United States Patent Application Publication US 2011/0183924 A1 - sequence listing, part 283

SEQ ID NO: 878724 - protein, 1406 aa, Homo sapiens
MKDCFEYGTPETLPFLIAHAFITVVSNIRIWLHIPAVMQHIIPFRTYVIRYLCKLSDQELRQSAARNMADLMWSTVKEPLDTTLCFDKESLDLAFKYFMSPTLTMRLAGLSQITNQLHTFNDVCNNESLVSDTETSIAKELADWLISNNVVEHIFGPNLHIEIIKQCQVILNFLAAEGRLSTQHIDCIWAAAQLKHCSRYIHDLFPSLIKNLDPVPLRHLLNLVSALEPSVHTEQTLYLASMLIKALWNNALAAKAQLSKQSSFASLLNTNIPIGNKKEEEELRRTAPSPWSPAASPQSSDNSDTHQSGGSDIEMDEQLINRTKHVQQRLSDTEESMQGSSDETANSGEDGSSGPGSSSGHSDGSSNEVNSSHASQSAGSPGSEVQSEDIADIEALKEEDEDDDHGHNPPKSSCGTDLRNRKLESQAGICLGDSQGTSERNGTSSGTGKDLVFNTESLPSVDNRMRMLDACSHSEDPEHDISGEMNATHIAQGSQESCITRTGDFLGETIGNELFNCRQFIGPQHHHHHHHHHHHHDGHMVDDMLSADDVSCSSSQVSAKSEKNMADFDGEESGCEEELVQINSHAELTSHLQQHLPNLASIYHEHLSQGPVVHKHQFNSNAVTDINLDNVCKKGNTLLWDIVQDEDAVNLSEGLINEAEKLLCSLVCWFTDRQIRMRFIEGCLENLGNNRSVVISLRLLPKLFGTFQQFGSSYDTHWITMWAEKELNMMKLFFDNLVYYIQTVREGRQKHALYSHSAEVQVRLQFLTCVFSTLGSPDHFRLSLEQVDILWHCLVEDSECYDDALHWFLNQVRSKDQHAMGMETYKHLFLEKMPQLKPETISMTGLNLFQHLCNLARLATSAYDGCSNSELCGMDQFWGIALRAQSGDVSRAAIQYINSYYINGKTGLEKEQEFISKCMESLMIASSSLEQESHSSLMVIERGLLMLKTHLEAFRRRFAYHLRQWQIEGTGISSHLKALSDKQSLPLRVVCQPAGLPDKMTIEMYPSDQVADLRAEVTHWYENLQKEQINQQAQLQEFGQSNRKGEFPGGLMGPVRMISSGHELTTDYDEKALHELGFKDMQMVFVSLGAPRRERKGEGVQLPASCLPPPQKDNIPMLLLLQEPHLTTLFDLLEMLASFKPPSGKVAVDDSESLRCEELHLHAENLSRRVWELLMLLPTCPNMLMAFQNISDEQSFKAQSDHRSRHEVSHYSMWLLVSWAHCCSLVKSSLADSDHLQDWLKKLTLLIPETAVCHESCSGLYKLSLSGLDGGDSINRSFLLLAASTLLKFLPDAQALKPIRIDDYEEEPILKPGCKEYFWLLCKLVDNIHIKDASQTTLLDLDALARHLADCIRSREILDHQDGNVEDDGLTGLLRLATSVVKHKPPFKFSREGQVSVKIIKCFYEM

SEQ ID NO: 878725 - protein, 359 aa, Homo sapiens
LYPDSDDSSEDQVENSKNSWSCKFVAAGGLQQLLEIFNSGILEPKEQESWTVWQLDCLACLLKLICQFAVDPSDLDLAYHDVFAWSGIAESHRKRTWPGKSRKAAGDHAKGLHIPRLTEVFLVLVQGTSLIQRLMSVAYTYDNLAPRVLKAQSDHRSRHEVSHYSMWLLVSWAHCCSLVKSSLADSDHLQDWLKKLTLLIPETAVCHESCSGLYKLSLSGLDGGDSINRSFLLLAASTLLKFLPDAQALKPIRIDDYEEEPILKPGCKEYFWLLCKLVDNIHIKDASQTTLLDLDALARHLADCIRSREILDHQDGNVEDDGLTGLLRLATSVVKHKPPFKFSREGQVSVKIIKCFYEM

SEQ ID NO: 878726 - protein, 266 aa, Homo sapiens [sequence omitted]

SEQ ID NO: 878727 - protein, 613 aa, Homo sapiens [sequence omitted]

SEQ ID NO: 878728 - protein, 167 aa, Homo sapiens
MNGREYHYVSKETFENLIYSHRMLEYGEYKGHLYGTSVDAVQTVLVEGKICVMDLEPQDIQGVRTHELKPYVIFIKPSNMRCMKQSRKNAKVITDYYVDMKFKDEDLQEMENLAQRMETQFGQFFDHVIVNDSLHDACAQLLSAIQKAQEEPQWVPATWISSDTESQ

SEQ ID NO: 878729 - protein, 105 aa, Homo sapiens
MIQSDKGADPPDKKDMKLSTATNPQNGLSQILRLVLQELSLFYSRDVNGVCLLYDLLHSPWLQALLKIYDCLQEFKEKKLVPATPHAQVLSYEVKEILFHRIVEL

SEQ ID NO: 878730 - protein, 593 aa, Homo sapiens [sequence omitted]

SEQ ID NO: 878731 - protein, 550 aa, Homo sapiens
MIQSDKGADPPDKKDMKLSTATNPQNGLSQILRLVLQELSLFYSRDVNGVCLLYDLLHSPWLQALLKIYDCLQEFKEKKLVPATPHAQVLSYEVVELLRETPTSPEIQELRQMLQAPHFKALLSAHDTIAQKDFEPLLPPLPDNIPESEEAMRIVCLVKNQQPLGATIKRHEMTGDILVARIIHGGLAERSGLLYAGDKLVEVNGVSVEGLDPEQVIHILAMSRGTIMFKVVPVSDPPVNSQQMVYVRAMTEYWPQEDPDIPCMDAGLPFQKGDILQIVDQNDALWWQARKISDPATCAGLVPSNHLLKRKQREFWWSQPYQPHTCLKSTLYEETFESDKEEFVGYGQKFFIAGFRRSMRLCRRKSHLSPLHASVCCTGSCYSAVGAPYEEVVRYQRRPSDKYRLIVLMGPSGVGVNELRRQLIEFNPSHFQSAVPHTTRTKKSYEMNGREYHYVSKETFENLIYSHRMLEYGEYKGHLYGTSVDAVQTVLVEGKICVMDLEPQDIQGVRTHELKPYVIFIKPSNMRCMKQSRKNAKVITDYYVDMKFKF

SEQ ID NO: 878732 - protein, 282 aa, Homo sapiens
MTVFLSFAFLAAILTHIGCSNQRRSPENSGRRYNRIQHGQCAYTFILPEHDGNCRESTTDQYNTNALQRDAPHVEPDFSSQKLQHLEHVMENYTQWLQKLENYIVENMKSEMAQIQQNAVQNHTATMLEIGTSLLSQTAEQTRKLTDVETQVLNQTSRLEIQLLENSLSTYKLEKQLLQQTNEILKIHEKNSLLEHKILEMEGKHKEELDTLKEEKENLQGLVTRQTYIIQELEKQLNRATTNNSVLQKQQLELMDTVHNLVNLCTKEGFTKGRKKRGRETI

SEQ ID NO: 878733 - protein, 119 aa, Homo sapiens
MTVFLSFAFLAAILTHIGCSNQRRSPENSGRRYNRIQHGQCAYTFILPEHDGNCRESTTDQYNTNALQRDAPHVEPDFSSQKLQHLEHVMENYTQWLQKDPAGLLARCPIKVNWKFLDF

SEQ ID NO: 878734 - protein, 282 aa, Homo sapiens
MTVFLSFAFLAAILTHIGCSNQRRSPENSGRRYNRIQHGQCAYTFILPEHDGNCRESTTDQYNTNALQRDAPHVEPDFSSQKLQHLEHVMENYTQWLQKLENYIVENMKSEMAQIQQNAVQNHTATMLEIGTSLLSQTAEQTRKLTDVETQVLNQTSRLEIQLLENSLSTYKLEKQLLQQTNEILKIHEKNSLLEHKILEMEGKHKEELDTLKEEKENLQGLVTRQTYIIQELEKQLNRATTNNSVLQKQQLELMDTVHNLVNLCTKEGCFAIWMSMGEVGL

SEQ ID NO: 878735 - protein, 282 aa, Homo sapiens; identical to SEQ ID NO: 878732

SEQ ID NO: 878736 - protein, 282 aa, Homo sapiens; identical to SEQ ID NO: 878732

SEQ ID NO: 878737 - protein, 205 aa, Homo sapiens
MTVFLSFAFLAAILTHIGCSNQRRSPENSGRRYNRIQHGQCAYTFILPEHDGNCRESTTDQYNTNALQRDAPHVEPDFSSQKLQHLEHVMENYTQWLQKLENYIVENMKSEMAQIQQNAVQNHTATMLEIGTSLLSQTAEQTRKLTDVETQVLNQTSRLEIQLLENSLSTYKLEKQLLQQTNEILKIHEKNSFTKGRKKRGRETI

SEQ ID NO: 878738 - protein, 73 aa, Homo sapiens
HEYDRWEEKVRDARGDWCTDRRRSVAKRYWSVGGGCRMDGQYRVGMLREQVSMETNDEKRKEMWERRGGSERQ

SEQ ID NO: 878739 - protein, 111 aa, Homo sapiens
MAPACHVSSGDPLIVILPKCSFPENGLIRPVKASGSIIKSHGPTYLPLLGCMQVGHLSHALEEEGSQTEVFFPTLGPRCPLLTALWASLLPVWLVHCSLPSRKRALPSIAE

SEQ ID NO: 878740 - protein, 321 aa, Homo sapiens
MPLLPAALTSSMLYFQMVIMAGTVMLAYYFEYTDTFTVNVQGFFCHDSAYRKPYPGPEDSSAVPPVLLYSLAAGVPVLVIIVGETAVFCLQLATRDFENQEKTILTGDCCYINPLVRRTVRFLGIYTFGLFATDIFVNAGQVVTGNLAPHFLALCKPNYTALGCQQYTQFISGEEACTGNPDLIMRARKTFPSKEAALSVYAAMYLTMYITNTIKAKGTRLAKPVLCLGLMCLAFLTGLNRVAEYRNHWSDVIAGFLVGISIAVFLVVCVVNNFKGRQAENEHIHMDNLAQMPMISIPRVESPLEKVTSVQNHITAFAEVT

SEQ ID NO: 878741 - protein, 321 aa, Homo sapiens; identical to SEQ ID NO: 878740

SEQ ID NO: 878742 - protein, 119 aa, Homo sapiens
RKEAESCDCLQGFQLTHSLGGGTGSGMGTLLISKIREEYPDRIINTFSILPSPKGVSEQFTAMFRRKAFLHWYTGEGMDEMEFTEAESNMNDLVSEYQQYQDATAKEEEDEEYAEEEVA

SEQ ID NO: 878743 - protein, 99 aa, Homo sapiens
PDNVKTAVCDIPPRGLKMSGSFIGNNAAIQELFTCVSEQFTAMFRRKAFLHWYTGEGMDEMEFTEAESNMNDLVSEYQQYQDATAKEEEDEEYAEEEVA

SEQ ID NO: 878744 - protein, 74 aa, Homo sapiens
RKEAESCDCLQGFQLTHSLGGGTGSGMGTLLISKIREEYPDRIINTFSILPSPKVSDTVVEPYNATLSVHQLIE

SEQ ID NO: 878745 - protein, 145 aa, Homo sapiens
MAAPSPGPREVLAPSPEAGCRAVTSSRRGLLWRLRDKQSRLGLFEISPGHELHGMTCMMQAGLWAATQVSMDHPPTGPPSRDDFSEVLTQVHEGFELGTLAGPAFAWLRRSLGLAEEDYQAALGPGGPYLQFLSTSKSKASFFLS

SEQ ID NO: 878746 - protein, 254 aa, Homo sapiens
MRTSQGRVQVPRILRRRRGLALGLAPDAPRVVEFGDPHPAPSPLPGVHSLRVDRGKKTYFIVMQSVFYPAGRISEREYDIKGCEVSRWVDPAPEGSPLVLVLKDLNFQGKTINLGPQRSWFLRQMELDTTFLRELNVLDYSLLIAFQRLHEDERGPGSSLIFRTARSVQGAQSPEESRAQNRRLLPDAPNALHILDGPEQRYFLGVVDLATVYGLRKRLEHLWKTLRYPGRTFSTVSPARYARRLCQWVEAHTE

SEQ ID NO: 878747 - protein, 395 aa, Homo sapiens
MAAPSPGPREVLAPSPEAGCRAVTSSRRGLLWRLRDKQSRLGLFEISPGHELHGMTCMMQAGLWAATQVSMDHPPTGPPSRDDFSEVLTQVHEGFELGTLAGPAFAWLRRSLGLAEEDYQAALGPGGPYLQFLSTSKSKASFFLSHDQRFFLKTQGRREVQALLAHLPRYVQHLQRHPHSLLARLLGVHSLRVDRGKKTYFIVMQSVFYPAGRISEREYDIKGCEVSRWVDPAPEGSPLVLVLKDLNFQGKTINLGPQRSWFLRQMELDTTFLRELNVLDYSLLIAFQRLHEDERGPGSSLIFRTARSVQGAQSPEESRAQNRRLLPDAPNALHILDGPEQRYFLGVVDLATVYGLRKRLEHLWKTLRYPGRTFSTVSPARYARRLCQWVEAHTE

SEQ ID NO: 878748 - protein, 347 aa, Homo sapiens
ESGNVPGLNSWPGAGDPEWMRYTQALPWVTLVPLASLEGPPSRDDFSEVLTQVHEGFELGTLAGPAFAWLRRSLGLAEEDYQAALGPGGPYLQFLSTSKSKASFFLSHDQRFFLKTQGRREVQALLAHLPRYVQHLQRHPHSLLARLLGVHSLRVDRGKKTYFIVMQSVFYPAGRISEREYDIKGCEVSRWVDPAPEGSPLVLVLKDLNFQGKTINLDGTGYHLPPGLNVLDYSLLIAFQRLHEDERGPGSSLIFRTARSVQGAQSPEESRAQNRRLLPDAPNALHILDGPEQRYFLGVVDLATVYGLRKRLEHLWKTLRYPGRTFSTVSPARYARRLCQWVEAHTE

SEQ ID NO: 878749 - protein, 254 aa, Homo sapiens; identical to SEQ ID NO: 878746

SEQ ID NO: 878750 - protein, 217 aa, Homo sapiens
MAAPSPGPREVLAPSPEAGCRAVTSSRRGLLWRLRDKQSRLGLFEISPGHELHGMTCMMQAGLWAATQVSMDHPPTGPPSRDDFSEVLTQVHEGFELGTLAGPAFAWLRRSLGLAEEDYQAALGPGGPYLQFLSTSKSKASFFLSHDQRFFLKTQGRREVQALLAHLPRYVQHLQRHPHSLLARLLGVHSLRVDRGKKTYFIVMQSVFYPAGRISER

SEQ ID NO: 878751 - protein, 208 aa, Homo sapiens [sequence omitted]

SEQ ID NO: 878752 - protein, 386 aa, Homo sapiens
ESGNVPGLNSWPGAGDPEWMRYTQALPWVTLVPLASLEGPPSRDDFSEVLTQVHEGFELGTLAGPAFAWLRRSLGLAEEDYQAALGPGGPYLQFLSTSKSKASFFLSHDQRFFLKTQGRREVQALLAHLPRYVQHLQRHPHSLLARLLGVHSLRVDRGKKVGEAEGGGWAERAAGGRQPASLTPCPGPQTYFIVMQSVFYPAGRISEREYDIKGCEVSRWVDPAPEGSPLVLVLKDLNFQGKTINLGPQRSWFLRQMELDTTFLRELNVLDYSLLIAFQRLHEDERGPGSSLIFRTARSVQGAQSPEESRAQNRRLLPDAPNALHILDGPEQRYFLGVVDLATVYGLRKRLEHLWKTLRYPGRTFSTVSPARYARRLCQWVEAHTE

SEQ ID NO: 878753 - protein, 248 aa, Homo sapiens
LGVGSGRDPDQPRKGPGAADLEKEAWPGAGIGAGCTPGCGVWGSSSGALSPSRSAQSAGGPGKEDVLHRHAERLLPRRPHLREVRGRVCGAPWLAHDERSGGGTDAPAGPQRSWFLRQMELDTTFLRELNVLDYSLLIAFQRLHEDERGPGSSLIFRTARSVQGAQSPEESRAQNRRLLPDAPNALHILDGPEQRYFLGVVDLATVYGLRKRLEHLWKTLRYPGRTFSTVSPARYARRLCQWVEAHTE

SEQ ID NO: 878754 - protein, 231 aa, Homo sapiens
SGARMRGRLCVGRAAAAAAAVAVPLAGGQEGSPGGGRRGSRGTTMVKKRKGRVVIDSDTEDSGSDENLDQELLSLAKRKRSDSEEKEPPVSQPAASSDSETSDSDDEWTFGSNKNKKKGKARKIEKKGTMKKQANKTASSGSSDKDSSAESSAPEEGEVSDSDSNSSSSSSDSDSSSEDEEFHDGYGEDLMGDEEDRARLEQMTEKEREQELFNRIEKREVLKRRLKSRKN

SEQ ID NO: 878755 - protein, 714 aa, Homo sapiens
SGARMRGRLCVGRAAAAAAAVAVPLAGGQEGSPGGGRRGSRGTTMVKKRKGRVVIDSDTEDSGSDENLDQELLSLAKRKRSDSEEKEPPVSQPAASSDSETSDSDDEWTFGSNKNKKKGKARKIEKKGTMKKQANKTASSGSSDKDSSAESSAPEEGEVSDSDSNSSSSSSDSDSSSEDEEFHDGYGEDLMGDEEDRARLEQMTEKEREQELFNRIEKREVLKRRFEIKKKLKTAKKKEKKEKKKKQEEEQEKKKLTQIQESQVTSHNKERRSKRDEKLDKKSQAMEELKAEREKRKNRTAELLAKKQPLKTSEVYSDDEEEEEDDKSSEKSDRSSRTSSSDEEEEKEEIPPKSQPVSLPEELNRVRLSRHKLERWCHMPFFAKTVTGCFVRIGIGNHNSKPVYRVAEITGVVETAKVYQLGGTRTNKGLQLRHGNDQRVFRLEFVSNQEFTESEFMKWKEAMFSAGMQLPTLDEINKKELSIKEALNYKFNDQDIEEIVKEKERFRKAPPNYAMKKTQLLKEKAMAEDLGDQDKAKQIQDQLNELEERAEALDRQRTKNISAISYINQRNREWNIVESEKALVAESHNMKNQQMDPFTRRQCKPTIVSNSRDPAVQAAILAQLNAKYGSGVLPDAPKEMSKGQGKDKDLNSKSASDLSEDLFKVHDFDVKIDLQVPSSESKALAITSKAPPAKDGAPRRSLNLEDYKKRRGLI

SEQ ID NO: 878756 - protein, 524 aa, Homo sapiens
MGDEEDRARLEQMTEKEREQELFNRIEKREVLKRRFEIKKKLKTAKKKEKKEKKKKQEEEQEKKKLTQIQESQVTSHNKERRSKRDEKLDKKSQAMEELKAEREKRKNRTAELLAKKQPLKTSEVYSDDEEEEEDDKSSEKSDRSSRTSSSDEEEEKEEIPPKSQPVSLPEELNRVRLSRHKLERWCHMPFFAKTVTGCFVRIGIGNHNSKPVYRVAEITGVVETAKVYQLGGTRTNKGLQLRHGNDQRVFRLEFVSNQEFTESEFMKWKEAMFSAGMQLPTLDEINKKELSIKEALNYKFNDQDIEEIVKEKERFRKAPPNYAMKKTQLLKEKAMAEDLGDQDKAKQIQDQLNELEERAEALDRQRTKNISAISYINQRNREWNIVESEKALVAESHNMKNQQMDPFTRRQCKPTIVSNSRDPAVQAAILAQLNAKYGSGVLPDAPKEMSKGQGKDKDLNSKSASDLSEDLFKVHDFDVKIDLQVPSSESKALAITSKAPPAKDGAPRRSLNLEDYKKRRGLI

SEQ ID NO: 878757 - protein, 714 aa, Homo sapiens; identical to SEQ ID NO: 878755

SEQ ID NO: 878758 - protein, 336 aa, Homo sapiens
MPFFAKTVTGCFVRIGIGNHNSKPVYRVAEITGVVETAKVYQLGGTRTNKGLQLRHGNDQRVFRLEFVSNQEFTESEFMKWKEAMFSAGMQLPTLDEINKKELSIKEALNYKFNDQDIEEIVKEKERFRKAPPNYAMKKTQLLKEKAMAEDLGDQDKAKQIQDQLNELEERAEALDRQRTKNISAISYINQRNREWNIVESEKALVAESHNMKNQQMDPFTRRQCKPTIVSNSRDPAVQAAILAQLNAKYGSGVLPDAPKEMSKGQGKDKDLNSKSASDLSEDLFKVHDFDVKIDLQVPSSESKALAITSKAPPAKDGAPRRSLNLEDYKKRRGLI

SEQ ID NO: 878759 - protein, 125 aa, Homo sapiens
MKNQQMDPFTRRQCKPTIVSNSRDPAVQAAILAQLNAKYGSGVLPDAPKEMSKGQGKDKDLNSKSASDLSEDLFKVHDFDVKIDLQVPSSESKALAITSKAPPAKDGAPRRSLNLEDYKKRRGLI

SEQ ID NO: 878760 - protein, 714 aa, Homo sapiens; identical to SEQ ID NO: 878755

SEQ ID NO: 878761 - protein, 260 aa, Homo sapiens
RRASQDKMTHGLEMSPTRILVHDECLEILTILIIYTARGRSSTYVCLPRNEEYRGIAQLTGRVELNMKHSIQTSECQNRGSEYSKLTAPEDWKREQELFNRIEKREVLKRRFEIKKKLKTAKKKEKKEKKKKQEEEQEKKKLTQIQESQVTSHNKERRSKRDEKLDKKSQAMEELKAELLAKKQPLKTMNVLLFPWVQPTASWLNVELLFLTQYTSLFLVILFCCFGKNYILFLREISEYECGEQTQKDLGYAGCSSSRL

SEQ ID NO: 878762 - protein, 714 aa, Homo sapiens; identical to SEQ ID NO: 878755

SEQ ID NO: 878763 - protein, 714 aa, Homo sapiens; identical to SEQ ID NO: 878755

SEQ ID NO: 878764 - protein, 585 aa, Homo sapiens
MKKQANKTASSGSSDKDSSAESSAPEEGEVSDSDSNSSSSSSDSDSSSEDEEFHDGYGEDLMGDEEDRARLEQMTEKEREQELFNRIEKREVLKRRFEIKKKLKTAKKKEKKEKKKKQEEEQEKKKLTQIQESQVTSHNKERRSKRDEKLDKKSQAMEELKAEREKRKNRTAELLAKKQPLKTSEVYSDDEEEEEDDKSSEKSDRSSRTSSSDEEEEKEEIPPKSQPVSLPEELNRVRLSRHKLERWCHMPFFAKTVTGCFVRIGIGNHNSKPVYRVAEITGVVETAKVYQLGGTRTNKGLQLRHGNDQRVFRLEFVSNQEFTESEFMKWKEAMFSAGMQLPTLDEINKKELSIKEALNYKFNDQDIEEIVKEKERFRKAPPNYAMKKTQLLKEKAMAEDLGDQDKAKQIQDQLNELEERAEALDRQRTKNISAISYINQRNREWNIVESEKALVAESHNMKNQQMDPFTRRQCKPTIVSNSRDPAVQAAILAQLNAKYGSGVLPDAPKEMSKGQGKDKDLNSKSASDLSEDLFKVHDFDVKIDLQVPSSESKALAITSKAPPAKDGAPRRSLNLEDYKKRRGLI

SEQ ID NO: 878765 - protein, 562 aa, Homo sapiens
MTSTGVLGPWIKRISCLYKKSKGPEIKRKERLKGGTKIERRKWLRARLEQMTEKEREQELFNRIEKREVLKRRFEIKKKLKTAKKKEKKEKKKKQEEEQEKKKLTQIQESQVTSHNKERRSKRDEKLDKKSQAMEELKAEREKRKNRTAELLAKKQPLKTSEVYSDDEEEEEDDKSSEKSDRSSRTSSSDEEEEKEEIPPKSQPVSLPEELNRVRLSRHKLERWCHMPFFAKTVTGCFVRIGIGNHNSKPVYRVAEITGVVETAKVYQLGGTRTNKGLQLRHGNDQRVFRLEFVSNQEFTESEFMKWKEAMFSAGMQLPTLDEINKKELSIKEALNYKFNDQDIEEIVKEKERFRKAPPNYAMKKTQLLKEKAMAEDLGDQDKAKQIQDQLNELEERAEALDRQRTKNISAISYINQRNREWNIVESEKALVAESHNMKNQQMDPFTRRQCKPTIVSNSRDPAVQAAILAQLNAKYGSGVLPDAPKEMSKGQGKDKDLNSKSASDLSEDLFKVHDFDVKIDLQVPSSESKALAITSKAPPAKDGAPRRSLNLEDYKKRRGLI

SEQ ID NO: 878766 - protein, 714 aa, Homo sapiens; identical to SEQ ID NO: 878755

SEQ ID NO: 878767 - protein, 80 aa, Homo sapiens
AAFLFTFQGQGKDKDLNSKSASDLSEDLFKVHDFDVKIDLQVPSSESKALAITSKAPPAKDGAPRRSLNLEDYKKRRGLI

SEQ ID NO: 878768 - protein, 714 aa, Homo sapiens; identical to SEQ ID NO: 878755

SEQ ID NO: 878769 - protein, 149 aa, Homo sapiens
MSYLLVSLVWSERPSLAHLPRALGSWCAGCQPGSPALLGDAPGLRGPGWLWSRDSWGRGPASDCPGPQPPPLQGIGVMCSIIGWGVCVCVCVCVYVCMRLAHGKAQANPAPRRWAATLPPKHGDVAAALGPPVGPMGEELPFAGVGSLP

SEQ ID NO: 878770 - protein, 287 aa, Homo sapiens
ADSRGYTCNADDTLSRKLDDLSLSRQGTSFASEEFWKGRVEQETPEDPEEWADHEDYMTQLLLKFGDKSLFQPQPNEMDIRASEHWISDNMVKSKTELKQNNQSLASKKYQSDMYWAQSQDGLGDSAYGSHPGPASSRRLQELELDHGASGYNHDETQWYEDSLECLSDLKPEQSVRDSMDSLALSNITGASVDGENKPRPSLYSLQNFEEMETEDCEKMSNMGTLNSSMLHRSAESLKSLSSELCPEKILPEEKPVHLPVLRRSKSQSRPQQVKFSDDVIDNGNYD

SEQ ID NO: 878771 - protein, 642 aa, Homo sapiens
LEMEPKMSKLAFGCQRSSTSDDDSGCALEEYAWVPPGLRPEQIQLYFACLPEEKVPYVNSPGEKHRIKQLLYQLPPHDNEVRYCQSLSEEEKKELQVFSAQRKKEALGRGTIKLLSRAVMHAVCEQCGLKINGGEVAVFASRAGPGVCWHPSCFVCFTCNELLVDLIYFYQDGKIHCGRHHAELLKPRCSACDEIIFADECTEAEGRHWHMKHFCCLECETVLGGQRYIMKDGRPFCCGCFESLYAEYCETCGEHIGVDHAQMTYDGQHWHATEACFSCAQCKASLLGCPFLPKQGQIYCSKTCSLGEDVHASDSSDSAFQSARSRDSRRSVRMGKSSRSADQCRQSLLLSPALNYKFPGLSGNADDTLSRKLDDLSLSRQGTSFASEEFWKGRVEQETPEDPEEWADHEDYMTQLLLKFGDKSLFQPQPNEMDIRASEHWISDNMVKSKTELKQNNQSLASKKYQSDMYWAQSQDGLGDSAYGSHPGPASSRRLQELELDHGASGYNHDETQWYEDSLECLSDLKPEQSVRDSMDSLALSNITGASVDGENKPRPSLYSLQNFEEMETEDCEKMSNMGTLNSSMLHRSAESLKSLSSELCPEKILPEEKPVHLPVLRRSKSQSRPQQVKFSDDVIDNGNYD

SEQ ID NO: 878772 - protein, 243 aa, Homo sapiens
RYPSSADAALAPQQTQLLLKFGDKSLFQPQPNEMDIRASEHWISDNMVKSKTELKQNNQSLASKKYQSDMYWAQSQDGLGDSAYGSHPGPASSRRLQELELDHGASGYNHDETQWYEDSLECLSDLKPEQSVRDSMDSLALSNITGASVDGENKPRPSLYSLQNFEEMETEDCEKMSNMGTLNSSMLHRSAESLKSLSSELCPEKILPEEKPVHLPVLRRSKSQSRPQQVKFSDDVIDNGNYD

SEQ ID NO: 878773 - protein, 453 aa, Homo sapiens
HFFLKIIFADECTEAEGRHWHMKHFCCLECETVLGGQRYIMKDGRPFCCGCFESLYAEYCETCGEHIGVDHAQMTYDGQHWHATEACFSCAQCKASLLGCPFLPKQGQIYCSKTCSLGEDVHASDSSDSAFQSARSRDSRRSVRMGKSSRSADQCRQSLLLSPALNYKFPGLSGNADDTLSRKLDDLSLSRQGTSFASEEFWKGRVEQETPEDPEEWADHEDYMTQLLLKFGDKSLFQPQPNEMDIRASEHWISDNMVKSKTELKQNNQSLASKKYQSDMYWAQSQDGLGDSAYGSHPGPASSRRLQELELDHGASGYNHDETQWYEDSLECLSDLKPEQSVRDSMDSLALSNITGASVDGENKPRPSLYSLQNFEEMETEDCEKMSNMGTLNSSMLHRSAESLKSLSSELCPEKILPEEKPVHLPVLRRSKSQSRPQQVKFSDDVIDNGNYD

SEQ ID NO: 878774 - protein, 100 aa, Homo sapiens
MDGRVQDGAGNLAVVVTLCMNPGPGTWTSCDRPYRPVRLSLALPKTTQSMRGGAGVQAAHQAVTTMVAAGDGHRHELKPGAALTLREGSMLPLPTAAVRP

SEQ ID NO: 878775 - protein, 110 aa, Homo sapiens
CGPRDPPASLPAPRRLSGLCARRRSQASLSAGVARADAPLCSGFRAGHACGTGTQPQPTLSSRSSSLTSAEVQLPQFLAQVDNYRHKPLKLECPVAGISIDLSQLSLQLQ

SEQ ID NO: 878776 - protein, 110 aa, Homo sapiens; identical to SEQ ID NO: 878775

SEQ ID NO: 878777 - protein, 110 aa, Homo sapiens; identical to SEQ ID NO: 878775

SEQ ID NO: 878778 - protein, 110 aa, Homo sapiens; identical to SEQ ID NO: 878775

SEQ ID NO: 878779 - protein, 399 aa, Homo sapiens
MAHITINQYLQQVYEAIDSRDGASCAELVSFKHPHVANPRLQMASPEEKCQQVLEPPYDEMFAAHLRCTYAVGNHDFIEAYKCQTVIVQSFLRAFQAHKEENWALPVMYAVALDLRVFANNADQQLVKKGKSKVGDMLEKAAELLMSCFRVCASDTRAGIEDSKKWGMLFLVNQLFKIYFKINKLHLCKPLIRAIDSSNLKDDYSTAQRVTYKYYVGRKAMFDSDFKQAEEYLSFAFEHCHRSSQKNKRMILIYLLPVKMLLGHMPTVELLKKYHLMQFAEVTRAVSEGNLLLLHEALAKHEAFFIRCGIFLILEKLKIITYRNLFKKVYLLLKTHQLSLDAFLVALKFMQVEDVDIDEVQCILANLIYMGHVKGYISHQHQKLVVSKQNPFPPLSTVC

SEQ ID NO: 878780 - protein, 399 aa, Homo sapiens; identical to SEQ ID NO: 878779

SEQ ID NO: 878781 - protein, 263 aa, Homo sapiens [sequence omitted]

SEQ ID NO: 878782 - protein, 128 aa, Homo sapiens
MAHITINQYLQQVYEAIDSRDGASCAELVSFKHPHVANPRLQMASPEEKCQQVLEPPYDEMFAAHLRCTYAVGNHDFIEAYKCQTVIVQSFLRAFQAHKEENWALPVMYAVALDLRVFANNPCWYRGL

SEQ ID NO: 878783 - protein, 310 aa, Homo sapiens
MAHITINQYLQQVYEAIDSRDGASCAELVSFKHPHVANPRLQMASPEEKCQQVLEPPYDEMFAAHLRCTYAVGNHDFIEAYKCQTVIVQSFLRAFQAHKEENWALPVMYAVALDLRVFANNADQQLVKKGKSKVGDMLEKAAELLMSCFRVCASDTRAGIEDSKKWGMLFLVNQLFKIYFKINKLHLCKPLIRAIDSSNLKDDYSTAQRVTYKYYVGRKAMFDSDFKQAEEYLSFAFEHCHRSSQKNKRMILIYLLPVKMLLGHMPTVELLRGQPAAAARGAGEARGLLHSLRNLPHPGEAEDHHLQEPL

SEQ ID NO: 878784 - protein, 354 aa, Homo sapiens
MAHITINQYLQQVYEAIDSRDGASCAELVSFKHPHVANPRLQMASPEEKCQQVLEPPYDEMFAAHLRCTYAVGNHDFIEAYKCQTVIVQSFLRAFQAHKEENWALPVMYAVALDLRVFANNADQQLVKKGKSKVGDMLEKAAELLMSCFRVCASDTRAGIEDSKKWGMLFLVNQLFKIYFKINKLHLCKPLIRAIDSSNLKDDYSTAQRVTYKYYVGRKAMFDSDFKQAEEYLSFAFEHCHRSSQKNKRMILIYLLPVKMLLGHMPTVELLKKYHLMQFAEVTRAVSEGNLLLLHEALAKHEAFFIRCGIFLILEKLKAVFVTFCSSLCKKRILNLYTWHVLHYIFQDTSIFIY

SEQ ID NO: 878785 - protein, 397 aa, Homo sapiens
MRLTDVVQQLVYEAIDSRDGASCAELVSFKHPHVANPRLQMASPEEKCQQVLEPPYDEMFAAHLRCTYAVGNHDFIEAYKCQTVIVQSFLRAFQAHKEENWALPVMYAVALDLRVFANNADQQLVKKGKSKVGDMLEKAAELLMSCFRVCASDTRAGIEDSKKWGMLFLVNQLFKIYFKINKLHLCKPLIRAIDSSNLKDDYSTAQRVTYKYYVGRKAMFDSDFKQAEEYLSFAFEHCHRSSQKNKRMILIYLLPVKMLLGHMPTVELLKKYHLMQFAEVTRAVSEGNLLLLHEALAKHEAFFIRCGIFLILEKLKIITYRNLFKKVYLLLKTHQLSLDAFLVALKFMQVEDVDIDEVQCILANLIYMGHVKGYISHQHQKLVVSKQNPFPPLSTVC

SEQ ID NO: 878786 - protein, 439 aa, Homo sapiens
RVVTICYILIVLSSFKVGENEFSPVWHSVYCCRFYSNRIFYFLLRFPFQMFQVYEAIDSRDGASCAELVSFKHPHVANPRLQMASPEEKCQQVLEPPYDEMFAAHLRCTYAVGNHDFIEAYKCQTVIVQSFLRAFQAHKEENWALPVMYAVALDLRVFANNADQQLVKKGKSKVGDMLEKAAELLMSCFRVCASDTRAGIEDSKKWGMLFLVNQLFKIYFKINKLHLCKPLIRAIDSSNLKDDYSTAQRVTYKYYVGRKAMFDSDFKQAEEYLSFAFEHCHRSSQKNKRMILIYLLPVKMLLGHMPTVELLKKYHLMQFAEVTRAVSEGNLLLLHEALAKHEAFFIRCGIFLILEKLKIITYRNLFKKVYLLLKTHQLSLDAFLVALKFMQVEDVDIDEVQCILANLIYMGHVKGYISHQHQKLVVSKQNPFPPLSTVC

SEQ ID NO: 878787 - protein, 263 aa, Homo sapiens [sequence omitted]

SEQ ID NO: 878788 - protein, 232 aa, Homo sapiens
MLFLVNQLFKIYFKINKLHLCKPLIRAIDSSNLKDDYSTAQRVTYKYYVGRKAMFDSDFKQAEEYLSFAFEHCHRSSQKNKRMILIYLLPVKMLLGHMPTVELLKKYHLMQFAEVTRAVSEGNLLLLHEALAKHEAFFIRCGIFLILEKLKIITYRNLFKKVYLLLKTHQLSLDAFLVALKFMQVEDVDIDEVQCILANLIYMGHVKGYISHQHQKLVVSKQNPFPPLSTVC

SEQ ID NO: 878789 - protein, 222 aa, Homo sapiens
MEKQINKLHLCKPLIRAIDSSNLKDDYSTAQRVTYKYYVGRKAMFDSDFKQAEEYLSFAFEHCHRSSQKNKRMILIYLLPVKMLLGHMPTVELLKKYHLMQFAEVTRAVSEGNLLLLHEALAKHEAFFIRCGIFLILEKLKIITYRNLFKKVYLLLKTHQLSLDAFLVALKFMQVEDVDIDEVQCILANLIYMGHVKGYISHQHQKLVVSKQNPFPPLSTVC

SEQ ID NO: 878790 - protein, 168 aa, Homo sapiens
NGDNAQRQMTGTPQKNKRMILIYLLPVKMLLGHMPTVELLKKYHLMQFAEVTRAVSEGNLLLLHEALAKHEAFFIRCGIFLILEKLKIITYRNLFKKVYLLLKTHQLSLDAFLVALKFMQVEDVDIDEVQCILANLIYMGHVKGYISHQHQKLVVSKQNPFPPLSTVC

SEQ ID NO: 878791 - protein, 79 aa, Homo sapiens
LRFRHLRHNLFNINTAIHGTRQRLHIASASEAGGQQAEPISSPVHGVLKVHGAPRTGEQLFLSTLVVLMRPVRYCNKAP

SEQ ID NO: 878792 - protein, 399 aa, Homo sapiens; identical to SEQ ID NO: 878779

SEQ ID NO: 878793 - protein, 358 aa, Homo sapiens
MAAVPHRTHAVDYLGLETRKHWASCSFLQLERNDSVLEQKLVSALSLGSFLRAFQAHKEENWALPVMYAVALDLRVFANNADQQLVKKGKSKVGDMLEKAAELLMSCFRVCASDTRAGIEDSKKWGMLFLVNQLFKIYFKINKLHLCKPLIRAIDSSNLKDDYSTAQRVTYKYYVGRKAMFDSDFKQAEEYLSFAFEHCHRSSQKNKRMILIYLLPVKMLLGHMPTVELLKKYHLMQFAEVTRAVSEGNLLLLHEALAKHEAFFIRCGIFLILEKLKIITYRNLFKKVYLLLKTHQLSLDAFLVALKFMQVEDVDIDEVQCILANLIYMGHVKGYISHQHQKLVVSKQNPFPPLSTVC

SEQ ID NO: 878794 - protein, 399 aa, Homo sapiens; identical to SEQ ID NO: 878779

SEQ ID NO: 878795 - protein, 287 aa, Homo sapiens
MAHITINQYLQQVYEAIDSRDGASCAELVSFKHPHVANPRLQMASPEEKCQQVLEPPYDEMFAAHLRCTYAVGNHDFIEAYKCQTVIVQSFLRAFQAHKEENWALPVMYAVALDLRVFANNADQQLVKKGKSKVGDMLEKAAELLMSCFRVCASDTRAGIEDSKKWGMLFLVNQLFKIYFKINKLHLCKPLIRAIDSSNLKDDYSTAQRVTYKYYVGRKAMFDSDFKQAEEYLSFAFEHCHRSSQKNKRMILIYLLPVKMLLGHMPTVELLKKYHLMQFAEVTRAVR

SEQ ID NO: 878796 - protein, 357 aa, Homo sapiens
MASPEEKCQQVLEPPYDEMFAAHLRCTYAVGNHDFIEAYKCQTVIVQSFLRAFQAHKEENWALPVMYAVALDLRVFANNADQQLVKKGKSKVGDMLEKAAELLMSCFRVCASDTRAGIEDSKKWGMLFLVNQLFKIYFKINKLHLCKPLIRAIDSSNLKDDYSTAQRVTYKYYVGRKAMFDSDFKQAEEYLSFAFEHCHRSSQKNKRMILIYLLPVKMLLGHMPTVELLKKYHLMQFAEVTRAVSEGNLLLLHEALAKHEAFFIRCGIFLILEKLKIITYRNLFKKVYLLLKTHQLSLDAFLVALKFMQVEDVDIDEVQCILANLIYMGHVKGYISHQHQKLVVSKQNPFPPLSTVC

SEQ ID NO: 878797 - protein, 386 aa, Homo sapiens
MAHITINQYLQQVYEAIDSRDGASCAELVSFKHPHVANPRLQMASPEEKCQQVLEPPYDEMFAAHLRCTYAVGNHDFIEAYKCQTVIVQSFLRAFQAHKEENWALPVMYAVALDLRVFANNADQQLVKKGKSKVGDMLEKAAELLMSCFRVCASDTRAGIEDSKKWGMLFLVNQLFKIYFKIDSSNLKDDYSTAQRVTYKYYVGRKAMFDSDFKQAEEYLSFAFEHCHRSSQKNKRMILIYLLPVKMLLGHMPTVELLKKYHLMQFAEVTRAVSEGNLLLLHEALAKHEAFFIRCGIFLILEKLKIITYRNLFKKVYLLLKTHQLSLDAFLVALKFMQVEDVDIDEVQCILANLIYMGHVKGYISHQHQKLVVSKQNPFPPLSTVC

SEQ ID NO: 878798 - protein, 179 aa, Homo sapiens [sequence omitted]

SEQ ID NO: 878799 - protein, 206 aa, Homo sapiens
MTTNRVSVPDYSTAQRVTYKYYVGRKAMFDSDFKQAEEYLSFAFEHCHRSSQKNKRMILIYLLPVKMLLGHMPTVELLKKYHLMQFAEVTRAVSEGNLLLLHEALAKHEAFFIRCGIFLILEKLKIITYRNLFKKVYLLLKTHQLSLDAFLVALKFMQVEDVDIDEVQCILANLIYMGHVKGYISHQHQKLVVSKQNPFPPLSTVC

SEQ ID NO: 878800 - protein, 156 aa, Homo sapiens
MAHITINQYLQQVYEAIDSRDGASCAELVSFKHPHVANPRLQMASPEEKCQQVLEPPYDEMFAAHLRCTYAVGNHDFIEAYKCQTVIVQSFLRAFQAHKEENWALPVMYAVALDLRVFANNADQQLVKKGKSKVGDMLEKAAELLMSCFRVCASDT

SEQ ID NO: 878801 - protein, 549 aa, Homo sapiens
QACLALPGTMSEARRDSTSSLQRKKPPWLKLDIPSAVPLTAEEPSFLQPLRRQAFLRSVSMPAETAHISSPHHELRRPVLQRQTSITQTIRRGTADWFGVSKDSDSTQKWQRKSIRHCSQRYGKLKPQVLRELDLPSQDNVSLTSTETPPPLYVGPCQLGMQKIIDPLARGRAFRVADDTAEGLSAPHTPVTPGAASLCSFSSSRSGFHRLPRRRKRESVAKMSFRAAAALMKGRSVRDGTFRRAQRRSFTPASFLEEDTTDFPDELDTSFFAREGILHEELSTYPDEVFESPSEAALKDWEKAPEQADLTGGALDRSELERSHLMLPLERGWRKQKEGAAAPQPKVRLRQEVVSTAGPRRGQRIAVPVRKLFAREKRPYGLGMVGRLTNRTYRKRIDSFVKRQIEDMDDHRPFFTYWLTFVHSLVTILAVCIYGIAPVGFSQHETVDSVLRNRGVYENVKYVQQENFWIGPSSEALIHLGAKFSPCMRQDPQVHSFIRSAREREKHSACCVRNDRSGCVQTSEEECSVRFPARDSRLRLPGVRSSDLR

SEQ ID NO: 878802 - protein, 501 aa, Homo sapiens
QACLALPGTMSEARRDSTSSLQRKKPPWLKLDIPSAVPLTAEEPSFLQPLRRQAFLRSVSMPAETAHISSPHHELRRPVLQRQTSITQTIRRGTADWFGVSKDSDSTQKWQRKSIRHCSQRYGKLKPQVLRELDLPSQDNVSLTSTETPPPLYVGPCQLGMQKIIDPLARGRAFRVADDTAEGLSAPHTPVTPGAASLCSFSSSRSGFHRLPRRRKRESVAKMSFRAAAALMKGRSVRDGTFRRAQRRSFTPASFLEEDTTDFPDELDTSFFAREGILHEELSTYPDEVFESPSEAALKDWEKAPEQADLTGGALDRSELERSHLMLPLERGWRKQKEGAAAPQPKVRLRQEVVSTAGPRRGQRIAVPVRKLFAREKRPYGLGMVGRLTNRTYRKRIDSFVKRQIEDMDDHRPFFTYWLTFVHSLVTILAVCIYGIAPVGFSQHETVDSVLRNRGVYENVKYVQQENFWIGPSSVRTGLGAGPAGAGPGGARRGQEAPDCG

SEQ ID NO: 878803 - protein, 263 aa, Homo sapiens
METEDCEKMSNMGTLNSSMLHRSAESLKSLSSELCPEKILPEEKPVHLPVLRRSKSQSRPQQVKFSDDVIDNGNYDIEIRQPPMSERTRRRVYNFEERGSRSHHHRRRRSRKSRSDNALNLVTERKYSPKDRLRLYTPDNYEKFIQNKSAREIQAYIQNADLYGQYAHATSDYGLQNPGMNRFLGLYGEDDDSWCSSSSSSSDSEEEGYFLGQPIPQPRPQRFAYYTDDLSSPPSALPTPQFGQRTTKSKKKKGHKGKNCIIS

SEQ ID NO: 878804 - protein, 556 aa, Homo sapiens
PTRLAAGRLCGSASRLLRIGSAQLGEKMFTVLTRQPCEQAGLKALYRTPTIIALVVLLVSIVVLVSITVIQIHKQEVLPPGLKYGIVLDAGSSRTTVYVYQWPAEKENNTGVVSQTFKCSVKGSGISSYGNNPQDVPRAFEECMQKVKGQVPSHLHGSTPIHLGATAGMRLLRLQNETAANEVLESIQSYFKSQPFDFRGAQIISGQEEGVYGWITANYLMGNFLEKNLWHMWVHPHGVETTGALDLGGASTQISFVAGEKMDLNTSDIMQVSLYGYVYTLYTHSFQCYGRNEAEKKFLAMLLQNSPTKNHLTNPCYPRDYSISFTMGHVFDSLCTVDQRPESYNPNDVITFEGTGDPSLCKEKVASIFDFKACHDQETCSFDGVYQPKIKGPFVAFAGFYYTASALNLSGSFSLDTFNSSTWNFCSQNWSQLPLLLPKFDEVYARSYCFSANYIYHLFVNGYKFTEETWPQIHFEKEVGNSSIAWSLGYMLSLTNQIPAESPLIRLPIEPPVFVGTLAFFTAAALLCLAFLAYLCSATRRKRHSEHAFDHAVDSD

SEQ ID NO: 878805 - protein, 556 aa, Homo sapiens; identical to SEQ ID NO: 878804

SEQ ID NO: 878806 - protein, 407 aa, Homo sapiens
RSVGAGSLKPVNMAVTDSLSRAATVLATVLLLSFGSVAASHIEDQAEQFFRSGHTNNWAVLVCTSRFWFNYRHVANTLSVYRSVKRLGIPDSHIVLMLADDMACNPRNPKPATVFSHKNMELNVYGDDVEVDYRSYEVTVENFLRVLTGRIPPSTPRSKRLLSDDRSNILIYMTGHGGNGFLKFQDSEEITNIELADAFEQMWQKRRYNELLFIIDTCQGASMYERFYSPNIMALASSQVGEDSLSHQPDPAIGVHLMDRYTFYVLEFLEEINPASQTNMNDLFQVCPKSLCVSTPGHRTDLFQRDPKNVLITDFFGSVRKVEITTETIKLQQDSEIMESSYKEDQMDEKLMEPLKYAEQLPVAQIIHQKPKLKDWHPPGGFILGLWALIIMVFFKTYGIKHMKFIF

SEQ ID NO: 878807 - protein, 289 aa, Homo sapiens
RSVGAGSLKPVNMAVTDSLSRAATVLATVLLLSFGSVAASHIEDQAEQFFRSGHTNNWAVLVCTSRFWFNYRHVANTLSVYRSVKRLGIPDSHIVLMLADDMACNPRNPKPATVFSHKNMELNVYGDDVEVDYRSYEVTVENFLRVLTGRIPPSTPRSKRLLSDDRSNILIYMTGHGGNGFLKFQDSEEITNIELADAFEQMWQKRRYNELLFIIDTCQGASMYERFYSPNIMALASSQVGEDSLSSQGANFSRVNRIWHGSSMVILLSGLEEYQCNNMTCASWFSYGH

SEQ ID NO: 878808 - protein, 407 aa, Homo sapiens; identical to SEQ ID NO: 878806

SEQ ID NO: 878809 - protein, 311 aa, Homo sapiens
MLADDMACNPRNPKPATVFSHKNMELNVYGDDVEVDYRSYEVTVENFLRVLTGRIPPSTPRSKRLLSDDRSNILIYMTGHGGNGFLKFQDSEEITNIELADAFEQMWQKRRYNELLFIIDTCQGASMYERFYSPNIMALASSQVGEDSLSHQPDPAIGVHLMDRYTFYVLEFLEEINPASQTNMNDLFQVCPKSLCVSTPGHRTDLFQRDPKNVLITDFFGSVRKVEITTETIKLQQDSEIMESSYKEDQMDEKLMEPLKYAEQLPVAQIIHQKPKLKDWHPPGGFILGLWALIIMVFFKTYGIKHMKFIF

SEQ ID NO: 878810 - protein, 407 aa, Homo sapiens; identical to SEQ ID NO: 878806

SEQ ID NO: 878811 - protein, 407 aa, Homo sapiens; identical to SEQ ID NO: 878806

SEQ ID NO: 878812 - protein, 115 aa, Homo sapiens
ILGLCYQYIFRIPPSTPRSKRLLSDDRSNILIYMTGHGGNGFLKFQDSEEITNIELADAFEQMWQKRRYNELLFIIDTCQGASMYERFYSPNIMALASSQVGEDSLSHSRYVHFP

SEQ ID NO: 878813 - protein, 407 aa, Homo sapiens; identical to SEQ ID NO: 878806

SEQ ID NO: 878814 - protein, 235 aa, Homo sapiens [sequence omitted]

SEQ ID NO: 878815 - protein, 407 aa, Homo sapiens; identical to SEQ ID NO: 878806

SEQ ID NO: 878816 - protein, 209 aa, Homo sapiens
MASMGLQVMGIALAVLGWLAVMLCCALPMWRVTAFIGSNIVTSQTIWEGLWMNCVVQSTGQMQCKVYDSLLALPQDLQAARALVIISIIVAALGVLLSVVGGKCTNCLEDESAKAKTMIVAGVVFLLAGLMVIVPVSWTAHNIIQDFYNPLVASGQKREMGASLYVGWAASGLLLLGGGLLCCNCPPRTDKPYSAKYSAARSAAASNYV

SEQ ID NO: 878817 - protein, 209 aa, Homo sapiens; identical to SEQ ID NO: 878816

SEQ ID NO: 878818 - protein, 209 aa, Homo sapiens; identical to SEQ ID NO: 878816

SEQ ID NO: 878819 - protein, 209 aa, Homo sapiens; identical to SEQ ID NO: 878816

SEQ ID NO: 878820 - protein, 209 aa, Homo sapiens; identical to SEQ ID NO: 878816

SEQ ID NO: 878821 - protein, 155 aa, Homo sapiens
ARVALPPVLRSRWWPPGRSGRWVPRSTSAGPPPACCSLAGGCFAATVHPAQTSLTPPSILLPALLLPATTCKVPRLHSVPLCFVLPWTELSAGCDPRRALPRATGCWGLGTGQRLSQAGRQQPSASLAHSDNFPRPPPASKNRVHPPLDIGEGRK

SEQ ID NO: 878822 - protein, 89 aa, Homo sapiens
LVPARDVRDRLEGTGSAHTCWLAHQDWLYLLTHGAKVHSANVKSVPSAWNPTAPTAGSPQPSRSSTPADAEQWPQDSLPHPLQPRAPGD

SEQ ID NO: 878823 - protein, 209 aa, Homo sapiens; identical to SEQ ID NO: 878816

SEQ ID NO: 878824 - protein, 209 aa, Homo sapiens; identical to SEQ ID NO: 878816

SEQ ID NO: 878825 - protein, 109 aa, Homo sapiens
MASMGLQVMGIALAVLGWLAVMLCCALPMWRVTAFIGSNIVTSQTIWEGLWMNCVVQSTGQMQCKVYDSLLALPQDLQAARALVIISIIVAASRPCSLSRRWGPAYTLP

SEQ ID NO: 878826 - protein, 71 aa, Homo sapiens
MASMGLQVMGIALAVLGWLAVMLCCALPMWRVTAFIGSNIVTSQTIWEGLWMNCVSLESYRERTAMGFVFF

SEQ ID NO: 878827 - protein, 860 aa, Homo sapiens
SDLAGGRGLGVRSPTSSALRTPKSPPDPPLDIPRVSDSETEGEDGGASPPAPQKMQFFGRLVNTFSGVTNLFSNPFRVKEVAVADYTSSDRVREEGQLILFQNTPNRTWDCVLVNPRNSQSGFRLFQLELEADALVNFHQYSSQLLPFYESSPQVLHTEVLQHLTDLIRNHPSWSVAHLAVELGIRECFHHSRIISCANCAENEEGCTPLHLACRKGDGEILVELVQYCHTQMDVTDYKGETVFHYAVQGDNSQVLQLLGRNAVAGLNQVNNQGLTPLHLACQLGKQEMVRVLLLCNARCNIMGPNGYPIHSAMKFSQKGCAEMIISMDSSQIHSKDPRYGASPLHWAKNAEMARMLLKRGCNVNSTSSAGNTALHVAVMRNRFDCAIVLLTHGANADARGEHGNTPLHLAMSKDNVEMIKALIVFGAEVDTPNDFGETPTFLASKIGRLVTRKAILTLLRTVGAEYCFPPIHGVPAEQGSAAPHHPFSLERAQPPPISLNNLELQDLMHISRARKPAFILGSMRDEKRTHDHLLCLDGGGVKGLIIIQLLIAIEKASGVATKDLFDWVAGTSTGGILALAILHSKSMAYMRGMYFRMKDEVFRGSRPYESGPLEEFLKREFGEHTKMTDVRKPKVMLTGTLSDRQPAELHLFRNYDAPETVREPRFNQNVNLRPPAQPSDQLVWRAARSSGAAPTYFRPNGRFLDGGLLANNPTLDAMTEIHEYNQDLIRKGQANKVKKLSIVVSLGTGRSPQVPVTCVDVFRPSNPWELAKTVFGAKELGKMVVDCCTDPDGRAVDRARAWCEMVGIQYFRLNPQLGTDIMLDEVSDTVLVNALWETEVYIYEHREEFQKLIQLLLSP

SEQ ID NO: 878828 - protein, 806 aa, Homo sapiens
MQFFGRLVNTFSGVTNLFSNPFRVKEVAVADYTSSDRVREEGQLILFQNTPNRTWDCVLVNPRNSQSGFRLFQLELEADALVNFHQYSSQLLPFYESSPQVLHTEVLQHLTDLIRNHPSWSVAHLAVELGIRECFHHSRIISCANCAENEEGCTPLHLACRKGDGEILVELVQYCHTQMDVTDYKGETVFHYAVQGDNSQVLQLLGRNAVAGLNQVNNQGLTPLHLACQLGKQEMVRVLLLCNARCNIMGPNGYPIHSAMKFSQKGCAEMIISMDSSQIHSKDPRYGASPLHWAKNAEMARMLLKRGCNVNSTSSAGNTALHVAVMRNRFDCAIVLLTHGANADARGEHGNTPLHLAMSKDNVEMIKALIVFGAEVDTPNDFGETPTFLASKIGRLVTRKAILTLLRTVGAEYCFPPIHGVPAEQGSAAPHHPFSLERAQPPPISLNNLELQDLMHISRARKPAFILGSMRDEKRTHDHLLCLDGGGVKGLIIIQLLIAIEKASGVATKDLFDWVAGTSTGGILALAILHSKSMAYMRGMYFRMKDEVFRGSRPYESGPLEEFLKREFGEHTKMTDVRKPKVMLTGTLSDRQPAELHLFRNYDAPETVREPRFNQNVNLRPPAQPSDQLVWRAARSSGAAPTYFRPNGRFLDGGLLANNPTLDAMTEIHEYNQDLIRKGQANKVKKLSIVVSLGTGRSPQVPVTCVDVFRPSNPWELAKTVFGAKELGKMVVDCCTDPDGRAVDRARAWCEMVGIQYFRLNPQLGTDIMLDEVSDTVLVNALWETEVYIYEHREEFQKLIQLLLSP

SEQ ID NO: 878829 - protein, 806 aa, Homo sapiens; identical to SEQ ID NO: 878828

SEQ ID NO: 878830 - protein, 780 aa, Homo sapiens
MQFFGRLVNTFSGVTNLFSNPFRVKEVAVADYTSSDRVREEGQLILFQNTPNRTWDCVLVNPRNSQSGFRLFQLELEADALVNFHQYSSQLLPFYESSPQVLHTEVLQHLTDLIRNHPSWSVAHLAVELGIRECFHHSRIIRVRSAHQVPGLWELISTHHEIEFSQPPQGCANCAENEEGCTPLHLACRKGDGEILVELVQYCHTQMDVTDYKGETVFHYAVQGDNSQVLQLLGRNAVAGLNQVNNQGLTPLHLACQLGKQEMVRVLLLCNARCNIMGPNGYPIHSAMKFSQKGCAEMIISMDSSQIHSKDPRYGASPLHWAKNAEMARMLLKRGCNVNSTSSAGNTALHVAVMRNRFDCAIVLLTHGANADARGEHGNTPLHLAMSKDNVEMIKALIVFGAEVDTPNDFGETPTFLASKIGRQLQDLMHISRARKPAFILGSMRDEKRTHDHLLCLDGGGVKGLIIIQLLIAIEKASGVATKDLFDWVAGTSTGGILALAILHSKSMAYMRGMYFRMKDEVFRGSRPYESGPLEEFLKREFGEHTKMTDVRKPKVMLTGTLSDRQPAELHLFRNYDAPETVREPRFNQNVNLRPPAQPSDQLVWRAARSSGAAPTYFRPNGRFLDGGLLANNPTLDAMTEIHEYNQDLIRKGQANKVKKLSIVVSLGTGRSPQVPVTCVDVFRPSNPWELAKTVFGAKELGKMVVDCCTDPDGRAVDRARAWCEMVGIQYFRLNPQLGTDIMLDEVSDTVLVNALWETEVYIYEHREEFQKLIQLLLSP

SEQ ID NO: 878831 - protein, 552 aa, Homo sapiens [sequence omitted]

SEQ ID NO: 878832 - protein, 836 aa, Homo sapiens
MQFFGRLVNTFSGVTNLFSNPFRVKEVAVADYTSSDRVREEGQLILFQNTPNRTWDCVLVNPRNSQSGFRLFQLELEADALVNFHQYSSQLLPFYESSPQVLHTEVLQHLTDLIRNHPSWSVAHLAVELGIRECFHHSRIISCANCAENEEGCTPLHLACRKGDGEILVELVQYCHTQMDVTDYKGETVFHYAVQGDNSQVLQLLGRNAVAGLNQVNNQGLTPLHLACQLGKQEMVRVLLLCNARCNIMGPNGYPIHSAMKFSQKGCAEMIISMDSSQIHSKDPRYGASPLHWAKNAEMARMLLKRGCNVNSTSSAGNTALHVAVMRNRFDCAIVLLTHGANADARGEHGNTPLHLAMSKDNVEMIKALIVFGAEVDTPNDFGETPTFLASKIGRLVTRKAILTLLRTVGAEYCFPPIHGVPAEQGSAAPHHPFSLERAQPPPISLNNLELQDLMHISRARKPAFILGSMRDEKRTHDHLLCLDGGGVKGLIIIQLLIAIEKASGVATKDLFDWVAGTSTGGILALAILHSKSMAYMRGMYFRMKDEVFRGSRPYESGPLEEFLKREFGEHTKMTDVRKPKLDQSDTPPALRREPVLRGWCGEKPTYPEQRVMLTGTLSDRQPAELHLFRNYDAPETVREPRFNQNVNLRPPAQPSDQLVWRAARSSGAAPTYFRPNGRFLDGGLLANNPTLDAMTEIHEYNQDLIRKGQANKVKKLSIVVSLGTGRSPQVPVTCVDVFRPSNPWELAKTVFGAKELGKMVVDCCTDPDGRAVDRARAWCEMVGIQYFRLNPQLGTDIMLDEVSDTVLVNALWETEVYIYEHREEFQKLIQLLLSP

SEQ ID NO: 878833 - protein, 370 aa, Homo sapiens [sequence omitted]

SEQ ID NO: 878834 - protein, 273 aa, Homo sapiens [sequence omitted]

SEQ ID NO: 878835 - protein, 294 aa, Homo sapiens
WGGGWESCTCHQAPSPCHQPTRCTGLYWLRTGIAGELSGPWQVRKVPGKSSAVPAFHQDELARECGFVGPASEEFPASPLPAPPAPNTHTLRSGVHGFYASPLCHWAALLPRPSDQLVWRAARSSGAAPTYFRPNGRFLDGGLLANNPTLDAMTEIHEYNQDLIRKGQANKVKKLSIVVSLGTGRSPQVPVTCVDVFRPSNPWELAKTVFGAKELGKMVVDCCTDPDGRAVDRARAWCEMVGIQYFRLNPQLGTDIMLDEVSDTVLVNALWETEVYIYEHREEFQKLIQLLLSP

SEQ ID NO: 878836 - protein, 479 aa, Homo sapiens
  misc_feature (463)..(463): Xaa can be any naturally occurring amino acid
  misc_feature (473)..(473): Xaa can be any naturally occurring amino acid
MQFFGRLVNTFSGVTNLFSNPFRVKEVAVADYTSSDRVREEGQLILFQNTPNRTWDCVLVNPRNSQSGFRLFQLELEADALVNFHQYSSQLLPFYESSPQVLHTEVLQHLTDLIRNHPSWSVAHLAVELGIRECFHHSRIISCANCAENEEGCTPLHLACRKGDGEILVELVQYCHTQMDVTDYKGETVFHYAVQGDNSQVLQLLGRNAVAGLNQVNNQGLTPLHLACQLGKQEMVRVLLLCNARCNIMGPNGYPIHSAMKFSQKGCAEMIISMDSSQIHSKDPRYGASPLHWAKNAEMARMLLKRGCNVNSTSSAGNTALHVAVMRNRFDCAIVLLTHGANADARGEHGNTPLHLAMSKDNVEMIKALIVFGAEVDTPNDFGETPTFLASKIGRLVTRKAILTLLRTVGAEYCFPPIHGVPAEQGSAAPHHPFSLERAQPPPISLNNLEPLNQPLRQVNPQXPKGPGIGLGXLGGFAR

SEQ ID NO: 878837 - protein, 129 aa, Homo sapiens
NRFFHWISLSKKPTFAELCPQGWTNLTLLQHCRREPVLRGWCGEKPTYPEQRLEWALCYPRPWGVNCGERERWMGGWLSRPPASFLSRVMLTGTLSDRQPAELHLFRNYDAPETVREPRFNQNVNLRPP

SEQ ID NO: 878838 - protein, 202 aa, Homo sapiens
RAGFLQAAETVRLSDTSQSNSPIACGWGAWDPEWEASPKIIQQIGSRACSEANKRGSGRAQRLTPVIPALWEAEGQANKVKKLSIVVSLGTGRSPQVPVTCVDVFRPSNPWELAKTVFGAKELGKMVVDCCTDPDGRAVDRARAWCEMVGIQYFRLNPQLGTDIMLDEVSDTVLVNALWETEVYIYEHREEFQKLIQLLLSP

SEQ ID NO: 878839 - protein, 113 aa, Homo sapiens
WGGGWESCTCHQAPSPCHQPTRCTGLYWLRTGIAGELSGPWQVRKVPGKSSAVPAFHQDELARECGFVGPASEEFPASPLPAPPAPNTHTLRSGVHGFYASPLCHWAALLPRP

SEQ ID NO: 878840 - protein, 752 aa, Homo sapiens
MQFFGRLVNTFSGVTNLFSNPFRVKEVAVADYTSSDRVREEGQLILFQNTPNRTWDCVLVNPRNSQSGFRLFQLELEADALVNFHQYSSQLLPFYESSPQVLHTEVLQHLTDLIRNHPSWSVAHLAVELGIRECFHHSRIISCANCAENEEGCTPLHLACRKGDGEILVELVQYCHTQMDVTDYKGETVFHYAVQGDNSQVLQLLGRNAVAGLNQVNNQGLTPLHLACQLGKQEMVRVLLLCNARCNIMGPNGYPIHSAMKFSQKGCAEMIISMDSSQIHSKDPRYGASPLHWAKNAEMARMLLKRGCNVNSTSSAGNTALHVAVMRNRFDCAIVLLTHGANADARGEHGNTPLHLAMSKDNVEMIKALIVFGAEVDTPNDFGETPTFLASKIGRQLQDLMHISRARKPAFILGSMRDEKRTHDHLLCLDGGGVKGLIIIQLLIAIEKASGVATKDLFDWVAGTSTGGILALAILHSKSMAYMRGMYFRMKDEVFRGSRPYESGPLEEFLKREFGEHTKMTDVRKPKVMLTGTLSDRQPAELHLFRNYDAPETVREPRFNQNVNLRPPAQPSDQLVWRAARSSGAAPTYFRPNGRFLDGGLLANNPTLDAMTEIHEYNQDLIRKGQANKVKKLSIVVSLGTGRSPQVPVTCVDVFRPSNPWELAKTVFGAKELGKMVVDCCTDPDGRAVDRARAWCEMVGIQYFRLNPQLGTDIMLDEVSDTVLVNALWETEVYIYEHREEFQKLIQLLLSP

SEQ ID NO: 878841 - protein, 840 aa, Homo sapiens
MRLKLESDTRACVIVLMCKTEGEDGGASPPAPQKMQFFGRLVNTFSGVTNLFSNPFRVKEVAVADYTSSDRVREEGQLILFQNTPNRTWDCVLVNPRNSQSGFRLFQLELEADALVNFHQYSSQLLPFYESSPQVLHTEVLQHLTDLIRNHPSWSVAHLAVELGIRECFHHSRIISCANCAENEEGCTPLHLACRKGDGEILVELVQYCHTQMDVTDYKGETVFHYAVQGDNSQVLQLLGRNAVAGLNQVNNQGLTPLHLACQLGKQEMVRVLLLCNARCNIMGPNGYPIHSAMKFSQKGCAEMIISMDSSQIHSKDPRYGASPLHWAKNAEMARMLLKRGCNVNSTSSAGNTALHVAVMRNRFDCAIVLLTHGANADARGEHGNTPLHLAMSKDNVEMIKALIVFGAEVDTPNDFGETPTFLASKIGRLVTRKAILTLLRTVGAEYCFPPIHGVPAEQGSAAPHHPFSLERAQPPPISLNNLELQDLMHISRARKPAFILGSMRDEKRTHDHLLCLDGGGVKGLIIIQLLIAIEKASGVATKDLFDWVAGTSTGGILALAILHSKSMAYMRGMYFRMKDEVFRGSRPYESGPLEEFLKREFGEHTKMTDVRKPKVMLTGTLSDRQPAELHLFRNYDAPETVREPRFNQNVNLRPPAQPSDQLVWRAARSSGAAPTYFRPNGRFLDGGLLANNPTLDAMTEIHEYNQDLIRKGQANKVKKLSIVVSLGTGRSPQVPVTCVDVFRPSNPWELAKTVFGAKELGKMVVDCCTDPDGRAVDRARAWCEMVGIQYFRLNPQLGTDIMLDEVSDTVLVNALWETEVYIYEHREEFQKLIQLLLSP

SEQ ID NO: 878842 - protein, 700 aa, Homo sapiens
TTAPQPGLQSKTLSQKTKLFQLELEADALVNFHQYSSQLLPFYESSPQVLHTEVLQHLTDLIRNHPSWSVAHLAVELGIRECFHHSRIISCANCAENEEGCTPLHLACRKGDGEILVELVQYCHTQMDVTDYKGETVFHYAVQGDNSQVLQLLGRNAVAGLNQVNNQGLTPLHLACQLGKQEMVRVLLLCNARCNIMGPNGYPIHSAMKFSQKGCAEMIISMDSSQIHSKDPRYGASPLHWAKNAEMARMLLKRGCNVNSTSSAGNTALHVAVMRNRFDCAIVLLTHGANADARGEHGNTPLHLAMSKDNVEMIKALIVFGAEVDTPNDFGETPTFLASKIGRQLQDLMHISRARKPAFILGSMRDEKRTHDHLLCLDGGGVKGLIIIQLLIAIEKASGVATKDLFDWVAGTSTGGILALAILHSKSMAYMRGMYFRMKDEVFRGSRPYESGPLEEFLKREFGEHTKMTDVRKPKVMLTGTLSDRQPAELHLFRNYDAPETVREPRFNQNVNLRPPAQPSDQLVWRAARSSGAAPTYFRPNGRFLDGGLLANNPTLDAMTEIHEYNQDLIRKGQANKVKKLSIVVSLGTGRSPQVPVTCVDVFRPSNPWELAKTVFGAKELGKMVVDCCTDPDGRAVDRARAWCEMVGIQYFRLNPQLGTDIMLDEVSDTVLVNALWETEVYIYEHREEFQKLIQLLLSP

SEQ ID NO: 878843 - protein, 848 aa, Homo sapiens
SDLAGGRGLGVRSPTSSALRTPKSPPDPPLDIPRVSDSETEGEDGGASPPAPQKMQFFGRLVNTFSGVTNLFSNPFRVKEVAVADYTSSDRVREEGQLILFQNTPNRTWDCVLVNPRNSQSGFRSHAQELTVNQRTLCGTTGWSRGANTLWALPSLDSGWLLRLERLFQLELEADALVNFHQYSSQLLPFYESSPQVLHTEVLQHLTDLIRNHPSWSVAHLAVELGIRECFHHSRIISCANCAENEEGCTPLHLACRKGDGEILVELVQYCHTQMDVTDYKGETVFHYAVQGDNSQVLQLLGRNAVAGLNQVNNQGLTPLHLACQLGKQEMVRVLLLCNARCNIMGPNGYPIHSAMKFSQKGCAEMIISMDSSQIHSKDPRYGASPLHWAKNAEMARMLLKRGCNVNSTSSAGNTALHVAVMRNRFDCAIVLLTHGANADARGEHGNTPLHLAMSKDNVEMIKALIVFGAEVDTPNDFGETPTFLASKIGRQLQDLMHISRARKPAFILGSMRDEKRTHDHLLCLDGGGVKGLIIIQLLIAIEKASGVATKDLFDWVAGTSTGGILALAILHSKSMAYMRGMYFRMKDEVFRGSRPYESGPLEEFLKREFGEHTKMTDVRKPKVMLTGTLSDRQPAELHLFRNYDAPETVREPRFNQNVNLRPPAQPSDQLVWRAARSSGAAPTYFRPNGRFLDGGLLANNPTLDAMTEIHEYNQDLIRKGQANKVKKLSIVVSLGTGRSPQVPVTCVDVFRPSNPWELAKTVFGAKELGKMVVDCCTDPDGRAVDRARAWCEMVGIQYFRLNPQLGTDIMLDEVSDTVLVNALWETEVYIYEHREEFQKLIQLLLSP

SEQ ID NO: 878844 - protein, 853 aa, Homo sapiens
MQFFGRLVNTFSGVTNLFSNPFRVKEVAVADYTSSDRVREEGQLILFQNTPNRTWDCVLVNPRNSQSGFRLFQLELEADALVNFHQYSSQLLPFYESSPQVLHTEVLQHLTDLIRNHPSWSVAHLAVELGIRECFHHSRIISCANCAENEEGCTPLHLACRKGDGEILVELVQYCHTQMDVTDYKGETVFHYAVQGDNSQVLQLLGRNAVAGLNQVNNQGLTPLHLACQLGKQEMVRVLLLCNARCNIMGPNGYPIHSAMKFSQKGCAEMIISMDSSQIHSKDPRYGASPLHWAKNAEMARMLLKRGCNVNSTSSAGNTALHVAVMRNRFDCAIVLLTHGANADARGEHGNTPLHLAMSKDNVEMIKALIVFGAEVDTPNDFGETPTFLASKIGRLVTRKAILTLLRTVGAEYCFPPIHGVPAEQGSAAPHHPFSLERAQPPPISLNNLELQDLMHISRARKPAFILGSMRDEKRTAEPEPLRGEVTSQGHTDHDHLLCLDGGGVKGLIIIQLLIAIEKASGVATKDLFDWVAGTSTGGILALAILHSKSMAYMRGMYFRMKDEVFRGSRPYESGPLEEFLKREFGEHTKMTDVRKPKLDQSDTPPALRREPVLRGWCGEKPTYPEQRVMLTGTLSDRQPAELHLFRNYDAPETVREPRFNQNVNLRPPAQPSDQLVWRAARSSGAAPTYFRPNGRFLDGGLLANNPTLDAMTEIHEYNQDLIRKGQANKVKKLSIVVSLGTGRSPQVPVTCVDVFRPSNPWELAKTVFGAKELGKMVVDCCTDPDGRAVDRARAWCEMVGIQYFRLNPQLGTDIMLDEVSDTVLVNALWETEVYIYEHREEFQKLIQLLLSP

SEQ ID NO: 878845 - protein, 558 aa, Homo sapiens
MRAPLRSCTLLGRNAVAGLNQVNNQGLTPLHLACQLGKQEMVRVLLLCNARCNIMGPNGYPIHSAMKFSQKGCAEMIISMDSSQIHSKDPRYGASPLHWAKNAEMARMLLKRGCNVNSTSSAGNTALHVAVMRNRFDCAIVLLTHGANADARGEHGNTPLHLAMSKDNVEMIKALIVFGAEVDTPNDFGETPTFLASKIGRQLQDLMHISRARKPAFILGSMRDEKRTHDHLLCLDGGGVKGLIIIQLLIAIEKASGVATKDLFDWVAGTSTGGILALAILHSKSMAYMRGMYFRMKDEVFRGSRPYESGPLEEFLKREFGEHTKMTDVRKPKVMLTGTLSDRQPAELHLFRNYDAPETVREPRFNQNVNLRPPAQPSDQLVWRAARSSGAAPTYFRPNGRFLDGGLLANNPTLDAMTEIHEYNQDLIRKGQANKVKKLSIVVSLGTGRSPQVPVTCVDVFRPSNPWELAKTVFGAKELGKMVVDCCTDPDGRAVDRARAWCEMVGIQYFRLNPQLGTDIMLDEVSDTVLVNALWETEVYIYEHREEFQKLIQLLLSP

SEQ ID NO: 878846 - protein, 469 aa, Homo sapiens
MQFFGRLVNTFSGVTNLFSNPFRVKEVAVADYTSSDRVREEGQLILFQNTPNRTWDCVLVNPRNSQSGFRLFQLELEADALVNFHQYSSQLLPFYESSPQVLHTEVLQHLTDLIRNHPSWSVAHLAVELGIRECFHHSRIISCANCAENEEGCTPLHLACRKGDGEILVELVQYCHTQMDVTDYKGETVFHYAVQGDNSQVLQLLGRNAVAGLNQVNNQGLTPLHLACQLGKQEMVRVLLLCNARCNIMGPNGYPIHSAMKFSQKGCAEMIISMDSSQIHSKDPRYGASPLHWAKNAEMARMLLKRGCNVNSTSSAGNTALHVAVMRNRFDCAIVLLTHGANADARGEHGNTPLHLAMSKDNVEMIKALIVFGAEVDTPNDFGETPTFLASKIGRLVTRKAILTLLRTVGAEYCFPPIHGVPAEQGSAAPHHPFSLERAQPPPISLNNLNYRISCTSHGPGSQRSSWAP

SEQ ID NO: 878847 - protein, 451 aa, Homo sapiens
MQFFGRLVNTFSGVTNLFSNPFRVKEVAVADYTSSDRVREEGQLILFQNTPNRTWDCVLVNPRNSQSGFRLFQLELEADALVNFHQYSSQLLPFYESSPQVLHTEVLQHLTDLIRNHPSWSVAHLAVELGIRECFHHSRIISCANCAENEEGCTPLHLACRKGDGEILVELVQYCHTQMDVTDYKGETVFHYAVQGDNSQVLQLLGRNAVAGLNQVNNQGLTPLHLACQLGKQEMVRVLLLCNARCNIMGPNGYPIHSAMKFSQKGCAEMIISMDSSQIHSKDPRYGASPLHWAKNAEMARMLLKRGCNVNSTSSAGNTALHVAVMRNRFDCAIVLLTHGANADARGEHGNTPLHLAMSKDNVEMIKALIVFGAEVDTPNDFGETPTFLASKIGRLVTRKAILTLLRTVGAEYCFPPIHGVPAEQGSAAPHHPFSLERAQPPPISLNNLAT

SEQ ID NO: 878848 - protein, 333 aa, Homo sapiens
QAPQCTSGRVTRSGGSRLDRSSLLVEMSMILSASVIRVRDGLPLSASTDYEQSTGMQECRKYFKMLSRKLAQLPDRCTLKTGHYNINFISSLGVSYMMLCTENYPNVLAFSFLDELQKEFITTYNMMKTNTAVRPYCFIEFDNFIQRTKQRYNNPRSLSTKINLSDMQTEIKLRPPYQISMCELGSANGVTSAFSVDCKGAGKISSAHQRLEPATLSGIVGFILSLLCGALNLIRGFHAIESLLQSDGDDFNYIIAFFLGTAACLYQCYLLVYYTGWRNVKSFLTFGLICLCNMYLYELRNLWQLFFHVTVGAFVTLQIWLRQAQGKAPDYDV

SEQ ID NO: 878849 - protein, 333 aa, Homo sapiens; identical to SEQ ID NO: 878848

SEQ ID NO: 878850 - protein, 213 aa, Homo sapiens
QAPQCTSGRVTRSGGSRLDRSSLLVEMSMILSASVIRVRDGLPLSASTDYEQSTGMQECRKYFKMLSRKLAQLPDRCTLKTGHYNINFISSLGVSYMMLCTENYPNVLAFSFLDELQKEFITTYNMMKTNTAVRPYCFIEFDNFIQRTKQRYNNPRSLSTKINLSDMQTEIKLRPPYQISMCELGSANGVTSAFSVDCKGAGKISSGTFAESP

SEQ ID NO: 878851 - protein, 273 aa, Homo sapiens
QAPQCTSGRVTRSGGSRLDRSSLLVEMSMILSASVIRVRDGLPLSASTDYEQSTGMQECRKYFKMLSRKLAQLPDRCTLKTGHYNINFISSLGVSYMMLCTENYPNVLAFSFLDELQKEFITTYNMMKTNTAVRPYCFIEFDNFIQRTKQRYNNPRSLSTKINLSDMQTEIKLRPPYQISMCELGSANGVTSAFSVDCKGAGKISSAHQRLEPATLSGIVGFILSLLCGALNLIRGFHAIESLLQSDGDDFNYIIAFFLGTAACLYQVGFLPF

SEQ ID NO: 878852 - protein, 190 aa, Homo sapiens
MSMILSASVIRVRDGLPLSASTDYEQSTGMQECRKYFKMLSRKLAQLPDRCTLKTGHYNINFISSLGVSYMMLCTENYPNVLAFSFLDELQKEFITTYNMMKTNTAVRPYCFIEFDNFIQRTKQRYNNPRSLSTKINLSDMQTEIKLRPPYQISMCELGSANGVTSAFSVDCKGAGKISSGEFWISVILF

SEQ ID NO: 878853 - protein, 129 aa, Homo sapiens
KKKKKKKKKKRPPELGSGGSRLDRSSLLVEMSMILSASVIRVRDGLPLSASTDYEQSTGMQECRKYFKMLSRKLAQLPDRCTLKTGHYNIKVMVMILITSLHFSLEQQPAFTSVIYLSTTPAGGMSNLF

SEQ ID NO: 878854 - protein, 268 aa, Homo sapiens
AGTGRKSRIGSRLDRSSLLVEMSMILSASVIRVRDGLPLSASTDYEQSTGMQECRKYFKMLSRKLAQLPDRCTLKTGHYNINFISSLGVSYMMLCTENYPNVLAFSFLDELQKEFITTYNMMKTNTAVRPYCFIEFDNFIQRTKQRYNNPRSLSTKINLSDMQTEIKLRPPYQISMCELGSANGVTSAFSVDCKGAGKISSAHQRLEPATLSGIVGFILSLLCGALNLIRGFHAIESLLQSDGDDFNYIIAFFLGTAACLYQVGFLPF

SEQ ID NO: 878855 - protein, 328 aa, Homo sapiens
AGTGRKSRIGSRLDRSSLLVEMSMILSASVIRVRDGLPLSASTDYEQSTGMQECRKYFKMLSRKLAQLPDRCTLKTGHYNINFISSLGVSYMMLCTENYPNVLAFSFLDELQKEFITTYNMMKTNTAVRPYCFIEFDNFIQRTKQRYNNPRSLSTKINLSDMQTEIKLRPPYQISMCELGSANGVTSAFSVDCKGAGKISSAHQRLEPATLSGIVGFILSLLCGALNLIRGFHAIESLLQSDGDDFNYIIAFFLGTAACLYQCYLLVYYTGWRNVKSFLTFGLICLCNMYLYELRNLWQLFFHVTVGAFVTLQIWLRQAQGKAPDYDV

SEQ ID NO: 878856 - protein, 207 aa, Homo sapiens [sequence omitted]

SEQ ID NO: 878857 - protein, 105 aa, Homo sapiens
MHVMDLQRDANRQISDLKFKLAKSEQEITALEQNVIRLESQVSRYKSAAENAEKIEDELKAEKRKLQRELRSALDKTEELEVSNGHLVKRLEKMKANRSALLSQQ

SEQ ID NO: 878858 - protein, 162 aa, Homo sapiens [sequence omitted]

SEQ ID NO: 878859 - protein, 106 aa, Homo sapiens [sequence omitted]

SEQ ID NO: 878860 - protein, 115 aa, Homo sapiens
MLPLCVPFSPSLSGSLISCTHFGLFTKSHISWRFCSLFHRLFSVLSGSAASSPAFRETKTVASLALRGSRAMAHPREPQQPPGASVCRPLARAGADAQNLQVLHKHTGASRELCV

SEQ ID NO: 878861 - protein, 105 aa, Homo sapiens; identical to SEQ ID NO: 878857

SEQ ID NO: 878862 - protein, 120 aa, Homo sapiens
SIYSLVADGTCEDTAIVGNKDPPSIWAAVPGKTFLNITPAEVGVLVGKDWSSFVMNGLTLGGQKYTVVLDSLLQDGELTTDLRMKSIGGAPTFNVIVTMTAKTLGLLMGKEGIHGNFIDK

SEQ ID NO: 878863 - protein, 585 aa, Homo sapiens
AAALSGGGGPGAQAPRPGTPWKSRAYSPGIQGLHEEIIDFYNFMSPCPEEAAMRREVVKRIETVVKDLWPTADVQIFGSFSTGLYLPTSDIDLVVFGKWERPPLQLLEQALRKHNVAEPCSIKVLDKATVPIIKLTDQETEVKVDISFNMETGVRAAEFIKNYMKKYSLLPYLILVLKQFLLQRDLNEVFTGGISSYSLILMAISFLQLHPRIDARRADENLGMLLVEFFELYGRNFNYLKTGIRIKEGGAYIAKEEIMKAMTSGYRPSMLCIEDPLLPGNDVGRSSYGAMQVKQVFDYAYIVLSHAVSPLARSYPNRDAESTLGRIIKVTQEVIDYRRWIKEKWGSKAHPSPGMDSRIKIKERIATCNGEQTQNREPESPYGQRLTLSLSSPQLLSSGSSASSVSSLSGSDVDSDTPPCTTPSVYQFSLQAPAPLMAGLPTALPMPSGKPQPTTSRTLIMTTNNQTRFTIPPPTLGVAPVPCRQAGVEGTASLKAVHHMSSPAIPSASPNPLSSPHLYHKQHNGMKLSMKGSHGHTQGGGYSSVGSGGVRPPVGNRGHHQYNRTGWRRKKHTHTRDSLPVSLSR

SEQ ID NO: 878864 - protein, 585 aa, Homo sapiens; identical to SEQ ID NO: 878863

SEQ ID NO: 878865 - protein, 436 aa, Homo sapiens
METGVRAAEFIKNYMKKYSLLPYLILVLKQFLLQRDLNEVFTGGISSYSLILMAISFLQLHPRIDARRADENLGMLLVEFFELYGRNFNYLKTGIRIKEGGAYIAKEEIMKAMTSGYRPSMLCIEDPLLPGNDVGRSSYGAMQVKQVFDYAYIVLSHAVSPLARSYPNRDAESTLGRIIKVTQEVIDYRRWIKEKWGSKAHPSPGMDSRIKIKERIATCNGEQTQNREPESPYGQRLTLSLSSPQLLSSGSSASSVSSLSGSDVDSDTPPCTTPSVYQFSLQAPAPLMAGLPTALPMPSGKPQPTTSRTLIMTTNNQTRFTIPPPTLGVAPVPCRQAGVEGTASLKAVHHMSSPAIPSASPNPLSSPHLYHKQHNGMKLSMKGSHGHTQGGGYSSVGSGGVRPPVGNRGHHQYNRTGWRRKKHTHTRDSLPVSLSR

SEQ ID NO: 878866 - protein, 149 aa, Homo sapiens
MAGLPTALPMPSGKPQPTTSRTLIMTTNNQTRFTIPPPTLGVAPVPCRQAGVEGTASLKAVHHMSSPAIPSASPNPLSSPHLYHKQHNGMKLSMKGSHGHTQGGGYSSVGSGGVRPPVGNRGHHQYNRTGWRRKKHTHTRDSLPVSLSR

SEQ ID NO: 878867 - protein, 522 aa, Homo sapiens
AAALSGGGGPGAQAPRPGTPWKSRAYSPGIQGLHEEIIDFYNFMSPCPEEAAMRREVVKRIETVVKDLWPTADVQIFGSFSTGLYLPTSDIDLVVFGKWERPPLQLLEQALRKHNVAEPCSIKVLDKATVPIIKLTDQETEVKVDISFNMETGVRAAEFIKNYMKKYSLLPYLILVLKQFLLQRDLNEVFTGGISSYSLILMAISFLQLHPRIDARRADENLGMLLVEFFELYGRNFNYLKTGIRIKEGGAYIAKEEIMKAMTSGYRPSMLCIEDPLLPGNDVGRSSYGAMQVKQVFDYAYIVLSHAVSPLARSYPNRDAESTLGRIIKVTQEVIDYRRWIKEKWGSKAHPSPGMDSRIKIKERIATCNGEQTQNREPESPYGQRLTLSLSSPQLLSSGSSASSVSSLSGSDVDSDTPPCTTPSVYQFSLQAPAPLMAGLPTALPMPSGKPQPTTSRTLIMTTNNQTRFTIPPPTLGVAPVPCRQAGVEGTASLKAVHHMSSPAIPSASPNPLSSPHLYHKV

SEQ ID NO: 878868 - protein, 86 aa, Homo sapiens
NLGMLLVEFFELYGRNFNYLKTGIRIKEGGAYIAKEEIMKAMTSGYRPSMLCIEDPLLPGKGALISTAESWASLGDVLVTGPVLGL

SEQ ID NO: 878869 - protein, 585 aa, Homo sapiens; identical to SEQ ID NO: 878863

SEQ ID NO: 878870 - protein, 542 aa, Homo sapiens
MSPCPEEAAMRREVVKRIETVVKDLWPTADVQIFGSFSTGLYLPTSDIDLVVFGKWERPPLQLLEQALRKHNVAEPCSIKVLDKATVPIIKLTDQETEVKVDISFNMETGVRAAEFIKNYMKKYSLLPYLILVLKQFLLQRDLNEVFTGGISSYSLILMAISFLQLHPRIDARRADENLGMLLVEFFELYGRNFNYLKTGIRIKEGGAYIAKEEIMKAMTSGYRPSMLCIEDPLLPGNDVGRSSYGAMQVKQVFDYAYIVLSHAVSPLARSYPNRDAESTLGRIIKVTQEVIDYRRWIKEKWGSKAHPSPGMDSRIKIKERIATCNGEQTQNREPESPYGQRLTLSLSSPQLLSSGSSASSVSSLSGSDVDSDTPPCTTPSVYQFSLQAPAPLMAGLPTALPMPSGKPQPTTSRTLIMTTNNQTRFTIPPPTLGVAPVPCRQAGVEGTASLKAVHHMSSPAIPSASPNPLSSPHLYHKQHNGMKLSMKGSHGHTQGGGYSSVGSGGVRPPVGNRGHHQYNRTGWRRKKHTHTRDSLPVSLSR

SEQ ID NO: 878871 - protein, 268 aa, Homo sapiens [sequence omitted]

SEQ ID NO: 878872 - protein, 585 aa, Homo sapiens; identical to SEQ ID NO: 878863

SEQ ID NO: 878873 - protein, 430 aa, Homo sapiens
AAALSGGGGPGAQAPRPGTPWKSRAYSPGIQGLHEEIIDFYNFMSPCPEEAAMRREVVKRIETVVKDLWPTADVQIFGSFSTGLYLPTSDIDLVVFGKWERPPLQLLEQALRKHNVAEPCSIKVLDKATVPIIKLTDQETEVKVDISFNMETGVRAAEFIKNYMKKYSLLPYLILVLKQFLLQRDLNEVFTGGISSYSLILMAISFLQLHPRIDARRADENLGMLLVEFFELYGRNFNYLKTGIRIKEGGAYIAKEEIMKAMTSGYRPSMLCIEDPLLPGNDVGRSSYGAMQVKQVFDYAYIVLSHAVSPLARSYPNRDAESTLGRIIKVTQEVIDYRRWIKEKWGSKAHPSPGMDSRIKIKERIATCNGEQTQNREPESPYGQRLTLSLSSPQLLSSGSSASSVSSLSGSDVVSALPSSVCLLDSLCLW

SEQ ID NO: 878874 - protein, 570 aa, Homo sapiens
MKEKSKNAAKTRREKENGEFYELAKLLPLPSAITSQLDKASIIRLTTSYLKMRAVFPEGLGDAWGQPSRAGPLDGVAKELGSHLLQTLDGFVFVVASDGKIMYISETASVHLGLSQVELTGNSIYEYIHPSDHDEMTAVLTAHQPLHHHLLQEYEIERSFFLRMKCVLAKRNAGLTCSGYKVIHCSGYLKIRQYMLDMSLYDSCYQIVGLVAVGQSLPPSAITEIKLYSNMFMFRASLDLKLIFLDSRVTEVTGYEPQDLIEKTLYHHVHGCDVFHLRYAHHLLLVKGQVTTKYYRLLSKRGGWVWVQSYATVVHNSRSSRPHCIVSVNYVLTEIEYKELQLSLEQVSTAKSQDSWRTALSTSQETRKLVKPKNTKMKTKLRTNPYPPQQYSSFQMDKLECGQLGNWRASPPASAAAPPELQPHSESSDLLYTPSYSLPFSYHYGHFPLDSHVFSSKKPMLPAKFGQPQGSPCEVARFFLSTLPASGECQWHYANPLVPSSSSPAKNPPEPPANTARHSLVPSYEGGSGLLVGKVGGLRTAGSRSSHGGGWQMETEPSRFGQTCPLSASK

SEQ ID NO: 878875 - protein, 667 aa, Homo sapiens
MKEKSKNAAKTRREKENGEFYELAKLLPLPSAITSQLDKASIIRLTTSYLKMRAVFPEGLGDAWGQPSRAGPLDGVAKELGSHLLQTLDGFVFVVASDGKIMYISETASVHLGLSQVELTGNSIYEYIHPSDHDEMTAVLTAHQPLHHHLLQEYEIERSFFLRMKCVLAKRNAGLTCSGYKVIHCSGYLKIRQYMLDMSLYDSCYQIVGLVAVGQSLPPSAITEIKLYSNMFMFRASLDLKLIFLDSRVTEVTGYEPQDLIEKTLYHHVHGCDVFHLRYAHHLLLVKGQVTTKYYRLLSKRGGWVWVQSYATVVHNSRSSRPHCIVSVNYVLTEIEYKELQLSLEQVSTAKSQDSWRTALSTSQETRKLVKPKNTKMKTKLRTNPYPPQQYSSFQMDKLECGQLGNWRASPPASAAAPPELQPHSESSDLLYTPSYSLPFSYHYGHFPLDSHVFSSKKPMLPAKFGQPQGSPCEVARFFLSTLPASGECQWHYANPLVPSSSSPAKNPPEPPANTARHSLVPSYEAPAAAVRRFGEDTAPPSFPSCGHYREEPALGPAKAARQAARDGARLALARAAPECCAPPTPEAPGAPAQLPFVLLNYHRVLARRGPLGGAAPAASGLACAPGGPEAATGALRLRHPSPAATSPPGAPLPHYLGASVIITNGR

SEQ ID NO: 878876 - protein, 419 aa, Homo sapiens
MKEKSKNAAKTRREKENGEFYELAKLLPLPSAITSQLDKASIIRLTTSYLKMRAVFPEGLGDAWGQPSRAGPLDGVAKELGSHLLQTLDGFVFVVASDGKIMYISETASVHLGLSQVELTGNSIYEYIHPSDHDEMTAVLTAHQPLHHHLLQEYEIERSFFLRMKCVLAKRNAGLTCSGYKVIHCSGYLKIRQYMLDMSLYDSCYQIVGLVAVGQSLPPSAITEIKLYSNMFMFRASLDLKLIFLDSRVTEVTGYEPQDLIEKTLYHHVHGCDVFHLRYAHHLLLVKGQVTTKYYRLLSKRGGWVWVQSYATVVHNSRSSRPHCIVSVNYVLTEIEYKELQLSLEQVSTAKSQDSWRTALSTSQETRKLVKPKNTKMKTKLRTNPYPPQQYSSFQMDKLECGQLGNWRASPPAREEEAF

SEQ ID NO: 878877 - protein, 78 aa, Homo sapiens
MCLGEKERGPDLQRIQGTGSHGCGEELAKGLQCVFSRASAERKAREHKLVIPTNVELSSNVVHSLLEAHVRAGVLGGC

SEQ ID NO: 878878 - protein, 667 aa, Homo sapiens; identical to SEQ ID NO: 878875

SEQ ID NO: 878879 - protein, 542 aa, Homo sapiens
MKEKSKNAAKTRREKENGEFYELAKLLPLPSAITSQLDKASIIRLTTSYLKMRAVFPEGLGDAWGQPSRAGPLDGVAKELGSHLLQTLDGFVFVVASDGKIMYISETASVHLGLSQVELTGNSIYEYIHPSDHDEMTAVLTAHQPLHHHLLQEYEIERSFFLRMKCVLAKRNAGLTCSGYKVIHCSGYLKIRQYMLDMSLYDSCYQIVGLVAVGQSLPPSAITEIKLYSNMFMFRASLDLKLIFLDSRVTEVTGYEPQDLIEKTLYHHVHGCDVFHLRYAHHLLLVKGQVTTKYYRLLSKRGGWVWVQSYATVVHNSRSSRPHCIVSVNYVLTEIEYKELQLSLEQVSTAKSQDSWRTALSTSQETRKLVKPKNTKMKTKLRTNPYPPQQYSSFQMDKLECGQLGNWRASPPASAAAPPELQPHSESSDLLYTPSYSLPFSYHYGHFPLDSHVFSSKKPMLPAKFGQPQGSPCEVARFFLSTLPASGECQWHYANPLVPSSSSPAKNPPEPPANTARHSLVPSYEGKQMSSAEIPPAPQDAD

SEQ ID NO: 878880 - protein, 163 aa, Homo sapiens
MKEKSKNAAKTRREKENGEFYELAKLLPLPSAITSQLDKASIIRLTTSYLKMRAVFPEGLGDAWGQPSRAGPLDGVAKELGSHLLQTLDGFVFVVASDGKIMYISETASVHLGLSQSSPRQPCSEILPKPGLSAYVVMLDALKRAPQRDMFQSTLAGLHVTVL

SEQ ID NO: 878881 - protein, 92 aa, Homo sapiens
MHKSQIRMEKTQNHHQHQDQKDKNPSKNRKKLLKHLKGPSSVEDIKAKMQASIEKCGSLPKVEAKFISYVKNCFWMTEQEAIQDFWQWRKSL

SEQ ID NO: 878882 - protein, 72 aa, Homo sapiens
RVKEQRGLGRHVRSTGTIPRSRAEVLGGCAGVKWWFSGDGMINKGVRRNRCWKVTKVERDVALALQVRRERE

SEQ ID NO: 878883 - protein, 72 aa, Homo sapiens; identical to SEQ ID NO: 878882

SEQ ID NO: 878884 - protein, 72 aa, Homo sapiens; identical to SEQ ID NO: 878882

SEQ ID NO: 878885 - protein, 115 aa, Homo sapiens
MGNVPQAGLSWASRGARAAWGGPGTGGPCWLALGPLARQSLSSQFLLPWGRRGGPWAAASSIPNHRLGGCSPGGWVLGLGPAAAHRTQWGPQGGEEAALPLPESSSPPRGCVCVS

SEQ ID NO: 878886 - protein, 88 aa, Homo sapiens
ESLARSCRPVRSDWAYFSPQSPQVFFMKPSGREWPCKNGRNLRLEMLGRLRSNGLSRYREAERISSPCIDFDFRLCDFLTPRSESSTG

SEQ ID NO: 878887 - protein, 406 aa, Homo sapiens
RIAEGHCFADLKNKAKSPASASGRRLCLLWEREGHPSPLLRSRLRRHNRGNGSRHHHHRSNLSALAGVQGAAASEWDKRASSSPSSRASGFSDIQAPFQHPFPASPAGTGAPLGVCGFQLNGRRHNETRANRFSAFLPRAFPSRGPASLTRKCWSRYWLSSTEESLRSAFRRPPDIVQRSGPQCGDSRHEAASAMAEAETRGGEHLIGPNPRAACRHQAARGHRRPGRAPRGGRRGRRGRVPGAWRRWCCGGCWPPCCTARSWWNVCQSRGLSDVRRSSRPSHCCRPSCGARTRPAACRTSRLGPWAPCAAALSDLETPSPRSYAAASEAARGHHQVARGALAQTFNPGLCGAEAACFSFRALQWHQCGGVIPGTARGFESRLGLLACRHPTHKSLGQTARSVEVL

SEQ ID NO: 878888 - protein, 104 aa, Homo sapiens
DGVSLCRPGCSTMVQSPLTATPPPRFKRFCCLSLPSSWDYRHAPMRHHARLIFVFLVETGFHHVGQPGLEHLTSGDLPASASQSAGITGMSHAPSLSNLFDHNP

SEQ ID NO: 878889 - protein, 134 aa, Homo sapiens
FPAPCPQDWIWHGENCYLFSSGSFNWEKSQEKCLSLDAKLLKINSTADLDFIQQAISYSSFPFWMGLSRRNPSYPWLWEDGSPLMPHLFRVRGAVSQTYPSGTCAYIQRGAVYAENCILAAFSICQKKANLRAQ

SEQ ID NO: 878890 - protein, 484 aa, Homo sapiens
SGAPSRSPPRPRAPKRLGGALSVNIVVHPLPIPSPRGFRLASAQPGSRPGSAMGAPAASLLLLLLLFACCWAPGGANLSQDGYWQEQDLELGTLAPLDEAISSTVWSSPDMLASQDSQPWTSDETVVAGGTVVLKCQVKDHEDSSLQWSNPAQQTLYFGEKRALRDNRIQLVTSTPHELSISISNVALADEGEYTCSIFTMPVRTAKSLVTVLGIPQKPIITGYKSSLREKDTATLNCQSSGSKPAARLTWRKGDQELHGEPTRIQEDPNGKTFTVSSSVTFQVTREDDGASIVCSVNHESLKGADRSTSQRIEVLYTPTAMIRPDPPHPREGQKLLLHCEGRGNPVPQQYLWEKEGSVPPLKMTQESALIFPFLNKSDSGTYGCTATSNMGSYKAYYTLNVNDPSPVPSSSSTYHAIIGGIVAFIVFLLLIMLIFLGHYLIRHKGTYLTHEAKGSDDAPDADTAIINAEGGQSGGDDKKEYFI

SEQ ID NO: 878891 - protein, 450 aa, Homo sapiens
SGAPSRSPPRPRAPKRLGGALSVNIVVHPLPIPSPRGFRLASAQPGSRPGSAMGAPAASLLLLLLLFACCWAPGGANLSQDDSQPWTSDETVVAGGTVVLKCQVKDHEDSSLQWSNPAQQTLYFGEKRALRDNRIQLVTSTPHELSISISNVALADEGEYTCSIFTMPVRTAKSLVTVLGIPQKPIITGYKSSLREKDTATLNCQSSGSKPAARLTWRKGDQELHGEPTRIQEDPNGKTFTVSSSVTFQVTREDDGASIVCSVNHESLKGADRSTSQRIEVLYTPTAMIRPDPPHPREGQKLLLHCEGRGNPVPQQYLWEKEGSVPPLKMTQESALIFPFLNKSDSGTYGCTATSNMGSYKAYYTLNVNDPSPVPSSSSTYHAIIGGIVAFIVFLLLIMLIFLGHYLIRHKGTYLTHEAKGSDDAPDADTAIINAEGGQSGGDDKKEYFI

SEQ ID NO: 878892 - protein, 450 aa, Homo sapiens; identical to SEQ ID NO: 878891

SEQ ID NO: 878893 - protein, 121 aa, Homo sapiens
MTQESALIFPFLNKSDSGTYGCTATSNMGSYKAYYTLNVNDPSPVPSSSSTYHAIIGGIVAFIVFLLLIMLIFLGHYLIRHKGTYLTHEAKGSDDAPDADTAIINAEGGQSGGDDKKEYFI

SEQ ID NO: 878894 - protein, 248 aa, Homo sapiens
HHRGYKSYRIVSLQRASERNDKPREPTRIQEDPNGKTFTVSSSVTFQVTREDDGASIVCSVNHESLKGADRSTSQRIEVLYTPTAMIRPDPPHPREGQKLLLHCEGRGNPVPQQYLWEKEGSVPPLKMTQESALIFPFLNKSDSGTYGCTATSNMGSYKAYYTLNVNDPSPVPSSSSTYHAIIGGIVAFIVFLLLIMLIFLGHYLIRHKGTYLTHEAKGSDDAPDADTAIINAEGGQSGGDDKKEYFI

SEQ ID NO: 878895 - protein, 450 aa, Homo sapiens; identical to SEQ ID NO: 878891

SEQ ID NO: 878896 - protein, 313 aa, Homo sapiens
SGAPSRSPPRPRAPKRLGGALSVNIVVHPLPIPSPRGFRLASAQPGSRPGSAMGAPAASLLLLLLLFACCWAPGGANLSQDDSQPWTSDETVVAGGTVVLKCQVKDHEDSSLQWSNPAQQTLYFGEKRALRDNRIQLVTSTPHELSISISNVALADEGEYTCSIFTMPVRTAKSLVTVLGIPQKPIITGYKSSLREKDTATLNCQSSGSKPAARLTWRKGDQELHGEPTRIQEDPNGKTFTVSSSVTFQVTREDDGASIVCSVNHESLKGADRSTSQRIEVLYTPTAMIRPDPPHPREGQKLLLHCEGRGNPV

SEQ ID NO: 878897 - protein, 323 aa, Homo sapiens
SGAPSRSPPRPRAPKRLGGALSVNIVVHPLPIPSPRGFRLASAQPGSRPGSAMGAPAASLLLLLLLFACCWAPGGANLSQDDSQPWTSDETVVAGGTVVLKCQVKDHEDSSLQWSNPAQQTLYFGEKRALRDNRIQLVTSTPHELSISISNVALADEGEYTCSIFTMPVRTAKSLVTVLGIPQKPIITGYKSSLREKDTATLNCQSSGSKPAARLTWRKGDQELHGEPTRIQEDPNGKTFTVSSSVTFQVTREDDGASIVCSVNHESLKGADRSTSQRIEVLYTPTAMIRPDPPHPREGQKLLLHCEGRGNPVRPREGHELDS

SEQ ID NO: 878898 - protein, 588 aa, Homo sapiens
KQKSIVRSHLQLIKAVSQLIADAGIGGSRFQHSLAITNNFANGDKQMKNSNFPAEVKDLTKRIRTVLMATAQMKEHEKDPEMLVDLQYSLANSYASTPELRRTWLESMAKIHARNGDLSEAAMCYIHIAALIAEYLKRKGYWKVEKICTASLLSEDTHPCDSNSLLTTPSGGSMFSMGWPAFLSITPNIKEEGAMKEDSGMQDTPYNENILVEQLYMCVEFLWKSERYELIADVNKPIIAVFEKQRDFKKLSDLYYDIHRSYLKVAEVVNSEKRLFGRYYRVAFYGQGFFEEEEGKEYIYKEPKLTGLSEISQRLLKLYADKFGADNVKIIQDSNKVNPKDLDPKYAYIQVTYVTPFFEEKEIEDRKTDFEMHHNINRFVFETPFTLSGKKHGGVAEQCKRRTILTTSHLFPYVKKRIQVISQSSTELNPIEVAIDEMSKKVSELNQLCTMEEVDMIRLQLKLQGSVSVKVNAGPMAYARAFLEETNAKKYPDNQVKLLKEIFRQFADACGQALDVNERLIKEDQLEYQEELRSHYKDMLSELSTVMNEQITGRDDLSKRGVDQTCTRVISKATPALPTVSISSSAEV

SEQ ID NO: 878899 - protein, 209 aa, Homo sapiens [sequence omitted]

SEQ ID NO: 878900 - protein, 412 aa, Homo sapiens
MGWPAFLSITPNIKEEGAMKEDSGMQDTPYNENILVEQLYMCVEFLWKSERYELIADVNKPIIAVFEKQRDFKKLSDLYYDIHRSYLKVAEVVNSEKRLFGRYYRVAFYGQGFFEEEEGKEYIYKEPKLTGLSEISQRLLKLYADKFGADNVKIIQDSNKVNPKDLDPKYAYIQVTYVTPFFEEKEIEDRKTDFEMHHNINRFVFETPFTLSGKKHGGVAEQCKRRTILTTSHLFPYVKKRIQVISQSSTELNPIEVAIDEMSKKVSELNQLCTMEEVDMIRLQLKLQGSVSVKVNAGPMAYARAFLEETNAKKYPDNQVKLLKEIFRQFADACGQALDVNERLIKEDQLEYQEELRSHYKDMLSELSTVMNEQITGRDDLSKRGVDQTCTRVISKATPALPTVSISSSAEV

SEQ ID NO: 878901 - protein, 588 aa, Homo sapiens; identical to SEQ ID NO: 878898

SEQ ID NO: 878902 - protein, 124 aa, Homo sapiens
NSTLSSLRVQVSSWVSASPDFLPRPGAEALAMRLMLGRRCPAKLNRYVATGWLSWSFTLSREEHITPSCCGMGVPGSQDSRGHWSTHVFYVQFDLNLRLAILFLLSLVGEQQELGFGCSSRGPS

SEQ ID NO: 878903 - protein, 256 aa, Homo sapiens
RRSRPFPSTGRQEARSKMAVNQSHTENRRGALIPNGESLLKRSPNVELSFPQRSEGSNVFSGRKTGTLFLTSYRVIFITSCSISDPMLSFMMPFDLMTNLTVEQPVFAANFIKGTIQAAPYGGWEGQATFKLVFRNGGAIEFAQLMVKAASAAARGFPLRTLNDWFSSMGIYVITGEGNMCTPQMPCSVIVYGAPPAGYGAPPPGYGAPPAGYGAQPVGNEAAACGIQSLTCAIWSPTSWIRSPTCRIWSPTSRIW

SEQ ID NO: 878904 - protein, 109 aa, Homo sapiens [sequence omitted]

SEQ ID NO: 878905 - protein, 117 aa, Homo sapiens
EGLCRGGAAAEPAARRPISSVRTGSRGSRPSRGRARGAGSPPAVPRSSAGPEPAPPPPPPCRSGRAAREACGRGLHGQRPRPAAEPSRSRAALGARIYTALLWDTPPLDLKDSPRQH

SEQ ID NO: 878906 - protein, 106 aa, Homo sapiens
AGCYWSGDFWMDKDKVSLTKTPKLERGDGGKEVRERASKRKLPFTAGANGEQKDSDTGPPGSCLSWGSHEGALVRSAMGRSCLPSARGCFFGTRGKIMIFLFCFDL

SEQ ID NO: 878907 - protein, 1429 aa, Homo sapiens
MPKGGCPKAPQQEELPLSSDMVEKQTGKKDKDKVSLTKTPKLERGDGGKEVRERASKRKLPFTAGANGEQKDSDTEKQGPERKRIKKEPVTRKAGLLFGMGLSGIRAGYPLSERQQVALLMQMTAEESANSPVDTTPKHPSQSTVCQKGTPNSASKTKDKVNKRNERGETRLHRAAIRGDARRIKELISEGADVNVKDFAGWTALHEACNRGYYDVAKQLLAAGAEVNTKGLDDDTPLHDAANNGHYKVVKLLLRYGGNPQQSNRKGETPLKVANSPTMVNLLLGKGTYTSSEESSTESSEEEDAPSFAPSSSVDGNNTDSEFEKGLKHKAKNPEPQKATAPVKDEYEFDEDDEQDRVPPVDDKHLLKKDYRKETKSNSFISIPKMEVKSYTKNNTIAPKKASHRILSDTSDEEDASVTVGTGEKLRLSAHTILPGSKTREPSNAKQQKEKNKVKKKRKKETKGREVRFGKRSDKFCSSESESESSESGEDDRDSLGSSGCLKGSPLVLKDPSLFSSLSASSTSSHGSSAAQKQNPSHTDQHTKHWRTDNWKTISSPAWSEVSSLSDSTRTRLTSESDYSSEGSSVESLKPVRKRQEHRKRASLSEKKSPFLSSAEGAVPKLDKEGKVVKKHKTKHKHKNKEKGQCSISQELKLKSFTYEYEDSKQKSDKAILLENDLSTENKLKVLKHDRDHFKKEEKLSKMKLEEKEWLFKDEKSLKRIKDTNKDISRSFREEKDRSNKAEKERSLKEKSPKEEKLRLYKEERKKKSKDRPSKLEKKNDLKEDKISKEKEKIFKEDKEKLKKEKVYREDSAFDEYCNKNQFLENEDTKFSLSDDQRDRWFSDLSDSSFDFKGEDSWDSPVTDYRDMKSDSVAKLILETVKEDSKERRRDSRAREKRDYREPFFRKKDRDYLDKNSEKRKEQTEKHKSVPGYLSEKDKKRRESAEAGRDRKDALESCKERRDGRAKPEEVHREELKECGCESGFKDKSDGDFGKGLEPWERHHPAREKEKKDGPDKERKEKTKPERYKEKSSDKDKSEKSILEKCQKDKEFDKCFKEKKDTKEKHKDTHGKDKERKASLDQGKEKKEKAFPGIISEDFSEKKDDKKGKEKSWYIADIFTDESEDDRDSCMGSGFKMGEASDLPRTDGLQEKEEGREAYASDRHRKSSDKQHPERQKDKEPRDRRKDRGAADAGRDKKEKVFEKHKEKKDKESTEKYKDRKDRASVDSTQDKKNKQKLPEKAEKKHAAEDKAKSKHKEKSDKEHSKERKSSRSADAEKSLLEKLEEEALHEYREDSNDKISEVSSDSFTDRGQEPGLTAFLEVSFTEPPGDDKPRESACLPEKLKEKERHRHSSSSSKKSHDRERAKKEKAEKKEKGEDYKEGGSRKDSGQYEKDFLEADAYGVSYNMKADIEDELDKTIELFSTEKKD

SEQ ID NO: 878908 - protein, 1523 aa, Homo sapiens
MPKGGCPKAPQQEELPLSSDMVEKQTGKKDKDKVSLTKTPKLERGDGGKEVRERASKRKLPFTAGANGEQKDSDTEKQGPERKRIKKEPVTRKAGLLFGMGLSGIRAGYPLSERQQVALLMQMTAEESANSPVDTTPKHPSQSTVCQKGTPNSASKTKDKVNKRNERGETRLHRAAIRGDARRIKELISEGADVNVKDFAGWTALHEACNRGYYDVAKQLLAAGAEVNTKGLDDDTPLHDAANNGHYKVVKLLLRYGGNPQQSNRKGETPLKVANSPTMVNLLLGKGTYTSSEESSTESSEEEDAPSFAPSSSVDGNNTDSEFEKGLKHKAKNPEPQKATAPVKDEYEFDEDDEQDRVPPVDDKHLLKKDYRKETKSNSFISIPKMEVKSYTKNNTIAPKKASHRILSDTSDEEDASVTVGTGEKLRLSAHTILPGSKTREPSNAKQQKEKNKVKKKRKKETKGREVRFGKRSDKFCSSESESESSESGEDDRDSLGSSGCLKGSPLVLKDPSLFSSLSASSTSSHGSSAAQKQNPSHTDQHTKHWRTDNWKTISSPAWSEVSSLSDSTRTRLTSESDYSSEGSSVESLKPVRKRQEHRKRASLSEKKSPFLSSAEGAVPKLDKEGKVVKKHKTKHKHKNKEKGQCSISQELKLKSFTYEYEDSKQKSDKAILLENDLSTENKLKVLKHDRDHFKKEEKLSKMKLEEKEWLFKDEKSLKRIKDTNKDISRSFREEKDRSNKAEKERSLKEKSPKEEKLRLYKEERKKKSKDRPSKLEKKNDLKEDKISKEKEKIFKEDKEKLKKEKVYREDSAFDEYCNKNQFLENEDTKFSLSDDQRDRWFSDLSDSSFDFKGEDSWDSPVTDYRDMKSDSVAKLILETVKEDSKERRRDSRAREKRDYREPFFRKKDRDYLDKNSEKRKEQTEKHKSVPGYLSEKDKKRRESAEAGRDRKDALESCKERRDGRAKPEEVHREELKECGCESGFKDKSDGDFGKGLEPWERHHPAREKEKKDGPDKERKEKTKPERYKEKSSDKDKSEKSILEKCQKDKEFDKCFKEKKDTKEKHKDTHGKDKERKASLDQGKEKKEKAFPGIISEDFSEKKDDKKGKEKSWYIADIFTDESEDDRDSCMGSGFKMGEASDLPRTDGLQEKEEGREAYASDRHRKSSDKQHPERQKDKEPRDRRKDRGAADAGRDKKEKVFEKHKEKKDKESTEKYKDRKDRASVDSTQDKKNKQKLPEKAEKKHAAEDKAKSKHKEKSDKEHSKERKSSRSADAEKSLLEKLEEEALHEYREDSNDKISEVSSDSFTDRGQEPGLTAFLEVSFTEPPGDDKPRESACLPEKLKEKERHRHSSSSSKKSHDRERAKKEKAEKKEKGEDYKEGGSRKDSGQYEKDFLEADAYGVSYNMKADIEDELDKTIELFSTEKKDKNDSEREPSKKIEKELKPYGSSAINILKEKKKREKHREKWRDEKERHRDRHADGLLRHHRDELLRHHRDEQKPATRDKDSPPRVLKDKSRDEGP

SEQ ID NO: 878909 - protein, 1400 aa, Homo sapiens
MPPAQSLLWCCKAGTLLEAPWHEMEVPRSKKKEKQGPERKRIKKEPVTRKAGLLFGMGLSGIRAGYPLSERQQVALLMQMTAEESANSPVDTTPKHPSQSTVCQKGTPNSASKTKDKVNKRNERGETRLHRAAIRGDARRIKELISEGADVNVKDFAGWTALHEACNRGYYDVAKQLLAAGAEVNTKGLDDDTPLHDAANNGHYKVVKLLLRYGGNPQQSNRKGETPLKVANSPTMVNLLLGKGTYTSSEESSTESSEEEDAPSFAPSSSVDGNNTDSEFEKGLKHKAKNPEPQKATAPVKDEYEFDEDDEQDRVPPVDDKHLLKKDYRKETKSNSFISIPKMEVKSYTKNNTIAPKKASHRILSDTSDEEDASVTVGTGEKLRLSAHTILPGSKTREPSNAKQQKEKNKVKKKRKKETKGREVRFGKRSDKFCSSESESESSESGEDDRDSLGSSGCLKGSPLVLKDPSLFSSLSASSTSSHGSSAAQKQNPSHTDQHTKHWRTDNWKTISSPAWSEVSSLSDSTRTRLTSESDYSSEGSSVESLKPVRKRQEHRKRASLSEKKSPFLSSAEGAVPKLDKEGKVVKKHKTKHKHKNKEKGQCSISQELKLKSFTYEYEDSKQKSDKAILLENDLSTENKLKVLKHDRDHFKKEEKLSKMKLEEKEWLFKDEKSLKRIKDTNKDISRSFREEKDRSNKAEKERSLKEKSPKEEKLRLYKEERKKKSKDRPSKLEKKNDLKEDKISKEKEKIFKEDKEKLKKEKVYREDSAFDEYCNKNQFLENEDTKFSLSDDQRDRWFSDLSDSSFDFKGEDSWDSPVTDYRDMKSDSVAKLILETVKEDSKERRRDSRAREKRDYREPFFRKKDRDYLDKNSEKRKEQTEKHKSVPGYLSEKDKKRRESAEAGRDRKDALESCKERRDGRAKPEEVHREELKECGCESGFKDKSDGDFGKGLEPWERHHPAREKEKKDGPDKERKEKTKPERYKEKSSDKDKSEKSILEKCQKDKEFDKCFKEKKDTKEKHKDTHGKDKERKASLDQGKEKKEKAFPGIISEDFSEKKDDKKGKEKSWYIADIFTDESEDDRDSCMGSGFKMGEASDLPRTDGLQEKEEGREAYASDRHRKSSDKQHPERQKDKEPRDRRKDRGAADAGRDKKEKVFEKHKEKKDKESTEKYKDRKDRASVDSTQDKKNKQKLPEKAEKKHAAEDKAKSKHKEKSDKEHSKERKSSRSADAEKSLLEKLEEEALHEYREDSNDKISEVSSDSFTDRGQEPGLTAFLEVSFTEPPGDDKPRESACLPEKLKEKERHRHSSSSSKKSHDRERAKKEKAEKKEKGEDYKEGGSRKDSGQYEKDFLEADAYGVSYNMKADIEDELDKTIELFSTEKKDKNDSEREPSKKIEK

SEQ ID NO: 878910 - protein, 274 aa, Homo sapiens
MPKGGCPKAPQQEELPLSSDMVEKQTGKKDKDKVSLTKTPKLERGDGGKEVRERASKRKLPFTAGANGEQKDSDTEKQGPERKRIKKEPVTRKAGLLFGMGLSGIRAGYPLSERQQVALLMQMTAEESANSPVDTTPKHPSQSTVCQKGTPNSASKTKDKVNKRNERGETRLHRAAIRGDARRIKELISEGADVNVKDFAGWTALHEACNRGYYDVAKQLLAAGAEVNTKGLDDDTPLHDAANNGHYKGWHPPVLHTSGLSWHLGGSVALFPRS

SEQ ID NO: 878911 - protein, 1190 aa, Homo sapiens
MGSRRTRTQVVKLLLRYGGNPQQSNRKGETPLKVANSPTMVNLLLGKGTYTSSEESSTESSEEEDAPSFAPSSSVDGNNTDSEFEKGLKHKAKNPEPQKATAPVKDEYEFDEDDEQDRVPPVDDKHLLKKDYRKETKSNSFISIPKMEVKSYTKNNTIAPKKASHRILSDTSDEEDASVTVGTGEKLRLSAHTILPGSKTREPSNAKQQKEKNKVKKKRKKETKGREVRFGKRSDKFCSSESESESSESGEDDRDSLGSSGCLKGSPLVLKDPSLFSSLSASSTSSHGSSAAQKQNPSHTDQHTKHWRTDNWKTISSPAWSEVSSLSDSTRTRLTSESDYSSEGSSVESLKPVRKRQEHRKRASLSEKKSPFLSSAEGAVPKLDKEGKVVKKHKTKHKHKNKEKGQCSISQELKLKSFTYEYEDSKQKSDKAILLENDLSTENKLKVLKHDRDHFKKEEKLSKMKLEEKEWLFKDEKSLKRIKDTNKDISRSFREEKDRSNKAEKERSLKEKSPKEEKLRLYKEERKKKSKDRPSKLEKKNDLKEDKISKEKEKIFKEDKEKLKKEKVYREDSAFDEYCNKNQFLENEDTKFSLSDDQRDRWFSDLSDSSFDFKGEDSWDSPVTDYRDMKSDSVAKLILETVKEDSKERRRDSRAREKRDYREPFFRKKDRDYLDKNSEKRKEQTEKHKSVPGYLSEKDKKRRESAEAGRDRKDALESCKERRDGRAKPEEVHREELKECGCESGFKDKSDGDFGKGLEPWERHHPAREKEKKDGPDKERKEKTKPERYKEKSSDKDKSEKSILEKCQKDKEFDKCFKEKKDTKEKHKDTHGKDKERKASLDQGKEKKEKAFPGIISEDFSEKKDDKKGKEKSWYIADIFTDESEDDRDSCMGSGFKMGEASDLPRTDGLQEKEEGREAYASDRHRKSSDKQHPERQKDKEPRDRRKDRGAADAGRDKKEKVFEKHKEKKDKESTEKYKDRKDRASVDSTQDKKNKQKLPEKAEKKHAAEDKAKSKHKEKSDKEHSKERKSSRSADAEKSLLEKLEEEALHEYREDSNDKISEVSSDSFTDRGQEPGLTAFLEVSFTEPPGDDKPRESACLPEKLKEKERHRHSSSSSKKSHDRERAKKEKAEKKEKGEDYKEGGSRKDSGQYEKDFLEADAYGVSYNMKADIEDELDKTIELFSTEKKD

SEQ ID NO: 878912 - protein, 248 aa, Homo sapiens
MESDKDKVSLTKTPKLERGDGGKEVRERASKRKLPFTAGANGEQKDSDTEKQGPERKRIKKEPVTRKAGLLFGMGLSGIRAGYPLSERQQVALLMQMTAEESANSPVDTTPKHPSQSTVCQKGTPNSASKTKDKVNKRNERGETRLHRAAIRGDARRIKELISEGADVNVKDFAGWTALHEACNRGYYDVAKQLLAAGAEVNTKGLDDDTPLHDAANNGHYKGWHPPVLHTSGLSWHLGGSVALFPRS

SEQ ID NO: 878913 - protein, 274 aa, Homo sapiens; identical to SEQ ID NO: 878910

SEQ ID NO: 878914 - protein, 421 aa, Homo sapiens
MPKGGCPKAPQQEELPLSSDMVEKQTGKKDKDKVSLTKTPKLERGDGGKEVRERASKRKLPFTAGANGEQKDSDTEKQGPERKRIKKEPVTRKAGLLFGMGLSGIRAGYPLSERQQVALLMQMTAEESANSPVDTTPKHPSQSTVCQKGTPNSASKTKDKVNKRNERGETRLHRAAIRGDARRIKELISEGADVNVKDFAGWTALHEACNRGYYDVAKQLLAAGAEVNTKGLDDDTPLHDAANNGHYKIAPPPSLAEPLKELFRQQEAVRGKLRLQHSIEREKLIVSCEQEILRVHCRAARTIANQAVPFSACTMLLDSEVYNMPLESQGDENKSVRDRFNARQFISWLQDVDDKYDRMKTCLLMRQQHEAAALNAVQRMEWQLKVQELDPAGHKSLCVNEVPSFYVPMVDVNDDFVLLPA

SEQ ID NO: 878915 - protein, 806 aa, Homo sapiens
IGGSRGSQFDGDSPLLSWLPFGKGQEEERVRRGRAGQKGRPVRAARERRDGRAKPEEAHREELKECGCESGFKDKSDGDFGKGLEPWERHHPAREKEKKDGPDKERKEKKNQKDRSNKAEKERSLKEKSPKEEKLRLYKEERKKKSKDRPSKLEKKNDLKEDKISKEKEKIFKEDKEKLKKEKVYREDSAFDEYCNKNQFLENEDTKFSLSDDQRDRWFSDLSDSSFDFKGEDSWDSPVTDYRDMKSDSVAKLILETVKEDSKERRRDSRAREKRDYREPFFRKKDRDYLDKNSEKRKEQTEKHKSVPGYLSEKDKKRRESAEAGRDRKDALESCKERRDGRAKPEEVHREELKECGCESGFKDKSDGDFGKGLEPWERHHPAREKEKKDGPDKERKEKTKPERYKEKSSDKDKSEKSILEKCQKDKEFDKCFKEKKDTKEKHKDTHGKDKERKASLDQGKEKKEKAFPGIISEDFSEKKDDKKGKEKSWYIADIFTDESEDDRDSCMGSGFKMGEASDLPRTDGLQEKEEGREAYASDRHRKSSDKQHPERQKDKEPRDRRKDRGAADAGRDKKEKVFEKHKEKKDKESTEKYKDRKDRASVDSTQDKKNKQKLPEKAEKKHAAEDKAKSKHKEKSDKEHSKERKSSRSADAEKSLLEKLEEEALHEYREDSNDKISEVSSDSFTDRGQEPGLTAFLEVSFTEPPGDDKPRESACLPEKLKEKERHRHSSSSSKKSHDRERAKKEKAEKKEKGEDYKEGGSRKDSGQYEKDFLEADAYGVSYNMKADIEDELDKTIELFSTEKKD

SEQ ID NO: 878916 - protein, 730 aa, Homo sapiens
RYKEKSSDKDKSEKSILEKCQKDKEFDKVLARGKKIPRKNIKTHMERSLKEKSPKEEKLRLYKEERKKKSKDRPSKLEKKNDLKEDKISKEKEKIFKEDKEKLKKEKVYREDSAFDEYCNKNQFLENEDTKFSLSDDQRDRWFSDLSDSSFDFKGEDSWDSPVTDYRDMKSDSVAKLILETVKEDSKERRRDSRAREKRDYREPFFRKKDRDYLDKNSEKRKEQTEKHKSVPGYLSEKDKKRRESAEAGRDRKDALESCKERRDGRAKPEEVHREELKECGCESGFKDKSDGDFGKGLEPWERHHPAREKEKKDGPDKERKEKTKPERYKEKSSDKDKSEKSILEKCQKDKEFDKCFKEKKDTKEKHKDTHGKDKERKASLDQGKEKKEKAFPGIISEDFSEKKDDKKGKEKSWYIADIFTDESEDDRDSCMGSGFKMGEASDLPRTDGLQEKEEGREAYASDRHRKSSDKQHPERQKDKEPRDRRKDRGAADAGRDKKEKVFEKHKEKKDKESTEKYKDRKDRASVDSTQDKKNKQKLPEKAEKKHAAEDKAKSKHKEKSDKEHSKERKSSRSADAEKSLLEKLEEEALHEYREDSNDKISEVSSDSFTDRGQEPGLTAFLEVSFTEPPGDDKPRESACLPEKLKEKERHRHSSSSSKKSHDRERAKKEKAEKKEKGEDYKEGGSRKDSGQYEKDFLEADAYGVSYNMKADIEDELDKTIELFSTEKKD

SEQ ID NO: 878917 - protein, 694 aa, Homo sapiens
ARYPTPPESERSLKEKSPKEEKLRLYKEERKKKSKDRPSKLEKKNDLKEDKISKEKEKIFKEDKEKLKKEKVYREDSAFDEYCNKNQFLENEDTKFSLSDDQRDRWFSDLSDSSFDFKGEDSWDSPVTDYRDMKSDSVAKLILETVKEDSKERRRDSRAREKRDYREPFFRKKDRDYLDKNSEKRKEQTEKHKSVPGYLSEKDKKRRESAEAGRDRKDALESCKERRDGRAKPEEVHREELKECGCESGFKDKSDGDFGKGLEPWERHHPAREKEKKDGPDKERKEKTKPERYKEKSSDKDKSEKSILEKCQKDKEFDKCFKEKKDTKEKHKDTHGKDKERKASLDQGKEKKEKAFPGIISEDFSEKKDDKKGKEKSWYIADIFTDESEDDRDSCMGSGFKMGEASDLPRTDGLQEKEEGREAYASDRHRKSSDKQHPERQKDKEPRDRRKDRGAADAGRDKKEKVFEKHKEKKDKESTEKYKDRKDRASVDSTQDKKNKQKLPEKAEKKHAAEDKAKSKHKEKSDKEHSKERKSSRSADAEKSLLEKLEEEALHEYREDSNDKISEVSSDSFTDRGQEPGLTAFLEVSFTEPPGDDKPRESACLPEKLKEKERHRHSSSSSKKSHDRERAKKEKAEKKEKGEDYKEGGSRKDSGQYEKDFLEADAYGVSYNMKADIEDELDKTIELFSTEKKD

SEQ ID NO: 878918 - protein, 387 aa, Homo sapiens
NTVAQAQAADGAGPEDDTEASRAAAPAEGPPGGIQPEAAEPKPTAEAPKAPRVEEIPQRMTRNRAQMLANQSKQGPPPSEKECAPTPAPVTRAKARGSEDDDAQAQHPRKRRFQRSTQQLQQQLNTSTQQTREVIQQTLAAIVDAIKLDAIEPYHSDRANPYFEYLQIRKKIEEKRKILCCITPQAPQCYAEYVTYTGSYLLDGKPLSKLHIPVIAPPPSLAEPLKELFRQQEAVRGKLRLQHSIEREKLIVSCEQEILRVHCRAARTIANQAVPFSACTMLLDSEVYNMPLESQGDENKSVRDRFNARQFISWLQDVDDKYDRMKTCLLMRQQHEAAALNAVQRMEWQLKVQELDPAGHKSLCVNEVPSFYVPMVDVNDDFVLLPA

SEQ ID NO: 878919 - protein, 387 aa, Homo sapiens
MGEASDLPRTDGLQEKEEGREAYASDRHRKSSDKQHPERQKDKEPRDRRKDRGAADAGRDKKEKVFEKHKEKKDKESTEKYKDRKDRASVDSTQDKKNKQKLPEKAEKKHAAEDKAKSKHKEKSDKEHSKERKSSRSADAEKSLLEKLEEEALHEYREDSNDKISEVSSDSFTDRGQEPGLTAFLEVSFTEPPGDDKPRESACLPEKLKEKERHRHSSSSSKKSHDRERAKKEKAEKKEKGEDYKEGGSRKDSGQYEKDFLEADAYGVSYNMKADIEDELDKTIELFSTEKKDKNDSEREPSKKIEKELKPYGSSAINILKEKKKREKHREKWRDEKERHRDRHADGLLRHHRDELLRHHRDEQKPATRDKDSPPRVLKDKSRDEGP

SEQ ID NO: 878920 - protein, 115 aa, Homo sapiens
VDAIKLDAIEPYHSDRANPYFEYLQIRKKIEEKRKILCCITPQAPQCYAEYVTYTGSYLLDGKPLSKLHIPVVSAGPGRATAFSLWDASGAPSHGFLQPVLSHSWPLTSLDLSAT

SEQ ID NO: 878921 - protein, 277 aa, Homo sapiens
IGGSRGSQFDGDSPLLSWLPFGKGQEEERVRRGRAGQKGRPVRAARERRDGRAKPEEAHREELKECGCESGFKDKSDGDFGKGLEPWERHHPAREKEKKDGPDKERKEKKNQKDRSNKAEKERSLKEKSPKEEKLRLYKEERKKKSKDRPSKLEKKNDLKEDKISKEKEKIFKEDKEKLKKEKVYREDSAFDEYCNKNQFLENEDTKFSLSDDQRDRWFSDLSDSSFDFKGEDSWDSPVTDYRDMKSDSVAKLILETVKEDSKESEGRLEVRPRSYS

SEQ ID NO: 878922 - protein, 101 aa, Homo sapiens
MADHGIPEPLSCLGKNQQDKDKVSLTKTPKLERGDGGKEVRERAISALCQKYPRKHAVLMNFLFTMLREEGGFEYKRAIVDCIISIIEENSESRRSLTDPV

SEQ ID NO: 878923 - protein, 1380 aa, Homo sapiens
MPKGGCPKAPQQEELPLSSDMVEKQTGKKDKDKVSLTKTPKLERGDGGKEVRERASKRKLPFTAGANGEQKDSDTEKQGPERKRIKKEPVTRKAGLLFGMGLSGIRAGYPLSERQQVALLMQMTAEESANSPVDTTPKHPSQSTVCQKGTPNSASKTKDKVNKRNERGETRLHRAAIRGDARRIKELISEGADVNVKDFAGWTALHEACNRGYYDVAKQLLAAGAEVNTKGLDDDTPLHDAANNGHYKVVKLLLRYGGNPQQSNRKGETPLKVANSPTMVNLLLGKGTYTSSEESSTESSEEEDAPSFAPSSSVDGNNTDSEFEKGLKHKAKNPEPQKATAPVKDEYEFDEDDEQDRVPPVDDKHLLKKDYRKETKSNSFISIPKMEVKSYTKNNTIAPKKASHRILSDTSDEEDASVTVGTGEKLRLSAHTILPGSKTREPSNAKQQKEKNKVKKKRKKETKGREVRFGKRSDKFCSSESESESSESGEDDRDSLGSSGCLKGSPLVLKDPSLFSSLSASSTSSHGSSAAQKQNPSHTDQHTKHWRTDNWKTISSPAWSEVSSLSDSTRTRLTSESDYSSEGSSVESLKPVRKRQEHRKRASLSEKKSPFLSSAEGAVPKLDKEGKVVKKHKTKHKHKNKEKGQCSISQELKLKSFTYEYEDSKQKSDKAILLENDLSTENKLKVLKHDRDHFKKEEKLSKMKLEEKEWLFKDEKSLKRIKDTNKDISRSFREEKDRSNKAEKERSLKEKSPKEEKLRLYKEERKKKSKDRPSKLEKKNDLKEDKISKEKEKIFKEDKEKLKKEKVYREDSAFDEYCNKNQFLENEDTKFSLSDDQRDRWFSDLSDSSFDFKGEDSWDSPVTDYRDMKSDSVAKLILETVKEDSKERRRDSRAREKRDYREPFFRKKDRDYLDKNSEKRKEQTEKHKSVPGYLSEKGQVHGDFGKGLEPWERHHPAREKEKKDGPDKERKEKTKPERYKEKSSDKDKSEKSILEKCQKDKEFDKCFKEKKDTKEKHKDTHGKDKERKASLDQGKEKKEKAFPGIISEDFSEKKDDKKGKEKSWYIADIFTDESEDDRDSCMGSGFKMGEASDLPRTDGLQEKEEGREAYASDRHRKSSDKQHPERQKDKEPRDRRKDRGAADAGRDKKEKVFEKHKEKKDKESTEKYKDRKDRASVDSTQDKKNKQKLPEKAEKKHAAEDKAKSKHKEKSDKEHSKERKSSRSADAEKSLLEKLEEEALHEYREDSNDKISEVSSDSFTDRGQEPGLTAFLEVSFTEPPGDDKPRESACLPEKLKEKERHRHSSSSSKKSHDRERAKKEKAEKKEKGEDYKEGGSRKDSGQYEKDFLEADAYGVSYNMKADIEDELDKTIELFSTEKKD

SEQ ID NO: 878924 - protein, 1469 aa, Homo sapiens
MPKGGCPKAPQQEELPLSSDMVEKQTGKKDKDKVSLTKTPKLERGDGGKEVRERASKRKLPFTAGANGEQKDSDTVLCVDAFRCLQPSPCCGAARLVRSSKHHGMRWRFLEAKKKEKQGPERKRIKKEPVTRKAGLLFGMGLSGIRAGYPLSERQQVALLMQMTAEESANSPVDTTPKHPSQSTVCQKGTPNSASKTKDKVNKRNERGETRLHRAAIRGDARRIKELISEGADVNVKDFAGWTALHEACNRGYYDVAKQLLAAGAEVNTKGLDDDTPLHDAANNGHYKVVKLLLRYGGNPQQSNRKGETPLKVANSPTMVNLLLGKGTYTSSEESSTESSEEEDAPSFAPSSSVDGNNTDSEFEKGLKHKAKNPEPQKATAPVKDEYEFDEDDEQDRVPPVDDKHLLKKDYRKETKSNSFISIPKMEVKSYTKNNTIAPKKASHRILSDTSDEEDASVTVGTGEKLRLSAHTILPGSKTREPSNAKQQKEKNKVKKKRKKETKGREVRFGKRSDKFCSSESESESSESGEDDRDSLGSSGCLKGSPLVLKDPSLFSSLSASSTSSHGSSAAQKQNPSHTDQHTKHWRTDNWKTISSPAWSEVSSLSDSTRTRLTSESDYSSEGSSVESLKPVRKRQEHRKRASLSEKKSPFLSSAEGAVPKLDKEGKVVKKHKTKHKHKNKEKGQCSISQELKLKSFTYEYEDSKQKSDKAILLENDLSTENKLKVLKHDRDHFKKEEKLSKMKLEEKEWLFKDEKSLKRIKDTNKDISRSFREEKDRSNKAEKERSLKEKSPKEEKLRLYKEERKKKSKDRPSKLEKKNDLKEDKISKEKEKIFKEDKEKLKKEKVYREDSAFDEYCNKNQFLENEDTKFSLSDDQRDRWFSDLSDSSFDFKGEDSWDSPVTDYRDMKSDSVAKLILETVKEDSKERRRDSRAREKRDYREPFFRKKDRDYLDKNSEKRKEQTEKHKSVPGYLSEKDKKRRESAEAGRDRKDALESCKERRDGRAKPEEVHREELKECGCESGFKDKSDGDFGKGLEPWERHHPAREKEKKDGPDKERKEKTKPERYKEKSSDKDKSEKSILEKCQKDKEFDKCFKEKKDTKEKHKDTHGKDKERKASLDQGKEKKEKAFPGIISEDFSEKKDDKKGKEKSWYIADIFTDESEDDRDSCMGSGFKMGEASDLPRTDGLQEKEEGREAYASDRHRKSSDKQHPERQKDKEPRDRRKDRGAADAGRDKKEKVFEKHKEKKDKESTEKYKDRKDRASVDSTQDKKNKQKLPEKAEKKHAAEDKAKSKHKEKSDKEHSKERKSSRSADAEKSLLEKLEEEALHEYREDSNDKISEVSSDSFTDRGQEPGLTAFLEVSFTEPPGDDKPRESACLPEKLKEKERHRHSSSSSKKSHDRERAKKEKAEKKEKGEDYKEGGSRKDSGQYEKDFLEADAYGVSYNMKADIEDELDKTIELFSTEKKD

SEQ ID NO: 878925 - protein, 1400 aa, Homo sapiens; identical to SEQ ID NO: 878909

SEQ ID NO: 878926 - protein, 274 aa, Homo sapiens; identical to SEQ ID NO: 878910

SEQ ID NO: 878927 - protein, 1214 aa, Homo sapiens
MRIPNPGPLLTTLHNGHYKVVKLLLRYGGNPQQSNRKGETPLKVANSPTMVNLLLGKGTYTSSEESSTESSEEEDAPSFAPSSSVDGNNTDSEFEKGLKHKAKNPEPQKATAPVKDEYEFDEDDEQDRVPPVDDKHLLKKDYRKETKSNSFISIPKMEVKSYTKNNTIAPKKASHRILSDTSDEEDASVTVGTGEKLRLSAHTILPGSKTREPSNAKQQKEKNKVKKKRKKETKGREVRFGKRSDKFCSSESESESSESGEDDRDSLGSSGCLKGSPLVLKDPSLFSSLSASSTSSHGSSAAQKQNPSHTDQHTKHWRTDNWKTISSPAWSEVSSLSDSTRTRLTSESDYSSEGSSVESLKPVRKRQEHRKRASLSEKKSPFLSSAEGAVPKLDKEGKVVKKHKTKHKHKNKEKGQCSISQELKLKSFTYEYEDSKQKSDKAILLENDLSTENKLKVLKHDRDHFKKEEKLSKMKLEEKEWLFKDEKSLKRIKDTNKDISRSFREEKDRSNKAEKERSLKEKSPKEEKLRLYKEERKKKSKDRPSKLEKKNDLKEDKISKEKEKIFKEDKEKLKKEKVYREDSAFDEYCNKNQFLENEDTKFSLSDDQRDRWFSDLSDSSFDFKGEDSWDSPVTDYRDMKSDSVAKLILETVKEDSKERRRDSRAREKRDYREPFFRKKDRDYLDKNSEKRKEQTEKHKSVPGYLSEKDKKRRESAEAGRDRKDALESCKERRDGRAKPEEVHREELKECGCESGFKDKSDGDFGKGLEPWERHHPAREKEKKDGPDKERKEKTKPERYKEKSSDKDKSEKSILEKCQKDKEFDKCFKEKKDTKEKHKDTHGKDKERKASLDQGKEKKEKAFPGIISEDFSEKKDDKKGKEKSWYIADIFTDESEDDRDSCMGSGFKMGEASDLPRTDGLQEKEEGREAYASDRHRKSSDKQHPERQKDKEPRDRRKDRGAADAGRDKKEKVFEKHKEKKDKESTEKYKDRKDRASVDSTQDKKNKQKLPEKAEKKHAAEDKAKSKHKEKSDKEHSKERKSSRSADAEKSLLEKLEEEALHEYREDSNDKISEVSSDSFTDRGQEPGLTAFLEVSFTEPPGDDKPRESACLPEKLKEKERHRHSSSSSKKSHDRERAKKEKAEKKEKGEDYKEGGSRKDSGQYEKDFLEADAYGVSYNMKADIEDELDKTIELFSTEKKDKNDSEREPSKKIEK

SEQ ID NO: 878928 - protein, 1077 aa, Homo sapiens
YGYGYEAGVKSNSFISIPKMEVKSYTKNNTIAPKKASHRILSDTSDEEDASVTVGTGEKLRLSAHTILPGSKTREPSNAKQQKEKNKVKKKRKKETKGREVRFGKRSDKFCSSESESESSESGEDDRDSLGSSGCLKGSPLVLKDPSLFSSLSASSTSSHGSSAAQKQNPSHTDQHTKHWRTDNWKTISSPAWSEVSSLSDSTRTRLTSESDYSSEGSSVESLKPVRKRQEHRKRASLSEKKSPFLSSAEGAVPKLDKEGKVVKKHKTKHKHKNKEKGQCSISQELKLKSFTYEYEDSKQKSDKAILLENDLSTENKLKVLKHDRDHFKKEEKLSKMKLEEKEWLFKDEKSLKRIKDTNKDISRSFREEKDRSNKAEKERSLKEKSPKEEKLRLYKEERKKKSKDRPSKLEKKNDLKEDKISKEKEKIFKEDKEKLKKEKVYREDSAFDEYCNKNQFLENEDTKFSLSDDQRDRWFSDLSDSSFDFKGEDSWDSPVTDYRDMKSDSVAKLILETVKEDSKERRRDSRAREKRDYREPFFRKKDRDYLDKNSEKRKEQTEKHKSVPGYLSEKDKKRRESAEAGRDRKDALESCKERRDGRAKPEEVHREELKECGCESGFKDKSDGDFGKGLEPWERHHPAREKEKKDGPDKERKEKTKPERYKEKSSDKDKSEKSILEKCQKDKEFDKCFKEKKDTKEKHKDTHGKDKERKASLDQGKEKKEKAFPGIISEDFSEKKDDKKGKEKSWYIADIFTDESEDDRDSCMGSGFKMGEASDLPRTDGLQEKEEGREAYASDRHRKSSDKQHPERQKDKEPRDRRKDRGAADAGRDKKEKVFEKHKEKKDKESTEKYKDRKDRASVDSTQDKKNKQKLPEKAEKKHAAEDKAKSKHKEKSDKEHSKERKSSRSADAEKSLLEKLEEEALHEYREDSNDKISEVSSDSFTDRGQEPGLTAFLEVSFTEPPGDDKPRESACLPEKLKEKERHRHSSSSSKKSHDRERAKKEKAEKKEKGEDYKEGGSRKDSGQYEKDFLEADAYGVSYNMKADIEDELDKTIELFSTEKKDKNDSEREPSKKIEK

SEQ ID NO: 878929 - protein, 124 aa, Homo sapiens
MPKGGCPKAPQQEELPLSSDMVEKQTGKKDKDKVSLTKTPKLERGDGGKEVRERASKRKLPFTAGANGEQKDSDTGPPGSCLSWGSHEGALVRSAMGRSCLPSARGCFFGTRGKIMIFLFCFDL

SEQ ID NO: 878930 - protein, 75 aa, Homo sapiens
ATRPVTWIQVYRIKTCLLMRQQHEAAALNAVQRMEWQLKVQELDPAGHKSLCVNEVPSFYVPMVDVNDDFVLLPA

SEQ ID NO: 878931 - protein, 317 aa, Homo sapiens
GRCPPESTEKYKDRKDRASVDSTQDKKNKQKLPEKAEKKHAAEDKAKSKHKEKSDKEHSKERKSSRSADAEKSLLEKLEEEALHEYREDSNDKISEVSSDSFTDRGQEPGLTAFLEVSFTEPPGDDKPRESACLPEKLKEKERHRHSSSSSKKSHDRERAKKEKAEKKEKGEDYKEGGSRKDSGQYEKDFLEADAYGVSYNMKADIEDELDKTIELFSTEKKDKNDSEREPSKKIEKELKPYGSSAINILKEKKKREKHREKWRDEKERHRDRHADGLLRHHRDELLRHHRDEQKPATRDKDSPPRVLKDKSRDEGP

SEQ ID NO: 878932 - protein, 467 aa, Homo sapiens
PPYQLPSSSLSTFTVNDSGRRLGPEKWIRRLRRMESESESGAAADTPPLETLSFHGDEEIIEVVELDPGPPDPDDLAQEMEDVDFEEEEEEEGNEEGWVLEPQEGVVGSMEGPDDSEVTFALHSASVFCVSLDPKTNTLAVTGGEDDKAFVWRLSDGELLFECAGHKDSVTCAGFSHDSTLVATGDMSGLLKVWQVDTKEEVWSFEAGDLEWMEWHPRAPVLLAGTADGNTWMWKVPNGDCKTFQGPNCPATCGRVLPDGKRAVVGYEDGTIRIWDLKQGSPIHVLKGTEGHQGPLTCVAANQDGSLILTGSVDCQAKLVSATTGKVVGVFRPETVASQPSLGEGEESESNSVESLGFCSVMPLAAVGYLDGTLAIYDLATQTLRHQCQHQSGIVQLLWEAGTAVVYTCSLDGIVRLWDARTGRLLTDYRGHTAEILDFALSKDASLVVTTSGDHKAKVFCVQRPDR

SEQ ID NO: 878933 - protein, 451 aa, Homo sapiens
GEFGTREREKWIRRLRRMESESESGAAADTPPLETLSFHGDEEIIEVVELDPGPPDPDDLAQEMEDVDFEEEEEEEGNEEGWVLEPQEGVVGSMEGPDDSEVTFALHSASVFCVSLDPKTNTLAVTGGEDDKAFVWRLSDGELLFECAGHKDSVTCAGFSHDSTLVATGDMSGLLKVWQVDTKEEVWSFEAGDLEWMEWHPRAPVLLAGTADGNTWMWKVPNGDCKTFQGPNCPATCGRVLPDGKRAVVGYEDGTIRIWDLKQGSPIHVLKGTEGHQGPLTCVAANQDGSLILTGSVDCQAKLVSATTGKVVGVFRPETVASQPSLGEGEESESNSVESLGFCSVMPLAAVGYLDGTLAIYDLATQTLRHQCQHQSGIVQLLWEAGTAVVYTCSLDGIVRLWDARTGRLLTDYRGHTAEILDFALSKDASLVVTTSGDHKAKVFCVQRPDR

SEQ ID NO: 878934 - protein, 551 aa, Homo sapiens
RGSSSASSRRADSGRRLGPEKWIRRLRRMESESESGAAADTPPLETLSFHGDEEIIEVVELDPGPPDPDDLAQEMEDVDFEEEEEEEGNEEGWVLEPQEGVVGSMEGPDDSEVTFALHSASVFCVSLDPKTNTLAVTGGEDDKAFVWRLSDGELLFECAGHKDSVTCAGFSHDSTLVATGDMSGLLKVWQVDTKEEVWSFEAGDLEWMEWHPRAPVLLAGTADGNTWMWKVPNGDCKTFQGPNCPATCGRVLPDGKRAVVGYEDGTIRIWDLKQGSPIHVLKGTEGHQGPLTCVAANQDGSLILTGSVDCQAKLVSATTGKVSGPGARLGPPLSRLLSFLPGSSLSPLPTVFLSIKHPDSVSSSDLSGFQVVGVFRPETVASQPSLGEGEESESNSVESLGFCSVLSEDGERGLWEGPGLGAREDGRACEIQALMSLHGTLLWPGMPLAAVGYLDGTLAIYDLATQTLRHQCQHQSGIVQLLWEAGTAVVYTCSLDGIVRLWDARTGRLLTDYRGHTAEILDFALSKDASLVVTTSGDHKAKVFCVQRPDR

SEQ ID NO: 878935 - protein, 462 aa, Homo sapiens
RGSSSASSRRADSGRRLGPEKWIRRLRRMESESESGAAADTPPLETLSFHGDEEIIEVVELDPGPPDPDDLAQEMEDVDFEEEEEEEGNEEGWVLEPQEGVVGSMEGPDDSEVTFALHSASVFCVSLDPKTNTLAVTGGEDDKAFVWRLSDGELLFECAGHKDSVTCAGFSHDSTLVATGDMSGLLKVWQVDTKEEVWSFEAGDLEWMEWHPRAPVLLAGTADGNTWMWKVPNGDCKTFQGPNCPATCGRVLPDGKRAVVGYEDGTIRIWDLKQGSPIHVLKGTEGHQGPLTCVAANQDGSLILTGSVDCQAKLVSATTGKVVGVFRPETVASQPSLGEGEESESNSVESLGFCSVMPLAAVGYLDGTLAIYDLATQTLRHQCQHQSGIVQLLWEAGTAVVYTCSLDGIVRLWDARTGRLLTDYRGHTAEILDFALSKDASLVVTTSGDHKAKVFCVQRPDR

SEQ ID NO: 878936 - protein, 444 aa, Homo sapiens
  misc_feature (444)..(444): Xaa can be any naturally occurring amino acid
RGSSSASSRRADSGRRLGPEKWIRRLRRMESESESGAAADTPPLETLSFHGDEEIIEVVELDPGPPDPDDLAQEMEDVDFEEEEEEEGNEEGWVLEPQEGVVGSMEGPDDSEVTFALHSASVFCVSLDPKTNTLAVTGGEDDKAFVWRLSDGELLFECAGHKDSVTCAGFSHDSTLVATGDMSGLLKVWQVDTKEEVWSFEAGDLEWMEWHPRAPVLLAGTADGNTWMWKVPNGDCKTFQGPNCPATCGRVLPDGKRAVVGYEDGTIRIWDLKQGSPIHVLKGTEGHQGPLTCVAANQDGSLILTGSVDCQAKLVSATTGKVVGVFRPETVASQPSLGEGEESESNSVESLGFCSVMPLAAVGYLDGTLAIYDLATQTLRHQCQHQSGIVQLLWEAGTAVVYTCSLDGIVRLWDARTGRLLTDYRGHTAEILDFALSKDSSLVX

SEQ ID NO: 878937 - protein, 560 aa, Homo sapiens
RGSSSASSRRADSGRRLGPEKWIRRLRRMESESESGAAADTPPLETLSFHGDEEIIEVVELDPGPPDPDDLAQEMEDVDFEEEEEEEGNEEGWVLEPQEGVVGSMEGPDDSEVTFALHSASVFCVSLDPKTNTLAVTGGEDDKAFVWRLSDGELLFECAGHKDSVTCAGFSHDSTLVATGDMSGLLKVWQVDTKEEVWSFEAGDLEWMEWHPRAPVLLAGTADGNTWMWKVPNGDCKTFQGPNCPATCGRVLPDGRAPPLSDLSWVQRPNPGIYTSQSSLLGHSRQNLRPAVCSADLLGPKVHSASFLLLNSPVIPGAVSGPFHSSFLSLSPFPCLVYVSVPSALSSSVPSSGKRAVVGYEDGTIRIWDLKQGSPIHVLKGTEGHQGPLTCVAANQDGSLILTGSVDCQAKLVSATTGKVVGVFRPETVASQPSLGEGEESESNSVESLGFCSVMPLAAVGYLDGTLAIYDLATQTLRHQCQHQSGIVQLLWEAGTAVVYTCSLDGIVRLWDARTGRLLTDYRGHTAEILDFALSKDASLVVTTSGDHKAKVFCVQRPDR

SEQ ID NO: 878938 - protein, 388 aa, Homo sapiens
MEDVDFEEEEEEEGNEEGWVLEPQEGVVGSMEGPDDSEVTFALHSASVFCVSLDPKTNTLAVTGGEDDKAFVWRLSDGELLFECAGHKDSVTCAGFSHDSTLVATGDMSGLLKVWQVDTKEEVWSFEAGDLEWMEWHPRAPVLLAGTADGNTWMWKVPNGDCKTFQGPNCPATCGRVLPDGKRAVVGYEDGTIRIWDLKQGSPIHVLKGTEGHQGPLTCVAANQDGSLILTGSVDCQAKLVSATTGKVVGVFRPETVASQPSLGEGEESESNSVESLGFCSVMPLAAVGYLDGTLAIYDLATQTLRHQCQHQSGIVQLLWEAGTAVVYTCSLDGIVRLWDARTGRLLTDYRGHTAEILDFALSKDASLVVTTSGDHKAKVFCVQRPDR

SEQ ID NO: 878939 - protein, 345 aa, Homo sapiens
GRVGRPTRPRTRGTNTLAVTGGEDDKAFVWRLSDGELLFECAGHKDSVTCAGFSHDSTLVATGDMSGLLKVWQVDTKEEVWSFEAGDLEWMEWHPRAPVLLAGTADGNTWMWKVPNGDCKTFQGPNCPATCGRVLPDGKRAVVGYEDGTIRIWDLKQGSPIHVLKGTEGHQGPLTCVAANQDGSLILTGSVDCQAKLVSATTGKVVGVFRPETVASQPSLGEGEESESNSVESLGFCSVMPLAAVGYLDGTLAIYDLATQTLRHQCQHQSGIVQLLWEAGTAVVYTCSLDGIVRLWDARTGRLLTDYRGHTAEILDFALSKDASLVVTTSGDHKAKVFCVQRPDR

SEQ ID NO: 878940 - protein, 315 aa, Homo sapiens
RRLVRGWGVNGRGHKDSVTCAGFSHDSTLVATGDMSGLLKVWQVDTKEEVWSFEAGDLEWMEWHPRAPVLLAGTADGNTWMWKVPNGDCKTFQGPNCPATCGRVLPDGKRAVVGYEDGTIRIWDLKQGSPIHVLKGTEGHQGPLTCVAANQDGSLILTGSVDCQAKLVSATTGKVVGVFRPETVASQPSLGEGEESESNSVESLGFCSVMPLAAVGYLDGTLAIYDLATQTLRHQCQHQSGIVQLLWEAGTAVVYTCSLDGIVRLWDARTGRLLTDYRGHTAEILDFALSKDASLVVTTSGDHKAKVFCVQRPDR

SEQ ID NO: 878941 - protein, 318 aa, Homo sapiens
RGSSSASSRRADSGRRLGPEKWIRRLRRMESESESGAAADTPPLETLSFHGDEEIIEVVELDPGPPDPDDLAQEMEDVDFEEEEEEEGNEEGWVLEPQEGVVGSMEGPDDSEVTFALHSASVFCVSLDPKTNTLAVTGGEDDKAFVWRLSDGELLFECAGHKDSVTCAGFSHDSTLVATGDMSGLLKVWQVDTKEEVWSFEAGDLEWMEWHPRAPVLLAGTADGNTWMWKVPNGDCKTFQGPNCPATCGRVLPDGKRAVVGYEDGTIRIWDLKHCFSFTFICWCEPWGVYLYVGSRCLRFPFFPFPSLWGWKGGRDTS

SEQ ID NO: 878942 - protein, 290 aa, Homo sapiens
MESESESGAAADTPPLETLSFHGDEEIIEVVELDPGPPDPDDLAQEMEDVDFEEEEEEEGNEEGWVLEPQEGVVGSMEGPDDSEVTFALHSASVFCVSLDPKTNTLAVTGGEDDKAFVWRLSDGELLFECAGHKDSVTCAGFSHDSTLVATGDMSGLLKVWQVDTKEEVWSFEAGDLEWMEWHPRAPVLLAGTADGNTWMWKVPNGDCKTFQGPNCPATCGRVLPDGKRAVVGYEDGTIRIWDLKHCFSFTFICWCEPWGVYLYVGSRCLRFPFFPFPSLWGWKGGRDTS

SEQ ID NO: 878943 - protein, 111 aa, Homo sapiens
PPYQLPSSSLSTFTVNDSGRRLGPEKWIRRLRRMESESESGAAADTPPLETLSFHGDEEIIEVVELDPGPPDPALPRPGGPFRGRGGPVSLSLSFAGVSHGVCICMWGVGV

SEQ ID NO: 878944 - protein, 142 aa, Homo sapiens
PPYQLPSSSLSTFTVNDSGRRLGPEKWIRRLRRMESESESGAAADTPPLETLSFHGDEEIIEVVELDPGPPDPDDLAQEMEDVDFEEEEEEEGNEEGWVLEPQEGVVGSMEGPDDSEVTFALHSGRSLRRSTSNQFRWACKH

SEQ ID NO: 878945 - protein, 462 aa, Homo sapiens; identical to SEQ ID NO: 878935

SEQ ID NO: 878946 - protein, 502 aa, Homo sapiens
RGSSSASSRRADSGRRLGPEKWIRRLRRMESESESGAAADTPPLETLSFHGDEEIIEVVELDPGPPDPDDLAQEMEDVDFEEEEEEEGNEEGWVLEPQEGVVGSMEGPDDSEVTFALHSASVFCVSLDPKTNTLAVTGGEDDKAFVWRLSDGELLFECAGHKDSVTCAGFSHDSTLVATGDMSGLLKVWQVDTKEEVWSFEAGDLEWMEWHPRAPVLLAGTADGNTWMWKVPNGDCKTFQGPNCPATCGRVLPDGKRAVVGYEDGTIRIWDLKQGSPIHVLKGTEGHQGPLTCVAANQDGSLILTGSVDCQAKLVSATTGKVVGVFRPETVASQPSLGEGEESESNSVESLGFCSVLSEDGERGLWEGPGLGAREDGRACEIQALMSLHGTLLWPGMPLAAVGYLDGTLAIYDLATQTLRHQCQHQSGIVQLLWEAGTAVVYTCSLDGIVRLWDARTGRLLTDYRGHTAEILDFALSKDASLVVTTSGDHKAKVFCVQRPDR

SEQ ID NO: 878947 - protein, 352 aa, Homo sapiens
RGSSSASSRRADSGRRLGPEKWIRRLRRMESESESGAAADTPPLETLSFHGDEEIIEVVELDPGPPDPDDLAQEMEDVDFEEEEEEEGNEEGWVLEPQEGVVGSMEGPDDSEVTFALHSASVFCVSLDPKTNTLAVTGGEDDKAFVWRLSDGELLFECAGHKDSVTCAGFSHDSTLVATGDMSGLLKVWQVDTKEEVWSFEAGDLEWMEWHPRAPVLLAGTADGNTWMWKVPNGDCKTFQGPNCPATCGRVLPDGKRAVVGYEDGTIRIWDLKQGSPIHVLKGTEGHQGPLTCVAANQDGSLILTGSVDCQAKLVSATTGKVVGVFRPETVASQPSDAPGSCWLPGWDLGHL

SEQ ID NO: 878948 - protein, 462 aa, Homo sapiens; identical to SEQ ID NO: 878935

SEQ ID NO: 878949 - protein, 462 aa, Homo sapiens; identical to SEQ ID NO: 878935

SEQ ID NO: 878950 - protein, 411 aa, Homo sapiens
LASRGLPSCVPRAPADPDDLAQEMEDVDFEEEEEEEGNEEGWVLEPQEGVVGSMEGPDDSEVTFALHSASVFCVSLDPKTNTLAVTGGEDDKAFVWRLSDGELLFECAGHKDSVTCAGFSHDSTLVATGDMSGLLKVWQVDTKEEVWSFEAGDLEWMEWHPRAPVLLAGTADGNTWMWKVPNGDCKTFQGPNCPATCGRVLPDGKRAVVGYEDGTIRIWDLKQGSPIHVLKGTEGHQGPLTCVAANQDGSLILTGSVDCQAKLVSATTGKVVGVFRPETVASQPSLGEGEESESNSVESLGFCSVMPLAAVGYLDGTLAIYDLATQTLRHQCQHQSGIVQLLWEAGTAVVYTCSLDGIVRLWDARTGRLLTDYRGHTAEILDFALSKDASLVVTTSGDHKAKVFCVQRPDR

SEQ ID NO: 878951 - protein, 358 aa, Homo sapiens [sequence omitted]

SEQ ID NO: 878952 - protein, 261 aa, Homo sapiens
RTRGSTHASADAWAVLLAGTADGNTWMWKVPNGDCKTFQGPNCPATCGRVLPDGKRAVVGYEDGTIRIWDLKQGSPIHVLKGTEGHQGPLTCVAANQDGSLILTGSVDCQAKLVSATTGKVVGVFRPETVASQPSLGEGEESESNSVESLGFCSVMPLAAVGYLDGTLAIYDLATQTLRHQCQHQSGIVQLLWEAGTAVVYTCSLDGIVRLWDARTGRLLTDYRGHTAEILDFALSKDASLVVTTSGDHKAKVFCVQRPDR

SEQ ID NO: 878953 - protein, 304 aa, Homo sapiens
RGSSSASSRRADSGRRLGPEKWIRRLRRMESESESGAAADTPPLETLSFHGDEEIIEVVELDPGPPDPDDLAQEMEDVDFEEEEEEEGNEEGWVLEPQEGVVGSMEGPDDSEVTFALHSASVFCVSLDPKTNTLAVTGGEDDKAFVWRLSDGELLFECAGHKDSVTCAGFSHDSTLVATGDMSGLLKVWQVDTKEEVWSFEAGDLEWMEWHPRAPVLLAGTADGNTWMWKVPNGDCKTFQGPNCPATCGRVLPDGKRAVVGYEDGTIRIWDLKHFRGRGGPVSLSLSFAGVSHGVCICMWGVGV

SEQ ID NO: 878954 - protein, 142 aa, Homo sapiens
PPYQLPSSSLSTFTVNDSGRRLGPEKWIRRLRRMESESESGAAADTPPLETLSFHGDEEIIEVVELDPGPPDPDDLAQEMEDVDFEEEEEEEGNEEGWVLEPQEGVVGSMEGPDDSEVTFALHSAFAGVSHGVCICMWGVGV

SEQ ID NO: 878955 - protein, 201 aa, Homo sapiens
PPYQLPSSSLSTFTVNDSGRRLGPEKWIRRLRRMESESESGAAADTPPLETLSFHGDEEIIEVVELDPGPPDPDDLAQEMEDVDFEEEEEEEGNEEEEIEMMKLMGLWPPFDSTKGKEGGWLCTMPMPYNVSQKRKYRQYMNRKGGFNRPWDFMALRIEVLKDDFFSPHLGQRVDRYTAFNWHSKNQDLKFSYPGYGKAKS

SEQ ID NO: 878956 - protein, 103 aa, Homo sapiens
MDASDIWCRDSDRGTSLGRSIPCPPALCSKRKIHLRPLLLRPTSPRNISPILNRALGDGRVTGWKNSVSLNHCMEENWKLPRNTSLGQLCEQEINFFYSVKKN

SEQ ID NO: 878957 - protein, 103 aa, Homo sapiens; identical to SEQ ID NO: 878956

SEQ ID NO: 878958 - protein, 104 aa, Homo sapiens
ACADVDGFVGAGREARGGSWASPVPWRLGLSALRKELGRDLSLPAVRSPSAPRLVVTAALPPATPVMIAMEPRLRWHYYKPKRRGARSNKGKLFSILSSMFLAA

SEQ ID NO: 878959 - protein, 104 aa, Homo sapiens; identical to SEQ ID NO: 878958

SEQ ID NO: 878960 - protein, 408 aa, Homo sapiens
RSCGPPTAGGQRCEEAPGTVMERRLGVRAWVKENRGSFQPPVCNKLMHQEQLKVMFVGGPNTRKDYHIEEGEEVFYQLEGDMVLRVLEQGKHRDVVIRQGEIFLLPARVPHSPQRFANTVGLVVERRRLETELDGLRYYVGDTMDVLFEKWFYCKDLGTQLAPIIQELSPQPSPCLLLSWGSASAPDALGESLPSQGGDPGPESPLPGRGEGGAAAPLGGKGWQTHSCVEPHECVWAPAPDRECGVCVCRWPLRWECSPLLLLPVRPCRFFSSEQYRTGKPIPDQLLKEPPFPLSTRSIMEPMSLDAWLDSHHRELQAGTPLSLFGDTYETQVIAYGQGSSEGLRQNVDVWLWQLEGSSVVTMGGRRLSLAPDDSLLVLAGTSYAWERTQGSVALSVTQDPACKKPLG

SEQ ID NO: 878961 - protein, 254 aa, Homo sapiens
MTIPETVPNTRKDYHIEEGEEVFYQLEGDMVLRVLEQGKHRDVVIRQGEIFLLPARVPHSPQRFANTVGLVVERRRLETELDGLRYYVGDTMDVLFEKWFYCKDLGTQLAPIIQEFFSSEQYRTGKPIPDQLLKEPPFPLSTRSIMEPMSLDAWLDSHHRELQAGTPLSLFGDTYETQVIAYGQGSSEGLRQNVDVWLWQLEGSSVVTMGGRRLSLAPDDSLLVLAGTSYAWERTQGSVALSVTQDPACKKPLG

SEQ ID NO: 878962 - protein, 306 aa, Homo sapiens
RSCGPPTAGGQRCEEAPGTVMERRLGVRAWVKENRGSFQPPVCNKLMHQEQLKVMFVGGPNTRKDYHIEEGEEVFYQLEGDMVLRVLEQGKHRDVVIRQGEIFLLPARVPHSPQRFANTVGLVVERRRLETELDGLRYYVGDTMDVLFEKWFYCKDLGTQLAPIIQEFFSSEQYRTGKPIPDQLLKEPPFPLSTRSIMEPMSLDAWLDSHHRELQAGTPLSLFGDTYETQVIAYGQGSSEGLRQNVDVWLWQLEGSSVVTMGGRRLSLAPDDSLLVLAGTSYAWERTQGSVALSVTQDPACKKPLG

SEQ ID NO: 878963 - protein, 306 aa, Homo sapiens; identical to SEQ ID NO: 878962

SEQ ID NO: 878964 - protein, 306 aa, Homo sapiens; identical to SEQ ID NO: 878962

SEQ ID NO: 878965 - protein, 163 aa, Homo sapiens
MSRLMVSIITSMGIRGVGVPCGKKWARAFLILERKPIPDQLLKEPPFPLSTRSIMEPMSLDAWLDSHHRELQAGTPLSLFGDTYETQVIAYGQGSSEGLRQNVDVWLWQLEGSSVVTMGGRRLSLAPDDSLLVLAGTSYAWERTQGSVALSVTQDPACKKPLG

SEQ ID NO: 878966 - protein, 288 aa, Homo sapiens
RSCGPPTAGGQRCEEAPGTVMERRLGVRAWVKENRGSFQPPVCNKLMHQEQLKVMFVGGPNTRKDYHIEEGEEVFYQLEGDMVLRVLEQGKHRDVVIRQGEIFLLPARVPHSPQRFANTVGLVVERRRLETELDGLRFFSSEQYRTGKPIPGDRLWARQQRRPETECGRVAVAAGKWGPGTGLQNPLPEGISPLLGPGLPHGAHSWGLGAQADSDIHPGDEAQQSPFDSPAPLLQEGSSVVTMGGRRLSLAPDDSLLVLAGTSYAWERTQGSVALSVTQDPACKKPLG

SEQ ID NO: 878967 - protein, 306 aa, Homo sapiens; identical to SEQ ID NO: 878962

SEQ ID NO: 878968 - protein, 196 aa, Homo sapiens
AAFRDIEEVSQGLLSLLGANRAEAQQRRLLGRHEQVVERLLETQDGAEKQLREILTMEKEVAQSLLNAKEQVHQGGVELQQLEAGLQEAGEEDTRLKASLLQLTRELEELKEIEADLERQEKEVDEDTTVTIPSAVYVAQLYHQVSKIEWDYECEPGMVKGIHHGPSVAQPIHLDSTQLSRKFISDYLWSLVDTEW

SEQ ID NO: 878969 - protein, 174 aa, Homo sapiens
AAFRDIEEVSQGLLSLLGANRAEAQQRRLLGRHEQVVERLLETQDGAEKQLREILTMEKEVAQSLLNAKEQVHQGGVELQQLEAGLQEAGEEDTRLKASLLQLTRELEELKEIEADLERQEKEVDEDTTVTIPSAVYVAQLYHQVSKIEWDYECEPGMVKGRGMFECHGVPRLC

SEQ ID NO: 878970 - protein, 174 aa, Homo sapiens; identical to SEQ ID NO: 878969

SEQ ID NO: 878971 - protein, 106 aa, Homo sapiens
MSRDRTTVLQPGLQNETLSQKKKVKAVSFSPWGCVRGCVSRAFLTSVPQSIMAPVWPSPSTWTAPSSPGNSSATTSGVWWTPSGSQEPRGCVLHPAGICRGQIHFK

SEQ ID NO: 878972 - protein, 135 aa, Homo sapiens
AAFRDIEEVSQGLLSLLGANRAEAQQRRLLGRHEQVVERLLETQDGAEKQLRGTWLNFTTKLVKLSGIMSVSQGWSKASIMAPVWPSPSTWTAPSSPGNSSATTSGVWWTPSGSQEPRGCVLHPAGICRGQIHFK

SEQ ID NO: 878973 - protein, 196 aa, Homo sapiens; identical to SEQ ID NO: 878968

SEQ ID NO: 878974 - protein, 169 aa, Homo sapiens
AAFRDIEEVSQGLLSLLGANRAEAQQRRLLGRHEQVVERLLETQDGAEKQLREILTMEKEVAQSLLNAKEQVHQGGVELQQLEAGLQEAGEEDTRLKASLLQLTRELEELKEIEADLERQEKEVDEDTTVTIPSAVYVAQLYHQVSKIEWDYECEPGMVKGSILFGEPF

SEQ ID NO: 878975 - protein, 107 aa, Homo sapiens
HVSHTHTHTHTHTHAHVSGMALRETVFDQRAKGSEVVSHRVILKKSIPRTGETSSKTSKPECSWCTQGTGQRPVWLGRWERARKRKITGDGINRKLGTRSCEACILI

SEQ ID NO: 878976 - protein, 102 aa, Homo sapiens
MCPPTKSILLLMHVLPWPAPCCLGLLSSWSRSLTHPAMCPSHPRLLSLTIFRHLSVYSSQFALTPLFPCCFVFWSWVTSSVAAFGHFGVLILVLTFGSWFST

SEQ ID NO: 878977 - protein, 128 aa, Homo sapiens
PQSLPGAWCAMATPSLRGRLARFGNPRKPVLKPNKPLILANRVGERRREKGEATCITEMSVMMACWKQNEFRDDACRKEIQGFLDCAARAQEARKMRSIQETLGESGSLLPNKLNKLLQRFPNKPYLS

SEQ ID NO: 878978 - protein, 83 aa, Homo sapiens
PQSLPGAWCAMATPSLRGRLARFGNPRKPVLKPNKPLILANRVGERRREKGGEQSESGRPRSGSRSMSRGGWVGGQEGGSSCD

SEQ ID NO: 878979 - protein, 128 aa, Homo sapiens; identical to SEQ ID NO: 878977

SEQ ID NO: 878980 - protein, 128 aa, Homo sapiens; identical to SEQ ID NO: 878977

SEQ ID NO: 878981 - protein, 107 aa, Homo sapiens
PQSLPGAWCAMATPSLRGRLARFGNPRKPVLKPNKPLILANRVGERRREKGEATCITEMSVMMACWKQNEFRDDACRKEIQGFLDCAARAQVTDGSWGAFSGKEWGR

SEQ ID NO: 878982 - protein, 277 aa, Homo sapiens
MFSAVSGETRGLRVSLSVFQSPGAVVQGLGLVMASPSRRLQTKPVITCFKSVLLIYTFIFWITGVILLAVGIWGKVSLENYFSLLNEKATNVPFVLIATGTVIILLGTFGCFATCRASAWMLKLYAMFLTLVFLVELVAAIVGFVFRHEIKNSFKNNYEKALKQYNSTGDYRSHAVDKIQNTLHCCGVTDYRDWTDTNYYSEKGFPKSCCKLEDCTPQRDADKVNNEGCFIKVMTIIESEMGVVAGISFGVACFQLIGIFLAYCLSRAITNNQYEIV

SEQ ID NO: 878983 - protein, 277 aa, Homo sapiens; identical to SEQ ID NO: 878982

SEQ ID NO: 878984 - protein, 157 aa, Homo sapiens
MLKLYAMFLTLVFLVELVAAIVGFVFRHEIKNSFKNNYEKALKQYNSTGDYRSHAVDKIQNTLHCCGVTDYRDWTDTNYYSEKGFPKSCCKLEDCTPQRDADKVNNEGCFIKVMTIIESEMGVVAGISFGVACFQLIGIFLAYCLSRAITNNQYEIV

SEQ ID NO: 878985 - protein, 259 aa, Homo sapiens
KFSAVSGETRGLRVSLSVFQSPGAVVQGLGLVMASPSRRLQTKPVITCFKSVLLIYTFIFWITGVILLAVGIWGKVSLENYFSLLNEKATNVPFVLIATGTVIILLGTFGCFATCRASAWMLKLYAMFLTLVFLVELVAAIVGFVFRHEIKNSFKNNYEKALKQYNSTGDYRSHAVDKIQNTLHCCGVTDYRDWTDTNYYSDADKVNNEGCFIKVMTIIESEMGVVAGISFGVACFQLIGIFLAYCLSRAITNNQYEIV

SEQ ID NO: 878986 - protein, 180 aa, Homo sapiens
MANQQSSESTIEILSDVRLIKTGHNVGPRESTLLNMLKDLPLSPLGWSLQQVFDIGIIVRTLYMIALLQAIFRNRSHAVDKIQNTLHCCGVTDYRDWTDTNYYSEKGFPKSCCKLEDCTPQRDADKVNNEGCFIKVMTIIESEMGVVAGISFGVACFQLIGIFLAYCLSRAITNNQYEIV

SEQ ID NO: 878987 - protein, 261 aa, Homo sapiens
KFSAVSGETRGLRVSLSVFQSPGAVVQGLGLVMASPSRRLQTKPVITCFKSVLLIYTFIFWITGVILLAVGIWGKVSLENYFSLLNEKATNVPFVLIATGTVIILLGTFGCFATCRASAWMLKLYAMFLTLVFLVELVAAIVGFVFRHEIKNSFKNNYEKALKQYNSTGDYRSHAVDKIQNTLHCCGVTDYRDWTDTNYYSEKGFPKSCCKGCFIKVMTIIESEMGVVAGISFGVACFQLIGIFLAYCLSRAITNNQYEIV

SEQ ID NO: 878988 - protein, 232 aa, Homo sapiens
KFSAVSGETRGLRVSLSVFQSPGAVVQGLGLVMASPSRRLQTKPVITCFKSVLLIYTFIFWITGVILLAVGIWGKVSLENYFSLLNEKATNVPFVLIATGTVIILLGTFGCFATCRASAWMLKLYAMFLTLVFLVELVAAIVGFVFRHEIKNSFKNNYEKALKQYNSTGDYRSHAVDKIQNTGCFIKVMTIIESEMGVVAGISFGVACFQLIGIFLAYCLSRAITNNQYEIV

SEQ ID NO: 878989 - protein, 160 aa, Homo sapiens
MANQQSSESTIEILSDVRLIKTGHNVGPRESTLLNMLKDLPLSPLGWSLQQVFDIGIIVRTLYMIALLQAIFRNRSHAVDKIQNTLHCCGVTDYRDWTDTNYYSEKGFPKSCCKLEDCTPQRDADKVNNEGCFIKVMTIIESEMGVVAGISFGVACFQDI

SEQ ID NO: 878990 - protein, 277 aa, Homo sapiens; identical to SEQ ID NO: 878982

SEQ ID NO: 878991 - protein, 157 aa, Homo sapiens; identical to SEQ ID NO: 878984

SEQ ID NO: 878992 - protein, 277 aa, Homo sapiens; identical to SEQ ID NO: 878982

SEQ ID NO: 878993 - protein, 175 aa, Homo sapiens
IFWESNEILSDLEWIMIENKAGASEAQAVEHALNISPFSLGLVFQQVFDIGIIVRTLYMIALLQAIFRDRSHAVDKIQNTLHCCGVTDYRDWTDTNYYSEKGFPKSCCKLEDCTPQRDADKVNNEGCFIKVMTIIESEMGVVAGISFGVACFQLIGIFLAYCLSRAITNNQYEIV

SEQ ID NO: 878994 - protein, 139 aa, Homo sapiens
MLKLYAMFLTLVFLVELVAAIVGFVFRHEIKNSFKNNYEKALKQYNSTGDYRSHAVDKIQNTLHCCGVTDYRDWTDTNYYSDADKVNNEGCFIKVMTIIESEMGVVAGISFGVACFQLIGIFLAYCLSRAITNNQYEIV

SEQ ID NO: 878995 - protein, 257 aa, Homo sapiens
MFSAVSGETRGLRVSLSVFQSPGAVVQGLGLVMASPSRRLQTKPVITCFKSVLLIYTFIFWITGVILLAVGIWGKVSLENYFSLLNEKATNVPFVLIATGTVIILLGTFGCFATCRASAWMLKLYAMFLTLVFLVELVAAIVGFVFRHEIKNSFKNNYEKALKQYNSTGDYRSHAVDKIQNTLHCCGVTDYRDWTDTNYYSEKGFPKSCCKLEDCTPQRDADKVNNEGCFIKVMTIIESEMGVVAGISFGVACFQDI

SEQ ID NO: 878996 - protein, 870 aa, Homo sapiens
MTSAQCPALACVMSPLRFWGPWPLLMWQLLWLLVKEAQPLEWVKDPLQLTSNPLGPPEPWSSHSSHFPRESPHAPTLPADPWDFDHLGPSASSEMPAPPQESTENLVPFLDTWDSAGELPLEPEQFLASQQDLKDKLSPQERLPVSPKKLKKDPAQRWSLAEIIGIIHQLSTPQSQKQTLQNEYSSTDTPYPGSLPPELRVKSDEPPGPSEQVGPSQFHLEPETQNPETLEDIQSSSLQQEAPAQLPQLLEEEPSSMQQEAPALPPESSMESLTLPNHEVSVQPPGEDQAYYHLPNITVKPADVEVTITSEPTNETESSQAQQETPIQFPEEVEPSATQQEAPIEPPVPPMEHELSISEQQQPVQPSESSREVESSPTQQETPGQPPEHHEVTVSPPGHHQTHHLDSPSVSVKPPDVQLTIAAEPSAEVGTSLVQQEATTRLSGSGNDIEPPAIQHGGPPLLSESSEEAGPLAVQQETSFQSPEPINNENPSPTQQEAAAEHPQTAEEGESSLTHQEAPAQTPEFPNVVVAQPPEHSHLTQATVQPLDLGFTITPESMTEVELSPTMKETPTQPPKKVVPQLRVYQGVTNPTPGQDQAQHPVSPSVTVQLLDLGLTITPEPTTEVGHSTPPKRTIVSPKHPEVTLPHPDQVQTQHSHLTRATVQPLDLGFTITPKSMTEVEPSTALMTTAPPPGHPEVTLPPSDKGQAQHSHLTQATVQPLDLELTITTKPTTEVKPSPTTEETSTQPPDLGLAIIPEPTTETGHSTALEKTTAPRPDRVQTLHRSLTEVTGPPTELEPAQDSLVQSESYTQNKALTAPEEHKASTSTNICELCTCGDEMLSCIDLNPEQRLRQVPVPEPNTHNGTFTIL

SEQ ID NO: 878997 - protein, 870 aa, Homo sapiens; identical to SEQ ID NO: 878996

SEQ ID NO: 878998 - protein, 273 aa, Homo sapiens
MSGDKLLSELGYKLGRTIGEGSYSKVKVATSKKYKGTVAIKVVDRRRAPPDFVNKFLPRELSILRGVRHPHIVHVFEFIEVCNGKLYIVMEAAATDLLQAVQRNGRIPGVQARDLFAQIAGAVRYLHDHHLVHRDLKCENVLLSPDERRVKLTDFGFGRQAHGYPDLSTTYCGSAAYASPEVLLGIPYDPKKYDVWSMGVVLYVMVTGCMPFDDSDIAGLPRRQKRGVLYPEGLELSERCKALIAELLQFSPSARPSAGQVARNCWLRAGDSG

SEQ ID NO: 878999 - protein, 185 aa, Homo sapiens
MSGDKLLSELGYKLGRTIGEGSYSKVKVATSKKYKGTVAIKVVDRRRAPPDFVNKFLPRELSILRGVRHPHIVHVFEFIEVCNGKLYIVMEAAATDLLQAVQRNGRIPGVQARDLFAQIAGAVRYLHDHHLVHRDLKCENVLLSPDERRVKLTDFGFGRQAHGYPDLSTTYCGSAAYASPESCIS

SEQ ID NO: 879000 - protein, 273 aa, Homo sapiens; identical to SEQ ID NO: 878998

SEQ ID NO: 879001 - protein, 273 aa, Homo sapiens; identical to SEQ ID NO: 878998

SEQ ID NO: 879002 - protein, 142 aa, Homo sapiens
MPPDFENSPFCLQSSTCKNLDWVPLTTLSHCKSLRTMTAISRYMELTIEPVQQAGCSATRLPGDGQTSAGDASLQDPPSYPPVQVIRARVSSGSSSEVSSINSDLEWDPEDVNLEGSKENVELLGSQVHQDSVRTAHLSDDD

SEQ ID NO: 879003 - protein, 156 aa, Homo sapiens
MRQALGFAKEARESPDTQALLTCAEKEEENQENLDWVPLTTLSHCKSLRTMTAISRYMELTIEPVQQAGCSATRLPGDGQTSAGDASLQDPPSYPPVQVIRARVSSGSSSEVSSINSDLEWDPEDVNLEGSKENVELLGSQVHQDSVRTAHLSDDD

SEQ ID NO: 879004 - protein, 142 aa, Homo sapiens; identical to SEQ ID NO: 879002

SEQ ID NO: 879005 - protein, 105 aa, Homo sapiens
KSCKSNRSIALEDWLQAEGLPPTCCATEGPGSCDLLLLPPSPSLSLPSAGGRHFPPSTCGPGSCRPLAGLLYASAIVAHDRHPEYLLRATPWFLTSLGRAALDLA

SEQ ID NO: 879006 - protein, 214 aa, Homo sapiens
HEVTIQVFLAGLLYASAIVAHDRHPEYLLRATPWFLTSLGRAALDLAIIFLSCVMKSKMRQALGFAKEARESPDTQALLTCAEKEEENQENLDWVPLTTLSHCKSLRTMTAISRYMELTIEPVQQAGCSATRLPGDGQTSAGDASLQDPPSYPPVQVIRARVSSGSSSEVSSINSDLEWDPEDVNLEGSKENVELLGSQVHQDSVRTAHLSDDD

SEQ ID NO: 879007 - protein, 225 aa, Homo sapiens
HEVTIQVFLAGLLYASAIVAHDRHPEYLLRATPWFLTSLGRAALDLAIIFLSCVMKSKMRQALGFAKEARESPDTQALLTCAEKEEENQENLDWVPLTTLSHCKSLRTMTAISRYMELTIEPVQQAGCSATRLPGDGQTSAGDASLQDPPSYPPVQVIRARVSSGSSSEVSSINSDLEQKYWEALNSEQWDPEDVNLEGSKENVELLGSQVHQDSVRTAHLSDDD

SEQ ID NO: 879008 - protein, 125 aa, Homo sapiens
MPPDFENSPFCLQSSTCKNLDWVPLTTLSHCKSLRTMTAISRYMELTIEPVQQAGCSATRLPGDGQTSAGDASLQDPPSYPPVQVIRARVSSGSSSEVSSINSDLEWDPEDVNLQWCSSSPRLQH

SEQ ID NO: 879009 - protein, 252 aa, Homo sapiens
PQLGSRSYSPGPGRWEAAAAAALAHLGGARSRNQGRARGPGLASRSEMSAQRLISNRTSQQSASNSDYTWEYEYYEIGPVSFEGLKAHKYSIVIGFWVGLAVFVIFMFFVLTLLTKTGAPHQDNAESSEKRFRMNSFVSDFGRPLEPDKVFSRQGNEESRSLFHCYINEVERLDRAKACHQTTALDSDVQLQEAIRSSGQPEEELNRLMKFDIPNFVNTDQNYFGEDDLLISEPPIVLETKPLSQTSHKDLD

SEQ ID NO: 879010 - protein, 252 aa, Homo sapiens; identical to SEQ ID NO: 879009

SEQ ID NO: 879011 - protein, 464 aa, Homo sapiens
SGLPETSHKMAAPEEHDSPTEASQPIVEEEETKTFKDLGVTDVLCEACDQLGWTKPTKIQIEAIPLALQGRDIIGLAETGSGKTGAFALPILNALLETPQRLFALVLTPTRELAFQISEQFEALGSSIGVQSAVIVGGIDSMSQSLALAKKPHIIIATPGRLIDHLENTKGFNLRALKYLVMDEADRILNMDFETEVDKILKVIPRDRKTFLFSATMTKKVQKLQRAALKNPVKCAVSSKYQTVEKLQQYYIFIPSKFKDTYLVYILNELAGNSFMIFCSTCNNTQRTALLLRNLGFTAIPLHGQMSQSKRLGSLNKFKAKARSILLATDVASRGLDIPHVDVVVNFDIPTHSKDYIHRVGRTARAGRSGKAITFVTQYDVELFQRIEHLIGKKLPGFPTQDDEVMMLTERVAEAQRFARMELREHGEKKKRSREDAGDNDDTEGAIGVRNKVAGGKMKKRKGR

SEQ ID NO: 879012 - protein, 264 aa, Homo sapiens
SGLPETSHKMAAPEEHDSPTEASQPIVEEEETKTFKDLGVTDVLCEACDQLGWTKPTKIQIEAIPLALQGRDIIGLAETGSGKTGAFALPILNALLETPQRLFALVLTPTRELAFQISEQFEALGSSIGVQSAVIVGGIDSMSQSLALAKKPHIIIATPGRLIDHLENTKGFNLRALKYLVMDEADRILNMDFETEVDKILKVIPRDRKTFLFSATMTKKVQKLQRAALKNPVKCAVSSKYQTVEKLQQYYIFIPSKFKVKCLL

SEQ ID NO: 879013 - protein, 189 aa, Homo sapiens
MIFCSTCNNTQRTALLLRNLGFTAIPLHGQMSQSKRLGSLNKFKAKARSILLATDVASRGLDIPHVDVVVNFDIPTHSKDYIHRVGRTARAGRSGKAITFVTQYDVELFQRIEHLIGKKLPGFPTQDDEVMMLTERVAEAQRFARMELREHGEKKKRSREDAGDNDDTEGAIGVRNKVAGGKMKKRKGR

SEQ ID NO: 879014 - protein, 367 aa, Homo sapiens
SGLPETSHKMAAPEEHDSPTEASQPIVEEEETKTFKDLGVTDVLCEACDQLGWTKPTKIQIEAIPLALQGRDIIGLAETGSGKTGAFALPILNALLETPQRLFALVLTPTRELAFQISEQFEALGSSIGVQSAVIVGGIDSMSQSLALAKKPHIIIATPGRLIDHLENTKGFNLRALKYLVMDEADRILNMDFETEVDKILKVIPRDRKTFLFSATMTKKVQKLQRAALKNPVKCAVSSKYQTVEKLQQYYIFIPSKFKDTYLVYILNELAGNSFMIFCSTCNNTQRTALLLRNLGFTAIPLHGQMSQSKRLGSLNKFKAKARSILLATDVASRGLDIPHVDVVVNFDIPTHSKDYIHRVGMSKLAA

SEQ ID NO: 879015 - protein, 105 aa, Homo sapiens [sequence omitted]

SEQ ID NO: 879016 - protein, 415 aa, Homo sapiens
SGLPETSHKMAAPEEHDSPTEASQPIVEEEETKTFKDLGVTDVLCEACDQLGWTKPTKIQIEAIPLALQGRDIIGLAETGSGKTGAFALPILNALLETPQRLFALVLTPTRELAFQISEQFEALGSSIGVQSAVIVGGIDSMSQSLALAKKPHIIIATPGRLIDHLENTKGFNLRALKYLVMDEADRILNMDFETEVDKILKVIPRDRKTFLFSATMTKKVQKLQRAALKNPVKCAVSSKYQTVEKLQQYYIFIPSKFKSKRLGSLNKFKAKARSILLATDVASRGLDIPHVDVVVNFDIPTHSKDYIHRVGRTARAGRSGKAITFVTQYDVELFQRIEHLIGKKLPGFPTQDDEVMMLTERVAEAQRFARMELREHGEKKKRSREDAGDNDDTEGAIGVRNKVAGGKMKKRKGR

SEQ ID NO: 879017 - protein, 464 aa, Homo sapiens; identical to SEQ ID NO: 879011

SEQ ID NO: 879018 - protein, 189 aa, Homo sapiens; identical to SEQ ID NO: 879013

SEQ ID NO: 879019 - protein, 105 aa, Homo sapiens [sequence omitted]

SEQ ID NO: 879020 - protein, 619 aa, Homo sapiens; identical to SEQ ID NO: 859409

SEQ ID NO: 879021 - protein, 473 aa, Homo sapiens
  misc_feature (462)..(462): Xaa can be any naturally occurring amino acid
MADEGKSYSEHDDERVNFPQRKKKGRGPFRWKYGEGNRRSGRGGSGIRSSRLEEDDGDVAMSDAQDGPRVRYNPYTTRPNRRGDTWHDRDRIHVTVRRDRAPPERGGAGTSQDGTSKNWFKITIPYGRKYDKAWLLSMIQSKCSVPFTPIEFHYENTRAQFFVEDASTASALKAVNYKILDRENRRISIIINSSAPPHTILNELKPEQVEQLKLIMSKRYDGSQQALDLKGLRSDPDLVAQNIDVVLNRRSCMAATLRIIEENIPELLSLNLSNNRLYRLDDMSSIVQKAPNLKILNLSGNELKSERELDKIKGLKLEELWLDGNSLCDTFRDQSTYISAIRERFPKLLRLDGHELPPPIAFDVEAPTTLPPCKGSYFGTENLKSLVLHFLQQYYAIYDSGDRQGLLDAYHDGACCSLSIPFIPQNPARSSLAEYFKDSRNVKKLKDPTLRLRLLKHTRRYXEAVLIFFFFFF

SEQ ID NO: 879022 - protein, 451 aa, Homo sapiens
MADEGKSYSEHDDERVNFPQRKKKGRGPFRWKYGEGNRRSGRGGSGIRSSRLEEDDGDVAMSDAQDGPRVRYNPYTTRPNRRGDTWHDRDRIHVTVRRDRAPPERGGAGTSQDGTSKNWFKITIPYGRKYDKAWLLSMIQSKCSVPFTPIEFHYENTRAQFFVEDASTASALKAVNYKILDRENRRISIIINSSAPPHTILNELKPEQVEQLKLIMSKRYDGSQQALDLKGLRSDPDLVAQNIDVVLNRRSCMAATLRIIEENIPELLSLNLSNNRLYRLDDMSSIVQKAPNLKILNLSGNELKSERELDKIKGLKLEELWLDGNSLCDTFRDQSTYISAIRERFPKLLRLDGHELPPPIAFDVEAPTTLPPCKGSYFGTENLKSLVLHFLQQYYAIYDSGDRQGLLDAYHDGACCSLSIPFIPQNPARSSIASSSFVNDNSLLASPNPPC

SEQ ID NO: 879023 - protein, 583 aa, Homo sapiens
MADEGKSYSEHDDERVNFPQRKKKGRGPFRWKYGEGNRRSGRGGSGIRSSRLEEDDGDVAMSDAQDGPRVRYNPYTTRPNRRGDTWHDRDRIHVTVRRDRAPPERGGAGTSQDGTSKNWFKITIPYGRKYDKAWLLSMIQSKCSVPFTPIEFHYENTRAQFFVEDASTASALKAVNYKILDRENRRISIIINSSAPPHTILNELKPEQVEQLKLIMSKRYDGSQQALDLKGLRSDPDLVAQNIDVVLNRRSCMAATLRIIEENIPELKSERELDKIKGLKLEELWLDGNSLCDTFRDQSTYISAIRERFPKLLRLDGHELPPPIAFDVEAPTTLPPCKGSYFGTENLKSLVLHFLQQYYAIYDSGDRQGLLDAYHDGACCSLSIPFIPQNPARSSLAEYFKDSRNVKKLKDPTLRFRLLKHTRLNVVAFLNELPKTQHDVNSFVVDISAQTSTLLCFSVNGVFKEVDGKSRDSLRAFTRTFIAVPASNSGLCIVNDELFVRNASSEEIQRAFAMPAPTPSSSPVPTLSPEQQEMLQAFSTQSGMNLEWSQKCLQDNNWDYTRSAQAFTHLKAKGEIPEVAFMK

SEQ ID NO: 879024 - protein, 236 aa, Homo sapiens
LSLPSSWDYRYYAIYDSGDRQGLLDAYHDGACCSLSIPFIPQNPARSSLAEYFKDSRNVKKLKDPTLRFRLLKHTRLNVVAFLNELPKTQHDVNSFVVDISAQTSTLLCFSVNGVFKEVDGKSRDSLRAFTRTFIAVPASNSGLCIVNDELFVRNASSEEIQRAFAMPAPTPSSSPVPTLSPEQQEMLQAFSTQSGMNLEWSQKCLQDNNWDYTRSAQAFTHLKAKGEIPEVAFMK

SEQ ID NO: 879025 - protein, 893 aa, Homo sapiens
RRGPAGGGGGGAGAGWQVSLTGRWSPGREAGAGEVRQDPGSTAASPSSCDADLSARMARGERRRRAVPAEGVRTAERAARGGPGRRDGRGGGPRSTAGGVALAVVVLSLALGMSGRWVLAWYRARRAVTLHSAPPVLPADSSSPAVAPDLFWGTYRPHVYFGMKTRSPKPLLTGLMWAQQGTTPGTPKLRHTCEQGDGVGPYGWEFHDGLSFGRQHIQDGALRLTTEFVKRPGGQHGGDWSWRVTVEPQDSGTSALPLVSLFFYVVTDGKEVLLPEVGAKGQLKFISGHTSELGDFRFTLLPPTSPGDTAPKYGSYNVFWTSNPGLPLLTEMVKSRLNSWFQHRPPGAPPERYLGLPGSLKWEDRGPSGQGQGQFLIQQVTLKIPISIEFVFESGSAQAGGNQALPRLAGSLLTQALESHAEGFRERFEKTFQLKEKGLSSGEQVLGQAALSGLLGGIGYFYGQGLVLPDIGVEGSEQKVDPALFPPVPLFTAVPSRSFFPRGFLWDEGFHQLVVQRWDPSLTREALGHWLGLLNADGWIGREQILGDEARARVPPEFLVQRAVHANPPTLLLPVAHMLEVGDPDDLAFLRKALPRLHAWFSWLHQSQAGPLPLSYRWRGRDPALPTLLNPKTLPSGLDDYPRASHPSVTERHLDLRCWVALGARVLTRLAEHLGEAEVAAELGPLAASLEAAESLDELHWAPELGVFADFGNHTKAVQLKPRPPQGLVRVVGRPQPQLQYVDALGYVSLFPLLLRLLDPTSSRLGPLLDILADSRHLWSPFGLRSLAASSSFYGQRNSEHDPPYWRGAVWLNVNYLALGALHHYGHLEGPHQARAAKLHGELRANVVGNVWRQYQATGFLWEQYSDRDGRGMGCRPFHGWTSLVLLAMAEDY

SEQ ID NO: 879026 - protein, 71 aa, Homo sapiens
LLNPKTLPSGLESDCRADSGTSALPLVSLFFYVVTDGKEVLLPEVGAKGQLKFISGHTSELGDFRFTPLWL

SEQ ID NO: 879027 - protein, 731 aa, Homo sapiens
MKTRSPKPLLTGLMWAQQGTTPGTPKLRHTCEQGDGVGPYGWEFHDGLSFGRQHIQDGALRLTTEFVKRPGGQHGGDWSWRVTVEPQDSGTSALPLVSLFFYVVTDGKEVLLPEVGAKGQLKFISGHTSELGDFRFTLLPPTSPGDTAPKYGSYNVFWTSNPGLPLLTEMVKSRLNSWFQHRPPGAPPERYLGLPGSLKWEDRGPSGQGQGQFLIQQVTLKIPISIEFVFESGSAQAGGNQALPRLAGSLLTQALESHAEGFRERFEKTFQLKEKGLSSGEQVLGQAALSGLLGGIGYFYGQGLVLPDIGVEGSEQKVDPALFPPVPLFTAVPSRSFFPRGFLWDEGFHQLVVQRWDPSLTREALGHWLGLLNADGWIGREQILGDEARARVPPEFLVQRAVHANPPTLLLPVAHMLEVGDPDDLAFLRKALPRLHAWFSWLHQSQAGPLPLSYRWRGRDPALPTLLNPKTLPSGLDDYPRASHPSVTERHLDLRCWVALGARVLTRLAEHLGEAEVAAELGPLAASLEAAESLDELHWAPELGVFADFGNHTKAVQLKPRPPQGLVRVVGRPQPQLQYVDALGYVSLFPLLLRLLDPTSSRLGPLLDILADSRHLWSPFGLRSLAASSSFYGQRNSEHDPPYWRGAVWLNVNYLALGALHHYGHLEGPHQARAAKLHGELRANVVGNVWRQYQATGFLWEQYSDRDGRGMGCRPFHGWTSLVLLAMAEDY

SEQ ID NO: 879028 - protein, 562 aa, Homo sapiens
MVKSRLNSWFQHRPPGAPPERYLGLPGSLKWEDRGPSGQGQGQFLIQQVTLKIPISIEFVFESGSAQAGGNQALPRLAGSLLTQALESHAEGFRERFEKTFQLKEKGLSSGEQVLGQAALSGLLGGIGYFYGQGLVLPDIGVEGSEQKVDPALFPPVPLFTAVPSRSFFPRGFLWDEGFHQLVVQRWDPSLTREALGHWLGLLNADGWIGREQILGDEARARVPPEFLVQRAVHANPPTLLLPVAHMLEVGDPDDLAFLRKALPRLHAWFSWLHQSQAGPLPLSYRWRGRDPALPTLLNPKTLPSGLDDYPRASHPSVTERHLDLRCWVALGARVLTRLAEHLGEAEVAAELGPLAASLEAAESLDELHWAPELGVFADFGNHTKAVQLKPRPPQGLVRVVGRPQPQLQYVDALGYVSLFPLLLRLLDPTSSRLGPLLDILADSRHLWSPFGLRSLAASSSFYGQRNSEHDPPYWRGAVWLNVNYLALGALHHYGHLEGPHQARAAKLHGELRANVVGNVWRQYQATGFLWEQYSDRDGRGMGCRPFHGWTSLVLLAMAEDY

SEQ ID NO: 879029 - protein, 562 aa, Homo sapiens; identical to SEQ ID NO: 879028

SEQ ID NO: 879030 - protein, 678 aa, Homo sapiens
RRGPAGGGGGGAGAGWQVSLTGRWSPGREAGAGEDSGTSALPLVSLFFYVVTDGKEVLLPEVGAKGQLKFISGHTSELGDFRFTLLPPTSPGDTAPKYGSYNVFWTSNPGLPLLTEMVKSRLNSWFQHRPPGAPPERYLGLPGSLKWEDRGPSGQGQGQFLIQQVTLKIPISIEFVFESGSAQAGGNQALPRLAGSLLTQALESHAEGFRERFEKTFQLKEKGLSSGEQVLGQAALSGLLGGIGYFYGQGLVLPDIGVEGSEQKVDPALFPPVPLFTAVPSRSFFPRGFLWDEGFHQLVVQRWDPSLTREALGHWLGLLNADGWIGREQILGDEARARVPPEFLVQRAVHANPPTLLLPVAHMLEVGDPDDLAFLRKALPRLHAWFSWLHQSQAGPLPLSYRWRGRDPALPTLLNPKTLPSGLDDYPRASHPSVTERHLDLRCWVALGARVLTRLAEHLGEAEVAAELGPLAASLEAAESLDELHWAPELGVFADFGNHTKAVQLKPRPPQGLVRVVGRPQPQLQYVDALGYVSLFPLLLRLLDPTSSRLGPLLDILADSRHLWSPFGLRSLAASSSFYGQRNSEHDPPYWRGAVWLNVNYLALGALHHYGHLEGPHQARAAKLHGELRANVVGNVWRQYQATGFLWEQYSDRDGRGMGCRPFHGWTSLVLLAMAEDY

SEQ ID NO: 879031 - protein, 893 aa, Homo sapiens; identical to SEQ ID NO: 879025

SEQ ID NO: 879032 - protein, 480 aa, Homo sapiens
VLKQIGLQAKVRVGGLAWTARCTRNFWRHPGSGLIPQYLLRANVVGNVWRQYQATGFLWEQYSDRVGEALAAALSTAGPALPSRSFFPRGFLWDEGFHQLVVQRWDPSLTREALGHWLGLLNADGWIGREQILGDEARARVPPEFLVQRAVHANPPTLLLPVAHMLEVGDPDDLAFLRKALPRLHAWFSWLHQSQAGPLPLSYRWRGRDPALPTLLNPKTLPSGLDDYPRASHPSVTERHLDLRCWVALGARVLTRLAEHLGEAEVAAELGPLAASLEAAESLDELHWAPELGVFADFGNHTKAVQLKPRPPQGLVRVVGRPQPQLQYVDALGYVSLFPLLLRLLDPTSSRLGPLLDILADSRHLWSPFGLRSLAASSSFYGQRNSEHDPPYWRGAVWLNVNYLALGALHHYGHLEGPHQARAAKLHGELRANVVGNVWRQYQATGFLWEQYSDRDGRGMGCRPFHGWTSLVLLAMAEDY

SEQ ID NO: 879033 - protein, 588 aa, Homo sapiens
RRGPAGGGGGGAGAGWQVSLTGRWSPGREAGAGEVRQDPGSTAASPSSCDADLSARMARGERRRRAVPAEGVRTAERAARGGPGRRDGRGGGPRSTAGGVALAVVVLSLALGMSGRWVLAWYRARRAVTLHSAPPVLPADSSSPAVAPDLFWGTYRPHVYFGMKTRSPKPLLTGLMWAQQGTTPGTPKLRHTCEQGDGVGPYGWEFHDGLSFGRQHIQDGALRLTTEFVKRPGGQHGGDWSWRVTVEPQDSGTSALPLVSLFFYVVTDGKEVLLPEVGAKGQLKFISGHTSELGDFRFTLLPPTSPGDTAPKYGSYNVFWTSNPGLPLLTEMVKSRLNSWFQHRPPGAPPERYLGLPGSLKWEDRGPSGQGQGQFLIQQVTLKIPISIEFVFESGSAQAGGNQALPRLAGSLLTQALESHAEGFRERFEKTFQLKEKGLSSGEQVLGQAALSGLLGGIGYFYGQGLVLPDIGVEGSEQKVDPALFPPVPLFTAVPSRSFFPRGFLWDEGFHQLVVQRWDPSLTREALGHWLGLLNADGWIGREQILGDEARARVPPEFLVQRAVHANPPTLLLPVAHMLEVGDLGAVQ

SEQ ID NO: 879034 - protein, 625 aa, Homo sapiens
RRGPAGGGGGGAGAGWQVSLTGRWSPGREAGAGEVRQDPGSTAASPSSCDADLSARMARGERRRRAVPAEGVRTAERAARGGPGRRDGRGGGPRSTAGGVALAVVVLSLALGMSGRWVLAWYRARRAVTLHSAPPVLPADSSSPAVAPDLFWGTYRPHVYFGMKTRSPKPLLTGLMWAQQGTTPGTPKLRHTCEQGDGVGPYGWEFHDGLSFGRQHIQDGALRLTTEFVKRPGGQHGGDWSWRVTVEPQDSGTSALPLVSLFFYVVTDGKEVLLPEVGAKGQLKFISGHTSELGDFRFTLLPPTSPGDTAPKYGSYNVFWTSNPGLPLLTEMVKSRLNSWFQHRPPGAPPERYLGLPGSLKWEDRGPSGQGQGQFLIQQVTLKIPISIEFVFESGSAQAGGNQALPRLAGSLLTQALESHAEGFRERFEKTFQLKEKGLSSGEQVLGQAALSGLLGGIGYFYGQGLVLPDIGVEGSEQKVDPALFPPVPLFTAVPSRSFFPRGFLWDEGFHQLVVQRWDPSLTREALGHWLGLLNADGWIGREQILGDEARARVPPEFLVQRAVHANPPTLLLPVAHMLEVGDPTLALKGQRLLAFAPSPLDTSNSNLPHFISGVSLLSSHIALG

SEQ ID NO: 879035 - protein, 625 aa, Homo sapiens; identical to SEQ ID NO: 879034

SEQ ID NO: 879036 - protein, 329 aa, Homo sapiens
RRGPAGGGGGGAGAGWQVSLTGRWSPGREAGAGEVRQDPGSTAASPSSCDADLSARMARGERRRRAVPAEGVRTAERAARGGPGRRDGRGGGPRSTAGGVALAVVVLSLALGMSGRWVLAWYRARRAVTLHSAPPVLPADSSSPAVAPDLFWGTYRPHVYFGMKTRSPKPLLTGLMWAQQGTTPGTPKLRHTCEQGDGVGPYGWEFHDGLSFGRQHIQDGALRLTTEFVKRPGGQHGGDWSWRVTVEPQDSGTSALPLVSLFFYVVTDGKEVLLPEVGAKGQLKFISGHTSELGDFRFTLLPPTSPGDTAPKYGRPFPRLDQPCLTGHG

SEQ ID NO: 879037 - protein, 562 aa, Homo sapiens; identical to SEQ ID NO: 879028

SEQ ID NO: 879038 - protein, 723 aa, Homo sapiens
RRGPAGGGGGGAGAGWQVSLTGRWSPGREAGAGEVRQDPGSTAASPSSCDADLSARMARGERRRRAVPAEGVRTAERAARGGPGRRDGRGGGPRSTAGGVALAVVVLSLALGMSGRWVLAWYRARRAVTLHSAPPVLPADSSSPAVAPDLFWGTYRPHVYFGMKTRSPKPLLTGLMWAQQGTTPGTPKLRHTCEQGDGVGPYGWEFHDGLSFGRQHIQDGALRLTTEFVKRPGGQHGGDWSWRVTVEPQDSGTSALPLVSLFFYVVTDGKEVLLPEVGAKGQLKFISGHTSELGDFRFTLLPPTSPGDTAPKYGSYNVFWTSNPGLPLLTEMVKSRLNSWFQHRPPGAPPERYLGLPGSLKWEDRGPSGQGQGQFLIQQVTLKIPISIEFVFESGSAQAGGNQALPRLAGSLLTQALESHAEGFRERFEKTFQLKEKGLSSGEQVLGQAALSGLLGGIGYFYGQGLVLPDIGVEGSEQKVDPALFPPVPLFTAVPSRSFFPRGFLWDEGFHQLVVQRWDPSLTREALGHWLGLLNADGWIGREQILGDEARARVPPEFLVQRAVHANPPTLLLPVAHMLEVGDPDDLAFLRKALPRLHAWFSWLHQSQAGPLPLSYRWRGRDPALPTLLNPKTLPSGLDDYPRASHPSVTERHLDLRCWVALGARVLTRLAEHLGEAEVAAELGPLAASLEAAESLDELHWAPELGVFADFGNHVGPNLNCSM

SEQ ID NO: 879039 - protein, 893 aa, Homo sapiens; identical to SEQ ID NO: 879025

SEQ ID NO: 879040 - protein, 562 aa, Homo sapiens; identical to SEQ ID NO: 879028

SEQ ID NO: 879041 - protein, 562 aa, Homo sapiens; identical to SEQ ID NO: 879028

SEQ ID NO: 879042 - protein, 844 aa, Homo sapiens
RRGPAGGGGGGAGAGWQVSLTGRWSPGREAGAGEVRQDPGSTAASPSSCDADLSARMARGERRRRAVPAEGVRTAERAARGGPGRRDGRGGGPRSTAGGVALAVVVLSLALGMSGRWVLAWYRARRAVTLHSAPPVLPADSSSPAVAPDLFWGTYRPHVYFGMKTRSPKPLLTGLMWAQQGTTPGTPKLRHTCEQGDGVGPYGWEFHDGLSFGRQHIQDGALRLTTEFVKRPGGQHGGDWSWRVTVEPQDSGTSALPLVSLFFYVVTDGKEVLLPEVGAKGQLKFISGHTSELGDFRFTLLPPTSPGDTAPKYGSYNVFWTSNPGLPLLTEMVKSRLNSWFQHRPPGAPPERYLGLPGSLKWEDRGPSGQGQGQFLIQQVTLKIPISIEFVFESGSAQAGGNQALPRLAGSLLTQALESHAEGFRERFEKTFQLKEKGLSSGEQVLGQAALSGLLGGIGYFYGQGLVLPDIGVEGSEQKVDPALFPPVPLFTAVPSRSFFPRGFLWDEGFHQLVVQRWDPSLTREALGHWLGLLNADGWIGREQILGDEARARVPPEFLVQRAVHANPPTLLLPVAHMLEVGDPDDLAFLRKALPRLHAWFSWLHQSQAGPLPLSYRWRGRDPALPTLLNPKTLPSGLDDYPRASHPSVTERHLDLRCWVALGARVLTRLAEHLGEAEVAAELGPLAASLEAAESLDELHWAPELGVFADFGNHTKAVQLKPRPPQGLVRVVGRPQPQLQYVDALGYVSLFPLLLRLLDPTSSRLGPLLDILADSRHLWSPFGLRSLAASSSFYGQRNSEHDPPYWRGAVWLNVNYLALGALHPRLFIWRETSTGFLLEKSPKG

SEQ ID NO: 879043 - protein, 570 aa, Homo sapiens
RRGPAGGGGGGAGAGWQVSLTGRWSPGREAGAGEVRQDPGSTAASPSSCDADLSARMARGERRRRAVPAEGVRTAERAARGGPGRRDGRGGGPRSTAGGVALAVVVLSLALGMSGRWVLAWYRARRAVTLHSAPPVLPADSSSPAVAPDLFWGTYRPHVYFGMKTRSPKPLLTGLMWAQQGTTPGTPKLRHTCEQGDGVGPYGWEFHDGLSFGRQHIQDGALRLTTEFVKRPGGQHGGDWSWRVTVEPQDSGTSALPLVSLFFYVVTDGKEVLLPEVGAKGQLKFISGHTSELGDFRFTLLPPTSPGDTAPKYGSYNVFWTSNPGLPLLTEMVKSRLNSWFQHRPPGAPPERYLGLPGSLKWEDRGPSGQGQGQFLIQQVTLKIPISIEFVFESGSAQAGGNQALPRLAGSLLTQALESHAEGFRERFEKTFQLKEKGLSSGEQVLGQAALSGLLGGIGYFYGQGLVLPDIGVEGSEQKVDPALFPPVPLFTAVPSRSFFPRGFLWDEGFHQLVVQRWDPSLTREALGHWLGLLNADGWIGREQILGDEARARVPPEFLVQRAVHVGAVQ

SEQ ID NO: 879044 - protein, 437 aa, Homo sapiens
RRGPAGGGGGGAGAGWQVSLTGRWSPGREAGAGEVRQDPGSTAASPSSCDADLSARMARGERRRRAVPAEGVRTAERAARGGPGRRDGRGGGPRSTAGGVALAVVVLSLALGMSGRWVLAWYRARRAVTLHSAPPVLPADSSSPAVAPDLFWGTYRPHVYFGMKTRSPKPLLTGLMWAQQGTTPGTPKLRHTCEQGDGVGPYGWEFHDGLSFGRQHIQDGALRLTTEFVKRPGGQHGGDWSWRVTVEPQDSGTSALPLVSLFFYVVTDGKEVLLPEVGAKGQLKFISGHTSELGDFRFTLLPPTSPGDTAPKYGSYNVFWTSNPGLPLLTEMVKSRLNSWFQHRPPGAPPERYLGLPGSLKWEDRGPSGQGQGQFLIQQVTLKIPISIEFVFESGSAQAGGNQALPRLAGSLLTQAWEHVEFKRVEKLHEESWIGEL

SEQ ID NO: 879045 - protein, 347 aa, Homo sapiens
RRGPAGGGGGGAGAGWQVSLTGRWSPGREAGAGEVRQDPGSTAASPSSCDADLSARMARGERRRRAVPAEGVRTAERAARGGPGRRDGRGGGPRSTAGGVALAVVVLSLALGMSGRWVLAWYRARRAVTLHSAPPVLPADSSSPAVAPDLFWGTYRPHVYFGMKTRSPKPLLTGLMWAQQGTTPGTPKLRHTCEQGDGVGPYGWEFHDGLSFGRQHIQDGALRLTTEFVKRPGGQHGGDWSWRVTVEPQDSGTSALPLVSLFFYVVTDGKEVLLPEVGAKGQLKFISGHTSELGDFRFTLLPPTSPGDTAPKYGRGNWGKRMLGDGSHSGSEGTKASGFCPQPLGYQ

SEQ ID NO: 879046 - protein, 265 aa, Homo sapiens
  misc_feature (253)..(253): Xaa can be any naturally occurring amino acid
MKFFLLLFTIGFCWAQYSPNTQQGRTSIVHLFEWRWVDIALECERYLAPKGFGGVQVSPPNENVAIYNPFRPWWERYQPVSYKLCTRSGNEDEFRNMVTRCNNVGVRIYVDAVINHMCGNAVSAGTSSTCGSYFNPGSRDFPAVPYSGWDFNDGKCKTGSGDIENYNDATQVRDCRLTGLLDLALEKDYVRSKIAEYMNHLIDIGVAGFRLDASKHMWPGDIKAILDKLHNLNSNWFPAGSKPFIYQEVIDLXVGEPNLKASDYF

SEQ ID NO: 879047 - protein, 88 aa, Homo sapiens
MTQNLLGPQQPMLERPMQNNTGPQPPKPGPVLQSGQGLPGVGIMPTVGQLRAQLQGVLAKNPQLRHLSPQQQQQLQALLMQRQLQQSQ

SEQ ID NO: 879048 - protein, 137 aa, Homo sapiens
ALSVGQGAGVGPEVEALPQLLEGACLRSREAPKLRLAQPSVSLGDQPGSMTQNLLGPQQPMLERPMQNNTGPQPPKPGPVLQSGQGLPGVGIMPTVGQLRAQLQGVLAKNPQLRHLSPQQQQQLQALLMQRQLQQSQ

SEQ ID NO: 879049 - protein, 235 aa, Homo sapiens
MPAKPLQHFSSPGALGPTLLLTGKEQNTVDPAVSSEATEGPSTHQGGPLAIGTTPESMATEPGEVKPSLSGDSQLLLVQPQPQPQPSSLQLQPPLRLPGQQQQQVSLLHTAGGGSHGQLGSGSSSEASSVPHLLAQPSVSLGDQPGSMTQNLLGPQQPMLERPMQNNTGPQPPKPGPVLQSGQGLPGVGIMPTVGQLRAQLQGVLAKNPQLRHLSPQQQQQLQALLMQRQLQQSQ

SEQ ID NO: 879050 - protein, 136 aa, Homo sapiens
MPAKPLQHFSSPGALGPTLLLTGKEQNTVDPAVSSEATEGPSTHQGGPLAIGTTPESMATEPGEVKPSLSGDSQLLLVQPQPQPQPSSLQLQPPLRLPGQQQQRSIFPEAKRESGGPASSGESLFPDFKRSARGTL

SEQ ID NO: 879051 - protein, 546 aa, Homo sapiens
GSLAGPSGGFFPGNLALRSLGPDSRLLQERQLQLQQQRMQLAQKLQQQQQQQQQQQHLLGQVAIQQQQQQGPGVQTNQALGPKPQGLMPPSSHQGLLVQQLSPQPPQGPQGMLGPAQVAVLQQQHPGALGPQGPHRQVLMTQSRVLSSPQLAQQGQGLMGHRLVTAQQQQQQQQHQQQGSMAGLSHLQQSLMSHSGQPKLSAQPMGSLQQLQQQQQLQQQQQLQQQQQQQLQQQQQLQQQQLQQQQQQQQLQQQQQQQLQQQQQQLQQQQQQQQQQFQQQQQQQQMGLLNQSRTLLSPQQQQQQQVALGPGMPAKPLQHFSSPGALGPTLLLTGKEQNTVDPAVSSEATEGPSTHQGGPLAIGTTPESMATEPGEVKPSLSGDSQLLLVQPQPQPQPSSLQLQPPLRLPGQQQQQVSLLHTAGGGSHGQLGSGSSSEASSVPHLLAQPSVSLGDQPGSMTQNLLGPQQPMLERPMQNNTGPQPPKPGPVLQSGQGLPGVGIMPTVGQLRAQLQGVLAKNPQLRHLSPQQQQQLQALLMQRQLQQSQ

SEQ ID NO: 879052 - protein, 351 aa, Homo sapiens
MNAILQSLSNIEQFCCYFKELPAVELRNGKTAGRRTYHTRSQGDNNVSLVEEFRKTLCALWQGSQTAFSPESLFYVVWKIMPNFRGYQQQDAHEFMRYLLDHLHLELQGGFNGVSRSAILQENSTLSASNKCCINGASTVVTAIFGGILQNEVNCLICGTESRKFDPFLDLSLDIPSQFRSKRSKNQENGPVCSLRDCLRSFTDLEELDETELYMCHKCKKKQKSTKKFWIQKLPKVLCLHLKRFHWTAYLRNKVDTYVEFPLRGLDMKWYLLEPENSGPESCLYDLAAVVVHHGSGVGSGHYTAYATHEGRWFHFNDSTVTLTDEETVVKAKAYILFYVEHQAKAGSDKL

SEQ ID NO: 879053 - protein, 245 aa, Homo sapiens
  misc_feature (244)..(244): Xaa can be any naturally occurring amino acid
AGRRRARKPGVRKPVLSLTQGLETQPPSAERPARSDTRRSLRSSSAPTSPGPGAAVLPAALLVAMECPHLSSSVCIAPDSAKFPNGSPSSWCCSVCRSNKSPWVCLTCSSVHCGRYVNGHAKKHYEDAQVPLTNHKKSEKQDKVQHTVCMDCSSYSTYCYRCDDFVVNDTKLGLVQKVREHLQNLENSAFTADRHKKRKLLENSTLNSKLLKVNGSTTAICATGLRNLGNTCFMNAILQSLSNXH

SEQ ID NO: 879054 - protein, 498 aa, Homo sapiens
MQSPPHLAVCRSNKSPWVCLTCSSVHCGRYVNGHAKKHYEDAQVPLTNHKKSEKQDKVQHTVCMDCSSYSTYCYRCDDFVVNDTKLGLVQKVREHLQNLENSAFTADRHKKRKLLENSTLNSKLLKVNGSTTAICATGLRNLGNTCFMNAILQSLSNIEQFCCYFKELPAVELRNGKTAGRRTYHTRSQGDNNVSLVEEFRKTLCALWQGSQTAFSPESLFYVVWKIMPNFRGYQQQDAHEFMRYLLDHLHLELQGGFNGVSRSAILQENSTLSASNKCCINGASTVVTAIFGGILQNEVNCLICGTESRKFDPFLDLSLDIPSQFRSKRSKNQENGPVCSLRDCLRSFTDLEELDETELYMCHKCKKKQKSTKKFWIQKLPKVLCLHLKRFHWTAYLRNKVDTYVEFPLRGLDMKCYLLEPENSGPESCLYDLAAVVVHHGSGVGSGHYTAYATHEGRWFHFNDSTVTLTDEETVVKAKAYILFYVEHQAKAGSDKL

SEQ ID NO: 879055 - protein, 500 aa, Homo sapiens
MLFGRLCQTLVCRSNKSPWVCLTCSSVHCGRYVNGHAKKHYEDAQVPLTNHKKSEKQDKVQHTVCMDCSSYSTYCYRCDDFVVNDTKLGLVQKVREHLQNLENSAFTADRHKKRKLLENSTLNSKLLKVNGSTTAICATGLRNLGNTCFMNAILQSLSNIEQFCCYFKELPAVELRNGKTAGRRTYHTRSQGDNNVSLVEEFRKTLCALWQGSQTAFSPESLFYVVWKIMPNFRGYQQQDAHEFMRYLLDHLHLELQGGFNGVSRSAILQENSTLSASNKCCINGASTVVTAIFGGILQNEVNCLICGTESRKFDPFLDLSLDIPSQFRSKRSKNQENGPVCSLRDCLRSFTDLEELDETELYMCHKCKKKQKSTKKFWIQKLPKVLCLHLKRFHWTAYLRNKVDTYVEFPLRGLDMKWYLLEPENSGPESCLYDLAAVVVHHGSGVGSGHYTAYATHEGRWFHFNDSTVTLTDEETVVKAKAYILFYVEHQAKAGSDKL

SEQ ID NO: 879056 - protein, 405 aa, Homo sapiens
TICLCFNSSAFTADRHKKRKLLENSTLNSKLLKVNGSTTAICATGLRNLGNTCFMNAILQSLSNIEQFCCYFKELPAVELRNGKTAGRRTYHTRSQGDNNVSLVEEFRKTLCALWQGSQTAFSPESLFYVVWKIMPNFRGYQQQDAHEFMRYLLDHLHLELQGGFNGVSRSAILQENSTLSASNKCCINGASTVVTAIFGGILQNEVNCLICGTESRKFDPFLDLSLDIPSQFRSKRSKNQENGPVCSLRDCLRSFTDLEELDETELYMCHKCKKKQKSTKKFWIQKLPKVLCLHLKRFHWTAYLRNKVDTYVEFPLRGLDMKWYLLEPENSGPESCLYDLAAVVVHHGSGVGSGHYTAYATHEGRWFHFNDSTVTLTDEETVVKAKAYILFYVEHQAKAGSDKL

SEQ ID NO: 879057 - protein, 217 aa, Homo sapiens
AGRRRARKPGVRKPVLSLTQGLETQPPSAERPARSDTRRSLRSSSAPTSPGPGAAVLPAALLVAMECPHLSSSVCIAPDSAKFPNGSPSSWCCSVCRSNKSPWVCLTCSSVHCGRYVNGHAKKHYEDAQVPLTNHKKSEKQDKVQHTVCMDCSSYSTYCYRCDDFVVNDTKLGLVQKVREHLQNLENSAFTADRHKKRKLLENSTLNSKLLKVNVSN

SEQ ID NO: 879058 - protein, 584 aa, Homo sapiens
AGRRRARKPGVRKPVLSLTQGLETQPPSAERPARSDTRRSLRSSSAPTSPGPGAAVLPAALLVAMECPHLSSSVCIAPDSAKFPNGSPSSWCCSVCRSNKSPWVCLTCSSVHCGRYVNGHAKKHYEDAQVPLTNHKKSEKQDKVQHTVCMDCSSYSTYCYRCDDFVVNDTKLGLVQKVREHLQNLENSAFTADRHKKRKLLENSTLNSKLLKVNGSTTAICATGLRNLGNTCFMNAILQSLSNIEQFCCYFKELPAVELRNGKTAGRRTYHTRSQGDNNVSLVEEFRKTLCALWQGSQTAFSPESLFYVVWKIMPNFRGYQQQDAHEFMRYLLDHLHLELQGGFNGVSRSAILQENSTLSASNKCCINGASTVVTAIFGGILQNEVNCLICGTESRKFDPFLDLSLDIPSQFRSKRSKNQENGPVCSLRDCLRSFTDLEELDETELYMCHKCKKKQKSTKKFWIQKLPKVLCLHLKRFHWTAYLRNKVDTYVEFPLRGLDMKWYLLEPENSGPESCLYDLAAVVVHHGSGVGSGHYTAYATHEGRWFHFNDSTVTLTDEETVVKAKAYILFYVEHQAKAGSDKL

SEQ ID NO: 879059 - protein, 243 aa, Homo sapiens
  misc_feature (238)..(238): Xaa can be any naturally occurring amino acid
AGRRRARKPGVRKPVLSLTQGLETQPPSAERPARSDTRRSLRSSSAPTSPGPGAAVLPAALLVAMECPHLSSSVCIAPDSAKFPNGSPSSWCCSVCRSNKSPWVCLTCSSVHCGSYRCDDFVVNDTKLGLVQKVREHLQNLENSAFTADRHKKRKLLENSTLNSKLLKVNGSTTAICATGLRNLGNTCFMNAILQSLSNIEQFCCYFKELPAVELRNGKTAGRRTYHTRSQGDNNVSXVEEFT

SEQ ID NO: 879060 - protein, 435 aa, Homo sapiens
MDCSSYSTYCYRCDDFVVNDTKLGLVQKVREHLQNLENSAFTADRHKKRKLLENSTLNSKLLKVNGSTTAICATGLRNLGNTCFMNAILQSLSNIEQFCCYFKELPAVELRNGKTAGRRTYHTRSQGDNNVSLVEEFRKTLCALWQGSQTAFSPESLFYVVWKIMPNFRGYQQQDAHEFMRYLLDHLHLELQGGFNGVSRSAILQENSTLSASNKCCINGASTVVTAIFGGILQNEVNCLICGTESRKFDPFLDLSLDIPSQFRSKRSKNQENGPVCSLRDCLRSFTDLEELDETELYMCHKCKKKQKSTKKFWIQKLPKVLCLHLKRFHWTAYLRNKVDTYVEFPLRGLDMKCYLLEPENSGPESCLYDLAAVVVHHGSGVGSGHYTAYATHEGRWFHFNDSTVTLTDEETVVKAKAYILFYVEHQAKAGSDKL

SEQ ID NO: 879061 - protein, 351 aa, Homo sapiens; identical to SEQ ID NO: 879052

SEQ ID NO: 879062 - protein, 271 aa, Homo sapiens
MPNFRGYQQQDAHEFMRYLLDHLHLELQGGFNGVSRSAILQENSTLSASNKCCINGASTVVTAIFGGILQNEVNCLICGTESRKFDPFLDLSLDIPSQFRSKRSKNQENGPVCSLRDCLRSFTDLEELDETELYMCHKCKKKQKSTKKFWIQKLPKVLCLHLKRFHWTAYLRNKVDTYVEFPLRGLDMKCYLLEPENSGPESCLYDLAAVVVHHGSGVGSGHYTAYATHEGRWFHFNDSTVTLTDEETVVKAKAYILFYVEHQAKAGSDKL

SEQ ID NO: 879063 - protein, 293 aa, Homo sapiens
FQGDLPCECLQVEAKLVLRATGALMKLGKAPWQGRSPSSVMGRLSSPAAGIQEGKLFPRRLQNQHKCPVICSVAVIPIQPLIQQPASSGECGSCSCMGWRLLVSLTDIQQPVTQVTKRVGWGGMPGQSLVFALCAMHSQNIVLVLEILNNSSQKTLHSVTILFLVLSLITSLLSSGFTFYNSISNPYQTFLGPTGVYTWNGLGASFVFVTMILFVANTQSNQLSEELFQMLYPATTSKGTTHSYGYSFWLILLVILLNIVTVTIIIFYQKARYQRKQEQRKPMEYAPRDGILF

SEQ ID NO: 879064 - protein, 226 aa, Homo sapiens
MPTTKKTLMFLSSFFTSLGSFIVICSILGTQAWITSTIAVRDSASNGSIFITYGLFRGESSEELSHGLAEPKKKFAVLEILNNSSQKTLHSVTILFLVLSLITSLLSSGFTFYNSISNPYQTFLGPTGVYTWNGLGASFVFVTMILFVANTQSNQLSEELFQMLYPATTSKGTTHSYGYSFWLILLVILLNIVTVTIIIFYQKARYQRKQEQRKPMEYAPRDGILF

SEQ ID NO: 879065 - protein, 439 aa, Homo sapiens
MRRAALRLCALGKGQLTPGRGLTQGPQNPKKQGIFHIHEVRDKLREIVGASTNWRDHVKAMEERKLLHSFLAKSQDGLPPRRMKDSYIEVLLPLGSEPELREKYLTVQNTVRFGRILEDLDSLGVLICYMHNKIHSAKMSPLSIVTALVDKIDMCKKSLSPEQDIKFSGHVSWVGKTSMEVKMQMFQLHGDEFCPVLDATFVMVARDSENKGPAFVNPLIPESPEEEELFRQGELNKGRRIAFSSTSLLKMAPSAEERTTIHEMFLSTLDPKTISFRSRVLPSNAVWMENSKLKSLEICHPQERNIFNRIFGGFLMRKAYELAWATACSFGGSRPFVVAVDDIMFQKPVEVGSLLFLSSQVCFTQNNYIQVRVHSEVASLQEKQHTTTNVFHFTFMSEKEVPLVFPKTYGESMLYLDGQRHFNSMSGPATLRKDYLVEP

SEQ ID NO: 879066 - protein, 379 aa, Homo sapiens
MEERKLLHSFLAKSQDGLPPRRMKDSYIEVLLPLGSEPELREKYLTVQNTVRFGRILEDLDSLGVLICYMHNKIHSAKMSPLSIVTALVDKIDMCKKSLSPEQDIKFSGHVSWVGKTSMEVKMQMFQLHGDEFCPVLDATFVMVARDSENKGPAFVNPLIPESPEEEELFRQGELNKGRRIAFSSTSLLKMAPSAEERTTIHEMFLSTLDPKTISFRSRVLPSNAVWMENSKLKSLEICHPQERNIFNRIFGGFLMRKAYELAWATACSFGGSRPFVVAVDDIMFQKPVEVGSLLFLSSQVCFTQNNYIQVRVHSEVASLQEKQHTTTNVFHFTFMSEKEVPLVFPKTYGESMLYLDGQRHFNSMSGPATLRKDYLVEP

SEQ ID NO: 879067 - protein, 448 aa, Homo sapiens
MRRAALRLCALGKGQLTPGRGLTQGPQNPKKQGIFHIHEACSSIHVNHVRDKLREIVGASTNWRDHVKAMEERKLLHSFLAKSQDGLPPRRMKDSYIEVLLPLGSEPELREKYLTVQNTVRFGRILEDLDSLGVLICYMHNKIHSAKMSPLSIVTALVDKIDMCKKSLSPEQDIKFSGHVSWVGKTSMEVKMQMFQLHGDEFCPVLDATFVMVARDSENKGPAFVNPLIPESPEEEELFRQGELNKGRRIAFSSTSLLKMAPSAEERTTIHEMFLSTLDPKTISFRSRVLPSNAVWMENSKLKSLEICHPQERNIFNRIFGGFLMRKAYELAWATACSFGGSRPFVVAVDDIMFQKPVEVGSLLFLSSQVCFTQNNYIQVRVHSEVASLQEKQHTTTNVFHFTFMSEKEVPLVFPKTYGESMLYLDGQRHFNSMSGPATLRKDYLVEP

SEQ ID NO: 879068 - protein, 448 aa, Homo sapiens; identical to SEQ ID NO: 879067

SEQ ID NO: 879069 - protein, 448 aa, Homo sapiens; identical to SEQ ID NO: 879067

SEQ ID NO: 879070 - protein, 249 aa, Homo sapiens [sequence omitted]

SEQ ID NO: 879071 - protein, 205 aa, Homo sapiens
MRRAALRLCALGKGQLTPGRGLTQGPQNPKKQGIFHIHEACSSIHVNHVRDKLREIVGASTNWRDHVKAMEERKLLHSFLAKSQDGLPPRRMKDSYIEVLLPLGSEPELREKYLTVQNTVRFGRILEDLDSLGVLICYMHNKIHSAKMSPLSIVTALVDKIDMCKKSLSPEQDIKFSGHVSWVGKTSMEVKMQMFQAGICKSTHP

SEQ ID NO: 879072 - protein, 504 aa, Homo sapiens
MKSTRNGKCVVLLYLHVSVISRTRQQKWSTPVADSKDPVAPASAHLSGFEFHAYYHPVITYCFHGMTGLRDGLCALGKGQLTPGRGLTQGPQNPKKQGIFHIHEVRDKLREIVGASTNWRDHVKAMEERKLLHSFLAKSQDGLPPRRMKDSYIEVLLPLGSEPELREKYLTVQNTVRFGRILEDLDSLGVLICYMHNKIHSAKMSPLSIVTALVDKIDMCKKSLSPEQDIKFSGHVSWVGKTSMEVKMQMFQLHGDEFCPVLDATFVMVARDSENKGPAFVNPLIPESPEEEELFRQGELNKGRRIAFSSTSLLKMAPSAEERTTIHEMFLSTLDPKTISFRSRVLPSNAVWMENSKLKSLEICHPQERNIFNRIFGGFLMRKAYELAWATACSFGGSRPFVVAVDDIMFQKPVEVGSLLFLSSQVCFTQNNYIQVRVHSEVASLQEKQHTTTNVFHFTFMSEKEVPLVFPKTYGESMLYLDGQRHFNSMSGPATLRKDYLVEP

SEQ ID NO: 879073 - protein, 448 aa, Homo sapiens; identical to SEQ ID NO: 879067

SEQ ID NO: 879074 - protein, 448 aa, Homo sapiens; identical to SEQ ID NO: 879067

SEQ ID NO: 879075 - protein, 186 aa, Homo sapiens
TNKELQALALSFQGTLDPKTISFRSRVLPSNAVWMENSKLKSLEICHPQERNIFNRIFGGFLMRKAYELAWATACSFGGSRPFVVAVDDIMFQKPVEVGSLLFLSSQVCFTQNNYIQVRVHSEVASLQEKQHTTTNVFHFTFMSEKEVPLVFPKTYGESMLYLDGQRHFNSMSGPATLRKDYLVEP

SEQ ID NO: 879076 - protein, 171 aa, Homo sapiens
MAPSAEERTTIHEMFLSTLDPKTISFRSRVLPSNAVWMENSIFGGFLMRKAYELAWATACSFGGSRPFVVAVDDIMFQKPVEVGSLLFLSSQVCFTQNNYIQVRVHSEVASLQEKQHTTTNVFHFTFMSEKEVPLVFPKTYGESMLYLDGQRHFNSMSGPATLRKDYLVEP

SEQ ID NO: 879077 - protein, 127 aa, Homo sapiens
MRRAALRLCALGKGQLTPGRGLTQGPQNPKKQGIFHIHEDMCKKSLSPEQDIKFSGHVSWVGKTSMEVKMQMFQLHGDEFCPVLDATFVMVARDSENKGPAFVNPLIPESPEEEELFRQGECTLICL

SEQ ID NO: 879078 - protein, 115 aa, Homo sapiens
MCDAHLRGPSGIITSPNFPIQYDNNAHCVWIITALNPSKVGGDPGNIQCNKEGLSVETQSLRLRNRSCLLGNSKDNGCCVPNPVHGTGLQVRYRCIQGLPIHSPSDISFSKKHSL

SEQ ID NO: 879079 - protein, 190 aa, Homo sapiens
LVVTQVGVSQGHNMCPDPGIPERGKRLGSDFRLGSSVQFTCNEGYDLQGSKRITCMKVSDMFAAWSDHRPVCRARMCDAHLRGPSGIITSPNFPIQYDNNAHCVWIITALNPSKVGGDPGNIQCNKEGLSVETQSLRLRNRSCLLGNSKDNGCCVPNPVHGTGLQVRYRCIQGLPIHSPSDISFSKKHSL

SEQ ID NO: 879080 - protein, 79 aa, Homo sapiens
LVVTQVGVSQGHNMCPDPGIPERGKRLGSDFRLGSSVQFTCNEGYDLQGSKRITCMKVSDMFAAWSDHRPVCRDLNNCF

SEQ ID NO: 879081 - protein, 115 aa, Homo sapiens
GVTARIWDACSVSLFVCLFLRQSLTLLPRLECSGAISAYCSLRFRGSSDSPASACQVAGTTGAHHHAWLIFEFLVESGFHYVGQAGLERLTSSDPSASAFQSSGITGVSHRARPE

SEQ ID NO: 879082 - protein, 142 aa, Homo sapiens
YSASFGKGGKASLAEAPIPFPACSVAGDWKTLCDSVQSLGGKASFQDSSSPGATSSPKGIMAALRSLVKPKIVKKRTKKFIRHQSDRYVKIKMRRIMSGVKVKHPAQDSAARKWPSALYTTGAGIHTEKWRPRRENSSMTAL

SEQ ID NO: 879083 - protein, 136 aa, Homo sapiens [sequence omitted]

SEQ ID NO: 879084 - protein, 136 aa, Homo sapiens [sequence omitted]

SEQ ID NO: 879085 - protein, 136 aa, Homo sapiens [sequence omitted]

SEQ ID NO: 879086 - protein, 115 aa, Homo sapiens; identical to SEQ ID NO: 879081

SEQ ID NO: 879087 - protein, 136 aa, Homo sapiens [sequence omitted]

SEQ ID NO: 879088 - protein, 136 aa, Homo sapiens [sequence omitted]

SEQ ID NO: 879089 - protein, 136 aa, Homo sapiens [sequence omitted]

SEQ ID NO: 879090 - protein, 86 aa, Homo sapiens
LPFPCQDPEVTSHQPRRSLIPSLFLGASFCIMAALRSLVKPKIVKKRTKKFIRHQSDRYVKIKRNWWKPRGIDNRVHRRFKGQVLI

SEQ ID NO: 879091 - protein, 103 aa, Homo sapiens
GSLFYRQENSEVLRAVSAPVLAISISTQSPRIPLVSPFLGSENGGGACLPSGKSHELLVFPTKKACKEIVKSYYQRQLLCGILPFHLVLFSLPYGTVGSLHRC

SEQ ID NO: 879092 - protein, 344 aa, Homo sapiens
MVSVNSSHCFYNDSFKYTLYGCMFSMVFVLGLISNCVAIYIFICVLKVRNETTTYMINLAMSDLLFVFTLPFRIFYFTTRNWPFGDLLCKISVMLFYTNMYGSILFLTCISVDRFLAIVYPFKSKTLRTKRNAKIVCTGVWLTVIGGSAPAVFVQSTHSQGNNASEACFENFPEATWKTYLSRIVIFIEIVGFFIPLILNVTCSSMVLKTLTKPVTLSRSKINKTKVLKMIFVHLIIFCFCFVPYNINLILYSLVRTQTFVNCSVVAAVRTMYPITLCIAVSNCCFDPIVYYFTSDTIQNSIKMKNWSVRRSDFRFSEVHGAENFIQHNLQTLKSKIFDNESAA

SEQ ID NO: 879093 - protein, 344 aa, Homo sapiens; identical to SEQ ID NO: 879092

SEQ ID NO: 879094 - protein, 344 aa, Homo sapiens; identical to SEQ ID NO: 879092

SEQ ID NO: 879095 - protein, 344 aa, Homo sapiens; identical to SEQ ID NO: 879092

SEQ ID NO: 879096 - protein, 344 aa, Homo sapiens; identical to SEQ ID NO: 879092

SEQ ID NO: 879097 - protein, 383 aa, Homo sapiens
MEGEGVRNFKELRAKFQNLDAPPLPGPIKFPAGVSPKGDIGGTQSTQILANGKPLSSNHKQRTPYCSSSESQPLQPQKIKLAQKSEIPKCSNSPGPLGKSTVCSATSSQKASLLLEVTQSNVEIITKEKVMVANSFRNKLWNWEKVSSQKSEMSSALLLANYGSKAIHLEGQKGMGLTPEEPRKKLETKGAQTLPSQKHVVAPKILHNVSEDPSFVISQHIRKSWENPPPERSPASSPCQPIYECELASQAPEKQPDVRHHHLPKTKPLPSIDSLGPPPPKPSRPPIVNLQAFQRQPAAVPKTQGEVTVEEGSLSPERLFNAEFEEPHNYEATISYLRHSGNSINLCTAKEIADPTYEVGIEELQKPGKNFPYPEPSAKHEDK

SEQ ID NO: 879098 - protein, 365 aa, Homo sapiens
MEGEGVRNFKELRAKFQNLDAPPLPGPIKFPAGVSPKGDIGGTQSTQILANGKPLSSNHKQRTPYCSSSESQPLQPQKIKLAQKSEIPSSQKASLLLEVTQSNVEIITKEKVMVANSFRNKLWNWEKVSSQKSEMSSALLLANYGSKAIHLEGQKGMGLTPEEPRKKLETKGAQTLPSQKHVVAPKILHNVSEDPSFVISQHIRKSWENPPPERSPASSPCQPIYECELASQAPEKQPDVRHHHLPKTKPLPSIDSLGPPPPKPSRPPIVNLQAFQRQPAAVPKTQGEVTVEEGSLSPERLFNAEFEEPHNYEATISYLRHSGNSINLCTAKEIADPTYEVGIEELQKPGKNFPYPEPSAKHEDK

SEQ ID NO: 879099 - protein, 169 aa, Homo sapiens
LLLVFLANTVSGRHKEESNRTSKTGGGITFLLVSFRTTAPLFLVSPFFFEITSSVFTTSSSSWQPSAPLPCIPLPAREDQQPVPGLSVCLHTIIIPCIFSPSTDTTPVFTSFIQSLAWHYSHSLMNTLNCSLLHSSISLKLRGTLPPPSLCLRMSTLPWLVNVPYQGHS

SEQ ID NO: 879100 - protein, 149 aa, Homo sapiens
MHSLDRRKINDPEFCGVGYQAPKGCFVVIIHNIRSVQKSCVHVCMRVGNGAASNSNSWKKFCFSPAPWPRAEGHQVQKSAERQRLRPRNSSLCVLERGKVSTGTPSVAELKPEHEHPASQFWLECGTSFPITASLRGLLLLIWGQPEKK

SEQ ID NO: 879101 - protein, 79 aa, Homo sapiens
DRKLLGSSNSPTLASQSIRIIGVSHHTQLTLGIYGTKPPSGTTLQKSQFPALNSSWTYPCVVLAPCPGLEAVLGLGPLE

SEQ ID NO: 879102 - protein, 137 aa, Homo sapiens
MSKGSHSPHTGSSQWWGEAITPQTQLQGAQDRRQWGNEDFLWGPSSLGDMEKGRGPKTHQGKRSHQAQGRGQRQQHSRTSHGTHRPGWGPRKASGLREEGEGCHTRKVLYVGKENRVVLGYFKGQNQELWHCVDGSL

SEQ ID NO: 879103 - protein, 747 aa, Homo sapiens
MSQVKSSYSYDAPSDFINFSSLDDEGDTQNIDSWFEEKANLENKLLGKNGTGGLFQGKTPLRKANLQQAIVTPLKPVDNTYYKEAEKENLVEQSIPSNACSSLEVEAAISRKTPAQPQRRSLRLSAQKDLEQKEKHHVKMKAKRCATPVIIDEILPSKKMKVSNNKKKPEEEGSAHQDTAEKNASSPEKAKGRHTVPCMPPAKQKFLKSTEEQELEKSMKMQQEVVEMRKKNEEFKKLALAGIGQPVKKSVSQVTKSVDFHFRTDERIKQHPKNQEEYKEVNFTSELRKHPSSPARVTKGCTIVKPFNLSQGKKRTFDETVSTYVPLAQQVEDFHKRTPNRYHLRSKKDDINLLPSKSSVTKICRDPQTPVLQTKHRARAVTCKSTAELEAEELEKLQQYKFKARELDPRILEGGPILPKKPPVKPPTEPIGFDLEIEKRIQERESKKKTEDEHFEFHSRPCPTKILEDVVGVPEKKVLPITVPKSPAFALKNRIRMPTKEDEEEDEPVVIKAQPVPHYGVPFKPQIPEARTVEICPFSFDSRDKERQLQKEKKIKELQKGEVPKFKALPLPHFDTINLPEKKVKNVTQIEPFCLETDRRGALKAQTWKHQLEEELRQQKEAACFKARPNTVISQEPFVPKKEKKSVAEGLSGSLVQEPFQLATEKRAKERQELEKRMAEVEAQKAQQLEEARLQEEEQKKEELARLRRELVHKANPIRKYQGLEIKSSDQPLTVPVSPKFSTRFHC

SEQ ID NO: 879104 - protein, 747 aa, Homo sapiens; identical to SEQ ID NO: 879103

SEQ ID NO: 879105 - protein, 783 aa, Homo sapiens
MSQVKSSYSYDAPSDFINFSSLDDEGDTQNIDSWFEEKANLENKLLGKNGTGGLFQGKTPLRKANLQQAIVTPLKPVDNTYYKEAEKENLVEQSIPSNACSSLEVEAAISRKTPAQPQRRSLRLSAQKDLEQKEKHHVKMKAKRCATPVIIDEILPSKKMKVSNNKKKPEEEGSAHQDTAEKNASSPEKAKGRHTVPCMPPAKQKFLKSTEEQELEKSMKMQQEVVEMRKKNEEFKKLALAGIGQPVKKSVSQVTKSVDFHFRTDERIKQHPKNQEEYKEVNFTSELRKHPSSPARVTKGCTIVKPFNLSQGKKRTFDETVSTYVPLAQQVEDFHKRTPNRYHLRSKKDDIKTGSCSVTQAGVQWRDHGSLQCPTPGLKQSSCLSLPNLLPSKSSVTKICRDPQTPVLQTKHRARAVTCKSTAELEAEELEKLQQYKFKARELDPRILEGGPILPKKPPVKPPTEPIGFDLEIEKRIQERESKKKTEDEHFEFHSRPCPTKILEDVVGVPEKKVLPITVPKSPAFALKNRIRMPTKEDEEEDEPVVIKAQPVPHYGVPFKPQIPEARTVEICPFSFDSRDKERQLQKEKKIKELQKGEVPKFKALPLPHFDTINLPEKKVKNVTQIEPFCLETDRRGALKAQTWKHQLEEELRQQKEAACFKARPNTVISQEPFVPKKEKKSVAEGLSGSLVQEPFQLATEKRAKERQELEKRMAEVEAQKAQQLEEARLQEEEQKKEELARLRRELVHKANPIRKYQGLEIKSSDQPLTVPVSPKFSTRFHC

SEQ ID NO: 879106 - protein, 747 aa, Homo sapiens; identical to SEQ ID NO: 879103

SEQ ID NO: 879107 - protein, 608 aa, Homo sapiens [sequence omitted]

SEQ ID NO: 879108 - protein, 608 aa, Homo sapiens [sequence omitted]

SEQ ID NO: 879109 - protein, 729 aa, Homo sapiens
MSQVKSSYSYDAPSDFINFSSLDDEGDTQNIDSWFEEKANLENKLLGKNGTGGLFQGKTPLRKANLQQAIVTPLKPVDNTYYKEAEKENLVEQSIPSNACSSLEVEAAISRKTPAQPQRRSLRLSAQKDLEQKEKHHVKMKAKRCATPVIIDEILPSKKMKVSNNKKKPEEEGSAHQDTAEKNASSPEKAKGRHTVPCMPPAKQKFLKSTEEQELEKSMKMQQEVVEMRKKNEEFKKLALAGIGQPVKKSVSQVTKSVDFHFRTDERIKQHPKNQEEYKEVNFTSELRKHPSSPARVTKGCTIVKPFNLSQGKKRTFDETVSTYVPLAQQVEDFHKRTPNRYHLRSKKDDINLLPSKSSVTKICRDPQTPVLQTKHRARAVTCKSTAELEAEELEKLQQYKFKARELDPRILEGGPILPKKPPVKPPTEPIGFDLEIEKRIQERESKKKTEDEHFEFHSRPCPTKILEDVVGVPEKKVLPITVPKSPAFALKNRIRMPTKEDEEEDEPVVIKAQPVPHYGVPFKPQIPEARTVEICPFSFDSRDKERQLQKEKKIFDTINLPEKKVKNVTQIEPFCLETDRRGALKAQTWKHQLEEELRQQKEAACFKARPNTVISQEPFVPKKEKKSVAEGLSGSLVQEPFQLATEKRAKERQELEKRMAEVEAQKAQQLEEARLQEEEQKKEELARLRRELVHKANPIRKYQGLEIKSSDQPLTVPVSPKFSTRFHC

SEQ ID NO: 879110 - protein, 251 aa, Homo sapiens [sequence omitted]

SEQ ID NO: 879111 - protein, 588 aa, Homo sapiens
MSQVKSSYSYDAPSDFINFSSLDDEGDTQNIDSWFEEKANLENKLLGKNGTGGLFQGKTPLRKANLQQAIVTPLKPVDNTYYKEAEKENLVEQSIPSNACSSLEVEAAISRKTPAQPQRRSLRLSAQKDLEQKEKHHVKMKAKRCATPVIIDEILPSKKMKVSNNKKKPEEEGSAHQDTAEKNASSPEKAKGRHTVPCMPPAKQKFLKSTEEQELEKSMKMQQEVVEMRKKNEEFKKLALAGIGQPVKKSVSQVTKSVDFHFRTDERIKQHPKNQEEYKEVNFTSELRKHPSSPARVTKGCTIVKPFNLSQGKKRTFDETVSTYVPLAQQVEDFHKRTPNRYHLRSKKDDINLLPSKSSVTKICRDPQTPVLQTKHRARAVTCKSTAELEAEELEKLQQYKFKARELDPRILEGGPILPKKPPVKPPTEPIGFDLEIEKRIQERESKKKTEDEHFEFHSRPCPTKILEDVVGVPEKKVLPITVPKSPAFALKNRIRMPTKEDEEEDEPVVIKAQPVPHYGVPFKPQIPEARTVEICPFSFDSRDKERQLQKEKKIKELQKGEVPKFKALPLPHFDTINLLLWQVNGRR

SEQ ID NO: 879112 - protein, 129 aa, Homo sapiens
VHVCATCSFQGAYVYASPACAPIFFLFLYLEGLSGSLVQEPFQLATEKRAKERQELEKRMAEVEAQKAQQLEEARLQEEEQKKEELARLRRELVHKANPIRKYQGLEIKSSDQPLTVPVSPKFSTRFHC

SEQ ID NO: 879113 - protein, 416 aa, Homo sapiens
MSQVKSSYSYDAPSDFINFSSLDDEGDTQNIDSWFEEKANLENKLLGKNGTGGLFQGKTPLRKANLQQAIVTPLKPVDNTYYKEAEKENLVEQSIPSNACSSLEVEAAISRKTPAQPQRRSLRLSAQKDLEQKEKHHVKMKAKRCATPVIIDEILPSKKMKVSNNKKKPEEEGSAHQDTAEKNASSPEKAKGRHTVPCMPPAKQKFLKSTEEQELEKSMKMQQEVVEMRKKNEEFKKLALAGIGQPVKKSVSQVTKSVDFHFRTDERIKQHPKNQEEYKEVNFTSELRKHPSSPARVTKGCTIVKPFNLSQGKKRTFDETVSTYVPLAQQVEDFHKRTPNRYHLRSKKDDINLLPSKSSVTKICRDPQTPVLQTKHRARAVTCKSTAELEAEELEKLQQYKFKALKLDAQPSLGTH

SEQ ID NO: 879114 - protein, 747 aa, Homo sapiens; identical to SEQ ID NO: 879103

SEQ ID NO: 879115 - protein, 747 aa, Homo sapiens; identical to SEQ ID NO: 879103

SEQ ID NO: 879116 - protein, 747 aa, Homo sapiens; identical to SEQ ID NO: 879103

SEQ ID NO: 879117 - protein, 747 aa, Homo sapiens; identical to SEQ ID NO: 879103

SEQ ID NO: 879118 - protein, 755 aa, Homo sapiens
MSQVKSSYSYDAPSDFINFSSLDDEGDTQNIDSWFEEKANLENKLLGKNGTGGLFQGKTPLRKANLQQAIVTPLKPVDNTYYKEAEKENLVEQSIPSNACSSLEVEAGLEFFDMAASTSREELQPSLRSLRLSAQKDLEQKEKHHVKMKAKRCATPVIIDEILPSKKMKVSNNKKKPEEEGSAHQDTAEKNASSPEKAKGRHTVPCMPPAKQKFLKSTEEQELEKSMKMQQEVVEMRKKNEEFKKLALAGIGQPVKKSVSQVTKSVDFHFRTDERIKQHPKNQEEYKEVNFTSELRKHPSSPARVTKGCTIVKPFNLSQGKKRTFDETVSTYVPLAQQVEDFHKRTPNRYHLRSKKDDINLLPSKSSVTKICRDPQTPVLQTKHRARAVTCKSTAELEAEELEKLQQYKFKARELDPRILEGGPILPKKPPVKPPTEPIGFDLEIEKRIQERESKKKTEDEHFEFHSRPCPTKILEDVVGVPEKKVLPITVPKSPAFALKNRIRMPTKEDEEEDEPVVIKAQPVPHYGVPFKPQIPEARTVEICPFSFDSRDKERQLQKEKKIKELQKGEVPKFKALPLPHFDTINLPEKKVKNVTQIEPFCLETDRRGALKAQTWKHQLEEELRQQKEAACFKARPNTVISQEPFVPKKEKKSVAEGLSGSLVQEPFQLATEKRAKERQELEKRMAEVEAQKAQQLEEARLQEEEQKKEELARLRRELVHKANPIRKYQGLEIKSSDQPLTVPVSPKFSTRFHC

SEQ ID NO: 879119 - protein, 747 aa, Homo sapiens; identical to SEQ ID NO: 879103

SEQ ID NO: 879120 - protein, 747 aa, Homo sapiens; identical to SEQ ID NO: 879103

SEQ ID NO: 879121 - protein, 895 aa, Homo sapiens
MSQVKSSYSYDAPSDFINFSSLDDEGDTQNIDSWFEEKANLENKLLGKNGTGGLFQGKTPLRKANLQQAIVTPLKPVDNTYYKEAEKENLVEQSIPSNACSSLEVEAAISRKTPAQPQRRSLRLSAQKDLEQKEKHHVKMKAKRCATPVIIDEILPSKKMKVSNNKKKPEEEGSAHQDTAEKNASSPEKAKGRHTVPCMPPAKQKFLKSTEEQELEKSMKMQQEVVEMRKKNEEFKKLALAGIGQPVKKSVSQVTKSVDFHFRTDERIKQHPKNQEEYKEVNFTSELRKHPSSPARVTKGCTIVKPFNLSQGKKRTFDETVSTYVPLAQQVEDFHKRTPNRYHLRSKKDDINLLPSKSSVTKICRDPQTPVLQTKHRARAVTCKSTAELEAEELEKLQQYKFKARELDPRILEGGPILPKKPPVKPPTEPIGFDLEIEKRIQERESKKKTEDEHFEFHSRPCPTKILEDVVGVPEKKVLPITVPKSPAFALKNRIRMPTKEDEEEDEPVVIKAQPVPHYGVPFKPQIPEARTVEICPFSFDSRDKERQLQKEKKIKELQKGEVPKFKALPLPHFDTINLPEKKVKNVTQIEPFCLETDRRGALKAQTWKHQLEEELRQQKEAACFKARPNTVISQEPFVPKKEKKSVAEGLSGSLVQEPFQLATEKRAKERQELEKRMAEVEAQKAQQLEEARLQEEEQKKEELARLRRELVHKANPIRKYQGLEIKSSDQPLTVPVSPKFSTRFHCRAVSELTAENYSSGTYADTARQWDLHLNLKTMTKQEDHRETPRNPGMRQAEHHWQEQSQRSQDREGHNGQHNRQKTILGQMRHPDEHHNNTYNETIMNDTKGLSPKHIRDPMRMHGRTHKKPKKAVTVTLERHQQKQHQRNKERTTIK

SEQ ID NO: 879122 - protein, 485 aa, Homo sapiens [sequence omitted]

SEQ ID NO: 879123 - protein, 134 aa, Homo sapiens
MSQVKSSYSYDAPSDFINFSSLDDEGDTQNIDSWFEEKANLENKLLGKNGTGGLFQGKTPLRKANLQQAIVTPLKPVDNTYYKEAEKENLVEQSIPSNACSSLEVEAAISRKTPAQPQSSRGTLVDISVLKTRL

SEQ ID NO: 879124 - protein, 158 aa, Homo sapiens
MKPKMKYSTNKISTAKWKNTASKALCFKLGKSQQKAKEVCPMYFMKLRSGLMIKKEACYFRRETTKRPSLKTGRKHKRHLVLAACQQQSTVECFAFGISGVQKYTRALHDSSITGISPITEYLASLSTYNDQSITFALEDESYEIYVEDLKKDEKKGR

SEQ ID NO: 879125 - protein, 103 aa, Homo sapiens
MKPKMKYSTNKISTAKWKNTASKALCFKLGKSQQKAKEVCPMYFMKLRSGLMIKKEACYFRRETTKRPSLKTALVYQGSRNILEHFMIQVSQEFHLLQSILLL

SEQ ID NO: 879126 - protein, 270 aa, Homo sapiens
MKPKMKYSTNKISTAKWKNTASKALCFKLGKSQQKAKEVCPMYFMKLRSGLMIKKEACYFRRETTKRPSLKTGRKHKRHLVLAACQQQSTVECFAFGISGVQKYTRALHDSSITGISPITEYLASLSTYNDQSITFALEDESYEIYVEDLKKDEKKDKVLLSYYESQHPSNESGDGVDGKMLMVTLSPTKDFWLHANNKEHSVELHKCEKPLPDQAFFVLHNMHSNCVSFECKTDPGVFIGVKDNHLALIKVDSSENLCTENILFKLSET

SEQ ID NO: 879127 - protein, 270 aa, Homo sapiens; identical to SEQ ID NO: 879126

SEQ ID NO: 879128 - protein, 270 aa, Homo sapiens; identical to SEQ ID NO: 879126

SEQ ID NO: 879129 - protein, 270 aa, Homo sapiens; identical to SEQ ID NO: 879126

SEQ ID NO: 879130 - protein, 158 aa, Homo sapiens; identical to SEQ ID NO: 879124

SEQ ID NO: 879131 - protein, 417 aa, Homo sapiens
AARLLGGTEAAAGLWARGWMPPACGSLRFPPSRGTSHGRRSRSGAAPAACRASARLLLLATSVLLLFAFSLPGSRASNQPPGGGGGSGGDCPGGKGKSINCSELNVRESDVRVCDESSCKYGGVCKEDGDGLKCACQFQCHTNYIPVCGSNGDTYQNECFLRRAACKHQKEITVIARGPCYSDNGSGSGEGEEEGSGAEVHRKHSKCGPCKYKAECDEDAENVGCVCNIDCSGYSFNPVCASDGSSYNNPCFVREASCIKQEQIDIRHLGHCTDTDDTSLLGKKDDGLQYRPDVKDASDQREDVYIGNHMPCPENLNGYCIHGKCEFIYSTQKASCRCESGYTGQHCEKTDFSILYVVPSRQKLTHVLIAAIIGAVQIAIIVAIVMCITRKCPKNNRGRRQKQNLGHFTSDTSSRMV

SEQ ID NO: 879132 - protein, 380 aa, Homo sapiens
MGAAAAEAPLRLPAAPPLAFCCYTSVLLLFAFSLPGSRASNQPPGGGGGSGGDCPGGKGKSINCSELNVRESDVRVCDESSCKYGGVCKEDGDGLKCACQFQCHTNYIPVCGSNGDTYQNECFLRRAACKHQKEITVIARGPCYSDNGSGSGEGEEEGSGAEVHRKHSKCGPCKYKAECDEDAENVGCVCNIDCSGYSFNPVCASDGSSYNNPCFVREASCIKQEQIDIRHLGHCTDTDDTSLLGKKDDGLQYRPDVKDASDQREDVYIGNHMPCPENLNGYCIHGKCEFIYSTQKASCRCESGYTGQHCEKTDFSILYVVPSRQKLTHVLIAAIIGAVQIAIIVAIVMCITRKCPKNNRGRRQKQNLGHFTSDTSSRMV

SEQ ID NO: 879133 - protein, 384 aa, Homo sapiens
KKCWENIKARTKKIMAHERREKVKRSVSPLLSTHVLGKEKIASMLPEQLYFLQSPPEEEPEYHPDASAQELNVRESDVRVCDESSCKYGGVCKEDGDGLKCACQFQCHTNYIPVCGSNGDTYQNECFLRRAACKHQKEITVIARGPCYSDNGSGSGEGEEEGSGAEVHRKHSKCGPCKYKAECDEDAENVGCVCNIDCSGYSFNPVCASDGSSYNNPCFVREASCIKQEQIDIRHLGHCTDTDDTSLLGKKDDGLQYRPDVKDASDQREDVYIGNHMPCPENLNGYCIHGKCEFIYSTQKASCRCESGYTGQHCEKTDFSILYVVPSRQKLTHVLIAAIIGAVQIAIIVAIVMCITRKCPKNNRGRRQKQNLGHFTSDTSSRMV

SEQ ID NO: 879134 - protein, 522 aa, Homo sapiens
SSRSGSSVEMKRIFSLLEKTWLGAPIQFAWQKTSGNYLAVTGADYIVKIFDRHGQKRSEINLPGNCVAMDWDKDGDVLAVIAEKSSCIYLWDANTNKTSQLDNGMRDQMSFLLWSKVGSFLAVGTVKGNLVIYNHQTSRKIPVLGKHTKRITCGCWNAENLPALGGEDKMITVSNQEGDTIRQTQVRSEPSNMQFFLMKMDDRTSAAESMISVVLGKKTLFFLNLNEPDNPADLEFQQDFGNIVCYNWYGDGRIMIGFSCGHFVVISTHTGELGQEIFQARNHKDNLTSIAVSQTLNKVATCGDNCIKIQDLVDLKDMYVILNLDEENKGLGTLSWTDDGQLLALSTQRGSLHVFLTKLPILGDACSTRIAYLTSLLEVTVANPVEGELPITVSVDVEPNFVAVGLYHLAVGMNNRAWFYVLGENAVKKLKDMEYLGTVASICLHSDYAAALFEGKVQLHLIESEILDAQEERETRLFPAVDDKCRILCHALTSDFLIYGTDTGVVQYFYISILRIEDHAKH

SEQ ID NO: 879135 - protein, 1015 aa, Homo sapiens
QALDRQVEGLYQDKGKKCLSSRELEFKFHVMKPRRHTGELGQEIFQARNHKDNLTSIAVSQTLNKVATCGDNCIKIQDLVDLKDMYVILNLDEENKGLGTLSWTDDGQLLALSTQRGSLHVFLTKLPILGDACSTRIAYLTSLLEVTVANPVEGELPITVSVDVEPNFVAVGLYHLAVGMNNRAWFYVLGENAVKKLKDMEYLGTVASICLHSDYAAALFEGKVQLHLIESEILDAQEERETRLFPAVDDKCRILCHALTSDFLIYGTDTGVVQYFYIEDWQFVNDYRHPVSVKKIFPDPNGTRLVFIDEKSDGFVYCPVNDATYEIPDFSPTIKGVLWENWPMDKGVFIAYDDDKVYTYVFHKDTIQGAKVILAGSTKVPFAHKPLLLYNGELTCQTQSGKVNNIYLSTHGFLSNLKDTGPDELRPMLAQNLMLKRFSDAWEMCRILNDEAAWNELARACLHHMEVEFAIRVYRRIGNVGIVMSLEQIKGIEDYNLLAGHLAMFTNDYNLAQDLYLASSCPIAALEMRRDLQHWDSALQLAKHLAPDQIPFISKEYAIQLEFAGDYVNALAHYEKGITGDNKEHDEACLAGVAQMSIRMGDIRRGVNQALKHPSRVLKRDCGAILENMKQFSEAAQLYEKGLYYDKAASVYIRSKNWAKVGDLLPHVSSPKIHLQYAKAKEADGRYKEAVVAYENAKQWQSVIRIYLDHLNNPEKAVNIVRETQSLDGAKMVARFFLQLGDYGSAIQFLVMSKCNNEAFTLAQQHNKMEIYADIIGSEDTTNEDYQSIALYFEGEKRYLQAGKFFLLCGQYSRALKHFLKCPSSEDNVAIEMAIETVGQAKDELLTNQLIDHLLGENDGMPKDAKYLFRLYMALKQYREAAQTAIIIAREEQSAGNYRNAHDVLFSMYAELKSQKIKIPSEMATNLMILHSYILVKIHVKNGDHMKGARMLIRVANNISKFPSHIVPILTSTVIECHRAGLKNSAFSFAAMLMRPEYRSKIDAKYKKKIEGMVR

SEQ ID NO: 879136 - protein, 1351 aa, Homo sapiens
SSRSGSSVEMKRIFSLLEKTWLGAPIQFAWQKTSGNYLAVTGADYIVKIFDRHGQKRSEINLPGNCVAMDWDKDGDVLAVIAEKSSCIYLWDANTNKTSQLDNGMRDQMSFLLWSKVGSFLAVGTVKGNLVIYNHQTSRKIPVLGKHTKRITCGCWNAENLPALGGEDKMITVSNQEGDTIRQTQVRSEPSNMQFFLMKMDDRTSAAESMISVVLGKKTLFFLNLNEPDNPADLEFQQDFGNIVCYNWYGDGRIMIGFSCGHFVVISTHTGELGQEIFQARNHKDNLTSIAVSQTLNKVATCGDNCIKIQDLVDLKDMYVILNLDEENKGLGTLSWTDDGQLLALSTQRGSLHVFLTKLPILGDACSTRIAYLTSLLEVTVANPVEGELPITVSVDVEPNFVAVGLYHLAVGMNNRAWFYVLGENAVKKLKDMEYLGTVASICLHSDYAAALFEGKVQLHLIESEILDAQEERETRLFPAVDDKCRILCHALTSDFLIYGTDTGVVQYFYIEDWQFVNDYRHPVSVKKIFPDPNGTRLVFIDEKSDGFVYCPVNDATYEIPDFSPTIKGVLWENWPMDKGVFIAYDDDKVYTYVFHKDTIQGAKVILAGSTKVPFAHKPLLLYNGELTCQTQSGKVNNIYLSTHGFLSNLKDTGPDELRPMLAQNLMLKRFSDAWEMCRILNDEAAWNELARACLHHMEVEFAIRVYRRIGNVGIVMSLEQIKGIEDYNLLAGHLAMFTNDYNLAQDLYLASSCPIAALEMRRDLQHWDSALQLAKHLAPDQIPFISKEYAIQLEFAGDYVNALAHYEKGITGDNKEHDEACLAGVAQMSIRMGDIRRGVNQALKHPSRVLKRDCGAILENMKQFSEAAQLYEKGLYYDKAASVYIRSKNWAKVGDLLPHVSSPKIHLQYAKAKEADGRYKEAVVAYENAKQWQSVIRIYLDHLNNPEKAVNIVRETQSLDGAKMVARFFLQLGDYGSAIQFLVMSKCNNEAFTLAQQHNKMEIYADIIGSEDTTNEDYQSIALYFEGEKRYLQAGKFFLLCGQYSRALKHFLKCPSSEDNVAIEMAIETVGQAKDELLTNQLIDHLLGENDGMPKDAKYLFRLYMALKQYREAAQTAIIIAREEQSAGNYRNAHDVLFSMYAELKSQKIKIPSEMATNLMILHSYILVKIHVKNGDHMKGARMLIRVANNISKFPSHIVPILTSTVIECHRAGLKNSAFSFAAMLMRPEYRSKIDAKYKKKIEGMVRRPDISEIEEATTPCPFCKFLLPECELLCPGCKNSIPYCIATGRHMLKDDWTVCPHCDFPALYSELKIMLNTESTCPMCSERLNAAQLKKISDCTQYLRTEEEL

SEQ ID NO: 879137 - protein, 127 aa, Homo sapiens
MLSLCHPRYMNKTAFLNDMILPHRRPDISEIEEATTPCPFCKFLLPECELLCPGCKNSIPYCIATGRHMLKDDWTVCPHCDFPALYSELKIMLNTESTCPMCSERLNAAQLKKISDCTQYLRTEEEL

SEQ ID NO: 879138 - protein, 804 aa, Homo sapiens
SSRSGSSVEMKRIFSLLEKTWLGAPIQFAWQKTSGNYLAVTGADYIVKIFDRHGQKRSEINLPGNCVAMDWDKDGDVLAVIAEKSSCIYLWDANTNKTSQLDNGMRDQMSFLLWSKVGSFLAVGTVKGNLVIYNHQTSRKIPVLGKHTKRITCGCWNAENLPALGGEDKMITVSNQEGDTIRQTQVRSEPSNMQFFLMKMDDRTSAAESMISVVLGKKTLFFLNLNEPDNPADLEFQQDFGNIVCYNWYGDGRIMIGFSCGHFVVISTHTGELGQEIFQARNHKDNLTSIAVSQTLNKVATCGDNCIKIQDLVDLKDMYVILNLDEENKGLGTLSWTDDGQLLALSTQRGSLHVFLTKLPILGDACSTRIAYLTSLLEVTVANPVEGELPITVSVDVEPNFVAVGLYHLAVGMNNRAWFYVLGENAVKKLKDMEYLGTVASICLHSDYAAALFEGKVQLHLIESEILDAQEERETRLFPAVDDKCRILCHALTSDFLIYGTDTGVVQYFYIEDWQFVNDYRHPVSVKKIFPDPNGTRLVFIDEKSDGFVYCPVNDATYEIPDFSPTIKGVLWENWPMDKGVFIAYDDDKVYTYVFHKDTIQGAKVILAGSTKVPFAHKPLLLYNGELTCQTQSGKVNNIYLSTHGFLSNLKDTGPDELRPMLAQNLMLKRFSDAWEMCRILNDEAAWNELARACLHHMEVEFAIRVYRRIGNVGIVMSLEQIKGIEDYNLLAGHLAMFTNDYNLAQDLYLASSCPIAALEMRRDLQHWDSALQLAKHLAPDQIPFISKEYAIQLEFALPHFCSL

SEQ ID NO: 879139 - protein, 1248 aa, Homo sapiens
SSRSGSSVEMKRIFSLLEKTWLGAPIQFAWQKTSGNYLAVTGADYIVKIFDRHGQKRSEINLPGNCVAMDWDKDGDVLAVIAEKSSCIYLWDANTNKTSQLDNGMRDQMSFLLWSKVGSFLAVGTVKGNLVIYNHQTSRKIPVLGKHTKRITCGCWNAENLPALGGEDKMITVSNQEGDTIRQTQVRSEPSNMQFFLMKMDDRTSAAESMISVVLGKKTLFFLNLNEPDNPADLEFQQDFGNIVCYNWYGDGRIMIGFSCGHFVVISTHTGELGQEIFQARNHKDNLTSIAVSQTLNKVATCGDNCIKIQDLVDLKDMYVILNLDEENKGLGTLSWTDDGQLLALSTQRGSLHVFLTKLPILGDACSTRIAYLTSLLEVTVANPVEGELPITVSVDVEPNFVAVGLYHLAVGMNNRAWFYVLGENAVKKLKDMEYLGTVASICLHSDYAAALFEGKVQLHLIESEILDAQEERETRLFPAVDDKCRILCHALTSDFLIYGTDTGVVQYFYIEDWQFVNDYRHPVSVKKIFPDPNGTRLVFIDEKSDGFVYCPVNDATYEIPDFSPTIKGVLWENWPMDKGVFIAYDDDKVYTYVFHKDTIQGAKVILAGSTKVPFAHKPLLLYNGELTCQTQSGKVNNIYLSTHGFLSNLKDTGPDELRPMLAQNLMLKRFSDAWEMCRILNDEAAWNELARACLHHMEVEFAIRVYRRIGNVGIVMSLEQIKGIEDYNLLAGHLAMFTNDYNLAQDLYLASSCPIAALEMRRDLQHWDSALQLAKHLAPDQIPFISKEYAIQLEFAGDYVNALAHYEKGITGDNKEHDEACLAGVAQMSIRMGDIRRGVNQALKHPSRVLKRDCGAILENMKQFSEAAQLYEKGLYYDKAASVYIRSKNWAKVGDLLPHVSSPKIHLQYAKAKEADGRYKEAVVAYENAKQWQSVIRIYLDHLNNPEKAVNIVRETQSLDGAKMVARFFLQLGDYGSAIQFLVMSKCNNEAFTLAQQHNKMEIYADIIGSEDTTNEDYQSIALYFEGEKRYLQAGKFFLLCGQYSRALKHFLKCPSSEDNVAIEMAIETVGQAKDELLTNQLIDHLLGENDGMPKDAKYLFRLYMALKQYREAAQTAIIIAREEQSAGNYRNAHDVLFSMYAELKSQKIKIPSEMATNLMILHSYILVKIHVKNGDHMKGARMLIRVANNISKFPSHIVPILTSTVIECHRAGLKNSAFSFAAMLMRPEYRSKIDAKYKKKIEGMVR

SEQ ID NO: 879140 - protein, 127 aa, Homo sapiens
MLMRPEYRSKIDAKYKKKIEGMVRRPDISEIEEATTPCPFCKFLLPECELLCPGCKNSIPYCIATGRHMLKDDWTVCPHCDFPALYSELKIMLNTESTCPMCSERLNAAQLKKISDCTQYLRTEEEL

SEQ ID NO: 879141 - protein, 1369 aa, Homo sapiens
SSRSGSSVEMKRIFSLLEKTWLGAPIQFAWQKTSGNYLAVTGADYIVKIFDRHGQKRSEINLPGNCVAMDWDKDGDVLAVIAEKSSCIYLWDANTNKTSQLDNGMRDQMSFLLWSKVGSFLAVGTVKGNLVIYNHQTSRKIPVLGKHTKRITCGCWNAENLPALGGEDKMITVSNQEGDTIRQTQVRSEPSNMQFFLMKMDDRTSAAESMISVVLGKKTLFFLNLNEPDNPADLEFQQDFGNIVCYNWYGDGRIMIGFSCGHFVVISTHTGELGQEIFQARNHKDNLTSIAVSQTLNKVATCGDNCIKIQDLVDLKDMYVILNLDEENKGLGTLSWTDDGQLLALSTQRGSLHVFLTKLPILGDACSTRIAYLTSLLEVTVANPVEGELPITVSVDVEPNFVAVGLYHLAVGMNNRAWFYVLGENAVKKLKDMEYLGTVASICLHSDYAAALFEGKVQLHLIESEILDAQEERETRLFPAVDDKCRILCHALTSDFLIYGTDTGVVQYFYIEDWQFVNDYRHPVSVKKIFPDPNGTRLVFIDEKSDGFVYCPVNDATYEIPDFSPTIKGVLWENWPMDKGVFIAYDDDKVYTYVFHKDTIQGAKVILAGSTKVPFAHKPLLLYNGELTCQTQSGKVNNIYLSTHGFLSNLKDTGPDELRPMLAQNLMLKRFSDAWEMCRILNDEAAWNELARACLHHMEVEFAIRVYRRIGNVGIVMSLEQIKGIEDYNLLAGHLAMFTNDYNLAQDLYLASSCPIAALEMRRDLQHWDSALQLAKHLAPDQIPFISKEYAIQLEFAGDYVNALAHYEKGITGDNKEHDEACLAGVAQMSIRMGDIRRGVNQALKHPSRVLKRDCGAILENMKQFSEAAQLYEKGLYYDKAASVYIRSKNWAKVGDLLPHVSSPKIHLQYAKAKEADGRYKEAVVAYENAKQWQSVIRIYLDHLNNPEKAVNIVRETQSLDGAKMVARFFLQLGDYGSAIQFLVMSKCNNEAFTLAQQHNKMEIYADIIGSEDTTNEDYQSIALYFEGEKRYLQAGKFFLLCGQYSRALKHFLKCPSSEDNVAIEMAIETVGQAKDELLTNQLIDHLLGENDGMPKDAKYLFRLYMALKQYREAAQTAIIIAREEQSAGNYRNAHDVLFSMYAELKSQKIKIPSEMATNLMILHSYILVKIHVKNGDHMKGARMLIRVANNISKFPSHIVPILTSTVIECHRAGLKNSAFSFAAMLMRPEYRSKIDAKYKKKIEGMVRRPDISEIEEATTPCPFCKFLLPECELLCPGCKNSIPYCIATGRHMLKDDWTVCPHCDFPALYSELKIMLNTESTCPMCSERLNAAQLKKISDCTQYLRTEPQEAVSSPGGFKRRSFLDTEK

SEQ ID NO: 879142 - protein, 114 aa, Homo sapiens
MKYKALSQPFILLNALYFLNAFTSQTLYTSTINKEDHTLGNIIKSQLLKDPQVLFAGYKVPHPLEHKIIIRVQTTPDYSPQEAFTNAITDLISELSLLEERFRVAIKDKQEGIE

SEQ ID NO: 879143 - protein, 117 aa, Homo sapiens
  misc_feature (114)..(114): Xaa can be any naturally occurring amino acid
NQSVPSTRRGGGGGGPLGSGRNGGGSMNAPPAFESFLLFEGEKKITINKDTKVPNACLFTINKEDHTLGNIIKSQLLKDPQVLFAGYKVPHPVGWSTPSGGAPRRVEHPVGWSXPSG

SEQ ID NO: 879144 - protein, 77 aa, Homo sapiens
IRTLGRRWRTLGVWTQRRREHERPSSLRVVLALRGREVSDAGCGGPRITINKDTKVPNACLFTINKEDHTLGNIIKS

SEQ ID NO: 879145 - protein, 143 aa, Homo sapiens
LGLWGGGGGHLGSGRNGGGSMNAPPAFESFLLFEGEKITINKDTKVPNACLFTINKEDHTLGNIIKSQLLKDPQVLFAGYKVPHPLEHKIIIRVQTTPDYSPQEAFTNAITDLISELSLLEERFRTCLLPLRLPKAQRRPKAQ

SEQ ID NO: 879146 - protein, 82 aa, Homo sapiens
AAAYYYYCSEFKLLTMYGDMARLVATPPPWPALWPPLTLTPTCPVHRLGFIFLIKYSGRDLDVDLSSGDFASKWIVRLDAGR

SEQ ID NO: 879147 - protein, 141 aa, Homo sapiens
DPSSADAGGGGGGPLGSGRNGGGSMNAPPAFESFLLFEGEKKITINKDTKVPNACLFTINKEDHTLGNIIKSQLLKDPQVLFAGYKVPHPLEHKIIIRVQTTPDYSPQEAFTNAITDLISELSLLEERFRVAIKDKQEGIE

SEQ ID NO: 879148 - protein, 263 aa, Homo sapiens
MDNSWRLGPAIGLSAGQSQLLVSLLLLLTRVQPGTDVAAPEHISYVPQLSNDTLAGRLTLSTFTLEQPLGQFSSHNISDLDTIWLVVALSNATQSFTAPRTNQDIPAPANFSQRGYYLTLRANRVLYQTRGQLHVLRVGNDTHCQPTKIGCNHPLPGPGPYRVKFLVMNDEGPVAETKWSSDTRLQQAQALRAVPGPQSPGTVVIIAILSILLAVLLTVLLAVLIYTCFNSCRSTSLSGPEEAGSVRRYTTHLAFSTPAEGAS

SEQ ID NO: 879149 - protein, 274 aa, Homo sapiens
MPVYSPSTKKTTHWETSLNHVPASPSPSAVIVSFLRPPQPRFLYSLQNSAPEHISYVPQLSNDTLAGRLTLSTFTLEQPLGQFSSHNISDLDTIWLVVALSNATQSFTAPRTNQDIPAPANFSQRGYYLTLRANRVLYQTRGQLHVLRVGNDTHCQPTKIGCNHPLPGPGPYRVKFLVMNDEGPVAETKWSSDTRLQQAQALRAVPGPQSPGTVVIIAILSILLAVLLTVLLAVLIYTCFNSCRSTSLSGPEEAGSVRRYTTHLAFSTPAEGAS

SEQ ID NO: 879150 - protein, 140 aa, Homo sapiens
DPSSADAGGGGGGPLGSGRNGGGSMNAPPAFESFLLFEGEKKITINKDTKVPNACLFTINKEDHTLGNIIKSQLLKDPQVLFAGYKVPHPLEHKIIIRVQTTPDYSPQEAFTNAITDLISELSLLEERFRTCLLPLRLLP

SEQ ID NO: 879151 - protein, 274 aa, Homo sapiens; identical to SEQ ID NO: 879149

SEQ ID NO: 879152 - protein, 140 aa, Homo sapiens; identical to SEQ ID NO: 879150

SEQ ID NO: 879153 - protein, 263 aa, Homo sapiens; identical to SEQ ID NO: 879148

SEQ ID NO: 879154 - protein, 263 aa, Homo sapiens; identical to SEQ ID NO: 879148

SEQ ID NO: 879155 - protein, 298 aa, Homo sapiens
MKEEETAGPLDKEHSTDYRQGSLWGCRHCRRTDRQMDNSWRLGPAIGLSAGQSQLLVSLLLLLTRVQPGTDVAAPEHISYVPQLSNDTLAGRLTLSTFTLEQPLGQFSSHNISDLDTIWLVVALSNATQSFTAPRTNQDIPAPANFSQRGYYLTLRANRVLYQTRGQLHVLRVGNDTHCQPTKIGCNHPLPGPGPYRVKFLVMNDEGPVAETKWSSDTRLQQAQALRAVPGPQSPGTVVIIAILSILLAVLLTVLLAVLIYTCFNSCRSTSLSGPEEAGSVRRYTTHLAFSTPAEGAS

SEQ ID NO: 879156 - protein, 263 aa, Homo sapiens; identical to SEQ ID NO: 879148

SEQ ID NO: 879157 - protein, 381 aa, Homo sapiens
GCNLRLGSEAGGGGGGPLGSGRNGGGSMNAPPAFESFLLFEGEKKITINKDTKVPNACLFTINKEDHTLGNIIKSRACFPFAFCRDCQFPEASPATLPVQPAELLAWKSPCATGKDINKHQEVSKSTRSHRHHVDIHLPVFPGKILLNCAALAKRAAPEHISYVPQLSNDTLAGRLTLSTFTLEQPLGQFSSHNISDLDTIWLVVALSNATQSFTAPRTNQDIPAPANFSQRGYYLTLRANRVLYQTRGQLHVLRVGNDTHCQPTKIGCNHPLPGPGPYRVKFLVMNDEGPVAETKWSSDTRLQQAQALRAVPGPQSPGTVVIIAILSILLAVLLTVLLAVLIYTCFNSCRSTSLSGPEEAGSVRRYTTHLAFSTPAEGAS

SEQ ID NO: 879158 - protein, 255 aa, Homo sapiens
MDNSWRLGPAIGLSAGQSQLLVSLLLLLTRVQPGTDVAAPEHISYVPQLSNDTLAGRLTLSTFTLEQPLGQFSSHNISDLDTIWLVVALSNATQSFTAPRTNQDIPAPANFSQRGYYLTLRANRVLYQTRGQLHVLRVGNDTHCQPTKIGCNHPLPGPGPYRVKFLVMNDEGPVAETKWSSDTRLQQAQALRAVPGPQSPGTVVIIAILSILLAVLLTVLLAVLIYTWTCLLPKSSLGALGHGTAGQPPEATVRV

SEQ ID NO: 879159 - protein, 141 aa, Homo sapiens; identical to SEQ ID NO: 879147

SEQ ID NO: 879160 - protein, 310 aa, Homo sapiens
MPVYSPSTKKTTHWETSLNHVPASPSPSAVIVSFLRPPQPRFLYSLQNSAPEHISYVPQLSNDTLAGRLTLSTFTLEQPLGQFSSHNISDLDTIWLVVALSNATQSFTAPRTNQDIPAPANFSQRGYYLTLRANRVLYQTRGQLHVLRVGNDTHCQPTKIGCNHPLPGPGPYRVKFLVMNDEGPVAETKWSSDTRLQQAQALRAVPGPQSPGTVVIIAILSILLAVLLTVLLAVLIYTCTGSSDPYCIVKVDNEPIIRTATVWKTLCPFWGEEYQVHLPPTFHAVAFYVMDEDALSRDDVIGKVCLTRDT

SEQ ID NO: 879161 - protein, 140 aa, Homo sapiens; identical to SEQ ID NO: 879150

SEQ ID NO: 879162 - protein, 141 aa, Homo sapiens; identical to SEQ ID NO: 879147

SEQ ID NO: 879163 - protein, 186 aa, Homo sapiens
GCNLRLGSEAGGGGGGPLGSGRNGGGSMNAPPAFESFLLFEGEKKITINKDTKVPNACLFTINKEDHTLGNIIKSQLLKDPQVLFAGYKVPHPLEHKIIIRVQTTPDYSPQEAFTNAITDLISELSLLEERFRVRAGPGGADGVGWTLARVPRPGTALACFFGGPQGEAAVMEEQGLPPQAPGHVD

SEQ ID NO: 879164 - protein, 104 aa, Homo sapiens
GCNLRLGSEAGGGGGGPLGSGRNGGGSMNAPPAFESFLLFEGEKKITINKDTKVPNACLFTINKEDHTLGNIIKSRACFPFAFCRDCQFPEASPATLPVQPAEL

SEQ ID NO: 879165 - protein, 152 aa, Homo sapiens
GCNLRLGSEAGGGGGGPLGSGRNGGGSMNAPPAFESFLLFEGEKKITINKDTKVPNACLFTINKEDHTLGNIIKSQLLKDPQVLFAGYKVPHPLEHKIIIRVQTTPSPKHSCAWGTAAKPQQLAVPTKVTRGRAPLVGLWRTRFLVQGGLSS

SEQ ID NO: 879166 - protein, 87 aa, Homo sapiens
GCNLRLGSEAGGGGGGPLGSGRNGGGSMNAPPAFESFLLFEGEKKITINKDTKVPNACLFTINKEDHTLGNIIKSVSFPSQALRGCV

SEQ ID NO: 879167 - protein, 79 aa, Homo sapiens
GCNLRLGSEAGGGGGGPLGSGRNGGGSMNAPPAFESFLLFEGEKKITINKDTKVPNACLFTINKEDHTLGNIIKSGTIK

SEQ ID NO: 879168 - protein, 95 aa, Homo sapiens
NITSEFTSNITSEFTSEYTLGNIIKSQLLKDPQVLFAGYKVPHPLEHKIIIRVQTTPDYSPQEAFTNAITDLISELSLLEERFRVAIKDKQEGIE

SEQ ID NO: 879169 - protein, 119 aa, Homo sapiens
KKLNEAAGRRHCRRTDRQMDNSWRLGPAIGLSAGQSQLLVSLLLLLTRVQPGTDVAAPEHISYVPQLSNDTLAGRLTLSTFTLEQPLGQFSSHNISDLDTIWLVVALSNATQSVCLGIL

SEQ ID NO: 879170 - protein, 70 aa, Homo sapiens
TRLSDGDRGAEMLCGRKMKLKRRRVSLVLAEHHEAFNRLIGMEDTPESTSNPVLSKNRKLPVSILFQWGT

SEQ ID NO: 879171 - protein, 274 aa, Homo sapiens; identical to SEQ ID NO: 879149

SEQ ID NO: 879172 - protein, 263 aa, Homo sapiens; identical to SEQ ID NO: 879148

SEQ ID NO: 879173 - protein, 263 aa, Homo sapiens; identical to SEQ ID NO: 879148

SEQ ID NO: 879174 - protein, 263 aa, Homo sapiens; identical to SEQ ID NO: 879148

SEQ ID NO: 879175 - protein, 209 aa, Homo sapiens
MDNSWRLGPAIGLSAGQSQLLVSLLLLLTRVQPGTDVATQSFTAPRTNQDIPAPANFSQRGYYLTLRANRVLYQTRGQLHVLRVGNDTHCQPTKIGCNHPLPGPGPYRVKFLVMNDEGPVAETKWSSDTRLQQAQALRAVPGPQSPGTVVIIAILSILLAVLLTVLLAVLIYTCFNSCRSTSLSGPEEAGSVRRYTTHLAFSTPAEGAS

SEQ ID NO: 879176 - protein, 274 aa, Homo sapiens; identical to SEQ ID NO: 879149

SEQ ID NO: 879177 - protein, 274 aa, Homo sapiens; identical to SEQ ID NO: 879149

SEQ ID NO: 879178 - protein, 274 aa, Homo sapiens; identical to SEQ ID NO: 879149

SEQ ID NO: 879179 - protein, 141 aa, Homo sapiens; identical to SEQ ID NO: 879147

SEQ ID NO: 879180 - protein, 141 aa, Homo sapiens; identical to SEQ ID NO: 879147

SEQ ID NO: 879181 - protein, 140 aa, Homo sapiens; identical to SEQ ID NO: 879150

SEQ ID NO: 879182 - protein, 204 aa, Homo sapiens
MDNSWRLGPAIGLSAGQSQLLVSLLLLLTRVQPGTDVAAPEHISYVPQLSNDTLAGRLTLSTFTLEQPLGQFSSHNISDLDTIWLVVALSNATQSFTAPRTNQDIPAPANFSQRGYYLTLRANRVLYQTRGQLHVLRVGNDTHCQPTKIGCNHPLPGPGPYSQGEVLVMMTKDRGETVVQETRCRSQGLGCPGQNGRAHRPLSR

SEQ ID NO: 879183 - protein, 156 aa, Homo sapiens
MPVYSPSTKKTTHWETSLNHVPASPSPSAVIVSFLRPPQPRFLYSLQNSAPEHISYVPQLSNDTLAGRLTLSTFTLEQPLGQFSSHNISDLDTIWLVVALSNATQSFTAPRTNQDIPAPANFSQRGYYLTLRANRVLYQTRGQLHVLRLKETKIKE

SEQ ID NO: 879184 - protein, 143 aa, Homo sapiens
GCNLRLGSEAGGGGGGPLGSGRNGGGSMNAPPAFESFLLFEGEKKITINKDTKVPNACLFTINKEDHTLGNIIKSQLLKDPQVLFAGYKVPHPLEHKIIIRVQTTPDYSPQEAFTNAITDLISELSLLEERFRTCLLPLRLLP

SEQ ID NO: 879185 - protein, 87 aa, Homo sapiens
SSVPGTSCGGFLLQQREWEHQDLGLGTRLCTDVLRKWQDCFKKMADKPDMGEIASFDKAKLKKTETQEKNTLPTKETIEQEKRSEIS

SEQ ID NO: 879186 - protein, 87 aa, Homo sapiens; identical to SEQ ID NO: 879185

SEQ ID NO: 879187 - protein, 87 aa, Homo sapiens; identical to SEQ ID NO: 879185

SEQ ID NO: 879188 - protein, 87 aa, Homo sapiens; identical to SEQ ID NO: 879185

SEQ ID NO: 879189 - protein, 110 aa, Homo sapiens
PLGRGVAYESAHVQHVFPAKGSKKGSVSMKTLSMNGWKGAHKSSSFEVVPSRTVPLGRDCTDCFKKMADKPDMGEIASFDKAKLKKTETQEKNTLPTKETIEQEKRSEIS

SEQ ID NO: 879190 - protein, 73 aa, Homo sapiens
TSPRLAGGATVAEQAGRQLRNACTAPPPTNLRSGRWEVPARGLWPHSGTQDPRKADSGKQLRGGAFLLWTTDL

SEQ ID NO: 879191 - protein, 83 aa, Homo sapiens
  misc_feature (2)..(2): Xaa can be any naturally occurring amino acid
GXSPGFVRSDQREWEHQDLGLGTRLCTDVLRKWQDCFKKMADKPDMGEIASFDKAKLKKTETQEKNTLPTKETIEQEKRSEIS

SEQ ID NO: 879192 - protein, 87 aa, Homo sapiens; identical to SEQ ID NO: 879185

SEQ ID NO: 879193 - protein, 87 aa, Homo sapiens; identical to SEQ ID NO: 879185

SEQ ID NO: 879194 - protein, 87 aa, Homo sapiens; identical to SEQ ID NO: 879185

SEQ ID NO: 879195 - protein, 110 aa, Homo sapiens; identical to SEQ ID NO: 879189

SEQ ID NO: 879196 - protein, 87 aa, Homo sapiens; identical to SEQ ID NO: 879185

SEQ ID NO: 879197 - protein, 75 aa, Homo sapiens
  misc_feature (22)..(22): Xaa can be any naturally occurring amino acid
  misc_feature (24)..(24): Xaa can be any naturally occurring amino acid
  misc_feature (30)..(30): Xaa can be any naturally occurring amino acid
RERERERERERERQRERERESXEXGERGGXTRVGAPGSRARNETLHGCFKKMAIVLRKWQTNQTWGKSPASIRPS

SEQ ID NO: 879198 - protein, 100 aa, Homo sapiens
YRCHEVGAGVPVCTLPSRSGSWGSCVHAALTKWELGFLCARCLQEVGAGVPVCTLPSQSGSWGSCVHIAFTSWEHFVGSAANASGSTRISGSERDFARMF

SEQ ID NO: 879199 - protein, 87 aa, Homo sapiens; identical to SEQ ID NO: 879185

SEQ ID NO: 879200 - protein, 80 aa, Homo sapiens
SSVPGTSCGGFLLQQREWEHQDLGLGTRLCTDVLRKWQDKPDMGEIASFDKAKLKKTETQEKNTLPTKETIEQEKRSEIS

SEQ ID NO: 879201 - protein, 80 aa, Homo sapiens; identical to SEQ ID NO: 879200

SEQ ID NO: 879202 - protein, 80 aa, Homo sapiens; identical to SEQ ID NO: 879200

SEQ ID NO: 879203 - protein, 80 aa, Homo sapiens; identical to SEQ ID NO: 879200

SEQ ID NO: 879204 - protein, 83 aa, Homo sapiens
QLGTWYFLWGFLAAATRVGAPGSRARNETLHGCFKKMADKPDMGEIASFDKAKLKKTETQEKNTLPTKETIEQERPLPALHSH

SEQ ID NO: 879205 - protein, 100 aa, Homo sapiens; identical to SEQ ID NO: 879198

SEQ ID NO: 879206 - protein, 100 aa, Homo sapiens; identical to SEQ ID NO: 879198

SEQ ID NO: 879207 - protein, 100 aa, Homo sapiens; identical to SEQ ID NO: 879198

SEQ ID NO: 879208 - protein, 119 aa, Homo sapiens
QLGTWYFLWGFLAAATRVGAPGSRARNETLHGCFKKMADKPDMGEIASFDKAKLKKTETQEKNTLPTKETIEQELSRRSGVKFPKILGGFPTPVLFETPVVMWRKSHLARMGHEPQAAL

SEQ ID NO: 879209 - protein, 80 aa, Homo sapiens; identical to SEQ ID NO: 879200

SEQ ID NO: 879210 - protein, 87 aa, Homo sapiens; identical to SEQ ID NO: 879185

SEQ ID NO: 879211 - protein, 87 aa, Homo sapiens; identical to SEQ ID NO: 879185

SEQ ID NO: 879212 - protein, 87 aa, Homo sapiens; identical to SEQ ID NO: 879185

SEQ ID NO: 879213 - protein, 80 aa, Homo sapiens; identical to SEQ ID NO: 879200

SEQ ID NO: 879214 - protein, 106 aa, Homo sapiens
MKENFPYFRSACDDEGSDYLSDVFEFKDKDEDYKIDFSEFLSLSGRHSHRRTSEQSHGSSALFRGQPMTQPHQWASRDPRYHKMLFSAIEVCTLRSLEQEKRSEIS

SEQ ID NO: 879215 - protein, 87 aa, Homo sapiens; identical to SEQ ID NO: 879185

SEQ ID NO: 879216 - protein, 87 aa, Homo sapiens; identical to SEQ ID NO: 879185

SEQ ID NO: 879217 - protein, 155 aa, Homo sapiens
QLGTWYFLWGFLAAATRVGAPGSRARNETLHGCFKKMAVSAAPGRGAHPGCGRIRCTGRARRNRDRRPSRTGRRGRRPRPGTEKRGAGRAQILGLGAARHALARVPRREASAGSAEGDAGPQAQVKRLGLPTRIVLRKWQTNQTWGKSPASIRPS

SEQ ID NO: 879218 - protein, 87 aa, Homo sapiens; identical to SEQ ID NO: 879185

SEQ ID NO: 879219 - protein, 87 aa, Homo sapiens; identical to SEQ ID NO: 879185

SEQ ID NO: 879220 - protein, 80 aa, Homo sapiens; identical to SEQ ID NO: 879200

SEQ ID NO: 879221 - protein, 155 aa, Homo sapiens; identical to SEQ ID NO: 879217

SEQ ID NO: 879222 - protein, 80 aa, Homo sapiens; identical to SEQ ID NO: 879200

SEQ ID NO: 879223 - protein, 157 aa, Homo sapiens
MGHSAPDATGLVGLLKGPPPQFGLPNSPVVPRDIIRTIIVYELTENKTHLRGMAKREKRGGQGRGASMIHPNVPAIMIAPMCPQSLSFRPIVGPPGVRAEDHAVTGSREHSMGAPWMDRKRQEIRQGDQHQHQYPHGYPFRSICVRGPCERLGLKAS

SEQ ID NO: 879224 - protein, 100 aa, Homo sapiens; identical to SEQ ID NO: 879198

SEQ ID NO: 879225 - protein, 100 aa, Homo sapiens; identical to SEQ ID NO: 879198

SEQ ID NO: 879226 - protein, 119 aa, Homo sapiens; identical to SEQ ID NO: 879208

SEQ ID NO: 879227 - protein, 100 aa, Homo sapiens; identical to SEQ ID NO: 879198

SEQ ID NO: 879228 - protein, 551 aa, Homo sapiens
MAENWKNCFEEELICPICLHVFVEPVQLPCKHNFCRGCIGEAWAKDSGLVRCPECNQAYNQKPGLEKNLKLTNIVEKFNALHVEKPPAALHCVFCRRGPPLPAQKVCLRCEAPCCQSHVQTHLQQPSTARGHLLVEADDVRAWSCPQHNAYRLYHCEAEQVAVCQYCCYYSGAHQGHSVCDVEIRRNEIRKMLMKQQDRLEEREQDIEDQLYKLESDKRLVEEKVNQLKEEVRLQYEKLHQLLDEDLRQTVEVLDKAQAKFCSENAAQALHLGERMQEAKKLLGSLQLLFDKTEDVSFMKNTKSVKILMDRTQTCTSSSLSPTKIGHLNSKLFLNEVAKKEKQLRKMLEGPFSTPVPFLQSVPLYPCGVSSSGAEKRKHSTAFPEASFLETSSGPVGGQYGAAGTASGEGQSGQPLGPCSSTQHLVALPGGAQPVHSSPVFPPSQYPNGSAAQQPMLPQYGGRKILVCSVDNCYCSSVANHGGHQPYPRSGHFPWTVPSQEYSHPLPPTPSVPQSLPSLAVRDWLDASQQPGHQDFYRVYGQPSTKHYVTS

SEQ ID NO: 879229 - protein, 551 aa, Homo sapiens; identical to SEQ ID NO: 879228

SEQ ID NO: 879230 - protein, 368 aa, Homo sapiens
PTQMSLQKMLMKQQDRLEEREQDIEDQLYKLESDKRLVEEKVNQLKEEVRLQYEKLHQLLDEDLRQTVEVLDKAQAKFCSENAAQALHLGERMQEAKKLLGSLQLLFDKTEDVSFMKNTKSVKILMDRTQTCTSSSLSPTKIGHLNSKLFLNEVAKKEKQLRKMLEGPFSTPVPFLQSVPLYPCGVSSSGAEKRKHSTAFPEASFLETSSGPVGGQYGAAGTASGEGQSGQPLGPCSSTQHLVALPGGAQPVHSSPVFPPSQYPNGSAAQQPMLPQYGGRKILVCSVDNCYCSSVANHGGHQPYPRSGHFPWTVPSQEYSHPLPPTPSVPQSLPSLAVRDWLDASQQPGHQDFYRVYGQPSTKHYVTS

SEQ ID NO: 879231 - protein, 551 aa, Homo sapiens; identical to SEQ ID NO: 879228

SEQ ID NO: 879232 - protein, 230 aa, Homo sapiens [sequence omitted]

SEQ ID NO: 879233 - protein, 252 aa, Homo sapiens
MAENWKNCFEEELICPICLHVFVEPVQLPCKHNFCRGCIGEAWAKDSGLVRCPECNQAYNQKPGLEKNLKLTNIVEKFNALHVEKPPAALHCVFCRRGPPLPAQKVCLRLGNLPPQPPGSGVMHPETCPSTFLASPLPHSIAPGLFLLDFVLVLALFLIFFYYESPGRRGDSGSWPGPGRQVALEMGKCLCRGAELSLCFSFFPLLLPLHTPVAGRNLGFPESLGVPPFLPHPGGTPRAPGLFLLLFSFWAV

SEQ ID NO: 879234 - protein, 341 aa, Homo sapiens
MAENWKNCFEEELICPICLHVFVEPVQLPCKHNFCRGCIGEAWAKDSGLVRCPECNQAYNQKPGLEKNLKLTNIVEKFNALHVEKPPAALHCVFCRRGPPLPAQKVCLRCEAPCCQSHVQTHLQQPSTARGHLLVEADDVRAWSCPQHNAYRLYHCEAEQVAVCQYCCYYSGAHQGHSVCDVEIRRNEIRKMLMKQQDRLEEREQDIEDQLYKLESDKRLVEEKVNQLKEEVRLQYEKLHQLLDEDLRQTVEVLDKAQAKFCSENAAQALHLGERMQEAKKLLGSLQLLFDKTEDVSFMKNTKSVKILMDRTQTCTSSSLSPTKIGHLNSKLFLILARSTS

SEQ ID NO: 879235 - protein, 551 aa, Homo sapiens; identical to SEQ ID NO: 879228

SEQ ID NO: 879236 - protein, 559 aa, Homo sapiens
MAENWKNCFEEELICPICLHVFVEPVQLPCKHNFCRGCIGEAWAKDSGLVRCPECNQAYNQKPGLEKNLKLTNIVEKFNALHVEKPPAALHCVFCRRGPPLPAQKVCLRCEAPCCQSHVQTHLQQPSTARGHLLVEADDVRAWSCPQHNAYRLYHCEAEQVAVCQYCCYYSGAHQGHSVCDVEIRRNEIRKMLMKQQDRLEEREQDIEDQLYKLESDKRLVEEKVNQLKEEVRLQYEKLHQLLDEDLRQTVEVLDKAQAKFCSENAAQALHLGERMQEAKKLLGSLQLLFDKTEDVSFMKNTKSVKILMDSSAPSTAPRTQTCTSSSLSPTKIGHLNSKLFLNEVAKKEKQLRKMLEGPFSTPVPFLQSVPLYPCGVSSSGAEKRKHSTAFPEASFLETSSGPVGGQYGAAGTASGEGQSGQPLGPCSSTQHLVALPGGAQPVHSSPVFPPSQYPNGSAAQQPMLPQYGGRKILVCSVDNCYCSSVANHGGHQPYPRSGHFPWTVPSQEYSHPLPPTPSVPQSLPSLAVRDWLDASQQPGHQDFYRVYGQPSTKHYVTS

SEQ ID NO: 879237 - protein, 360 aa, Homo sapiens [sequence omitted]

SEQ ID NO: 879238 - protein, 338 aa, Homo sapiens
MASSGYVLQAELSPSTENSSQLDFEDVWNSSYGVNDSFPDGDYDANLEAAAPCHSCNLLDDSALPFFILTSVLGILASSTVLFMLFRPLFRWQLCPGWPVLAQLAVGSALFSIVVPVLAPGLGSTRSSALCSLGYCVWYGSAFAQALLLGCHASLGHRLGAGQVPGLTLGLTVGIWGVAALLTLPVTLASGASGGLCTLIYSTELKALQATHTVACLAIFVLLPLGLFGAKGLKKALGMGPGPWMNILWAWFIFWWPHGVVLGLDFLVRSKLLLLSTCLAQQALDLLLNLAEALAILHCVATPLLLALFCHQATRTLLPSLPLPEGWSSHLDTLGSKS

SEQ ID NO: 879239 - protein, 336 aa, Homo sapiens [sequence omitted]

SEQ ID NO: 879240 - protein, 134 aa, Homo sapiens
PGSINTAYTTTNFAAAQTLPLGLFGAKGLKKALGMGPGPWMNILWAWFIFWWPHGVVLGLDFLVRSKLLLLSTCLAQQALDLLLNLAEALAILHCVATPLLLALFCHQATRTLLPSLPLPEGWSSHLDTLGSKS

SEQ ID NO: 879241 - protein, 338 aa, Homo sapiens; identical to SEQ ID NO: 879238

SEQ ID NO: 879242 - protein, 958 aa, Homo sapiens
PQISQETRTDLPALLPFVALLFTLSLQSPGVKMLQVHRTGLGRLGVSLSKGLHHKAVLAVRREDVNAWERRAPLAPKHIKGITNLGYKVLIQPSNRRAIHDKDYVKAGGILQEDISEACLILGVKRPPEEKLMSRKTYAFFSHTIKAQEANMGLLDEILKQEIRLIDYEKMVDHRGVRVVAFGQWAGVAGMINILHGMGLRLLALGHHTPFMHIGMAHNYRNSSQAVQAVRDAGYEISLGLMPKSIGPLTFVFTGTGNVSKGAQAIFNELPCEYVEPHELKEVSQTGDLRKVYGTVLSRHHHLVRKTDAVYDPAEYDKHPERYISRFNTDIAPYTTCLINGIYWEQNTPRLLTRQDAQSLLAPGKFSPAGVEGCPALPHKLVAICDISADTGGSIEFMTECTTIEHPFCMYDADQHIIHDSVEGSGILMCSIDNLPAQLPIEATECFGDMLYPYVEEMILSDATQPLESQNFSPVVRDAVITSNGTLPDKYKYIQTLRESRERAQSLSMGTRRKVLVLGSGYISEPVLEYLSRDGNIEITVGSDMKNQIEQLGKKYNINPVSMDICKQEEKLGFLVAKQDLVISLLPYVLHPLVAKACITNKVNMVTASYITPALKELEKSVEDAGITIIGELGLDPGLDHMLAMETIDKAKEVGATIESYISYCGGLPAPEHSNNPLRYKFSWSPVGVLMNVMQSATYLLDGKVVNVAGGISFLDAVTSMDFFPGLNLEGYPNRDSTKYAEIYGISSAHTLLRGTLRYKGYMKALNGFVKLGLINREALPAFRPEANPLTWKQLLCDLVGISPSSEHDVLKEAVLKKLGGDNTQLEAAEWLGLLGDEQVPQAESILDALSKHLVMKLSYGPEEKDMIVMRDSFGIRHPSGHLEHKTIDLVAYGDINGFSAMAKTVGLPTAMAAKMLLDGEIGAKGLMGPFSKEIYGPILERIKAEGIIYTTQSTIKP

SEQ ID NO: 879243 - protein, 969 aa, Homo sapiens
LLLPGLPSQFLLGIRSLPCSDSEDSRRRGTSRRPRADESPGVKMLQVHRTGLGRLGVSLSKGLHHKAVLAVRREDVNAWERRAPLAPKHIKGITNLGYKVLIQPSNRRAIHDKDYVKAGGILQEDISEACLILGVKRPPEEKLMSRKTYAFFSHTIKAQEANMGLLDEILKQEIRLIDYEKMVDHRGVRVVAFGQWAGVAGMINILHGMGLRLLALGHHTPFMHIGMAHNYRNSSQAVQAVRDAGYEISLGLMPKSIGPLTFVFTGTGNVSKGAQAIFNELPCEYVEPHELKEVSQTGDLRKVYGTVLSRHHHLVRKTDAVYDPAEYDKHPERYISRFNTDIAPYTTCLINGIYWEQNTPRLLTRQDAQSLLAPGKFSPAGVEGCPALPHKLVAICDISADTGGSIEFMTECTTIEHPFCMYDADQHIIHDSVEGSGILMCSIDNLPAQLPIEATECFGDMLYPYVEEMILSDATQPLESQNFSPVVRDAVITSNGTLPDKYKYIQTLRESRERAQSLSMGTRRKVLVLGSGYISEPVLEYLSRDGNIEITVGSDMKNQIEQLGKKYNINPVSMDICKQEEKLGFLVAKQDLVISLLPYVLHPLVAKACITNKVNMVTASYITPALKELEKSVEDAGITIIGELGLDPGLDHMLAMETIDKAKEVGATIESYISYCGGLPAPEHSNNPLRYKFSWSPVGVLMNVMQSATYLLDGKVVNVAGGISFLDAVTSMDFFPGLNLEGYPNRDSTKYAEIYGISSAHTLLRGTLRYKGYMKALNGFVKLGLINREALPAFRPEANPLTWKQLLCDLVGISPSSEHDVLKEAVLKKLGGDNTQLEAAEWLGLLGDEQVPQAESILDALSKHLVMKLSYGPEEKDMIVMRDSFGIRHPSGHLEHKTIDLVAYGDINGFSAMAKTVGLPTAMAAKMLLDGEIGAKGLMGPFSKEIYGPILERIKAEGIIYTTQSTIKP

SEQ ID NO: 879244 - protein, 834 aa, Homo sapiens
LLLPGLPSQFLLGIRSLPCSDSEDSRRRGTSRRPRADESPGVKMLQVHRTGLGRLGVSLSKGLHHKAVLAVRREDVNAWERRAPLAPKHIKGITNLGYKVLIQPSNRRAIHDKDYVKAGGILQEDISEACLILGVKRPPEEKLMSRKTYAFFSHTIKAQEANMGLLDEILKQEIRLIDYEKMVDHRGVRVVAFGQWAGVAGMINILHGMGLRLLALGHHTPFMHIGMAHNYRNSSQAVQAVRDAGYEISLGLMPKSIGPLTFVFTGTGNVSKGAQAIFNELPCEYVEPHELKEVSQTGDLRKVYGTVLSRHHHLVRKTDAVYDPAEYDKHPERYISRFNTDIAPYTTCLINGIYWEQNTPRLLTRQDAQSLLAPGKFSPAGVEGCPALPHNLVGDFRISSSHLSIDVIFRLVAICDISADTGGSIEFMTECTTIEHPFCMYDADQHIIHDSVEGSGILMCSIDNLPAQLPIEATECFGDMLYPYVEEMILALLPRLECSDAIAAHCNLHLPGSSDSSCLSLPSSQDQQILSDATQPLESQNFSPVVRDAVITSNGTLPDKYKYIQTLRESRERAQSLSMGTRRKVLVLGSGYISEPVLEYLSRDGNIEITVGSDMKNQIEQLGKKYNINPVSMDICKQEEKLGFLVAKQDLVISLLPYVLHPLVAKACITNKVNMVTASYITPALKELEKSVEDAGITIIGELGLDPGLDHMLAMETIDKAKEVGATIESYISYCGGLPAPEHSNNPLRYKFSWSPVGVLMNVMQSATYLLDGKVVNVAGGISFLDAVTSMDFFPGLNLEGYPNRDSTKYAEIYGISSAHTLLRGTLRYKGLEC

SEQ ID NO: 879245 - protein, 958 aa, Homo sapiens; identical to SEQ ID NO: 879242

SEQ ID NO: 879246 - protein, 217 aa, Homo sapiens
LLLPGLPSQFLLGIRSLPCSDSEDSRRRGTSRRPRADESPGVKMLQVHRTGLGRLGVSLSKGLHHKAVLAVRREDVNAWERRAPLAPKHIKGITNLGYKVLIQPSNRRAIHDKDYVKAGGILQEDISEACLILGVKRPPEEKLMSRKTYAFFSHTIKAQEANMGLLDEILKQEIRLIDYEKMVDHRGVRVVAFGQWAGVAGKYARAYITHFLNWLGE

SEQ ID NO: 879247 - protein, 142 aa, Homo sapiens
MPCPAPVWRDLFVFIPLWGPSSGHPNQQPWVAEPSGTEGRQLYLAESPKATGLSKAGERGKLGSGTMVLAPCCSGHVGGSWRGPKWQLLPDYPGLPSPSSCTLLQWDVWPSLWLASGQVPLLKITLWGSWCPLGLPHSAHTI

SEQ ID NO: 879248 - protein, 142 aa, Homo sapiens; identical to SEQ ID NO: 879247

SEQ ID NO: 879249 - protein, 335 aa, Homo sapiens
IQQILSTVFWQVRNAGSSPLSAACPLFRTPAPQPCGSWGRCCIPHASTGCRPMAERGELDLTGAKQNTGVWLVKVPKYLSQQWAKASGRGEVGKLRIAKTQGRTEVSFTLNEDLANIHDIGGKPASVSAPREHPFVLQSVGGQTLTVFTESSSDKLSLEGIVVQRAECRPAASENYMRLKRLQIEESSKPVRLSQQLDKVVTTNYKPVANHQYNIEYERKKKEDGKRARADKQHVLDMLFSAFEKHQYYNLKDLVDITKQPVVSEGILQEMVFRLVTVPKHLELRPSTNHPGRKVVGRSSVLESYRCCKGFGGTVYGKTFLRITDVSGGNITVHI

SEQ ID NO: 879250 - protein, 301 aa, Homo sapiens
IQQILSTVFWQVRNAGSSPLSAACPLFRTPAPQPCGSWGRCCIPHASTGCRPMAERGELDLTGAKQNTGVWLVKVPKYLSQQWAKASGRGEVGKLRIAKTQGRTEVSFTLNEDLANIHDIGGKPASVSAPREHPFVLQSVGGQTLTVFTESSSDKLSLEGIVVQRAECRPAASENYMRLKRLQIEESSKPVRLSQQLDKVVTTNYKPVANHQYNIEYERKKKEDGKRARADKQHVLDMLFSAFEKHQYYNLKDLVDITKQPVVYLKEILKEIGVQNVKGIHKNTWELKPEYRHYQGEEKSD

SEQ ID NO: 879251 - protein, 310 aa, Homo sapiens
AQSRLLAACSSFPRFPVFWQVRNAGSSPLSAACPLFRTPAPQPCGSWGRCCIPHASTGCRPMAERGELDLTGAKQNTGVWLVKVPKYLSQQWAKASGRGEVGKLRIAKTQGRTEVSFTLNEDLANIHDIGGKPASVSAPREHPFVLQSVGGQTLTVFTESSSDKLSLEGIVVQRAECRPAASENYMRLKRLQIEESSKPVRLSQQLDKVVTTNYKPVANHQYNIEYERKKKEDGKRARADKQHVLDMLFSAFEKHQYYNLKDLVDITKQPVVYLKEILKEIGVQNVKGIHKNTWELKPEYRHYQGEEKSD

SEQ ID NO: 879252 - protein, 162 aa, Homo sapiens [sequence omitted]

SEQ ID NO: 879253 - protein, 310 aa, Homo sapiens; identical to SEQ ID NO: 879251

SEQ ID NO: 879254 - protein, 310 aa, Homo sapiens; identical to SEQ ID NO: 879251

SEQ ID NO: 879255 - protein, 216 aa, Homo sapiens
AQSRLLAACSSFPRFPVFWQVRNAGSSPLSAACPLFRTPAPQPCGSWGRCCIPHASTGCRPMAERGELDLTGAKQNTGVWLVKVPKYLSQQWAKASGRGEVGKLRIAKTQGRTEVSFTLNEDLANIHDIGGKPASVSAPREHPFVLQSVGGQTLTVFTESSSGGSRMTAGVTTVISTSQASKGKQDGEESFLVTQARVQWHDLGSQQPLPPGLKQL

SEQ ID NO: 879256 - protein, 130 aa, Homo sapiens
SVAKFPVTIRHPVIPKLYDPGPERKLRNLVTIATKTFLRPHKLMIMLRSIREYYPDLTVIVADDSQKPLEIKDNHVEYYTMPFGKGWFAGRNLAISQVTTKYVLWVDDDFLFNEETKIEVLVDVLEKTEL

SEQ ID NO: 879257 - protein, 106 aa, Homo sapiens
PRRQKAPMAAPAEPCAGQGVWNQTEPEPAATSLLSLCFLRTAGVWVPPMYLWVLGPIYLLFIHHHGRGYLQMSPLFKAKMVAAIPGSLEPGNGGGRQGTGWNLVKS

SEQ ID NO: 879258 - protein, 97 aa, Homo sapiens
PRRQKAPMAAPAEPCAGQGVWNQTEPEPAATSLLSLCFLRTAGVWVPPMYLWVLGPIYLLFIHHHGRGYLQMSPLFKAKMVAAIPGSLEPGWNLVKS

SEQ ID NO: 879259 - protein, 214 aa, Homo sapiens
MGRRSTSSTKSGKFMNPTDQARKEARKRELKKNKKQRMMVRAAVLKMKDPKQIIRDMEKLDEMEFNPVQQPQLNEKVLKDKRKKLRETFERILRLYEKENPDIYKELRKLEVEYEQKRAQLSQYFDAVIQYFSFNCGCCVTLVASEPSRTGQDDHGRAVAIFANMLGVSLFYACRSLSLQWAVKNPKKPGMKSGRLFRPKVSPDIILRHEGGAS

SEQ ID NO: 879260 - protein, 641 aa, Homo sapiens
MGRRSTSSTKSGKFMNPTDQARKEARKRELKKNKKQRMMVRAAVLKMKDPKQIIRDMEKLDEMEFNPVQQPQLNEKVLKDKRKKLRETFERILRLYEKENPDIYKELRKLEVEYEQKRAQLSQYFDAVKNAQHVEVESIPLPDMPHAPSNILIQDIPLPGAQPPSILKKTSAYGPPTRAVSILPLLGHGVPRLPPGRKPPGPPPGPPPPQVVQMYGRKVGFALDLPPRRRDEDMLYSPELAQRGHDDDVSSTSEDDGYPEDMDQDKHDDSTDDSDTDKSDGESDGDEFVHRDNGERDNNEEKKSGLSVRFADMPGKSRKKKKNMKELTPLQAMMLRMAGQEIPEEGREVEEFSEDDDEDDSDDSEAEKQSQKQHKEESHSDGTSTASSQQQAPPQSVPPSQIQAPPMPGPPPLGPPPAPPLRPPGPPTGLPPGPPPGAPPFLRPPGMPGLRGPLPRLLPPGPPPGRPPGPPPGPPPGLPPGPPPRGPPPRLPPPAPPGIPPPRPGMMRPPLVPPLGPAPPGLFPPAPLPNPGVLSAPPNLIQRPKADDTSAATIEKKATATISAKPQITNPKAEITRFVPTALRVRRENKGATAAPQRKSEDDSAVPLAKAAPKSGPSVPVSVQTKDDVYEAFMKEMEGLL

SEQ ID NO: 879261 - protein, 602 aa, Homo sapiens
MGRRSTSSTKSGKFMNPTDQARKEARKRELKKNKKQRMMVRAAVLKMKDPKQIIRDMEKLDEMEFNPVQQPQLNEKVLKDKRKKLRETFERILRLYEKENPDIYKELRKLEVEYEQKRAQLSQYFDAVKNAQHVEVESIPLPDMPHAPSNILIQDIPLPGAQPPSILKKTSAYGPPTRAVSILPLLGHGVPRLPPGRKPPGPPPGPPPPQVVQMYGRKVGFALDLPPRRRDEDMLYSPELAQRGHDDDVSSTSEDDGYPEDMDQDKHDDSTDDSDTDKSDGESDGDEFVHRDNGERDNNEEKKSGLSVRFADMPGKSRKKKKNMKELTPLQAMMLRMAGQEIPEEGREVEEFSEDDDEDDSDDSEAEKQSQKQHKEESHSDGTSTASSQQQAPPQSVRAPPFLRPPGMPGLRGPLPRLLPPGPPPGRPPGPPPGPPPGLPPGPPPRGPPPRLPPPAPPGIPPPRPGMMRPPLVPPLGPAPPGLFPPAPLPNPGVLSAPPNLIQRPKADDTSAATIEKKATATISAKPQITNPKAEITRFVPTALRVRRENKGATAAPQRKSEDDSAVPLAKAAPKSGPSVPVSVQTKDDVYEAFMKEMEGLL

SEQ ID NO: 879262 - protein, 428 aa, Homo sapiens
MYGRKVGFALDLPPRRRDEDMLYSPELAQRGHDDDVSSTSEDDGYPEDMDQDKHDDSTDDSDTDKSDGESDGDEFVHRDNGERDNNEEKKSGLSVRFADMPGKSRKKKKNMKELTPLQAMMLRMAGQEIPEEGREVEEFSEDDDEDDSDDSEAEKQSQKQHKEESHSDGTSTASSQQQAPPQSVPPSQIQAPPMPGPPPLGPPPAPPLRPPGPPTGLPPGPPPGAPPFLRPPGMPGLRGPLPRLLPPGPPPGRPPGPPPGPPPGLPPGPPPRGPPPRLPPPAPPGIPPPRPGMMRPPLVPPLGPAPPGLFPPAPLPNPGVLSAPPNLIQRPKADDTSAATIEKKATATISAKPQITNPKAEITRFVPTALRVRRENKGATAAPQRKSEDDSAVPLAKAAPKSGPSVPVSVQTKDDVYEAFMKEMEGLL

SEQ ID NO: 879263 - protein, 209 aa, Homo sapiens
MGRRSTSSTKSGKFMNPTDQARKEARKRELKKNKKQRMMVRAAVLKMKDPKQIIRDMEKLDEMEFNPVQQPQLNEKVLKDKRKKLRETFERILRLYEKENPDIYKELRKLEVEYEQKRAQLSQYFDAVKNAQHVEVESIPLPDMPHAPSNILIQDIPLPGAQPPSILKKTSAYGPPTRAVSILPLLGHGVPRLPPGRNSRLIRFPMGIL

SEQ ID NO: 879264 - protein, 641 aa, Homo sapiens; identical to SEQ ID NO: 879260

SEQ ID NO: 879265 - protein, 641 aa, Homo sapiens; identical to SEQ ID NO: 879260

SEQ ID NO: 879266 - protein, 641 aa, Homo sapiens; identical to SEQ ID NO: 879260

SEQ ID NO: 879267 - protein, 641 aa, Homo sapiens; identical to SEQ ID NO: 879260

SEQ ID NO: 879268 - protein, 308 aa, Homo sapiens
MGRRSTSSTKSGKFMNPTDQARKEARKRELKKNKKQRMMVRAAVLKMKDPKQIIRDMEKLDEMEFNPVQQPQLNEKVLKDKRKKLRETFERILRLYEKENPDIYKELRKLEVEYEQKRAQLSQYFDAVKNAQHVEVESIPLPDMPHAPSNILIQDIPLPGAQPPSILKKTSAYGPPTRAVSILPLLGHGVPRLPPGRKPPGPPPGPPPPQVVQMYGRKVGFALDLPPRRRDEDMLYSPELAQRGHDDDVSSTSEDDGYPEDMDQDKHDDSTDDSDTDKSDGESDGDEFVHRDNGERDNNEEKKSGMCR

SEQ ID NO: 879269 - protein, 251 aa, Homo sapiens
MTRLTVLALLAGLLASSRAGSSPLLDIVGGRKARPRQFPFLASIQNQGRHFCGGALIHARFVMTAASCFQSQNPGVSTVVLGAYDLRRRERQSRQTFSISSMSENGYDPQQNLNDLMLLQLDREANLTSSVTILPLPLQNATVEAGTRCQVAGWGSQRSGGRLSRFPRFVNVTVTPEDQCRPNNVCTGVLTRRGGICNGDGGTPLVCEGLAHGVASFSLGPCGRGPDFFTRVALFRDWIDGVLNNPGPGPA

SEQ ID NO: 879270 - protein, 212 aa, Homo sapiens
MTRLTVLALLAGLLASSRAGSSPLLDIVGGRKARPRQFPFLASIQNQGRHFCGGALIHARFVMTAASCFQSQNPGVSTVVLGAYDLRRRERQSRQTFSISSMSENGYDPQQNLNDLMLLQLDREANLTSSVTILPLPLQNATVEAGTRCQVAGWGSQRSGGRLSRFPRFVNVTVTPEDQCRPNNVCTGVLTRRGGICNVSAPCGGRRGPERY

SEQ ID NO: 879271 - protein, 226 aa, Homo sapiens
AEGKWGLAHGRAEAHVWPGQGGWRLGPPQGRWTGSSPLLDIVGGRKARPRQFPFLASIQNQGRHFCGGALIHARFVMTAASCFQSQNPGVSTVVLGAYDLRRRERQSRQTFSISSMSENGYDPQQNLNDLMLLQLDREANLTSSVTILPLPLQNATVEAGTRCQVAGWGSQRSGGRLSRFPRFVNVTVTPEDQCRPNNVCTGVLTRRGGICNVSAPCGGRRGPERY

SEQ ID NO: 879272 - protein, 160 aa, Homo sapiens
MFEELKSRLDTLAQEVALLKEQQALQTVCLKGTKVHMKCFLAFTQTKTFHEASEDCISRGGTLSTPQTGSENDALYEYLRQSVGNEAEIWLGLNDMAAEGTWVDMTGARIAYKNWETEITAQPDGGKTENCAVLSGAANGKWFDKRCRDQLPYICQFGIV

SEQ ID NO: 879273 - protein, 192 aa, Homo sapiens
MASSSASATPEFEGRGGDDLGTEIANTLYRIFNNKSSVDLKTLCISPREHCWVLYVDVAVCLKGTKVHMKCFLAFTQTKTFHEASEDCISRGGTLSTPQTGSENDALYEYLRQSVGNEAEIWLGLNDMAAEGTWVDMTGARIAYKNWETEITAQPDGGKTENCAVLSGAANGKWFDKRCRDQLPYICQFGIV

SEQ ID NO: 879274 - protein, 218 aa, Homo sapiens
MELWGAYLLLCLFSLLTQVTTEPPTQKPKKIVNAKKDVVNTKMFEELKSRLDTLAQEVALLKEQQALQTVCLKGTKVHMKCFLAFTQTKTFHEASEDCISRGGTLSTPQTGSENDALYEYLRQSVGNEAEIWLGLNDMAAEGTWVDMTGARIAYKNWETEITAQPDGGKTENCAVLSGAANGKWFDKRCRDQLPYNCLFGDSCLTGYLLYLSSIFLLF

SEQ ID NO: 879275 - protein, 202 aa, Homo sapiens
MELWGAYLLLCLFSLLTQVTTEPPTQKPKKIVNAKKDVVNTKMFEELKSRLDTLAQEVALLKEQQALQTVCLKGTKVHMKCFLAFTQTKTFHEASEDCISRGGTLSTPQTGSENDALYEYLRQSVGNEAEIWLGLNDMAAEGTWVDMTGARIAYKNWETEITAQPDGGKTENCAVLSGAANGKWFDKRCRDQLPYICQFGIV

SEQ ID NO: 879276 - protein, 169 aa, Homo sapiens
MELWGAYLLLCLFSLLTQVTTEPPTQKPKKIVNAKKVCLKGTKVHMKCFLAFTQTKTFHEASEDCISRGGTLSTPQTGSENDALYEYLRQSVGNEAEIWLGLNDMAAEGTWVDMTGARIAYKNWETEITAQPDGGKTENCAVLSGAANGKWFDKRCRDQLPYICQFGIV

SEQ ID NO: 879277 - protein, 110 aa, Homo sapiens
AGWEMPEIVGSQQIFVAFSSPLPIPSSLLKVMQMKSFCLIFRKYLLGAYLRLNRLYPVASDGFIHWCQEHTFASRNGINYFGGFEEESIIAFLVQTGNRCICRTITEKLR

SEQ ID NO: 879278 - protein, 293 aa, Homo sapiens
MSHGHSHGGGGCRCAAEREEPPEQRGLAYGLYLRIDLERLQCLNESREGSGRGVFKPWEERTDRSKFVESDADEELLFNIPFTGNVKLKGIIIMGEDDDSHPSEMRLYKNIPQMSFDDTEREPDQTFSLNRDLTGELEYATKISRFSNVYHLSIHISKNFGADTTKVFYIGLRGEWTELRRHEVTICNYEASANPADHRVHQVTPQTHYVRLPVGKDKGMRLQRELAATASAKLCLWGLLQKPGLRKIRHHWEGCVGARGPSWFSRALWKLGLGLGGIWQSWITLAFPVNVAM

SEQ ID NO: 879279 - protein, 118 aa, Homo sapiens
MGEDDDSHPSEMRLYKNIPQMSFDDTEREPDQTFSLNRDLTGELEYATKISRFSNVYHLSIHISKNFGADTTKVFYIGLRGEWTELRRHEVTICNYEASANPADHRVHQVTPQTHFIS

SEQ ID NO: 879280 - protein, 191 aa, Homo sapiens
MSHGHSHGGGGCRCAAEREEPPEQRGLAYGLYLRIDLERLQCLNESREGSGRGVFKPWEERTDRSKFVESDADEELLFNIPFTGNVKLKGIIIMGEDDEEREPDQTFSLNRDLTGELEYATKISRFSNVYHLSIHISKNFGADTTKVFYIGLRGEWTELRRHEVTICNYEASANPADHRVHQVTPQTHFIS

SEQ ID NO: 879281 - protein, 165 aa, Homo sapiens
MSHGHSHGGGGCRCAAEREEPPEQRGLAYGLYLRIDLERLQCLNESREGSGRGVFKPWEERTDRSKFVESDADEELLFNIPFTGNVKLKGIIIMGEDDDSHPSEMRLYKNIPQMSFDDTEREPDQTFSLNRDLTGELEYATKISRFSNVYHLSIHISKNFGAVIS

SEQ ID NO: 879282 - protein, 211 aa, Homo sapiens
MSHGHSHGGGGCRCAAEREEPPEQRGLAYGLYLRIDLERLQCLNESREGSGRGVFKPWEERTDRSKFVESDADEELLFNIPFTGNVKLKGIIIMGEDDDSHPSEMRLYKNIPQMSFDDTEREPDQTFSLNRDLTGELEYATKISRFSNVYHLSIHISKNFGADTTKVFYIGLRGEWTELRRHEVTICNYEASANPADHRVHQVTPQTHFIS

SEQ ID NO: 879283 - protein, 211 aa, Homo sapiens; identical to SEQ ID NO: 879282

SEQ ID NO: 879284 - protein, 118 aa, Homo sapiens; identical to SEQ ID NO: 879279

SEQ ID NO: 879285 - protein, 147 aa, Homo sapiens [sequence omitted]

SEQ ID NO: 879286 - protein, 165 aa, Homo sapiens; identical to SEQ ID NO: 879281

SEQ ID NO: 879287 - protein, 699 aa, Homo sapiens
PASFDGWRPPRRRRKQGWRLLRRLRRGPGWAPRSGPGSEARAAGPVGWAAGPAAALAPLPAPGGPMWLQQRLKGLPGLLSSSWARRLLCLLGLLLLLLWFGGSGARRAAGGLHLLPWSRGEPGAAEPSACLEAATRAWRGLRERGEVVPLGPGVPALVANGFLALDVAANRLWVTPGEREPAVAPDFVPFVQLRPLSALAEAGEAVLLLREGLLRRVRCLQLGSPGPGPVAAGPGPASVSGLAAGSGRDCVLLQEDFLAHRGRPHVYLQRIQLNNPTERVAALQTVGPTAGPAPKAFTSTLEKVGDHQFLLYSGRSPPTPTGLVHLVVVAAKKLVNRLQVAPKTQLDETVLWVVHVSGPINPQVLKSKAAKELKALQDLARKEMLELLDMPAAELLQDHQLLWAQLFSPGVEMKKITDTHTPSGLTVNLTLYYMLSCSPAPLLSPSLSHRERDQMESTLNYEDHCFSGHATMHAENLWPGRLSSVQQILQLSDLWRLTLQKRGCKGLVKVGAPGILQGMVLSFGGLQFTENHLQFQADPDVLHNSYALHGIRYKNDHINLAVLADAEGKPYLHVSVESRGQPVKIYACKAGCLDEPVELTSAPTGHTFSVMVTQPITPLLYISTDLTHLQDLRHTLHLKAILAHDEHMAQQDPGLPFLFWFSVASLITLFHLFLFKLIYNEYCGPGAKPLFRSKEDPSV

SEQ ID NO: 879288 - protein, 699 aa, Homo sapiens; identical to SEQ ID NO: 879287

SEQ ID NO: 879289 - protein, 719 aa, Homo sapiens
PASFDGWRPPRRRRKQGWRLLRRLRRGPGWAPRSGPGSEARAAGPVGWAAGPAAALAPLPAPGGPMWLQQRLKGLPGLLSSSWARRLLCLLGLLLLLLWFGGSGARRAAGGLHLLPWSRGEPGAAEPSACLEAATRAWRGLRERGEVVPLGPGVPALVANGFLALDVAANRLWVTPGEREPAVAPDFVPFVQLRPLSALAEAGEAVLLLREGLLRRVRCLQLGSPGPGPVAAGPGPASVSGLAAGSGRDCVLLQEDFLAHRGRPHVYLQRIQLNNPTERVAALQTVGPTAGPAPKAFTSTLEKVGDHQFLLYSGRSPPTPTGLVHLVVVAAKKLVNRLQVAPKTQLDETVLWVVHVSGPINPQVLKSKAAKELKALQDLARKEMLELLDMPAAELLQDHQLLWAQLFSPGVEMKKITDTHTPSGLTVNLTLYYMLSCSPAPLLSPSLSHRERDQMESTLNYEDHCFSGHATMHAENLWPGRLSSVQQILQLSDLWRLTLQKRGCKGLVKVGAPGILQGMVLSFGGLQFTENHLQFQADPDVLHNSYALHGIRYKNDHINLAVLADAEGKPYLHVSVESRGQPVKIYACKAGCLDEPVELTSAPTGHTFSVMVTQPITPLLYISTDLTHLQDLRHTLHLKAILAHDEHMAQQDPGLPFLFWFSVASLITLFHLFLFKLIYNEYCGPGAKPLFRSKAQAGPCQSGASEHSAPEGPRPLSPW

SEQ ID NO: 879290 - protein, 699 aa, Homo sapiens; identical to SEQ ID NO: 879287

SEQ ID NO: 879291 - protein, 699 aa, Homo sapiens; identical to SEQ ID NO: 879287

SEQ ID NO: 879292 - protein, 719 aa, Homo sapiens; identical to SEQ ID NO: 879289

SEQ ID NO: 879293 - protein, 732 aa, Homo sapiens
PASFDGWRPPRRRRKQGWRLLRRLRRGPGWAPRSGPGSEARAAGPVGWAAGPAAALAPLPAPGGPMWLQQRLKGLPGLLSSSWARRLLCLLGLLLLLLWFGGSGARRAAGGLHLLPWSRGEPGAAEPSACLEAATRAWRGLRERGEVVPLGPGVPALVANGFLALDVAANRLWVTPGEREPAVAPDFVPFVQLRPLSALAEAGEAVLLLREGLLRRVRCLQLGSPGPGPVAAGPGPASVSGLAAGSGRDCVLLQEDFLAHRGRPHVYLQRIQLNNPTERVAALQTVGPTAGPAPKAFTSTLEKVGDHQFLLYSGRSPPTPTGLVHLVVVAAKKLVNRLQVAPKTQLDETVLWVVHVSGPINPQVLKSKAAKELKALQDLARKEMLELLDMPAAELLQDHQLLWAQLFSPGVEMKKITDTHTPSGLTVNLTLYYMLSCSPAPLLSPSLSHRERDQMESTLNYEDHCFSGHATMHAENLWPGRLSSVQQILQLSDLWRLTLQKRGCKGLVKVGAPGILQGMVLSFGGLQFTENHLQFQADPDVLHNSYALHGIRYKNDHINLAVLADAEGKPYLHVSVESRGQPVKIYACKAGCLDEPVELTSAPTGHTFSVMVTQPITPLLYISTDLTHLQDLRHTLHLKAILAHDEHMAQQDPGLPFLFWFSVASLITLFHLFLFKLIYNEYCGPGAKPLFRSKVGSRHLVETRGLGLALSPVSRKGLAWRGGVRPGQEWVS

SEQ ID NO: 879294 - protein, 602 aa, Homo sapiens
PASFDELEATEKKEEAGVAAAAAVAAGAGVGAAVRAATRAWRGLRERGEVVPLGPGVPALVANGFLALDVAANRLWVTPGEREPAVAPDFVPFVQLRPLSALAEAGEAVLLLREGLLRRVRCLQLGSPGPGPVAAGPGPASVSGLAAGSGRDCVLLQEDFLAHRGRPHVYLQRIQLNNPTERVAALQTVGPTAGPAPKAFTSTLEKVGDHQFLLYSGRSPPTPTGLVHLVVVAAKKLVNRLQVAPKTQLDETVLWVVHVSGPINPQVLKSKAAKELKALQDLARKEMLELLDMPAAELLQDHQLLWAQLFSPGVEMKKITDTHTPSGLTVNLTLYYMLSCSPAPLLSPSLSHRERDQMESTLNYEDHCFSGHATMHAENLWPGRLSSVQQILQLSDLWRLTLQKRGCKGLVKVGAPGILQGMVLSFGGLQFTENHLQFQADPDVLHNSYALHGIRYKNDHINLAVLADAEGKPYLHVSVESRGQPVKIYACKAGCLDEPVELTSAPTGHTFSVMVTQPITPLLYISTDLTHLQDLRHTLHLKAILAHDEHMAQQDPGLPFLFWFSVASLITLFHLFLFKLIYNEYCGPGAKPLFRSKEDPSV

SEQ ID NO: 879295 - protein, 674 aa, Homo sapiens
PASFDGWRPPRRRRKQGWRLLRRLRRGPGWAPRSGPGSEARAAGPVGWAAGPAAALAPLPAPGGPMWLQQRLKGLPGLLSSSWARRLLCLLGLLLLLLWFGGSGARRAAGGLHLLPWSRGEPGAAEPSACLEAATRAWRGLRERGEVVPLGPGVPALVANGFLALDVAANRLWVTPGEREPAVAPDFVPFVQLRPLSALAEAGEAVLLLREGLLRRVRCLQLGSPGPGPVAAGPGPASVSGLAAGSGRDCVLLQEDFLAHRGRPHVYLQRIQLNNPTERVAALQTVGPTAGPAPKAFTSTLEKVGDHQFLLYSGRSPPTPTGLVHLVVVAAKKLVNRLQVAPKTQLDETVLWVVHVSGPINPQVLKSKAAKELKALQDLARKEMLELLDMPAAELLQDHQLLWAQLFSPGVEMKKITDTHTPSGLTVNLTLYYMLSCSPAPLLSPSLSHRERDQMESTLNYEDHCFSGHATMHAENLWPGRLSSVQQILQLSDLWRLTLQKRGCKGLVKFQADPDVLHNSYALHGIRYKNDHINLAVLADAEGKPYLHVSVESRGQPVKIYACKAGCLDEPVELTSAPTGHTFSVMVTQPITPLLYISTDLTHLQDLRHTLHLKAILAHDEHMAQQDPGLPFLFWFSVASLITLFHLFLFKLIYNEYCGPGAKPLFRSKEDPSV

SEQ ID NO: 879296 - protein, 732 aa, Homo sapiens; identical to SEQ ID NO: 879293

SEQ ID NO: 879297 - protein, 725 aa, Homo sapiens
PASFDGWRPPRRRRKQGWRLLRRLRRGPGWAPRSGPGSEARAAGPVGWAAGPAAALAPLPAPGGPMWLQQRLKGLPGLLSSSWARRLLCLLGLLLLLLWFGGSGARRAAGGLHLLPWSRGEPGAAEPSACLEAATRAWRGLRERGEVVPLGPGVPALVANGFLALDVAANRLWVTPGEREPAVAPDFVPFVQLRPLSALAEAGEAVLLLREGLLRRVRCLQLGSPGPGPVAAGPGPASVSGLAAGSGRDCVLLQEDFLAHRGRPHVYLQRIQLNNPTERVAALQTVGPTAGPAPKAFTSTLEKVGDHQFLLYSGRSPPTPTGLVHLVVVAAKKLVNRLQVAPKTQLDETVLWVVHVSGPINPQVLKSKAAKELKALQDLARKEMLELLDMPAAELLQDHQLLWAQLFSPGVEMKKITDTHTPSGLTVNLTLYYMLSCSPAPLLSPSLSHRERDQMESTLNYEDHCFSGHATMHAENLWPGRLSSVQQILQLSDLWRLTLQKRGCKGLVKVGAPGILQGMVLSFGGLQFTENHLQFQADPDVLHNSYALHGIRYKNDHINLAVLADAEGKPYLHVSVESRGQPVKIYACKAGCLDEPVELTSAPTGHTFSVMVTQPITPLLYISTDLTHLQDLRHTLHLKAILAHDEHMAQQDPGLPFLFWFSVASLITLFHLFLFKLIYNEYCGPGAKPLFRSKAQAGPCQSGASEHSAPEGPRPLSPWKIPVSE

SEQ ID NO: 879298 - protein, 445 aa, Homo sapiens
PASFDGWRPPRRRRKQGWRLLRRLRRGPGWAPRSGPGSEARAAGPVGWAAGPAAALAPLPAPGGPMWLQQRLKGLPGLLSSSWARRLLCLLGLLLLLLWFGGSGARRAAGGLHLLPWSRGEPGAAEPSACLEAATRAWRGLRERGEVVPLGPGVPALVANGFLALDVAANRLWVTPGEREPAVAPDFVPFVQLRPLSALAEAGEAVLLLREGLLRRVRCLQLGSPGPGPVAAGPGPASVSGLAAGSGRDCVLLQEDFLAHRGRPHVYLQRIQLNNPTERVAALQTVGPTAGPAPKAFTSTLEKVGDHQFLLYSGRSPPTPTGLVHLVVVAAKKLVNRLQVAPKTQLDETVLWVVHVSGPINPQVLKSKAAKELKALQDLARKEMLELLDMPAAELLQDHQLLWAQLFSPALLVQRGLPNHPLPPLPLQAHLQRVLWAWSQAPLQE

SEQ ID NO: 879299 - protein, 61 aa, Homo sapiens
FAGLRRMGAWQAFRCGSRTTVEAPAPRARGGVSSTPASAPPALPEVPSSSGGQDGESDSLR

SEQ ID NO: 879300 - protein, 56 aa, Homo sapiens
MQAPDSVRSVKVEREAKTWIEKPRGAGLRVAQKTPVHATTSLTLGTVVHLAFIILP

SEQ ID NO: 879301 - protein, 794 aa, Homo sapiens
MAGWIQAQQLQGDALRQMQVLYGQHFPIEVRHYLAQWIESQPWDAIDLDNPQDRAQATQLLEGLVQELQKKAEHQVGEDGFLLKIKLGHYATQLQKTYDRCPLELVRCIRHILYNEQRLVREANNCSSPAGILVDAMSQKHLQINQTFEELRLVTQDTENELKKLQQTQEYFIIQYQESLRIQAQFAQLAQLSPQERLSRETALQQKQVSLEAWLQREAQTLQQYRVELAEKHQKTLQLLRKQQTIILDDELIQWKRRQQLAGNGGPPEGSLDVLQSWCEKLAEIIWQNRQQIRRAEHLCQQLPIPGPVEEMLAEVNATITDIISALVTSTFIIEKQPPQVLKTQTKFAATVRLLVGGKLNVHMNPPQVKATIISEQQAKSLLKNENTRNECSGEILNNCCVMEYHQATGTLSAHFRNMSLKRIKRADRRGAESVTEEKFTVLFESQFSVGSNELVFQVKTLSLPVVVIVHGSQDHNATATVLWDNAFAEPGRVPFAVPDKVLWPQLCEALNMKFKAEVQSNRGLTKENLVFLAQKLFNNSSSHLEDYSGLSVSWSQFNRENLPGWNYTFWQWFDGVMEVLKKHHKPHWNDGAILGFVNKQQAHDLLINKPDGTFLLRFSDSEIGGITIAWKFDSPERNLWNLKPFTTRDFSIRSLADRLGDLSYLIYVFPDRPKDEVFSKYYTPVLAKAVDGYVKPQIKQVVPEFVNASADAGGSSATYMDQAPSPAVCPQAPYNMYPQNPDHVLDQDGEFDLDETMDVARHVEELLRRPMDSLDSRLSPPAGLFTSARGSLS

SEQ ID NO: 879302 - protein, 109 aa, Homo sapiens
MAGWIQAQQLQGDALRQMQVLYGQHFPIEVRHYLAQWIESQPWDAIDLDNPQDRAQATQLLEGLVQELQKKAEHQVGEDGFLLKIKLGHYATQLQKTYDRWPTDMPWIL

SEQ ID NO: 879303 - protein, 794 aa, Homo sapiens; identical to SEQ ID NO: 879301

SEQ ID NO: 879304 - protein, 424 aa, Homo sapiens
MPSESGAERRDRAAAQVGTAAATAVATAAPAGGGPDPEALSAFPGRHLSGLSWPQVKRLDALLSEPIPIHGRGNFPTLSVQPRQIVQVVRSTLEEQGLHVHSVRLHGSAASHVLHPESGLGYKDLDLVFRVDLRSEASFQLTKAVVLACLLDFLPAGVSRAKITPLTLKEAYVQKLVKVCTDSDRWSLISLSNKSGKNVELKFVDSVRRQFEFSIDSFQIILDSLLLFGQCSSTPMSEAFHPTVTGESLYGDFTEALEHLRHRVIATRSPEEIRGGGLLKYCHLLVRGFRPRPSTDVRALQRYMCSRFFIDFPDLVEQRRTLERYLEAHFGGADAARRYACLVTLHRVVNESTVCLMNHERRQTLDLIAALALQALAEQGPAATAALAWRPPGTDGVVPATVNYYVTPVQPLLAHAYPTWLPCN

SEQ ID NO: 879305 - protein, 346 aa, Homo sapiens
KGLGVESARGTVRLQSAASPAARSAPAWPGPQVGAAEGRGARFPAPPAPRAPRSRRPLRGFSPLATMSESFDCAKCNESLYGRKYIQTDSGPYCVPCYDNTFANTCAECQQLIGHDSRELFYEDRHFHEGCFRCCRCQRSLADEPFTCQDSELLCNDCYCSAFSSQCSACGETVMPGSRKLEYGGQTWHEHCFLCSGCEQPLGSRSFVPDKGAHYCVPCYENKFAPRCARCSKTLTQGGVTYRDQPWHRECLVCTGCQTPLAGQQFTSRDEDPYCVACFGELFAPKCSSCKRPIVGLGGGKYVSFEDRHWHHNCFSCARCSTSLVGQGFVPDGDQVLCQGCSQAGP

SEQ ID NO: 879306 - protein, 389 aa, Homo sapiens
EEGAGRWRRKEVGAGSGPRGGLGVPGCVWSGLGLVPCAHFLGEWVGAALPLAHTVRLQSAASPAARSAPAWPGPQVGAAEGRGARFPAPPAPRAPRSRRPLRGFSPLATMSESFDCAKCNESLYGRKYIQTDSGPYCVPCYDNTFANTCAECQQLIGHDSRELFYEDRHFHEGCFRCCRCQRSLADEPFTCQDSELLCNDCYCSAFSSQCSACGETVMPGSRKLEYGGQTWHEHCFLCSGCEQPLGSRSFVPDKGAHYCVPCYENKFAPRCARCSKTLTQGGVTYRDQPWHRECLVCTGCQTPLAGQQFTSRDEDPYCVACFGELFAPKCSSCKRPIVGLGGGKYVSFEDRHWHHNCFSCARCSTSLVGQGFVPDGDQVLCQGCSQAGP

SEQ ID NO: 879307 - protein, 346 aa, Homo sapiens; identical to SEQ ID NO: 879305

SEQ ID NO: 879308 - protein, 215 aa, Homo sapiens
MTRGSCSMKTAISTRAASAAALLCNDCYCSAFSSQCSACGETVMPGSRKLEYGGQTWHEHCFLCSGCEQPLGSRSFVPDKGAHYCVPCYENKFAPRCARCSKTLTQGGVTYRDQPWHRECLVCTGCQTPLAGQQFTSRDEDPYCVACFGELFAPKCSSCKRPIVGLGGGKYVSFEDRHWHHNCFSCARCSTSLVGQGFVPDGDQVLCQGCSQAGP

SEQ ID NO: 879309 - protein, 229 aa, Homo sapiens
EEGAGRWRRKEVGAGSGPRGGLGVPGCVWSGLGLVPCAHFLGEWVGAALPLAHTVRLQSAASPAARSAPAWPGPQVGAAEGRGARFPAPPAPRAPRSRRPLRGFSPLATMSESFDCAKCNESLYGRKYIQTDSGPYCVPCYDNTFANTCAECQQLIGHDSRELFYEDRHFHEGCFRCCRCQRSLADEPFTCQDSELLCNDCYCSAFSSQCSACGETVMPDADTGWSDIP

SEQ ID NO: 879310 - protein, 147 aa, Homo sapiens
MNPSPARTVSCSAMTATAVRFPRSAPLVGRLSCLTLTQGGVTYRDQPWHRECLVCTGCQTPLAGQQFTSRDEDPYCVACFGELFAPKCSSCKRPIVGLGGGKYVSFEDRHWHHNCFSCARCSTSLVGQGFVPDGDQVLCQGCSQAGP

SEQ ID NO: 879311 - protein, 346 aa, Homo sapiens; identical to SEQ ID NO: 879305

SEQ ID NO: 879312 - protein, 361 aa, Homo sapiens
EEGAGRWRRKEVGAGSGPRGGLGGRGAVVRAVGWALRSLPRGVGWGRAPTRPHGPSAVGSLAGSSLGPRLARPAGFSPLATMSESFDCAKCNESLYGRKYIQTDSGPYCVPCYDNTFANTCAECQQLIGHDSRELFYEDRHFHEGCFRCCRCQRSLADEPFTCQDSELLCNDCYCSAFSSQCSACGETVMPGSRKLEYGGQTWHEHCFLCSGCEQPLGSRSFVPDKGAHYCVPCYENKFAPRCARCSKTLTQGGVTYRDQPWHRECLVCTGCQTPLAGQQFTSRDEDPYCVACFGELFAPKCSSCKRPIVGLGGGKYVSFEDRHWHHNCFSCARCSTSLVGQGFVPDGDQVLCQGCSQAGP

SEQ ID NO: 879313 - protein, 119 aa, Homo sapiens
MSESFDCAKCNESLYGRKYIQTDSGPYCVPCYDNTFANTCAECQQLIGHDSRELFYEDRHFHEGCFRCCRCQRSLADEPFTCQDSELLCNDCYCSAFSSQCSACGETVMPGMCSGAHLV

SEQ ID NO: 879314 - protein, 361 aa, Homo sapiens; identical to SEQ ID NO: 879312

SEQ ID NO: 879315 - protein, 172 aa, Homo sapiens
MPGSRKLEYGGQTWHEHCFLCSGCEQPLGSRSFVPDKGAHYCVPCYENKFAPRCARCSKTLTQGGVTYRDQPWHRECLVCTGCQTPLAGQQFTSRDEDPYCVACFGELFAPKCSSCKRPIVGLGGGKYVSFEDRHWHHNCFSCARCSTSLVGQGFVPDGDQVLCQGCSQAGP

SEQ ID NO: 879316 - protein, 177 aa, Homo sapiens
MGPLFPTGSRKLEYGGQTWHEHCFLCSGCEQPLGSRSFVPDKGAHYCVPCYENKFAPRCARCSKTLTQGGVTYRDQPWHRECLVCTGCQTPLAGQQFTSRDEDPYCVACFGELFAPKCSSCKRPIVGLGGGKYVSFEDRHWHHNCFSCARCSTSLVGQGFVPDGDQVLCQGCSQAGP

SEQ ID NO: 879317 - protein, 382 aa, Homo sapiens
KGLGVESARGTVRLQSAASPAARSAPAWPGPQVGAAEGRGARFPAPPAPRAPRSRRPLRGFSPLATMSESFDCAKCNESLYGRKYIQTDSGPYCVPCYDNTFANTCAECQQLIGHDSRELFYEDRHFHEGCFRCCRCQRSLADEPFTCQDSELLCNDCYCSAFSSQCSACGETVMPGSRKLEYGGQTWHEHCFLCSGCEQPLGSRSFVPDKGAHYCVPCYENKFAPRCARCSKTLTQGGVTYRDQPWHRECLVCTGCQRSLADEPFTCQDSELLCNDCYCSAFSSQCSACGETVMPGSRKLEMEARHGMSTASCFGELFAPKCSSCKRPIVGLGGGKYVSFEDRHWHHNCFSCARCSTSLVGQGFVPDGDQVLCQGCSQAGP

SEQ ID NO: 879318 - protein, 346 aa, Homo sapiens; identical to SEQ ID NO: 879305

SEQ ID NO: 879319 - protein, 220 aa, Homo sapiens
MKSVIYHALSQKEANDSDVQPSGAQRAEAFVRAFLKRSTPRMSPQAREDQLQRKAVVLEYFTRHKRKEKKKKAKGLSARQRRELRLFDIKPEQQRYSLFLPLHELWKQYIRDLCSGLKPDTQPQMIQAKLLKADLHGAIISVTKSKCPSYVGITGILLQETKHIFKIITKEDRLKVIPKLNCVFTVETDGFISYIYGSKFQLRSSERSAKKFKAKGTIDL

SEQ ID NO: 879320 - protein, 220 aa, Homo sapiens; identical to SEQ ID NO: 879319

SEQ ID NO: 879321 - protein, 220 aa, Homo sapiens; identical to SEQ ID NO: 879319

SEQ ID NO: 879322 - protein, 220 aa, Homo sapiens; identical to SEQ ID NO: 879319

SEQ ID NO: 879323 - protein, 202 aa, Homo sapiens
MKSVIYHALSQKEANDSDVQPSGAQRAEAFVRAFLKRSTPRMSPQAREDQLQRKAVVLEYFTRHKRKEKKKKAKGLSARQRRELRLFDIKPEQQRYSLFLPLHELWKQYIRDLCSGLKPDTQPQMIQAKLLKADLHGAIISVTKSKCPSYVGITGILLQETKHIFFTVETDGFISYIYGSKFQLRSSERSAKKFKAKGTIDL

SEQ ID NO: 879324 - protein, 220 aa, Homo sapiens; identical to SEQ ID NO: 879319

SEQ ID NO: 879325 - protein, 220 aa, Homo sapiens; identical to SEQ ID NO: 879319

SEQ ID NO: 879326 - protein, 131 aa, Homo sapiens
MTPMSRYSLFLPLHELWKQYIRDLCSGLKPDTQPQMIQAKLLKADLHGAIISVTKSKCPSYVGITGILLQETKHIFKIITKEDRLKVIPKLNCVFTVETDGFISYIYGSKFQLRSSERSAKKFKAKGTIDL

SEQ ID NO: 879327 - protein, 103 aa, Homo sapiens
  misc_feature (7)..(7): Xaa can be any naturally occurring amino acid
ADRRVTXESAEVGCEKTTEGETALRSPKKLLPRQPRRSYQNEALPLPPTHHQPPGYGTDTNWTLRTKRHQPNQQPLSIQQHERRHFPFLRGQCHNPPLLLQLR

SEQ ID NO: 879328 - protein, 101 aa, Homo sapiens
RLLCLLVQKQLNQKKPPDSTALRSPKKLLPRQPRRSYQNEALPLPPTHHQPPGYGTDTNWTLRTKRHQPNQQPLSIQQHERRHFPFLRGQCHNPPLLLQLR

SEQ ID NO: 879329 - protein, 103 aa, Homo sapiens; identical to SEQ ID NO: 879327
  misc_feature (7)..(7): Xaa can be any naturally occurring amino acid

SEQ ID NO: 879330 - protein, 101 aa, Homo sapiens; identical to SEQ ID NO: 879328

SEQ ID NO: 879331 - protein, 103 aa, Homo sapiens; identical to SEQ ID NO: 879327
  misc_feature (7)..(7): Xaa can be any naturally occurring amino acid

SEQ ID NO: 879332 - protein, 101 aa, Homo sapiens; identical to SEQ ID NO: 879328

SEQ ID NO: 879333 - protein, 116 aa, Homo sapiens
MRYSLSPDNHLEDGIMNMANFLRGFEEKGIKNDRPEDQLSKEKKKILFSFCEVCNIQLNSAAQAQVHSNGKSHRKRVKQLSDGQPPPPAQASPSSNSSTGKIHELFVTSRNICYTH

SEQ ID NO: 879334 - protein, 94 aa, Homo sapiens
EVCNIQLNSAAQAQVHSNGKSHRKRVKQLSDGQPPPPAQASPSSNSSTGRRQGPGFHVLRGEMVLVWKMKDLEQDLIFTLKLGYHDNMYSFSYR

SEQ ID NO: 879335 - protein, 116 aa, Homo sapiens; identical to SEQ ID NO: 879333

SEQ ID NO: 879336 - protein, 662 aa, Homo sapiens
RSGAGGEASRNALGARTRVQSPGPGGQTKREEAQNSSTPSVPMSKSKCSVGLMSSVVAPAKEPNAVGPKEVELILVKEQNGVQLTSSTLTNPRQSPVEAQDRETWGKKIDFLLSVIGFAVDLANVWRFPYLCYKNGGGAFLVPYLLFMVIAGMPLFYMELALGQFNREGAAGVWKICPILKGVGFTVILISLYVGFFYNVIIAWALHYLFSSFTTELPWIHCNNSWNSPNCSDAHPGDSSGDSSGLNDTFGTTPAAEYFERGVLHLHQSHGIDDLGPPRWQLTACLVLVIVLLYFSLWKGVKTSGKVVWITATMPYVVLTALLLRGVTLPGAIDGIRAYLSVDFYRLCEASVWIDAATQVCFSLGVGFGVLIAFSSYNKFTNNCYRDAIVTTSINSLTSFSSGFVVFSFLGYMAQKHSVPIGDVAKDGPGLIFIIYPEAIATLPLSSAWAVVFFIMLLTLGIDSAMGGMESVITGLIDEFQLLHRHRELFTLFIVLATFLLSLFCVTNGGIYVFTLLDHFAAGTSILFGVLIEAIGVAWFYGVGQFSDDIQQMTGQRPSLYWRLCWKLVSPCFLLFVVVVSIVTFRPPHYGAYIFPDWANALGWVIATSSMAMVPIYAAYKFCSLPGSFREKLAYAIAPEKDRELVDRGEVRQFTLRHWLKV

SEQ ID NO: 879337 - protein, 102 aa, Homo sapiens
DWKIAAAAAQLVPETAVSCSYRDAIVTTSINSLTSFSSGFVVFSFLGYMAQKHSVPIGDVAKDGEPLLLHLGLLRVAPAPSSQQSLFPCERGRRRMGPERLQ

SEQ ID NO: 879338 - protein, 617 aa, Homo sapiens
MKVSLGNGEMGVSAHLQPCKAGTTRFFTSNTHSSVVLQGFDQLRIEGLLCDVTLVPGDGDEIFPVHRAMMASASDYFKAMFTGGMKEQDLMCIKLHGVNKVGLKKIIDFIYTAKLSLNMDNLQDTLEAASFLQILPVLDFCKVFLISGVSLDNCVEVGRIANTYNLIEVDKYVNNFILKNFPALLSTGEFLKLPFERLAFVLSSNSLKHCTELELFKAACRWLRLEDPRMDYAAKLMKNIRFPLMTPQDLINYVQTVDFMRTDNTCVNLLLEASNYQMMPYMQPVMQSDRTAIRSDSTHLVTLGGVLRQQLVVSKELRMYDERAQEWRSLAPMDAPRYQHGIAVIGNFLYVVGGQSNYDTKGKTAVDTVFRFDPRYNKWMQVASLNEKRTFFHLSALKGHLYAVGGRSAAGELATVECYNPRMNEWSYVAKMSEPHYGHAGTVYGGLMYISGGITHDTFQNELMCFDPDTDKWMQKAPMTTVRGLHCMCTVGDKLYVIGGNHFRGTSDYDDVLSCEYYSPTLDQWTPIAAMLRGQSDVGVAVFENKIYVVGGYSWNNRCMVEIVQKYDPEKDEWHKVFDLPESLGGIRACTLTVFPPEENPGSPSRESPLSAPSDHS

SEQ ID NO: 879339 - protein, 590 aa, Homo sapiens
MGVSAHLQPCKAGTTRFFTSNTHSSVVLQGFDQLRIEGLLCDVTLVPGDGDEIFPVHRAMMASASDYFKAMFTGGMKEQDLMCIKLHGVNKVGLKKIIDFIYTAKLSLNMDNLQDTLEAASFLQILPVLDFCKVFLISGVSLDNCVEVGRIANTYNLIEVDKYVNNFILKNFPALLSTGEFLKLPFERLAFVLSSNSLKHCTELELFKAACRWLRLEDPRMDYAAKLMKNIRFPLMTPQDLINYVQTVDFMRTDNTCVNLLLEASNYQMMPYMQPVMQSDRTAIRSDSTHLVTLGGVLRQQLVVSKELRMYDERAQEWRSLAPMDAPRYQHGIAVIGNFLYVVGGQSNYDTKGKTAVDTVFRFDPRYNKWMQVASLNEKRTFFHLSALKGHLYAVGGRSAAGELATVECYNPRMNEWSYVAKMSEPHYGHAGTVYGGLMYISGGITHDTFQNELMCFDPDTDKWMQKAPMTTVRGLHCMCTVGDKLYVIGGNHFRGTSDYDDVLSCEYYSPTLDQWTPIAAMLRGQSDVGVAVFENKIYVVGGYSWNNRCMVEIVQKYDPEKDEWHKVFDLPESLGGIRACTLTVFPPEA

SEQ ID NO: 879340 - protein, 617 aa, Homo sapiens; identical to SEQ ID NO: 879338

SEQ ID NO: 879341 - protein, 511 aa, Homo sapiens
MRITITAETIQHKLLQHKLLQHKLLQHTIPVLDFCKVFLISGVSLDNCVEVGRIANTYNLIEVDKYVNNFILKNFPALLSTGEFLKLPFERLAFVLSSNSLKHCTELELFKAACRWLRLEDPRMDYAAKLMKNIRFPLMTPQDLINYVQTVDFMRTDNTCVNLLLEASNYQMMPYMQPVMQSDRTAIRSDSTHLVTLGGVLRQQLVVSKELRMYDERAQEWRSLAPMDAPRYQHGIAVIGNFLYVVGGQSNYDTKGKTAVDTVFRFDPRYNKWMQVASLNEKRTFFHLSALKGHLYAVGGRSAAGELATVECYNPRMNEWSYVAKMSEPHYGHAGTVYGGLMYISGGITHDTFQNELMCFDPDTDKWMQKAPMTTVRGLHCMCTVGDKLYVIGGNHFRGTSDYDDVLSCEYYSPTLDQWTPIAAMLRGQSDVGVAVFENKIYVVGGYSWNNRCMVEIVQKYDPEKDEWHKVFDLPESLGGIRACTLTVFPPEENPGSPSRESPLSAPSDHS

SEQ ID NO: 879342 - protein, 617 aa, Homo sapiens; identical to SEQ ID NO: 879338

SEQ ID NO: 879343 - protein, 183 aa, Homo sapiens
MSLSRDLKDDFHSDTVLSILNEQRIRGILCDVTIIVEDTKFKAHSNVLAASSLYFKNIFWSHTICISSHVLELDDLKAEVFTEILNYIYSSTVVVKRQETVTDLAAAGKKLGISFLEDLTDRNFSNSPGPYVFCITEKGVVKEEKNEKRHEEPAITNGPRITNAFSIIETENSNNMFSPLDLR

SEQ ID NO: 879344 - protein, 183 aa, Homo sapiens; identical to SEQ ID NO: 879343

SEQ ID NO: 879345 - protein, 183 aa, Homo sapiens; identical to SEQ ID NO: 879343

SEQ ID NO: 879346 - protein, 186 aa, Homo sapiens
MTVMSLSRDLKDDFHSDTVLSILNEQRIRGILCDVTIIVEDTKFKAHSNVLAASSLYFKNIFWSHTICISSHVLELDDLKAEVFTEILNYIYSSTVVVKRQETVTDLAAAGKKLGISFLEDLTDRNFSNSPGPYVFCITEKGVVKEEKNEKRHEEPAITNGPRITNAFSIIETENSNNMFSPLDLR

SEQ ID NO: 879347 - protein, 735 aa, Homo sapiens
GAFYWSWVPSMGAASVRAGARLVEVALCSFTVTCLEVMRRFLLLYATQQGQAKAIAEEMCEQAVVHGFSADLHCISESDKYDLKTETAPLVVVVSTTGTGDPPDTARKFVKEIQNQTLPVDFFAHLRYGLLGLGDSEYTYFCNGGKIIDKRLQELGARHFYDTGHADDCVGLELVVEPWIAGLWPALRKHFRSSRGQEEISGALPVASPASSRTDLVKSELLHIESQVELLRFDDSGRKDSEVLKQNAVNSNQSNVVIEDFESSLTRSVPPLSQASLNIPGLPPEYLQVHLQESLGQEESQVSVTSADPVFQVPISKAVQLTTNDAIKTTLLVELDISNTDFSYQPGDAFSVICPNSDSEVQSLLQRLQLEDKREHCVLLKIKADTKKKGATLPQHIPAGCSLQFIFTWCLEIRAIPKKAFLRALVDYTSDSAEKRRLQELCSKQGAADYSRFVRDACACLLDLLLAFPSCQPPLSLLLEHLPKLQPRPYSCASSSLFHPGKLHFVFNIVEFLSTATTEVLRKGVCTGWLALLVASVLQPNIHASHEDSGKALAPKISISPRTTNSFHLPDDPSIPIIMVGPGTGIAPFIGFLQHREKLQEQHPDGNFGAMWLFFGCRHKDRDYLFRKELRHFLKHGILTHLKVSFSRDAPVGEEEAPAKYVQDNIQLHGQQVARILLQENGHIYVCGDAKNMAKDVHDALVQIISKEVGVEKLEAMKTLATLKEEKRYLQDIWS

SEQ ID NO: 879348 - protein, 157 aa, Homo sapiens
MVGPGTGIAPFIGFLQHREKLQEQHPDGNFGAMWLFFGCRHKDRDYLFRKELRHFLKHGILTHLKVSFSRDAPVGEEEAPAKYVQDNIQLHGQQVARILLQENGHIYVCGDAKNMAKDVHDALVQIISKEVGVEKLEAMKTLATLKEEKRYLQDIWS

SEQ ID NO: 879349 - protein, 103 aa, Homo sapiens
SFLLVLGTEHGRCVSARWRKVGGSRVVQVRARLARRGFTVTCLEVMRRFLLLYATQQGQAKAIAEEMCEQAVVHGFSADLHCISESDKVSVIQNTPTFAMGGR

SEQ ID NO: 879350 - protein, 103 aa, Homo sapiens; identical to SEQ ID NO: 879349

SEQ ID NO: 879351 - protein, 356 aa, Homo sapiens
MNPFPVFTCKGATLPQHIPAGCSLQFIFTWCLEIRAIPKKAFLRALVDYTSDSAEKRRLQELCSKQGAADYSRFVRDACACLLDLLLAFPSCQPPLSLLLEHLPKLQPRPYSCASSSLFHPGKLHFVFNIVEFLSTATTEVLRKGVCTGWLALLVASVLQPNIHASHEDSGKALAPKISISPRTTNSFHLPDDPSIPIIMVGPGTGIAPFIGFLQHREKLQEQHPDGNFGAMWLFFGCRHKDRDYLFRKELRHFLKHGILTHLKVSFSRDAPVGEEEAPAKYVQDNIQLHGQQVARILLQENGHIYVCGDAKNMAKDVHDALVQIISKEVGVEKLEAMKTLATLKEEKRYLQDIWS

SEQ ID NO: 879352 - protein, 103 aa, Homo sapiens; identical to SEQ ID NO: 879349

SEQ ID NO: 879353 - protein, 103 aa, Homo sapiens; identical to SEQ ID NO: 879349

SEQ ID NO: 879354 - protein, 743 aa, Homo sapiens
SFLLVLGTEHGRCVSARWRKVGGSRVVQVRARLARRGFTVTCLEVMRRFLLLYATQQGQAKAIAEEMCEQAVVHGFSADLHCISESDKYDLKTETAPLVVVVSTTGTGDPPDTARKFVKEIQNQTLPVDFFAHLRYGLLGLGDSEYTYFCNGGKIIDKRLQELGARHFYDTGHADDCVGLELVVEPWIAGLWPALRKHFRSSRGQEEISGALPVASPASSRTDLVKSELLHIESQVELLRFDDSGRKDSEVLKQNAVNSNQSNVVIEDFESSLTRSVPPLSQASLNIPGLPPEYLQVHLQESLGQEESQVSVTSADPVFQVPISKAVQLTTNDAIKTTLLVELDISNTDFSYQPGDAFSVICPNSDSEVQSLLQRLQLEDKREHCVLLKIKADTKKKGATLPQHIPAGCSLQFIFTWCLEIRAIPKKAFLRALVDYTSDSAEKRRLQELCSKQGAADYSRFVRDACACLLDLLLAFPSCQPPLSLLLEHLPKLQPRPYSCASSSLFHPGKLHFVFNIVEFLSTATTEVLRKGVCTGWLALLVASVLQPNIHASHEDSGKALAPKISISPRTTNSFHLPDDPSIPIIMVGPGTGIAPFIGFLQHREKLQEQHPDGNFGAMWLFFGCRHKDRDYLFRKELRHFLKHGILTHLKVSFSRDAPVGEEEAPAKYVQDNIQLHGQQVARILLQENGHIYVCGDAKNMAKDVHDALVQIISKEVGVEKLEAMKTLATLKEEKRYLQDIWS

SEQ ID NO: 879355 - protein, 103 aa, Homo sapiens; identical to SEQ ID NO: 879349

SEQ ID NO: 879356 - protein, 555 aa, Homo sapiens
CLLRIHSEQDNQLEEGQEEISGALPVASPASSRTDLVKSELLHIESQVELLRFDDSGRKDSEVLKQNAVNSNQSNVVIEDFESSLTRSVPPLSQASLNIPGLPPEYLQVHLQESLGQEESQVSVTSADPVFQVPISKAVQLTTNDAIKTTLLVELDISNTDFSYQPGDAFSVICPNSDSEVQSLLQRLQLEDKREHCVLLKIKADTKKKGATLPQHIPAGCSLQFIFTWCLEIRAIPKKAFLRALVDYTSDSAEKRRLQELCSKQGAADYSRFVRDACACLLDLLLAFPSCQPPLSLLLEHLPKLQPRPYSCASSSLFHPGKLHFVFNIVEFLSTATTEVLRKGVCTGWLALLVASVLQPNIHASHEDSGKALAPKISISPRTTNSFHLPDDPSIPIIMVGPGTGIAPFIGFLQHREKLQEQHPDGNFGAMWLFFGCRHKDRDYLFRKELRHFLKHGILTHLKVSFSRDAPVGEEEAPAKYVQDNIQLHGQQVARILLQENGHIYVCGDAKNMAKDVHDALVQIISKEVGVEKLEAMKTLATLKEEKRYLQDIWS

SEQ ID NO: 879357 - protein, 157 aa, Homo sapiens; identical to SEQ ID NO: 879348

SEQ ID NO: 879358 - protein, 103 aa, Homo sapiens; identical to SEQ ID NO: 879349

SEQ ID NO: 879359 - protein, 103 aa, Homo sapiens; identical to SEQ ID NO: 879349

SEQ ID NO: 879360 - protein, 152 aa, Homo sapiens
LGTSIHTGTRAMAQTAIKAMHQAQTMEGCSSPMVVKFADTQKDKEQKRMAQQLQQQMQQISAASVWGNLAGLNTLGPQYLAVSLCGLLSADCASSQLFLLLLSLANKHSGIYNFWHIEIICKNSGSTISFSPVSLFLSIYICISGHASLVIS

SEQ ID NO: 879361 - protein, 486 aa, Homo sapiens
MNGTLDHPDQPDLDAIKMFVGQVPRTWSEKDLRELFEQYGAVYEINVLRDRSQNPPQSKGCCFVTFYTRKAALEAQNALHNMKVLPGMHHPIQMKPADSEKNNAVEDRKLFIGMISKKCTENDIRVMFSSFGQIEECRILRGPDGLSRGCAFVTFTTRAMAQTAIKAMHQAQTMEGCSSPMVVKFADTQKDKEQKRMAQQLQQQMQQISAASVWGNLAGLNTLGPQYLALYLQLLQQTASSGNLNTLSSLHPMGGLNAMQLQNLAALAAAASAAQNTPSGTNALTTSSSPLSVLTSSGSSPSSSSSNSVNPIASLGALQTLAGATAGLNVGSLAGMAALNGGLGSSGLSNGTGSTMEALTQAYSGIQQYAAAALPTLYNQNLLTQQSIGAAGSQKEGPEGANLFIYHLPQEFGDQDLLQMFMPFGNVVSAKVFIDKQTNLSKCFGFVSYDNPVSAQAAIQSMNGFQIGMKRLKVQLKRSKNDSKPY

SEQ ID NO: 879362 - protein, 486 aa, Homo sapiens; identical to SEQ ID NO: 879361

SEQ ID NO: 879363 - protein, 486 aa, Homo sapiens; identical to SEQ ID NO: 879361

SEQ ID NO: 879364 - protein, 178 aa, Homo sapiens
MNGTLDHPDQPDLDAIKMFVGQVPRTWSEKDLRELFEQYGAVYEINVLRDRSQNPPQSKGCCFVTFYTRKAALEAQNALHNMKVLPGMHHPIQMKPADSEKNNAVEDRKLFIGMISKKCTENDIRVMFSSFGQIEECRILRGPDGLSRGCAFVTFTTRAMAQTAIKAMHQAQTMEQPY

SEQ ID NO: 879365 - protein, 109 aa, Homo sapiens
MKEGIPAGFLLWGWQVAWYYAQGRSAWGKGQPGRGPVSGRLLNFLEGVIGWKEARNPSLRDCCAPHSLTAQSRLCWQEALRLPFLCIEKQCLPIYFAFNSKRSSGKTCG

SEQ ID NO: 879366 - protein, 189 aa, Homo sapiens
MGKEKTHINIVVIGHVDSGKSTTTGHLIYKCGGIDKRTIEKFEKEAAEMGKGSFKYAWVLDKLKAERERGITIDISLWKFETSKYYVTIIDAPGHRDFIKNMITGTSQADCAVLIVAAGVGEFEAGISKNGQTREHALLAYTLGVKQLIVGVNKMDSTEPPYSQKRYEEIVTVCGGFNGFETLERQLPF

SEQ ID NO: 879367 - protein, 184 aa, Homo sapiens
MNGTLDHPDQPDLDAIKMFVGQVPRTWSEKDLRELFEQYGAVYEINVLRDRSQNPPQSKGCCFVTFYTRKAALEAQNALHNMKVLPGMHHPIQMKPADSEKNNAVEDRKLFIGMISKKCTENDIRVMFSSFGQIEECRILRGPDGLSRGCAFRHLLTRAWTDGIRHAHSRPGSVESPEMQVTVY

SEQ ID NO: 879368 - protein, 486 aa, Homo sapiens; identical to SEQ ID NO: 879361

SEQ ID NO: 879369 - protein, 106 aa, Homo sapiens
TSGSLRIVVLLEARKEGPEGANLFIYHLPQEFGDQDLLQMFMPFGNVVSAKVFIDKQTNLSKCFGFVSYDNPVSAQAAIQSMNGFQIGMKRLKVQLKRSKNDSKPY

SEQ ID NO: 879370 - protein, 486 aa, Homo sapiens; identical to SEQ ID NO: 879361

SEQ ID NO: 879371 - protein, 486 aa, Homo sapiens; identical to SEQ ID NO: 879361

SEQ ID NO: 879372 - protein, 300 aa, Homo sapiens [sequence omitted]

SEQ ID NO: 879373 - protein, 113 aa, Homo sapiens
SCRIRQSHGYTHDSRAVKFLFEILSSFDNEQQRLFLQFVTGSPRLPVGGFRSLNPPLTIVRKTFESTENPDDFLPSVMTCVNYLKLPDYSSIEIMREKLLIAAREGQQSFHLS

SEQ ID NO: 879374 - protein, 1992 aa, Homo sapiens
MSNRPNNNPGGSLRRSQRNTAGAQPQDDSIGGRSCSSSSAVIVPQPEDPDRANTSERQKTGQVPKKDNSRGVKRSASPDYNRTNSPSSAKKPKALQHTESPSETNKPHSKSKKRHLDQEQQLKSAQSPSTSKAHTRKSGATGGSRSQKRKRTESSCVKSGSGSESTGAEERSAKPTKLASKSATSAKAGCSTITDSSSAASTSSSSSAVASASSTVPPGARVKQGKDQNKARRSRSASSPSPRRSSREKEQSKTGGSSKFDWAARFSPKVSLPKTKLSLPGSSKSETSKPGPSGLQAKLASLRKSTKKRSESPPAELPSLRRSTRQKTTGSCASTSRRGSGLGKRGAAEARRQEKMADPESNQEAVNSSAARTDEAPQGAAGAVGMTTSGESESDDSEMGRLQALLEARGLPPHLFGPLGPRMSQLFHRTIGSGASSKAQQLLQGLQASDESQQLQAVIEMCQLLVMGNEETLGGFPVKSVVPALITLLQMEHNFDIMNHACRALTYMMEALPRSSAVVVDAIPVFLEKLQVIQCIDVAEQALTALEMLSRRHSKAILQAGGLADCLLYLEFFSINAQRNALAIAANCCQSITPDEFHFVADSLPLLTQRLTHQDKKSVESTCLCFARLVDNFQHEENLLQQVASKDLLTNVQQLLVVTPPILSSGMFIMVVRMFSLMCSNCPTLAVQLMKQNIAETLHFLLCGASNGSCQEQIDLVPRSPQELYELTSLICELMPCLPKEGIFAVDTMLKKGNAQNTDGAIWQWRDDRGLWHPYNRIDSRIIEQINEDTGTARAIQRKPNPLANSNTSGYSESKKDDARAQLMKEDPELAKSFIKTLFGVLYEVYSSSAGPAVRHKCLRAILRIIYFADAELLKDVLKNHAVSSHIASMLSSQDLKIVVGALQMAEILMQKLPDIFSVYFRREGVMHQVKHLAESESLLTSPPKACTNGSGSMGSTTSVSSGTATAATHAAADLGSPSLQHSRDDSLDLSPQGRLSDVLKRKRLPKRGPRRPKYSPPRDDDKVDNQAKSPTTTQSPKSSFLASLNPKTWGRLSTQSNSNNIEPARTAGGSGLARAASKDTISNNREKIKGWIKEQAHKFVERYFSSENMDGSNPALNVLQRLCAATEQLNLQVDGGAECLVEIRSIVSESDVSSFEIQHSGFVKQLLLYLTSKSEKDAVSREIRLKRFLHVFFSSPLPGEEPIGRVEPVGNAPLLALVHKMNNCLSQMEQFPVKVHDFPSGNGTGGSFSLNRGSQALKFFNTHQLKCQLQRHPDCANVKQWKGGPVKIDPLALVQAIERYLVVRGYGRVREDDEDSDDDGSDEEIDESLAAQFLNSGNVRHRLQFYIGEHLLPYNMTVYQAVRQFSIQAEDERESTDDESNPLGRAGIWTKTHTIWYKPVREDEESNKDCVGGKRGRAQTAPTKTSPRNAKKHDELWHDGVCPSVSNPLEVYLIPTPPENITFEDPSLDVILLLRVLHAISRYWYYLYDNAMCKEIIPTSEFINSKLTAKANRQLQDPLVIMTGNIPTWLTELGKTCPFFFPFDTRQMLFYVTAFDRDRAMQRLLDTNPEINQSDSQDSRVAPRLDRKKRTVNREELLKQAESVMQDLGSSRAMLEIQYENEVGTGLGPTLEFYALVSQELQRADLGLWRGEEVTLSNPKGSQEGTKYIQNLQGLFALPFGRTAKPAHIAKVKMKFRFLGKLMAKAIMDFRLVDLPLGLPFYKWMLRQETSLTSHDLFDIDPVVARSVYHLEDIVRQKKRLEQDKSQTKESLQYALETLTMNGCSVEDLGLDFTLPGFPNIELKKGGKDIPVTIHNLEEYLRLVIFWALNEGVSRQFDSFRDGFESVFPLSHLQYFYPEELDQLLCGSKADTWDAKTLMECCRPDHGYTHDSRAVKFLFEILSSFDNEQQRLFLQFVTGSPRLPVGGFRSLNPPLTIVRKTFESTENPDDFLPSVMTCVNYLKLPDYSSIEIMREKLLIAAREGQQSFHLS

SEQ ID NO: 879375 - protein, 2032 aa, Homo sapiens
MSNRPNNNPGGSLRRSQRNTAGAQPQDDSIGGRSHLGQAKHKGYSPPESRKSNSKAPKVQSNTTSELSRGHLSKRSCSSSSAVIVPQPEDPDRANTSERQKTGQVPKKDNSRGVKRSASPDYNRTNSPSSAKKPKALQHTESPSETNKPHSKSKKRHLDQEQQLKSAQSPSTSKAHTRKSGATGGSRSQKRKRTESSCVKSGSGSESTGAEERSAKPTKLASKSATSAKAGCSTITDSSSAASTSSSSSAVASASSTVPPGARVKQGKDQNKARRSRSASSPSPRRSSREKEQRSSKSETSKPGPSGLQAKLASLRKSTKKRSESPPAELPSLRRSTRQKTTGSCASTSRRGSGLGKRGAAEARRQEKMADPESNQEAVNSSAARTDEAPQGAAGAVGMTTSGESESDDSEMGRLQALLEARGLPPHLFGPLGPRMSQLFHRTIGSGASSKAQQLLQGLQASDESQQLQAVIEMCQLLVMGNEETLGGFPVKSVVPALITLLQMEHNFDIMNHACRALTYMMEALPRSSAVVVDAIPVFLEKLQVIQCIDVAEQALTALEMLSRRHSKAILQAGGLADCLLYLEFFSINAQRNALAIAANCCQSITPDEFHFVADSLPLLTQRLTHQDKKSVESTCLCFARLVDNFQHEENLLQQVASKDLLTNVQQLLVVTPPILSSGMFIMVVRMFSLMCSNCPTLAVQLMKQNIAETLHFLLCGASNGSCQEQIDLVPRSPQELYELTSLICELMPCLPKEGIFAVDTMLKKGNAQNTDGAIWQWRDDRGLWHPYNRIDSRIIEAAHQVGEDEISLSTLGRVYTIDFNSMQQINEDTGTARAIQRKPNPLANSNTSGYSESKKDDARAQLMKEDPELAKSFIKTLFGVLYEVYSSSAGPAVRHKCLRAILRIIYFADAELLKDVLKNHAVSSHIASMLSSQDLKIVVGALQMAEILMQKLPDIFSVYFRREGVMHQVKHLAESESLLTSPPKACTNGSGSMGSTTSVSSGTATAATHAAADLGSPSLQHSRDDSLDLSPQGRLSDVLKRKRLPKRGPRRPKYSPPRDDDKVDNQAKSPTTTQSPKSSFLASLNPKTWGRLSTQSNSNNIEPARTAGGSGLARAASKDTISNNREKIKGWIKEQAHKFVERYFSSENMDGSNPALNVLQRLCAATEQLNLQVDGGAECLVEIRSIVSESDVSSFEIQHSGFVKQLLLYLTSKSEKDAVSREIRLKRFLHVFFSSPLPGEEPIGRVEPVGNAPLLALVHKMNNCLSQMEQFPVKVHDFPSGNGTGGSFSLNRGSQALKFFNTHQLKCQLQRHPDCANVKQWKGGPVKIDPLALVQAIERYLVVRGYGRVREDDEDSDDDGSDEEIDESLAAQFLNSGNVRHRLQFYIGEHLLPYNMTVYQAVRQFSIQAEDERESTDDESNPLGRAGIWTKTHTIWYKPVREDEESNKDCVGGKRGRAQTAPTKTSPRNAKKHDELWHDGVCPSVSNPLEVYLIPTPPENITFEDPSLDVILLLRVLHAISRYWYYLYDNAMCKEIIPTSEFINSKLTAKANRQLQDPLVIMTGNIPTWLTELGKTCPFFFPFDTRQMLFYVTAFDRDRAMQRLLDTNPEINQSDSQDSRVAPRLDRKKRTVNREELLKQAESVMQDLGSSRAMLEIQYENEVGTGLGPTLEFYALVSQELQRADLGLWRGEEVTLSNPKGSQEGTKYIQNLQGLFALPFGRTAKPAHIAKVKMKFRFLGKLMAKAIMDFRLVDLPLGLPFYKWMLRQETSLTSHDLFDIDPVVARSVYHLEDIVRQKKRLEQDKSQTKESLQYALETLTMNGCSVEDLGLDFTLPGFPNIELKKGGKDIPVTIHNLEEYLRLVIFWALNEGVSRQFDSFRDGFESVFPLSHLQYFYPEELDQLLCGSKADTWDAKTLMECCRPDHGYTHDSRAVKFLFEILSSFDNEQQRLFLQFVTGSPRLPVGGFRSLNPPLTIVRKTFESTENPDDFLPSVMTCVNYLKLPDYSSIEIMREKLLIAAREGQQSFHLS

SEQ ID NO: 879376 - protein, 1573 aa, Homo sapiens
GLAGEWRRLSVSCEFCLPAAHTELPYQAGNHNLYSHKASWCIRRQGLKIYLMNHACRALTYMMEALPRSSAVVVDAIPVFLEKLQVIQCIDVAEQALTALEMLSRRHSKAILQAGGLADCLLYLEFFSINAQRNALAIAANCCQSITPDEFHFVADSLPLLTQRLTHQDKKSVESTCLCFARLVDNFQHEENLLQQVASKDLLTNVQQLLVVTPPILSSGMFIMVVRMFSLMCSNCPTLAVQLMKQNIAETLHFLLCGASNGSCQEQIDLVPRSPQELYELTSLICELMPCLPKEGIFAVDTMLKKGNAQNTDGAIWQWRDDRGLWHPYNRIDSRIIEAAHQVGEDEISLSTLGRVYTIDFNSMQQINEDTGTARAIQRKPNPLANSNTSGYSESKKDDARAQLMKEDPELAKSFIKTLFGVLYEVYSSSAGPAVRHKCLRAILRIIYFADAELLKDVLKNHAVSSHIASMLSSQDLKIVVGALQMAEILMQKLPDIFSVYFRREGVMHQVKHLAESESLLTSPPKACTNGSGSMGSTTSVSSGTATAATHAAADLGSPSLQHSRDDSLDLSPQGRLSDVLKRKRLPKRGPRRPKYSPPRDDDKVDNQAKSPTTTQSPKSSFLASLNPKTWGRLSTQSNSNNIEPARTAGGSGLARAASKDTISNNREKIKGWIKEQAHKFVERYFSSENMDGSNPALNVLQRLCAATEQLNLQVDGGAECLVEIRSIVSESDVSSFEIQHSGFVKQLLLYLTSKSEKDAVSREIRLKRFLHVFFSSPLPGEEPIGRVEPVGNAPLLALVHKMNNCLSQMEQFPVKVHDFPSGNGTGGSFSLNRGSQALKFFNTHQLKCQLQRHPDCANVKQWKGGPVKIDPLALVQAIERYLVVRGYGRVREDDEDSDDDGSDEEIDESLAAQFLNSGNVRHRLQFYIGEHLLPYNMTVYQAVRQFSIQAEDERESTDDESNPLGRAGIWTKTHTIWYKPVREDEESNKDCVGGKRGRAQTAPTKTSPRNAKKHDELWHDGVCPSVSNPLEVYLIPTPPENITFEDPSLDVILLLRVLHAISRYWYYLYDNAMCKEIIPTSEFINSKLTAKANRQLQDPLVIMTGNIPTWLTELGKTCPFFFPFDTRQMLFYVTAFDRDRAMQRLLDTNPEINQSDSQDSRVAPRLDRKKRTVNREELLKQAESVMQDLGSSRAMLEIQYENEVGTGLGPTLEFYALVSQELQRADLGLWRGEEVTLSNPKGSQEGTKYIQNLQGLFALPFGRTAKPAHIAKVKMKFRFLGKLMAKAIMDFRLVDLPLGLPFYKWMLRQETSLTSHDLFDIDPVVARSVYHLEDIVRQKKRLEQDKSQTKESLQYALETLTMNGCSVEDLGLDFTLPGFPNIELKKGGKDIPVTIHNLEEYLRLVIFWALNEGVSRQFDSFRDGFESVFPLSHLQYFYPEELDQLLCGSKADTWDAKTLMECCRPDHGYTHDSRAVKFLFEILSSFDNEQQRLFLQFVTGSPRLPVGGFRSLNPPLTIVRKTFESTENPDDFLPSVMTCVNYLKLPDYSSIEIMREKLLIAAREGQQSFHLS

SEQ ID NO: 879377 - protein, 1805 aa, Homo sapiens
MSNRPNNNPGGSLRRSQRNTAGAQPQDDSIGGRSCSSSSAVIVPQPEDPDRANTSERQKTGQVPKKDNSRGVKRSASPDYNRTNSPSSAKKPKALQHTESPSETNKPHSKSKKRHLDQEQQLKSAQSPSTSKAHTRKSGATGGSRSQKRKRTESSCVKSGSGSESTGAEERSAKPTKLASKSATSAKAGCSTITDSSSAASTSSSSSAVASASSTVPPGARVKQGKDQNKARRSRSASSPSPRRSSREKEQRSSKSETSKPGPSGLQAKLASLRKSTKKRSESPPAELPSLRRSTRQKTTGSCASTSRRGSGLGKRGAAEARRQEKMADPESNQEAVNSSAARTDEAPQGAAGAVGMTTSGESESDDSEMGRLQALLEARGLPPHLFGPLGPRMSQLFHRTIGSGASSKAQQLLQGLQASDESQQLQAVIEMCQLLVMGNEETLGGFPVKSVVPALITLLQMEHNFDIMNHACRALTYMMEALPRSSAVVVDAIPVFLEKLQVIQCIDVAEQALTALEMLSRRHSKAILQAGGLADCLLYLEFFSINAQRNALAIAANCCQSITPDEFHFVADSLPLLTQRLTHQDKKSVESTCLCFARLVDNFQHEENLLQQVASKDLLTNVQQLLVVTPPILSSGMFIMVVRMFSLMCSNCPTLAVQLMKQNIAETLHFLLCGASNGSCQEQIDLVPRSPQELYELTSLICELMPCLPKEGIFAVDTMLKKGNAQNTDGAIWQWRDDRGLWHPYNRIDSRIIEAAHQVGEDEISLSTLGRVYTIDFNSMQQINEDTGTARAIQRKPNPLANSNTSGYSESKKDDARAQLMKEDPELAKSFIKTLFGVLYEVYSSSAGPAVRHKCLRAILRIIYFADAELLKDVLKNHAVSSHIASMLSSQDLKIVVGALQMAEILMQKLPDIFSVYFRREGVMHQVKHLAESESLLTSPPKACTNGSGSMGSTTSVSSGTATAATHAAADLGSPSLQHSRDDSLDLSPQGRLSDVLKRKLTAKTRAKKLPGEEPIGRVEPVGNAPLLALVHKMNNCLSQMEQFPVKVHDFPSGNGTGGSFSLNRGSQALKFFNTHQLKCQLQRHPDCANVKQWKGGPVKIDPLALVQAIERYLVVRGYGRVREDDEDSDDDGSDEEIDESLAAQFLNSGNVRHRLQFYIGEHLLPYNMTVYQAVRQFSIQAEDERESTDDESNPLGRAGIWTKTHTIWYKPVREDEESNKDCVGGKRGRAQTAPTKTSPRNAKKHDELWHDGVCPSVSNPLEVYLIPTPPENITFEDPSLDVILLLRVLHAISRYWYYLYDNAMCKEIIPTSEFINSKLTAKANRQLQDPLVIMTGNIPTWLTELGKTCPFFFPFDTRQMLFYVTAFDRDRAMQRLLDTNPEINQSDSQDSRVAPRLDRKKRTVNREELLKQAESVMQDLGSSRAMLEIQYENEVGTGLGPTLEFYALVSQELQRADLGLWRGEEVTLSNPKGSQEGTKYIQNLQGLFALPFGRTAKPAHIAKVKMKFRFLGKLMAKAIMDFRLVDLPLGLPFYKWMLRQETSLTSHDLFDIDPVVARSVYHLEDIVRQKKRLEQDKSQTKESLQYALETLTMNGCSVEDLGLDFTLPGFPNIELKKGGKDIPVTIHNLEEYLRLVIFWALNEGVSRQFDSFRDGFESVFPLSHLQYFYPEELDQLLCGSKADTWDAKTLMECCRPDHGYTHDSRAVKFLFEILSSFDNEQQRLFLQFVTGSPRLPVGGFRSLNPPLTIVRKTFESTENPDDFLPSVMTCVNYLKLPDYSSIEIMREKLLIAAREGQQSFHLS

SEQ ID NO: 879378 - protein, 500 aa, Homo sapiens [sequence omitted]

SEQ ID NO: 879379 - protein, 539 aa, Homo sapiens
DTSNTQYRLIACDPSFKSFTCYQSIQVIPVSTDSMYDNAMCKEIIPTSEFINSKLTAKANRQLQDPLVIMTGNIPTWLTELGKTCPFFFPFDTRQMLFYVTAFDRDRAMQRLLDTNPEINQSDSQDSRVAPRLDRKKRTVNREELLKQAESVMQDLGSSRAMLEIQYENEVGTGLGPTLEFYALVSQELQRADLGLWRGEEVTLSNPKGSQEGTKYIQNLQGLFALPFGRTAKPAHIAKVKMKFRFLGKLMAKAIMDFRLVDLPLGLPFYKWMLRQETSLTSHDLFDIDPVVARSVYHLEDIVRQKKRLEQDKSQTKESLQYALETLTMNGCSVEDLGLDFTLPGFPNIELKKGGKDIPVTIHNLEEYLRLVIFWALNEGVSRQFDSFRDGFESVFPLSHLQYFYPEELDQLLCGSKADTWDAKTLMECCRPDHGYTHDSRAVKFLFEILSSFDNEQQRLFLQFVTGSPRLPVGGFRSLNPPLTIVRKTFESTENPDDFLPSVMTCVNYLKLPDYSSIEIMREKLLIAAREGQQSFHLS

SEQ ID NO: 879380 - protein, 1990 aa, Homo sapiens
MSNRPNNNPGGSLRRSQRNTAGAQPQDDSIGGRSCSSSSAVIVPQPEDPDRANTSERQKTGQVPKKDNSRGVKRSASPDYNRTNSPSSAKKPKALQHTESPSETNKPHSKSKKRHLDQEQQLKSAQSPSTSKAHTRKSGATGGSRSQKRKRTESSCVKSGSGSESTGAEERSAKPTKLASKSATSAKAGCSTITDSSSAASTSSSSSAVASASSTVPPGARVKQGKDQNKARRSRSASSPSPRRSSREKEQRSSKSETSKPGPSGLQAKLASLRKSTKKRSESPPAELPSLRRSTRQKTTGSCASTSRRGSGLGKRGAAEARRQEKMADPESNQEAVNSSAARTDEAPQGAAGAVGMTTSGESESDDSEMGRLQALLEARGLPPHLFGPLGPRMSQLFHRTIGSGASSKAQQLLQGLQASDESQQLQAVIEMCQLLVMGNEETLGGFPVKSVVPALITLLQMEHNFDIMNHACRALTYMMEALPRSSAVVVDAIPVFLEKLQVIQCIDVAEQALTALEMLSRRHSKAILQAGGLADCLLYLEFFSINAQRNALAIAANCCQSITPDEFHFVADSLPLLTQRLTHQDKKSVESTCLCFARLVDNFQHEENLLQQVASKDLLTNVQQLLVVTPPILSSGMFIMVVRMFSLMCSNCPTLAVQLMKQNIAETLHFLLCGASNGSCQEQIDLVPRSPQELYELTSLICELMPCLPKEGIFAVDTMLKKGNAQNTDGAIWQWRDDRGLWHPYNRIDSRIIEAAHQVGEDEISLSTLGRVYTIDFNSMQQINEDTGTARAIQRKPNPLANSNTSGYSESKKDDARAQLMKEDPELAKSFIKTLFGVLYEVYSSSAGPAVRHKCLRAILRIIYFADAELLKDVLKNHAVSSHIASMLSSQDLKIVVGALQMAEILMQKLPDIFSVYFRREGVMHQVKHLAESESLLTSPPKACTNGSGSMGSTTSVSSGTATAATHAAADLGSPSLQHSRDDSLDLSPQGRLSDVLKRKRLPKRGPRRPKYSPPRDDDKVDNQAKSPTTTQSPKSSFLASLNPKTWGRLSTQSNSNNIEPARTAGGSGLARAASKDTISNNREKIKGWIKEQAHKFVERYFSSENMDGSNPALNVLQRLCAATEQLNLQVDGGAECLVEIRSIVSESDVSSFEIQHSGFVKQLLLYLTSKSEKDAVSREIRLKRFLHVFFSSPLPGEEPIGRVEPVGNAPLLALVHKMNNCLSQMEQFPVKVHDFPSGNGTGGSFSLNRGSQALKFFNTHQLKCQLQRHPDCANVKQWKGGPVKIDPLALVQAIERYLVVRGYGRVREDDEDSDDDGSDEEIDESLAAQFLNSGNVRHRLQFYIGEHLLPYNMTVYQAVRQFSIQAEDERESTDDESNPLGRAGIWTKTHTIWYKPVREDEESNKDCVGGKRGRAQTAPTKTSPRNAKKHDELWHDGVCPSVSNPLEVYLIPTPPENITFEDPSLDVILLLRVLHAISRYWYYLYDNAMCKEIIPTSEFINSKLTAKANRQLQDPLVIMTGNIPTWLTELGKTCPFFFPFDTRQMLFYVTAFDRDRAMQRLLDTNPEINQSDSQDSRVAPRLDRKKRTVNREELLKQAESVMQDLGSSRAMLEIQYENEVGTGLGPTLEFYALVSQELQRADLGLWRGEEVTLSNPKGSQEGTKYIQNLQGLFALPFGRTAKPAHIAKVKMKFRFLGKLMAKAIMDFRLVDLPLGLPFYKWMLRQETSLTSHDLFDIDPVVARSVYHLEDIVRQKKRLEQDKSQTKESLQYALETLTMNGCSVEDLGLDFTLPGFPNIELKKGGKDIPVTIHNLEEYLRLVIFWALNEGVSRQFDSFRDGFESVFPLSHLQYFYPEELDQLLCGSKADTWDAKTLMECCRPDHGYTHDSRAVKFLFEILSSFDNEQQRLFLQFVTGSPRLPVGGFRSLNPPLTIVRKTFESTENPDDFLPSVMTCVNYLKLPDYSSIEIMREKLLIAAREGQQSFHLS

SEQ ID NO: 879381 - protein, 140 aa, Homo sapiens
SVCFTSTKELIQFLRVEVLKMLSGKTLMECCRPDHGYTHDSRAVKFLFEILSSFDNEQQRLFLQFVTGSPRLPVGGFRSLNPPLTIVRKTFESTENPDDFLPSVMTCVNYLKLPDYSSIEIMREKLLIAAREGQQSFHLS

SEQ ID NO: 879382 - protein, 113 aa, Homo sapiens; identical to SEQ ID NO: 879373

SEQ ID NO: 879383 - protein, 1691 aa, Homo sapiens
MSNRPNNNPGGSLRRSQRNTAGAQPQDDSIGGRSCSSSSAVIVPQPEDPDRANTSERQKTGQVPKKDNSRGVKRSASPDYNRTNSPSSAKKPKALQHTESPSETNKPHSKSKKRHLDQEQQLKSAQSPSTSKAHTRKSGATGGSRSQKRKRTESSCVKSGSGSESTGAEERSAKPTKLASKSATSAKAGCSTITDSSSAASTSSSSSAVASASSTVPPGARVKQGKDQNKARRSRSASSPSPRRSSREKEQRSSKSETSKPGPSGLQAKLASLRKSTKKRSESPPAELPSLRRSTRQKTTGSCASTSRRGSGLGKRGAAEARRQEKMADPESNQEAVNSSAARTDEAPQGAAGAVGMTTSGESESDDSEMGRLQALLEARGLPPHLFGPLGPRMSQLFHRTIGSGASSKAQQLLQGLQASDESQQLQAVIEMCQLLVMGNEETLGGFPVKSVVPALITLLQMEHNFDIMNHACRALTYMMEALPRSSAVVVDAIPVFLEKLQVIQCIDVAEQALTALEMLSRRHSKAILQAGGLADCLLYLEFFSINAQRNALAIAANCCQSITPDEFHFVADSLPLLTQRLTHQDKKSVESTCLCFARLVDNFQHEENLLQQVASKDLLTNVQQLLVVTPPILSSGMFIMVVRMFSLMCSNCPTLAVQLMKQNIAETLHFLLCGASNGSCQEQIDLVPRSPQELYELTSLICELMPCLPKEGIFAVDTMLKKGNAQNTDGAIWQWRDDRGLWHPYNRIDSRIIEAAHQVGEDEISLSTLGRVYTIDFNSMQQINEDTGTARAIQRKPNPLANSNTSGYSESKKDDARAQLMKEDPELAKSFIKTLFGVLYEVYSSSAGPAVRHKCLRAILRIIYFADAELLKDVLKNHAVSSHIASMLSSQDLKIVVGALQMAEILMQKLPDIFSVYFRREGVMHQVKHLAESESLLTSPPKACTNGSGSMGSTTSVSSGTATAATHAAADLGSPSLQHSRDDSLDLSPQGRLSDVLKRKRLPKRGPRRPKYSPPRDDDKVDNQAKSPTTTQSPKSSFLASLNPKTWGRLSTQSNSNNIEPARTAGGSGLARAASKDTISNNREKIKGWIKEQAHKFVERYFSSENMDGSNPALNVLQRLCAATEQLNLQVDGGAECLVEIRSIVSESDVSSFEIQHSGFVKQLLLYLTSKSEKDAVSREIRLKRFLHVFFSSPLPGEEPIGRVEPVGNAPLLALVHKMNNCLSQMEQFPVKVHDFPSGNGTGGSFSLNRGSQALKFFNTHQLKCQLQRHPDCANVKQWKGGPVKIDPLALVQAIERYLVVRGYGRVREDDEDSDDDGSDEEIDESLAAQFLNSGNVRHRLQFYIGEHLLPYNMTVYQAVRQFSIQAEDERESTDDESNPLGRAGIWTKTHTIWYKPVREDEESNKDCVGGKRGRAQTAPTKTSPRNAKKHDELWHDGVCPSVSNPLEVYLIPTPPENITFEDPSLDVILLLRVLHAISRYWYYLYDNAMCKEIIPTSEFINSKLTAKANRQLQDPLVIMTGNIPTWLTELGKTCPFFFPFDTRQMLFYVTAFDRDRAMQRLLDTNPEINQSDSQDSRVAPRLDRKKRTVNREELLKQAESVMQDLGSSRAMLEIQYENEVGTGLGPTLEFYALVSQELQRADLGLWRGEEVTLSNPKGSQEGTKYIQNLQGLFALPFGRSFAWDTLGTS

SEQ ID NO: 879384 - protein, 1397 aa, Homo sapiens
MSNRPNNNPGGSLRRSQRNTAGAQPQDDSIGGRSCSSSSAVIVPQPEDPDRANTSERQKTGQVPKKDNSRGVKRSASPDYNRTNSPSSAKKPKALQHTESPSETNKPHSKSKKRHLDQEQQLKSAQSPSTSKAHTRKSGATGGSRSQKRKRTESSCVKSGSGSESTGAEERSAKPTKLASKSATSAKAGCSTITDSSSAASTSSSSSAVASASSTVPPGARVKQGKDQNKARRSRSASSPSPRRSSREKEQRSSKSETSKPGPSGLQAKLASLRKSTKKRSESPPAELPSLRRSTRQKTTGSCASTSRRGSGLGKRGAAEARRQEKMADPESNQEAVNSSAARTDEAPQGAAGAVGMTTSGESESDDSEMGRLQALLEARGLPPHLFGPLGPRMSQLFHRTIGSGASSKAQQLLQGLQASDESQQLQAVIEMCQLLVMGNEETLGGFPVKSVVPALITLLQMEHNFDIMNHACRALTYMMEALPRSSAVVVDAIPVFLEKLQVIQCIDVAEQALTALEMLSRRHSKAILQAGGLADCLLYLEFFSINAQRNALAIAANCCQSITPDEFHFVADSLPLLTQRLTHQDKKSVESTCLCFARLVDNFQHEENLLQQVASKDLLTNVQQLLVVTPPILSSGMFIMVVRMFSLMCSNCPTLAVQLMKQNIAETLHFLLCGASNGSCQEQIDLVPRSPQELYELTSLICELMPCLPKEGIFAVDTMLKKGNAQNTDGAIWQWRDDRGLWHPYNRIDSRIIEAAHQVGEDEISLSTLGRVYTIDFNSMQQINEDTGTARAIQRKPNPLANSNTSGYSESKKDDARAQLMKEDPELAKSFIKTLFGVLYEVYSSSAGPAVRHKCLRAILRIIYFADAELLKDVLKNHAVSSHIASMLSSQDLKIVVGALQMAEILMQKLPDIFSVYFRREGVMHQVKHLAESESLLTSPPKACTNGSGSMGSTTSVSSGTATAATHAAADLGSPSLQHSRDDSLDLSPQGRLSDVLKRKRLPKRGPRRPKYSPPRDDDKVDNQAKSPTTTQSPKSSFLASLNPKTWGRLSTQSNSNNIEPARTAGGSGLARAASKDTISNNREKIKGWIKEQAHKFVERYFSSENMDGSNPALNVLQRLCAATEQLNLQVDGGAECLVEIRSIVSESDVSSFEIQHSGFVKQLLLYLTSKSEKDAVSREIRLKRFLHVFFSSPLPGEEPIGRVEPVGNAPLLALVHKMNNCLSQMEQFPVKVHDFPSGNGTGGSFSLNRGSQALKFFNTHQLKCQLQRHPDCANVKQWKGGPVKIDPLALVQAIERYLVVRGYGRVREDDEDSDDDGSDEEIDESLAAQFLNSGNVRHRLQFYIGEHLLPYNMTVYQAVRQFSIQAEDERESTDDESNPLGRAGIWTKTHTIWQV

SEQ ID NO: 879385 - protein, 767 aa, Homo sapiens
MSNRPNNNPGGSLRRSQRNTAGAQPQDDSIGGRSCSSSSAVIVPQPEDPDRANTSERQKTGQVPKKDNSRGVKRSASPDYNRTNSPSSAKKPKALQHTESPSETNKPHSKSKKRHLDQEQQLKSAQSPSTSKAHTRKSGATGGSRSQKRKRTESSCVKSGSGSESTGAEERSAKPTKLASKSATSAKAGCSTITDSSSAASTSSSSSAVASASSTVPPGARVKQGKDQNKARRSRSASSPSPRRSSREKEQRSSKSETSKPGPSGLQAKLASLRKSTKKRSESPPAELPSLRRSTRQKTTGSCASTSRRGSGLGKRGAAEARRQEKMADPESNQEAVNSSAARTDEAPQGAAGAVGMTTSGESESDDSEMGRLQALLEARGLPPHLFGPLGPRMSQLFHRTIGSGASSKAQQLLQGLQASDESQQLQAVIEMCQLLVMGNEETLGGFPVKSVVPALITLLQMEHNFDIMNHACRALTYMMEALPRSSAVVVDAIPVFLEKLQVIQCIDVAEQALTALEMLSRRHSKAILQAGGLADCLLYLEFFSINAQRNALAIAANCCQSITPDEFHFVADSLPLLTQRLTHQDKKSVESTCLCFARLVDNFQHEENLLQQVASKDLLTNVQQLLVVTPPILSSGMFIMVVRMFSLMCSNCPTLAVQLMKQNIAETLHFLLCGASNGSCQEQIDLVPRSPQELYELTSLICELMPCLPKEGIFAVDTMLKKGNAQNTDGAIWQWRDDRGLWHPYNRIDSRIIEVVVSSYRLNVSI

SEQ ID NO: 879386 - protein, 160 aa, Homo sapiens
MSNRPNNNPGGSLRRSQRNTAGAQPQDDSIGGRSHLGQAKHKGYSPPESRKSNSKAPKVQSNTTSELSRGHLSKRSCSSSSAVIVPQPEDPDRANTSERQKTGQVPKKDNSRGVKRSASPDYNRTNSPSSAKKPKALQHTESPKKKAEKKERERIKRDRP

SEQ ID NO: 879387 - protein, 1990 aa, Homo sapiens; identical to SEQ ID NO: 879380

SEQ ID NO: 879388 - protein, 1990 aa, Homo sapiens; identical to SEQ ID NO: 879380

SEQ ID NO: 879389 - protein, 1087 aa, Homo sapiens
MWGITGRVPDIFSIYFRREGVMHQVKHLAESESLLTSPPKACTNGSGSMGSTTSVSSGTATAATHAAADLGSPSLQHSRDDSLDLSPQGRLSDVLKRKRLPKRGPRRPKYSPPRDDDKVDNQAKSPTTTQSPKSSFLASLNPKTWGRLSTQSNSNNIEPARTAGGSGLARAASKDTISNNREKIKGWIKEQAHKFVERYFSSENMDGSNPALNVLQRLCAATEQLNLQVDGGAECLVEIRSIVSESDVSSFEIQHSGFVKQLLLYLTSKSEKDAVSREIRLKRFLHVFFSSPLPGEEPIGRVEPVGNAPLLALVHKMNNCLSQMEQFPVKVHDFPSGNGTGGSFSLNRGSQALKFFNTHQLKCQLQRHPDCANVKQWKGGPVKIDPLALVQAIERYLVVRGYGRVREDDEDSDDDGSDEEIDESLAAQFLNSGNVRHRLQFYIGEHLLPYNMTVYQAVRQFSIQAEDERESTDDESNPLGRAGIWTKTHTIWYKPVREDEESNKDCVGGKRGRAQTAPTKTSPRNAKKHDELWHDGVCPSVSNPLEVYLIPTPPENITFEDPSLDVILLLRVLHAISRYWYYLYDNAMCKEIIPTSEFINSKLTAKANRQLQDPLVIMTGNIPTWLTELGKTCPFFFPFDTRQMLFYVTAFDRDRAMQRLLDTNPEINQSDSQDSRVAPRLDRKKRTVNREELLKQAESVMQDLGSSRAMLEIQYENEVGTGLGPTLEFYALVSQELQRADLGLWRGEEVTLSNPKGSQEGTKYIQNLQGLFALPFGRTAKPAHIAKVKMKFRFLGKLMAKAIMDFRLVDLPLGLPFYKWMLRQETSLTSHDLFDIDPVVARSVYHLEDIVRQKKRLEQDKSQTKESLQYALETLTMNGCSVEDLGLDFTLPGFPNIELKKGGKDIPVTIHNLEEYLRLVIFWALNEGVSRQFDSFRDGFESVFPLSHLQYFYPEELDQLLCGSKADTWDAKTLMECCRPDHGYTHDSRAVKFLFEILSSFDNEQQRLFLQFVTGSPRLPVGGFRSLNPPLTIVRKTFESTENPDDFLPSVMTCVNYLKLPDYSSIEIMREKLLIAAREGQQSFHLS

SEQ ID NO: 879390 - protein, 1935 aa, Homo sapiens
MSNRPNNNPGGSLRRSQRNTAGAQPQDDSIGGRSCSSSSAVIVPQPEDPDRANTSERQKTGQVPKKDNSRGVKRSASPDYNRTNSPSSAKKPKALQHTESPSETNKPHSKSKKRHLDQEQQLKSAQSPSTSKAHTRKSGATGGSRSQKRKRTESSCVKSGSGSESTGAEERSAKPTKLASKSATSAKAGCSTITDSSSAASTSSSSSAVASASSTVPPGARVKQGKDQNKARRSRSASSPSPRRSSREKEQRSSKSETSKPGPSGLQAKLASLRKSTKKRSESPPAELPSLRRSTRQKTTGSCASTSRRGSGLGKRGAAEARRQEKMADPESNQEAVNSSAARTDEAPQGAAGAVGMTTSGESESDDSEMGRLQALLEARGLPPHLFGPLGPRMSQLFHRTIGSGASSKAQQLLQGLQASDESQQLQAVIEMCQLLVMGNEETLGGFPVKSVVPALITLLQMEHNFDIMNHACRALTYMMEALPRSSAVVVDAIPVFLEKLQVIQCIDVAEQALTALEMLSRRHSKAILQAGGLADCLLYLEFFSINAQRNALAIAANCCQSITPDEFHFVADSLPLLTQRLTHQDKKSVESTCLCFARLVDNFQHEENLLQQVASKDLLTNVQQLLVVTPPILSSGMFIMVVRMFSLMCSNCPTLAVQLMKQNIAETLHFLLCGASNGSCQEQIDLVPRSPQELYELTSLICELMPCLPKEGIFAVDTMLKKGNAQNTDGAIWQWRDDRGLWHPYNRIDSRIIEAAHQVGEDEISLSTLGRVYTIDFNSMQQINEDTGTARAIQRKPNPLANSNTSGYSESKKDDARAQLMKEDPELAKSFIKTLFGVLYEVYSSSAGPAVRHKCLRAILRIIYFADAELLKDVLKNHAVSSHIASMLSSQDLKIVVGALQMAEILMQKLPDIFSVYFRREGVMHQVKHLAESESLLTSPPKACTNGSGSMGSTTSVSSGTATAATHAAADLGSPSLQHSRDDSLDLSPQGRLSDVLKRKRLPKRGPRRPKYSPPRDDDKVDNQAKSPTTTQSPKSSFLASLNPKTWGRLSTQSNSNNIEPARTAGGSGLARAASKDTISNNREKIKGWIKEQAHKFVERYFSSENMDGSNPALNVLQRLCAATEQLNLQVDGGAECLVEIRSIVSESDVSSFEIQHSGFVKQLLLYLTSKSEKDAVSREIRLKRFLHVFFSSPLPGEEPIGRVEPVGNAPLLALVHKMNNCLSQMEQFPVKVHDFPSGNGTGGSFSLNRGSQALKFFNTHQLKCQLQRHPDCANVKQWKGGPVKIDPLALVQAIERYLVVRGYGRVREDDEDSDDDGSDEEIDESLAAQFLNSGNVRHRLQFYIGEHLLPYNMTVYQAVRQFSIQAEDERESTDDESNPLGRAGIWTKTHTIWYKPVREDEESNKDCVGGKRGRAQTAPTKTSPRNAKKHDELWHDGVCPSVSNPLEVYLIPTPPENITFEDPSLDVILLLRVLHAISRYWYYLYDNAMCKEIIPTSEFINSKLTAKANRQLQDPLVIMTGNIPTWLTELGKTCPFFFPFDTRQMLFYVTAFDRDRAMQRLLDTNPEINQSDSQDSRVAPRLDRKKRTVNREELLKQAESVMQDLGSSRAMLEIQYENEVGTGLGPTLEFYALVSQELQRADLGLWRGEEVTLSNPKGSQEGTKYIQNLQGLFALPFGRTAKPAHIAKVKMKFRFLGKLMAKAIMDFRLVDLPLGLPFYKWMLRQETSLTSHDLFDIDPVVARSVYHLEDIVRQKKRLEQDKSQLVIFWALNEGVSRQFDSFRDGFESVFPLSHLQYFYPEELDQLLCGSKADTWDAKTLMECCRPDHGYTHDSRAVKFLFEILSSFDNEQQRLFLQFVTGSPRLPVGGFRSLNPPLTIVRKTFESTENPDDFLPSVMTCVNYLKLPDYSSIEIMREKLLIAAREGQQSFHLS

SEQ ID NO: 879391 - protein, 299 aa, Homo sapiens
SEDPFDGGHLMAKAIMDVRYVDLPLGLPFYKWMLRQETSLTSHDLFDIDPVVARSVYHLEDIVRQKKRLEQDKSQTKESLQYALETLTMNGCSVEDLGLDFTLPGFPNIELKKGGKDIPVTIHNLEEYLRLVIFWALNEGVSRQFDSFRDGFESVFPLSHLQYFYPEELDQLLCGSKADTWDAKTLMECCRPDHGYTHDSRAVKFLFEILSSFDNEQQRLFLQFVTGSPRLPVGGFRSLNPPLTIVRKTFESTENPDDFLPSVMTCVNYLKLPDYSSIEIMREKLLIAAREGQQSFHLS

SEQ ID NO: 879392 - protein, 392 aa, Homo sapiens
DYLIPTQKSLHARSRAMQRLLDTNPEINQSDSQDSRVAPRLDRKKRTVNREELLKQAESVMQDLGSSRAMLEIQYENEVGTGLGPTLEFYALVSQELQRADLGLWRGEEVTLSNPKGSQEGTKYIQNLQGLFALPFGRTAKPAHIAKVKMKFRFLGKLMAKAIMDFRLVDLPLGLPFYKWMLRQETSLTSHDLFDIDPVVARSVYHLEDIVRQKKRLEQDKSQLVIFWALNEGVSRQFDSFRDGFESVFPLSHLQYFYPEELDQLLCGSKADTWDAKTLMECCRPDHGYTHDSRAVKFLFEILSSFDNEQQRLFLQFVTGSPRLPVGGFRSLNPPLTIVRKTFESTENPDDFLPSVMTCVNYLKLPDYSSIEIMREKLLIAAREGQQSFHLS

SEQ ID NO: 879393 - protein, 1829 aa, Homo sapiens
MSNRPNNNPGGSLRRSQRNTAGAQPQDDSIGGRSCSSSSAVIVPQPEDPDRANTSERQKTGQVPKKDNSRGVKRSASPDYNRTNSPSSAKKPKALQHTESPSETNKPHSKSKKRHLDQEQQLKSAQSPSTSKAHTRKSGATGGSRSQKRKRTESSCVKSGSGSESTGAEERSAKPTKLASKSATSAKAGCSTITDSSSAASTSSSSSAVASASSTVPPGARVKQGKDQNKARRSRSASSPSPRRSSREKEQRSSKSETSKPGPSGLQAKLASLRKSTKKRSESPPAELPSLRRSTRQKTTGSCASTSRRGSGLGKRGAAEARRQEKMADPESNQEAVNSSAARTDEAPQGAAGAVGMTTSGESESDDSEMGRLQALLEARGLPPHLFGPLGPRMSQLFHRTIGSGASSKAQQLLQGLQASDESQQLQAVIEMCQLLVMGNEETLGGFPVKSVVPALITLLQMEHNFDIMNHACRALTYMMEALPRSSAVVVDAIPVFLEKLQVIQCIDVAEQALTALEMLSRRHSKAILQAGGLADCLLYLEFFSINAQRNALAIAANCCQSITPDEFHFVADSLPLLTQRLTHQDKKSVESTCLCFARLVDNFQHEENLLQQVASKDLLTNVQQLLVVTPPILSSGMFIMVVRMFSLMCSNCPTLAVQLMKQNIAETLHFLLCGASNGSCQEQIDLVPRSPQELYELTSLICELMPCLPKEGIFAVDTMLKKGNAQNTDGAIWQWRDDRGLWHPYNRIDSRIIEAAHQVGEDEISLSTLGRVYTIDFNSMQQINEDTGTARAIQRKPNPLANSNTSGYSESKKDDARAQLMKEDPELAKSFIKTLFGVLYEVYSSSAGPAVRHKCLRAILRIIYFADAELLKDVLKNHAVSSHIASMLSSQDLKIVVGALQMAEILMQKLPDIFSVYFRREGVMHQVKHLAESESLLTSPPKACTNGSGSMGSTTSVSSGTATAATHAAADLGSPSLQHSRDDSLDLSPQGRLSDVLKRKRLPKRGPRRPKYSPPRDDDKVDNQAKSPTTTQSPKSSFLASLNPKTWGRLSTQSNSNNIEPARTAGGSGLARAASKDTISNNREKIKGWIKEQAHKFVERYFSSENMDGSNPALNVLQRLCAATEQLNLQVDGGAECLVEIRSIVSESDVSSFEIQHSGFVKQLLLYLTSKSEKDAVSREIRLKRFLHVFFSSPLPGEEPIGRVEPVGNAPLLALVHKMNNCLSQMEQFPVKVHDFPSGNGTGGSFSLNRGSQALKFFNTHQLKCQLQRHPDCANVKQWKGGPVKIDPLALVQAIERYLVVRGYGRVREDDEDSDDDGSDEEIDESLAAQFLNSGNVRHRLQFYIGEHLLPYNMTVYQAVRQFSIQAEDERESTDDESNPLGRAGIWTKTHTIWYKPVREDEESNKDCVGGKRGRAQTAPTKTSPRNAKKHDELWHDGVCPSVSNPLEVYLIPTPPENITFEDPSLDVILLLRVLHAISRYWYYLYDNAMCKEIIPTSEFINSKLTAKANRQLQDPLVIMTGNIPTWLTELGKTCPFFFPFDTRQMLFYVTAFDRDRAMQRLLDTNPEINQSDSQDSRVAPRLDRKKRTVNREELLKQAESVMQDLGSSRAMLEIQYENEVGTGLGPTLEFYALVSQELQRADLGLWRGEEVTLSNPKGSQEGTKYIQNLQGLFALPFGRTAKPAHIAKVKMKFRFLGKLMAKAIMDFRLVDLPLGLPFYKWMLRQETSLTSHDLFDIDPVVARSVYHLEDIVRQKKRLEQDKSQTKESLQYALETLTMNGCSVEDLGLDFTLPGFPNIELKKGGKDIPVTIHNLEEYLRVCNCVFGG

SEQ ID NO: 879394 - protein, 1596 aa, Homo sapiens
  misc_feature (1592)..(1592): Xaa can be any naturally occurring amino acid
MSNRPNNNPGGSLRRSQRNTAGAQPQDDSIGGRSCSSSSAVIVPQPEDPDRANTSERQKTGQVPKKDNSRGVKRSASPDYNRTNSPSSAKKPKALQHTESPSETNKPHSKSKKRHLDQEQQLKSAQSPSTSKAHTRKSGATGGSRSQKRKRTESSCVKSGSGSESTGAEERSAKPTKLASKSATSAKAGCSTITDSSSAASTSSSSSAVASASSTVPPGARVKQGKDQNKARRSRSASSPSPRRSSREKEQRSSKSETSKPGPSGLQAKLASLRKSTKKRSESPPAELPSLRRSTRQKTTGSCASTSRRGSGLGKRGAAEARRQEKMADPESNQEAVNSSAARTDEAPQGAAGAVGMTTSGESESDDSEMGRLQALLEARGLPPHLFGPLGPRMSQLFHRTIGSGASSKAQQLLQGLQASDESQQLQAVIEMCQLLVMGNEETLGGFPVKSVVPALITLLQMEHNFDIMNHACRALTYMMEALPRSSAVVVDAIPVFLEKLQVIQCIDVAEQALTALEMLSRRHSKAILQAGGLADCLLYLEFFSINAQRNALAIAANCCQSITPDEFHFVADSLPLLTQRLTHQDKKSVESTCLCFARLVDNFQHEENLLQQVASKDLLTNVQQLLVVTPPILSSGMFIMVVRMFSLMCSNCPTLAVQLMKQNIAETLHFLLCGASNGSCQEQIDLVPRSPQELYELTSLICELMPCLPKEGIFAVDTMLKKGNAQNTDGAIWQWRDDRGLWHPYNRIDSRIIEAAHQVGEDEISLSTLGRVYTIDFNSMQQINEDTGTARAIQRKPNPLANSNTSGYSESKKDDARAQLMKEDPELAKSFIKTLFGVLYEVYSSSAGPAVRHKCLRAILRIIYFADAELLKDVLKNHAVSSHIASMLSSQDLKIVVGALQMAEILMQKLPDIFSVYFRREGVMHQVKHLAESESLLTSPPKACTNGSGSMGSTTSVSSGTATAATHAAADLGSPSLQHSRDDSLDLSPQGRLSDVLKRKRLPKRGPRRPKYSPPRDDDKVDNQAKSPTTTQSPKSSFLASLNPKTWGRLSTQSNSNNIEPARTAGGSGLARAASKDTISNNREKIKGWIKEQAHKFVERYFSSENMDGSNPALNVLQRLCAATEQLNLQVDGGAECLVEIRSIVSESDVSSFEIQHSGFVKQLLLYLTSKSEKDAVSREIRLKRFLHVFFSSPLPGEEPIGRVEPVGNAPLLALVHKMNNCLSQMEQFPVKVHDFPSGNGTGGSFSLNRGSQALKFFNTHQLKCQLQRHPDCANVKQWKGGPVKIDPLALVQAIERYLVVRGYGRVREDDEDSDDDGSDEEIDESLAAQFLNSGNVRHRLQFYIGEHLLPYNMTVYQAVRQFSIQAEDERESTDDESNPLGRAGIWTKTHTIWYKPVREDEESNKDCVGGKRGRAQTAPTKTSPRNAKKHDELWHDGVCPSVSNPLEVYLIPTPPENITFEDPSLDVILLLRVLHAISRYWYYLYDNAMCKEIIPTSEFINSKLTAKANRQLQDPLVIMTGNIPTWLTELGKTCPFFFPFDTRQMLFYVTAFDRDRAMQRLLDTNPEINQSDSQDSRVAPRLDRKKLLTXDCDS

SEQ ID NO: 879395 - protein, 553 aa, Homo sapiens
MSNRPNNNPGGSLRRSQRNTAGAQPQDDSIGGRSCSSSSAVIVPQPEDPDRANTSERQKTGQVPKKDNSRGVKRSASPDYNRTNSPSSAKKPKALQHTESPSETNKPHSKSKKRHLDQEQQLKSAQSPSTSKAHTRKSGATGGSRSQKRKRTESSCVKSGSGSESTGAEERSAKPTKLASKSATSAKAGCSTITDSSSAASTSSSSSAVASASSTVPPGARVKQGKDQNKARRSRSASSPSPRRSSREKEQRSSKSETSKPGPSGLQAKLASLRKSTKKRSESPPAELPSLRRSTRQKTTGSCASTSRRGSGLGKRGAAEARRQEKMADPESNQEAVNSSAARTDEAPQGAAGAVGMTTSGESESDDSEMGRLQALLEARGLPPHLFGPLGPRMSQLFHRTIGSGASSKAQQLLQGLQASDESQQLQAVIEMCQLLVMGNEETLGGFPVKSVVPALITLLQMEHNFDIMNHACRALTYMMEALPRSSAVVVDAIPVFLEKVILLLPRLFKSRHRESSFKLLNFSFHFLNKVYFLAREMFYVQQINSLKVKINH

SEQ ID NO: 879396 - protein, 153 aa, Homo sapiens
MCVSTSPSDSVLTRSRNQVSPSDLKLCPCFGYKTLTCTDTHTRTHCLSGWECPRTGPVSFSLPAHLCLPTASAWHTEMVVPQVGKVGVAVRDHEPGALQDSKPRSLYPDEGLFPPCSCRPRPLLPLSKNLNVRTREGRGGLLTASPSEPRLPN

SEQ ID NO: 879397 - protein, 51 aa, Homo sapiens
MLDSYINAFTREPKINNSMNRRPGVFNHSIQTTEMIRVHRYLGEVRGLTAD

SEQ ID NO: 879398 - protein, 595 aa, Homo sapiens
MSFRDLRNFTEMMRALGYPRHISMENFRTPNFGLVSEVLLWLVKRYEPQTDIPPDVDTEQDRVFFIKAIAQFMATKAHIKLNTKKLYQADGYAVKELLKITSVLYNAMKTKGMEGSEIVEEDVNKFKFDLGSKIADLKAARQLASEITSKGASLYDLLGMEVELREMRTEAIARPLEINETEKVMRIAIKEILTQVQKTKDLLNNVASDEANLEAKIEKRKLELERNRKRLETLQSVRPCFMDEYEKTEEELQKQYDTYLEKFQNLTYLEQQLEDHHRMEQERFEEAKNTLCLIQNKLKEEEKRLLKSGSNDDSDIDIQEDDESDSELEERRLPKPQTAMEMLMQGRPGKRIVGTMQGGDSDDNVSPPLPSVVLCTLGLAVPKMGVAELLSAAREPSMVSPAVPRCVAGFGLMRLWTLRCSWMAHLFSSECACSAFFAFSLFFPFSLSKDGSSTSLLGKCKTSSSKKQVGFLFCLMCLWVSVSPPGASQGPLPRSDASSLLGKKATQKRSCGDSGITEGPCAKVEAQARSLEAGKAQAGPSSGPGPPPRNEGGRRGPGSGPTPLPVLCWGRNGEAALSPDQALEVPGMRLRHKLP

SEQ ID NO: 879399 - protein, 419 aa, Homo sapiens
RHPELHLHPFCRADFTEMMRALGYPRHISMENFRTPNFGLVSEVLLWLVKRYEPQTDIPPDVDTEQDRVFFIKAIAQFMATKAHIKLNTKKLYQADGYAVKELLKITSVLYNAMKTKGMEGSEIVEEDVNKFKFDLGSKIADLKAARQLASEITSKGASLYDLLGMEVELREMRTEAIARPLEINETEKVMRIAIKEILTQVQKTKDLLNNVASDEANLEAKIEKRKLELERNRKRLETLQSVRPCFMDEYEKTEEELQKQYDTYLEKFQNLTYLEQQLEDHHRMEQERFEEAKNTLCLIQNKLKEEEKRLLKSGSNDDSDIDIQEDDESDSELEERRLPKPQTAMEMLMQGRPGKRIVGTMQGGDSDDNEDSEESEIDMEDDDDEDDDLEDESISLSPTKPNRRVRKSEPLDESDNDF

SEQ ID NO: 879400 - protein, 398 aa, Homo sapiens
RAGPVIAEGRAVATLGSWGPERYVFPRPPQYEPQTDIPPDVDTEQDRVFFIKAIAQFMATKAHIKLNTKKLYQADGYAVKELLKITSVLYNAMKTKGMEGSEIVEEDVNKFKFDLGSKIADLKAARQLASEITSKGASLYDLLGMEVELREMRTEAIARPLEINETEKVMRIAIKEILTQVQKTKDLLNNVASDEANLEAKIEKRKLELERNRKRLETLQSVRPCFMDEYEKTEEELQKQYDTYLEKFQNLTYLEQQLEDHHRMEQERFEEAKNTLCLIQNKLKEEEKRLLKSGSNDDSDIDIQEDDESDSELEERRLPKPQTAMEMLMQGRPGKRIVGTMQGGDSDDNEDSEESEIDMEDDDDEDDDLEDESISLSPTKPNRRVRKSEPLDESDNDF

SEQ ID NO: 879401 - protein, 413 aa, Homo sapiens
MSFRDLRNFTEMMRALGYPRHISMENFRTPNFGLVSEVLLWLVKRYEPQTDIPPDVDTEQDRVFFIKAIAQFMATKAHIKLNTKKLYQADGYAVKELLKITSVLYNAMKTKGMEGSEIVEEDVNKFKFDLGSKIADLKAARQLASEITSKGASLYDLLGMEVELREMRTEAIARPLEINETEKVMRIAIKEILTQVQKTKDLLNNVASDEANLEAKIEKRKLELERNRKRLETLQSVRPCFMDEYEKTEEELQKQYDTYLEKFQNLTYLEQQLEDHHRMEQERFEEAKNTLCLIQNKLKEEEKRLLKSGSNDDSDIDIQEDDESDSELEERRLPKPQTAMEMLMQGRPGKRIVGTMQGGDSDDNEDSEESEIDMEDDDDEDDDLEDESISLSPTKPNRRVRKSEPLDESDNDF

SEQ ID NO: 879402 - protein, 247 aa, Homo sapiens
MRTEAIARPLEINETEKVMRIAIKEILTQVQKTKDLLNNVASDEANLEAKIEKRKLELERNRKRLETLQSVRPCFMDEYEKTEEELQKQYDTYLEKFQNLTYLEQQLEDHHRMEQERFEEAKNTLCLIQNKLKEEEKRLLKSGSNDDSDIDIQEDDESDSELEERRLPKPQTAMEMLMQGRPGKRIVGTMQGGDSDDNEDSEESEIDMEDDDDEDDDLEDESISLSPTKPNRRVRKSEPLDESDNDF

SEQ ID NO: 879403 - protein, 94 aa, Homo sapiens
LACSGLEVELREMRTEAIARPLEINETEKVMRIAIKEILTQVQKTKDLLNNVASDEANLEAKIEKRKLELERNRKRLETLQSVRPCFMDEYEKT

SEQ ID NO: 879404 - protein, 338 aa, Homo sapiens
RAGPVIAEGRAVATLGSWGPERYVFPRPPQYEPQTDIPPDVDTEQDRVFFIKAIAQFMIADLKAARQLASEITSKGASLYDLLGMEVELREMRTEAIARPLEINETEKVMRIAIKEILTQVQKTKDLLNNVASDEANLEAKIEKRKLELERNRKRLETLQSVRPCFMDEYEKTEEELQKQYDTYLEKFQNLTYLEQQLEDHHRMEQERFEEAKNTLCLIQNKLKEEEKRLLKSGSNDDSDIDIQEDDESDSELEERRLPKPQTAMEMLMQGRPGKRIVGTMQGGDSDDNEDSEESEIDMEDDDDEDDDLEDESISLSPTKPNRRVRKSEPLDESDNDF

SEQ ID NO: 879405 - protein, 432 aa, Homo sapiens
MSFRDLRNFTEMMRALGYPRHISMENFRTPNFGLVSEVLLWLVKRYEPQTDIPPDVDTEQDRVFFIKAIAQFMATKAHIKLNTKKLYQADGYAVKELLKITSVLYNAMKTKGMEGSEIVEEDVNKFKFDLGSKIADLKAARQLASEITSKGASLYDLLGMEVELREMRTEAIARPLEINETEKVMRIAIKEILTQVQKTKDLLNNVASDEANLEAKIEKRKLELERNRKRLETLQSVRPCFMDEYEKTEEELQKQYDTYLEKFQNLTYLEQQLEDHHRMEQERFEEAKNTLCLIQNKLKEEEKRLLKSGSNDDSDIDIQEDDESDSELEERRLPKPQTAMEMLMQGRPGKRIVGTMQGGDSDDNMEAAPALLGKCKTSSSKKQEDSEESEIDMEDDDDEDDDLEDESISLSPTKPNRRVRKSEPLDESDNDF

SEQ ID NO: 879406 - protein, 291 aa, Homo sapiens
MSFRDLRNFTEMMRALGYPRHISMENFRTPNFGLVSEVLLWLVKRYEPQTDIPPDVDTEQDRVFFIKAIAQFMATKAHIKLNTKKLYQADGYAVKELLKITSVLYNAMKTKGMEGSEIVEEDVNKFKFDLGSKIADLKAARQLASEITSKGASLYDLLGMEVELREMRTEAIARPLEINETEKVMRIAIKEILTQVQKTKDLLNNVASDEANLEAKIEKRKLELERNRKRLETLQSVRPCFMDEYEKTEEELQKQYDTYLEKFQNLTYLEQQLEDHHRMEQERFEVTMTRT

SEQ ID NO: 879407 - protein, 452 aa, Homo sapiens
MWQLTSLLLFVATWGISGTPAPLDSVFSSSERAHQVLRIRKRANSFLEELRHSSLERECIEEICDFEEAKEIFQNVDDTGDQCLVLPLEHPCASLCCGHGTCIDGIGSFSCDCRSGWEGRFCQREVSFLNCSLDNGGCTHYCLEEVGWRRCSCAPGYKLGDDLLQCHPAVKFPCGRPWKRMEKKRSHLKRDTEDQEDQVDPRLIDGKMTRRGDSPWQVVLLDSKKKLACGAVLIHPSWVLTAAHCMDESKKLLVRLGEYDLRRWEKWELDLDIKEVFVHPNYSKSTTDNDIALLHLAQPATLSQTIVPICLPDSGLAERELNQAGQETLVTGWGYHSSREKEAKRNRTFVLNFIKIPVVPHNECSEVMSNMVSENMLCAGILGDRQDACEGDSGGPMVASFHGTWFLVGLVSWGEGCGLLHNYGVYTKVSRYLDWIHGHIRDKEAPQKSWAP

SEQ ID NO: 879408 - protein, 227 aa, Homo sapiens
CRGGGGGGLSWRQDGELAVSPRPAPTGASASRMWQLTSLLLFVATWGISGTPAPLDSVFSSSERAHQVLRIRKRANSFLEELRHSSLERECIEEICDFEEAKEIFQNVDDTTVTSAWSCPWSTRAPACAAGTARASTASAASAATAAAAGRAASASAVRGRGGCWRAAGRGWGRVGAWPRVVYFYVDDTTGVKVPMYVQSISHQIPLLMRSLLCQLAAHHPPSPNGD

SEQ ID NO: 879409 - protein, 233 aa, Homo sapiens
  misc_feature (168)..(168): Xaa can be any naturally occurring amino acid
  misc_feature (171)..(173): Xaa can be any naturally occurring amino acid
CRGGGGGGLSWRQDGELAVSPRPAPTGASASRMWQLTSLLLFVATWGISGTPAPLDSVFSSSERAHQVLRIRKRANSFLEELRHSSLERECIEEICDFEEAKEIFQNVDDTLAFWSKHVDGDQCLVLPLEHPCASLCCGHGTCIDGIGSFSCDCRSGWEGRFCQRGEXERXXXTHSYRDDYGIIWATWDTRRHSMNNPLYEDYPMNRLTIGGQYDSLVGALHAGDAAPPISSA

SEQ ID NO: 879410 - protein, 461 aa, Homo sapiens
MWQLTSLLLFVATWGISGTPAPLDSVFSSSERAHQVLRIRKRANSFLEELRHSSLERECIEEICDFEEAKEIFQNVDDTLAFWSKHVDGDQCLVLPLEHPCASLCCGHGTCIDGIGSFSCDCRSGWEGRFCQREVSFLNCSLDNGGCTHYCLEEVGWRRCSCAPGYKLGDDLLQCHPAVKFPCGRPWKRMEKKRSHLKRDTEDQEDQVDPRLIDGKMTRRGDSPWQVVLLDSKKKLACGAVLIHPSWVLTAAHCMDESKKLLVRLGEYDLRRWEKWELDLDIKEVFVHPNYSKSTTDNDIALLHLAQPATLSQTIVPICLPDSGLAERELNQAGQETLVTGWGYHSSREKEAKRNRTFVLNFIKIPVVPHNECSEVMSNMVSENMLCAGILGDRQDACEGDSGGPMVASFHGTWFLVGLVSWGEGCGLLHNYGVYTKVSRYLDWIHGHIRDKEAPQKSWAP

SEQ ID NO: 879411 - protein, 495 aa, Homo sapiens
MWQLTSLLLFVATWGISGTPAPLDSVFSSSERAHQVLRIRKRANSFLEELRHSSLERECIEEICDFEEAKEIFQNVDDTLAFWSKHVDGDQCLVLPLEHPCASLCCGHGTCIDGIGSFSCDCRSGWEGRFCQRGEGERWMLAGGGAGLGPGWGRGTSTSCPRPPLPAEVSFLNCSLDNGGCTHYCLEEVGWRRCSCAPGYKLGDDLLQCHPAVKFPCGRPWKRMEKKRSHLKRDTEDQEDQVDPRLIDGKMTRRGDSPWQVVLLDSKKKLACGAVLIHPSWVLTAAHCMDESKKLLVRLGEYDLRRWEKWELDLDIKEVFVHPNYSKSTTDNDIALLHLAQPATLSQTIVPICLPDSGLAERELNQAGQETLVTGWGYHSSREKEAKRNRTFVLNFIKIPVVPHNECSEVMSNMVSENMLCAGILGDRQDACEGDSGGPMVASFHGTWFLVGLVSWGEGCGLLHNYGVYTKVSRYLDWIHGHIRDKEAPQKSWAP

SEQ ID NO: 879412 - protein, 239 aa, Homo sapiens
CRGGGGGGLSWRQDGELAVSPRPAPTGASASRMWQLTSLLLFVATWGISGTPAPLDSVFSSSERAHQVLRIRKRANSFLEELRHSSLERECIEEICDFEEAKEIFQNVDDTLAFWSKHVDGDQCLVLPLEHPCASLCCGHGTCIDGIGSFSCDCRSGWEGRFCQRGEGERWMLAGGGAGLGPGWTMLTVLCHAMVGPSFSLFPPVSEELRTNKATLSSILTDVYLAYRSEYWQASYHPR

SEQ ID NO: 879413 - protein, 1089 aa, Homo sapiens
MAVFDTPEEAFGVLRPVCVQLTKTQTVENVEHLQTRLQAVSDSALQELQQYILFPLRFTLKTPGPKRERLIQSVVECLTFVLSSTCVKEQELLQELFSELSACLYSPSSQKPAAVSEELKLAVIQGLSTLMHSAYGDIILTFYEPSILPRLGFAVSLLLGLAEQEKSKQIKIAALKCLQVLLLQCDCQDHPRSLDELEQKQLGDLFASFLPGISTALTRLITGDFKQGHSIVVSSLKIFYKTVSFIMADEQLKRISKVQAKPAVEHRVAELMVYREADWVKKTGDKLTILIKKIIECVSVHPHWKVRLELVELVEDLLLKCSQSLVECAGPLLKALVGLVNDESPEIQAQCNKVLRHFADQKVVVGNKALADILSESLHSLATSLPRLMNSQDDQGKFSTLSLLLGYLKLLGPKINFVLNSVAHLQRLSKALIQVLELDVADIKIVEERRWNSDDLNASPKTSATQPWNRIQRRYFRFFTDERIFMLLRQVCQLLGYYGNLYLLVDHFMELYHQSVVYRKQAAMILNELVTGAAGLEVEDLHEKHIKTNPEELREIVTSILEEYTSQENWYLVTCLETEEMGEELMMEHPGLQAITSGEHTCQVTSFLAFSKPSPTICSMNSNIWQICIQLEGIGQFAYALGKDFCLLLMSALYPVLEKAGDQTLLISQVATSTMMDVCRACGYDSLQHLINQNSDYLVNGISLNLRHLALHPHTPKVLEVMLRNSDANLLPLVADVVQDVLATLDQFYDKRAASFVSVLHALMAALAQWFPDTGNLGHLQEQSLGEEGSHLNQRPAALEKSTTTAEDIEQFLLNYLKEKDVADGNVSDFDNEEEEQSVPPKVDENDTRPDVEPPLPLQIQIAMDVMERCIHLLSDKNLQIRLKVLDVLDLCVVVLQSHKNQLLPLAHQAWPSLVHRLTRDAPLAVLRAFKVLRTLGSKCGDFLRSRFCKDVLPKLAGSLVTQAPISARAGPVYSHTLAFKLQLAVLQGLGPLCERLDLGEGDLNKVADACLIYLSVKQPVKLQEAARSVFLHLMKVDPDSTWFLLNELYCPVQFTPPHPSLHPVQLHGASGQQNPYTTNVLQLLKELQ

SEQ ID NO: 879414 - protein, 618 aa, Homo sapiens
MPHICPFFTDERIFMLLRQVCQLLGYYGNLYLLVDHFMELYHQSVVYRKQAAMILNELVTGAAGLEVEDLHEKHIKTNPEELREIVTSILEEYTSQENWYLVTCLETEEMGEELMMEHPGLQAITSGEHTCQVTSFLAFSKPSPTICSMNSNIWQICIQLEGIGQFAYALGKDFCLLLMSALYPVLEKAGDQTLLISQVATSTMMDVCRACGYDSLQHLINQNSDYLVNGISLNLRHLALHPHTPKVLEVMLRNSDANLLPLVADVVQDVLATLDQFYDKRAASFVSVLHALMAALAQWFPDTGNLGHLQEQSLGEEGSHLNQRPAALEKSTTTAEDIEQFLLNYLKEKDVADGNVSDFDNEEEEQSVPPKVDENDTRPDVEPPLPLQIQIAMDVMERCIHLLSDKNLQIRLKVLDVLDLCVVVLQSHKNQLLPLAHQAWPSLVHRLTRDAPLAVLRAFKVLRTLGSKCGDFLRSRFCKDVLPKLAGSLVTQAPISARAGPVYSHTLAFKLQLAVLQGLGPLCERLDLGEGDLNKVADACLIYLSVKQPVKLQEAARSVFLHLMKVDPDSTWFLLNELYCPVQFTPPHPSLHPVQLHGASGQQNPYTTNVLQLLKELQ

SEQ ID NO: 879415 - protein, 240 aa, Homo sapiens
HVGGKPALAAHAGGKPALAVVLTAACDTDAGSLFSVLDVLDLCVVVLQSHKNQLLPLAHQAWPSLVHRLTRDAPLAVLRAFKVLRTLGSKCGDFLRSRFCKDVLPKLAGSLVTQAPISARAGPVYSHTLAFKLQLAVLQGLGPLCERLDLGEGDLNKVADACLIYLSVKQPVKLQEAARSVFLHLMKVDPDSTWFLLNELYCPVQFTPPHPSLHPVQLHGASGQQNPYTTNVLQLLKELQ

SEQ ID NO: 879416 - protein, 1089 aa, Homo sapiens; identical to SEQ ID NO: 879413

SEQ ID NO: 879417 - protein, 509 aa, Homo sapiens
MGEELMMEHPGLQAITSGEHTCQVTSFLAFSKPSPTICSMNSNIWQICIQLEGIGQFAYALGKDFCLLLMSALYPVLEKAGDQTLLISQVATSTMMDVCRACGYDSLQHLINQNSDYLVNGISLNLRHLALHPHTPKVLEVMLRNSDANLLPLVADVVQDVLATLDQFYDKRAASFVSVLHALMAALAQWFPDTGNLGHLQEQSLGEEGSHLNQRPAALEKSTTTAEDIEQFLLNYLKEKDVADGNVSDFDNEEEEQSVPPKVDENDTRPDVEPPLPLQIQIAMDVMERCIHLLSDKNLQIRLKVLDVLDLCVVVLQSHKNQLLPLAHQAWPSLVHRLTRDAPLAVLRAFKVLRTLGSKCGDFLRSRFCKDVLPKLAGSLVTQAPISARAGPVYSHTLAFKLQLAVLQGLGPLCERLDLGEGDLNKVADACLIYLSVKQPVKLQEAARSVFLHLMKVDPDSTWFLLNELYCPVQFTPPHPSLHPVQLHGASGQQNPYTTNVLQLLKELQ

SEQ ID NO: 879418 - protein, 130 aa, Homo sapiens
MMDVCRACGYDSLQHLINQNSDYLVNGISLNLRHLALHPHTPKVLEVMLRNSDANLLPLVADVVQDVLATLDQFYDKRAASFVSVLHALMAALGTLRALFNADVWGTGLSLLVCLASFFALFVVMLWRTF

SEQ ID NO: 879419 - protein, 111 aa, Homo sapiens
FQNREMLPFWMNSTGRREGWQRGWHGYDNELMDMRGIFLAFGPDFKSNFRAAPIRSVDVYNVMCNVVGITPLPNNGSWSRVMCMLKGRASTAPPVWPSHCALALILLFLLA

SEQ ID NO: 879420 - protein, 109 aa, Homo sapiens
FQNREMLPFWMNSTGRREGWQRGWHGYDNELMDMRGIFLAFGPGRRGNDQMLSDPIPKEVSVRGATGARRGCRDFLTDPLYEPSRANPAGLHETSFAGFLSNASWVWQM

SEQ ID NO: 879421 - protein, 1145 aa, Homo sapiens
MDDWKSRLVIKSMLPHFAMVGNRQEPRKLQESGKKPSWMEEEDLSFLYKSSPGRKHQGTVKRRQEEDHFQFPDMADGGYPNKIKRPCLEDVTLAMGPGAHPSTACAELQVPPLTINPSPAAMGVAGQSLLLENNPMNGNIMGSPFVVPQTTEVGLKGPTVPYYEKINSVPAVDQELQELLEELTKIQDPSPNELDLEKILGTKPEEPLVLDHPQATLSTTPKPSVQMSHLESLASSKEFASSCSQVTGMSLQIPSSSTGISYSIPSTSKQIVSPSSSMAQSKSQVQAMLPVALPPLPVPQWHHAHQLKALAASKQGSATKQQGPTPSWSGLPPPGLSPPYRPVPSPHPPPLPLPPPPPPFSPQSLMVSCMSSNTLSGSTLRGSPNALLSSMTSSSNAALGPAMPYAPEKLPSPALTQQPQFGPQSSILANLMSSTIKTPQGHLMSALPASNPGPSPPYRPEKLSSPGLPQQSFTPQCSLIRSLTPTSNLLSQQQQQQQQQQQANVIFKPISSNSSKTLSMIMQQGMASSSPGATEPFTFGNTKPLSHFVSEPGPQKMPSMPTTSRQPSLLHYLQQPTPTQASSATASSTATATLQLQQQQQQQQQQPDHSSFLLQQMMQQPQRFQRSVASDSMPALPRQVCCHLFAWTSAASSVKPQHQHGNSFTSRQDPQPGDVSPSNITHVDKACKLGEARHPQVSLGRQPPSCQALGSESFLPGSSFAHELARVTSSYSTSEAAPWGSWDPKAWRQVPAPLLPSCDATARGTEIRSYGKTPERQNAYISQQMSPFEAVQEQVTSKCSRIKASPPSSKHLMPPRTGLLQNNLSPGMIPLTRHQSCEGMGVISPTLGKRQGIFTSSPQCPILSHSGQTPLGRLDSVCQHMQSPKATPPEVPLPGFCPSSLGTQSLSPHQLRRPSVPRMPTAFNNAAWVTAAAAVTTAVSGKTPLSQVDNSVQQHSPSGQACLQRPSDWEAQVPAAMGTQVPLANNPSFSLLGSQSLRQSPVQGPVPVANTTKFLQQGMASFSPLSPIQGIEPPSYVAAAATAAAASAVAASQFPGPFDRTDIPPELPPADFLRQPQPPLNDLISSPDCNEVDFIEALLKGSCVSPDEDWVCNLRLIDDILEQHAAAQNATAQNSGQVTQDAGAL

SEQ ID NO: 879422 - protein, 1145 aa, Homo sapiens; identical to SEQ ID NO: 879421

SEQ ID NO: 879423 - protein, 1142 aa, Homo sapiens
MDDWKSRLVIKSMLPHFAMVGNRQEPRKLQESGKKPSWMEEEDLSFLYKSSPGRKHQGTVKRRQEEDHFQFPDMADGGYPNKIKRPCLEDVTLAMGPGAHPSTACAELQVPPLTINPSPAAMGVAGQSLLLENNPMNGNIMGSPFVVPQTTEVGLKGPTVPYYEKINSVPAVDQELQELLEELTKIQDPSPNELDLEKILGTKPEEPLVLDHPQATLSTTPKPSVQMSHLESLASSKEFASSCSQVTGMSLQIPSSSTGISYSIPSTSKQIVSPSSSMAQSKSQVQAMLPVALPPLPVPQWHHAHQLKALAASKQGSATKQQGPTPSWSGLPPPGLSPPYRPVPSPHPPPLPLPPPPPPFSPQSLMVSCMSSNTLSGSTLRGSPNALLSSMTSSSNAALGPAMPYAPEKLPSPALTQQPQFGPQSSILANLMSSTIKTPQGHLMSALPASNPGPSPPYRPEKLSSPGLPQQSFTPQCSLIRSLTPTSNLLSQQQQQQQQQQQANVIFKPISSNSSKTLSMIMQQGMASSSPGATEPFTFGNTKPLSHFVSEPGPQKMPSMPTTSRQPSLLHYLQQPTPTQASSATASSTATATLQLQQQQQQQQQQPDHSSFLLQQMMQQPQRFQRSVASDSMPALPRQVCCHLFAWTSAASSVKPQHQHGNSFTSRQDPQPGDVSPSNITHVDKACKLGEARHPQVSLGRQPPSCQALGSESFLPGSSFAHELARVTSSYSTSEAAPWGSWDPKAWRQVPAPLLPSCDATARGTEIRSYGKTPERQNAYISQQMSPFEAVQEQVTSKCSRIKASPPSSKHLMPPRTGLLQNNLSPGMIPLTRHQSCEGMGVISPTLGKRQGIFTSSPQCPILSHSGQTPLGRLDSVCQHMQSPKATPPEVPLPGFCPSSLGTQSLSPHQLRRPSVPRMPTAFNNAAWVTAAAAVTTAVSGKTPLSQVDNSVQQHSPSGQACLQRPSDWEAQVPAAMGTQVPLANNPSFSLLGSQSLRQSPVQGPVPVANTTKFLQQGMASFSPLSPIQGIEPPSYVAAAATAAAASAVAASQFPGPFDRTDIPPELPPADFLRQPQPPLNDLISSPHPPPLPLPPPPPPFSPQSLMVSCMSSNTLSGSTLRGSPNALLSSMTSTSNAALGP

SEQ ID NO: 879424 - protein, 1474 aa, Homo sapiens
MVENADSLQAQERKDILMKYDKGHRAGLPEDKGPEPVGINSSIDRFGILHETELPPVTAREAKKIRREMTRTSKWMEMLGEWETYKHSSKLIDRVYKGIPMNIRGPVWSVLLNIQEIKLKNPGRYQIMKERGKRSSEHIHHIDLDVRTTLRNHVFFRDRYGAKQRELFYILLAYSEYNPEVGYCRDLSHITALFLLYLPEEDAFWALVQLLASERHSLPGFHSPNGGTVQGLQDQQEHVVPKSQPKTMWHQDKEGLCGQCASLGCLLRNLIDGISLGLTLRLWDVYLVEGEQVLMPITSIALKVQQKRLMKTSRCGLWARLRNQFFDTWAMNDDTVLKHLRASTKKLTRKQGDLPPPGPTALGRRCVAGSPQPAEPWGQSQEPPTMPQRLPHARQHTPLPLGSADYRRVVSVRPQGPHRDPKDSRDAAKREQGSLAPRPVPASRGGKTLCKGYRQAPPGPPAQFQRPICSASPPWASRFSTPCPGGAVREDTYPVGTQGVPSLALAQGGPQGSWRFLEWKSMPRLPTDLDIGGPWFPHYDFERSCWVRAISQEDQLATCWQAEHCGEVHNKDMSWPEEMSFTANSSKIDRQKVPTEKGATGLSNLGNTCFMNSSIQCVSNTQPLTQYFISGRHLYELNRTNPIGMKGHMAKCYGDLVQELWSGTQKSVAPLKLRRTIAKYAPKFDGFQQQDSQELLAFLLDGLHEDLNRVHEKPYVELKDSDGRPDWEVAAEAWDNHLRRNRSIIVDLFHGQLRSQVKCKTCGHISVRFDPFNFLSLPLPMDSYMDLEITVIKLDGTTPVRYGLRLNMDEKYTGLKKQLRDLCGLNSEQILLAEVHDSNIKNFPQDNQKVQLSVSGFLCAFEIPVPSSPISASSPTQIDFSSSPSTNGMFTLTTNGDLPKPIFIPNGMPNTVVPCGTEKNFTNGMVNGHMPSLPDSPFTGYIIAVHRKMMRTELYFLSPQENRPSLFGMPLIVPCTVHTQKKDLYDAVWIQVSWLARPLPPQEASIHAQDRDNCMGYQYPFTLRVVQKDGISCAWCPQYRFCRGCKIDCGEDRAFIGNAYIAVDWHPTALHLRYQTSQERVVDKHESVEQSRRAQAEPINLDSCLRAFTSEEELGESEMYYCSKCKTHCLATKKLDLWRLPPFLIIHLKRFQFVNDQWIKSQKIVRFLRESFDPSAFLVPRDPALCQHKPLTPQGDELSKPRILAREVKKVDAQSSAGKEDMLLSKSPSSLSANISSSPKGSPSSSRKSGTSCPSSKNSSPNSSPRTLGRSKGRLRLPQIGSKNKPSSSKKNLDASKENGAGQICELADALSRGHMRGGSQPELVTPQDHEVALANGFLYEHEACGNGCGDGYSNGQLGNHSEEDSTDDQREDTHIKPIYNLYAISCHSGILSGGHYITYAKNPNCKWYCYNDSSCEELHPDEIDTDSAYILFYEQQGIDYAQFLPKIDGKKMADTSSTDEDSESDYEKYSMLQ

SEQ ID NO: 879425 - protein, 99 aa, Homo sapiens
VLRILEKRAKMKIPQAYDAVLIFEFVDFSSSPSTNGMFTLTTNGDLPKPIFIPNGMPNTVVPCGTEKNFTNGMVNGHMPSLPDSPFTGYIIAVHRKMVS

SEQ ID NO: 879426 - protein, 1367 aa, Homo sapiens
MVENADSLQAQERKDILMKYDKGHRAGLPEDKGPEPVGINSSIDRFGILHETELPPVTAREAKKIRREMTRTSKWMEMLGEWETYKHSSKLIDRVYKGIPMNIRGPVWSVLLNIQEIKLKNPGRYQIMKERGKRSSEHIHHIDLDVRTTLRNHVFFRDRYGAKQRELFYILLAYSEYNPEVGYCRDLSHITALFLLYLPEEDAFWALVQLLASERHSLPGFHSPNGGTVQGLQDQQEHVVPKSQPKTMWHQDKEGLCGQCASLGCLLRNLIDGISLGLTLRLWDVYLVEGEQVLMPITSIALKVQQKRLMKTSRCGLWARLRNQFFDTWAMNDDTVLKHLRASTKKLTRKQGDLPPPAKREQGSLAPRPVPASRGGKTLCKGYRQAPPGPPAQFQRPICSASPPWASRFSTPCPGGAVREDTYPVGTQGVPSLALAQGGPQGSWRFLEWKSMPRLPTDLDIGGPWFPHYDFERSCWVRAISQEDQLATCWQAEHCGEVHNKDMSWPEEMSFTANSSKIDRQKVPTEKGATGLSNLGNTCFMNSSIQCVSNTQPLTQYFISGRHLYELNRTNPIGMKGHMAKCYGDLVQELWSGTQKSVAPLKLRRTIAKYAPKFDGFQQQDSQELLAFLLDGLHEDLNRVHEKPYVELKDSDGRPDWEVAAEAWDNHLRRNRSIIVDLFHGQLRSQVKCKTCGHISVRFDPFNFLSLPLPMDSYMDLEITVIKLDGTTPVRYGLRLNMDEKYTGLKKQLRDLCGLNSEQILLAEVHDSNIKDFSSSPSTNGMFTLTTNGDLPKPIFIPNGMPNTVVPCGTEKNFTNGMVNGHMPSLPDSPFTGYIIAVHRKMMRTELYFLSPQENRPSLFGMPLIVPCTVHTQKKDLYDAVWIQVSWLARPLPPQEASIHAQDRDNCMGYQYPFTLRVVQKDGISCAWCPQYRFCRGCKIDCGEDRAFIGNAYIAVDWHPTALHLRYQTSQERVVDKHESVEQSRRAQAEPINLDSCLRAFTSEEELGESEMYYCSKCKTHCLATKKLDLWRLPPFLIIHLKRFQFVNDQWIKSQKIVRFLRESFDPSAFLVPRDPALCQHKPLTPQGDELSKPRILAREVKKVDAQSSAGKEDMLLSKSPSSLSANISSSPKGSPSSSRKSGTSCPSSKNSSPNSSPRTLGRSKGRLRLPQIGSKNKPSSSKKNLDASKENGAGQICELADALSRGHMRGGSQPELVTPQDHEVALANGFLYEHEACGNGCGDGYSNGQLGNHSEEDSTDDQREDTHIKPIYNLYAISCHSGILSGGHYITYAKNPNCKWYCYNDSSCEELHPDEIDTDSAYILFYEQQGIDYAQFLPKIDGKKMADTSSTDEDSESDYEKYSMLQ

SEQ ID NO: 879427 - protein, 1428 aa, Homo sapiens
MVENADSLQAQERKDILMKYDKGHRAGLPEDKGPEPVGINSSIDRFGILQSCPSWESEPQEGPCPPFPVPSPGLSPELDRDRASPFWGSAPRLGRLQALCTSSALPGLPYSETELPPVTAREAKKIRREMTRTSKWMEMLGEWETYKHSSKLIDRVYKGIPMNIRGPVWSVLLNIQEIKLKNPGRYQIMKERGKRSSEHIHHIDLDVRTTLRNHVFFRDRYGAKQRELFYILLAYSEYNPEVGYCRDLSHITALFLLYLPEEDAFWALVQLLASERHSLPGFHSPNGGTVQGLQDQQEHVVPKSQPKTMWHQDKEGLCGQCASLGCLLRNLIDGISLGLTLRLWDVYLVEGEQVLMPITSIALKVQQKRLMKTSRCGLWARLRNQFFDTWAMNDDTVLKHLRASTKKLTRKQGDLPPPAKREQGSLAPRPVPASRGGKTLCKGYRQAPPGPPAQFQRPICSASPPWASRFSTPCPGGAVREDTYPVGTQGVPSLALAQGGPQGSWRFLEWKSMPRLPTDLDIGGPWFPHYDFERSCWVRAISQEDQLATCWQAEHCGEVHNKDMSWPEEMSFTANSSKIDRQKVPTEKGATGLSNLGNTCFMNSSIQCVSNTQPLTQYFISGRHLYELNRTNPIGMKGHMAKCYGDLVQELWSGTQKSVAPLKLRRTIAKYAPKFDGFQQQDSQELLAFLLDGLHEDLNRVHEKPYVELKDSDGRPDWEVAAEAWDNHLRRNRSIIVDLFHGQLRSQVKCKTCGHISVRFDPFNFLSLPLPMDSYMDLEITVIKLDGTTPVRYGLRLNMDEKYTGLKKQLRDLCGLNSEQILLAEVHDSNIKDFSSSPSTNGMFTLTTNGDLPKPIFIPNGMPNTVVPCGTEKNFTNGMVNGHMPSLPDSPFTGYIIAVHRKMMRTELYFLSPQENRPSLFGMPLIVPCTVHTQKKDLYDAVWIQVSWLARPLPPQEASIHAQDRDNCMGYQYPFTLRVVQKDGISCAWCPQYRFCRGCKIDCGEDRAFIGNAYIAVDWHPTALHLRYQTSQERVVDKHESVEQSRRAQAEPINLDSCLRAFTSEEELGESEMYYCSKCKTHCLATKKLDLWRLPPFLIIHLKRFQFVNDQWIKSQKIVRFLRESFDPSAFLVPRDPALCQHKPLTPQGDELSKPRILAREVKKVDAQSSAGKEDMLLSKSPSSLSANISSSPKGSPSSSRKSGTSCPSSKNSSPNSSPRTLGRSKGRLRLPQIGSKNKPSSSKKNLDASKENGAGQICELADALSRGHMRGGSQPELVTPQDHEVALANGFLYEHEACGNGCGDGYSNGQLGNHSEEDSTDDQREDTHIKPIYNLYAISCHSGILSGGHYITYAKNPNCKWYCYNDSSCEELHPDEIDTDSAYILFYEQQGIDYAQFLPKIDGKKMADTSSTDEDSESDYEKYSMLQ

SEQ ID NO: 879428 - protein, 541 aa, Homo sapiens
GSPAETEFLSERTEQLLFQSPEMTSTFNPRECKLSKQEGQNYGFFLRIEKDTEGHLVRVVEKCSPAEKAGLQDGDRVLRINGVFVDKEEHMQVVDLVRKSGNSVTLLVLDGDSYEKAVKTRVDLKELGQSQKEQGLSDNILSPVMNGGVQTWTQPRLCYLVKEGGSYGFSLKTVQGKKGVYMTDITPQGVAMRAGVLADDHLIEVNGENVEDASHEEVVEKVKKSGSRVMFLLVDKETDKRHVEQKIQFKRETASLKLLPHQPRIVEMKKGSNGYGFYLRAGSEQKGQIIKDIDSGSPAEEAGLKNNDLVVAVNGESVETLDHDSVVEMIRKGGDQTSLLVVDKETDNMYRLAHFSPFLYYQSQELPNGSVKEAPAPTPTSLEVSSPPDTTEEVDHKPKLCRLAKGENGYGFHLNAIRGLPGSFIKEVQKGGPADLAGLEDEDVIIEVNGVNVLDEPYEKVVDRIQSSGKNVTLLVCGKKAYDYFQAKKIPIVSSLADPLDTPPDSKEGIVVESNHDSHMAKERAHSTASHSSSNSEDTEM

SEQ ID NO: 879429 - protein, 530 aa, Homo sapiens
GSPAETEFLSERTEQLLFQSPEMTSTFNPRECKLSKQEGQNYGFFLRIEKDTEGHLVRVVEKCSPAEKAGLQDGDRVLRINGVFVDKEEHMQVVDLVRKSGNSVTLLVLDGDSYEKAVKTRVDLKELGQSQKEQGLSDNILSPVMNGGVQTWTQPRLCYLVKEGGSYGFSLKTVQGKKGVYMTDITPQGVAMRAGVLADDHLIEVNGENVEDASHEEVVEKVKKSGSRVMFLLVDKETDKRHVEQKIQFKRETASLKLLPHQPRIVEMKKGSNGYGFYLRAGSEQKGQIIKDIDSGSPAEEAGLKNNDLVVAVNGESVETLDHDSVVEMIRKGGDQTSLLVVDKETDNMYRLAHFSPFLYYQSQELPNGSVKEAPAPTPTSLEVSSPPDTTEEVDHKPKLCRLAKGENGYGFHLNAIRGLPGSFIKEVQKGGPADLAGLEDEDVIIEVNGVNVLDEPYEKVVDRIQSSGKNVTLLVCGKKAYDYFQAKKIPIVSSLADPLDTPPDSKEGIVVESNHDSHMAKERAAIADG

SEQ ID NO: 879430 - protein, 302 aa, Homo sapiens
MLVEGVVVVLSMPFLSISSGLWAPAENLFYFFRGLTDNFIFWGWGRVGQIIKDIDSGSPAEEAGLKNNDLVVAVNGESVETLDHDSVVEMIRKGGDQTSLLVVDKETDNMYRLAHFSPFLYYQSQELPNGSVKEAPAPTPTSLEVSSPPDTTEEVDHKPKLCRLAKGENGYGFHLNAIRGLPGSFIKEVQKGGPADLAGLEDEDVIIEVNGVNVLDEPYEKVVDRIQSSGKNVTLLVCGKKAYDYFQAKKIPIVSSLADPLDTPPDSKEGIVVESNHDSHMAKERAHSTASHSSSNSEDTEM

SEQ ID NO: 879431 - protein, 204 aa, Homo sapiens
MVTTKLMFFPFIFQKAHFSPFLYYQSQELPNGSVKEAPAPTPTSLEVSSPPDTTEEVDHKPKLCRLAKGENGYGFHLNAIRGLPGSFIKEVQKGGPADLAGLEDEDVIIEVNGVNVLDEPYEKVVDRIQSSGKNVTLLVCGKKAYDYFQAKKIPIVSSLADPLDTPPDSKEGIVVESNHDSHMAKERAHSTASHSSSNSEDTEM

SEQ ID NO: 879432 - protein, 541 aa, Homo sapiens; identical to SEQ ID NO: 879428

SEQ ID NO: 879433 - protein, 512 aa, Homo sapiens
MTSTFNPRECKLSKQEGQNYGFFLRIEKDTEGHLVRVVEKCSPAEKAGLQDGDRVLRINGVFVDKEEHMQVVDLVRKSGNSVTLLVLDGDSYEKAVKTRVDLKELGQSQKEQGLSDNILSPVMNGGVQTWTQPRLCYLVKEGGSYGFSLKTVQGKKGVYMTDITPQGVAMRAGVLADDHLIEVNGENVEDASHEEVVEKVKKSGSRVMFLLVDKETDKRHVEQKIQFKRETASLKLLPHQPRIVEMKKGSNGYGFYLRAGSEQKGQIIKDIDSGSPAEEAGLKNNDLVVAVNGESVETLDHDSVVEMIRKGGDQTSLLVVDKETDNMYRLAHFSPFLYYQSQELPNGSVKEAPAPTPTSLEVSSPPDTTEEVDHKPKLCRLAKGENGYGFHLNAIRGLPGSFIKEVQKGGPADLAGLEDEDVIIEVNGVNVLDEPYEKVVDRIQSSGKNVTLLVCGKKAYDYFQAKKIPIVSSLADPLDTPPDSKEGIVVESNHDSHMAKERLYTIAVNCML

SEQ ID NO: 879434 - protein, 299 aa, Homo sapiens
MLVEGVVVVLSMPFLSISSGLWAPAENLFYFFRGLTDNFIFWGWGRVGQIIKDIDSGSPAEEAGLKNNDLVVAVNGESVETLDHDSVVEMIRKGGDQTSLLVVDKETDNMYRLRTLIEKEACPHHLLPRSPNQELPNGSVKEAPAPTPTSLEVSSPPDTTEEVDHKPKLCRLAKGENGYGFHLNAIRGLPGSFIKEVQKGGPADLAGLEDEDVIIEVNGVNVLDEPYEKVVDRIQSSGKNVTLLVCGKKAYDYFQAKKIPIVSSLADPLDTPPDSKEGIVVESNHDSHMAKERAAIADG

SEQ ID NO: 879435 - protein, 392 aa, Homo sapiens
GSPAETEFLSERTEQLLFQSPEMTSTFNPRECKLSKQEGQNYGFFLRIEKDTEGHLVRVVEKCSPAEKAGLQDGDRVLRINGVFVDKEEHMQVVDLVRKSGNSVTLLVLDGDSYEKAVKTRVDLKELGQSQKEQGLSDNILSPVMNGGVQTWTQPRLCYLVKEGGSYGFSLKTVQGKKGVYMTDITPQGVAMRAGVLADDHLIEVNGENVEDASHEEVVEKVKKSGSRVMFLLVDKETDKRHVEQKIQFKRETASLKLLPHQPRIVEMKKGSNGYGFYLRAGSEQKGQIIKDIDSGSPAEEAGLKNNDLVVAVNGESVETLDHDSVVEMIRKGGDQTSLLVVDKETDNMYRLVSNTRPYIHALRLGPFTHDLNFCTELGLCSSNWKRHNNHH

SEQ ID NO: 879436 - protein, 638 aa, Homo sapiens
MSALAGEDVWRCPGCGDHIAPSQIWYRTVNETWHGSCFRCSECQDSLTNWYYEKDGKLYCPKDYWGKFGEFCHGCSLLMTGPFMVAGEFKYHPECFACMSCKVIIEDGDAYALVQHATLYCGKCHNEVVLAPMFERLSTESVQEQLPYSVTLISMPATTEGRRGFSVSVESACSNYATTVQVKEVNRMHISPNNRNAIHPGDRILEINGTPVRTLRVEEVEDAISQTSQTLQLLIEHDPVSQRLDQLRLEARLAPHMQNAGHPHALSTLDTKENLEGTLRRRSLRRSNSISKSPGPSSPKEPLLFSRDISRSESLRCSSSYSQQIFRPCDLIHGEVLGKGFFGQAIKVTHKATGKVMVMKELIRCDEETQKTFLTEVKVMRSLDHPNVLKFIGVLYKDKKLNLLTEYIEGGTLKDFLRSMDPFPWQQKVRFAKGIASGMAYLHSMCIIHRDLNSHNCLIKLDKTVVVADFGLSRLIVEERKRAPMEKATTKKRTLRKNDRKKRYTVVGNPYWMAPEMLNGKSYDETVDIFSFGIVLCEIIGQVYADPDCLPRTLDFGLNVKLFWEKFVPTDCPPAFFPLAAICCRLEPESRPAFSKLEDSFEALSLYLGELGIPLPAELEELDHTVSMQYGLTRDSPP

SEQ ID NO: 879437 - protein, 617 aa, Homo sapiens
MGSYLSVPAYFTSRDLFRCSECQDSLTNWYYEKDGKLYCPKDYWGKFGEFCHGCSLLMTGPFMVAGEFKYHPECFACMSCKVIIEDGDAYALVQHATLYCGKCHNEVVLAPMFERLSTESVQEQLPYSVTLISMPATTEGRRGFSVSVESACSNYATTVQVKEVNRMHISPNNRNAIHPGDRILEINGTPVRTLRVEEVEDAISQTSQTLQLLIEHDPVSQRLDQLRLEARLAPHMQNAGHPHALSTLDTKENLEGTLRRRSLRRSNSISKSPGPSSPKEPLLFSRDISRSESLRCSSSYSQQIFRPCDLIHGEVLGKGFFGQAIKVTHKATGKVMVMKELIRCDEETQKTFLTEVKVMRSLDHPNVLKFIGVLYKDKKLNLLTEYIEGGTLKDFLRSMDPFPWQQKVRFAKGIASGMAYLHSMCIIHRDLNSHNCLIKLDKTVVVADFGLSRLIVEERKRAPMEKATTKKRTLRKNDRKKRYTVVGNPYWMAPEMLNGKSYDETVDIFSFGIVLCEIIGQVYADPDCLPRTLDFGLNVKLFWEKFVPTDCPPAFFPLAAICCRLEPESRPAFSKLEDSFEALSLYLGELGIPLPAELEELDHTVSMQYGLTRDSPP

SEQ ID NO: 879438 - protein, 686 aa, Homo sapiens
MGSYLSVPAYFTSRDLFRCSECQDSLTNWYYEKDGKLYCPKDYWGKFGEFCHGCSLLMTGPFMVAGEFKYHPECFACMSCKVIIEDGDAYALVQHATLYCGKCHNEVVLAPMFERLSTESVQEQLPYSVTLISMPATTEGRRGFSVSVESACSNYATTVQVKEVNRMHISPNNRNAIHPGDRILEINGTPVRTLRVEEVEDAISQTSQTLQLLIEHDPVSQRLDQLRLEARLAPHMQNAGHPHALSTLDTKENLEGTLRRRSLRRSNSISKSPGPSSPKEPLLFSRDISRSESLRCSSSYSQQIFRPCDLIHGEVLGKGFFGQAIKVTHKATGKVMVMKELIRCDEETQKTFLTEVKVMRSLDHPNVLKFIGVLYKDKKLNLLTEYIEGGTLKDFLRSMDPFPWQQKVRFAKGIASGMAYLHSMCIIHRDLNSHNCLIKLDKTVVVADFGLSRLIVEERKRAPMEKATTKKRTLRKNDRKKRYTVVGNPYWMAPEMLNGKSYDETVDIFSFGIVLCEIIGQVYADPDCLPRTLDFGLNVKLFWEKFVPTDCPPAFFPLAAICCRLEPESRAPPGAAGEGPGCADDEGPVRRQGKVTIKYDPKELRKHLNLEEWILEQLTRLYDCQEEEISELEIDVDELLDMESDDAWASRVKELLVDCYKPTEAFISGLLDKIRAMQKLSTPQKK

SEQ ID NO: 879439 - protein, 182 aa, Homo sapiens
MEKATTKKRTLRKNDRKKRYTVVGNPYWMAPEMLNGKSYDETVDIFSFGIVLCEIIGQVYADPDCLPRTLDFGLNVKLFWEKFVPTDCPPAFFPLAAICCRLEPESRLVSCLFLPAHRVLGRLPLSKATPEPSASTGVREALRSRMWLSTPEPSDNTYVQVGEERGKDIAASNLDRTQKHSH

SEQ ID NO: 879440 - protein, 686 aa, Homo sapiens; identical to SEQ ID NO: 879438

SEQ ID NO: 879441 - protein, 549 aa, Homo sapiens
MGSYLSVPAYFTSRDLFRCSECQDSLTNWYYEKDGKLYCPKDYWGKFGEFCHGCSLLMTGPFMVAGEFKYHPECFACMSCKVIIEDGDAYALVQHATLYCGKCHNEVVLAPMFERLSTESVQEQLPYSVTLISMPATTEGRRGFSVSVESACSNYATTVQVKEVNRMHISPNNRNAIHPGDRILEINGTPVRTLRVEEVEDAISQTSQTLQLLIEHDPVSQRLDQLRLEARLAPHMQNAGHPHALSTLDTKENLEGTLRRRSLRRSNSISKSPGPSSPKEPLLFSRDISRSESLRCSSSYSQQIFRPCDLIHGEVLGKGFFGQAIKVTHKATGKVMVMKELIRCDEETQKTFLTEVKVMRSLDHPNVLKFIGVLYKDKKLNLLTEYIEGGTLKDFLRSMDPFPWQQKVRFAKGIASGMAYLHSMCIIHRDLNSHNCLIKLDKTVVVADFGLSRLIVEERKRAPMEKATTKKRTLRKNDRKKRYTVVGNPYWMAPEMLNGKSYDETVDIFSFGIVLCEIIGQVYADPDCLPRTLDFGLNILLTPNSTLPG

SEQ ID NO: 879442 - protein, 282 aa, Homo sapiens [sequence omitted]

SEQ ID NO: 879443 - protein, 109 aa, Homo sapiens
MTARYEAGGAGHPAACRAGGVGPHCEHAVRPDPGLTSLALAQPPAGGCSTASIAPLCPIPAVSRAVRASCGLAECLEAEQAIPITSPGGKWAQHQGNVSPQVLGPSYCL

SEQ ID NO: 879444 - protein, 117 aa, Homo sapiens
NTHTTTTSPTHLRYEELVFSIRCCRAGGVGPHCEHAVRPDPGLTSLALAQPPAGGCSTASIAPLCPIPAVSRAVRASCGLAECLEAEQAIPITSPGGKWAQHQGNVSPQVLGPSYCL

SEQ ID NO: 879445 - protein, 686 aa, Homo sapiens; identical to SEQ ID NO: 879438

SEQ ID NO: 879446 - protein, 95 aa, Homo sapiens
HQGESGGDTEETFPKVPPPTLALFCPMSVSRMKLSWLSEACRVRKGTSWPGTDYEDCADPAAPVGITVYSQSLCGPSCLPGFLRNLRVSLCPLNS

SEQ ID NO: 879447 - protein, 66 aa, Homo sapiens
MEKATTKKRTLRKNDRKKRYTVVGNPYWMAPEMLNGEILKPWRGHPQREDRCCPCIRALGIPGEAC

SEQ ID NO: 879448 - protein, 617 aa, Homo sapiens; identical to SEQ ID NO: 879437

SEQ ID NO: 879449 - protein, 129 aa, Homo sapiens
MAVAAKDHASTFRAPPGAAGEGPGCADDEGPVRRQGKVTIKYDPKELRKHLNLEEWILEQLTRLYDCQEEEISELEIDVDELLDMESDDAWASRVKELLVDCYKPTEAFISGLLDKIRAMQKLSTPQKK

SEQ ID NO: 879450 - protein, 129 aa, Homo sapiens; identical to SEQ ID NO: 879449

SEQ ID NO: 879451 - protein, 617 aa, Homo sapiens; identical to SEQ ID NO: 879437

SEQ ID NO: 879452 - protein, 617 aa, Homo sapiens; identical to SEQ ID NO: 879437

SEQ ID NO: 879453 - protein, 645 aa, Homo sapiens [sequence omitted]

SEQ ID NO: 879454 - protein, 709 aa, Homo sapiens
MGSQGKQMLKSAAFTPEFQLISQLTKEWTQTMSRQFTQEYKNGKQTFEKVLNLSELCNTIKIPLDSAILLVKIYPTEIHKYSKIQEQGYSLVAWETGSKPYDHDKVLLSKLQSIHTMLKRINWHVNCLGHVKQISMKHSMYGMYLLWLRKCVHRKELWGNLCYSNSGYLWDDRMFMEGFHFYSISANIFYDDYVLIYTFISRKTIPTLPSTPTIKSPVSFCQSQWKINQSKGFIIRAELDLTKGKLHGLWQVTKPKLRFPDCYTGGISQGYLMILCDRFCEALSIMPGIEQALNALQSPLLLLDKACGRRAILQTMPGDGRSPVPHFYGSTSTTRRSELASQMSWPLCLSTWSPNLRFCLLPHIPGTLHLHCPLLTDALWYHIAPGGGGIFLLVSSRVLGEKVYTVCFSKNKAEHQPRQCHPQRRKHLIHISLNFFVCFFVFSRDEVSLCCPGWSRTPGFKRPSCLGLPKCCDYQHEPPCPALNYFFNGWGSWGIEKEMFSHKVAYVDIKTEDIRESRVLIQNLLAIDCPGCVRECGIPDQGSKLTQGHRACRRAPNHFPASAHYPSIFSLVSEGHCPRREHEPFNIIRLGLANPQIYFSSFWIHSQPEPLPACRVLSGICSLPIPKRSRGRPQDPFPLPRYKDNEVGISCYLVPQLRLDVSPERTQYVACKLICGRAMPLENQETPGKQNSHPVEKLKLCQPPMARAH

SEQ ID NO: 879455 - protein, 349 aa, Homo sapiens
MLRKHVEFRKQKDIDNIISWQPPEVIQQYLSGGMCGYDLDGCPVWYDIIGPLDAKGLLFSASKQDLLRTKMRECELLLQECAHQTTKLGRKVETITIIYDCEGLGLKHLWKPAVEAYGEFLCMFEENYPETLKRLFVVKAPKLFPVAYNLIKPFLSEDTRKKIMVLGANWKEVLLKHISPDQVPVEYGGTMTDPDGNPKCKSKINYGGDIPRKYYVRDQVKQQYEHSVQISRGSSHQVEYEILFPGCVLRWQFMSDGADVGFGIFLKTKMGERQRAGEMTEVLPNQRYNSHLVPEDGTLTCSDPGIYVLRFDNTYSFIHAKKVNFTVEVLLPDKASEEKMKQLGAGTPK

SEQ ID NO: 879456 - protein, 279 aa, Homo sapiens
MRECELLLQECAHQTTKLGRKVETITIIYDCEGLGLKHLWKPAVEAYGEFLCMFEENYPETLKRLFVVKAPKLFPVAYNLIKPFLSEDTRKKIMVLGANWKEVLLKHISPDQVPVEYGGTMTDPDGNPKCKSKINYGGDIPRKYYVRDQVKQQYEHSVQISRGSSHQVEYEILFPGCVLRWQFMSDGADVGFGIFLKTKMGERQRAGEMTEVLPNQRYNSHLVPEDGTLTCSDPGIYVLRFDNTYSFIHAKKVNFTVEVLLPDKASEEKMKQLGAGTPK

SEQ ID NO: 879457 - protein, 403 aa, Homo sapiens
MSGRVGDLSPRQKEALAKFRENVQDVLPALPNPDDYFLLRWLRARSFDLQKSEAMLRKHVEFRKQKDIDNIISWQPPEVIQQYLSGGMCGYDLDGCPVWYDIIGPLDAKGLLFSASKQDLLRTKMRECELLLQECAHQTTKLGRKVETITIIYDCEGLGLKHLWKPAVEAYGEFLCMFEENYPETLKRLFVVKAPKLFPVAYNLIKPFLSEDTRKKIMVLGANWKEVLLKHISPDQVPVEYGGTMTDPDGNPKCKSKINYGGDIPRKYYVRDQVKQQYEHSVQISRGSSHQVEYEILFPGCVLRWQFMSDGADVGFGIFLKTKMGERQRAGEMTEVLPNQRYNSHLVPEDGTLTCSDPGIYVLRFDNTYSFIHAKKVNFTVEVLLPDKASEEKMKQLGAGTPK

SEQ ID NO: 879458 - protein, 76 aa, Homo sapiens
GWVRQWGQILSLLESRVILFPQFLCMFEENYPETLKRLFVVKGKLGISCDKARWKRGVKNMTAADGGSNSEPKEGV

SEQ ID NO: 879459 - protein, 403 aa, Homo sapiens; identical to SEQ ID NO: 879457

SEQ ID NO: 879460 - protein, 301 aa, Homo sapiens [sequence omitted]

SEQ ID NO: 879461 - protein, 227 aa, Homo sapiens [sequence omitted]

SEQ ID NO: 879462 - protein, 360 aa, Homo sapiens [sequence omitted]

SEQ ID NO: 879463 - protein, 1250 aa, Homo sapiens
MLRFVIHFYTTLESVHIATSFLTSTNLTKSVVGTNQNDMKKCHYYLFQRSKIIDHEKSPAIFWSKTIGNRMSHSIFKVLLEEFSLVTYIVLKDRLSCSSVPLVFKKFPMCKETSTCYILRIGSYLLNCWHMKARVYESFLKYRSLKILKSEIVSITELRAEFFCLKLIEIDAVYSTGSLMIVEKHCNVPNETGCVPDDFVNFLNSLEIVSRSHTTAVIISEHSKRLILFYFIILEVHFLKLQGISLPFYMKRFSFEYFSSLLVAVIDMTNNILVLFVCFLAVNELKRLDRSSGYVAPLLTTVNIPLCSKVENSTVTNSECSVNTLDEYEAVFSLYDTHQLILSGKRRLLSHSYLIKTELVVVQEKATDKTGYILKPLFIENPKNCRINLIEVKSKSYTKFCEDLRAIINSSKPNKESSYISSVVVKTSYLLKKRKNKTQQCPVSSENCFKKLARHSEWPTPVVRAVWEVEVGRLVGAQDFEAAVSHNCTTALQPERQRTRPCLKNKVGEGVQNYTVRSQEVSKFYLFFYSHFESLFVVSVFEFNIMFLKMEWILKMSWVQDIQHIFYIGLMSLGEVELLFLFNLHENNLYNFLIYIAKLSSSFKILNNNFFFGGKIKEGFLYIEIKMPRPGAVAHACNPNYFGGLRRVDHLRSRVQDQPGQHGETLPLLKVQKLAGRGGSCLYIPATRRLRHENHLNLGGEGCSEPRSCHCTPAWATEQNSLSKKKKKKKDAYRSKVLRCSDSCLKFQHFGSLRQEDHLSSGIQNQPGQYGKTPSLQNISLSLVARVCGPSYLEELRWEGSLEPGEVEAAVSYIHTIALYLNNKVRSCLKKKKEKLQLTAVIPALWEAKARRSLEVRSLRPANMVSPFSTKNTKISQVSWRVPVIPATREAEEENRLTQEAEITVNQDDTSDSSLGNRLKDSVLKKIKNLYSHNIFSFKLVAFKSLSTNKSCVGQVWWLMLVIPALWEAEAGGSPEVGSSRAAYPICRNPASTKNTKLARRGRMPVILATREAEAGESLNPGGGGCGWANITPLHSNLGNKSKSPSKKRAVYTTLICPWASDLNILLNSKNTNKLNLKARRSIIVIRHPCVFKLEFSDGLRKIKEIIVISMTQLFNLNKLSWRLEYFYYLFSCEMGNVLTFITKFEGDTLYVEFEVLMKYKSRGQVLTSVIPALWEAKAHRSLEVRSLRPAWPHGENPSLTKNTKISWMWWCGPVIPATREAEAGNRLNLAGRGCGEPRLRHCTPAWTRE

SEQ ID NO: 879464 - protein, 1236 aa, Homo sapiens
MPLVLVSEKKIIDHEKSPAIFWSKTIGNRMSHSIFKVLLEEFSLVTYIVLKDRLSCSSVPLVFKKFPMCKETSTCYILRIGSYLLNCWHMKARVYESFLKNRSLKILKSEIVSITELRAEFFCLKLIEIDACIYWLPDDSRKALVMYQMKLVVYQMMFVNFLNSLEIVSRSHTTAVIISEHSKRLILFYFIILEVHFLKLQGISLPFYMKRFSFEYFSSLLVAVIDMTNNILVLFVCFLAVNELKRLDRSSGYVAPLLTTVNIPLCSKVENSTVTNSECSVNTLDEYEAVFSLYDTHQLILSGKRRLLSHSYLIKTELVVVQEKATDKTGYILKPLFIENPKNCRINLIEVKSKSYTKFCEDLRAIINSSKPNKESSYISSVVVKTSYLLKKRKNKTQQCPVSSENCFKKLARHSEWPTPVVRAVWEVEVGRLVGAQDFEAAVSHNCTTALQPERQRTRPCLKNKVGEGVQNYTVRSQEVSKFYLFFYVIFNHYLLFQCLNLNYVFKDGVDSKDELGSRYPTYLLYWAYVTYGEVELLFLFNLHENNLYNFLIEIAKLSSSFKILNNNFFFGGKIKEGFLYIEIKMPRPGAVAHACNPNDFGGLRRVDHLRSRVQDQPGQHGETLPLLKVQKLAGRGGSCLYIPATRRLRHENHLNLGGEGCSEPRSCHCTPAWATEQNSLSKKKKKKKDAYRSKVLRCSDSCLKFQHFGSLRQEDHLSSGIQNQPGQYGKTPSLQNISLSLVARVCGPSYLEELRWEGSLEPGRLKLQCAIFTPLHSSLNNKVRSCLKKKKEKLQLTAVIPALWEAKARRSLEVRSLRPANMVSPFSTKNTKISQVSWRVPVIPATREAEEENRLTQEAEITVNQDDTSDSSLGNRLKDSVLKKNKNLYSHNIFSFKLVAFKSLSTNKSCVGQVWWLMLVIPALWEAEAGGSPEVGSSRAAYPICRNPASTKNTKLARRGRMPVILATREAEAGESLNPGGGGCGWANITPLHSNLGNKSKSPSKKRAVYTTLICPWASDLNILLNSKILTKLNLKARRSIIVIRHPCVFKLEFSDGLRKIKEIIVISMTQLFNLNKLSWRLEYFYYLFSCEMGNVLTFITKFEGDTLYVEFEVLMKYKSRGQVLTSVIPALWEAKAHRSLEVRSLRPAWPTWENPSLTKNTKISWMWWCGPVIPATREAEAGESLEPGRQRLRRAKIASLHSGVDKRVRLRHKKKKKRRKVLDSHILKMLVICG

SEQ ID NO: 879465 - protein, 1289 aa, Homo sapiens
MRLLSHSYLIKTELVVVQEKATDKTGYILKPLFIENPKNCRINLIEVKSKSYTKFCEDLRAIINSSKPNKESSYISSVVVKTSYLLKKRKNKTQQCPVSSENCFKKLARHSEWPTPVVRAVWEVEVGRLVGAQDFEAAVSHNCTTALQPERQRTRPCLKNKVGEGVQNYTVRSQEVSKFYLFFYVIFNHYLLFQCLNLNYVFKDGVDSKDELGSRYPTYLLYWAYVTYGEVELLFLFNLHENNLYNFLIYIAKLSSSFKILNNNFFFGGKIKEGFLYIEIKMPRPGAVAHACNPNYFGGLRRVDHLRSRVQDQPGQHGETLPLLKVQKLAGRGGSCLYIPATRRLRHENHLNLGGEGCSEPRSCHCTPAWATEQNSLSKKKKKKKDAYRSKVLRCSDSCLKFQHFGSLRQEDHLSSGIQNQPGQYGKTPSLQNISLSLVARVCGPSYLEELRWEGSLEPGRLKLQGAIFTPLHSSLNNKVRSCLKKKKEKLQLTAVIPALWEAKARRSLEVRSLRPANMVSPFSTKNTKISQVSWRVPVIPATREAEAGESLEPRRQRLQGTKMTPLHSSLGNRLKDSVLKKIKNLYSHNIFSFKLVAFKSLSTNKSCVGQVWWLMLVIPALWEAEAGGSPEVGSSRAAYPICRNPASTKNTKLARRGRMPVILATREAEAGESLNPGGGGCGWANITPLHSNLGNKSKSPSKKRAVYTTLICPWASDLNILLNSKNTNKLNLKARRSIIVIRHPCVFKLEFSDGLRKIKEIIVISMTQLFNLNKLSWRLEYFYYLFSCEMGNVLTFITKFEGDTLYVEFEVLMKYKSRGQVLTSVIPALWEAKAHRSLEVRSLRPAWPHGENPSLTKNTKISWMWWCGPVIPATREAEAGESLEPGRQRLLVSQDCVTALRRGQESETPSQKKKKKKKSIGFTYSQKCSSFVANFIKSSLISYLQSLVNSELALLEVINHIINLEPTLCLLEFLCIIACHHHHNMLVLHYASRGDIHQYLKIWLVRVQWCLQLIDHNTVTDFVSSPVLLLHLTSLLKKRKKIEKILTYIYLLYVVISLIEGSLILNNEVSPQQFIDLVLMYPCVLLYNVDYLAILDFVYKLMHKLILNMAKYKSLMSHLRSFSQKTAFMFLVNFFQCPFPKVAVSSCLQNKETVGMMLLKSFIQCIVCLFHKKSNYSIRDQLGQHSETVSLKKKKKLKISRCGDDTPVVLAIREAEEEDRLSQVFEVRMSYDRTTYTPAWATEQDPNGSWLLCLFSLLSASVYFEQSSVNGLLALESFIIEPYLIYHF

SEQ ID NO: 879466 - protein, 1250 aa, Homo sapiens; identical to SEQ ID NO: 879463

SEQ ID NO: 879467 - protein, 1250 aa, Homo sapiens; identical to SEQ ID NO: 879463

SEQ ID NO: 879468 - protein, 1250 aa, Homo sapiens; identical to SEQ ID NO: 879463

SEQ ID NO: 879469 - protein, 489 aa, Homo sapiens
AEDVNEEQDYYPLPAGIIDEYFYVNEQSGESQWEFPDGEEEEEESQAQENRDETLAKQTLKDKTGTDSNSTESSETSTVGIEMGDWQEVWDENTGCYYYWNTQTNEVTWELPQYLATQVQGLQHYQPSSVPGAETSFVVNTDIYSKEKTISVSSSKSGPVIAKREVKKEVNEGIQALSNSEEEKKGVAASLLAPLLPEGIKEEEERWRRKVICKEEPVSEVKETSTTVEEATTIVKPQEIMLDNIEDPSQEDLCSVVQSGESEEEEEQDTLELELVLERKKAELRALEEGDGSVSGSSPRSDISQPASQDGMRRLMSKRGKWKMFVRATSPESTSRSSSKTGRDTPENGETAIGAENSEKIDENSDKEMEVEESPEKIKVQTTPKVEEEQDLKFQIGELANTLTSKFEFLGINRQSISNFHVLLLQTETRIADWREGALNGNYLKRKLQDAAEQLKQYEINATPKGWSCHWDRYALFSPFHLSPLTSQT

SEQ ID NO: 879470 - protein, 1250 aa, Homo sapiens; identical to SEQ ID NO: 879463

SEQ ID NO: 879471 - protein, 883 aa, Homo sapiens
AEDVNEEQDYYPLPAGIIDEYFYVNEQSGESQWEFPDGEEEEEESQAQENRDETLAKQTLKDKTGTDSNSTESSETSTVGIEMGDWQEVWDENTGCYYYWNTQTNEVTWELPQYLATQVQGLQHYQPSSVPGAETSFVVNTDIYSKEKTISVSSSKSGPVIAKREVKKEVNEGIQALSNSEEEKKGVAASLLAPLLPEGIKEEEERWRRKVICKEEPVSEVKETSTTVEEATTIVKPQEIMLDNIEDPSQEDLCSVVQSGESEEEEEQDTLELELVLERKKAELRALEEGDGSVSGSSPRSDISQPASQDGMRRLMSKRGKWKMFVRATSPESTSRSSSKTGRDTPENGETAIGAENSEKIDENSDKEMEVEESPEKIKVQTTPKVEEEQDLKFQIGELANTLTSKFEFLGINRQSISNFHVLLLQTETRIADWREGALNGNYLKRKLQDAAEQLKQYEINATPKGWSCHWDRDHRRYFYVNEQSGESQWEFPDGEEEEEESQAQENRDETLAKQTLKDKTGTDSNSTESSETSTGSLCKESFSGQVSSSSLMPLTPFWTLLQSNVPVLQPPLPLEMPPPPPPPPESPPPPPPPPPPAEDGEIQEVEMEDEGSEEPPAPGTEEDTPLKPSAQTTVVTSQSSVDSTISSSSSTKGIKRKATEISTAVVQRSATIGSSPVLYSQSAIATGHQAAGIGNQATGIGHQTIPVSLPAAGMGHQARGMSLQSNYLGLAAAPAIMSYAECSVPIGVTAPSLQPVQARGAVPTATIIEPPPPPPPPPPPPPPAPKMPPPEKTKKGRKDKAKKSKTKMPSLVKKWQSIQRELDEEDNSSSSEEDRESTAQKRIEEWKQQQLVSGMAERNANFEALPEDWRARLKRRKMAPNT

SEQ ID NO: 879472 - protein, 1250 aa, Homo sapiens; identical to SEQ ID NO: 879463

SEQ ID NO: 879473 - protein, 489 aa, Homo sapiens; identical to SEQ ID NO: 879469

SEQ ID NO: 879474 - protein, 1250 aa, Homo sapiens; identical to SEQ ID NO: 879463

SEQ ID NO: 879475 - protein, 1250 aa, Homo sapiens; identical to SEQ ID NO: 879463

SEQ ID NO: 879476 - protein, 412 aa, Homo sapiens
AEDVNEEQDYYPLPAGIIDEYFYVNEQSGESQWEFPDGEEEEEESQAQENRDETLAKQTLKDKTGTDSNSTESSETSTVGIEMGDWQEVWDENTGCYYYWNTQTNEVTWELPQYLATQVQGLQHYQPSSVPGAETSFVVNTDIYSKEKTISVSSSKSGPVIAKREVKKEVNEGIQALSNSEEEKKGVAASLLAPLLPEGIKEEEERWRRKVICKEEPVSEVKETSTTVEEATTIVKPQEIMLDNIEDPSQEDLCSVVQSGESEEEEEQDTLELELVLERKKAELRALEEGDGSVSGSSPRSDISQPASQDGMRRLMSKRGKWKMFVRATSPESTSRSSSKTGRDTPENGETGNLCFTLNFRVERYRGEGNSCLFLFPLQQNRRLYFYSLGEVLGRKLPSTSLPFPDLFLVEE

SEQ ID NO: 879477 - protein, 374 aa, Homo sapiens
SSPVPLVLEVSLASSETSTVGIEMGDWQEVWDENTGCYYYWNTQTNEVTWELPQYLATQVQGLQHYQPSSVPGAETSFVVNTDIYSKEKTISVSSSKSGPVIAKREVKKEVNEGIQALSNSEEEKKGVAASLLAPLLPEGIKEEEERWRRKVICKEEPVSEVKETSTTVEEATTIVKPQEIMLDNIEDPSQEDLCSVVQSGESEEEEEQDTLELELVLERKKAELRALEEGDGSVSGSSPRSDISQPASQDGMRRLMSKRGKWKMFVRATSPESTSRSSSKTGRDTPENGETAIGAGNSGKNKDEKDKARKKLDPNAILGKKGGQSIPAGSYDRRGAQIPKFPRLEKKGIGGIPIGGKEKGKFGPTGDRRTQVG

SEQ ID NO: 879478 - protein, 1015 aa, Homo sapiens
MGKKSRAVPGRRPILQLSPPGPRGSTPGRDPEPEPDTEPDSTAAVPSQPAPSAATTTAVTAAAASDDSPSEDEQEAVQEVPRVVQNPPKPVMTTRPTAVKATGGLCLLGAYADSDDDDNDVSEKLAQSKETNGNQSTDIDSTLANFLAEIDAITAPQPAAPVGASAPPPTPPRPEPKEAATSTLSSSTSNGTDSTQTSGWQYDTQCSLAGVGIEMGDWQEVWDENTGCYYYWNTQTNEVTWELPQYLATQVQGLQHYQPSSVPGAETSFVVNTDIYSKEKTISVSSSKSGPVIAKREVKKEVNEGIQALSNSEEEKKGVAASLLAPLLPEGIKEEEERWRRKVICKEEPVSEVKETSTTVEEATTIVKPQEIMLDNIEDPSQEDLCSVVQSGESEEEEEQDTLELELVLERKKAELRALEEGDGSVSGSSPRSDISQPASQDGMRRLMSKRGKWKMFVRATSPESTSRSSSKTGRDTPENGETAIGAENSEKIDENSDKEMEVEESPEKIKVQTTPKVEEEQDLKFQIGELANTLTSKFEFLGINRQSISNFHVLLLQTETRIADWREGALNGNYLKRKLQDAAEQLKQYEINATPKGWSCHWDRDHRRYFYVNEQSGESQWEFPDGEEEEEESQAQENRDETLAKQTLKDKTGTDSNSTESSETSTGSLCKESFSGQVSSSSLMPLTPFWTLLQSNVPVLQPPLPLEMPPPPPPPPESPPPPPPPPPPAEDGEIQEVEMEDEGSEEPPAPGTEEDTPLKPSAQTTVVTSQSSVDSTISSSSSTKGIKRKATEISTAVVQRSATIGSSPVLYSQSAIATGHQAAGIGNQATGIGHQTIPVSLPAAGMGHQARGMSLQSNYLGLAAAPAIMSYAECSVPIGVTAPSLQPVQARGAVPTATIIEPPPPPPPPPPPPPPAPKMPPPEKTKKGRKDKAKKSKTKMPSLVKKWQSIQRELDEEDNSSSSEEDRESTAQKRIEEWKQQQLVSGMAERNANFEALPEDWRARLKRRKMAPNT

SEQ ID NO: 879479 - protein, 1210 aa, Homo sapiens
MAYEGKSLRVVSKVIDLLKILKSEIVSITELRAEFFCLKLIEIDACIYWLPDDSRKALVMYQMKLVVYQMMFVNFLNSLEIVSRSHTTAVIISEHSKRLILFYFIILEVHFLKLQGISLPFYMKRFSFEYFSSLLVAVIDMTNNILVLFVCFLAVNELKRLDRSSGYVAPLLTTVNIPLCSKVENSTVTNSECSVNTLDEYEAVFSLYDTHQLILSGKRRLLSHSYLIKTELVVVQEKATDKTGYILKPLFIENPKNCRINLIEVKSKSYTKFCEDLRAIINSSKPNKESSYISSVVVKTSYLLKKRKNKTQQCPVSSENCFKKLARHSEWPTPVVRAVWEVEVGRLVGAQDFEAAVSHNCTTALQPERQRTRPCLKNKVGEGVQNYTVRSQEVSKFYLFFYVIFNHYLLFQCLNLTYVFKDGVDSKDELGSRYPTYLLYWAYVTYGEVELLFLFNLHENNLYNFLIEIAKLSSSFKILNNEFLFGGKIKEGFLYIEIKMPRPGAVAHACNPNTLGELRRVDHLRSRVQDQPGQHGETLPLLKVQKLAGRGGSCLYIPATRRLRHENHLNLGGEGCSEPRSCHCTPAWATEQNSLSKKKKKKKDAYRSKVLRCSDSCLKFQHFGSLRQEDHLSSGIQNQPGQYGKTPSLQNISLSLVARVCGPSYLEELRWEGSLEPGRLKLQCAIFTPLHSSLNNKVRSCLKKKKEKLQLTAVIPALWEAKARRSLEVRSLRPANMVSPFSTKNTKISQVSWRVPVIPATREAEAGESLEPRRQRLQGTKMTPLHSSLGNRLKDSVLKKIKNLYSHNIFSFKLVAFKSLSTNKSCVGQVWWLMLVIPALWEAEAGGSPEVGSSRAAYPICRNPASTKNTKLARRGRMPVILATREAEAGESLNPGGGGCGWANITPLHSNLGNKSKSPSKKRAVYTTLICPWASDLNILLNSKNTNKLNLKARRSIIVIRHPCVFKLEFSDGLRKIKEIIVISMTQLFNLNKLSWRLEYFYYLFSCEMGNVLTFITKFEGDTLYVEFEVLMKYKSRGQVLTSVIPALWEAKAHRSLEVRSLRPAWPHGENPSLTKNTKISWMWWCGPVIPATREAEAGESLEPGRQRLRCAKIASLHSGVDKRVRLRHKKKKKRRKVLDSHILKCSSFVANFIKSSLISYLQSLVNSELALLEVINHIINLEPTLCLLEFLCIIACHHHHKHVGIALCF

SEQ ID NO: 879480 - protein, 1262 aa, Homo sapiens
MLVLYWLPDDSRKALVMYQMKLVVYQMMFVNFLNSLEIVSRSHTTAVIISEHSKRLILFYFIILEVHFLKLQGISLPFYMKRFSFEYFSSLLVAVIDMTNNILVLFVCFLAVNELKRLDRSSGYVAPLLTTVNIPLCSKVENSTVTNSECSVNTLDEYEAVFSLYDTHQLILSGKRRLLSHSYLIKTELVVVQEKATDKTGYILKPLFIENPKNCRINLIEVKSKSYTKFCEDLRAIINSSKPNKESSYISSVVVKTSYLLKKRKNKTQQCPVSSENCFKKLARHSEWPTPVVRAVWEVEVGRLVGAQDFEAAVSHNCTTALQPERQRTRPCLKNKVGEGVQNYTVRSQEVSKFYLFFYVIFNHYLLFQCLNLTYVFKDGVDSKDELGSRYPTYLLYWAYVTYGEVELLFLFNLHENNLYNFLIYIAKLSSSFKILNNNFFFGGKIKEGFLYIEIKMPRPGAVAHACNPNYFGGLRRVDHLRSRVQDQPGQHGETLPLLKVQKLAGRGGSCLYIPATRRLRHENHLNLGGEGCSEPRSCHCTPAWATEQNSLSKKKKKKKDAYRSKVLRCSDSCLKFQHFGSLRQEDHLSSGIQNQPGQYGKTPSLQNISLSLVARVCGPSYLEELRWEGSLEPGRLKLQCAIFTPLHSSLNNKVRSCLKKKKEKLQLTAVIPALWEAKARRSLEVRSLRPANMVSPFSTKNTKISQVSWRVPVIPATREAEEENRLTQEAEITVNQDDTSDSSLGNRLKDSVLKKIKNLYSHNIFSFKLVAFKSLSTNKSCVGQVWWLMLVIPALWEAEAGGSPEVGSSRAAYPICRNPASTKNTKLARRGRMPVILATREAEAGESLNPGGGGCGWANITPLHSNLGNKSKSPSKKRAVYTTLICPWASDLNILLNSKNTNKLNLKARRSIIVIRHPCVFKLEFSDGLRKIKEIIVISMTQLFNLNKLSWRLEYFYYLFSCEMGNVLTFITKFEGDTLYVEFEVLMKYKSRGQVLTSVIPALWEAKAHRSLEVRSLRPAWPHGENPSLTKNTKISWMWWCGPVIPATREAEAGESLEPGRQRLRRAKIASLHSGVDKRVRLRHKKKKKRRKVLDSHILKMLVIVANFIKSSLISYLQSLVNSELALLEVINHIINLEPTLCLLEFLCIIACHHHHNMLVLHYASRGDIHQYLKIWLVRVQWCLQLIDHNTVTDFVSSPVLLLHLTSLLKKRKKIEKILTYIYLLYVVISLIEGSLILNNEVSPQRLLTYSDVVLVYYCIM

SEQ ID NO: 879481 - protein, 1250 aa, Homo sapiens; identical to SEQ ID NO: 879463

SEQ ID NO: 879482 - protein, 883 aa, Homo sapiens; identical to SEQ ID NO: 879471

SEQ ID NO: 879483 - protein, 1514 aa, Homo sapiens
MSSSFKILNNNFFFGGKIKEGFLYIEIKMPRPGAVAHACNPNYFGGLRRVDHLRSRVQDQPGQHGETLPLLKVQKLAGRGGSCLYIPATRRLRHENHLNLGGEGCSEPRSCHCTPAWATEQNSLSKKKKKKKDAYRSKVLRCSDSCLKFQHFGSLRQEDHLSSGIQNQPGQYGKTPSLQNISLSLVARVCGPSYLEELRWEGSLEPGRLKLQCAIFTPLHSSLNNKVRSCLKKKKEKLQLTAVIPALWEAKARRSLEVRSLRPANMVSPFSTKNTKISQVSWRVPVIPATREAEAGESLEPRRQRLQGTKMTPLHSSLGNRLKDSVLKKIKNLYSHNIFSFKLVAFKSLSTNKSCVGQVWWLMLVIPALWEAEAGGSPEVGSSRAAYPICRNPASTKNTKLARRGRMPVILATREAEAGESLNPGGGGCGWANITPLHSNLGNKSKSPSKKRAVYTTLICPWASDLNILLNSKNTNKLNLKARRSIIVIRHPCVFKLEFSDGLRKIKEIIVISMTQLFNLNKLSWRLEYFYYLFSCEMGNVLTFITKFEGDTLYVEFEVLMKYKSRGQVLTSVIPALWEAKAHRSLEVRSLRPAWPHGENPSLTKNTKISWMWWCGPVIPATREAEAGESLEPGRQRLRRAKIASLHSGVDKRVRLRHKKKKKRRKVLDSHILKCSSFVANFIKSSLISYLQSLVNSELALLEVINHIINLEPTLCLLEFLCIIACHHHHNMLVLHYASRGDIHQYLKIWLVRVQWCLQLIDHNTVTDFVSSPVLLLHLTSLLKKRKKIEKILTYIYLLYVVISLIEGSLILKIKLVLNVYCLSSDVVLVYYCIMYDYLAILDFVYKLMHKLILNMAKYKSLMSHLRSFSQKTAFMFLVNFFQCPFPKVAVSSCLQNKETVGMMLLKSFIQCIVCLFHKKKNYSIRDQLGQHSETVSLKKKKKLKISRCGDATPVVLAIREAEEEDRLSQVFEVRMSYDRTTYTPAWATEQDPNGSWLLCLFSLLSASVYFEQSSVNGLLALESFIIEPYLIYHFVTMKFNSDFFWVSTPGEVIFFLTEMSKALGFLVSHQDILVKQQVSDEESDLSSSSGLATNIDMILGKLVPAWVSLPLTEEVEIDDFSCLFYSYNSMILGRKSPSTFLGYISNSPIYCETSLLTIRGLGKATSSLCKESFSGQVSSSSLMPLTPFWTLLQSNVPVLQPPLPLEMPPPPPPPPESPPPPPPPPPPAEDGEIQEVEMEDEGSEEPPAPGTEEDTPLKPSAQTTVVTSQSSVDSTISSSSSTKGIKRKATEISTAVVQRSATIGSSPVLYSQSAIATGHQAAGIGNQATGIGHQTIPVSLPAAGMGHQARGMSLQSNYLGLAAAPAIMSYAECSVPIGVTAPSLQPVQARGAVPTATIIEPPPPPPPPPPPPPPAPKMPPPEKTKKGRKDKAKKSKTKMPSLVKKWQSIQRELDEEDNSSSSEEDRESTAQKRIEEWKQQQLVSGMAERNANFEALPEDWRARLKRRKMAPNT

SEQ ID NO: 879484 - protein, 659 aa, Homo sapiens
MAKYKSLMSHLRSFSQKTAFMFLVNFFQCPFPKVAVSSCLQNKETVGMMLLKSFIQCIVCLFHKKSNYSIRDQLGQHSETVSLKKKKKLKISRCGDATPVVLAIREAEEEDRLSQVFEVRMSYDRTTYTPAWATEQDPNGSWLLCLFSLLSASVYFEQSSVNGLLALESFIIEPYLIYHFVTMKFNRYFFWVSTPGEVIFFLTEMSKALGFLVSHQDILVKQQVSDEESDLSSSSGLATNIDMILGKLVPAWVSLPLTEEVEIDDFSCLFYSYNSMILGRKSPSTFLGYISNSPIYCETSLLTIRGLGKATSSLCKESFSGQVSSSSLMPLTPFWTLLQSNVPVLQPPLPLEMPPPPPPPPESPPPPPPPPPPAEDGEIQEVEMEDEGSEEPPAPGTEEDTPLKPSAQTTVVTSQSSVDSTISSSSSTKGIKRKATEISTAVVQRSATIGSSPVLYSQSAIATGHQAAGIGNQATGIGHQTIPVSLPAAGMGHQARGMSLQSNYLGLAAAPAIMSYAECSVPIGVTAPSLQPVQARGAVPTATIIEPPPPPPPPPPPPPPAPKMPPPEKTKKGRKDKAKKSKTKMPSLVKKWQSIQRELDEEDNSSSSEEDRESTAQKRIEEWKQQQLVSGMAERNANFEALPEDWRARLKRRKMAPNT

SEQ ID NO: 879485 - protein, 480 aa, Homo sapiens
AEDVNEEQDYYPLPAGIIDEYFYVNEQSGESQWEFPDGEEEEEESQAQENRDETLAKQTLKDKTGTDSNSTESSETSTVGIEMGDWQEVWDENTGCYYYWNTQTNEVTWELPQYLATQVQGLQHYQPSSVPGAETSFVVNTDIYSKEKTISVSSSKSGPVIAKREVKKEVNEGIQALSNSEEEKKGVAASLLAPLLPEGIKEEEERWRRKVICKEEPVSEVKETSTTVEEATTIVKPQEIMLDNIEDPSQEDLCSVVQSGESEEEEEQDTLELELVLERKKAELRALEEGDGSVSGSSPRSDISQPASQDGMRRLMSKRGKWKMFVRATSPESTSRSSSKTGRDTPENGETAIGAENSEKIDENSDKEMEVEESPEKIKVQTTPKVEEEQDLKFQIGELANTLTSKFEFLGINRQSISNFHVLLLQTETRIADWREGALNGNYLKRKLQDAAEQLKQYEINATPKGWSCHWDRTSGSNYS

SEQ ID NO: 879486 - protein, 1250 aa, Homo sapiens; identical to SEQ ID NO: 879463

SEQ ID NO: 879487 - protein, 1250 aa, Homo sapiens; identical to SEQ ID NO: 879463

SEQ ID NO: 879488 - protein, 1250 aa, Homo sapiens; identical to SEQ ID NO: 879463

SEQ ID NO: 879489 - protein, 99 aa, Homo sapiens
RGSLGLQDFGTRKEGMTAKKSKTKMPSLVKKWQSIQRELDEEDNSSSSEEDRESTAQKRIEEWKQQQLVSGMAERNANFEALPEDWRARLKRRKMAPNT

SEQ ID NO: 879490 - protein, 478 aa, Homo sapiens
AEDVNEEQDYYPLPAGIIDEYFYVNEQSGESQWEFPDGEEEEEESQAQENRDETLAKQTLKDKTGTDSNSTESSETSTVGIEMGDWQEVWDENTGCYYYWNTQTNEVTWELPQYLATQVQGLQHYQPSSVPGAETSFVVNTDIYSKEKTISVSSSKSGPVIAKREVKKEVNEGIQALSNSEEEKKGVAASLLAPLLPEGIKEEEERWRRKVICKEEPVSEVKETSTTVEEATTIVKPQEIMLDNIEDPSQEDLCSVVQSGESEEEEEQDTLELELVLERKKAELRALEEGDGSVSGSSPRSDISQPASQDGMRRLMSKRGKWKMFVRATSPESTSRSSSKTGRDTPENGETAIGAENSEKIDENSDKEMEVEESPEKIKVQTTPKVEEEQDLKFQIGELANTLTSKFEFLGINRQSISNFHVLLLQTEVSLFFFFFGHKQLSFWNEMLYVLTILSCLHFKPKFKFLTLEEYLSRQSRK

SEQ ID NO: 879491 - protein, 102 aa, Homo sapiens
AASGRWAGSPYPTQVGLRHPGRCWDGDGFSYLHKNKGSCSTQSRGDERGERGCQANFSSSTIKTALIMQETTVSPQIGCVEVDAALGLPRCLRAAAWSPPSP

SEQ ID NO: 879492 - protein, 109 aa, Homo sapiens
MILDEPPPSATFPKLQGRLRPPLPAVTLGLHHAHGFHSCQRRAADPVSLSHLLPPAPGDRPPPALAALELRVGPPCTVGPASIQALRVAVATASAWHHLPVPRPGAQSP

SEQ ID NO: 879493 - protein, 89 aa, Homo sapiens
ILAASMGPSYGLLMEWWGANPQLAQIQHHWTQTCHLLRVRKEEDLLPLFPLVAQSTGYRREVSELEGDVRSPSPTPRGPGSTWLSLYEL

SEQ ID NO: 879494 - protein, 117 aa, Homo sapiens
MSTGVWTEGVGYSGRRLLVMCHGFHPLLHPQPFLYQAGTPSPGAPHLLVSWLALEAAVGHLLHPAPPLPPCSLSAPLFTCCPASILPIPLCRCLPGDSGEISAPVQVITFKWKLAFI

SEQ ID NO: 879495 - protein, 109 aa, Homo sapiens
MTSEVIEDEKQFYSKAKTYWKQIPPTVDGMLGGYGHISSIDINSSRKFLQRFLRVGRSGVLSRRGCGSGGTAESMWGATFYTCNTAGSLAISWYLPQSLEELGWVGTVG

SEQ ID NO: 879496 - protein, 81 aa, Homo sapiens
MCLRCLSYLGFLGCLGFLALTGVPGVSGVAGVPGVPGISGVPFVSVVSGVPGVSGVPASRQLWAGPEPLEHRGHFSPNAED

SEQ ID NO: 879497 - protein, 106 aa, Homo sapiens
MAPSSGRGLGSPCCHCWLCHPILFMAAGWVRSMVEPGPSQGCGENLLSSSRASPEASNQKGCVSCSNSAPETAQSQKAPRDSSEPEGTPRQLRARRHRGLWPKWGS

SEQ ID NO: 879498 - protein, 106 aa, Homo sapiens; identical to SEQ ID NO: 879497

SEQ ID NO: 879499 - protein, 126 aa, Homo sapiens
MSDHFTFLPHGELTHWGLFFPLEKCGYWKFPVFGKNRIGGALWGVLLPSSLLKASWCSGSTSDTRRRFSFILRPHSISATQISSGSGASTFRGSSSNDSSDSSHHSIFLFQQKDLCGGLGSTPGAE

SEQ ID NO: 879500 - protein, 92 aa, Homo sapiens
TGSVCATLPSSRGFQFPLGSVGDVRALRTSPVPVTKRLLPRLWDNALEDLRVDGRGCEDYRCVEVETDVVSNTSGSARVKLVTTDILMEASR

SEQ ID NO: 879501 - protein, 307 aa, Homo sapiens
EGTRADDVRLVGQLGSMASVTLSEAEKVYIVHGVQEDLRVDGRGCEDYRCVEVETDVVSNTSGSARVKLGHTDILVGVKAEMGTPKLEKPNEGYLEFFVDCSASATPEFEGRGGDDLGTEIANTLYRIFNNKSSVDLKTLCISPREHCWVLYVDVLLLECGGNLFDAISIAVKAALFNTRIPRVRVLEDEEGSKDIELSDDPYDCIRLSVENVPCIVTLCKIGYRHVVDATLQEEACSLASLLVSVTSKGVVTCMRKVGKGSLDPESIFEMMETGKRVGKVLHASLQSVLHKEESLGPKRQKVGFLG

SEQ ID NO: 879502 - protein, 307 aa, Homo sapiens; identical to SEQ ID NO: 879501

SEQ ID NO: 879503 - protein, 307 aa, Homo sapiens; identical to SEQ ID NO: 879501

SEQ ID NO: 879504 - protein, 307 aa, Homo sapiens; identical to SEQ ID NO: 879501

SEQ ID NO: 879505 - protein, 562 aa, Homo sapiens
EGTRADDVRLVGQLGSMASVTLSEAEKVYIVHGVQEDLRVDGRGCEDYRCVEVETDVVSNTSGSARVKLGHTDILVGVKAEMGTPKLEKPNEGYLEFFVDCSASATPEFEGRGGDDLGTEIANTLYRIFNNKSSVDLKTLCISPREHCWVLYVDVLLLECGGNLFDAISIAVKAALFNTRIPRVRVLEDEEGSKDIELSDDPYDCIRLSVENVPCIVTLCKIGYRHVVDATLQEEACSLASLLVSVTSKGVVTCMRKVGKGSLDPESIFEMMETGKRVGKVLHASLQSVLHKDQLLNCGLFFTFPFKPVRIYFSSLLRIYSSICTCKIKGYFLVKKKKKKIGGINARGRETRGHTNGPMGHSWYHGPISRAQRANPAGHPIGEPDKFRIRPEVKPGIKKERWEKRRREQRDRGGTREKHETEDGDDDHREQHRKRAGERRDDTDDRHRQQSTEKEGERQQPEEGAATSATGRGKPEANHAREEKEEGRNGEEGGGAREEKRARKTAERTARRKREQTEEEGRGEQRLAEEEKDGERSGAKGKREERGKGGERTKALRKEEEE

SEQ ID NO: 879506 - protein, 378 aa, Homo sapiens
RSLGSYNLMSSVFYIKSLVMTTPERGLKNVGPGNELPCILLRLCLHLLTYGVVLLSEFFIPSLAEFWRQSYLFFLMPFLCQYQLQSQWSRDVAIGLKRPAIIEVPQEDLRVDGRGCEDYRCVEVETDVVSNTSGSARVKLGHTDILVGVKAEMGTPKLEKPNEGYLEFFVDCSASATPEFEGRGGDDLGTEIANTLYRIFNNKSSVDLKTLCISPREHCWVLYVDVLLLECGGNLFDAISIAVKAALFNTRIPRVRVLEDEEGSKDIELSDDPYDCIRLSVENVPCIVTLCKIGYRHVVDATLQEEACSLASLLVSVTSKGVVTCMRKVGKGSLDPESIFEMMETGKRVGKVLHASLQSVLHKEESLGPKRQKVGFLG

SEQ ID NO: 879507 - protein, 214 aa, Homo sapiens
LEDPTIDTSASATPEFEGRGGDDLGTEIANTLYRIFNNKSSVDLKTLCISPREHCWVLYVDVLLLECGGNLFDAISIAVKAALFNTRIPRVRVLEDEEGSKDIELSDDPYDCIRLSVENVPCIVTLCKIGYRHVVDATLQEEACSLASLLVSVTSKGVVTCMRKVGKGSLDPESIFEMMETGKRVGKVLHASLQSVLHKEESLGPKRQKVGFLG

SEQ ID NO: 879508 - protein, 140 aa, Homo sapiens
MASRTRVEKCWTWIPRVRVLEDEEGSKDIELSDDPYDCIRLSVENVPCIVTLCKIGYRHVVDATLQEEACSLASLLVSVTSKGVVTCMRKVGKGSLDPESIFEMMETGKRVGKVLHASLQSVLHKEESLGPKRQKVGFLG

SEQ ID NO: 879509 - protein, 307 aa, Homo sapiens; identical to SEQ ID NO: 879501

SEQ ID NO: 879510 - protein, 307 aa, Homo sapiens; identical to SEQ ID NO: 879501

SEQ ID NO: 879511 - protein, 307 aa, Homo sapiens; identical to SEQ ID NO: 879501

SEQ ID NO: 879512 - protein, 307 aa, Homo sapiens; identical to SEQ ID NO: 879501

SEQ ID NO: 879513 - protein, 302 aa, Homo sapiens
  misc_feature (1)..(1): Xaa can be any naturally occurring amino acid
XYKKQAVPVRYSRIVTLSEAEKVYIVHGVQEDLRVDGRGCEDYRCVEVETDVVSNTSGSARVKLGHTDILVGVKAEMGTPKLEKPNEGYLEFFVDCSASATPEFEGRGGDDLGTEIANTLYRIFNNKSSVDLKTLCISPREHCWVLYVDVLLLECGGNLFDAISIAVKAALFNTRIPRVRVLEDEEGSKDIELSDDPYDCIRLSVENVPCIVTLCKIGYRHVVDATLQEEACSLASLLVSVTSKGVVTCMRKVGKGSLDPESIFEMMETGKRVGKVLHASLQSVLHKEESLGPKRQKVGFLG

SEQ ID NO: 879514 - protein, 321 aa, Homo sapiens
  misc_feature (50)..(50): Xaa can be any naturally occurring amino acid
EGTRADDVRLVGQLGSMASVTLSEAEKVYIVHGVQEDLRVDGRGCEDYRXLFDKVGGQKKTPGNCWVDSQNPPKWVLPRVQSLGHTDILVGVKAEMGTPKLEKPNEGYLEFFVDCSASATPEFEGRGGDDLGTEIANTLYRIFNNKSSVDLKTLCISPREHCWVLYVDVLLLECGGNLFDAISIAVKAALFNTRIPRVRVLEDEEGSKDIELSDDPYDCIRLSVENVPCIVTLCKIGYRHVVDATLQEEACSLASLLVSVTSKGVVTCMRKVGKGSLDPESIFEMMETGKRVGKVLHASLQSVLHKEESLGPKRQKVGFLG

SEQ ID NO: 879515 - protein, 265 aa, Homo sapiens
EGTRADDVRLVGQLGSMASVTLSEAEKVYIVHGVQEDLRVDGRGCEDYRCVEVETDVVSNTSGSARVKLGHTDILVGVKAEMGTPKLEKPNEGYLEFFVDCSASATPEFEGRGGDDLGTEIANTLYRIFNNKSSVDLKTLCISPREHCWVLYVDVLLLECGGNLFDAISIAVKAALFNTRIPRVRVLEDEEGSKDIELSDDPYDCIRLSVENVPCIVTLCKIGYRHLRDDETGKRVGKVLHASLQSVLHKEESLGPKRQKVGFLG

SEQ ID NO: 879516 - protein, 297 aa, Homo sapiens
NAHTPTRPSQGVGVGFFSGNCSQLPVITSIKPGFPVPARKRGDVRALRTSPVPVTKRLLPRLWDNALEDLRVDGRGCEDYRCVEVETDVVSNTSGSARVKLGHTDILVGVKAEMGTPKLEKPNEGYLEFFVDCSASATPEFEGRGGDDLGTEIANTLYRIFNNKSSVDLKTLCISPREHCWVLYVDVLLLECGGNLFDAISIAVKAALFNTRIPRVRVLEDEEGSKDIELSDDPYDCIRLSVENVPCIVTLCKIGYRHLRDDETGKRVGKVLHASLQSVLHKEESLGPKRQKVGFLG

SEQ ID NO: 879517 - protein, 71 aa, Homo sapiens
MNEAPGPINFTMFGEKLNGTDPEDVIRNASACFDEEATGTIQEDYLRELMTTMGDQFTDEEVDELHREAPI

SEQ ID NO: 879518 - protein, 35 aa, Homo sapiens
MVGGPSCEVLLCDEEWIGNLLNQQSDHILVKKSCY

SEQ ID NO: 879519 - protein, 95 aa, Homo sapiens
ERRVKCPQVDRGWDPRKASEVEVKNEIVANVGKREILHNTEKEQHTEDTVKDCVDIEVFTAGENTEDQKSSEDTAPFLGTLAGATYEEQVQSQIL

SEQ ID NO: 879520 - protein, 108 aa, Homo sapiens
MTRVPQAPPPTGPGPVVPPCANTKSPRPLPAPPVDSASWRLSNPLPVPILCWPQPAPSSPVLPINSRVGPDLVPLPSPSTVPNWPETGHRKPMNAPPQWPTEGSLCLS

SEQ ID NO: 879521 - protein, 152 aa, Homo sapiens
MVNDPPVPALLWAQEVGHVLAGRARMLLLPFGGLFCTILLLLWVSVFLYGSFYYSYMPTVSHLSPVHFYYRTDCDSSSSSLCSFPVANVSLTKGGRDRVLMYGQPYRVTLELELPEPCESRLGMCLVTISWYTRGGRIISISSRTVMLYYRS

SEQ ID NO: 879522 - protein, 153 aa, Homo sapiens
MVNDPPGTCLTCGPTEVGHVLAGRARMLLLPFGGLFCTILLLLWVSVFLYGSFYYSYMPTVSHLSPVHFYYRTDCDSSSSSLCSFPVANVSLTKGGRDRVLMYGQPYRVTLELELPEPCESRLGMCLVTISWYTRGGRIISISSRTVMLYYRS

SEQ ID NO: 879523 - protein, 153 aa, Homo sapiens; identical to SEQ ID NO: 879522

SEQ ID NO: 879524 - protein, 157 aa, Homo sapiens
GTQAMPPLFSLGYHQCRWNYEDEQDVKAVDAGFDEHDIPYDAMWLDIEHTEGKRYFTWDKNRFPNPKRMQELLRSKKRKLVVISDPHIKIDPDYSVYVKAKDQGFFVKNQEGEDFEGVCWPGLSSYLDFTNPKVREWYSSLFAFPVYQVGFYSFVLF

SEQ ID NO: 879525 - protein, 213 aa, Homo sapiens
GTQAMPPLFSLGYHQCRWNYEDEQDVKAVDAGFDEHDIPYDAMWLDIEHTEGKRYFTWDKNRFPNPKRMQELLRSKKRKLVVISDPHIKIDPDYSVYVKAKDQGFFVKNQEGEDFEGVCWPGLSSYLDFTNPKVREWYSSLFAFPVYQGSTDILFLWNDMNEPSVFRGPEQTMQKNAIHHGNWEHRELHNIYGFYHVRHPKRIKLGLCDPPFG

SEQ ID NO: 879526 - protein, 262 aa, Homo sapiens
GTQAMPPLFSLGYHQCRWNYEDEQDVKAVDAGFDEHDIPYDAMWLDIEHTEGKRYFTWDKNRFPNPKRMQELLRSKKRKLVVISDPHIKIDPDYSVYVKAKDQGFFVKNQEGEDFEGVCWPGLSSYLDFTNPKVREWYSSLFAFPVYQGSTDILFLWNDMNEPSVFRGPEQTMQKNAIHHGNWEHRELHNIYGFYHQMATAEGLIKRSKGKERPFVLTRSFFAGSQKYGAVWTGDNTAEWSNLKISIPMLLTLSITGISFCG

SEQ ID NO: 879527 - protein, 103 aa, Homo sapiens
VQWRDLGSLQPRPPGFKRFSFLSLQSSWDYRHVPPCPANFYIFSRDGVSPCWPRCSQSPDLVIRLPPKCWDYRREPPRPALRSHFYGEREQQLNHRFIFKSVH

SEQ ID NO: 879528 - protein, 133 aa, Homo sapiens
FLLVPAGENSFAENFSLSMGSVLNQQYTSGASKGGGEEPGKLPEPAEEESQVLRGTGHCKWFNVRMGFGFISMINREGSPLDIPVDVFVHQSKLFMEGFRSLKEGEPVEFTFKKSSKGLESIRVTGPGGSPCL

SEQ ID NO: 879529 - protein, 231 aa, Homo sapiens
DDSFSEAHSEFLKAASNLRDNYRFAHTNVESLVNEYDDNGDGIILFRPSHLTNKLEDKTVAYTVQKMTSGKIKKFIQENIFGICPHMTEDNKDLIQGKDLLIAYYDVDYEKNAKGSNYWRNRVMMVAKKFLDAGHKLNFAVASRKTFSHELSDFGLESTAGEIPVVAIRTAKGEKFVMQEDFSRDGNALERFLQDYFDGNLKRYLKSEPIPESNDGPVKVVVAENFECDMK

SEQ ID NO: 879530 - protein, 301 aa, Homo sapiens
DDSFSEAHSEFLKAASNLRDNYRFAHTNVESLVNEYDDNGDGIILFRPSHLTNKLEDKTVAYTVQKMTSGKIKKFIQENIFGICPHMTEDNKDLIQGKDLLIAYYDVDYEKNAKGSNYWRNRVMMVAKKFLDAGHKLNFAVASRKTFSHELSDFGLESTAGEIPVVAIRTAKGEKFVMQEDFSRDGNALERFLQDYFDGNLKRYLKSEPIPESNDGPVKVVVAENFDEIVNNENKDVLIEFYAPWCGHCKNLEPKYKELGEKLSKDLNIVIAKMDATANDVPSPYEVRVFLPYTSLQPTRS

SEQ ID NO: 879531 - protein, 283 aa, Homo sapiens
DDSFSEAHSEFLKAASNLRDNYRFAHTNVESLVNEYDDNGDGIILFRPSHLTNKLEDKTVAYTVQKMTSGKIKKFIQENIFGICPHMTEDNKDLIQGKDLLIAYYDVDYEKFLDAGHKLNFAVASRKTFSHELSDFGLESTAGEIPVVAIRTAKGEKFVMQEDFSRDGNALERFLQDYFDGNLKRYLKSEPIPESNDGPVKVVVAENFDEIVNNENKDVLIEFYAPWCGHCKNLEPKYKELGEKLSKDLNIVIAKMDATANDVPSPYEVRVFLPYTSLQPTRS

SEQ ID NO: 879532 - protein, 193 aa, Homo sapiens
MLVEFFAPWCGHCKRLAPEYEAAATRLKGIVPLAKADCTANTNTCNKYGVSGYPTLNMFRDGEEAGAYDGPRTADGIVSHLKKQAGPASVPLRTEEEFKKFISDKDASIVGFFDDSFSEAHSEFLKAASNLRDNYRFAHTNVESLVNEYDDNGDGIILFRPSHLTNKLEDKTVAYTVQKMTSGKIKKFIQENI

SEQ ID NO: 879533 - protein, 165 aa, Homo sapiens
MVNPTVFFDIAVDGEPLGRVSFELFADKVPKTAENFRALSTGEKGFGYKGSCFHRIIPGFMCQGGDFTRHNGTGGKSIYGEKFEDENFILKHTGPGILSMANAGPNTNGSQFFICTAKTEWLDGKHVVFGKVKEGMNIVEAMERFGSRNGKTSKKITIADCGQLE

SEQ ID NO: 879534 - protein, 118 aa, Homo sapiens
RASASPGPRRPPCCGGEGRLAATAADGGGGPRAFGTSLEGAEPRAPASPRPPGGGVHGPGSRRAWGRDAVRRFRDCPAAAARRLLSPPRFPSALPGLKAAKLRLRKKRENCNPCLQPD

SEQ ID NO: 879535 - protein, 133 aa, Homo sapiens
MMEIRNDALTHTGIVDWYTHHQADKRMSLDHTIQAPHARVKTQKIALLSLERSMMRTLLYVEELLFSYTQEVENQMIDPYGDQRIADRSNKDLYSSVWNSPRVARSHLLLTPPLSNPLQDCHLCIGHALCKST

SEQ ID NO: 879536 - protein, 64 aa, Homo sapiens
MDPPFYLPTLSLVMRHHISSHSLGHQSHCPLPWMPSNVCLLVGDCEDTRIQYSWPRGPLLTIGC

SEQ ID NO: 879537 - protein, 102 aa, Homo sapiens
HPLEKPRHRVGWELPSRPRPHIRKAWLAGFSGPWAPAQDPGGPVCLLSLRSLVPSPPLLARGRRDCACTTSPGPRPVSPGPGVNRALARSSDRSAPAAVLTV

SEQ ID NO: 879538 - protein, 102 aa, Homo sapiens; identical to SEQ ID NO: 879537

SEQ ID NO: 879539 - protein, 102 aa, Homo sapiens
MKFRNNLELFKPGIWKKLTLLFSGKRQESASKSPGSNHGSTVMPLEHEVLQEDAIGMASIPGPGEQPETRRVAQEGTGSQCYTVACQSQSQDLITGSPINQS

SEQ ID NO: 879540 - protein, 102 aa, Homo sapiens; identical to SEQ ID NO: 879539

SEQ ID NO: 879541 - protein, 236 aa, Homo sapiens
MCVCAGCRAAPSRRGAGPLQVAGGWSEGADMDYDSYQHYFYDYDCGEDFYRSTAPSEDIWKKFELVPSPPTSPPWGLGPGAGDPAPGIGPPEPWPGGCTGDEAESRGHSKGWGRNYASIIRRDCMWSGFSARERLERAVSDRLAPGAPRGNPPKASAAPDCTPSLEAGNPAPAAPCPLGEPKTQACSGSESPSDSGKDLPEPSKRGPPHGWPKLCPCLRSGIGSSQALGPSPPLFG

SEQ ID NO: 879542 - protein, 394 aa, Homo sapiens [sequence omitted]

SEQ ID NO: 879543 - protein, 236 aa, Homo sapiens; identical to SEQ ID NO: 879541

SEQ ID NO: 879544 - protein, 272 aa, Homo sapiens
GCRAAPSRRGAGPLQVAGGWSEVRLRVARARARVPRCGLAAGCLLGTARPRPAPPGPGSCAPGGAGKVCFELAAHSRVRALRLASPTTLTRGPASRDARTGRRLQAGGVGEEREPGSRLCRGTRGHLLRPAGTRSARPPFPPAGADMDYDSYQHYFYDYDCGEDFYRSTAPSEDIWKKFELVPSPPTSPPWGLGPGAGDPAPGIGPPEPWPGGCTGDEAESRGHSKGWGRNYASIIRRDCMWSGFSARERLERAVSDRLAPGAPRGNPPKAS

SEQ ID NO: 879545 - protein, 98 aa, Homo sapiens
IFCISRLLCSHGAPVAPMTPYLMLCQPHKRCGDKFYDPLQHCCYDDAVVPLARTQTCGNCTFRVCFEQCCPWTFMVKLINQNCDSARTSDDRLCRSVS

SEQ ID NO: 879546 - protein, 72 aa, Homo sapiens
PSSIPLSLFYDPLQHCCYDDAVVPLARTQTCGNCTFRVCFEQCCPWTFMVKLINQNCDSARTSDDRLCRSVS

SEQ ID NO: 879547 - protein, 38 aa, Homo sapiens
LPGDPRLGPTCHYLLDLTSSVSSSGPHDSLPDAVPATQ

SEQ ID NO: 879548 - protein, 190 aa, Homo sapiens
MWQEAMRRRRYLRDRSEEAAGGGDGLPRSRDWLYESYYCMSQQHPLIVFLLLIVMGSCLALLAVFFALGLEVEDHVAFLITVPTALAIFFAIFILVCIESVFKKLLRLFSLVIWICLVAMGYLFMCFGGTVSPWDQVSFFLFIIFVVYTMLPFNMRDAIIASVLTSSSHTIVLSVCLSATPGGKEHLVWQ

SEQ ID NO: 879549 - protein, 136 aa, Homo sapiens
MRRRRYLRDRSEEAAGGGDGLPRSRDWLYESYYCMSQQHPLIVFLLLIVMGSCLALLAVFFALGLVSGLPAVSSAAPSPALRGARPAEPRPAPGCPSARGSPSARGSLLLLLARGPVDSGKGCGREKSFLGRLFPK

SEQ ID NO: 879550 - protein, 246 aa, Homo sapiens
EQVGSIKERYDHRLMLKHLPPEFSIFLDHISSLDYFTKPDYQLLTSVFDNSIKTFGVIESDPFDWEKTGNDGSLTTTTTSTTPQLHTRLTPAAIGIANATPIPGDLLRENTDEVFPDEQLSDGENGIPVGVSPDKLPGSLGHPRPQEKDVWEEMDANKNKIKLGICKAATEEENSHGQANGLLNAPSLGSPIRVRSEITQPDRDIPLVRKLRSIHSFELEKRLTLEPKPDTDKFLETWYKIVYFSF

SEQ ID NO: 879551 - protein, 177 aa, Homo sapiens
MAWMLLLILIMVHPGSCALWVSQPPEIRTLEGSSAFLPCSFNASQGRLAIGSVTWFRDEVVPGKEVRNGTPEFRGRLAPLASSRFLHDHQAELHIRDVRGHDASIYVCRVEVLGLGVGTGNGTRLVVEKEHPQLGAGTVLLLRAGFYAVSFLSVAVGSTVYYQGKYAKSTLSGFPQL

SEQ ID NO: 879552 - protein, 190 aa, Homo sapiens
MAWMLLLILIMVHPGSCALWVSQPPEIRTLEGSSAFLPCSFNASQGRLAIGSVTWFRDEVVPGKEVRNGTPEFRGRLAPLASSRFLHDHQAELHIRDVRGHDASIYVCRVEVLGLGVGTGNGTRLVVEKEHPQLGAGTVLLLRAGFYAVSFLSVAVGSTVYYQGKCHCHMGTHCHSSDGPRGVIPEPRCP

SEQ ID NO: 879553 - protein, 201 aa, Homo sapiens
MAWMLLLILIMVHPGSCALWVSQPPEIRTLEGSSAFLPCSFNASQGRLAIGSVTWFRDEVVPGKEVRNGTPEFRGRLAPLASSRFLHDHQAELHIRDVRGHDASIYVCRVEVLGLGVGTGNGTRLVVEKEHPQLGAGTVLLLRAGFYAVSFLSVAVGSTVYYQGKCLTWKGPRRQLPAVVPAPLPPPCGSSAHLLPPVPGG

SEQ ID NO: 879554 - protein, 504 aa, Homo sapiens
MLAFSEPYEFVSLEWLQKWLDESTPTKPIDNHACLCSHDKLHPDKISIMKRISEYAADIFYSRYGGGPRLTVKALCKECVVERCRILRLKNQLNEDYKTVNNLLKAAVKGDGFWVGKSSLRSWRQLALEQLDEQDGDAEQSNGKMNGSTLNKDESKEERKEEEELNFNEDILCPHGELCISENERRLVSKEAWSKLQQYFPKAPEFPSYKECCSQCKILEREGEENEALHKMIANEQKTSLPNLFQDKNRPCLSNWPEDTDVLYIVSQFFVEEWRKFVRKPTRCSPVSSVGNSALLCPHGGLMFTFASMTKEDSKLIALIWPSEWQMIQKLFVVDHVIKITRIEVGDVNPSETQYISEPKLCPECREGLLCQQQRDLREYTQATIYVHKVVDNKKVMKDSAPELNVSSSETEEDKEEAKPDGEKDPDFNQIMHAFSVAPFDQNLSIDGKILSDDCATLGTLGVIPESVILLKADEPIADYAAMDDVMQVCMPEEGFKGTGLLGH

SEQ ID NO: 879555 - protein, 556 aa, Homo sapiens [sequence omitted]

SEQ ID NO: 879556 - protein, 556 aa, Homo sapiens [sequence omitted]

SEQ ID NO: 879557 - protein, 413 aa, Homo sapiens
DLEDPTVNKDESKEERKEEEELNFNEDILCPHGELCISENERRLVSKEAWSKLQQYFPKAPEFPSYKECCSQCKILEREGEENEALHKMIANEQKTSLPNLFQDKNRPCLSNWPEDTDVLYIVSQFFVEEWRKFVRKPTRCSPVSSVGNSALLCPHGGLMFTFASMTKEDSKLIALIWPSEWQMIQKLFVVDHVIKITRIEVGDVNPSETQYISEPKLCPECREGLLCQQQRDLREYTQATIYVHKVVDNKKVMKDSAPELNVSSSETEEDKEEAKPDGEKDPDFNQSNGGTKRQKISHQNYIAYQKQVIRRSMRHRKVRGEKALLVSANQTLKELKIQIMHAFSVAPFDQNLSIDGKILSDDCATLGTLGVIPESVILLKADEPIADYAAMDDVMQVCMPEEGFKGTGLLGH

SEQ ID NO: 879558 - protein, 504 aa, Homo sapiens; identical to SEQ ID NO: 879554

SEQ ID NO: 879559 - protein, 550 aa, Homo sapiens
MLAFSEPYEFVSLEWLQKWLDESTPTKPIDNHACLCSHDKLHPDKISIMKRISEYAADIFYSRYGGGPRLTVKALCKECVVERCRILRLKNQLNEDYKTVNNLLKAAVKGDGFWVGKSSLRSWRQLALEQLDEQDGDAEQSNGKMNGSTLNKDESKEERKEEEELNFNEDILCPHGELCISENERRLVSKEAWSKLQQYFPKAPEFPSYKECCSQCKILEREGEENEALHKMIANEQKTSLPNLFQDKNRPCLSNWPEDTDVLYIVSQFFVEEWRKFVRKPTRCSPVSSVGNSALLCPHGGLMFTFASMTKEDSKLIALIWPSEWQMIQKLFVVDHVIKITRIEVGDVNPSETQYISEPKLCPECREGLLCQQQRDLREYTQATIYVHKVVDNKKVMKDSAPELNVSSSETEEDKEEAKPDGEKDPDFNQSNGGTKRQKISHQNYIAYQKQVIRRSMRHRKVRGEKALLVSANQTLKELKIQIMHAFSVAPFDQNLSIDGKILSDDCATLGTLGVIPESVILLKADEPIADYAAMDDVMQGKDEFVLGIC

SEQ ID NO: 879560 - protein, 413 aa, Homo sapiens
MLAFSEPYEFVSLEWLQKWLDESTPTKPIDNHACLCSHDKLHPDKISIMKRISEYAADIFYSRYGGGPRLTVKALCKECVVERCRILRLKNQLNEDYKTVNNLLKAAVKGDGFWVGKSSLRSWRQLALEQLDEQDGDAEQSNGKMNGSTLNKDESKEERKEEEELNFNEDILCPHGELCISENERRLVSKEAWSKLQQYFPKAPEFPSYKECCSQCKILEREGEENEALHKMIANEQKTSLPNLFQDKNRPCLSNWPEDTDVLYIVSQFFVEEWRKFVRKPTRCSPVSSVGNSALLCPHGGLMFTFASMTKEDSKLIALIWPSEWQMIQKLFVVDHVIKITRIEVGDVNPSETQYISEPKLCPECREGLLCQQQRDLREYTQATIYVHKVVDNKKVLVPLVAMTSNDQACSLA

SEQ ID NO: 879561 - protein, 154 aa, Homo sapiens
MKDSAPELNVSSSETEEDKEEAKPDGEKDPDFNQSNGGTKRQKISHQNYIAYQKQVIRRSMRHRKVRGEKALLVSANQTLKELKIQIMHAFSVAPFDQNLSIDGKILSDDCATLGTLGVIPESVILLKADEPIADYAAMDDVMQGKDEFVLGIC

SEQ ID NO: 879562 - protein, 158 aa, Homo sapiens
MRASRSPPSPRRCHHHHEATGAASGAAAGGPGAGCVGLCRLALTPSAQDGRNSTFQTYKKEVCLPRHSMHPGPWAICCECQTRFGGRLPVSRVEAALPYWVPLSLRPRKQHPCWMHAAGTTAGGSAVMSACCPSSSSSRPPTRTSYRLLQRVCCPSAS

SEQ ID NO: 879563 - protein, 148 aa, Homo sapiens [sequence omitted]

SEQ ID NO: 879564 - protein, 114 aa, Homo sapiens
RTLEDIFHEHMQELILMKFIYTSQYDNCLTYRRIYLPPSRPDDLIKPGPPPGHPEGHHGHSPVFWGLKLESSATVKNSHKNVSRSRSLRVHQSGGVCDSRCLLRTESTPRIQPK

SEQ ID NO: 879565 - protein, 236 aa, Homo sapiens
PAGQQTVEIDLRHRIQLPDLENQRNFNELSRIVLEVRERVRQEQQEGGHEAGEGRGRQGPRESQPSPAQPRAEAPSKGPDGTPGEDGGEPGDAVAAAEQPAQCGQGQPFVLPVGVSSRNEDYPRTCRMWNSTFQTYKKEVCLPRHSMHPGPWAICCECQTRFGGRLPVSRVEAALPYWVPLSLRPRKQHPCWMHAAGTTAGGSAVMSACCPSSSSSRPPTRTSYRLLQRVCCPSAS

SEQ ID NO: 879566 - protein, 239 aa, Homo sapiens
MRASRSPPSPRRCHHHHEATGAASGAAAGGPGAGCVGLCRLALTPSAQDGRNSTFQTYKKEVCLPRHSMHPGPWAICCECQTRFGGRLPVSRVEAALPYWVPLSLRPRKQSQKTVQFPIPQTAKMCPCLCHRFGGRLPMPRDQAVMPYWVPQVLRSQQQIVRRQQSLKGIQAPLLDACCWHNCWRICGDECLLSKFQQLQAPYQDQLPAPAARLLPLGLLTLLQAIPRVIMAIRQCFGV

SEQ ID NO: 879567 - protein, 158 aa, Homo sapiens; identical to SEQ ID NO: 879562

SEQ ID NO: 879568 - protein, 120 aa, Homo sapiens
RKKGFRSRPLEKVLGSHAGRNSRHGLTLSPKLECSGAMIAHCNLELLGSGNLPASAFQSTGIPGTNHRAQPALHFFVAFKEILQFNSVMSRTIYHLNVFTKKGIIQLNPRHRACVTTKSN

SEQ ID NO: 879569 - protein, 195 aa, Homo sapiens
QELRSSEQVILTPPLGRGRGHGFTFQLDYKGCEVSLTEQKGREDSTPGKWNEQQSPKGPPAYPLPSTWKKLSTCSLGASSRSAGSYRLKAQLSLSSTVPRRITDKPATKSWEGGRRELCPRVLFTQLLLWVWPGDPGPELQETGFPGPPRPAHLKTDRAIMVGVKGIEEKSGIGAGVCRVSVEKLASTQERTSSL

SEQ ID NO: 879570 - protein, 349 aa, Homo sapiens
SLTLVPPPPFAASSCPAVGVQRLCLFVCVSLQALFMGSPLRFDGRVVLVTGAGAGLGRAYALAFAERGALVVVNDLGGDFKGVGKGSLAADKVVEEIRRRGGKAVANYDSVEEGEKVVKTALDAFGRIDVVVNNAGILRDHSFARISDEDWDIIHRVHLRGSFQVTRAAWEHMKKQKYGRIIMTSSASGIYGNFGQANYSAAKLGLLGLANSLAIEGRKSNIHCNTIAPNAGSRMTQTVMPEDLVEALKPEYVAPLVLWLCHESCEENGGLFEVGAGWIGKLRWERTLGAIVRQKNHPMTPEAVKANWKKICDFENASKPQSIQESTGRIIEVLSTQQLRKRKFTQLHT

SEQ ID NO: 879571 - protein, 177 aa, Homo sapiens
MKKQKYGRIIMTSSASGIYGNFGQANYSAAKLGLLGLANSLAIEGRKSNIHCNTIAPNAGSRMTQTVMPEDLVEALKPEYVAPLVLWLCHESCEENGGLFEVGAGWIGKLRWERTLGAIVRQKNHPMTPEAVKANWKKICDFENASKPQSIQESTGRIIEVLSTQQLRKRKFTQLHT

SEQ ID NO: 879572 - protein, 330 aa, Homo sapiens
SLTLVPPPPFAASSCPAVGVQRLCLFVCVSLQALFMGSPLRFDGRVVLVTGAGAGLGRAYALAFAERGALVVVNDLGGDFKGVGKGSLAADKVVEEIRRRGGKAVANYDSVEEGEKVVKTALDAFGRIDVVVNNAGILRDHSFARISDEDWDIIHRVHLRGSFQVTRAAWEHMKKQKYGRIIMTSSASGIYGNFGQANYSAAKLGLLGLANSLAIEGRKSNIHYLVEALKPEYVAPLVLWLCHESCEENGGLFEVGAGWIGKLRWERTLGAIVRQKNHPMTPEAVKANWKKICDFENASKPQSIQESTGRIIEVLSTQQLRKRKFTQLHT

SEQ ID NO: 879573 - protein, 358 aa, Homo sapiens
SLTLVPPPPFAASSCPAVGVQRLCLFVCVSLQALFMGSPLRFDGRVVLVTGAGAGLGRAYALAFAERGALVVVNDLGGDFKGVGKGSLAADKVVEEIRRRGGKAVANYDSVEEGEKVVKTALDAFGRIDELVSFYIVDVVVNNAGILRDHSFARISDEDWDIIHRVHLRGSFQVTRAAWEHMKKQKYGRIIMTSSASGIYGNFGQANYSAAKLGLLGLANSLAIEGRKSNIHCNTIAPNAGSRMTQTVMPEDLVEALKPEYVAPLVLWLCHESCEENGGLFEVGAGWIGKLRWERTLGAIVRQKNHPMTPEAVKANWKKICDFENASKPQSIQESTGRIIEVLSTQQLRKRKFTQLHT

SEQ ID NO: 879574 - protein, 177 aa, Homo sapiens; identical to SEQ ID NO: 879571

SEQ ID NO: 879575 - protein, 137 aa, Homo sapiens
RVRNTSYLYLWDRVLVSLTSTRCLERGPRAPSSDPMRPPCSSCTAAPPRTGAPRRGRTTTPRPTPPPPPWSPGSPARRPARGISSVQGAEPFCSGNSTKSELSLASSTSTRTSASLLSAVEPRSEAPTRNSNSCRAS

SEQ ID NO: 879576 - protein, 91 aa, Homo sapiens
RVRNTSYLYLWDRVLVSLTSTKMPGKGSSGTEQRPNEASLLLLHSRTATNRSTEKRKNDDTKANATTTIAVLNAEKSCNGLRRIFADGACE

SEQ ID NO: 879577 - protein, 267 aa, Homo sapiens
MVSNSAGSNSRQLPLPLSADAPPASSSHWSWQPSRHTNQPIDRAILRSRPCCRLSRTCHWSLQPPPPPPARQWLGGLAGAGRSSCACALGLPSAGCSAGRARLRGAALEETEAAGGPEAQEEDEDEEEALPHSEAMDVFQEGLAMVVQDPLLCDLPIQVTLEEVNSQIALEYGQAMTVRVCKMDGEVMPVVVVQSATVLDLKKAIQRYVQLKQEREGGIQHISWSYVWRTYHLTSAGEKLTEDRKKLRDYGIRNRDEVSFIKKLRQK

SEQ ID NO: 879578 - protein, 261 aa, Homo sapiens
MGSLPSRRKSLPSPSLSSSVQGQGPVTMEAERSKATAVALGSFPAGGPAELSLRLGEPLTIVSEDGDWWTVLSEVSGREYNIPSVHVAKVSHGWLYEGLSREKAEELLLLPGNPGGAFLIRESQTRRGSYSLSVRLSRPASWDRIRHYRIHCLDNGWLYISPRLTFPSLQALVDHYSELADDICCLLKEPCVLQRAGPLPGKDIPLPVTVQRTPLNWKELDSSLLFSEAATGEESLLSEGLRESLSFYISLNDEAVSLDDA

SEQ ID NO: 879579 - protein, 261 aa, Homo sapiens; identical to SEQ ID NO: 879578

SEQ ID NO: 879580 - protein, 619 aa, Homo sapiens
MDDQQALNSIMQDLAVLHKASRPALSLQETRKAKSSSPKKQNDVRVKFEHRGEKRILQFPRPVKLEDLRSKAKIAFGQSMDLHYTNNELVIPLTTQDDLDKALELLDRSIHMKSLKILLVINGSTQATNLEPLPSLEDLDNTVFGAERKKRLSIIGPTSRDRSSPPPGYIPDELHQVARNGSFTSINSEGEFIPESMEQMLDPLSLSSPENSGSGSCPSLDSPLDGESYPKSRMPRAQSYPDNHQEFSDYDNPIFEKFGKGGTYPRRYHVSYHHQEYNDGRKTFPRARRTQGNQLTSPVSFSPTDHSLSTSSGSSIFTPEYDDSRIRRRGSDIDNPTLTVMDISPPSRSPRAPTNWRLGKLLGQGAFGRVYLCYDVDTGRELAVKQVQFDPDSPETSKEVNALECEIQLLKNFLHERIVQYYGCLRDPQEKTLSIFMEYMPGGSIKDQLKAYGALTENGTRKYTRQILEGVHYLHSNMILHRDIKGANILRDSTGNVKLGDFGASKRLQTICLSGTGMKSVTGTPYWMSPEVISGQGYGRKADIWSVACTVVEMLTEKPPWAEFEAMAAIFKIATQPTNPKLPPHVSDYTRDFLKRIFVEAKLRPSADELLRHMFVHYH

SEQ ID NO: 879581 - protein, 619 aa, Homo sapiens; identical to SEQ ID NO: 879580

SEQ ID NO: 879582 - protein, 363 aa, Homo sapiens
EDAGDTRLGSAAPFWVPRPKPLAVFVSGREVTLSSAAPAALCPRWIPRRGSFKSLAGRPPLGRSPAMRALRAGLTLALGAGLGAVVEGWRRRREDARAAPGLLGRLPVLPVAAAAELPPVPGGPRGPGELAKYGLPGLAQLKSRESYVLCYDPRTRGALWVVEQLRPERLRGDGDRRECDFREDDSVHAYHRATNADYRGSGFDRGHLAAAANHRWSQKAMDDTFYLSNVAPQVPHLNQNAWNNLEKYSRSLTRSYQNVYVCTGPLFLPRTEADGKSYVKYQVIGKNHVAVPTHFFKVLILEAAGGQIELRTYVMPNAPVDEAIPLERFLVPIESIERASGLLFVPNILARAGSLKAITAGSK

SEQ ID NO: 879583 - protein, 106 aa, Homo sapiens
MAPCPRVPGSAHRTEADGKSYVKYQVIGKNHVAVPTHFFKVLILEAAGGQIELRTYVMPNAPVDEAIPLERFLVPIESIERASGLLFVPNILARAGSLKAITAGSK

SEQ ID NO: 879584 - protein, 142 aa, Homo sapiens
LGVNRPRQALPPSVSALLGAPRTWAGRVALCRSAVHQALPPSVSALLGALPSTLLGSLNLDLPDPGPPLLLLCSPASQVEATEHLWVCSVVFLACRGLGLRGNRSRLSSSLWNPQARDGVQASSPSSLVLWANDLCPPLQNL

SEQ ID NO: 879585 - protein, 363 aa, Homo sapiens; identical to SEQ ID NO: 879582

SEQ ID NO: 879586 - protein, 104 aa, Homo sapiens
MSHASPGPGPWTEADGKSYVKYQVIGKNHVAVPTHFFKVLILEAAGGQIELRTYVMPNAPVDEAIPLERFLVPIESIERASGLLFVPNILARAGSLKAITAGSK

SEQ ID NO: 879587 - protein, 851 aa, Homo sapiens
MSSKQEIMSDQRFRRVAKDPRFWEMPEKDRKVKIDKRFRAMFHDKKFKLNYAVDKRGRPISHSTTEDLKRFYDLSDSDSNLSGEDSKALSQKKIKKKKTQTKKEIDSKNLVEKKKETKKANHKGSENKTDLDNSIGIKKMKTSCKFKIDSNISPKKDSKEFTQKNKKEKKNIVQHTTDSSLEEKQRTLDSGTSEIVKSPRIECSKTRREMQSVVQLIMTRDSDGYENSTDGEMCDKDALEEDSESVSEIGSDEESENEITSVGRASGDDDGSEDDEEEDEDEEEDEDEDSEDDDKSDSGPDLARGKGNIETSSEDEDDTADLFPEESGFEHAWRELDKDAPRADEITRRLAVCNMDWDRLKAKDLLALFNSFKPKGGVIFSVKIYPSEFGKERMKEEQVQGPVELLSIPEDAPEKDWTSREKLRDYQFKRLKYYYAVVDCDSPETASKIYEDCDGLEFESSCSFIDLRFIPDDITFDDEPKDVASEVNLTAYKPKYFTSAAMGTSTVEITWDETDHERITMLNRKFKKEELLDMDFQAYLASSSEDEEEIEEELQGDDGVNVEEDGKTKKSQKDDEEQIAKYRQLLQVIQEKEKKGKENDMEMEIKWVPGLKESAEEMVKNKLEGKDKLTPWEQFLEKKKEKKRLKRKQKALAEEASEEELPSDVDLNDPYFAEEVKQIGINKKSVKSAKDGTSPEEEIEIERQKAEMALLMMDEDEDSKKHFNYNKIVEHQNLSKKKKKQLMKKKELIEDDFEVNVNDARFQAMYTSHLFNLDPSDPNFKKTKAMEKILEEKARQRERKEQELTQAIKKKESEIEKESQRKSIDPALSMLIKSIKTKTEQFQARKKQKVK

SEQ ID NO: 879588 - protein, 851 aa, Homo sapiens; identical to SEQ ID NO: 879587

SEQ ID NO: 879589 - protein, 866 aa, Homo sapiens
MSSKQEIMSDQRFRRVAKDPRFWEMPEKDRKVKIDKRFRAMFHDKKFKLNYAVDKRGRPISHSTTEDLKRFYDLSDSDSNLSGEDSKALSQKKIKKKKTQTKKEIDSKNLVEKKKETKKANHKGSENKTDLDNSIGIKKMKTSCKFKIDSNISPKKDSKEFTQKNKKEKKNIVQHTTDSSLEEKQRTLDSGTSEIVKSPRIECSKTRREMQSVVQLIMTRDSDGYENSTDGEMCDKDALEEDSESVSEIGSDEESENEITSVGRASGDDDGSEDDEEEDEDEEEDEDEDSEDDDKSDSGPDLARGKGNIETSSEDEDDTADLFPEESGFEHAWRELDKDAPRADEITRRLAVCNMDWDRLKAKDLLALFNSFKPKGGVIFSVKIYPSEFGKERMKEEQVQGPVELLSIPEDAPEKDWTSREKLRDYQFKRLKYYYAVVDCDSPETASKIYEDCDGLEFESSCSFIDLRFIPDDITFDDEPKDVASEVNLTAYKPKYFTSAAMGTSTVEITWDETDHERITMLNRKFKKEELLDMDFQAYLASSSEDEEEIEEELQGDDGVNVEEDGKTKKSQKDDEEQIAKYRQLLQVIQEKEKKGKENDMEMEIKWVPGLKESAEEMVKNKLEGKDKLTPWEQFLEKKKEKKRLKRKQKALAEEASEEELPSDVDLNDPYFAEEVKQIGINKKSVKSAKDGTSPEEEIEIERQKAEMALLMMDEDEDSKKHFNYNKIVEHQNLSKKKKKQLMKKKELIEDDFEVNVNDARFQAMYTSHLFNLDPSDPNFKKTKAMEKILEEKARQRERKEQELTQNLSKKKKKQLMKKKELIEDDFEVNVNDARFQAMYTSHLFNLDPSDPNFKKTKLWKKSLRR

SEQ ID NO: 879590 - protein, 851 aa, Homo sapiens; identical to SEQ ID NO: 879587

SEQ ID NO: 879591 - protein, 851 aa, Homo sapiens; identical to SEQ ID NO: 879587

SEQ ID NO: 879592 - protein, 253 aa, Homo sapiens
ERHLDFGLLDSGTVRDEVILIYATKFVEFVTEPEDPSRERVPMEMGLKRKQKALAEEASEEELPSDVDLNDPYFAEEVKQIGINKKSVKSAKDGTSPEEEIEIERQKAEMALLMMDEDEDSKKHFNYNKIVEHQNLSKKKKKQLMKKKELIEDDFEVNVNDARFQAMYTSHLFNLDPSDPNFKKTKAMEKILEEKARQRERKEQELTQAIKKKESEIEKESQRKSIDPALSMLIKSIKTKTEQFQARKKQKVK

SEQ ID NO: 879593 - protein, 174 aa, Homo sapiens
MAGSGAWKRLKSMLRKDDAPLFLNDTSAFDFSDEAGDEGLSRFNKLRVVVADDGSEAPERPVNGAHPTLQADDDSLLDQDLPLTNSQLSLKVDSCDNCSKQREILKQRKVKARLTIAAVLYLLFMIGELVGELCCQLTFRLPFLESLCQAVVTQALRFNPSFQEVCIYQDTDLM

SEQ ID NO: 879594 - protein, 181 aa, Homo sapiens [sequence omitted]

SEQ ID NO: 879595 - protein, 417 aa, Homo sapiens [sequence omitted]

SEQ ID NO: 879596 - protein, 429 aa, Homo sapiens
MAGSGAWKRLKSMLRKDDAPLFLNDTSAFDFSDEAGDEGLSRFNKLRVVVADDGSEAPERPVNGAHPTLQADDDSLLDQDLPLTNSQLSLKVDSCDNCSKQREILKQRKVKARLTIAAVLYLLFMIGELVGGYIANSLAIMTDALHMLTDLSAIILTLLALWLSSKSPTKRFTFGFHRLEVLSAMISVLLVYILMGFLLYEAVQRTIHMNYEINGDIMLITAAVGVAVNVIMGFLLNQSGHRHSHSHSLPSNSPTRGSGCERNHGQDSLAVRAAFVHALGDLVQSVGVLIAAYIIRFKPEYKIADPICTYVFSLLVAFTTFRIIWDTVVIILEGVPSHLNVDYIKEALMKIEDVYSVEDLNIWSLTSGKSTAIVHIQLIPGSSSKWEEVQSKANHLLLNTFGMYRCTIQLQSYRQEVDRTCANCQSSSP

SEQ ID NO: 879597 - protein, 52 aa, Homo sapiens
MSHKASGRQCYSLIPGSLRPKFSLNHLPFLGLIVSSFMFFLATTSLDLILVS

SEQ ID NO: 879598 - protein, 116 aa, Homo sapiens
MCCIHSGLNGLRAVQDGFVKQMLEGSMLLKSHHHSLISSTQGHKHCGRPQGPLPRKTRDLCSLVYLLTFPPLLSCDPANIPLYEKHPRMINKKKRKKKNLFLCEMGLISPTGGAEE

SEQ ID NO: 879599 - protein, 110 aa, Homo sapiens
PLFLILFPGLSPRGSELCTQVCIWHFSSRFLNNFIYHNYFHQDRNLSIFFIKILYHENCQIYAKTKRMTLHIPLLRYTEYQDFVILSSSVVSLFFVKVKISDVSFHPYLL

SEQ ID NO: 879600 - protein, 341 aa, Homo sapiens
SRAAGDRTPQAPPACSRGSLAYPSPTSSAPPGEQPRLSKSLNACGAEPAVLSYPSRLCTADCSGQLHSDTIPQANRTQTCWALIPWFWALHRLALLQGAVLPEVAKPPDPTPTLGSVFHEDTEDERSSGRARGQMACQAVSREQLPFPKAGLTPRIHCGPVRPQNLQPSKAGYALRQDPGGPSEPLRGAEGAQQGGAEPEGWEPNNSSLQGHHQKLRPGAQMGQASESASPGGHGPERRPESLGHQLLVPEGHVKERCGRMRLGRGRGRSQVKGQFPAPDGAWREAEARLSGLPTLRLRTSPAPPTGMATSPLGQQEQARQRSTESRDAVRGGQGTLDGSQ

SEQ ID NO: 879601 - protein, 517 aa, Homo sapiens
MPSPLGPPCLPVMDPETTLEEPETARLRFRGFCYQEVAGPREALARLRELCCQWLQPEAHSKEQMLEMLVLEQFLGTLPPEIQAWVRGQRPGSPEEAAALVEGLQHDPGQLLGWITAHVLKQEVLPAAQKTEEPLGSPHPSGTVESPGEGPQDTRIEGSVQLSCSVKEEPNVDGQEVAPSSPPLAAQSPEGNHGHQEPASTSFHPPRIQEEWGLLDRSQKELYWDAMLEKYGTVVSLGEDQPAPPRPFPGACTHPAAGLAGQGLCATSPTQLSHLPEEHPVTYQNRPHPSFMQTPCLTVPPTRAGLPPHQPEAQAQSELGMLLTGTGVCRSLRSGNESEGPPGCPEAQPPQGPGPAAWEGLSGAATPAPTVRPGTPPVPTQPTPAETRLEPAATPRKPYTCEQCGRGFDWKSVFVIHHRTHTSGPGVQSPGLATGESTEKPPQGEVAFPHHPRRSLTGPRSYPCEECGCSFSWKSQLVIHRKSHTGQRRHFCSDCGRAFDWKSQLVIHRKGHRPEVP

SEQ ID NO: 879602 - protein, 450 aa, Homo sapiens
MPSPLGPPCLPVMDPETTLEEPETARLRFRGFCYQEVAGPREALARLRELCCQWLQPEAHSKEQMLEMLVLEQFLGTLPPEIQAWVRGQRPGSPEEAAALVEGLQHDPGQLLGWITAHVLKQEVLPAAQKTEEPLGSPHPSGTVESPGEGPQDTRIEGSVQLSCSVKEEPNVDGQEVAPSSPPLAAQSPEGNHGHQEPASTSFHPPRIQEEWGLLDRSQKELYWDAMLEKYGTVVSLGLPPHQPEAQAQSELGMLLTGTGVCRSLRSGNESEGPPGCPEAQPPQGPGPAAWEGLSGAATPAPTVRPGTPPVPTQPTPAETRLEPAATPRKPYTCEQCGRGFDWKSVFVIHHRTHTSGPGVQSPGLATGESTEKPPQGEVAFPHHPRRSLTGPRSYPCEECGCSFSWKSQLVIHRKSHTGQRRHFCSDCGRAFDWKSQLVIHRKGHRPEVP

SEQ ID NO: 879603 - protein, 450 aa, Homo sapiens; identical to SEQ ID NO: 879602

SEQ ID NO: 879604 - protein, 230 aa, Homo sapiens
MPSPLGPPCLPVMDPETTLEEPETARLRFRGFCYQEVAGPREALARLRELCCQWLQPEAHSKEQMLEMLVLEQFLGTLPPEIQAWVRGQRPGSPEEAAALVEGLQHDPGQLLGWITAHVLKQEVLPAAQKTEEPLGSPHPSGTVESPGEGPQDTRIEGSVQLSCSVKEEPNVDGQEVAPSSPPLAAQSPEGNHGHQEPASTSFHPPRIQEEWGQVARDRKDVPGIARGDR

SEQ ID NO: 879605 - protein, 146 aa, Homo sapiens
MSVAPQNTNGPNGNPTPNFLRELLWRRLAPHVVALGTTDSGGQSALDPESAAQGRVPTSPHPFVRHRMERHWGSSVRSVGGTGWTKGLPNSRFGGEQPGPDPRPQHRSRPRSPISRLCTNSSRKPRNPEALLVSKPFISPHQKVGV

SEQ ID NO: 879606 - protein, 146 aa, Homo sapiens; identical to SEQ ID NO: 879605

SEQ ID NO: 879607 - protein, 88 aa, Homo sapiens
  misc_feature (14)..(14): Xaa can be any naturally occurring amino acid
IYIFRVMYKIKLKXYYILLIYWLTFAVGRSFRGFGYGLTFLPLLSMLMWNLYYMFVVEPERMLTATESRLDYPDHARSASDYRPRPWG

SEQ ID NO: 879608 - protein, 394 aa, Homo sapiens
MTEQETLALLEVKRSDSPEKSSPQALVPNGRQPEGEGGAESPGAESLRVGSSAGSPTAIEGAEDGLDSTVSEAATLPWGTGPQPSAPFPDPPGWRDIEPEPPESEPLTKLEELPEDDANLLPEKAARAFVPIDLQCIERQPQEDLIVRCEAGEGECRTFMPPRVTHPDPTERKWAEAVVRPPGCSCGGCGSCGDREWLRAVASVGAALILFPCLLYGAYAFLPFDVPRLPTMSSRLIYTLRCGVFATFPIVLGILVYGLSLLCFSALRPFGEPRREVEIHRRYVAQSVQLFILYFFNLAVLSTYLPQDTLKLLPLLTGLFAVSRLIYWLTFAVGRSFRGFGYGLTFLPLLSMLMWNLYYMFVVEPERMLTATESRLDYPDHARSASDYRPRPWG

SEQ ID NO: 879609 - protein, 394 aa, Homo sapiens; identical to SEQ ID NO: 879608

SEQ ID NO: 879610 - protein, 394 aa, Homo sapiens; identical to SEQ ID NO: 879608

SEQ ID NO: 879611 - protein, 394 aa, Homo sapiens; identical to SEQ ID NO: 879608

SEQ ID NO: 879612 - protein, 394 aa, Homo sapiens; identical to SEQ ID NO: 879608

SEQ ID NO: 879613 - protein, 87 aa, Homo sapiens
CNIMIYIFYVFDFLQTRLIYWLTFAVGRSFRGFGYGLTFLPLLSMLMWNLYYMFVVEPERMLTATESRLDYPDHARSASDYRPRPWG

SEQ ID NO: 879614 - protein, 133 aa, Homo sapiens
RPPYSYSALIAMAIQSAPERKLTLSHIYQFVADSFPFYQRSKAGWQNSIRHNLSLNDCFKKVPRDEDDPGKGNYWTLDPNCEKMFDNGNFRRKRKRRSEASNGSTVAAGTSKSEEGLSSGLGSGVGGKPEEES

SEQ ID NO: 879615 - protein, 174 aa, Homo sapiens
RPPYSYSALIAMAIQSAPERKLTLSHIYQFVADSFPFYQRSKAGWQNSIRHNLSLNDCFKKVPRDEDDPGEGRWQVLPSRGGRTRVARAGAGVGVRLEDLPGVFLSRLRVGADGGITTQPRGQREGAGDLRKEDSVRKELDLYIHIRRGGPIRETKKICIPEQKATPGWCSLGL

SEQ ID NO: 879616 - protein, 1052 aa, Homo sapiens
FILRPSRFIQRTFTDIGIKYYRNEFKMKVPIIMVNSVSDLHGYIDKSQLTRELGGTLEYRHGQWVNHRTAIENFALTLKTTAQMLQTFGSCLATAELPRSMLSTEDLLMSHTRQRDKLQDELKLLGKQGTTLLSCIQEPATKCPNSKLNLNQLENVTTMERLLVQLDETEKAFSHFWSEHHLKLNQCLQLQHFEHDFCKAKLALDNLLEEQAEFTGIGDSVMHVEQILKEHKKLEEKSQEPLEKAQLLALVGDQLIQSHHYAADAIRPRCVELRHLCDDFINGNKKKWDILGKSLEFHRQLDKVSQWCEAGIYLLASQAVDKCQSREGVDIALNDIATFLGTVKEYPLLSPKEFYNEFELLLTLDAKAKAQKVLQRLDDVQEIFHKRQVSLMKLAAKQTRPVQPVAPHPESSPKWVSSKTSQPSTSVPLARPLRTSEEPYTEAELNSRGKEDDETKFEVKSEEIFESHHERGNPELEQQARLGDLSPRRRIIRDLLETEEIYIKEIKSIIDGYITPMDFIWLKHLIPDVLQNNKDFLFGNIRELYEFHNRTFLKELEKCAENPELLAHCFLKRKEDLQIYFKYHKNLPRARAIWQECQDCAYFGVCQRQLDHNLPLFKYLKGPSQRLIKYQMLLKGLLDFESPEDMEIDPGELGGSAKDGPKRTKDSAFSTELQQALAVIEDLIKSCELAVDLAAVTECPDDIGKLGKLLLHGPFSVWTIHKDRYKMKDLIRFKPSQRQIYLFERGIVFCKIRMEPGDQGLSPHYSFKKAMKLMTLSIRQLGRGSHRKFEIASRNGLEKYILQAASKEIRDCWFSEISKLLMEQQNNIKDQGNPQFEMSTSKGSGAGSGPWIKNMERATTSKEDPASSTGGIKGCSSREFSSMDTFEDCEGAEDMEKESSALSLAGLFQSDDSHETCSSKSAFLERGESSQGEKEERDEEETATRSTEEERAGASTGRLAPAGATAGFQAGRCARGPPPRRADLPADAPAPRLQSARIPGRGGVGARALPSYAESSRSLGGGRKGTTRASSEEPEGCPGCAPSSARGTSELL

SEQ ID NO: 879617 - protein, 605 aa, Homo sapiens
MLISPYCYNCLTFQAIENFALTLKTTAQMLQTFGSCLATAELPRSMLSTEDLLMSHTRQRDKLQDELKLLGKQGTTLLSCIQEPATKCPNSKLNLNQLENVTTMERLLVQLDETEKAFSHFWSEHHLKLNQCLQLQHFEHDFCKAKLALDNLLEEQAEFTGIGDSVMHVEQILKEHKKLEEKSQEPLEKAQLLALVGDQLIQSHHYAADAIRPRCVELRHLCDDFINGNKKKWDILGKSLEFHRQLDKVSQWCEAGIYLLASQAVDKCQSREGVDIALNDIATFLGTVKEYPLLSPKEFYNEFELLLTLDAKAKAQKVLQRLDDVQEIFHKRQVSLMKLAAKQTRPVQPVAPHPESSPKWVSSKTSQPSTSVPLARPLRTSEEPYTEAELNSRGKEDDETKFEVKSEEIFESHHERGNPELEQQARLGDLSPRRRIIRDLLETEEIYIKEIKSIIDGYITPMDFIWLKHLIPDVLQNNKDFLFGNIRELYEFHNRTFLKELEKCAENPELLAHCFLKRKEDLQIYFKYHKNLPRARAIWQECQDCAYFGVMLRRQTSSWKMFLCIKLLKKSKVGLGRGTWHCDLCLFKVSHTLKLHMKSCNGIGL

SEQ ID NO: 879618 - protein, 524 aa, Homo sapiens
SHRPIWMPVEMNANLNITFSFFLERLLVQLDETEKAFSHFWSEHHLKLNQCLQLQHFEHDFCKAKLALDNLLEEQAEFTGIGDSVMHVEQILKEHKKLEEKSQEPLEKAQLLALVGDQLIQSHHYAADAIRPRCVELRHLCDDFINGNKKKWDILGKSLEFHRQLDKVSQWCEAGIYLLASQAVDKCQSREGVDIALNDIATFLGTVKEYPLLSPKEFYNEFELLLTLDAKAKAQKVLQRLDDVQEIFHKRQVSLMKLAAKQTRPVQPVAPHPESSPKWVSSKTSQPSTSVPLARPLRTSEEPYTEAELNSRGKEDDETKFEVKSEEIFESHHERGNPELEQQARLGDLSPRRRIIRDLLETEEIYIKEIKSIIDGYITPMDFIWLKHLIPDVLQNNKDFLFGNIRELYEFHNRTFLKELEKCAENPELLAHCFLKRKEDLQIYFKYHKNLPRARAIWQECQDCAYFGVMLRRQTSSWKMFLCIKLLKKSKVGLGRGTWHCDLCLFKVSHTLKLHMKSCNGIGL

SEQ ID NO: 879619 - protein, 311 aa, Homo sapiens
FILRPSRFIQRTFTDIGIKYYRNEFKMKVPIIMVNSVSDLHGYIDKSQLTRELGGTLEYRHGQWVNHRTAIENFALTLKTTAQMLQTFGSCLATAELPRSMLSTEDLLMSHTRQRDKLQDELKLLGKQGTTLLSCIQEPATKCPNSKLNLNQLENVTTMERLLVQLDETEKAFSHFWSEHHLKLNQCLQLQHFEHDFCKAKLALDNLLEEQAEFTGIGDSVMHVEQILKEHKKLEEKSQEPLEKAQLLALVGDQLIQSHHYAADAIRPRCVELRHLCDDFINGNKKKWDILGKSLEFHRQLDKVSKTQPRT

SEQ ID NO: 879620 - protein, 290 aa, Homo sapiens [sequence omitted]

SEQ ID NO: 879621 - protein, 111 aa, Homo sapiens
MKNATIVMSVRREQGSSSGEGSLSFEDVAVGFTREEWQFLDQSQKVLYKEVMLENYINLVSIGYRGTKPDSLFKLEQGEPPGIAEGAAHSQICPGYSFRRRTLQMEGMQES

SEQ ID NO: 879622 - protein, 290 aa, Homo sapiens [sequence omitted]

SEQ ID NO: 879623 - protein, 193 aa, Homo sapiens
RYLWFWPLCCTVIIKEVPPPPAEESEEEDDDGLPKKKWPTVDASYYGGRGVGGIKRMEVRWGEKGSTEEGAKLEKAKNARVKMPEQEYEFPEPRNLNNNMRRPSSPRKWYSPIKGKLDALWVLLRKGYDRVSVMRPQPGDTGRRINFTRVKNNQPAKYPLNNARTYKYLTTTSGKAQNRQKRENILELLAPKS

SEQ ID NO: 879624 - protein, 85 aa, Homo sapiens
  misc_feature (82)..(82): Xaa can be any naturally occurring amino acid
MKTISLQPPPLYQRRQISLEILKKPHPQSNVIIYLVLQLHKLSKLCCAGLSYLAFALRSDTSLPVTRGWNPAYTIAETSSQXDTK

SEQ ID NO: 879625 - protein, 149 aa, Homo sapiens
MALAGRHPRNLASVASAVCGVRGAAGRVEHFCHLQIILARWQVYGLWSKKYLPLPLTWGSLSFEDVAVGFTREEWQFLDQSQKVLYKEVMLENYINLVSIGYRGTKPDSLFKLEQGEPPGIAEGAAHSQICPGYSFRRRTLQMEGMQES

SEQ ID NO: 879626 - protein, 290 aa, Homo sapiens [sequence omitted]

SEQ ID NO: 879627 - protein, 111 aa, Homo sapiens; identical to SEQ ID NO: 879621

SEQ ID NO: 879628 - protein, 68 aa, Homo sapiens
SALPLENSSLRTTVAMKTISLQPPPLYQRRQISLEILKKPHPQSNVIIYLVLQLHDVVPFFVLTHSLT

SEQ ID NO: 879629 - protein, 372 aa, Homo sapiens
MSRRRFDCRSISGLLTTTPQIPIKMENFNNFYILTSKELGRGKFAVVRQCISKSTGQEYAAKFLKKRRRGQDCRAEILHEIAVLELAKSCPRVINLHEVYENTSEIILILEYAAGGEIFSLCLPELAEMVSENDVIRLIKQILEGVYYLHQNNIVHLDLKPQNILLSSIYPLGDIKIVDFGMSRKIGHACELREIMGTPEYLAPEILNYDPITTATDMWNIGIIAYMLLTHTSPFVGEDNQETYLNISQVNVDYSEETFSSVSQLATDFIQSLLVKNPEKRPTAEICLSHSWLQQWDFENLFHPEETSSSSQTQDHSVRSSEDKTSKSSCNGTCGDREDKENIPEDSSMVSKRFRFDDSLPNPHELVSDLLC

SEQ ID NO: 879630 - protein, 372 aa, Homo sapiens; identical to SEQ ID NO: 879629

SEQ ID NO: 879631 - protein, 372 aa, Homo sapiens; identical to SEQ ID NO: 879629

SEQ ID NO: 879632 - protein, 186 aa, Homo sapiens
MRVNFLGKSGGTPEYLAPEILNYDPITTATDMWNIGIIAYMLLTHTSPFVGEDNQETYLNISQVNVDYSEETFSSVSQLATDFIQSLLVKNPEKRPTAEICLSHSWLQQWDFENLFHPEETSSSSQTQDHSVRSSEDKTSKSSCNGTCGDREDKENIPEDSSMVSKRFRFDDSLPNPHELVSDLLC

SEQ ID NO: 879633 - protein, 107 aa, Homo sapiens
TTVGDDWPAKRQRLKRPTAEICLSHSWLQQWDFENLFHPEETSSSSQTQDHSVRSSEDKTSKSSCNGTCGDREDKENIPEDSSMVSKRFRFDDSLPNPHELVSDLLC

SEQ ID NO: 879634 - protein, 372 aa, Homo sapiens; identical to SEQ ID NO: 879629

SEQ ID NO: 879635 - protein, 372 aa, Homo sapiens; identical to SEQ ID NO: 879629

SEQ ID NO: 879636 - protein, 213 aa, Homo sapiens [sequence omitted]

SEQ ID NO: 879637 - protein, 111 aa, Homo sapiens
MSRRRFDCRSISGLLTTTPQIPIKMENFNNFYILTSKELGRGKFAVVRQCISKSTGQEYAAKFLKKRRRGQDCRAEILHEIAVLELAKSCPRVINLHEVYENTSEIILILE

SEQ ID NO: 879638 - protein, 71 aa, Homo sapiens
SPKSQLAHGPSGLMATSRACQPTHPCALTASAPGNAAARVCMCVHSVCVCVYVGDLAAPGRLALLGNGFCL

SEQ ID NO: 879639 - protein, 106 aa, Homo sapiens
SLRMSLSLMRLSAKSAKPGCGYFPGEVLLESCLPSAVGQPLLWVPLLKLPSSESSKVPLPVSPVHSLLEEFFRTFKDLDEATVRKTHFAVIQKQVTQCVMFASKLV

SEQ ID NO: 879640 - protein, 106 aa, Homo sapiens; identical to SEQ ID NO: 879639

SEQ ID NO: 879641 - protein, 70 aa, Homo sapiens
MSFLFGSRSSKTFKPKKNIPEGSHQYELLKHAEATLGSGNLRMAVMLPEGEDLNEWVAVNTVDFLQSDQP

SEQ ID NO: 879642 - protein, 306 aa, Homo sapiens
PRTQTDYENSLTMKMFLFQFVNYYSSCFYIAFFKGKFVGYPGDPVYWLGKYRNEECDPGGCLLELTTQLTIIMGGKAIWNNIQEVLLPWIMNLIGRFHRVSGSEKITPRWEQDYHLQPMGKLGLFYEYLEMIIQFGFVTLFVASFPLAPLLALVNNILEIRVDAWKLTTQFRRLVPEKAQDIGAWQPIMQGIAILAVVTNAMIIAFTSDMIPRLVYYWSFSVPPYGDHTSYTMEGYINNTLSIFKVADFKNKSKGNPYSDLGNHTTCRYRDFRYPPGHPQEYKHNIYYWHVIAAKLAFIIVMEHVI

SEQ ID NO: 879643 - protein, 102 aa, Homo sapiens
IRKSGPRWVIAEEGGHAVFSCSGDGDPAPTVSWMRPHGAWLGRAGRVRVLEDGTLEIRSVQLRDRGAYVCVVSNVAGNDSLRTWLEVIQVEPPNGTLSDPNI

SEQ ID NO: 879644 - protein, 342 aa, Homo sapiens
MNAIVALCHFCELHGPRTLFCTEVLHAPLPQGDGNEDSPGQGEQAEEEEGGIQMNSRMRAHSPAEGASVESSSPGPKKSDMCEGCRSLAAGHPGYISHDKETSIKYVSHQHPSHPQLFSIVRQACVRSLSCEVCPGREGPIFFGDEQHGFVFSHTFFIKDSLARGFQRWYSIITIMMDRIYLINSWPFLLGKVRGIIDELQGKALKVFEAEQFGCPQRAQRMNTAFTPFLHQRNGNAARSLTSLTSDDNLWACLHTSFAWLLKACGSRLTEKLLEGAPTEDTLVQMEKLAGEAGVLLPGPWPGWPWGGTSCLLSWQESLREGNAALNQPRTSLREAHPPISV

SEQ ID NO: 879645 - protein, 289 aa, Homo sapiens [sequence omitted]

SEQ ID NO: 879646 - protein, 342 aa, Homo sapiens; identical to SEQ ID NO: 879644

SEQ ID NO: 879647 - protein, 197 aa, Homo sapiens
MNAIVALCHFCELHGPRTLFCTEVLHAPLPQGDGNEDSPGQGEQAEEEEGGIQMNSRMRAHSPAEGASVESSSPGPKKSDMCEGCRSLAAGHPGYISHDKETSIKYVSHQHPSHPQLFSIVRQACVRSLSCEVSLVATEPVSVGAHMLPGALGGLGASIAQGGRHWSSLRADPQISTAQGTGRLPCPELREESCWTC

SEQ ID NO: 879648 - protein, 219 aa, Homo sapiens
MNAIVALCHFCELHGPRTLFCTEVLHAPLPQGDGNEDSPGQGEQAEEEEGGIQMNSRMRAHSPAEGASVESSSPGPKKSDMCEGCRSLAAGHPGYISHDKETSIKYVSHQHPSHPQLFSIVRQACVRSLSCEVCPGREGPIFFGDEQHGFVFSHTFFIKDSLARGFQRWYSIITIMMDRIYLINSWPFLLGKVRGIIDELQGKALKMIPGLPSRRAGVD

SEQ ID NO: 879649 - protein, 189 aa, Homo sapiens
NDWTGGTLCALHGESIVGLILQESGPGVGCERVGVRAAGSFGLKRPSLPFAFQVFEAEQFGCPQRAQRMNTAFTPFLHQRNGNAARSLTSLTSDDNLWACLHTSFAWLLKACGSRLTEKLLEGAPTEDTLVQMEKLAGEAGVLLPGPWPGWPWGGTSCLLSWQESLREGNAALNQPRTSLREAHPPISV

SEQ ID NO: 879650 - protein, 165 aa, Homo sapiens
MNSRMRAHSPAEGASVESSSPGPKKSDMCEGCRSLAAGHPGYISHDKETSIKYVSHQHPSHPQLFSIVRQACVRSLSCEVCPGREGPIFFGDEQHGFVFSHTFFIKDSLARGFQRWYSIITIMMDRIYLINSWPFLLGKVRGIIDELQGKALKVERESWCPAVQG

SEQ ID NO: 879651 - protein, 342 aa, Homo sapiens; identical to SEQ ID NO: 879644

SEQ ID NO: 879652 - protein, 222 aa, Homo sapiens
MNAIVALCHFCELHGPRTLFCTEVLHAPLPQGDGNEDSPGQGEQAEEEEGGIQMNSRMRAHSPAEGASVESSSPGPKKSDMCEGCRSLAAGHPGYISHDKETSIKYVSHQHPSHPQLFSIVRQACVRSLSCEVCPGREGPIFFGDEQHGFVFSHTFFIKDSLARGFQRWYSIITIMMDRIYLINSWPFLLGKVRGIIDELQGKALKVNSEMRCRGGRGPCTA

SEQ ID NO: 879653 - protein, 197 aa, Homo sapiens; identical to SEQ ID NO: 879647

SEQ ID NO: 879654 - protein, 83 aa, Homo sapiens
MLKKQFQAWAAGREAGCSTPHHHAHRALLLPRVSGFGRPCLVCVHSLPVRSEDRTSDFWIRNRGGGSPEEKRLWVLASVHYSV

SEQ ID NO: 879655 - protein, 470 aa, Homo sapiens
MGIWTSGTDIFLSLWEIYVSPRSPGWMDFIQHLGVCCLVALISVGLLSVAACWFLPSIIAAAASWIITCVLLCCSKHARCFILLVFLSCGLREGRNALIAAGTGIVILGHVENIFHNFKGLLDGMTCNLRAKSFSIHFPLLKKYIEAIQWIYGLATPLSVFDDLVSWNQTLAVSLFSPSHVLEAQLNDSKGEVLSVLYQMATTTEVLSSLGQKLLAFAGLSLVLLGTGLFMKRFLGPCGWKYENIYITRQFVQFDERERHQQRPCVLPLNKEERRKYVIIPTFWPTPKERKNLGLFFLPILIHLCIWVLFAAVDYLLYRLIFSVSKQFQSLPGFEVHLKLHGEKQGTQDIIHDSSFNISVFEPNCIPKPKFLLSETWVPLSVILLILVMLGLLSSILMQLKILVSASFYPSVERKRIQYLHAKLLKKRSKQPLGEVKRRLSLYLTKIHFWLPVLKMIRKKQMDMASADKS

SEQ ID NO: 879656 - protein, 470 aa, Homo sapiens; identical to SEQ ID NO: 879655

SEQ ID NO: 879657 - protein, 470 aa, Homo sapiens; identical to SEQ ID NO: 879655

SEQ ID NO: 879658 - protein, 494 aa, Homo sapiens
MIELQASPCGQKLYLGGASRDFWMSSNLHQLQKLDNGEKLFKVDGDQASFMMNCRFHVSGKPFTFGEVGRDFSATSGLLQHQVTPTIERPHSRIRHLRVPTGRKPLKYTESRKSFREKSVFIQHQRADSGERPYKCSECGKSFSQSSGFLRHRKAHGRTRTHECSECGKSFSRKTHLTQHQRVHTGERPYDCSECGKSFRQVSVLIQHQRVHTGERPYECSECGKSFSHSTNLYRHRSAHTSTRPYECSECGKSFSHSTNLFRHWRVHTGVRPYECSECGKAFSCNIYLIHHQRFHTGERPYVCSECGKSFGQKSVLIQHQRVHTGERPYECSECGKVFSQSSGLFRHRRAHTKTKPYECSECEKSFSCKTDLIRHQTVHTGERPYECSVCGKSFIRKTHLIRHQTVHTNERPYECDECGKSYSQSSALLQHRRVHTGERPYECRECGKSFTRKNHLIQHKTVHTGERPYECSECGKSFSQSSGLLRHRRVHVQ

SEQ ID NO: 879659 - protein, 91 aa, Homo sapiens
DRPPLPARSAQSPMAAALRAPTQIATSTYRSEEALEDPTRQVFVAFEDVAIYFSQEEWELLDEMQRLLYRDVMLENFAVMASLGIIECFQE

SEQ ID NO: 879660 - protein, 81 aa, Homo sapiens
RTTLLLLFFHFLLFLSPAEEEPPLPLLEPEPGLSSLGLINCLSQGLLGESPSLLASSMSSQPGRISLLLAGSQELSMTMLY

SEQ ID NO: 879661 - protein, 399 aa, Homo sapiens
MGDGAVKQGFLYLQQQQTFGKKWRRFGASLYGGSDCALARLELQEGPEKPRRCEAARKVIRLSDCLRVAEAGGEASSPRDTSAFFLETKERLYLLAAPAAERGDWVQAICLLAFPGQRKELSGPEGKQSRPCMEENELYSSAVTVGPHKEFAVTMRPTEASERCHLRGSYTLRAGESALELWGGPEPGTQLYDWPYRFLRRFGRDKAVAASLERATLSSKPGKAMRSSWPWKRPSLPRRMLHPLHPNRSQPQSPRRCPGLIAPTLGRMTHCRRLHPPHRCLLHGLGARRGSMPCPSMRWPVPWGRTSGASWQSLLSSWPTLCTTALRRPCPLDLTTYTMSPREWLPCPSMTARRSPGVRHGGGRRQLTGTLLASSMSSQPGRISLLLAGSQELSMTMLY

SEQ ID NO: 879662 - protein, 258 aa, Homo sapiens
MRPTEASERCHLRGSYTLRAGESALELWGGPEPGTQLYDWPYRFLRRFGRDKVTFSFEAGRRCVSGEGNFEFETRQGNEIFLALEEAISAQKNAAPATPQPQPATIPASLPRPDSPYSRPHDSLPPPSPTTPVPAPRPRGQEGEYAVPFDAVARSLGKNFRGILAVPPQLLADPLYDSIEETLPPRPDHIYDEPEGVAALSLYDSPQEPRGEAWRRQATADRDPAGLQHVQPAGQDFSASGWQPGTEYDNVVLKKGPK

SEQ ID NO: 879663 - protein, 382 aa, Homo sapiens
MGDGAVKQGFLYLQQQQTFGKKWRRFGASLYGGSDCALARLELQEGPEKPRRCEAARKVIRLSDCLRVAEAGGEASSPRDTSAFFLETKERLYLLAAPAAERGDWVQAICLLAFPGQRKELSGPEGKQSRPCMEENELYSSAVTVGPHKEFAVTMRPTEASERCHLRGSYTLRAGESALELWGGPEPGTQLYDWPYRFLRRFGRDKVTFSFEAGRRCVSGEGNFEFETRQGNEIFLALEEAISAQKNAAPATPQPQPATIPASLPRPDSPYSRPHDSLPPPSPTTPVPAPRPRGQEGEYAVPFDAVARSLGKNFRRARRSLVGVRLPGRSSASVTACGVGRGRRRGQQPPGHQCLLPGDQERLYSWRPLQRSAGTGVPAIWL

SEQ ID NO: 879664 - protein, 412 aa, Homo sapiens
MGDGAVKQGFLYLQQQQTFGKKWRRFGASLYGGSDCALARLELQEGPEKPRRCEAARKVIRLSDCLRVAEAGGEASSPRDTSAFFLETKERLYLLAAPAAERGDWVQAICLLAFPGQRKELSGPEGKQSRPCMEENELYSSAVTVGPHKEFAVTMRPTEASERCHLRGSYTLRAGESALELWGGPEPGTQLYDWPYRFLRRFGRDKVTFSFEAGRRCVSGEGNFEFETRQGNEIFLALEEAISAQKNAAPATPQPQPATIPASLPRPDSPYSRPHDSLPPPSPTTPVPAPRPRGQEGEYAVPFDAVARSLGKNFRGILAVPPQLLADPLYDSIEETLPPRPDHIYDEPEGVAALSLYDSPQEPRGEAWRRQATADRDPAGLQHVQPAGQDFSASGWQPGTEYDNVVLKKGPK

SEQ ID NO: 879665 - protein, 258 aa, Homo sapiens; identical to SEQ ID NO: 879662

SEQ ID NO: 879666 - protein, 104 aa, Homo sapiens
MGRRLFLFQGEAVFMALRCPLTYSPPTHQVLCKRSRGRGERLQPPAHIPRHRLTEPVAAGTAELCEMSRGVMLIGSLASVSLWLAYSSISTVFITWKSEGTIKR

SEQ ID NO: 879667 - protein, 193 aa, Homo sapiens
NITLLKGVAVIVVAIMGSGIFVTPTGVLKEAGSPGLALVVWAACGVFSIVGALCYAELGTTISKSGGDYAYMLDVYGSLPAFLKLWIELLIIRPSSQYIVALVFATYLLKPLFPTCPVPEEAAKLVACHSVRWSVTLSPRLECSGAISAHCQLHLLGSRHSPASASRVAGIAGARHHAWLIFCIFSRDRVSPC

SEQ ID NO: 879668 - protein, 237 aa, Homo sapiens
MVHVDPTLLDAFVPESSLLRYMFIQLTQDLGMFSSIRGINLALAKSFPYNFQQPALMMAGSTWILQFFPQMFPICLCCMPCDSGGAASGAGRRGSSGRVSVRSCRHRLFLVVLLLGGPGDVGRAGPWKRRRLPFIRLSLTAPLPPPRPVLRAQAEPGTVVLFPRPPPPPPPPPSRLPSQPRAGAGCWRRPVRVATRASLGGGAWPYRVGEGNEPQSPGVSAERRRRHQRHQLFAELE

SEQ ID NO: 879669 - protein, 132 aa, Homo sapiens
NITLLKGVAVIVVAIMGSGIFVTPTGVLKEAGSPGLALVVWAACGVFSIVGALCYAELGTTISKSGGDYAYMLDVYGSLPAFLKLWIELLIIRPSSQYIVALVFATYLLKPLFPTCPVPEEAAKLVACHSVP

SEQ ID NO: 879670 - protein, 302 aa, Homo sapiens
NITLLKGVAVIVVAIMGSGIFVTPTGVLKEAGSPGLALVVWAACGVFSIVGALCYAELGTTISKSGGDYAYMLDVYGSLPAFLKLWIELLIIRPSSQYIVALVFATYLLKPLFPTCPVPEEAAKLVACHSVRTAGPTPPLAPSMPCDSGGAASGAGRRGSSGRVSVRSCRHRLFLVVLLLGGPGDVGRAGPWKRRRLPFIRLSLTAPLPPPRPVLRAQAEPGTVVLFPRPPPPPPPPPSRLPSQPRAGAGCWRRPVRVATRASLGGGAWPYRVGEGNEPQSPGVSAERRRRHQRHQLFAELE

SEQ ID NO: 879671 - protein, 194 aa, Homo sapiens
NITLLKGVAVIVVAIMGSGIFVTPTGVLKEAGSPGLALVVWAACGVFSIVGALCYAELGTTISKSGGDYAYMLDVYGSLPAFLKLWIELLIIRPSSQYIVALVFATYLLKPLFPTCPVPEEAAKLVACHSVQAILGKRSSFAYKAAQLTGLGPFLPQPQHWPPGTASRSHLESTEKHWTLPSKGLCVTAQVACL

SEQ ID NO: 879672 - protein, 105 aa, Homo sapiens
ELLCQVHPGGPGCLGFLELVKLPPLPLCSLQQAILGKRSSFAYKAAQLTGLGPFLPQPQHWPFGQTLKPCAERTLSLQMTPGGSPRGPGRSTCVSVGSENDRPIA

SEQ ID NO: 879673 - protein, 170 aa, Homo sapiens
NITLLKGVAVIVVAIMGSGIFVTPTGVLKEAGSPGLALVVWAACGVFSIVGALCYAELGTTISKSGGDYAYMLDVYGSLPAFLKLWIELLIIRPSSQYIVALVFATYLLKPLFPTCPVPEEAAKLVACHSVLIPDQPQGLPAEPLQHPARWERGHRLPGPGLLPPGVTQC

SEQ ID NO: 879674 - protein, 205 aa, Homo sapiens
NITLLKGVAVIVVAIMGSGIFVTPTGVLKEAGSPGLALVVWAACGVFSIVGALCYAELGTTISKSGGDYAYMLDVYGSLPAFLKLWIELLIIRPSSQYIVALVFATYLLKPLFPTCPVPEEAAKLVACHSVQAILGKRSSFAYKAAQLTGLGPFLPQPQHWPFGQTLKPCAERTLSLQMTPGGSPRGPGRSTCVSVGSENDRPIA

SEQ ID NO: 879675 - protein, 189 aa, Homo sapiens
MHRQSPKEKASKTTTVRRRKRPHAHLRVPHLEEVMSPVTTPTDEDVGHRIKHVAGSTQTRHIPEDTPNGFHLQSVSKLLLVISCVLVLLVILNMMLFYKLWMLEYTTQTLTAWQGLRLQERLPQSQTEWAQLLESQQKYHDTELQKWREIIKSSVMLLDQMKDSLINLQNGIRSRDYTSESEEKRNRYH

SEQ ID NO: 879676 - protein, 115 aa, Homo sapiens
LLLRVSTELRYRKQPWGLVKTFIEKNFWSGLEDYFRHLESELAKTESTYLAEMHRQSPKEKASKTTTVRRRKRPHAHLRVPHLEEVMSPVTTPTDEDVGHRIKHVAGVCQVGTGR

SEQ ID NO: 879677 - protein, 88 aa, Homo sapiens
  misc_feature (4)..(4): Xaa can be any naturally occurring amino acid
KKKXKKKKKDLQRRAPGTLHQSTRTDLHHLGHGTAHCGPQTPQQPSTARLCASTAATGDACLDGDPAVRLHPGTGASRTTAELPGTEE

SEQ ID NO: 879678 - protein, 378 aa, Homo sapiens
ALTWAQGNTEDMGKSIPQYLGQLDIRKSVVSLATGAGAIYLLYKAIKAGIKCKPPLCSNSPICIARECPGPGERALPQEAPAPEASAVGGPKGLAVERERHGRDSGELRRLLNSLECKQDEYAKSMILHSITRCVYLLEAEASACTTDDIVLLGYMLDDKDNSVKTQALNTLKAFSGIRKFRLKIQEHSIKVLELISTIWDTELHIAGLRLLNNLPLPDYVHPQLRRVMPALMEILQSDYILAQVQAVRLLSYLAQKNDLLYDILNCQVHSNFLNLFQPTQSGSLLYEVLVFAERLSEGRNAPHYHVVKWHYNEQSLHESLFGEESRLADRLLALVIHPEEDVQIQACKVIVSLQYPQDLRARPSSCQPSRSYFKNTE

SEQ ID NO: 879679 - protein, 378 aa, Homo sapiens; identical to SEQ ID NO: 879678

SEQ ID NO: 879680 - protein, 199 aa, Homo sapiens
  misc_feature (6)..(6): Xaa can be any naturally occurring amino acid
MCKGGXLEHSIKVLELISTIWDTELHIAGLRLLNNLPLPDYVHPQLRRVMPALMEILQSDYILAQVQAVRLLSYLAQKNDLLYDILNCQVHSNFLNLFQPTQSGSLLYEVLVFAERLSEGRNAPHYHVVKWHYNEQSLHESLFGEESRLADRLLALVIHPEEDVQIQACKVIVSLQYPQDLRARPSSCQPSRSYFKNTE

SEQ ID NO: 879681 - protein, 351 aa, Homo sapiens
ALTWAQGNTEDMGKSIPQYLGQLDIRKSVVSLATGAGAIYLLYKAIKAGIKCKPPLCSNSPICIARLAVERERHGRDSGELRRLLNSLECKQDEYAKSMILHSITRCVYLLEAEASACTTDDIVLLGYMLDDKDNSVKTQALNTLKAFSGIRKFRLKIQEHSIKVLELISTIWDTELHIAGLRLLNNLPLPDYVHPQLRRVMPALMEILQSDYILAQVQAVRLLSYLAQKNDLLYDILNCQVHSNFLNLFQPTQSGSLLYEVLVFAERLSEGRNAPHYHVVKWHYNEQSLHESLFGEESRLADRLLALVIHPEEDVQIQACKVIVSLQYPQDLRARPSSCQPSRSYFKNTE

SEQ ID NO: 879682 - protein, 378 aa, Homo sapiens; identical to SEQ ID NO: 879678

SEQ ID NO: 879683 - protein, 179 aa, Homo sapiens
PRWAGNQPPVSNSFSNREAAMTQPTRPSVTCDQGSSTIGGTAAQATTSSSATSGSNYQRDRLGRRPEIGVGGQPQICFPRPRSAQQPVLFSLMNSSEAAMKKTLPKSHLSRVIIHDNRITQRIYEMEVSALEKTKKKISHYYEHLKKKFMTEQLRKLGRWREESVNSNRYLTFGIPPPV

SEQ ID NO: 879684 - protein, 95 aa, Homo sapiens
MGCMKSKQTFPFPTIYEGEKQHESEEPFMPEERCLPRMASPVNVKEEVKEPPGTNIVILEYAHRLSQDILCDALQQWACNNIKYHDIPYIESEGP

SEQ ID NO: 879685 - protein, 527 aa, Homo sapiens
GLRSPGYGCTQQRRRGPQPRGGGKVTDPPWGAACAACSRLRKTLPMAQGRERDEGPHSAGGASLSVRWVQGFPKQNVHFVNDNTICYPCGNYVIFINIETKKKTVLQCSNGIVGVMATNIPCEVVAFSDRKLKPLIYVYSFPGLTRRTKLKGNILLDYTLLSFSYCGTYLASYSSLPEFELALWNWESSIILCKKSQPGMDVNQMSFNPMNWRQLCLSSPSTVSVWTIERSNQEHCFRARSVKLPLEDGSFFNETDVVFPQSLPKDLIYGPVLPLSAIAGLVGKEAETFRPKDDLYPLLHPTMHCWTPTSDLYIGCEEGHLLMINGDTLQVTVLNKIEEESPLEDRRNFISPVTLVYQKEGVLASGIDGFVYSFIIKDRSYMIEDFLEIERPVEHMTFSPNYTVLLIQTDKGSVYIYTFGKEPTLNKVLDACDGKFQAIDFITPGTQYFMTLTYSGEICVWWLEDCACVSKIYLNTLATVLACCPSSLSAAVGTEDGSVYFISVYDKESPQVVHKAFLSESSVQHVV

SEQ ID NO: 879686 - protein, 567 aa, Homo sapiens
GLRSPGYGCTQQRRRGPQPRGGGKVTDPPWGAACAACSRLRKTLPMAQGRERDEGPHSAGGASLSVRWVQGFPKQNVHFVNDNTICYPCGNYVIFINIETKKKTVLQCSNGIVGVMATNIPCEVVAFSDRKLKPLIYVYSFPGLTRRTKLKGNILLDYTLLSFSYCGTYLASYSSLPEFELALWNWESSIILCKKSQPGMDVNQMSFNPMNWRQLCLSSPSTVSVWTIERSNQEHCFRARSVKLPLEDGSFFNETDVVFPQSLPKDLIYGPVLPLSAIAGLVGKEAETFRPKDDLYPLLHPTMHCWTPTSDLYIGCEEGHLLMINGDTLQVTVLNKIEEESPLEDRRNFISPVTLVYQKEGVLASGIDGFVYSFIIKDRSYMIEDFLEIERPVEHMTFSPNYTVLLIQTDKGSVYIYTFGKEPTLNKVLDACDGKFQAIDFITPGTQYFMTLTYSGEICVWWLEDCACVSKIYLNTLATVLACCPSSLSAAVGTEDGSVYFISVYDKESPQVVHKAFLSESSVQHVVYDQQGIFLLVGTAEGKVFIINANSSSSFQIIGFTGTTENA

SEQ ID NO: 879687 - protein, 418 aa, Homo sapiens
GLRSPGYGCTQQRRRGPQPRGGGKVTDPPWGAACAACSRLRKTLPMAQGRERDEGPHSAGGASLSVRWVQGFPKQNVHFVNDNTICYPCGNYVIFINIETKKKTVLQCSNGIVGVMATNIPCEVVAFSDRKLKPLIYVYSFPGLTRRTKLKGNILLDYTLLSFSYCGTYLASYSSLPEFELALWNWESSIILCKKSQPGMDVNQMSFNPMNWRQLCLSSPSTVSVWTIERSNQEHCFRARSVKLPLEDGSFFNETDVVFPQSLPKDLIYGPVLPLSAIAGLVGKEAETFRPKDDLYPLLHPTMHCWTPTSDLYIGCEEGHLLMINGDTLQVTVLNKIEEESPLEDRRNFISPVTLVYQKEGVLASGIDGFVYSFIIKDRSYMIEDFLEIERPVEHMTFSPNYTVLLIQTDKVCWMVIS

SEQ ID NO: 879688 - protein, 365 aa, Homo sapiens
MDVNQMSFNPMNWRQLCLSSPSTVSVWTIERSNQEHCFRARSVKLPLEDGSFFNETDVVFPQSLPKDLIYGPVLPLSAIAGLVGKEAETFRPKDDLYPLLHPTMHCWTPTSDLYIGCEEGHLLMINGDTLQVTVLNKIEEESPLEDRRNFISPVTLVYQKEGVLASGIDGFVYSFIIKDRSYMIEDFLEIERPVEHMTFSPNYTVLLIQTDKGSVYIYTFGKEPTLNKVLDACDGKFQAIDFITPGTQYFMTLTYSGEICVWWLEDCACVSKIYLNTLATVLACCPSSLSAAVGTEDGSVYFISVYDKESPQVVHKAFLSESSVQHVVYDQQGIFLLVGTAEGKVFIINANSSSSFQIIGFTGTT

SEQ ID NO: 879689 - protein, 390 aa, Homo sapiens
PPSHTPGPARTRQLLEAPPGPTSTRHLEPLAPMDPLRRSPSPCLSSQPSSPSTPPCEMLGPVGIEAVLDQLKIKAMKMGFEFNIMVVGQSGLGKSTMVNTLFKSKVWKSNPPGLGVPTPQTLQLHSLTHVIEEKGVKLKLTVTDTPGFGDQINNDNCWDPILGYINEQYEQYLQEEILITRQRHIPDTRVHCCVYFVPPTGHCLRALDIEFLQRLCRTVNVVPVIARADSLTMEEREAFRRRIQQNLRTHCIDVYPQMCFDEDINDKILNSKLRDRIPFAVVGADQEHLVNGRCVLGRKTKWGIIEVENMAHCEFPLLRDLLIRSHLQDLKDITHNIHYENYRVIRLNESHLLPRGPGWVNLAPASPGQLTTPRTFKVCRGAHDDSDDEF

SEQ ID NO: 879690 - protein, 318 aa, Homo sapiens
PPSHTPGPARTRQLLEAPPGPTSTRHLEPLAPMDPLRRSPSPCLSSQPSSPSTPPCEMLGPVGIEAVLDQLKIKAMKMGFEFNIMVVGQSGLGKSTMVNTLFKSKVWKSNPPGLGVPTPQTLQLHSLTHVIEEKGVKLKLTVTDTPGFGDQINNDNCWDPILGYINEQYEQQQNLRTHCIDVYPQMCFDEDINDKILNSKLRDRIPFAVVGADQEHLVNGRCVLGRKTKWGIIEVENMAHCEFPLLRDLLIRSHLQDLKDITHNIHYENYRVIRLNESHLLPRGPGWVNLAPASPGQLTTPRTFKVCRGAHDDSDDEF

SEQ ID NO: 879691 - protein, 257 aa, Homo sapiens
GSGAASALARSRPLSPARQPALLPPQTRAPRSGAMQRLAMDLRMLSRELSLYLEHQVRVGFFGSGVGLSLILGFSVAYAFYYLSSIAKKPQLVTGGESFSRFLQDHCPVVTETYYPTVWCWEGRGQTLLRPFITSKPPVQYRNELIKTADGGQISLDWFDNDNSTCYMDASTRPTILLLPGLTGTSKESYILHMIHLSEELGYRCVVFNNRGVAGENLLTPRTYCCANTEDLETVIHHVHSLYPSAPFLAAGVSMGG

SEQ ID NO: 879692 - protein, 224 aa, Homo sapiens
GSGAASALARSRPLSPARQPALLPPQTRAPRSGAMQRLAMDLRMLSRELSLYLEHQVRVGFFGSGVGLSLILGFSVAYAFYYLSSIAKKPQLVTGGESFSRFLQDHCPVVTETYYPTVWCWEGRGQTLLRPFITSKPPVQYRNELIKTADGGQISLDWFDNDNSTCYMDASTRPTILLLPGLTGTSKESYILHMIHLSEELGYRCVVFNNRGVAGENLLVSKFK

SEQ ID NO: 879693 - protein, 224 aa, Homo sapiens; identical to SEQ ID NO: 879692

SEQ ID NO: 879694 - protein, 257 aa, Homo sapiens; identical to SEQ ID NO: 879691

SEQ ID NO: 879695 - protein, 219 aa, Homo sapiens
GSGAASALARSRPLSPARQPALLPPQTRAPRSGAMQRLAMDLRMLSRELSLYLEHQVRVGFFGSGVGLSLILGFSVAYAFYYLSSIAKKPQLVTGGESFSRFLQDHCPVVTETYYPTVWCWEGRGQTLLRPFITSKPPVQYRNELIKTADGGQISLDWFDNDNSTCYMDASTRPTILLLPGLTGTSKESYILHMIHLSEELGYRCVVFNNRGVAGENLL

SEQ ID NO: 879696 - protein, 74 aa, Homo sapiens
TCPRQPASPSSASKLPKRLHWSWDSRLWLLCLFEGPRKWRGMCPRLRPLIVSPQRKSCTEGNRLPARVRRLHLL

SEQ ID NO: 879697 - protein, 74 aa, Homo sapiens; identical to SEQ ID NO: 879696

SEQ ID NO: 879698 - protein, 74 aa, Homo sapiens; identical to SEQ ID NO: 879696

SEQ ID NO: 879699 - protein, 724 aa, Homo sapiens
MGDEDWEAEINPHMSSYVPIFEKDRYSGENGDNFNRTPASSSEMDDGPSRRDHFMKSGFASGRNFGNRDAGECNKRDNTSTMGGFGVGKSFGNRGFSNSRFEDGDSSGFWRESSNDCEDNPTRNRGFSKRGGYRDGNNSEASGPYRRGGRGSFRGCRGGFGLGSPNNDLDPDECMQRTGGLFGSRRPVLSGTGNGDTSQSRSGSGSERGGYKGLNEEVITGSGKNSWKSEAEGGESSDTQGPKVTYIPPPPPEDEDSIFAHYQTGINFDKYDTILVEVSGHDAPPAILTFEEANLCQTLNNNIAKAGYTKLTPVQKYSIPIILAGRDLMACAQTGSGKTAAFLLPILAHMMHDGITASRFKELQEPECIIVAPTRELVNQIYLEARKFSFGTCVRAVVIYGGTQLGHSIRQIVQGCNILCATPGRLMDIIGKEKIGLKQIKYLVLDEADRMLDMGFGPEMKKLISCPGMPSKEQRQTLMFSATFPEEIQRLAAEFLKSNYLFVAVGQVGGACRDVQQTVLQVGQFSKREKLVEILRNIGDERTMVFVETKKKADFIATFLCQEKISTTSIHGDREQREREQALGDFRFGKCPVLVATSVAARGLDIENVQHVINFDLPSTIDEYVHRIGRTGRCGNTGRAISFFDLESDNHLAQPLVKVLTDAQQDVPAWLEEIAFSTYIPGFSGSTRGNVFASVDTRKGKSTLNTAGFSSSQAPNPVDDESWD

SEQ ID NO: 879700 - protein, 149 aa, Homo sapiens
MGDEDWEAEINPHMSSYVPIFEKDRYSGENGDNFNRTPASSSEMDDGPSRRDHFMKSGFASGRNFGNRDAGECNKRDNTSTMGGFGVGKSFGNRGFSNSRFEDGDSSGFWRESSNDCEDNPTRNRGFSKRGGKDHILEQFVLNTETLNW

SEQ ID NO: 879701 - protein, 690 aa, Homo sapiens
MGDEDWEAEINPHMSSYVPIFEKDRYSGENGDNFNRTPASSSEMDDGPSRRDHFMKSGFASGRNFGNRDAGECNKRDNTSTMGGFGVGKSFGNRGFSNSRFEDGDSSGFWRESSNDCEDNPTRNRGFSKRGDNDLDPDECMQRTGGLFGSRRPVLSGTGNGDTSQSRSGSGSERGGYKGLNEEVITGSGKNSWKSEAEGGESSDTQGPKVTYIPPPPPEDEDSIFAHYQTGINFDKYDTILVEVSGHDAPPAILTFEEANLCQTLNNNIAKAGYTKLTPVQKYSIPIILAGRDLMACAQTGSGKTAAFLLPILAHMMHDGITASRFKELQEPECIIVAPTRELVNQIYLEARKFSFGTCVRAVVIYGGTQLGHSIRQIVQGCNILCATPGRLMDIIGKEKIGLKQIKYLVLDEADRMLDMGFGPEMKKLISCPGMPSKEQRQTLMFSATFPEEIQRLAAEFLKSNYLFVAVGQVGGACRDVQQTVLQVGQFSKREKLVEILRNIGDERTMVFVETKKKADFIATFLCQEKISTTSIHGDREQREREQALGDFRFGKCPVLVATSVAARGLDIENVQHVINFDLPSTIDEYVHRIGRTGRCGNTGRAISFFDLESDNHLAQPLVKVLTDAQQDVPAWLEEIAFSTYIPGFSGSTRGNVFASVDTRKGKSTLNTAGFSSSQAPNPVDDESWD

SEQ ID NO: 879702 - protein, 704 aa, Homo sapiens
MGDEDWEAEINPHMSSYVPIFEKDRYSGENGDNFNRTPASSSEMDDGPSRRDHFMKSGFASGRNFGNRDAGECNKRDNTSTMGGFGVGKSFGNRGFSNSRFEDGDSSGFWRGYRDGNNSEASGPYRRGGRGSFRGCRGGFGLGSPNNDLDPDECMQRTGGLFGSRRPVLSGTGNGDTSQSRSGSGSERGGYKGLNEEVITGSGKNSWKSEAEGGESSDTQGPKVTYIPPPPPEDEDSIFAHYQTGINFDKYDTILVEVSGHDAPPAILTFEEANLCQTLNNNIAKAGYTKLTPVQKYSIPIILAGRDLMACAQTGSGKTAAFLLPILAHMMHDGITASRFKELQEPECIIVAPTRELVNQIYLEARKFSFGTCVRAVVIYGGTQLGHSIRQIVQGCNILCATPGRLMDIIGKEKIGLKQIKYLVLDEADRMLDMGFGPEMKKLISCPGMPSKEQRQTLMFSATFPEEIQRLAAEFLKSNYLFVAVGQVGGACRDVQQTVLQVGQFSKREKLVEILRNIGDERTMVFVETKKKADFIATFLCQEKISTTSIHGDREQREREQALGDFRFGKCPVLVATSVAARGLDIENVQHVINFDLPSTIDEYVHRIGRTGRCGNTGRAISFFDLESDNHLAQPLVKVLTDAQQDVPAWLEEIAFSTYIPGFSGSTRGNVFASVDTRKGKSTLNTAGFSSSQAPNPVDDESWD

SEQ ID NO: 879703 - protein, 724 aa, Homo sapiens; identical to SEQ ID NO: 879699

SEQ ID NO: 879704 - protein, 724 aa, Homo sapiens; identical to SEQ ID NO: 879699

SEQ ID NO: 879705 - protein, 698 aa, Homo sapiens
MGDEDWEAEINPHMSSYVPIFEKDRYSGENGDNFNRTPASSSEMDDGPSRRDHFMKSGFASGRNFGNRGFSNSRFEDGDSSGFWRESSNDCEDNPTRNRGFSKRGGYRDGNNSEASGPYRRGGRGSFRGCRGGFGLGSPNNDLDPDECMQRTGGLFGSRRPVLSGTGNGDTSQSRSGSGSERGGYKGLNEEVITGSGKNSWKSEAEGGESSDTQGPKVTYIPPPPPEDEDSIFAHYQTGINFDKYDTILVEVSGHDAPPAILTFEEANLCQTLNNNIAKAGYTKLTPVQKYSIPIILAGRDLMACAQTGSGKTAAFLLPILAHMMHDGITASRFKELQEPECIIVAPTRELVNQIYLEARKFSFGTCVRAVVIYGGTQLGHSIRQIVQGCNILCATPGRLMDIIGKEKIGLKQIKYLVLDEADRMLDMGFGPEMKKLISCPGMPSKEQRQTLMFSATFPEEIQRLAAEFLKSNYLFVAVGQVGGACRDVQQTVLQVGQFSKREKLVEILRNIGDERTMVFVETKKKADFIATFLCQEKISTTSIHGDREQREREQALGDFRFGKCPVLVATSVAARGLDIENVQHVINFDLPSTIDEYVHRIGRTGRCGNTGRAISFFDLESDNHLAQPLVKVLTDAQQDVPAWLEEIAFSTYIPGFSGSTRGNVFASVDTRKGKSTLNTAGFSSSQAPNPVDDESWD

SEQ ID NO: 879706 - protein, 221 aa, Homo sapiens
MWSAGRGGAAWPVLLGLLLALLVPGGGAAKTGAELVTCGSVLKLLNTHHRVRLHSHDIKYGSGSGQQSVTGVEASDDANSYWRIRGGSEGGCPRGSPVRCGQAVRLTHVLTGKNLHTHHFPSPLSNNQEVSAFGEDGEGDDLDLWTVRCSGQHWEREAAVRFQHVGTSVFLSVTGEQYGSPIRGQHEVHGMPSANTHNTWKAMEGIFIKPSVEPSAGHDEL

SEQ ID NO: 879707 - protein, 235 aa, Homo sapiens
MWSAGRGGAAWPVLLGLLLALLVPGGGAAKTGAELVTCGSVLKLLNTHHRVRLHSHDIKYGSGSGQQSVTGVEASDDANSYWRIRGGSEGGCPRGSPVRCGQAVRLTHVLTGKNLHTHHFPSPLSNNQEVSAFGEDGEGDDLDLWTVRCSGQHWEREAAVRFQHVGTSVFLSVTGEQYGSPIRGQHEVHGMPSANTHNTWKAMEDGWVDGGWQVGRLQGHSWQRLWVCRGPQVPL

SEQ ID NO: 879708 - protein, 221 aa, Homo sapiens; identical to SEQ ID NO: 879706

SEQ ID NO: 879709 - protein, 120 aa, Homo sapiens
ALISRALTSLDCDCPQDTCPSSPKDCRAEHVSEVTLSAHSPPWLTSVVFGADTLIPKPGSPKGLHDPGVPHTVQPCLAGTPVLLYLQQELPGLPSGPTPTGVSRIFIKPSVEPSAGHDEL

SEQ ID NO: 879710 - protein, 335 aa, Homo sapiens
EVADSRILCLALVHLPVEKESWIVSGTQSGTLLVINTEDGKKRHTLEKMTDSVTCLYCNSFSKQSKQKNFLLVGTADGKLAIFEDKTVKLKGAAPLKILNIGNVSTPLMCLSESTNSTERNVMWGGCGTKIFSFSNDFTIQKLIETRTSQLFSYAAFSDSNIITVVVDTALYIAKQNSPVVEVWDKKTEKLCGLIDCVHFLREVTVKENKESKHKMSYSGRVKTLCLQKNTALWIGTGGGHILLLDLSTRRLIRVIYNFCNSVRVMMTAQLGSLKNVMLVLGYNRKNTEGTQKQKEIQSCLTVWDINLPHEVQNLEKHIEVRKELAEKMRRTSVE

SEQ ID NO: 879711 - protein, 101 aa, Homo sapiens
EVADSRILCLALVHLPVEKESWIVSGTQSGTLLVINTEDGKKRHTLEKMTDSVTCLYCNSFSKQSKQKNFLLVGTADGKLAIFEDKTVKVNVECILHLNLF

SEQ ID NO: 879712 - protein, 329 aa, Homo sapiens
EVADSRILCLALVHLPVEKESWIVSGTQSGTLLVINTEDGKKRHTLEKMTDSVTCLYCNSFSKQSKQKNFLLVGTADGKLAIFEDKTVKLKGAAPLKILNIGNVSTPLMCLSESTNSTERNVMWGGCGTKIFSFSNDFTIQKLIETRTSQLFSYAAFSDSNIITVVVDTALYIAKQNSPVVEVWDKKTEKLCGLIDCVHFLREVTVKENKESKHKMSYSGRVKTLCLQKNTALWIGTGGGHILLLDLSTRRLIRVIYNFCNSVRVMMTAQLGSLKNVMLVLGYNRKNTEEIQSCLTVWDINLPHEVQNLEKHIEVRKELAEKMRRTSVE

SEQ ID NO: 879713 - protein, 108 aa, Homo sapiens
SCGGSGEGEPRGLGASVCLHLTRTQSEHDPHFSFCFKRKYRSYSIELQYLDIRNNRSRSRYGTARHTWSLRPGCRSANVRGIGLGLLSPTEPVAHSFSIIEYLLCARH

SEQ ID NO: 879714 - protein, 755 aa, Homo sapiens
MIYEEDAEEWALYLTEVFLHVVKREAILLYRLENFSFRHLELLNLTSYKCKLLILSNSLLRDLTPKKCQFLEKILHSPKSVVTLLCGVKSSDQLYELLNISQSRWEISTEQEPEDYISVIQSIIFKDSEDYFEVNIPTDLRAKHSGEISERKEIEELSEASRNTIPLAVVLPTEIPCENPGEIFIILRDEVIGDTVEVEFTSSNKRIRTRPALWNKKVWCMKALEFPAGSVHVNVYCDGIVKATTKIKYYPTAKAKECLFRMADSGESLCQNSIEELDGVLTSIFKHEIPYYEFQSLQTEICSQNKYTHFKELPTLLHCAAKFGLKNLAIHLLQCSGATWASKMKNMEGSDPAHIAERHGHKELKKIFEDFSIQEIDINNEQENDYEEDIASFSTYIPSTQNPAFHHESRKTYGQSADGAEANEMEGEGKQNGSGMETKHSPLEVGSESSEDQYDDLYVFIPGADPENNSQEPLMSSRPPLPPPRPVANAFQLERPHFTLPGTMVEGQMERSQNWGHPGVRQETGDEPKGEKEKKEEEKEQEEEEDPYTFAEIDDSEYDMILANLSIKKKTGSRSFIINRPPAPTPRPTSIPPKEETTPYIAQVFQQKTARRQSDDDKFRGLPKKQDRARIESPAFSTLRGCLTDGQEELILLQEKVKNGKMSMDEALEKFKHWQMGKSGLEMIQQEKLRQLRDCIIGKRPEEENVYNKLTIVHHPGGKETAHNENKFYNVHFSNKLPARPQVEKEFGFCCKKDH

SEQ ID NO: 879715 - protein, 835 aa, Homo sapiens
RPGRSLRGWQAGWGEPRAKGRENRGESLAGRVQVALGGQQCAGPSASTATMLPAAPGKGLGSPDPAPCGPAPPGNTKDIIMIYEEDAEEWALYLTEVFLHVVKREAILLYRLENFSFRHLELLNLTSYKCKLLILSNSLLRDLTPKKCQFLEKILHSPKSVVTLLCGVKSSDQLYELLNISQSRWEISTEQEPEDYISVIQSIIFKDSEDYFEVNIPTDLRAKHSGEISERKEIEELSEASRNTIPLAVVLPTEIPCENPGEIFIILRDEVIGDTVEVEFTSSNKRIRTRPALWNKKVWCMKALEFPAGSVHVNVYCDGIVKATTKIKYYPTAKAKECLFRMADSGESLCQNSIEELDGVLTSIFKHEIPYYEFQSLQTEICSQNKYTHFKELPTLLHCAAKFGLKNLAIHLLQCSGATWASKMKNMEGSDPAHIAERHGHKELKKIFEDFSIQEIDINNEQENDYEEDIASFSTYIPSTQNPAFHHESRKTYGQSADGAEANEMEGEGKQNGSGMETKHSPLEVGSESSEDQYDDLYVFIPGADPENNSQEPLMSSRPPLPPPRPVANAFQLERPHFTLPGTMVEGQMERSQNWGHPGVRQETGDEPKGEKEKKEEEKEQEEEEDPYTFAEIDDSEYDMILANLSIKKKTGSRSFIINRPPAPTPRPTSIPPKEETTPYIAQVFQQKTARRQSDDDKFRGLPKKQDRARIESPAFSTLRGCLTDGQEELILLQEKVKNGKMSMDEALEKFKHWQMGKSGLEMIQQEKLRQLRDCIIGKRPEEENVYNKLTIVHHPGGKETAHNENKFYNVHFSNKLPARPQVEKEFGFCCKKDH

SEQ ID NO: 879716 - protein, 755 aa, Homo sapiens; identical to SEQ ID NO: 879714

SEQ ID NO: 879717 - protein, 585 aa, Homo sapiens
RPGRSLRGWQAGWGEPRAKGRENRGESLAGRVQVALGGQQCAGPSASTATMLPAAPGKGLGSPDPAPCGPAPPGNTKDIIMIYEEDAEEWALYLTEVFLHVVKREAILLYRLENFSFRHLELLNLTSYKCKLLILSNSLLRDLTPKKCQFLEKILHSPKSVVTLLCGVKSSDQLYELLNISQSRWEISTEQEPEDYISVIQSIIFKDSEDYFEVNIPTDLRAKHSGEISERKEIEELSEASRNTIPLAVVLPTEIPCENPGEIFIILRDEVIGDTVEVEFTSSNKRIRTRPALWNKKVWCMKALEFPAGSVHVNVYCDGIVKATTKIKYYPTAKAKECLFRMADSGESLCQNSIEELDGVLTSIFKHEIPYYEFQSLQTEICSQNKYTHFKELPTLLHCAAKFGLKNLAIHLLQCSGATWASKMKNMEGSDPAHIAERHGHKELKKIFEDFSIQEIDINNEQENDYEEDIASFSTYIPSTQNPAFHHESRKTYGQSADGAEANEMEGEGKQNGSGMETKHSPLEVGSESSEDQYDDLYVFIPGADPENNSQEPLMSSRPPLPPPRPVANAFQLERPHFTLPGGDI

SEQ ID NO: 879718 - protein, 149 aa, Homo sapiens
MSVLAAAHLTSSSFSADEEFAMGTLKQWLPKEEDEGKVEMVSGIEVDEEQLEPRSDDDDTNFEESEDELRDEVVEYLEKLATFKGEEKTEEASSTSKDSRKSREREGISMQKSEELREGLENISTTSNDHICITDEDQGTSTTSQNIQV

SEQ ID NO: 879719 - protein, 94 aa, Homo sapiens
HSSLGDRARLHLKKKPKKPVASALSSVPGITPSGRKQVSCQGDTQTALWRVQCHEELRSPPTAVQPCRELEGESPSTVKSSDDSSPSSILIAAS

SEQ ID NO: 879720 - protein, 106 aa, Homo sapiens
LFHFLRLKTLSLLNTNSPFSPPPAPGNHILLSVYANWTTPGATDDWSHAVLSLCDWNPVSLTSLDLSLLSLLTALPLMISVSTVVSKLVPCLSSPSFLSSLNSASK

SEQ ID NO: 879721 - protein, 135 aa, Homo sapiens
PYRELCSWCLRNMMANHLVKPDNRNCKRPRELESPVPDSPQLSSLGKSDSSFSEISGLFYKDEALEKDLNDVSKEINLMLSTYAKLLSERAAVDASYIDEIDELFKEANAIENFLIQKREFLRQRFTVIANTLHR

SEQ ID NO: 879722 - protein, 122 aa, Homo sapiens
MANHLVKPDNRNCKRPRELESPVPDSPQLSSLGKSDSSFSEISGLFYKDEALEKDLNDVSKEINLMLSTYAKLLSERAAVDASYIDEIDELFKEANAIENFLIQKREFLRQRFTVIANTLHR

SEQ ID NO: 879723 - protein, 895 aa, Homo sapiens
MSAETPITLNIDPQDLQVQTFTVEKLLEPLIIQVTTLVNCPQNPSSRKKGRSKRASVLLASVEEATWNLLDKGEKIAQEATVLKDELTASLEEVRKESEALKVSAERFTDDPCFLPKREAVVQAARALLAAVTRLLILADMIDVMCLLQHVSAFQRTFESLKNVANKSDLQKTYQKLGKELENLDYLAFKRQQDLKSPNQRDEIAGARASLKENSPLLHSICSACLEHSDVASLKASKDTVCEEIQNALNVISNASQGIQNMTTPPEPQAATLGSALDELENLIVLNPLTVTEEEIRPSLEKRLEAIISGAALLADSSCTRDLHRERIIAECNAIRQALQDLLSEYMNNAGKKERSNTLNIALDNMCKKTRDLRRQLRKAIIDHVSDSFLDTTVPLLVLIEAAKNGREKEIKEYAAIFHEHTSRLVEVANLACSMSTNEDGIKIVKIAANHLETLCPQIINAALALAARPKSQAVKNTMEMYKRTWENHIHVLTEAVDDITSIDDFLAVSESHILEDVNKCIIALRDQDADNLDRAAGAIRGRAARVAHIVTGEMDSYEPGAYTEGVMRNVNFLTSTVIPEFVTQVNVALEALSKSSLNVLDDNQFVDISKKIYDTIHDIRCSVMMIRTPEELEDVSDLEEEHEVRSHTSIQTEGKTDRAKMTQLPEAEKEKIAEQVADFKKVKSKLDAEIEIWDDTSNDIIVLAKNMCMIMMEMTDFTRGKGPLKHTTDVIYAAKMISESGSRMDVLARQIANQCPDPSCKQDLLAYLEQIKFYSHQLKICSQVKAEIQNLGGELIMSALDSVTSLIQAAKNLMNAVVQTVKMSYIASTKIIRIQSPAGPRHPVVMWRMKAPAKKPLIKREKPEETCAAVRRGSAKKKIHPLQVMSEFRGRQIY

SEQ ID NO: 879724 - protein, 895 aa, Homo sapiens; identical to SEQ ID NO: 879723

SEQ ID NO: 879725 - protein, 895 aa, Homo sapiens; identical to SEQ ID NO: 879723

SEQ ID NO: 879726 - protein, 895 aa, Homo sapiens; identical to SEQ ID NO: 879723

SEQ ID NO: 879727 - protein, 142 aa, Homo sapiens
MQCPDPSCKQDLLAYLEQIKFYSHQLKICSQVKAEIQNLGGELIMSALDSVTSLIQAAKNLMNAVVQTVKMSYIASTKIIRIQSPAGPRHPVVMWRMKAPAKKPLIKREKPEETCAAVRRGSAKKKIHPLQVMSEFRGRQIY

SEQ ID NO: 879728 - protein, 234 aa, Homo sapiens
MTQLPEAEKEKIAEQVADFKKVKSKLDAEIEIWDDTSNDIIVLAKNMCMIMMEMTDFTRGKGPLKHTTDVIYAAKMISESGSRMDVLARQIANQCPDPSCKQDLLAYLEQIKFYSHQLKICSQVKAEIQNLGGELIMSALDSVTSLIQAAKNLMNAVVQTVKMSYIASTKIIRIQSPAGPRHPVVMWRMKAPAKKPLIKREKPEETCAAVRRGSAKKKIHPLQVMSEFRGRQIY

SEQ ID NO: 879729 - protein, 946 aa, Homo sapiens
SGLFRLFAYRCIISQIVSHDSGTEFLNTRNCLDNWFSICIWAILCPAVEGSMSAETPITLNIDPQDLQVQTFTVEKLLEPLIIQVTTLVNCPQNPSSRKKGRSKRASVLLASVEEATWNLLDKGEKIAQEATVLKDELTASLEEVRKESEALKVSAERFTDDPCFLPKREAVVQAARALLAAVTRLLILADMIDVMCLLQHVSAFQRTFESLKNVANKSDLQKTYQKLGKELENLDYLAFKRQQDLKSPNQRDEIAGARASLKENSPLLHSICSACLEHSDVASLKASKDTVCEEIQNALNVISNASQGIQNMTTPPEPQAATLGSALDELENLIVLNPLTVTEEEIRPSLEKRLEAIISGAALLADSSCTRDLHRERIIAECNAIRQALQDLLSEYMNNAGKKERSNTLNIALDNMCKKTRDLRRQLRKAIIDHVSDSFLDTTVPLLVLIEAAKNGREKEIKEYAAIFHEHTSRLVEVANLACSMSTNEDGIKIVKIAANHLETLCPQIINAALALAARPKSQAVKNTMEMYKRTWENHIHVLTEAVDDITSIDDFLAVSESHILEDVNKCIIALRDQDADNLDRAAGAIRGRAARVAHIVTGEMDSYEPGAYTEGVMRNVNFLTSTVIPEFVTQVNVALEALSKSSLNVLDDNQFVDISKKIYDTIHDIRCSVMMIRTPEELEDVSDLEEEHEVRSHTSIQTEGKTDRAKMTQLPEAEKEKIAEQVADFKKVKSKLDAEIEIWDDTSNDIIVLAKNMCMIMMEMTDFTRGKGPLKHTTDVIYAAKMISESGSRMDVLARQIANQCPDPSCKQDLLAYLEQIKFYSHQLKICSQVKAEIQNLGGELIMSALDSVTSLIQAAKNLMNAVVQTVKMSYIASTKIIRIQSPAGPRHPVVMWRMKAPAKKPLIKREKPEETCAAVRRGSAKKKIHPLQVMSEFRGRQIY

SEQ ID NO: 879730 - protein, 68 aa, Homo sapiens
  misc_feature (8)..(8): Xaa can be any naturally occurring amino acid
  misc_feature (17)..(17): Xaa can be any naturally occurring amino acid
DIEKGEEXLLETIFNSXTATAGRVSAKNLMNAVVQTVKMSYIASTKIIRIQSPSCDVENEGSCKKTLD

SEQ ID NO: 879731 - protein, 895 aa, Homo sapiens; identical to SEQ ID NO: 879723

SEQ ID NO: 879732 - protein, 895 aa, Homo sapiens; identical to SEQ ID NO: 879723

SEQ ID NO: 879733 - protein, 895 aa, Homo sapiens; identical to SEQ ID NO: 879723

SEQ ID NO: 879734 - protein, 154 aa, Homo sapiens
  misc_feature (10)..(10): Xaa can be any naturally occurring amino acid
VLRYSDSLIXPPIQCPDPSCKQDLLAYLEQIKFYSHQLKICSQVKAEIQNLGGELIMSALDSVTSLIQAAKNLMNAVVQTVKMSYIASTKIIRIQSPAGPRHPVVMWRMKAPAKKPLIKREKPEETCAAVRRGSAKKKIHPLQVMSEFRGRQIY

SEQ ID NO: 879735 - protein, 433 aa, Homo sapiens
MSAETPITLNIDPQDLQVQTFTVEKLLEPLIIQVTTLVNCPQNPSSRKKGRSKRASVLLASVEEATWNLLDKGEKIAQEATVLKDELTASLEEVRKESEALKVSAERFTDDPCFLPKREAVVQAARALLAAVTRLLILADMIDVMCLLQHVSAFQRTFESLKNVANKSDLQKTYQKLGKELENLDYLAFKRQQDLKSPNQRDEIAGARASLKENSPLLHSICSACLEHSDVASLKASKDTVCEEIQNALNVISNASQGIQNMTTPPEPQAATLGSALDELENLIVLNPLTVTEEEIRPSLEKRLEAIISGAALLADSSCTRDLHRERIIAECNAIRQALQDLLSEYMNNAGKKERSNTLNIALDNMCKKTRDLRRQLRKAIIDHVSDSFLDTTVPLLVLIEAAKNGREKEIKEYAAIFHEHTSRLVEVSMLEL

SEQ ID NO: 879736 - protein, 359 aa, Homo sapiens
MNLNPPTSALQIEGKGSHIMARNVSCFLVRHTPHPRRVCHIKGLNNIPICTVNDDENAFGTLWEVGQSNYLEKNRIPFANCSYPPSTAVQKSPVRGMSPAPNGAKVPPRPHSEPSRKIKECFKTSSENPLVIKKEEIKAKRPPSPPKACSTPGSCSSGMTSTKNDVKANTICIPNYLDQEIKILAKLCSILHTDSLAEVLQWLLHATSKEKEWVSALIHSELAEINLLTHHRRNTSMEPAAETGKPPTVKSPPTVKLPPNFTAKSKVLTRDTEGDQPTRVSSQGSEENKEVPKEAEHKPPLLIRRNNMKIPVAEYFSKPNSPPRPNTQESGSAKPVSARSIQEYNLCPQRACYPSTHRR

SEQ ID NO: 879737 - protein, 189 aa, Homo sapiens
MNLNPPTSALQIEGKGSHIMARNVSCFLVRHTPHPRRVCHIKGLNNIPICTVNDDENAFGTLWEVGQSNYLEKNRIPFANCSYPPSTAVQKSPVRGMSPAPNGAKVPPRPHSEPSRKIKECFKTSSENPLVIKKEEIKAKRPPSPPKACSTPGSCSSGMTSTKNDVKANTICIPNYLDQEIKKKSGSQL

SEQ ID NO: 879738 - protein, 69 aa, Homo sapiens
LTWGSVGVHDIVLHQHLGHRGVWNREGLVVRRLELVEGLLPIPKGPPAGAVGRTMAASSGSMKQSRRQR

SEQ ID NO: 879739 - protein, 88 aa, Homo sapiens
TRAPARATPPRGVLSCLALVLGLTDSKDSLDEARQKIFDIREEYRNKLLEAEHLKLETLAAQEAAMKLETEKMTPAPDTQKKKKGKKK

SEQ ID NO: 879740 - protein, 390 aa, Homo sapiens
MHEHATPVTSAYGERHEELINLGSPDSHTISEGQKSSVTSKTTRKGKEKSSEKEKTAKEKQAPRFEPQISTVHPQQEDPNKPYWILRLVTEHNESELFEVKKDTERADEIRAMKQAWETTEPGRAIKASQARLHYLSGFIKKTSDAESPPISESQTKPKEEVETAARGVKEPNSKNSAGSESKEMTQTGSGSAVWKKWQLTKGLRDVAKSTSSESGGVSSPGKEEREQSTRKENIQTGPRTRSPTILETSPRLIRKALEFMDLSQYVRKTDTDPLLQTDELNQQQAMQKAEEIHQFRQHRTRVLSIRNIDQEERLKLKDEVLDMYKEMQDSLDEARQKIFDIREEYRNKLLEAEHLKLETLAAQEAAMKLETEKMTPAPDTQKKKKGKKK

SEQ ID NO: 879741 - protein, 390 aa, Homo sapiens; identical to SEQ ID NO: 879740

SEQ ID NO: 879742 - protein, 737 aa, Homo sapiens
GSGFRPRRTLPWAGLSRGTRWNRGERGAPGAANMDDYSLDEFRRRWQEELAQAQAPKKRRRPEAAERRARRPENEMNDVPFFDIQLPYELAINIFQYLDRKELEKMGTDEQTDFGLGDAHQSDGLNLEREIVSQTTATQEKSQEELPTTNNSVSKEIWLDFEDFCVCFQNIYIFHKPSSYCLNFQKSEFKFSEERVSYYLFVDSLKPIELLVCFSALVRWGEYGALTKDSPPIEPGLLTAETFSWKSLKPGSLVLKIHTYATKATVVRLPVGRHMLLFNAYSPVGHSIHICSMVSFVIGDEHVVLPNFEPESCRFTEQSLLIMKAIGNVIANFKDKGKLSAALKDLQTAHYPVPFHDKELTAQHFRVFHLSLWRLMKKVQITKPPPNFKFAFRAMVLDLELLNSSLEEVSLVEWLDVKYCMPTSDKEYSAEEVAAAIKIQAMWRGTYVRLLMKARIPDTKENISVADTLQKVWAVLEMNLEQYAVSLLRLMFKSKCKSLESYPCYQDEETKIAFADYTVTYQEQPPNSWFIVFRETFLVHQDMILVPKVYTTLPICILHIVNNDTMEQVPKVFQKVVPYLYTKNKKGYTFVAEAFTGDTYVAASRWKLRLIGSSAPLPCLSRDSPCNSFAIKEIRDYYIPNDKKILFRYSVKVLTPQPATIQVRTSKPDAFIKLQVLENEETMVSSTGKGQAIIPAFHFLKSEKGLSSQCKCTFMNRIVRFINGYLCFHDTLKMKIK

SEQ ID NO: 879743 - protein, 1049 aa, Homo sapiens
GSGFRPRRTLPWAGLSRGTRWNRGERGAPGAANMDDYSLDEFRRRWQEELAQAQAPKKRRRPEAAERRARRPENEMNDVPFFDIQLPYELAINIFQYLDRKELEKMGTDEQTDFGLGDAHQSDGLNLEREIVSQTTATQEKSQEELPTTNNSVSKEIWLDFEDFCVCFQNIYIFHKPSSYCLNFQKSEFKFSEERVSYYLFVDSLKPIELLVCFSALVRWGEYGALTKDSPPIEPGLLTAETFSWKSLKPGSLVLKIHTYATKATVVRLPVGRHMLLFNAYSPVGHSIHICSMVSFVIGDEHVVLPNFEPESCRFTEQSLLIMKAIGNVIANFKDKGKLSAALKDLQTAHYPVPFHDKELTAQHFRVFHLSLWRLMKKVQITKPPPNFKFAFRAMVLDLELLNSSLEEVSLVEWLDVKYCMPTSDKEYSAEEVAAAIKIQAMWRGTYVRLLMKARIPDTKENISVADTLQKVWAVLEMNLEQYAVSLLRLMFKSKCKSLESYPCYQDEETKIAFADYTVTYQEQPPNSWFIVFRETFLVHQDMILVPKVYTTLPICILHIVNNDTMEQVPKVFQKVVPYLYTKNKKGYTFVAEAFTGDTYVAASRWKLRLIGSSAPLPCLSRDSPCNSFAIKEIRDYYIPNDKKILFRYSVKVLTPQPATIQVRTSKPDAFIKLQVLENEETMVSSTGKGQAIIPAFHFLKSEKGLSSQSYGERHEELINLGSPDSHTISEGQKSSVTSKTTRKGKEKSSEKEKTAKEKQAPRFEPQISTVHPQQEDPNKPYWILRLLRLVCITLAGSLRKHLMLRVRLYLKAKLNQKKKYETAARGVKEPNSKNSAGSESKEMTQTGSGSAVWKKWQLTKGLRDVAKSTSSESGGVSSPGKEEREQSTRKENIQTGPRTRSPTILETSPRLIRKALEFMDLSQYVRKTDTDPLLQTDELNQQQAMQKAEEIHQFRQHRTRVLSIRNIDQEERLKLKDEVLDMYKEMQDSLDEARQKIFDIREEYRNKLLEAEHLKLETLAAQEAAMKLETEKMTPAPDTQKKKKGKKK

SEQ ID NO: 879744 - protein, 1089 aa, Homo sapiens
GSGFRPRRTLPWAGLSRGTRWNRGERGAPGAANMDDYSLDEFRRRWQEELAQAQAPKKRRRPEAAERRARRPENEMNDVPFFDIQLPYELAINIFQYLDRKELEKMGTDEQTDFGLGDAHQSDGLNLEREIVSQTTATQEKSQEELPTTNNSVSKEIWLDFEDFCVCFQNIYIFHKPSSYCLNFQKSEFKFSEERVSYYLFVDSLKPIELLVCFSALVRWGEYGALTKDSPPIEPGLLTAETFSWKSLKPGSLVLKIHTYATKATVVRLPVGRHMLLFNAYSPVGHSIHICSMVSFVIGDEHVVLPNFEPESCRFTEQSLLIMKAIGNVIANFKDKGKLSAALKDLQTAHYPVPFHDKELTAQHFRVFHLSLWRLMKKVQITKPPPNFKFAFRAMVLDLELLNSSLEEVSLVEWLDVKYCMPTSDKEYSAEEVAAAIKIQAMWRGTYVRLLMKARIPDTKENISVADTLQKVWAVLEMNLEQYAVSLLRLMFKSKCKSLESYPCYQDEETKIAFADYTVTYQEQPPNSWFIVFRETFLVHQDMILVPKVYTTLPICILHIVNNDTMEQVPKVFQKVVPYLYTKNKKGYTFVAEAFTGDTYVAASRWKLRLIGSSAPLPCLSRDSPCNSFAIKEIRDYYIPNDKKILFRYSVKVLTPQPATIQVRTSKPDAFIKLQVLENEETMVSSTGKGQAIIPAFHFLKSEKGLSSQSYGERHEELINLGSPDSHTISEGQKSSVTSKTTRKGKEKSSEKEKTAKEKQAPRFEPQISTVHPQQEDPNKPYWILRLVTEHNESELFEVKKDTERADEIRAMKQAWETTEPGRAIKASQARLHYLSGFIKKTSDAESPPISESQTKPKEEVETAARGVKEPNSKNSAGSESKEMTQTGSGSAVWKKWQLTKGLRDVAKSTSSESGGVSSPGKEEREQSTRKENIQTGPRTRSPTILETSPRLIRKALEFMDLSQYVRKTDTDPLLQTDELNQQQAMQKAEEIHQFRQHRTRVLSIRNIDQEERLKLKDEVLDMYKEMQDSLDEARQKIFDIREEYRNKLLEAEHLKLETLAAQEAAMKLETEKMTPAPDTQKKKKGKKK

SEQ ID NO: 879745 - protein, 80 aa, Homo sapiens
  misc_feature (3)..(3): Xaa can be any naturally occurring amino acid
  misc_feature (9)..(9): Xaa can be any naturally occurring amino acid
YRXSAPPLXLNPTPPPPPLDSLDEARQKIFDIREEYRNKLLEAEHLKLETLAAQEAAMKLETEKMTPAPDTQKKKKGKKK

SEQ ID NO: 879746 - protein, 74 aa, Homo sapiens
NGESLEHHGYRGNGTDGESLEHRGYHGNGTHSESLEHHGYHGNGTDRESLEHRGYHGNGFQKGFCMLVFSQVKK

SEQ ID NO: 879747 - protein, 132 aa, Homo sapiens [sequence omitted]

SEQ ID NO: 879748 - protein, 138 aa, Homo sapiens
QHIQAKGCEKTPSYNYAPNMDKHWIMQYTGPMLPIHMEFTNILQRKRLQTLMSVDDSVERLYNMLVETGELENTYIIYTADHGYHIGQFGLVKGKSMPYDFDIRVPFFIRGPSVEPGSMFRTNKKAKIWRDTFLVERG

SEQ ID NO: 879749 - protein, 871 aa, Homo sapiens
MKYSCCALVLAVLGTELLGSLCSTVRSPRFRGRIQQERKNIRPNIILVLTDDQDVELGSLQVMNKTRKIMEHGGATFINAFVTTPMCCPSRSSMLTGKYVHNHNVYTNNENCSSPSWQAMHEPRTFAVYLNNTGYRTAFFGKYLNEYNGSYIPPGWREWLGLIKNSRFYNYTVCRNGIKEKHGFDYAKDYFTDLITNESINYFKMSKRMYPHRPVMMVISHAAPHGPEDSAPQFSKLYPNASQHITPSYNYAPNMDKHWIMQYTGPMLPIHMEFTNILQRKRLQTLMSVDDSVERLYNMLVETGELENTYIIYTADHGYHIGQFGLVKGKSMPYDFDIRVPFFIRGPSVEPGSIVPQIVLNIDLAPTILDIAGLDTPPDVDGKSVLKLLDPEKPGNRFRTNKKAKIWRDTFLVERGKFLRKKEESSKNIQQSNHLPKYERVKELCQQARYQTACEQPGQKWQCIEDTSGKLRIHKCKGPSDLLTVRQSTRNLYARGFHDKDKECSCRESGYRASRSQRKSQRQFLRNQGTPKYKPRFVHTRQTRSLSVEFEGEIYDINLEEEEELQVLQPRNIAKRHDEGHKGPRDLQASSGGNRGRMLADSSNAVGPPTTVRVTHKCFILPNDSIHCERELYQSARAWKDHKAYIDKEIEALQDKIKNLREVRGHLKRRKPEECSCSKQSYYNKEKGVKKQEKLKSHLHPFKEAAQEVDSKLQLFKENNRRRKKERKEKRRQRKGEECSLPGLTCFTHDNNHWQTAPFWNLGSFCACTSSNNNTYWCLRTVNETHNFLFCEFATGFLEYFDMNTDPYQLTNTVHTVERGILNQLHVQLMELRSCQGYKQCNPRPKNLDVGNKDGGSYDLHRGQLWDGWEG

SEQ ID NO: 879750 - protein, 892 aa, Homo sapiens
MCYGTPSYNYAPNMDKHWIMQYTGPMLPIHMEFTNILQRKRLQTLMSVDDSVERLYNMLVETGELENTYIIYTADHGYHIGQFGLVKGKSMPYDFDIRVPFFIRGPSVEPGSIVPQIVLNIDLAPTILDIAGLDTPPDVDGKSVLKLLDPEKPGNRFRTNKKAKIWRDTFLVERGKFLRKKEESSKNIQQSNHLPKYERVKELCQQARYQTACEQPGQKWQCIEDTSGKLRIHKCKGPSDLLTVRQSTRNLYARGFHDKDKECSCRESGYRASRSQRKSQRQFLRNQGTPKYKPRFVHTRQTRSLSVEFEGEIYDINLEEEEELQVLQPRNIAKRHDEGHKGPRDLQASSGGNRGRMLADSSNAVGPPTTVRVTHKCFILPNDSIHCERELYQSARAWKDHKAYIDKEIEALQDKIKNLREVRGHLKRRKPEECSCSKQSYYNKEKGVKKQEKLKSHLHPFKEAAQEVDSKLQLFKENNRRRKKERKEKRRQRKGEECSLPGLTCFTHDNNHWQTAPFWNLGSFCACTSSNNNTYWCLRTVNETHNFLFCEFATGFLEYFDMNTDPYQLTNTVHTVERGILNQLHVQLMELRSCQGYKQCNPRPKNLDVGNKDGGAMTYTEDSYGMDGKVNQPRLTADINWQGLEELHSVNENIYEYRQNYRLSLVDWTNYLKDLDRVFALLKSHYEQNKTNKTQTAQSDGFLVVSAEHAVSMEMASADSDEDPRHKVGKTPHLTLPADLQTLHLNRPTLSPESKLEWNNDIPEVNHLNSEHWRKTEKWTGHEETNHLETDFSGDGMTELELGPSPRLQPIRRHPKELPQYGGPGKDIFEDQLYLPVHSDGISVHQMFTMATAEHRSNSSIAGKMLTKVEKNHEKEKSQHLEGSASSSLSSD

SEQ ID NO: 879751 - protein, 175 aa, Homo sapiens
CGTDWSTVVQSQLTDNLRPLGFKRFSCLSLPRSWNYRHAPPRPANFVFLVKMVFLHVGQAGLELPTSGDPPTSASQSAGMTELELGPSPRLQPIRRHPKELPQYGGPGKDIFEDQLYLPVHSDGISVHQMFTMATAEHRSNSSIAGKMLTKVEKNHEKEKSQHLEGSASSSLSSD

SEQ ID NO: 879752 - protein, 416 aa, Homo sapiens
MKYSCCALVLAVLGTELLGSLCSTVRSPRFRGRIQQERKNIRPNIILVLTDDQDVELGSLQVMNKTRKIMEHGGATFINAFVTTPMCCPSRSSMLTGKYVHNHNVYTNNENCSSPSWQAMHEPRTFAVYLNNTGYRTAFFGKYLNEYNGSYIPPGWREWLGLIKNSRFYNYTVCRNGIKEKHGFDYAKDYFTDLITNESINYFKMSKRMYPHRPVMMVISHAAPHGPEDSAPQFSKLYPNASQHITPSYNYAPNMDKHWIMQYTGPMLPIHMEFTNILQRKRLQTLMSVDDSVERLYNMLVETGELENTYIIYTADHGYHIGQFGLVKGKSMPYDFDIRVPFFIRGPSVEPGSIVPQIVLNIDLAPTILDIAGLDTPPDVDGKSVLKLLDPEKPGNRFRTNKKAKIWRDTFLVERG

SEQ ID NO: 879753 - protein, 666 aa, Homo sapiens
MKYSCCALVLAVLGTELLGSLCSTVRSPRFRGRIQQERKNIRPNIILVLTDDQDVELGSLQVMNKTRKIMEHGGATFINAFVTTPMCCPSRSSMLTGKYVHNHNVYTNNENCSSPSWQAMHEPRTFAVYLNNTGYRTAFFGKYLNEYNGSYIPPGWREWLGLIKNSRFYNYTVCRNGIKEKHGFDYAKDYFTDLITNESINYFKMSKRMYPHRPVMMVISHAAPHGPEDSAPQFSKLYPNASQHITPSYNYAPNMDKHWIMQYTGPMLPIHMEFTNILQRKRLQTLMSVDDSVERLYNMLVETGELENTYIIYTADHGYHIGQFGLVKGKSMPYDFDIRVPFFIRGPSVEPGSIVPQIVLNIDLAPTILDIAGLDTPPDVDGKSVLKLLDPEKPGNRFRTNKKAKIWRDTFLVERGKFLRKKEESSKNIQQSNHLPKYERVKELCQQARYQTACEQPGQKWQCIEDTSGKLRIHKCKGPSDLLTVRQSTRNLYARGFHDKDKECSCRESGYRASRSQRKSQRQFLRNQGTPKYKPRFVHTRQTRSLSVEFEGEIYDINLEEEEELQVLQPRNIAKRHDEGHKGPRDLQASSGGNRGRMLADSSNAVGPPTTVRVTHKCFILPNDSIHCERELYQSARAWKDHKAYIDKEIEALQDKIKNLKEVRGL

SEQ ID NO: 879754 - protein, 67 aa, Homo sapiens
DLSHHRVPLYRVPQIVLNIDLAPTILDIAGLDTPPDVDGKSVLKLLDPEKPGNRCVIVPPLSQPQIH

SEQ ID NO: 879755 - protein, 871 aa, Homo sapiens; identical to SEQ ID NO: 879749

SEQ ID NO: 879756 - protein, 546 aa, Homo sapiens
MSHCCRKSSPKCHLPLALDLSHHRVPLYRVPQIVLNIDLAPTILDIAGLDTPPDVDGKSVLKLLDPEKPGNRFRTNKKAKIWRDTFLVERGKFLRKKEESSKNIQQSNHLPKYERVKELCQQARYQTACEQPGQKWQCIEDTSGKLRIHKCKGPSDLLTVRQSTRNLYARGFHDKDKECSCRESGYRASRSQRKSQRQFLRNQGTPKYKPRFVHTRQTRSLSVEFEGEIYDINLEEEEELQVLQPRNIAKRHDEGHKGPRDLQASSGGNRGRMLADSSNAVGPPTTVRVTHKCFILPNDSIHCERELYQSARAWKDHKAYIDKEIEALQDKIKNLREVRGHLKRRKPEECSCSKQSYYNKEKGVKKQEKLKSHLHPFKEAAQEVDSKLQLFKENNRRRKKERKEKRRQRKGEECSLPGLTCFTHDNNHWQTAPFWNLGSFCACTSSNNNTYWCLRTVNETHNFLFCEFATGFLEYFDMNTDPYQLTNTVHTVERGILNQLHVQLMELRSCQGYKQCNPRPKNLDVGNKDGGSYDLHRGQLWDGWEG

SEQ ID NO: 879757 - protein, 871 aa, Homo sapiens; identical to SEQ ID NO: 879749

SEQ ID NO: 879758 - protein, 1133 aa, Homo sapiens
MKYSCCALVLAVLGTELLGSLCSTVRSPRFRGRIQQERKNIRPNIILVLTDDQDVELGSLQVMNKTRKIMEHGGATFINAFVTTPMCCPSRSSMLTGKYVHNHNVYTNNENCSSPSWQAMHEPRTFAVYLNNTGYRTAFFGKYLNEYNGSYIPPGWREWLGLIKNSRFYNYTVCRNGIKEKHGFDYAKDYFTDLITNESINYFKMSKRMYPHRPVMMVISHAAPHGPEDSAPQFSKLYPNASQHITPSYNYAPNMDKHWIMQYTGPMLPIHMEFTNILQRKRLQTLMSVDDSVERLYNMLVETGELENTYIIYTADHGYHIGQFGLVKGKSMPYDFDIRVPFFIRGPSVEPGSIVPQIVLNIDLAPTILDIAGLDTPPDVDGKSVLKLLDPEKPGNRFRTNKKAKIWRDTFLVERGKFLRKKEESSKNIQQSNHLPKYERVKELCQQARYQTACEQPGQKWQCIEDTSGKLRIHKCKGPSDLLTVRQSTRNLYARGFHDKDKECSCRESGYRASRSQRKSQRQFLRNQGTPKYKPRFVHTRQTRSLSVEFEGEIYDINLEEEEELQVLQPRNIAKRHDEGHKGPRDLQASSGGNRGRMLADSSNAVGPPTTVRVTHKCFILPNDSIHCERELYQSARAWKDHKAYIDKEIEALQDKIKNLREVRGHLKRRKPEECSCSKQSYYNKEKGVKKQEKLKSHLHPFKEAAQEVDSKLQLFKENNRRRKKERKEKRRQRKGEECSLPGLTCFTHDNNHWQTAPFWNLGSFCACTSSNNNTYWCLRTVNETHNFLFCEFATGFLEYFDMNTDPYQLTNTVHTVERGILNQLHVQLMELRSCQGYKQCNPRPKNLDVGNKDGGAMTYTEDSYGMDGKVNQPRLTADINWQGLEELHSVNENIYEYRQNYRLSLVDWTNYLKDLDRVFALLKSHYEQNKTNKTQTAQSDGFLVVSAEHAVSMEMASADSDEDPRHKVGKTPHLTLPADLQTLHLNRPTLSPESKLEWNNDIPEVNHLNSEHWRKTEKWTGHEETNHLETDFSGDGMTELELGPSPRLQPIRRHPKELPQYGGPGKDIFEDQLYLPVHSDGISVHQMFTMATAEHRSNSSIAGKMLTKVEKNHEKEKSQHLEGSASSSLSSD

SEQ ID NO: 879759 - protein, 678 aa, Homo sapiens
  misc_feature (674)..(674): Xaa can be any naturally occurring amino acid
MKYSCCALVLAVLGTELLGSLCSTVRSPRFRGRIQQERKNIRPNIILVLTDDQDVELGSLQVMNKTRKIMEHGGATFINAFVTTPMCCPSRSSMLTGKYVHNHNVYTNNENCSSPSWQAMHEPRTFAVYLNNTGYRTAFFGKYLNEYNGSYIPPGWREWLGLIKNSRFYNYTVCRNGIKEKHGFDYAKDYFTDLITNESINYFKMSKRMYPHRPVMMVISHAAPHGPEDSAPQFSKLYPNASQHITPSYNYAPNMDKHWIMQYTGPMLPIHMEFTNILQRKRLQTLMSVDDSVERLYNMLVETGELENTYIIYTADHGYHIGQFGLVKGKSMPYDFDIRVPFFIRGPSVEPGSIVPQIVLNIDLAPTILDIAGLDTPPDVDGKSVLKLLDPEKPGNRFRTNKKAKIWRDTFLVERGKFLRKKEESSKNIQQSNHLPKYERVKELCQQARYQTACEQPGQKWQCIEDTSGKLRIHKCKGPSDLLTVRQSTRNLYARGFHDKDKECSCRESGYRASRSQRKSQRQFLRNQGTPKYKPRFVHTRQTRSLSVEFEGEIYDINLEEEEELQVLQPRNIAKRHDEGHKGPRDLQASSGGNRGRMLADSSNAVGPPTTVRVTHKCFILPNDSIHCERELYQSARAWKDHKAYIDKEIEALQDKIKNLKEVSLDLWTGILLXDLRL

SEQ ID NO: 879760 - protein, 120 aa, Homo sapiens
KKEKRKKLRQQLLINNTWSRIGKLLSRWLLQKWQCIEDTSGKLRIHKCKGPSDLLTVRQSTRNLYARGFHDKDKECSCRESGYRASRSQRKSQRQFLRNQGTPSKPRFCDHLNGGLGLWE

SEQ ID NO: 879761 - protein, 126 aa, Homo sapiens
DLGTESVSGTLSSLQQCNPRDGFDMFAQTRGNSLAEQRKTVTYEDPQAVGGLASALDNRKQSSEGKGDDLEEGVTSEEFDKFLEERAKAAEMVPDLPSPPMEAPAPASNPSGRKKPERSEDALFAL

SEQ ID NO: 879762 - protein, 146 aa, Homo sapiens
DLGTESVSGTLSSLQQCNPRDGFDMFAQTRGNSLAEQRKTVTYEDPQAVGGLASALDNRKQSSEGIPVAQPSVMDDIEVWLRTDLKGDDLEEGVTSEEFDKFLEERAKAAEMVPDLPSPPMEAPAPASNPSGRKKPERSEDALFAL

SEQ ID NO: 879763 - protein, 146 aa, Homo sapiens; identical to SEQ ID NO: 879762

SEQ ID NO: 879764 - protein, 102 aa, Homo sapiens
ERMHQIPSERRLPRARLQLYFQPCCGKQFRAGFSSLCTTSTSPPVSMRQFSFSAQGFRSAPTQGWQKRAQPEDLWREVASTEPASIWGAQAPPGECFCQAVI

SEQ ID NO: 879765 - protein, 356 aa, Homo sapiens
GVDFAPAACPSEDRDTVLGHTMGRPLHLVLLSASLAGLLLLGESLFIRREQANNILARVTRANSFLEEMKKGHLERECMEETCSYEEAREVFEDSDKTNEFWNKYKDGDQCETSPCQNQGKCKDGLGEYTCTCLEGFEGKNCELFTRKLCSLDNGDCDQFCHEEQNSVVCSCARGYTLADNGKACIPTGPYPCGKQTLERRKRSVAQATSSSGEAPDSITWKPYDAADLDPTENPFDLLDFNQTQPERGDNNLTRIVGGQECKDGECPWQALLINEENEGFCGGTILSEFYILTAAHCLYQAKRFKVREGTGTRSRRRAVRRCTRWRWSSSTTGSQRRPMTSTSPCSGSRPPSPSA

SEQ ID NO: 879766 - protein, 509 aa, Homo sapiens
GVDFAPAACPSEDRDTVLGHTMGRPLHLVLLSASLAGLLLLGESLFIRREQANNILARVTRANSFLEEMKKGHLERECMEETCSYEEAREVFEDSDKTNEFWNKYKDGDQCETSPCQNQGKCKDGLGEYTCTCLEGFEGKNCELFTRKLCSLDNGDCDQFCHEEQNSVVCSCARGYTLADNGKACIPTGPYPCGKQTLERRKRSVAQATSSSGEAPDSITWKPYDAADLDPTENPFDLLDFNQTQPERGDNNLTRIVGGQECKDGECPWQALLINEENEGFCGGTILSEFYILTAAHCLYQAKRFKVRVGDRNTEQEEGGEAVHEVEVVIKHNRFTKETYDFDIAVLRLKTPITFRMNVAPACLPERDWAESTLMTQKTGIVSGFGRTHEKGRQSTRLKMLEVPYVDRNSCKLSSSFIITQNMFCAGYDTKQEDACQGDSGGPHVTRFKDTYFVTGIVSWGEGCARKGKYGIYTKVTAFLKWIDRSMKTRGLPKAKSHAPEVITSSPLK

SEQ ID NO: 879767 - protein, 144 aa, Homo sapiens
GVDFAPAACPSEDRDTVLGHTMGRPLHLVLLSASLAGLLLLGESLFIRREQANNILARVTRANSFLEEMKKGHLERECMEETCSYEEAREVFEDSDKTNEFWNKYKDGDQCETSPCQNQGKCKDGLGEYTCTCLEGFEGKNCEL

SEQ ID NO: 879768 - protein, 147 aa, Homo sapiens
MCESMSLAELSTVPLSVPGDRNTEQEEGGEAVHEVEVVIKHNRFTKETYDFDIAVLRLKTPITFRMNVAPACLPERDWAESTLMTQKTGIVSGFGRTHEKGRQSTRLKMLEVPYVDRNSCKLSSSFIITQNMFCAGYDTKQEDACQG

SEQ ID NO: 879769 - protein, 372 aa, Homo sapiens
MHVDWNYFTRKLCSLDNGDCDQFCHEEQNSVVCSCARGYTLADNGKACIPTGPYPCGKQTLERRKRSVAQATSSSGEAPDSITWKPYDAADLDPTENPFDLLDFNQTQPERGDNNLTRIVGGQECKDGECPWQALLINEENEGFCGGTILSEFYILTAAHCLYQAKRFKVRVGDRNTEQEEGGEAVHEVEVVIKHNRFTKETYDFDIAVLRLKTPITFRMNVAPACLPERDWAESTLMTQKTGIVSGFGRTHEKGRQSTRLKMLEVPYVDRNSCKLSSSFIITQNMFCAGYDTKQEDACQGDSGGPHVTRFKDTYFVTGIVSWGEGCARKGKYGIYTKVTAFLKWIDRSMKTRGLPKAKSHAPEVITSSPLK

SEQ ID NO: 879770 - protein, 92 aa, Homo sapiens
MKKGHLERECMEETCSYEEAREVFEDSDKTVRAGDSLAVGKELRPQRPRWPCCSVHPGGRPGGRGSVREGFQGRGPANRGLGGVLPTGTSVP

SEQ ID NO: 879771 - protein, 33 aa, Homo sapiens
MGDNSKNSLLCDLITKQLASLRTMSKASSLATY

SEQ ID NO: 879772 - protein, 111 aa, Homo sapiens
QGQSLLQLPRTAVKSVSTLMVSALQSGWQMCSWKSSVSSASVSSQVRTQSPLKTPEAELLWEVYLVLWAVRKHLRRLYRRQERHRRHHVRCHAAPRPNPAQSLKLDAQSPL

SEQ ID NO: 879773 - protein, 111 aa, Homo sapiens
MTKHWSLQPLIVTQTFLSIDNSFNQLPIRKSLNLPVTSKPHLPTATPSDCPTFLDQTNVYLTCIDAYVFLKCIKPSCGPTTSGTCSQDLLRVVLQAIGHSYLPQNKFLKTC

SEQ ID NO: 879774 - protein, 346 aa, Homo sapiens
CVQTSEEECSSTLAVWVKWPIHPSAPELAGHKRQFGSVCHQDPRVCDEPSSEDPHEWPEDITKWPICTKNSAGNHTNHPHMDCVITGRPCCIGTKGRCEITSREYCDFMRGYFHEEATLCSQVHCMDDVCGLLPFLNPEVPDQFYRLWLSLFLHAGILHCLVSICFQMTVLRDLEKLAGWHRIAIIYLLSGVTGNLASAIFLPYRAEVGPAGSQFGILACLFVELFQSWQILARPWRAFFKLLAVVLFLFTFGLLPWIDNFAHISGFISGLFLSFAFLPYISFGKFDLYRKRCQIIIFQVVFLGLLAGLVVLFYVYPVRCEWCEFLTCIPFTDKFCEKYELDAQLH

SEQ ID NO: 879775 - protein, 122 aa, Homo sapiens
CVQTSEEECSSTLAVWVKWPIHPSAPELAGHKRQFGSVCHQDPRVCDEPSSEDPHEWPEDITKWPVSCSGGVVREPSVSCGRECHTPPTGDTRDSHHGTTSRFQRLCTCPLYSLSINQRLPL

SEQ ID NO: 879776 - protein, 120 aa, Homo sapiens
MTGSSIINAWLAWWSSSTSILSAVSGVSSSPASPSLTSSVRSTNWTLSSTELAAGSSGRVLQQARARHDLPEPHRLTGVTCSMWGLACFLNTDLFLVPCSLLLNPSYCRAFIILLPVITF

SEQ ID NO: 879777 - protein, 386 aa, Homo sapiens
CVQTSEEECSSTLAVWVKWPIHPSAPELAGHKRQFGSVCHQDPRVCDEPSSEDPHEWPEDITKWPICTKNSAGNHTNHPHMDCVITGRPCCIGTKGRCEITSREYCDFMRGYFHEEATLCSQVHCMDDVCGLLPFLNPEVPDQFYRLWLSLFLHAGQVTLWAGSGVSGPSGLAGWGWQKGHFLLNVSRPPPATDYRILHCLVSICFQMTVLRDLEKLAGWHRIAIIYLLSGVTGNLASAIFLPYRAEVGPAGSQFGILACLFVELFQSWQILARPWRAFFKLLAVVLFLFTFGLLPWIDNFAHISGFISGLFLSFAFLPYISFGKFDLYRKRCQIIIFQVVFLGLLAGLVVLFYVYPVRCEWCEFLTCIPFTDKFCEKYELDAQLH

SEQ ID NO: 879778 - protein, 213 aa, Homo sapiens
MHLLVPPPQHSLFTAFSQFGLLYSVRVFPNAAVAHPGFYAVIKFYSARAAHRAQKACDRKQLFQKSPVKVRLGTRHKAVQHQALALNSSKCQELANYYFGFNGCSKRIIKLQELSDLEERENEDSMVPLPKQSLKFFCALEVVLPSCDCRSPGIGLVEEPMDKVEEGPLSFLMKRKTAQKLAIQKALSDAFQKLLIVVLGKTVLIILEVLQFQ

SEQ ID NO: 879779 - protein, 236 aa, Homo sapiens
MAELVPFAVPIESDKTLLVWELSSGPTAEALHHSLFTAFSQFGLLYSVRVFPNAAVAHPGFYAVIKFYSARAAHRAQKACDRKQLFQKSPVKVRLGTRHKAVQHQALALNSSKCQELANYYFGFNGCSKRIIKLQELSDLEERENEDSMVPLPKQSLKFFCALEVVLPSCDCRSPGIGLVEEPMDKVEEGPLSFLMKRKTAQKLAIQKALSDAFQKLLIVVLGKTVLIILEVLQFQ

SEQ ID NO: 879780 - protein, 116 aa, Homo sapiens
MHLLVPPPQHSLFTAFSQFGLLYSVRVFPNAAVAHPGFYAVIKFYSARAAHRAQKACDRKQLFQKSPVKVRLGTRHKAVQHQALALNSSKCQELANYYFGFNGCSKRIIKDHYHSL

SEQ ID NO: 879781 - protein, 546 aa, Homo sapiens
MDVVEVAGSWWAQEREDIIMKYEKIMKEKGKRSSEHIQQMDLDVKRDIKEAYILQGSIRNQETAIKYMTDGCLLKHILGDPSLTKFRVIILDEAHERTLTTDILFGLLKKLFQEKSANRKEHLKVVIVKVTMDIHLNEMAGDILVFLTDQQRRIFLPPPPGIRKCVISTNISATSLTIDGIRYVVDGGFVKQLNHNPRLGLDILEVVPISKSEALQRSGRAGRTSSGKCFRIYSKDFWNQCMPDHVIPEIKRTSLTSVVLTLKCLAIHDVIRFPYLDPPNERLILEALKQLYQCDAIDRSGHVTRLGLSMVEFPLPPHLTCAVIKAASLDCEDLLLPIAAMLSVENVFIRPVDPEYQKEAEQRHRELAAKAGGFNDFATLAVIFEQCKSSGAPASWCQKHWIHWRCLFSAFRVEAQLRELIRKLKQQSDFPKETFEGPKHEVLRRCLCAGYFKNVARRSVGRTFCTMDGRGSPVHIHPSSALHEQETKLEWIIFHGVLVTTKVYARIVCPIRYEWVRDLLPKLHEFNAHDLSSVARREVMKIYYFQ

SEQ ID NO: 879782 - protein, 488 aa, Homo sapiens
MDVVEVAGSWWAQEREDIIMKYEKIMKEKGKRSSEHIQQMDLDVKRDIKEAYILQGSIRNQETAIKYMTDGCLLKHILGDPSLTKFRVIILDEAHERTLTTDILFGLLKKLFQEKSANRKEHLKVVIVKVTMDIHLNEMAGDILVFLTDQQRRIFLPPPPGIRKCVISTNISATSLTIDGIRYVVDGGFVKQLNHNPRLGLDILEVVPISKSEALQRSGRAGRTSSGKCFRIYSKDFWNQCMPDHVIPEIKRTSLTSVVLTLKCLAIHDVIRFPYLDPPNERLILEALKQLYQCDAIDRSGHVTRLGLSMVEFPLPPHLTCAVIKAASLDCEDLLLPIAAMLSVENVFIRPVDPEYQKEAEQRHRELAAKAGGFNDFATLAVIFEQCKSSGAPASWCQKHWIHWRCLFSAFRVEAQLRELIRKLKQWLPEVPGPQRQGAGSAADVQQILLCRDHSPCFLQEPQSHRGKSCPTGHQSHQPQCQAAQQRK

SEQ ID NO: 879783 - protein, 84 aa, Homo sapiens
MLPSGFRKFLVHNVKELEVLLMCNKSYCAEITHHVSSKNRKAIVERAAQLAIKVTNPNARLRSKENEETARVHVFCLNKSKNCQ

SEQ ID NO: 879784 - protein, 402 aa, Homo sapiens
YLLYALKQRRNPQVLTSLLVCREDRINMSTAGKVIKCKAAVLWELKKPFSIEEVEVAPPKAHEVRIKMVAAGICRSDEHVVSGNLVTPLPVILGHEAAGIVESVGEGVTTVKPGDKVIPLFTPQCGKCRICKNPESNYCLKNDLGNPRGTLQDGTRRFTCSGKPIHHFVGVSTFSQYTVVDENAVAKIDAASPLEKVCLIGCGFSTGYGSAVKVAKVTPGSTCAVFGLGGVGLSVVMGCKAAGAARIIAVDINKDKFAKAKELGATECINPQDYKKPIQEVLKEMTDGGVDFSFEVIGRLDTMMASLLCCHEACGTSVIVGVPPDSQNLSINPMLLLTGRTWKGAIFGGFKSKESVPKLVADFMAKKFSLDALITNILPFEKINEGFDLLRSGKSIRTVLTF

SEQ ID NO: 879785 - protein, 47 aa, Homo sapiens
AQARRRLTTQGTRLSPRHGAGSPRREHASRPGTAQAHHAGNTPLAHS

SEQ ID NO: 879786 - protein, 89 aa, Homo sapiens
VPRNWVSSQTDPQFASMAQRCPASPSAPSRPLNAFTALGKRDLVREPSGACFLAVGHSPTAGSPKIASGHYALGSGEMESHLAAQQPGT

SEQ ID NO: 879787 - protein, 1115 aa, Homo sapiens
MERAISPGLLVRALLLLLLLGLAARTVAAGRARGLPAPTAEAAFGLGAAAAPTSATRVPAAGAVAAAEVTVEDAEALPAAAGEQEPRGPEPDDETELRPRGRSLVIISTLDGRIAALDPENHGKKQWDLDVGSGSLVSSSLSKPEVFGNKMIIPSLDGALFQWDRDRESMETVPFTVESLLESSYKFGDDVVLVGGKSLTTYGLSAYSGKVRYICSALGCRQWDSDEMEQEEDILLLQRTQKTVRAVGPRSGNEKWNFSVGHFELRYIPDMETRAGFIESTFKPNENTEESKIISDVEEQEAAIMDIVIKVSVADWKVMAFSKKGGHLEWEYQFCTPIASAWLLKDGKVIPISLFDDTSYTSNDDVLEDEEDIVEAARGATENSVYLGMYRGQLYLQSSVRISEKFPSSPKALESVTNENAIIPLPTIKWKPLIHSPSRTPVLVGSDEFDKCLSNDKFSHEEYSNGALSILQYPYDNGYYLPYYKRERNKRSTQITVRFLDNPHYNKNIRKKDPVLLLHWWKEIVATILFCIIATTFIVRRLFHPHPHRQRKESETQCQTENKYDSVSGEANDSSWNDIKNSGYISRYLTDFEPIQCLGRGGFGVVFEAKNKVDDCNYAIKRIRLPNRELAREKVMREVKALAKLEHPGIVRYFNAWLEAPPEKWQEKMDEIWLKDESTDWPLSSPSPMDAPSVKIRRMDPFSTKEHIEIIAPSPQRSRSFSVGISCDQTSSSESQFSPLEFSGMDHEDISESVDAAYNLQDSCLTDCDVEDGTMDGNDEGHSFELCPSEASPYVRSRERTSSSIVFEDSGCDNASSKEEPKTNRLHIGNHCANKLTAFKPTSSKSSSEATLSISPPRPTTLSLDLTKNTTEKLQPSSPKVYLYIQMQLCRKENLKDWMNGRCTIEERERSVCLHIFLQIAEAVEFLHSKGLMHRDLKPSNIFFTMDDVVKVGDFGLVTAMDQDEEEQTVLTPMPAYARHTGQVGTKLYMSPEQIHGNSYSHKVDIFSLGLILFELLYPFSTQMERVRTLTDVRNLKFPPLFTQKYPCEYVMVQDMLSPSPMERPEAINIIENAVFEDLDFPGKTVLRQRSRSLSSSGTKHSRQSNNSHSPLPSN

SEQ ID NO: 879788 - protein, 130 aa, Homo sapiens
MWTEGDFSASLAGACSKLADALCACWARRGLTSATVSGLQRTLELRAGQPAQAQAAHGAAGRLPHSGGGHPGAADLLCPSPQHRGNLTGRGRASSLWNSGSVKDKVSSKSSWKTCVVTKLAWLSSFFAPK

SEQ ID NO: 879789 - protein, 915 aa, Homo sapiens
MDRKDLCMKVMRERTGYTKTYQAHAKQKFSRLWSSKSVTEIHLYFEEEVKQEECDHLDRLFAPKETGKQPRTVIIQGPQGIGKTTLLMKLMMAWSDNKIFRDRFLYTFYFCCRELRELPPTSLADLISREWLTRCSYNRDRVSTGETLVRHRQLRRAAGRLNEPDSDLCGDLMEKRPVQVLLSSLLRKKMLPEASLLIAIKPVCPKELRDQVTISEIYQPRGFNESDRLVYFCCFFKDPKRAMEAFNLVRESEQLFSICQIPLLCWILCTSLKQEMQKGKDLALTCQSTTSVYSSFVFNLFTPEGAEGPTPQTQHQLKALCSLAAEGMWTDTFEFCEDDLRRNGVVDADIPALLGTKILLKYGERESSYVFLHVCIQEFCAALFYLLKSHLDHPHPAVRCVQELLVANFEKARRAHWIFLGCFLTGLLNKKEQEKLDAFFGFQLSQEIKQQIHQCLKSLGERGNPQGQVDSLAIFYCLFEMQDPAFVKQAVNLLQEANFHIIDNVDLVVSAYCLKYCSSLRKLCFSVQNVFKKEDEHSSTSDYSLICWHHICSVLTTSGHLRELQVQDSTLSESTFVTWCNQLRHPSCRLQKLGINNVSFSGQSVLLFEVLFYQPDLKYLSFTLTKLSRDDIRSLCDALNYPAGNVKELALVNCHLSPIDCEVLAGLLTNNKKLTYLNVSCNQLDTGVPLLCEALCSPDTVLVYLMLAFCHLSEQCCEYISEMLLRNKSVRYLDLSANVLKDEGLKTLCEALKHPDCCLDSLCLVKCFITAAGCEDLASALISNQNLKILQIGCNEIGDVGVQLLCRALTHTDCRLEILGLEECGLTSTCCKDLASVLTCSKTLQQLNLTLNTLDHTGVVVLCEALRHPECALQVLGLRKTDFDEETQALLTAEEERNPNLTITDDCDTITRVEI

SEQ ID NO: 879790 - protein, 915 aa, Homo sapiens; identical to SEQ ID NO: 879789

SEQ ID NO: 879791 - protein, 858 aa, Homo sapiens
MDRKDLCMKVMRERTGYTKTYQAHAKQKFSRLWSSKSVTEIHLYFEEEVKQEECDHLDRLFAPKETGKQPRTVIIQGPQGIGKTTLLMKLMMAWSDNKIFRDRFLYTFYFCCRELRELPPTSLADLISREWLTRCSYNRDRVSTGETLVRHRQLRRAAGRLNEPDSDLCGDLMEKRPVQVLLSSLLRKKMLPEASLLIAIKPVCPKELRDQVTISEIYQPRGFNESDRLVYFCCFFKDPKRAMEAFNLVRESEQLFSICQIPLLCWILCTSLKQEMQKGKDLALTCQSTTSVYSSFVFNLFTPEGAEGPTPQTQHQLKALCSLAAEGMWTDTFEFCEDDLRRNGVVDADIPALLGTKILLKYGERESSYVFLHVCIQEFCAALFYLLKSHLDHPHPAVRCVQELLVANFEKARRAHWIFLGCFLTGLLNKKEQEKLDAFFGFQLSQEIKQQIHQCLKSLGERGNPQGQVDSLAIFYCLFEMQDPAFVKQAVNLLQEANFHIIDNVDLVVSAYCLKYCSSLRKLCFSVQNVFKKEDEHSSTSDYSLICWHHICSVLTTSGHLRELQVQDSTLSESTFVTWCNQLRHPSCRLQKLGINNVSFSGQSVLLFEVLFYQPDLKYLSFTLTKLSRDDIRSLCDALNYPAGNVKELALVNCHLSPIDCEVLAGLLTNNKKLTYLNVSCNQLDTGVPLLCEALCSPDTVLVYLMLAFCHLSEQCCEYISEMLLRNKSVRYLDLSANVLKDEGLKTLCEALKHPDCCLDSLWLEECGLTSTCCKDLASVLTCSKTLQQLNLTLNTLDHTGVVVLCEALRHPECALQVLGLRKTDFDEETQALLTAEEERNPNLTITDDCDTITRVEI

SEQ ID NO: 879792 - protein, 140 aa, Homo sapiens
MQECLTLWVFSPLALTDSGYTKTYQAHAKQKFSRLWSSKSVTEIHLYFEEEVKQEECDHLDRLFAPKETGKQPRTVIIQGPQGIGKTTLLMKLMMAWSDNKIFRDRFLYTFYFCCRELRELPPTSLADLISREWLTPLLL

SEQ ID NO: 879793 - protein, 116 aa, Homo sapiens
TRTGGWEILGRRERVLVKAPPSSLELQPKVRTCIPVFLLKCCLFQNHPWPTLPPILCHPRLCQQSRRGEDEKQLDIGNWFGAGEKKSRPLDFRKRSSSCSIPFPAPLAAESHFHRQ

SEQ ID NO: 879794 - protein, 123 aa, Homo sapiens
KRDWTAELGIRHVLLTIKCLLIHPNPESALNEEAGRLLLENYEEYAARARLLTEIHGGAGGPSGRAEAGRALASGTEASSTDSGAPGGLGGAEGPMAKKHAGERDKKLAAKKKTDKKRALRRL

SEQ ID NO: 879795 - protein, 99 aa, Homo sapiens
RHEAGARAKLEMDDADPEERNYDNMLKMLSDLNKDLEKLLEEMEKISVQATWMAYDMVVMRTNPTLAESMRRLEDAFVNCKEEMEKNWQELLHETKQRL

SEQ ID NO: 879796 - protein, 200 aa, Homo sapiens
SSQLQTGRDLEDEVVVSYSHPHVRLLRQRMDRLDNLTCHLLKKQAFRPQLPAYESLVQEIHHYVTSIAKAPAVQDLLTRLLQALHIDGPRSAQVAQSLLKEEASWQQSHHQFRKRLSEEYTFYPDAVSPLQASILQLQHGMRLVASELHTSLHSSMVGADRLGTLATALLAFPSVGPTFPTYYAHADTLCSVKSEEVLRG

SEQ ID NO: 879797 - protein, 252 aa, Homo sapiens
DGVPSLELGLPRKQSEMQMKAGVTCEVCMNVVQKLDHWLMSNSSELMITHALERVCSVMPASITKECIILVDTYSPSLVQLVAKITPEKVCKFIRLCGNRRRARAVHDAYAIVPSPEWDAENQGSFCNGCKRLLTVSSHNLESKSTKRDILVAFKGGCSILPLPYMIQCKHFVTQYEPVLIESLKDMMDPVAVCKKVGACHGPRTPLLGTDQCALGPSFWCRSQEAAKLCNAVQHCQKHVWKEMHLHAGEHA

SEQ ID NO: 879798 - protein, 252 aa, Homo sapiens; identical to SEQ ID NO: 879797

SEQ ID NO: 879799 - protein, 113 aa, Homo sapiens
MLSKLLQMQVIIIKGKRSPVCLGTVPCFADWRSSVSLGAVSCFADCQSPVSLGTVPCFADHGAGCLPLVQTHLHPRHALCCRRLTAWARPQRLLCSLASGQVGSQGERVEGGR

SEQ ID NO: 879800 - protein, 124 aa, Homo sapiens
EPNPANIMSEKKNCKNSSTNNNQTQDPSRNELQVPRSFVDRVVQDERDVQSQSSSTINTLLTLLDCLADYIMERVGLEASNNGSMRNTSQDREREVDNNREPHSAESDVTRFLFDEMPKSRKND

SEQ ID NO: 879801 - protein, 103 aa, Homo sapiens
AENGDNEKMAALEAKICHQIEYYLGDLRLPRDKFLKEKIKLDEGWVSLEIMIKFNRLNRLTTDFNVIVEALSKSKAEVMEISEDKTKIRRSPSKSLPEVTDEY

SEQ ID NO: 879802 - protein, 137 aa, Homo sapiens
MASEAEKTFHRFAAFGESSSSGTEMNNKNFSKLCKDCGIMDGKTVTSTDVDIVFSKVKAKNARTITFQQFKEAVKELGQKRFKGKSPDEVLENIYGLMEGKDPATTGATWMLSSRLDSTHTPTPVRLNSNISLIQLQ

SEQ ID NO: 879803 - protein, 170 aa, Homo sapiens
MASEAEKTFHRFAAFGESSSSGTEMNNKNFSKLCKDCGIMDGKTVTSTDVDIVFSKVKAKNARTITFQQFKEAVKELGQKRFKGKSPDEVLENIYGLMEGKDPATTGATKATTVGAVDRLTDTSKYTGTHKERFDESGKGKGIAGREEMTDNTGYVSGYKGSGTYDKKTK

SEQ ID NO: 879804 - protein, 118 aa, Homo sapiens
MASEAEKTFHRFAAFGESSSSGTEMNNKNFSKLCKDCGIMDGKTVTSTDVDIVFSKVKAKNARTITFQQFKEAVKELGQKRFKGKSPDEVLENIYGLMEGKDPATTGATFPWLPMQET

SEQ ID NO: 879805 - protein, 124 aa, Homo sapiens
MASEAEKTFHRFAAFGESSSSGTEMNNKNFSKLCKDCGIMDGKTVTSTDVDIVFSKVKAKNARTITFQQFKEAVKELGQKRFKGKSPDEVLENIYGLMEGKDPATTGATLLPRTGWKNIFGVKR

SEQ ID NO: 879806 - protein, 110 aa, Homo sapiens
YLGPKKAAPHASGRARAPSTCSKYLGPSLGKGYDSVRKGRELKSIPGLQKATTVGAVDRLTDTSKYTGTHKERFDESGKGKGIAGREEMTDNTGYVSGYKGSGTYDKKTK

SEQ ID NO: 879807 - protein, 261 aa, Homo sapiens [sequence omitted]

SEQ ID NO: 879808 - protein, 261 aa, Homo sapiens [sequence omitted]

SEQ ID NO: 879809 - protein, 68 aa, Homo sapiens
QALIVLHSKSLQNVERNFSGFCWVGLKETPVKPTPVKMLLTVGLLSLGSWSQSIFLQIIGFAFLVVSL

SEQ ID NO: 879810 - protein, 87 aa, Homo sapiens
TGCRGNRPPVEGGDPRKPAGWRSLVCLGRPLVQSFPGVSVQGLKRNALWFSREPPRRMHWDLRTVGQSHELFHDQLQPTSTRPFALH

SEQ ID NO: 879811 - protein, 75 aa, Homo sapiens
KVTEDVRRETQRQRRGRQPPSLGGALSSPAPAPTLSGGLLKPSAPTPGSPWKPAVPQEEQEEVESAECPRCARGP

SEQ ID NO: 879812 - protein, 593 aa, Homo sapiens
MENTPPGTVFPLKNTQDLDVAINNIQNYTIYPYSHVHALTQNGSEGRKYPELVLDKALDREEQAEIRLTLMAVDGGTPPRTGTALVLIEILDINDNAPEFVEPLYQVQISENSPLDSLVATVSARDSDMGINGEIFYFIFYGDEEISKTFALNERRGEIKIIRKLDFEKIVSYQVDIKASDGAGLSGKCTVIIQVVDINDNAPELTMASFTSPIRENSPETVAALFSIQDRDSGKNGRIVRSIQNDVPFMPKPSVENLYWLLTEGPLDKEIRAEYNITNTATDLGTPRLKTEYNITVLVSYVNDKAPTFTYNLLHPVRPREQQPRPAYWQRQHRRDSGTNIQVTYSLLPPRNPHLPLASLVSINTDNGHLFALRSLDYEALQEFEFRVGASDRGSTALSSEALVRVLVLDANDSSLFVLFPLQNGSAPCTELMPRAGRRAGLPGDQGGGGGRCLGPERLAVVAVAQGHGARAVRRVGAQCTDRLLSERDTAKHRLMVLVKDNGEPPRSATATLHVLLVDGFSLPYLPFPEAAPAQAQADLLTVYLVVALALVSSFFLFSVLLFVAVRLCRRSREASLGRCSVPEDPFPGIWWT

SEQ ID NO: 879813 - protein, 88 aa, Homo sapiens
RHEERWAAAAEELNMREMYLYATWEKAWRRGSSLRPARTWQLWRRIMKRWAWIPWKPRLKKVKNTEGRVWWVLHSTATPSVAAFKFFC

SEQ ID NO: 879814 - protein, 450 aa, Homo sapiens
MRECISIHVGQAGVQIGNACWELYCLEHGIQPDGQMPSDKTIGGGDDSFNTFFSETGAGKHVPRAVFVDLEPTVVDEVRTGTYRQLFHPEQLITGKEDAANNYARGHYTIGKEIVDLVLDRIRKLADLCTGLQGFLIFHSFGGGTGSGFASLLMERLSVDYGKKSKLEFAIYPAPQVSTAVVEPYNSILTTHTTLEHSDCAFMVDNEAIYDICRRNLDIERPTYTNLNRLIGQIVSSITASLRFDGGLNVDLTEFQTNLVPYPRIHFPLATYAPVISAEKAYHEQLSVAEITNACFEPANQMVKCDPRHGKYMACCMLYRGDVVPKDVNAAIATIKTKRTIQFVDWCPTGFKVGINYQPPTVVPGGDLAKVQRAVCMLSNTTAIAEAWARLDHKFDLMYAKRAFVHWYVGEGMEEGEFSEAREDLAALEKDYEEVGVDSVEAEAEEGEEY

SEQ ID NO: 879815 - protein, 418 aa, Homo sapiens
MRECISIHVGQAGVQIGNACWELYCLEHGIQPDGQMPSDKTIGGGDDSFNTFFSETGAGKHVPRAVFVDLEPTVVDEVRTGTYRQLFHPEQLITGKEDAANNYARGHYTIGKEIVDLVLDRIRKLADLCTGLQGFLIFHSFGGGTGSGFASLLMERLSVDYGKKSKLEFAIYPAPQVSTAVVEPYNSILTTHTTLEHSDCAFMVDNEAIYDICRRNLDIERPTYTNLNRLIGQIVSSITASLRFDGGLNVDLTEFQTNLVPYPRIHFPLATYAPVISAEKAYHEQLSVAEITNACFEPANQMVKCDPRHGKYMACCMLYRGDVVPKDVNAAIATIKTKRTIQFVDWCPTGFKVGINYQPPTVVPGGDLAKVQRAVCMLSNTTAIAEAWARLDLAALEKDYEEVGVDSVEAEAEEGEEY

SEQ ID NO: 879816 - protein, 78 aa, Homo sapiens
MALTHRITLANIHLAYAPTSCSPTQHTEAFVVFYFPLTHCGTTMQVAGDQLIYENWLVSGIHIQKGPQGSITRDSTFQ

SEQ ID NO: 879817 - protein, 524 aa, Homo sapiens
LVEKYCEKSITVKVNSTYGNSSRNIVNQNVRENLKTLYRLTMDLCSKLKDYGLWQLFRTLELPLIPILAVMESHAIQVNKEEMEKTSALLGARLKELEQEAHFVAGERFLITSNNQLREILFGKLKLHLLSQRNSLPRTGLQKYPSTVSEALNALRDLHPLPKIILEYRQVHKIKSTFVDGLLACMKKGSISSTWNQTGTVTGRLSAKHPNIQGISKHPIQITTPKNFKGKEDKILTISPRAMFVSSKGHTFLAADFSQIELRILTHLSGDPELLKLFQESERDDVFSTLTSQWKDVPVEQVTHADREQTKKVVYAVVYGAGKERLAACLGVPIQEAAQFLESFLQKYKKIKDFARAAIAQCHQTGCVVSIMGRRRPLPRIHAHDQQLRAQAERQAVNFVVQGSAADLCKLAMIHVFTAVAASHTLTARLVAQIHDELLFEVEDPQIPECAALVRRTMESLEQVPLKVSLSAGRSWGHLVPLQEASGPPPGPCRTESPSNSLAAPGSPASTQPPPLHFSPSFCL

SEQ ID NO: 879818 - protein, 442 aa, Homo sapiens
LVEKYCEKSITVKVNSTYGNSSRNIVNQNVRENLKTLYRLTMDLCSKLKDYGLWQLFRTLELPLIPILAVMESHAIQVNKEEMEKTSALLGARLKELEQEAHFVAGERFLITSNNQLREILFGKLKLHLLSQRNSLPRTGLQKYPSTVSEALNALRDLHPLPKIILEYRQVHKIKSTFVDGLLACMKKGSISSTWNQTGTVTGRLSAKHPNIQGISKHPIQITTPKNFKGKEDKILTISPRAMFVSSKGHTFLAADFSQIELRILTHLSGDPELLKLFQESERDDVFSTLTSQWKDVPVEQVTHADREQTKKVVYAVVYGAGKERLAACLGVPIQEAAQFLESFLQKYKKIKDFARAAIAQCHQTGCVVSIMGRRRPLPRIHAHDQQLRAQAERQAVNFVVQGSAADLCKLAMIHVFTAVAASHTLTASPCGIDKGSWHVRS

SEQ ID NO: 879819 - protein, 324 aa, Homo sapiens
MASEALHQVGDGEEAVLKKENFNMMNALDQLPKPFSNPKSMNRTVTTKGLPLASKGNLVNFLEDDTINLLKPLPVEDSDCSSDETSISAFSSTLLNPIKLAVTQPNSSFFAGMLEGELNKLSFSPMAKNAENEDLALGPCPCPSKSQMATRGLLDLDNPELETETSSTHSESSVVVDLPDTPFIFEHTVNNSTAVISWTYALGKQPVSFYQLLLQEVAKTQENELPEAKNRPWIFNKILGTTVKLMELKPNTCYCLSVRAANTAGVGKWCKPYKFATLATDFSSFPENYPIQITVRRKEPRQKIVSIGPEEMRRLEDLEYLFPC

SEQ ID NO: 879820 - protein, 234 aa, Homo sapiens [sequence omitted]

SEQ ID NO: 879821 - protein, 943 aa, Homo sapiens
MTQRSIAGPICNLKFVTLLVALSSELPFLGAGVQLQDNGYNGLLIAINPQVPENQNLISNIKEMITEASFYLFNATKRRVFFRNIKILIPATWKANNNSKIKQESYEKANVIVTDWYGAHGDDPYTLQYRGCGKEGKYIHFTPNFLLNDNLTAGYGSRGRVFVHEWAHLRWGVFDEYNNDKPFYINGQNQIKVTRCSSDITGIFVCEKGPCPQENCIISKLFKEGCTFIYNSTQNATASIMFMQSLSSVVEFCNASTHNQEAPNLQNQMCSLRSAWDVITDSADFHHSFPMNGTELPPPPTFSLVQAGDKVVCLVLDVSSKMAEADRLLQLQQAAEFYLMQIVEIHTFVGIASFDSKGEIRAQLHQINSNDDRKLLVSYLPTTVSAKTDISICSGLKKGFEVVEKLNGKAYGSVMILVTSGDDKLLGNCLPTVLSSGSTIHSIALGSSAAPNLEELSRLTGGLKFFVPDISNSNSMIDAFSRISSGTGDIFQQHIQLESTGENVKPHHQLKNTVTVDNTVGNDTMFLVTWQASGPPEIILFDPDGRKYYTNNFITNLTFRTASLWIPGTAKPGHWTYTLNNTHHSLQALKVTVTSRASNSAVPPATVEAFVERDSLHFPHPVMIYANVKQGFYPILNATVTATVEPETGDPVTLRLLDDGAGADVIKNDGIYSRYFFSFAANGRYSLKVHVNHSPSISTPAHSIPGSHAMYVPGYTANGNIQMNAPRKSVGRNEEERKWGFSRVSSGGSFSVLGVPAGPHPDVFPPCKIIDLEAVKVEEELTLSWTAPGEDFDQGQATSYEIRMSKSLQNIQDDFNNAILVNTSKRNPQQAGIREIFTFSPQISTNGPEHQPNGETHESHRIYVAIRAMDRNSLQSAVSNIAQAPLFIPPNSDPVPARDYLILKGVLTAMGLIGIICLIIVVTHHTLSRKKRADKKENGTKLL

SEQ ID NO: 879822 - protein, 616 aa, Homo sapiens
MTQRSIAGPICNLKFVTLLVALSSELPFLGAGVQLQDNGYNGLLIAINPQVPENQNLISNIKEMITEASFYLFNATKRRVFFRNIKILIPATWKANNNSKIKQESYEKANVIVTDWYGAHGDDPYTLQYRGCGKEGKYIHFTPNFLLNDNLTAGYGSRGRVFVHEWAHLRWGVFDEYNNDKPFYINGQNQIKVTRCSSDITGIFVCEKGPCPQENCIISKLFKEGCTFIYNSTQNATASIMFMQSLSSVVEFCNASTHNQEAPNLQNQMCSLRSAWDVITDSADFHHSFPMNGTELPPPPTFSLVQAGDKVVCLVLDVSSKMAEADRLLQLQQAAEFYLMQIVEIHTFVGIASFDSKGEIRAQLHQINSNDDRKLLVSYLPTTVSAKTDISICSGLKKGFEVVEKLNGKAYGSVMILVTSGDDKLLGNCLPTVLSSGSTIHSIALGSSAAPNLEELSRLTGGLKFFVPDISNSNSMIDAFSRISSGTGDIFQQHIQLESTGENVKPHHQLKNTVTVDNTVGNDTMFLVTWQASGPPEIILFDPDGRKYYTNNFITNLTFRTASLWIPGTAKLRRFAFIPDGRLNLSVVDFDTLALFLFLIYCLGHKVKGNNKVYFH

SEQ ID NO: 879823 - protein, 696 aa, Homo sapiens
MTQRSIAGPICNLKFVTLLVALSSELPFLGAGVQLQDNGYNGLLIAINPQVPENQNLISNIKEMITEASFYLFNATKRRVFFRNIKILIPATWKANNNSKIKQESYEKANVIVTDWYGAHGDDPYTLQYRGCGKEGKYIHFTPNFLLNDNLTAGYGSRGRVFVHEWAHLRWGVFDEYNNDKPFYINGQNQIKVTRCSSDITGIFVCEKGPCPQENCIISKLFKEGCTFIYNSTQNATASIMFMQSLSSVVEFCNASTHNQEAPNLQNQMCSLRSAWDVITDSADFHHSFPMNGTELPPPPTFSLVQAGDKVVCLVLDVSSKMAEADRLLQLQQAAEFYLMQIVEIHTFVGIASFDSKGEIRAQLHQINSNDDRKLLVSYLPTTVSAKTDISICSGLKKGFEVVEKLNGKAYGSVMILVTSGDDKLLGNCLPTVLSSGSTIHSIALGSSAAPNLEELSRLTGGLKFFVPDISNSNSMIDAFSRISSGTGDIFQQHIQLESTGENVKPHHQLKNTVTVDNTVGNDTMFLVTWQASGPPEIILFDPDGRKYYTNNFITNLTFRTASLWIPGTAKPGHWTYTLNNTHHSLQALKVTVTSRASNSAVPPATVEAFVERDSLHFPHPVMIYANVKQGFYPILNATVTATVEPETGDPVTLRLLDDGAADVSIEDSVISLSGDHCIIGRTLVAHEEADDLANK

SEQ ID NO: 879824 - protein, 265 aa, Homo sapiens
MTQRSIAGPICNLKFVTLLVALSSELPFLGAGVQLQDNGYNGLLIAINPQVPENQNLISNIKEMITEASFYLFNATKRRVFFRNIKILIPATWKANNNSKIKQESYEKANVIVTDWYGAHGDDPYTLQYRGCGKEGKYIHFTPNFLLNDNLTAGYGSRGRVFVHEWAHLRWGVFDEYNNDKPFYINGQNQIKVTRCSSDITGIFVCEKGPCPQENCIISKLFKEGCTFIYNSTQNATASIMFMQSLSSVVEFCNASTTSRVSGSS

SEQ ID NO: 879825 - protein, 515 aa, Homo sapiens
MGDWNLLGDTLEEVHIHSTMIGKIWLTILFIFRMLVLGVAAEDVWNDEQSGFICNTEQPGCRNVCYDQAFPISLIRYWVLQVIFVSSPSLVYMGHALYRLRVLEEERQRMKAQLRVELEEVEFEMPRDRRRLEQELCQLEKRKLNKAPLRGTLLCTYVIHIFTRSVVEVGFMIGQYLLYGFHLEPLFKCHGHPCPNIIDCFVSRPTEKTIFLLFMQSIATISLFLNILEIFHLGFKKIKRGLWGKYKLKKEHNEFHANKAKQNVAKYQSTSANSLKRLPSAPDYNLLVEKQTHTAVYPSLNSSSVFQPNPDNHSVNDEKCILDEQETVLSNEISTLSTSCSHFQHISSNNNKDTHKIFGKELNGNQLMEKRETEGKDSKRNYYSRGHRSIPGVAIDGENNMRQSPQTVFSLPANCDWKPRWLRATWGSSTEHENRGSPPKGNLKGQFRKGTVRTLPPSQGDSQSLDIPNTADSLGGLSFEPGLVRTCNNPVCPPNHVVSLTNNLIGRRVPTDLQI

SEQ ID NO: 879826 - protein, 515 aa, Homo sapiens; identical to SEQ ID NO: 879825

SEQ ID NO: 879827 - protein, 151 aa, Homo sapiens
IQDEEKHQKLPTFLHFLQQGSRVRHGTTHPEDVIFRSSGHSLLHGLVQLLLSGEISRDGPSDLRPDVMQCAQASLESKGRMVRTTLPFLQAPQPATASGQDLSLQGPGILHPASRPSGREKLVWLGTGLGMRALPSTFQERSFFGLVLDLG

SEQ ID NO: 879828 - protein, 149 aa, Homo sapiens
DVGVGAGGRVAARGEGGVHQLLVGWRLSVALAAARLVDVQRALSGEGLGEGAPAVALVVADVVAEQATGPLLKMSSSEAADTASFMALSSSSSAVRSPEMARRISGPMSCSVRKPACRDSAFLWEGLPTRPCSLRFLNFRKYSWIRNVA

SEQ ID NO: 879829 - protein, 413 aa, Homo sapiens
MENMLLWLIFFTPGWTLIDGSEMEWDFMWHLRKVPRIVSERTFHLTSPAFEADAKMMVNTVCGIECQKELPTPSLSELEDYLSYETVFENGTRTLTRVKVQDLVLEPTQNITTKGVSVRRKRQVYGTDSRFSILDKRFLTNFPFSTAVKLSTGCSGILISPQHVLTAAHCVHDGKDYVKGSKKLRVGLLKMRNKSGGKKRRGSKRSRREASGGDQREGTREHLQERAKGGRRRKKSGRGQRIAEGRPSFQWTRVKNTHIPKGWARGGMGDATLDYDYALLELKRAHKKKYMELGISPTIKKMPGGMIHFSGFDNDRADQLVYRFCSVSDESNDLLYQYCDAESGSTGSGVYLRLKDPDKKNWKRKIIAVYSGHQWVDVHGVQKDYNVAVRITPLKYAQICLWIHGNDANCAYG

SEQ ID NO: 879830 - protein, 107 aa, Homo sapiens
MDSLTSAKLTLKEADPSSKVAIRRKDSPPPGKVSSQKQPAEKAASDEKDSVSNIATEIKEGPISGTVSSQKQPAEKAASDEKDSVSNIATEIKDGQQSGRHNFAKQI

SEQ ID NO: 879831 - protein, 107 aa, Homo sapiens; identical to SEQ ID NO: 879830

SEQ ID NO: 879832 - protein, 484 aa, Homo sapiens
MPKKEKMAKTPLSDEKQLLLFQQKLLAEEEMAKKKERLLSQFLKDKLAKEEHNSALNLNKINTQWRTVLREVKTRELHKDIEILSQTFERVVDCKDNVIKSLAKDLSEAEEQYAHALRSHLHNVDQLLALQRHRLSLLEESYNMELEALTKEFETERKTIIDQHEKEIHYLQDIFMAMEQNYIDSEYESKLEFQSMWNDLKNMNLEEKHFLRLHLENRVEDLWRKFQDVLKNYTDATEDRKAAFETLQVKDEKSSKEIEVQMKKIQKLQDAITISKGKIMIHSRESEDENRYIRNDKELVLVQLRKLKAQRTQARAASQKNLVRLTLESNATLKALRKIVDKGEKILKLAEICRKFETEEEKVLPFYSSVLTPKEQEGIQKNNLEELTEELTKVMVDYIGMENFWKRYNKVKLEQLSLQHRRAQLLDINGKLREMLKQYLDGISVSDEVLSQLNPLFIVNYQSNLLQPLSIRIAHPGDKQHPTT

SEQ ID NO: 879833 - protein, 484 aa, Homo sapiens; identical to SEQ ID NO: 879832

SEQ ID NO: 879834 - protein, 445 aa, Homo sapiens
MPKKEKMAKTPLSDEKQLLLFQQKLLAEEEMAKKKERLLSQFLKDKLAKEEHNSALNLNKINTQWRTVLREVKTRELHKDIEILSQTFERVVDCKDNVIKSLAKDLSEAEEQYAHALRSHLHNVDQLLALQRHRLSLLEESYNMELEALTKEFETERKTIIDQHEKEIHYLQDIFMAMEQNYIDSEYESKLEFQSMWNDLKNMNLEEKHFLRLHLENRVEDLWRKFQDVLKNYTDATEDRKAAFETLQVKDEKSSKEIEVQMKKIQKLQDAITISKGKIMIHSRESEDENRYIRNDKELVLVQLRKLKAQRTQARAASQKNLVRLTLESNATLKALRKIVDKGEKILKLAEICRKFETEEEKVLPFYSSVLTPKEQEGIQKNNLEELTEELTKVMVDYIGMENFWKRYNKVKLEQLSLQHRRAQLLDINGKLREMLKQYLDGISG

SEQ ID NO: 879835 - protein, 172 aa, Homo sapiens
MGGSHYVAQASLELPGSCNPPTLATQSVGITNASHLAQPLPSLLLYTRVRGTASILKVKELALGTKKKLPAEYIFIFSQRCYSAGMVTLSFWPESLAKDLSEAEEQYAHALRSHLHNVDQLLALQRHRLSLLEESYNMELEALTKEFETERYGGLREDGELNPGECPESVSR

SEQ ID NO: 879836 - protein, 64 aa, Homo sapiens
MPSCSQGRRAEVRLTVGCRFFCLFFVFAMESHSVARLECSGMILAHCRTSTSQVQAILLPQPPK

SEQ ID NO: 879837 - protein, 79 aa, Homo sapiens
RLLARDRAPEEAGCACGTVVRGRKITYLKRRSIPENRGRPVFCVPGCGVPGHGVEGAERRDLRASSSGDGALCDCTASA

SEQ ID NO: 879838 - protein, 129 aa, Homo sapiens
MSGGRFDFDDGGAYCGGWEGGKAHGHGLCTGPKGQGEYSGSWNFGFEVAGVYTWPSGNTFEGYWSQGKRHGLGIETKGRWLYKGEWTHGFKGRYGIRQSSSSGAKYEGTWNNGLQDGYGTETYADGGMC

SEQ ID NO: 879839 - protein, 211 aa, Homo sapiens
MSGGRFDFDDGGAYCGGWEGGKAHGHGLCTGPKGQGEYSGSWNFGFEVAGVYTWPSGNTFEGYWSQGKRHGLGIETKGRWLYKGEWTHGFKGRYGIRQSSSSGAKYEGTWNNGLQDGYGTETYADGGTYQGQFTNGMRHGYGVRQSVPYGMAVVVRSPLRTSLSSLRSEHSNGTVAPDSPASPASDGPALPSPAIPRGGFALSLLANAEAA

SEQ ID NO: 879840 - protein, 67 aa, Homo sapiens
GYEEAASCLPACGPTRQRKISKGEFLQGLITRKKAISSASSKAVWKLLSSCHHNKPLETCIYFVTDY

SEQ ID NO: 879841 - protein, 295 aa, Homo sapiens
WLASACSARAWSWELGPRSGPEMAAADGALPEAAALEQPAELPASVRASIERKRQRALMLRQARLAARPYSATAAAATGGMANVKAAPKIIDTGGGFILEEEEEEEQKIGKVVHQPGPVMEFDYVICEECGKEFMDSYLMNHFDLPTCDNCRDADDKHKLITKTEAKQEYLLKDCDLEKREPPLKFIVKKNPHHSQWGDMKLYLKLQIVKRSLEVWGSQEALEEAKEVRQENREKMKQKKFDKKVKELRRAVRSSVWKRETIVHQHEYGPEENLEDDMYRKTCTMCGHELTYEKM

SEQ ID NO: 879842 - protein, 286 aa, Homo sapiens
WLASACSARAWSWELGPRSGPEMAAADGALPEAAALEQPAELPASVRASIERKRQRALMLRQARLAARPYSATAAAATGGMANVKAAPKIIDTGGGFILEEEEEEEQKIGKVVHQPGPVMEFDYVICEECGKEFMDSYLMNHFDLPTCDNCRDADDKHKLITKTEAKQEYLLKDCDLEKREPPLKFIVKKNPHHSQWGDMKLYLKLQIVKRSLEVWGSQEALEEAKEVRQENREKMKQKKFDKKVKEVVPAFLNRPQRAETGVDTVEIRHKELTVQFSQKAQNREE

SEQ ID NO: 879843 - protein, 90 aa, Homo sapiens
ARLGVQCACVELGARSSEWAGDGGGRRGFAGGGGFRATRGAACLGMANVKAAPKIIDTGGGFILEEEEEEEQKIGKVVHQPEMLMINTSL

SEQ ID NO: 879844 - protein, 284 aa, Homo sapiens
WLASACSARAWSWELGPRSGPEMAAADGALPEAAALEQPAELPASVRASIERKRQRALMLRQARLAARPYSATAAAATGGMANVKAAPKIIDTGGGFILEEEEEEEQKIGKVVHQPGPVMEFDYVICEECGKEFMDSYLMNHFDLPTCDNCRDADDKHKLITKTEAKQEYLLKDCDLEKREPPLKFIVKKNPHHSQWGDMKLYLKLQIVKRSLEVWGSQEALEEAKEVRQENREKMKQKKFDKKVKELRRAVRSSVWKRETIVHQHEYGPEENLEDDMYPLKYQ

SEQ ID NO: 879845 - protein, 222 aa, Homo sapiens
WLASACSARAWSWELGPRSGPEMAAADGALPEAAALEQPAELPASVRASIERKRQRALMLRQARLAARPYSATAAAATGGMANVKAAPKIIDTGGGFILEEEEEEEQKIGKVVHQPGPVMEFDYVICEECGKEFMDSYLMNHFDLPTCDNCRDADDKHKLITKTEAKQEYLLKDCDLEKREPPLKFIVKKNPHHSQWGDMKLYLKLQVSNKLYLLFFTLVNS

SEQ ID NO: 879846 - protein, 84 aa, Homo sapiens
SFKALQKSRNKTTLHPILPPALRAHLRRARVTAIWGKEMGSLVLPATRPAAAPQPSVPTTMMLKSKPVFMVFLRICSMMVSMPM

SEQ ID NO: 879847 - protein, 108 aa, Homo sapiens
GREAKVVTMVTATHSETSTSDGQATYNRSQSRKRVRHRGRTWRVGPGRAGRLDRELVAFTLAARRPRRPLPDPGRGSQLPALAQRAELEFPEASAAAFLLLHSCFPHK

SEQ ID NO: 879848 - protein, 116 aa, Homo sapiens
WRARRADLTRRKGLRRGEPGSRGLGEGPAAARRPQVQSIDTTPSGEGAPSFSRAQRPGRSGPSPSLASDPAPGRGAAWGSLRPGKRQQALESEAGGRASREARAAEVRERIPGGGS

SEQ ID NO: 879849 - protein, 129 aa, Homo sapiens
WRARRADLTRRKGLRRGEPGSRGLGEGPAAARRPQVQSIDTTPSGEGAPSFSRAQRPGRSGPSPSLASDPAPGRGAAWGSLRPGKRQQALESEAGGRASREARAAEVRERIPGGGSCCHAGSHRPLSRS

SEQ ID NO: 879850 - protein, 73 aa, Homo sapiens
RLHRKTRKEPGVLRRPGPRPELSSGREERILGARKRCPGRRDWLTPPCAGSSSQLTEPSVIQQPSISAPNMPN

SEQ ID NO: 879851 - protein, 78 aa, Homo sapiens
APGSKVSATSTCPGVVSEGLMLPRAAEPIPRKTGHGQHAQRCPGRRDWLTPPCAGSSSQLTEPSVIQQPSISAPNMPN

SEQ ID NO: 879852 - protein, 78 aa, Homo sapiens; identical to SEQ ID NO: 879851

SEQ ID NO: 879853 - protein, 125 aa, Homo sapiens
PGPLRVRPRWVCQACTWAADAQEAEPSLPRLCVHLSAPCLTLRSRERDFSLAASHPEENISSQQNIRPSSPASWATAVTLIGDPFPSPLPRLLQTECIQGVTSQVKTCCDTITLQHRPQSQASHS

SEQ ID NO: 879854 - protein, 223 aa, Homo sapiens
RLPLSPPQYGSGLVLRLRQLGVQAMGQPWAAGSTDGAPAQLPLVLTALWAAAVGLELAYVLVLGPGPPPLGPLARALQLALAAFQLLNLLGNVGLFLRSDPSIRGVMLAGRGLGQGWAYCYQCQSQVPPRSGHCSACRVCILRRDHHCRLLGRCVGFGNYRPFLCLLLHAAGVLLHVSVLLGPALSALLRAHTPLHMAALLLLPWLMLLTAPSSLRNSDLQAT

SEQ ID NO: 879855 - protein, 307 aa, Homo sapiens
RLPLSPPQYGSGLVLRLRQLGVQAMGQPWAAGSTDGAPAQLPLVLTALWAAAVGLELAYVLVLGPGPPPLGPLARALQLALAAFQLLNLLGNVGLFLRSDPSIRGVMLAGRGLGQGWAYCYQCQSQVPPRSGHCSACRVCILRRDHHCRLLGRCVGFGNYRPFLCLLLHAAGVLLHVSVLLGPALSALLRAHTPLHMAALLLLPWLMLLTGRVSLAQFALAFVTDTCVAGALLCGAGLLFHGMLLLRGQTTWEWARGQHSYDLGPCHNLQAALGPAGPRLALAFLASPLPGDGITFQTTADVGHTAS

SEQ ID NO: 879856 - protein, 51 aa, Homo sapiens
MGMGNPRGEGIWKRDPYLQATPGEGASSHRTGPPVLVGPPHWATKAFPGGT

SEQ ID NO: 879857 - protein, 67 aa, Homo sapiens
WLYTEEQAQRLPEGPACGQGDADIHLWDPPGAIQLQCASAEPDLEPNRQHGLEEALEGKSERRGFPP

SEQ ID NO: 879858 - protein, 80 aa, Homo sapiens
HGPKRQHSTTPPNEGGTGSAPQDIQAPWLLQLDALSTSQQESRVRAFEHIQCEHAFSKHFLSPALCQAVLSAQDTQGRNK

SEQ ID NO: 879859 - protein, 291 aa, Homo sapiens
DYLKTLTERLARLRRARRALRRRNSIKKMAALTPRKRKQDSLKCDSLLHFTENLFPSPNKKHCFYQNSDKNEENLHCSQQEHFVLSALKTTEINRLPSANQGSPFKSALSTVSFYNQNKWYLNPLERKLIKESRSTCLKTNDEDKSFPIVTEKMQGKPVCSKKNNKKPQKSLTAKYQPKYRHIKPVSRNSRNSKQNRVIYKPIVEKENNCHSAENNSNAPRVLSQKIKPQVTLQGGAAFFVRKKSSLRKSSLENEPSLGRTQKSKSEVIEDSDVETVSEKKTFATRQVPKC

SEQ ID NO: 879860 - protein, 101 aa, Homo sapiens
SSQLTVNQGEFRRYPFPYMSLQTPSIQCRVGIGPISQNRKPKGFTGWFIESGSEGLCFLFLVRPLHSSFTRNQAVFWDFGSPPLPALWRGWTGYFIFFPRF

SEQ ID NO: 879861 - protein, 723 aa, Homo sapiens
MSLLKERKPKKPHYIPRPPGKPFKYKCFQCPFTCNEKSHLFNHMKYGLCKNSITLVSEQDRVPKCPKSNSLDPKQTNQPDATAKPASSKSVANGLSAFDSKLQHSSAREDIKENLELQARGTHRCLGQKPALHRASPCKSPAPEAALGAQPALEGAARPSAFVPVGEHRLKGPDNAEAPETLALHNPTAKAVSFHTKSAFHTPGYPWKAGSPFLPPEFPHKISSTKGLGAISPYMHPTIPEYPPHFYTEHGLATIYSPYLLAGSSPECDAPLLSVYGTQDPRHFLPHPGPIPKHLAPSPATYDHYRFFQQYPSNLPIPYGFYRPESAFSSYGLRLPPVTGLTRDQSSHLLEEATLVYPASSPSRLNPSDPNRKHVEFESPIPEAKDSSKAGQRDTEGSKMSPRAGSAATGSPGRPSPTDFMQTSQTCEGLYDLSNKAASSALGRLYPPEQSLTAFRPVKKSTECLPAQAAETTAESPVSLNVVNGDPPAPTGSASLVSEAAPSSPDDSSGMGPLNLSKKSEINLAATHEPTYQGSPQAETASFSELQDLPLNLSVKDPCNTQAPRPAFPGRPRAAEPAAAVPQKTGTEGSEDGPSHPETKPGSLDGDGAPPTGPGEEAPDACAVDSSEEQKQTAAVALCQLAAYSPRNIRVGDGDAAAPEPACRQDTPTLSSMESQEAQCDLRPKGQKRTSLRDAGKSQQGAKKAKLQDTARVFTLRRRARVS

SEQ ID NO: 879862 - protein, 66 aa, Homo sapiens
WVAERQLAAREWVRRTAAAPRDEYRDGGFRRVEEWLYHFTSLPAMYGVIQFLSILASIWCYQCFSF

SEQ ID NO: 879863 - protein, 112 aa, Homo sapiens
AEVKEPCSLPMLSVDMENKENGSVGVKNSMENGRPPDPADWAVMDVVNYFRTVGFEEQASAFQEQEIDGKSLLLMTRNDVLTGLQLKLGPALKIYEYHVKPLQTKHLKNNSS

SEQ ID NO: 879864 - protein, 92 aa, Homo sapiens
AEVKEPCSLPMLSVDMENKENGSVGVKNSMENGRPPDPADWAVMDVVNYFRTVGFEEQASAFQEQDKVTDRDKYLECTPIESWSGQIKGLLL

SEQ ID NO: 879865 - protein, 107 aa, Homo sapiens
LRTKVSKQEWLLQSTAEHLKIDNQQKESMEQFIVSQLTRTHDVLKNARTNLELRKLLHQSEAPSLSPTHHHLLADLVGDAWPAFAFQEKISSPLVKSLRALPCTPAL

SEQ ID NO: 879866 - protein, 107 aa, Homo sapiens; identical to SEQ ID NO: 879865

SEQ ID NO: 879867 - protein, 73 aa, Homo sapiens
TTTKFAAASQRSNPGLGFLVTNPHPEAGQGLPAINQSLACKKTYFGDSKDFRNSMAENGDEHQIEGRAQWRRL

SEQ ID NO: 879868 - protein, 121 aa, Homo sapiens
MQGSATWGKRHWYATSARTTRKDDSFPNSKPQQKRPQQSRLLSLIPTSPCGQRVGLFWPELMGFHISPAGQNASLLTARHRLGTRETQLAPQGRADTEPGEGCGGPHCMSLQGEGTPCVGC

SEQ ID NO: 879869 - protein, 177 aa, Homo sapiens
FPAPAPDPAAAEMLMPKKNRIAIYELLFKEGVMVAKKDVHMPKHPELADKNVPNLHVMKAMQSLKSRGYVKEQFAWRHFYWYLTNEGIQYLRDYLHLPPEIVPATLRRSRPETGRPRPKGLEGERPARLTRGEADRDTYRRSAVPPGADKKAEAGAGSATEFQFRGGFGRGRGQPPQ

SEQ ID NO: 879870 - protein, 229 aa, Homo sapiens
MDLLQFLAFLFVLLLSGMGATGTLRTSLDPSLEIYKKMFEVKRREQLLALKNLAQLNDIHQQYKILDVMLKGLFKVLEDSRTVLTAADVLPDGPFPQDEKLKDAFSHVVENTAFFGDVVLRFPRIVHYYFDHNSNWNLLIRWGISFCNQTGVFNQGPHSPILSLMAQELGISEKDSNFQNPFKIDRTEFIPSTDPFQKALREEEKRRKKEEKRKEIRKGPRISRSQSEL

SEQ ID NO: 879871 - protein, 229 aa, Homo sapiens; identical to SEQ ID NO: 879870

SEQ ID NO: 879872 - protein, 229 aa, Homo sapiens; identical to SEQ ID NO: 879870

SEQ ID NO: 879873 - protein, 122 aa, Homo sapiens
RWDQPWGQRHWADCDGVSEMGQGQWAGVWVHGHVGRVPSPSPWSPFSLRSPPSRASPCHTLERAEACGCVSTVFWKYYYGHYLDDYHTKRTSSLVSLSGLGASLNASLHTALNATSAQGGWD

SEQ ID NO: 879874 - protein, 891 aa, Homo sapiens
MSQVGGRGDRCTQEVQGLVHGAGDLSASLAENSPTMSQNGYFEDSSYYKCDTDDTFEAREEILGDEAFDTANSSIVSGESIRFFVNVNLEMQATNTENEATSGGCVLLHTSRKYLKLKNFKEEIRAHRDLDGFLAQASIVLNETATSLDNVLRTMLRRFARDPDNNEPNCNLDLLMAMLFTDAGAPMRGKVHLLSDTIQGVTATVTGVRYQQSWLCIICTMKALQKRHVCISRLVRPQNWGENSCEVRFVILVLAPPKMKSTKTAMEVARTFATMFSDIAFRQKLLETRTEEEFKEALVHQRQLLTMVSHGPVAPRTKERSTVSLPAHRHPEPPKCKDFVPFGKGIREDIARRFPLYPLDFTDGIIGKNKAVGKYITTTLFLYFACLLPTIAFGSLNDENTDGAIDVQKTIAGQSIGGLLYALFSGQPLVILLTTAPLALYIQVIRVICDDYDLDFNSFYAWTGLWNSFFLALYAFFNLSLVMSLFKRSTEEIIALFISITFVLDAVKGTVKIFWKYYYGHYLDDYHTKRTSSLVSLSGLGASLNASLHTALNASFLASPTELPSATHSGQATAVLSLLIMLGTLWLGYTLYQFKKSPYLHPCVREILSDCALPIAVLAFSLISSHGFREIEMSKFRYNPSESPFAMAQIQSLSLRAVSGAMGLGFLLSMLFFIEQNLVAALVNAPENRLVKGTAYHWDLLLLAIINTGLSLFGLPWIHAAYPHSPLHVRALALVEERVENGHIYDTIVNVKETRLTSLGASVLVGLSLLLLPVPLQWIPKPVLYGLFLYIALTSLDGNQLVQRVALLLKEQTAYPPTHYIRRVPQRKIHYFTGLQVLQLLLLCAFGMSSLPYMKMIFPLIMIAMIPIRYILLPRIIEAKYLDVMDAEHRP

SEQ ID NO: 879875 - protein, 199 aa, Homo sapiens
RRVWGPEAPERRVRSPAVSARVCHGRGHQARVPSAAVRWVPEPGGAAGRPPGSPPPSPVGDPGENADAVCLRGPGPVGERAAGFPAAGRRARVREARGGFAATARLVSLGLCCRRLEFLTRFEQLMQRVEGGELESGQGGAVGLPAPRAPSFWEPGGPPPRKVSFYLPPGHLPVRRRGGSPGTPGVLGVPGPLTVPCAA

SEQ ID NO: 879876 - protein, 875 aa, Homo sapiens
MAAATRRVFHLQPCENSPTMSQNGYFEDSSYYKCDTDDTFEAREEILGDEAFDTANSSIVSGESIRFFVNVNLEMQATNTENEATSGGCVLLHTSRKYLKLKNFKEEIRAHRDLDGFLAQASIVLNETATSLDNVLRTMLRRFARDPDNNEPNCNLDLLMAMLFTDAGAPMRGKVHLLSDTIQGVTATVTGVRYQQSWLCIICTMKALQKRHVCISRLVRPQNWGENSCEVRFVILVLAPPKMKSTKTAMEVARTFATMFSDIAFRQKLLETRTEEEFKEALVHQRQLLTMVSHGPVAPRTKERSTVSLPAHRHPEPPKCKDFVPFGKGIREDIARRFPLYPLDFTDGIIGKNKAVGKYITTTLFLYFACLLPTIAFGSLNDENTDGAIDVQKTIAGQSIGGLLYALFSGQPLVILLTTAPLALYIQVIRVICDDYDLDFNSFYAWTGLWNSFFLALYAFFNLSLVMSLFKRSTEEIIALFISITFVLDAVKGTVKIFWKYYYGHYLDDYHTKRTSSLVSLSGLGASLNASLHTALNASFLASPTELPSATHSGQATAVLSLLIMLGTLWLGYTLYQFKKSPYLHPCVREILSDCALPIAVLAFSLISSHGFREIEMSKFRYNPSESPFAMAQIQSLSLRAVSGAMGLGFLLSMLFFIEQNLVAALVNAPENRLVKGTAYHWDLLLLAIINTGLSLFGLPWIHAAYPHSPLHVRALALVEERVENGHIYDTIVNVKETRLTSLGASVLVGLSLLLLPVPLQWIPKPVLYGLFLYIALTSLDGNQLVQRVALLLKEQTAYPPTHYIRRVPQRKIHYFTGLQVLQLLLLCAFGMSSLPYMKMIFPLIMIAMIPIRYILLPRIIEAKYLDVMDAEHRP

SEQ ID NO: 879877 - protein, 952 aa, Homo sapiens
LPGGRDAVPGLETVACRPPCDPGRVTGVGGTAPAMGVYGPQDRSESEKRDVQRDPPPWHPRREGERPARARSLPLAAAGQGFLRKTWISEHENSPTMSQNGYFEDSSYYKCDTDDTFEAREEILGDEAFDTANSSIVSGESIRFFVNVNLEMQATNTENEATSGGCVLLHTSRKYLKLKNFKEEIRAHRDLDGFLAQASIVLNETATSLDNVLRTMLRRFARDPDNNEPNCNLDLLMAMLFTDAGAPMRGKVHLLSDTIQGVTATVTGVRYQQSWLCIICTMKALQKRHVCISRLVRPQNWGENSCEVRFVILVLAPPKMKSTKTAMEVARTFATMFSDIAFRQKLLETRTEEEFKEALVHQRQLLTMVSHGPVAPRTKERSTVSLPAHRHPEPPKCKDFVPFGKGIREDIARRFPLYPLDFTDGIIGKNKAVGKYITTTLFLYFACLLPTIAFGSLNDENTDGAIDVQKTIAGQSIGGLLYALFSGQPLVILLTTAPLALYIQVIRVICDDYDLDFNSFYAWTGLWNSFFLALYAFFNLSLVMSLFKRSTEEIIALFISITFVLDAVKGTVKIFWKYYYGHYLDDYHTKRTSSLVSLSGLGASLNASLHTALNASFLASPTELPSATHSGQATAVLSLLIMLGTLWLGYTLYQFKKSPYLHPCVREILSDCALPIAVLAFSLISSHGFREIEMSKFRYNPSESPFAMAQIQSLSLRAVSGAMGLGFLLSMLFFIEQNLVAALVNAPENRLVKGTAYHWDLLLLAIINTGLSLFGLPWIHAAYPHSPLHVRALALVEERVENGHIYDTIVNVKETRLTSLGASVLVGLSLLLLPVPLQWIPKPVLYGLFLYIALTSLDGNQLVQRVALLLKEQTAYPPTHYIRRVPQRKIHYFTGLQVLQLLLLCAFGMSSLPYMKMIFPLIMIAMIPIRYILLPRIIEAKYLDVMDAEHRP

SEQ ID NO: 879878 - protein, 398 aa, Homo sapiens
GDPLPQLQWSHGPGPLPLGALAQGGTLSIPSVQARDSGYYNCTATNNVGNPAKKTVNLLVRSMKNATFQITPDVIKESENIQLGQDLKLSCHVDAVPQEKVTYQWFKNGKPARMSKRLLVTRNDPELPAVTSSLELIDLHFSDYGTYLCMASFPGAPVPDLSVEVNISSETVPPTISVPKGRAVVTVREGSPAELQCEVRGKPRPPVLWSRVDKEAALLPSGLPLEETPDGKLRLERVSRDMSGTYRCQTARYNGFNVRPREAQVQLNVQFPPEVEPSSQDVRQALGRPVLLRCSLLRGSPQRIASAVWRFKGQLLPPPPVVPAAAEAPDHAELRLDAVTRDSSGSYECSVSNDVGSAACLFQVSAKAYSPEFYFDTPNPTRSHKLSKNYSYVLQWTQ

SEQ ID NO: 879879 - protein, 321 aa, Homo sapiens
GDPLPQLQWSHGPGPLPLGALAQGGTLSIPSVQARDSGYYNCTATNNVGNPAKKTVNLLVRSMKNATFQITPDVIKESENIQLGQDLKLSCHVDAVPQEKVTYQWFKNGKPARMSKRLLVTRNDPELPAVTSSLELIDLHFSDYGTYLCMASFPGAPVPDLSVEVNISSETVPPTISVPKGRAVVTVREGSPAELQCEVRGKPRPPVLWSRVDKEAALLPSGLPLEETPDGKLRLERVSRDMSGTYRCQTARYNGFNVRPREAQVQLNVQCESTTPPGLPSQLSFWLPAGLSPLHPLTHPSPTKPHQLLLIPLMLLDSPML

SEQ ID NO: 879880 - protein, 324 aa, Homo sapiens
  misc_feature (7)..(7): Xaa can be any naturally occurring amino acid
  misc_feature (14)..(14): Xaa can be any naturally occurring amino acid
NKYGVNXEAKALGXCFKNFGARKGEKVTYQWFKNGKPARMSKRLLVTRNDPELPAVTSSLELIDLHFSDYGTYLCMASFPGAPVPDLSVEVNISSETVPPTISVPKGRAVVTVREGSPAELQCEVRGKPRPPVLWSRVDKEAALLPSGLPLEETPDGKLRLERVSRDMSGTYRCQTARYNGFNVRPREAQVQLNVQFPPEVEPSSQDVRQALGRPVLLRCSLLRGSPQRIASAVWRFKGQLLPPPPVVPAAAEAPDHAELRLDAVTRDSSGSYECSVSNDVGSAACLFQVSAKAYSPEFYFDTPNPTRSHKLSKNYSYVLQWTQ

SEQ ID NO: 879881 - protein, 129 aa, Homo sapiens
CSSTLNITQSQIHFLSPDSFVNNSHGANNELELVTCLSSDMFMKDNSQPVHLESTIAHEIYQKILSPDSFIKDNYGLNQDLESESVNPILSPNQFLKDNMAYMCTSQQTCKVPLSNENSQVPQSPEDWR

SEQ ID NO: 879882 - protein, 114 aa, Homo sapiens
MPWERQTHPSVHITGSSSTLSQQIYNRLKNNENILTTHYELTGGQGTGTLASAGAVRMEMWKCVPLQENRSFHEQCLWVKDDKASHQLPPPQALMAVGRLCHSASSWMTTPIPA

SEQ ID NO: 879883 - protein, 67 aa, Homo sapiens
LSLSGCKRAQQEEPPAEASNHTLGVEGCLTLAFLAWAACSLTWYTSCFPCVFPAIFRCAGDYCRKGW

SEQ ID NO: 879884 - protein, 38 aa, Homo sapiens
KTQQIRMEATQHHTETDMSPAFLNALKEKPASWEGRVS

SEQ ID NO: 879885 - protein, 115 aa, Homo sapiens
RPRLTERSPDSELLCRPFSCPCLEEAYQVDQALLPPVDEKGRWPRVGVEEEDWMPMILISLCHQGWSAAAEFQLTATSTCWVQGISQVAGTTGAHHHAWLIFCRDGVLPCCPGWS

SEQ ID NO: 879886 - protein, 68 aa, Homo sapiens
IKGEARTHLRGMQSRYHHALRSFGEDCNFNFSFVLPAFLMCNELTTCNVITIAKLKMNDLAQRGGSCL

SEQ ID NO: 879887 - protein, 259 aa, Homo sapiens
KLLWLRRRKNYKRNKRNYKMYGQSLRTFNSSKQVMPNSPSTQLEASQLQQTPCTQQPNNVLNTHIMQTVQSTVASPSKQLNENQLVRKQDVLGPSTTPPAHSSSNTIRSGISPNLNVVDGRLTYPTCGIGYPVSSAFAFQNTFPHSISAKNTSHPGSGTKVQFNLQFTKPNASLGDVQSGATISMPCSTDKENGENVGLESKYLKKREDSIPLRGLSQNLFSNSDHQRDGTLGALHTSSKPTALPSASSAYFPGQLPNS

SEQ ID NO: 879888 - protein, 161 aa, Homo sapiens
KLLWLRRRKNYKRNKRNYKMYGQSLRTFNSSKQVMPNSPSTQLEASQLQQTPCTQQPNNVLNTHIMQTVQSTVASPSKQLNENQLVRKQDVLGPSTTPPAHSSSNTIRSGISPNLNVVDGRLTYPTCGIGYPVSSAFAFQNTFPHSISAKNTSHPGSGTKW

SEQ ID NO: 879889 - protein, 161 aa, Homo sapiens; identical to SEQ ID NO: 879888

SEQ ID NO: 879890 - protein, 161 aa, Homo sapiens; identical to SEQ ID NO: 879888

SEQ ID NO: 879891 - protein, 102 aa, Homo sapiens
MAAASKLMGSGSIWSLGQAILAVSESIVSSSSSSSSPAEFSQSSCGRWHAASFRHTNRPSSLFRSWVCRKLKQESSRLCMRRNSAQRMTSRMFSLLSNSLAV

SEQ ID NO: 879892 - protein, 97 aa, Homo sapiens
QRARESFTWLAVLIMVAWGWEEVPFLSHRNRPHPVGVLEGCENPEETLTQPAGRRLPLEAALKDDSSRWKNQEGPSHVEAPAGANVPGVFRQRATGE

SEQ ID NO: 879893 - protein, 192 aa, Homo sapiens
MAEQQGRELEAECPVCWNPFNNTFHTPKMLDCCHSFCVECLAHLSLVTPARRRLLCPLCRQPTVLASGQPVTDLPTDTAMLALLRLEPHHVILEGHQLCLKDQPKSRYFLRQPQVYTLDLGPQPGGQTGPPPDTASATVSTPILIPSHHSLRECFRNPQFRIFAYLMAVILSVTLLLIFSIFWTKQFLWGVG

SEQ ID NO: 879894 - protein, 227 aa, Homo sapiens
EGEEALEGLIWGLGQGSFCKASRTSPARPPRVWLRMAEQQGRELEAECPVCWNPFNNTFHTPKMLDCCHSFCVECLAHLSLVTPARRRLLCPLCRQPTVLASGQPVTDLPTDTAMLALLRLEPHHVILEGHQLCLKDQPKSRYFLRQPQVYTLDLGPQPGGQTGPPPDTASATVSTPILIPSHHSLRECFRNPQFRIFAYLMAVILSVTLLLIFSIFWTKQFLWGVG

SEQ ID NO: 879895 - protein, 315 aa, Homo sapiens
PRPRLRTGHADGAMAAAAAETPEVLRECGCKGIRTCLICERQRGSDPPWELPPAKTYRFIYCSDTGWAVGTEESDFEGWAFPFPGVMLIEDFVTREEEAELVRLMDRDPWKLSQSGRRKQDYGPKVNFRKQKLKTEGFCGLPSFSREVVRRMGLYPGLEGFRPVEQCNLDYCPERGSAIDPHLDDAWLWGERLVSLNLLSPTVLSMCREAPGSLLLCSAPSAAPEALVDSVIAPSRSVLCQEVEVAIPLPARSLLVLTGAARHQWKHAIHRRHIEARRVCVTFRELSAEFGPGGRQQELGQELLRIALSFQGRPV

SEQ ID NO: 879896 - protein, 229 aa, Homo sapiens
MLIEDFVTREEEAELVRLMDRDPWKLSQSGRRKQDYGPKVNFRKQKLKTEGFCGLPSFSREVVRRMGLYPGLEGFRPVEQCNLDYCPERGSAIDPHLDDAWLWGERLVSLNLLSPTVLSMCREAPGSLLLCSAPSAAPEALVDSVIAPSRSVLCQEVEVAIPLPARSLLVLTGAARHQWKHAIHRRHIEARRVCVTFRELSAEFGPGGRQQELGQELLRIALSFQGRPV

SEQ ID NO: 879897 - protein, 315 aa, Homo sapiens; identical to SEQ ID NO: 879895

SEQ ID NO: 879898 - protein, 253 aa, Homo sapiens
PRPRLRTGHADGAMAAAAAETPEVLRECGCKGIRTCLICERQRGSDPPWELPPAKTYRFIYCSDTGWAVGTEESDFEGWAFPFPGVMLIEDFVTREEEAELVRLMDRDPWKLSQSGRRKQDYGPKVNFRKQKLKTEGFCGLPSFSREVVRRMGLYPGLEGFRPVEQCNLDYCPERGSAIDPHLDDAWLWGERLVSLNLLSPTVLSMCREAPGSLLLCSAPSAAPEALVDSVIAPSRSVLCQEVEDCLRPAWAT

SEQ ID NO: 879899 - protein, 253 aa, Homo sapiens
MHSWERLAVLVLLGAAACAAPPRGRILGGREAEAHARPYMASVQLNGAHLCGGVLVAEQWVLSAAHCLEDAADGKVQVLLGAHSLSQPEPSKRLYDVLRAVPHPDSQPDTIDHDLLLLQLSEKATLGPAVRPLPWQRVDRDVAPGTLCDVAGWGIVNHAGRRPDSLQHVLLPVLDRATCNRRTHHDGAITERLMCAESNRRDSCKGDSGGPLVCGGVLEGVVTSGSRVCGNRKKPGIYTRVASYAAWIDSVLA

SEQ ID NO: 879900 - protein, 116 aa, Homo sapiens
MHSWERLAVLVLLGAAACAAPPRGRILGGREAEAHARPYMASVQLNGAHLCGGVLVAEQWVLSAAHCLEDAADGKVQVLLGAHSLSQPEPSKRLYDVLRAVPHPDSQPDTIDSVLA

SEQ ID NO: 879901 - protein, 106 aa, Homo sapiens
ISHLSFQSLRTGEQGREKKGLGEVPPFHLSSFSAPFRRASSSGMLGQSIRRFTTSVVRRSHYEEGPGKNLPFSVENKWSLLAKMCLYFGSAFATPFLVVRHQLLKT

SEQ ID NO: 879902 - protein, 106 aa, Homo sapiens; identical to SEQ ID NO: 879901

SEQ ID NO: 879903 - protein, 107 aa, Homo sapiens
RPPTTTKFAAASTEQGREKKGLGEVPPFHLSSFSAPFRRASSSGMLGQSIRRFTTSVVRRSHYEEGPGKNLPFSVENKWSLLAKMCLYFGSAFATPFLVVRHQLLKT

SEQ ID NO: 879904 - protein, 107 aa, Homo sapiens
RGRRHGCERRRRGEQGREKKGLGEVPPFHLSSFSAPFRRASSSGMLGQSIRRFTTSVVRRSHYEEGPGKNLPFSVENKWSLLAKMCLYFGSAFATPFLVVRHQLLKT

SEQ ID NO: 879905 - protein, 106 aa, Homo sapiens; identical to SEQ ID NO: 879901

SEQ ID NO: 879906 - protein, 106 aa, Homo sapiens; identical to SEQ ID NO: 879901

SEQ ID NO: 879907 - protein, 106 aa, Homo sapiens; identical to SEQ ID NO: 879901

SEQ ID NO: 879908 - protein, 106 aa, Homo sapiens; identical to SEQ ID NO: 879901

SEQ ID NO: 879909 - protein, 104 aa, Homo sapiens
LVRLGLIGRGEQGREKKGLGEVPPFHLSSFSAPFRRASSSGMLGQSIRRFTTSVVRRSHYEEGPGKNLPFSVENKWSLLAKMCLYFGSAFATPFLVVRHQLLKT

SEQ ID NO: 879910 - protein, 106 aa, Homo sapiens; identical to SEQ ID NO: 879901

SEQ ID NO: 879911 - protein, 104 aa, Homo sapiens; identical to SEQ ID NO: 879909

SEQ ID NO: 879912 - protein, 107 aa, Homo sapiens; identical to SEQ ID NO: 879904

SEQ ID NO: 879913 - protein, 107 aa, Homo sapiens; identical to SEQ ID NO: 879903

SEQ ID NO: 879914 - protein, 106 aa, Homo sapiens; identical to SEQ ID NO: 879901

SEQ ID NO: 879915 - protein, 106 aa, Homo sapiens; identical to SEQ ID NO: 879901

SEQ ID NO: 879916 - protein, 106 aa, Homo sapiens; identical to SEQ ID NO: 879901

SEQ ID NO: 879917 - protein, 106 aa, Homo sapiens; identical to SEQ ID NO: 879901

SEQ ID NO: 879918 - protein, 30 aa, Homo sapiens
YKCRTMFLALIIQGCAKLTGIPALMELTVT

SEQ ID NO: 879919 - protein, 90 aa, Homo sapiens
AAAAAWDSLRAGFGSIPPPGVSLCALPFETRPRARPAVDQAARKPTVSGGAAREVARASRNTAAPGSRPARRAHSNPPRERCVALGASRV

SEQ ID NO: 879920 - protein, 131 aa, Homo sapiens
AAAAAWDSLRAGFGSIPPPGVSLCALPFETRPRARPAVDQAARKPTVSGGAAREVARASRNTAAPGSRPARRAHSNPPRERMKPAWKIPSLETEPDRGRCTGRTLSGFSNQAAILAPQVWDFWVFSWLASC

SEQ ID NO: 879921 - protein, 117 aa, Homo sapiens
MDCGEMGSFREAPKFPCHRISHNLWGSRTAVAFTSPAGGPWNKSQCRSQCRVSGHGKMSRVCDQKLSVFGLCSLVSALVEGGLGCARLVCDTLAGGSKPSLLTLLGRRQQAQATAYF

SEQ ID NO: 879922 - protein, 111 aa, Homo sapiens [sequence omitted]

SEQ ID NO: 879923 - protein, 642 aa, Homo sapiens
MDKLKCPSFFKCREKEKVSASSENFHVGENDENQDRGNWSKKSDYLLSMIGYAVGLGNVWRFPYLTYSNGGGAFLIPYAIMLALAGLPLFFLECSLGQFASLGPVSVWRILPLFQGVGITMVLISIFVTIYYNVIIAYSLYYMFASFQSELPWKNCSSWSDKNCSRSPIVTHCNVSTVNKGIQEIIQMNKSWVDINNFTCINGSEIYQPGQLPSEQYWNKVALQRSSGMNETGVIVWYLALCLLLAWLIVGAALFKGIKSSGKVVYFTALFPYVVLLILLVRGATLEGASKGISYYIGAQSNFTKLKEAEVWKDAATQIFYSLSVAWGGLVALSSYNKFKNNCFSDAIVVCLTNCLTSVFAGFAIFSILGHMAHISGKEVSQVVKSGFDLAFIAYPEALAQLPGGPFWSILFFFMLLTLGLDSQFASIETITTTIQDLFPKVMKKMRVPITLGCCLVLFLLGLVCVTQAGIYWVHLIDHFCAGWGILIAAILELVGIIWIYGGNRFIEDTEMMIGAKRWIFWLWWRACWFVITPILLIAIFIWSLVQFHRPNYGAIPYPDWGVALGWCMIVFCIIWIPIMAIIKIIQAKGNIFQRLISCCRPASNWGPYLEQHRGERYKDMVDPKKEADHEIPTVSGSRKPE

SEQ ID NO: 879924 - protein, 586 aa, Homo sapiens
MDKLKCPSFFKCREKEKVSASSENFHVGENDENQDRGNWSKKSDYLLSMIGYAVGLGNVWRFPYLTYSNGGGAFLIPYAIMLALAGLPLFFLECSLGQFASLGPVSVWRILPLFQGVGITMVLISIFVTIYYNVIIAYSLYYMFASFQSELPWKNCSSWSDKNCSRSPIVTHCNVSTVNKGIQEIIQMNKSWVDINNFTCINGSEIYQPGQLPSEQYWNKVALQRSSGMNETGVIVWYLALCLLLAWLIVGAALFKGIKSSGKVVYFTALFPYVVLLILLVRGATLEGASKGISYYIGAQSNFTKLKEAEVWKDAATQIFYSLSVAWGGLVALSSYNKFKNNCFSDAIVVCLTNCLTSVFAGFAIFSILGHMAHISGKEVSQVVKSGFDLAFIAYPEALAQLPGGPFWSILFFFMLLTLGLDSQFASIETITTTIQDLFPKVMKKMRVPITLGCCLVLFLLGLVCVTQAGIYWVHLIDHFCAGWGILIAAILELVGIIWIYGGNRFIEDTEMMIGAKRWIFWLWWRACWFVITPILLIRLISCCRPASNWGPYLEQHRGERYKDMVDPKKEADHEIPTVSGSRKPE

SEQ ID NO: 879925 - protein, 78 aa, Homo sapiens
MRRSRIQQCSAVIPVSVETLGLWRSRLGCWRCPSSPEIAVSHRICILFTRLNKKKYRPGALAYACNPSTLGGHGGWIT

SEQ ID NO: 879926 - protein, 183 aa, Homo sapiens
HAQVSHTAVQCRYSSLRRNAGTMAEPTGLLEMSELPGDSSVPQVGTASGVSDVLRGAVGGGVRVQEAREGPVAEAARSMARMPGPVPGPIPSSVPGLASAPDPHQQLAFLEINRQLLFREYLDGSSMIPVRLLRDFEERRRLFVEGCKAREAAFDADPPQMDFAAVAFTVALTASEALSPLAD

SEQ ID NO: 879927 - protein, 202 aa, Homo sapiens
LFMASLETNCNFISFPCRSYKDYKTSLCVDCDCFKEKSCPRLGYQAKLFKGVLKERMEGRPLRTTVFLDTSGTYPFCTYYFVLSIIVPDKTMMDGSFSFKLLNQLGMIEEPRLYEKNKPFYKLQEVKILAQFYNDFVNISSIGLTYFQSSNLQCSTCTYKIQSLMLKSLTYPERPPLCRYNIVLKDREEVFLNPNTCTPKNT

SEQ ID NO: 879928 - protein, 117 aa, Homo sapiens
MPSPGTVCSLLLLGMLWLDLAMAGSSFLSPEHQRVQQRKESKKPPAKLQPRALAGWLRPEDGGQAEGAEDELEVRFNAPFDVGIKLSGVQYQQHSQALGKFLQDILWEEAKEAPADK

SEQ ID NO: 879929 - protein, 105 aa, Homo sapiens
LGMLWLDLAMAGSSFLSPEHQRVQVRPPHKAPHVVPALPLSNQLCDLEQQRHLWASVFSQSTKDSGSDLTVSGRTWGLRVLNRLFPPSSRERSRRSHQPSCSPEL

SEQ ID NO: 879930 - protein, 220 aa, Homo sapiens
MELGLGGLSTLSHCPWPRRQPALWPTLAALALLSSVAEASLGSAPRSPAPREGPPPVLASPAGHLPGGRTARWCSGRARRPPPQPSRPAPPPPAPPSALPRGGRAARAGGPGSRARAAGARGCRLRSQLVPVRALGLGHRSDELVRFRFCSGSCRRARSPHDLSLASLLGAGALRPPPGSRPVSQPCCRPTRYEAVSFMDVNSTWRTVDRLSATACGCLG

SEQ ID NO: 879931 - protein, 220 aa, Homo sapiens; identical to SEQ ID NO: 879930

SEQ ID NO: 879932 - protein, 220 aa, Homo sapiens; identical to SEQ ID NO: 879930

SEQ ID NO: 879933 - protein, 237 aa, Homo sapiens
MPGLISARGQPLLEVLPPQAHLGALFLPEAPLGLSAQPALWPTLAALALLSSVAEASLGSAPRSPAPREGPPPVLASPAGHLPGGRTARWCSGRARRPPPQPSRPAPPPPAPPSALPRGGRAARAGGPGSRARAAGARGCRLRSQLVPVRALGLGHRSDELVRFRFCSGSCRRARSPHDLSLASLLGAGALRPPPGSRPVSQPCCRPTRYEAVSFMDVNSTWRTVDRLSATACGCLG

SEQ ID NO: 879934 - protein, 228 aa, Homo sapiens
MELGLGGLSTLSHCPWPRRQAPLGLSAQPALWPTLAALALLSSVAEASLGSAPRSPAPREGPPPVLASPAGHLPGGRTARWCSGRARRPPPQPSRPAPPPPAPPSALPRGGRAARAGGPGSRARAAGARGCRLRSQLVPVRALGLGHRSDELVRFRFCSGSCRRARSPHDLSLASLLGAGALRPPPGSRPVSQPCCRPTRYEAVSFMDVNSTWRTVDRLSATACGCLG

SEQ ID NO: 879935 - protein, 220 aa, Homo sapiens; identical to SEQ ID NO: 879930

SEQ ID NO: 879936 - protein, 228 aa, Homo sapiens; identical to SEQ ID NO: 879934

SEQ ID NO: 879937 - protein, 451 aa, Homo sapiens
  misc_feature (426)..(427): Xaa can be any naturally occurring amino acid
  misc_feature (444)..(444): Xaa can be any naturally occurring amino acid
MWNRPCQRLPQQPLVAEPTAEGEPHLPTGRELTEANRFAYAALCGISLSQLFPEPEHSSFCTEFMAGLVQWLELSEAVLPTMTAFASGLGGEGADVFVQILLKDPILKDDPTVITQDLLSFSLKDGHYDARARVLVCHMTSLLQVPLEELDVLEEMFLESLKEIKEEESEMAEASRKKKENRRKWKRYLLIGLATVGGGTVIGVTGGLAAPLVAAGAATIIGSAGAAALGSAAGIAIMTSLFGAAGAGLTGYKMKKRVGAIEEFTFLPLTEGRQLHITIAVTGWLASGKYRTFSAPWAALAHSREQYCLAWEAKYLMELGNALETILSGLANMVAQEALKYTVLSGIVAALTWPASLLSVANVIDNPWGVCLHRSAEVGKHLAHILLSRQQGRRPVTLIGFSLGARVIYFCLQEMAQEKDCQGIIXXVILPGAPVEGRAKHWEXSGSGVRE

SEQ ID NO: 879938 - protein, 451 aa, Homo sapiens; identical to SEQ ID NO: 879937
  misc_feature (426)..(427): Xaa can be any naturally occurring amino acid
  misc_feature (444)..(444): Xaa can be any naturally occurring amino acid

SEQ ID NO: 879939 - protein, 411 aa, Homo sapiens
  misc_feature (386)..(387): Xaa can be any naturally occurring amino acid
  misc_feature (404)..(404): Xaa can be any naturally occurring amino acid
MWNRPCQRLPQQPLVAEPTAEGEPHLPTGRELTEANRFAYAALCGISLSQLFPEPEHSSFCTEFMAGLVQWLELSEAVLPTMTAFASGLGGEGADVFVQILLKDPILKDDPTVITQDLLSFSLKDGHYDARARVLVCHMTSLLQVPLEELDVLEEMFLESLKEIKEEESEMAEASRKKKENRRKWKRYLLIGLATVGGGTVIGVTGGLAAPLVAAGAATIIGSAGAAALGSAAGIAIMTSLFGAAGAGLTGTFSAPWAALAHSREQYCLAWEAKYLMELGNALETILSGLANMVAQEALKYTVLSGIVAALTWPASLLSVANVIDNPWGVCLHRSAEVGKHLAHILLSRQQGRRPVTLIGFSLGARVIYFCLQEMAQEKDCQGIIXXVILPGAPVEGRAKHWEXSGSGVRE

SEQ ID NO: 879940 - protein, 411 aa, Homo sapiens
  misc_feature (386)..(387): Xaa can be any naturally occurring amino acid
  misc_feature (404)..(404): Xaa can be any naturally occurring amino acid
RLGRGRCNRPRIPEPDHSSFCTEFMAGLVQWLELSEAVLPTMTAFASGLGGEGADVFVQILLKDPILKDDPTVITQDLLSFSLKDGHYDARARVLVCHMTSLLQVPLEELDVLEEMFLESLKEIKEEESEMAEASRKKKENRRKWKRYLLIGLATVGGGTVIGVTGGLAAPLVAAGAATIIGSAGAAALGSAAGIAIMTSLFGAAGAGLTGYKMKKRVGAIEEFTFLPLTEGRQLHITIAVTGWLASGKYRTFSAPWAALAHSREQYCLAWEAKYLMELGNALETILSGLANMVAQEALKYTVLSGIVAALTWPASLLSVANVIDNPWGVCLHRSAEVGKHLAHILLSRQQGRRPVTLIGFSLGARVIYFCLQEMAQEKDCQGIIXXVILPGAPVEGRAKHWEXSGSGVRE

SEQ ID NO: 879941 - protein, 299 aa, Homo sapiens
  misc_feature (274)..(275): Xaa can be any naturally occurring amino acid
  misc_feature (292)..(292): Xaa can be any naturally occurring amino acid
MWNRPCQRLPQQPLVAEPTAEGEPHLPTGRELTEANRFAYAALCGISLSQLFPEPEHRMAEASRKKKENRRKWKRYLLIGLATVGGGTVIGVTGGLAAPLVAAGAATIIGSAGAAALGSAAGIAIMTSLFGAAGAGLTGTFSAPWAALAHSREQYCLAWEAKYLMELGNALETILSGLANMVAQEALKYTVLSGIVAALTWPASLLSVANVIDNPWGVCLHRSAEVGKHLAHILLSRQQGRRPVTLIGFSLGARVIYFCLQEMAQEKDCQGIIXXVILPGAPVEGRAKHWEXSGSGVRE

SEQ ID NO: 879942 - protein, 61 aa, Homo sapiens
TFSAPWAALAHSREQYCLAWEAKYLMELGNALETILSGLANMVAQEALKYTVLSGKCPHLP

SEQ ID NO: 879943 - protein, 536 aa, Homo sapiens
MATPDAGLPGAEGVEPAPWAQLEAPARLLLQALQAGPEGARRGLGVLRALGSRGWEPFDWGRLLEALCREEPVVQGPDGRLELKPLLLRLPRICQRNLMSLLMAVRPSLPESGLLSVLQIAQQDLAPDPDAWLRALGELLRRDLGVGTSMEGASPLSERCQRQLQSLCRGLGLGGRRLKSPQAPDPEEEENRDSQQPGKRRKDSEEEAASPEGKRVPKRLRCWEEEEDHEKERPEHKSLESLADGGSASPIKDQPVMAVKTGEDGSNLDDAKGLAESLELPKAIQDQLPRLQQLLKTLEEGLEGLEDAPPVELQLLHECSPSQMDLLCAQLQLPQLSDLGLLRLCTWLLALSPDLSLSNATVLTRSLFLGRILSLTSSASRLLTTALTSFCAKYTYPVCSALLDPVLQAPGTGPAQTELLCCLVKMESLEPDAQVLMLGQILELPWKEETFLVLQSLLERQVEMTPEKFSVLMEKLCKKGLAATTSMAYAKLMLTVMTKYQANITETQRLGLAMALEPNTTFLRKSLKAALKHLGP

SEQ ID NO: 879944 - protein, 438 aa, Homo sapiens
MSLLMAVRPSLPESGLLSVLQIAQQDLAPDPDAWLRALGELLRRDLGVGTSMEGASPLSERCQRQLQSLCRGLGLGGRRLKSPQAPDPEEEENRDSQQPGKRRKDSEEEAASPEGKRVPKRLRCWEEEEDHEKERPEHKSLESLADGGSASPIKDQPVMAVKTGEDGSNLDDAKGLAESLELPKAIQDQLPRLQQLLKTLEEGLEGLEDAPPVELQLLHECSPSQMDLLCAQLQLPQLSDLGLLRLCTWLLALSPDLSLSNATVLTRSLFLGRILSLTSSASRLLTTALTSFCAKYTYPVCSALLDPVLQAPGTGPAQTELLCCLVKMESLEPDAQVLMLGQILELPWKEETFLVLQSLLERQVEMTPEKFSVLMEKLCKKGLAATTSMAYAKLMLTVMTKYQANITETQRLGLAMALEPNTTFLRKSLKAALKHLGP

SEQ ID NO: 879945 - protein, 513 aa, Homo sapiens
MATPDAGLPGAEGVEPAPWAQLEAPARLLLQALQAGPEGARRGLGVLRALGSRGWEPFDWGRLLEALCREEPVVQGPDGRLELKPLLLRLPRICQRNLMSLLMAVRPSLPESGLLSVLQIAQQDLAPDPDAWLRALGELLRRDLGVGTSMEGASPLSERCQRQLQSLCRGLGLGGRRLKSPQAPDPEEEENRDSQQPGKRRKDSEEEAASPEGKRVPKRLRCWEEEEDHEKERPEHKSLESLADGGSASPIKDQPVMAVKTGEDGSNLDDAKGLAESLELPKAIQDQLPRLQQLLKTLEEMDLLCAQLQLPQLSDLGLLRLCTWLLALSPDLSLSNATVLTRSLFLGRILSLTSSASRLLTTALTSFCAKYTYPVCSALLDPVLQAPGTGPAQTELLCCLVKMESLEPDAQVLMLGQILELPWKEETFLVLQSLLERQVEMTPEKFSVLMEKLCKKGLAATTSMAYAKLMLTVMTKYQANITETQRLGLAMALEPNTTFLRKSLKAALKHLGP

SEQ ID NO: 879946 - protein, 213 aa, Homo sapiens [sequence omitted]

SEQ ID NO: 879947 - protein, 179 aa, Homo sapiens
MAKTAMAYKEKMKELSMLSLICSCFYPEPRNINIYTYDDMEVKQINKRASGQAFELILKPPSPISEAPRTLASPKKKDLSLEEIQKKLEAAEERRKSQEAQVLKQLAEKREHEREVLQKALEENNNFSKMAEEKLILKMEQIKENREANLAAIIERLQEKERHAAEVRRNKELQVELSG

SEQ ID NO: 879948 - protein, 179 aa, Homo sapiens; identical to SEQ ID NO: 879947

SEQ ID NO: 879949 - protein, 179 aa, Homo sapiens; identical to SEQ ID NO: 879947

SEQ ID NO: 879950 - protein, 179 aa, Homo sapiens; identical to SEQ ID NO: 879947

SEQ ID NO: 879951 - protein, 120 aa, Homo sapiens
MIAVISEAPRTLASPKKKDLSLEEIQKKLEAAEERRKSQEAQVLKQLAEKREHEREVLQKALEENNNFSKMAEEKLILKMEQIKENREANLAAIIERLQEKERHAAEVRRNKELQVELSG

SEQ ID NO: 879952 - protein, 179 aa, Homo sapiens; identical to SEQ ID NO: 879947

SEQ ID NO: 879953 - protein, 107 aa, Homo sapiens
MAKTAMAYKEKMKELSMLSLICSCFYPEPRNINIYTYDDMEVKQINKRASGQAFELILKPPSPISEAPRTLASPNQKHCGLSLKLVFLPQCKAILPTNNTNNKTLHL

SEQ ID NO: 879954 - protein, 179 aa, Homo sapiens; identical to SEQ ID NO: 879947

SEQ ID NO: 879955 - protein, 179 aa, Homo sapiens; identical to SEQ ID NO: 879947

SEQ ID NO: 879956 - protein, 179 aa, Homo sapiens; identical to SEQ ID NO: 879947

SEQ ID NO: 879957 - protein, 193 aa, Homo sapiens
MAKTAMAYKEKMKELSMLSLICSCFYPEPRNINIYTYDDMEVKQINKRASGQAFELILKPPSPISEAPRTLASPKKKDLSLEEIQKKLEAAEERRKSQEAQVLKQLAEKREHEREVLQKALEENNNFSKMAEEKLILKMEQIKENREANLAAIIERLQEKCLAEAREGLARPTNSKSPCLYYNGSCDIRMGNV

SEQ ID NO: 879958 - protein, 224 aa, Homo sapiens
VPPLSPSAGPASGSPCARAMSKKKGLSAEEKRTRMMEIFSETKDVFQLKDLEKIAPKEKGITAMSVKEVLQSLVDDGMVDCERIGTSNYYWAFPSKALHARKHKLEVLESQLSEGSQKHASLQKSIEKAKIGRCETEERTRLAKELSSLRDQREQLKAEVEKYKDCDPQVVEEIRQANKVAKEAANRWTDNIFAIKSWAKRKFGFEENKIDRTFGIPEDFDYID

SEQ ID NO: 879959 - protein, 224 aa, Homo sapiens; identical to SEQ ID NO: 879958

SEQ ID NO: 879960 - protein, 145 aa, Homo sapiens
VPPLSPSAGPASGSPCARAMSKKKGLSAEEKRTRMMEIFSETKDVFQLKDLEKIAPKEKGITAMSVKEVLQSLVDDGMVDCERIGTSNYYWAFPSKALHARKHKLEVLESQDPGCCFHEIIKVSYYRKFWLGAVAHACNPSTLGG

SEQ ID NO: 879961 - protein, 141 aa, Homo sapiens
VPPLSPSAGPASGSPCARAMSKKKGLSAEEKRTRMMEIFSETKDVFQLKDLEKIAPKEKGITAMSVKEVLQSLVDDGMVDCERIGTSNYYWAFPSKALHARKHKLEVLESQLSEGSQKHASLQKSIEKAKIGRCETAKQIK

SEQ ID NO: 879962 - protein, 135 aa, Homo sapiens
VPPLSPSAGPASGSPCARAMSKKKGLSAEEKRTRMMEIFSETKDVFQLKDLEKIAPKEKGITAMSVKEVLQSLVDDGMVDCERIGTSNYYWAFPSKALHARKHKLEVLESQAWCSRLLSQDFGRLWQEDRMRPGV

SEQ ID NO: 879963 - protein, 578 aa, Homo sapiens
MNISVDLETNYAELVLDVGRVTLGENSRKKMKDCKLRKKQNERVSRAMCALLNSGGGVIKAEIENEDYSYTKDGIGLDLENSFSNILLFVPEYLDFMQNGNYFLIFVKSWSLNTSGLRITTLSSNLYKRDITSAKVMNATAALEFLKDMKKTRGRLYLRPELLAKRPCVDIQEENNMKALAGVFFDRTELDRKEKLTFTESTHVEIKNFSTEKLLQRIKEILPQYVSAFANTDGGYLFIGLNEDKEIIGFKAEMSDLDDLEREIEKSIRKMPVHHFCMEKKKINYSCKFLGVYDKGSLCGYVCALRVERFCCAVFAKEPDSWHVKDNRVMQLTRKEWIQFMVEAEPKFSSSYEEVISQINASLPAPHSWPLLEWQRQRHHCPGLSGRITYTPENLCRKLFLQHEGLKQLICEEMDSVRKGSLIFSRSWSVDLGLQENHKVLCDALLISQDSPPVLYTFHMVQDEEFKGYSTQTALTLKQKLAKIGGYTKKVCVMTKIFYLSPEGMTSCQYDLRSQVIYPESYYFTRRKYLLKALFKALKRLKSLRDQFSFAENLYQIIGIDCFQKNDKKMFKSCRRLT

SEQ ID NO: 879964 - protein, 578 aa, Homo sapiens; identical to SEQ ID NO: 879963

SEQ ID NO: 879965 - protein, 578 aa, Homo sapiens; identical to SEQ ID NO: 879963

SEQ ID NO: 879966 - protein, 136 aa, Homo sapiens
YIINFAFANLLPFITHLLSTKYCFALGDSVIIFPPPPPPYFPESSASAVAESPGTNSLLPNENPPSYYSIFNYGTPTSEGAASERDCESIYTISGTNSSSEASHTPHLPSELPPRYEEKENAAATFLPLSSEPSPP

SEQ ID NO: 879967 - protein, 387 aa, Homo sapiens
SGGRAVGRVQGGRRSRGRVRRRTPRPASAHSSAVSQAPDPASELLKSWREENTSHPASGKGPLLDMSPAAAAEPDGDQQDRHVSKLIFCFFVFGAVLLCVGVLLSIFGFQACQYKPLPDCPMVLKVAGPACAVVGLGAVILARSRAQLQLRAGLQRGQQMDPDRAFICGESRQFAQCLIFGFLFLTSGMLISVLGIWVPGCGSNWAQEPLNETDTGDSEPRMCGFLSLQIMGPLIVLVGLCFFVVAHVKKRNTLNAGQDASEREEGQIQIMEPVQVTVGDSVIIFPPPPPPYFPESSASAVAESPGTNSLLPNENPPSYYSIFNYGTPTSEGAASERDCESIYTISGTNSSSEASHTPHLPSELPPRYEEKDMDSSSVLYAMDHYFI

SEQ ID NO: 879968 - protein, 388 aa, Homo sapiens
SGGRAVGRVQGGRRSRGRVRRRTPRPASAHSSAVSQAPDPASELLKSWREENTSHPASGKGPLLDMSPAAAAEPDGDQQDRHVSKLIFCFFVFGAVLLCVGVLLSIFGFQACQYKPLPDCPMVLKVAGPACAVVGLGAVILARSRAQLQLRAGLQRGQQMDPDRAFICGESRQFAQCLIFGFLFLTSGMLISVLGIWVPGCGSNWAQEPLNETDTGDSEPRMCGFLSLQIMGPLIVLVGLCFFVVAHVKKRNTLNAGQDASEREEGQIQIMEPVQVTVGDSVIIFPPPPPPYFPESSASAVAESPGTNSLLPNENPPSYYSIFNYGTPTSEGAASERDCESIYTISGTNSSSEASHTPHLPSELPPRYEEKENAAATFLPLSSEPSPP

SEQ ID NO: 879969 - protein, 143 aa, Homo sapiens [sequence omitted]

SEQ ID NO: 879970 - protein, 358 aa, Homo sapiens
MSSLGCWCGVEDEAAPSKQSIYIQRETQVRTPMAGVSPKKAHPCEMCGPILGDILHVADHQGTHHKQKLHRCEAWGNKLYDSGNFHQHQNEHIGEKPYRGSVEEALFAKRCKLHVSGESSVFSESGKDFLLRSGLLQQEATHTGKSNSKTECVSLFHGGKSHYSCGGCMKHFSTKDILSQHERLLPTEEPSVWCECGKSSSKYDSFSNHQGVHTREKPYTCGICGKLFNSKSHLLVHQRIHTGEKPYECEVCQKFFRHKYHLIAHQRVHTGERPYECSDCGKSFTHSSTFRVHKRVHTGQKPYECSECGKSFAESSSLTKHRRVHTGEKPYGCSECEKKFRQISSLRHHQRVHKRKGL

SEQ ID NO: 879971 - protein, 407 aa, Homo sapiens
MAAAALRFPVQGTVTFEDVAVKFTQEEWNLLSEAQRCLYRDVTLENLALMSSLGCWCGVEDEAAPSKQSIYIQRETQVRTPMAGVSPKKAHPCEMCGPILGDILHVADHQGTHHKQKLHRCEAWGNKLYDSGNFHQHQNEHIGEKPYRGSVEEALFAKRCKLHVSGESSVFSESGKDFLLRSGLLQQEATHTGKSNSKTECVSLFHGGKSHYSCGGCMKHFSTKDILSQHERLLPTEEPSVWCECGKSSSKYDSFSNHQGVHTREKPYTCGICGKLFNSKSHLLVHQRIHTGEKPYECEVCQKFFRHKYHLIAHQRVHTGERPYECSDCGKSFTHSSTFRVHKRVHTGQKPYECSECGKSFAESSSLTKHRRVHTGEKPYGCSECEKKFRQISSLRHHQRVHKRKGL

SEQ ID NO: 879972 - protein, 364 aa, Homo sapiens [sequence omitted]

SEQ ID NO: 879973 - protein, 358 aa, Homo sapiens; identical to SEQ ID NO: 879970

SEQ ID NO: 879974 - protein, 176 aa, Homo sapiens
RSHHTHTTKQRTGKKGTHTLLPFTPNQNQNPNQSIQKSKPGQNQNESIKQSKSSQKQKPKCRYRHAVGDQATLPLKWSGQVPKTSLTKFQMSGLQVPVPSQCSAAALILCGGLPHATLARCSTGAIAYPGVLSGSASLKLARVPCRDAPQGRPKLPKGLPRLSVNHLASQSGNQEM

SEQ ID NO: 879975 - protein, 176 aa, Homo sapiens; identical to SEQ ID NO: 879974

SEQ ID NO: 879976 - protein, 54 aa, Homo sapiens
MLLAHLISPHALLAGRGEGSRFLSEEYIFRIALWLGCPYKSGVIYDRVCMPKCV

SEQ ID NO: 879977 - protein, 176 aa, Homo sapiens; identical to SEQ ID NO: 879974

SEQ ID NO: 879978 - protein, 358 aa, Homo sapiens; identical to SEQ ID NO: 879970

SEQ ID NO: 879979 - protein, 462 aa, Homo sapiens
AAAAMGPRGVSWVESSGRRERAAESRLCKEKNDSRPPGSSHHHGPNTALQGLPNANGNGRAKVPRSGTVTFEDVAVKFTQEEWNLLSEAQRCLYRDVTLENLALMSSLGCWCGVEDEAAPSKQSIYIQRETQVRTPMAGVSPKKAHPCEMCGPILGDILHVADHQGTHHKQKLHRCEAWGNKLYDSGNFHQHQNEHIGEKPYRGSVEEALFAKRCKLHVSGESSVFSESGKDFLLRSGLLQQEATHTGKSNSKTECVSLFHGGKSHYSCGGCMKHFSTKDILSQHERLLPTEEPSVWCECGKSSSKYDSFSNHQGVHTREKPYTCGICGKLFNSKSHLLVHQRIHTGEKPYECEVCQKFFRHKYHLIAHQRVHTGERPYECSDCGKSFTHSSTFRVHKRVHTGQKPYECSECGKSFAESSSLTKHRRVHTGEKPYGCSECEKKFRQISSLRHHQRVHKRKGL

SEQ ID NO: 879980 - protein, 176 aa, Homo sapiens; identical to SEQ ID NO: 879974

SEQ ID NO: 879981 - protein, 176 aa, Homo sapiens; identical to SEQ ID NO: 879974

SEQ ID NO: 879982 - protein, 75 aa, Homo sapiens
AGELVTAAESRPHPASRARACARRISPGDGGECEGGGEVVTDAEAVLAAEAKSPSQACMGSYCTSGFGGMQNRGL

SEQ ID NO: 879983 - protein, 68 aa, Homo sapiens
RPLGGRGLRFRTSSCCWMAPVCDVPRNLALRKKQSKPGKYVALNRSNQGQKGRKRVSYLHGTTLTSSA

SEQ ID NO: 879984 - protein, 105 aa, Homo sapiens
MNNHHLSREKRNYQHFADDETDSGRGGGGQSVCHLESGNVRIQTQIPGSSRHHMALTLGREFQEIPEEEGEKLAGTGGVNGANTGVWESISWRKVIAVFAIESNV

SEQ ID NO: 879985 - protein, 120 aa, Homo sapiens
PRSRGRPSRREPVRDVGRRRPEDYDIHNSRKKPRIDYPPEFHQRPGYLKDPRYQEVDRRFSGVRRDVFLNGSYNDYVREFHNMGPPPPWQGMPLTQEWNNLHTILTISTMLHLLKLIPRR

SEQ ID NO: 879986 - protein, 111 aa, Homo sapiens
MARINFCIIQNCSHISESKFQNLIYNLWFVVCDSHILRDLCHHQGIPRSVLGKCHLAQFHVIQPLVIRRESLLVVFNLVGHFMVFLLLQVVQVLTQLLVSKKKKSRRVISN

SEQ ID NO: 879987 - protein, 74 aa, Homo sapiens
HPQTLNQRGKLPLNTFRSIFYTGSIFLETNLSWELPVLQLPSGQAALWACNVAGILGLAGSNILCTPQHSLLCL

SEQ ID NO: 879988 - protein, 79 aa, Homo sapiens
FPRRTKPPVTRAGSTSSKQREQQVLKPKANALTEKSLMTKCVASVCAEITKRVPQKGEKKGPQERVAGLQVLEKGSKHG

SEQ ID NO: 879989 - protein, 82 aa, Homo sapiens
GLCILQWKFHSMPVCTISSLPQVDDVLASLQISSHNCKVMYYTKVIGSEDFRGSMTSLESSHSGFSQLSAPPPSPASLTPAP

SEQ ID NO: 879990 - protein, 137 aa, Homo sapiens
MEAVHTCSHTAVHTYTHTPIRDGGSAHLLTHSGAHIHSHIDRRWRQCTPAHTQRCTHTHTHTDRRWRQCTPAHTQRCTHTLTHTPIRDGGSVPQYHRCAFLDAGISGHFYFQLYRIFYFSYLMSLYYFYNQKHAISI

SEQ ID NO: 879991 - protein, 360 aa, Homo sapiens
LPTLDTKAPTGRRTKPWGRLKRRARSPQGQTAKPRAAAELNTEVPKPSAKDVEILEQESEVLEPSVEQDAESPGLSTAAGFESPEPGRDDPGPSEAQRAEVQGQHPPPGPKTSSSRSGSEAPHLRFPPCPEAPQRPPEERFMETPIEREIRRSCEREESLRRSRGLSPGRAGRELVELRVRPVLNLPGPGPALPRALERARAGAQMQRDIEREAHRQAALARPAVPEPRARSPPQPLGELKRFFEAAAGSGSSAGAGDGAGPQRLPEPGGRPRSAVQGGCRVLGSAPPPFTPSLLEQEVRAVREREQELQRQRRSVYGTAEFKEPTPSLTASRGDGKLVVIWPPRRKVSENGLEQEERKP

SEQ ID NO: 879992 - protein, 335 aa, Homo sapiens
LPTLDTKAPTGRRTKPWGRLKRRARSPQGQTAKPRAAAELNTEVPKPSAKDVEILEQESEVLEPSVEQDAESPGLSTAAGFESPEPGRDDPGPSEAQRAEVQGQHPPPGPKTSSSRSGSEAPHLRFPPCPEAPQRPPEERFMETPIEREIRRSCEREESLRRSRGLSPGRAGRELVELRVRPVLNLPGPGPALPRALERARAGAQMQRDIEREAHRQAALARPAVPEPRARSPPQPLGELKRFFEAAAGSGSSAGAGDGAGPQRLPEPGGRPRSAVQGGCRVLGSAPPPFTPSLLEQEVRAVREREQELQRQRRSVYGTAEFKEPTPSLTGKPRA

SEQ ID NO: 879993 - protein, 345 aa, Homo sapiens
LPTLDTKAPTGRRTKPWGRLKRRARSPQGQTAKPRAAAELNTEVPKPSAKDVEILEQESEVLEPSVEQDAESPGLSTAAGFESPEPGRDDPGPSEAQRAEVQGQHPPPGPKTSSSRSGSEAPHLRFPPCPEAPQRPPEERFMETPIEREIRRSCEREESLRRSRGLSPGRAGRELVELRVRPVLNLPGPGPALPRALERARAGAQMQRDIEREAHRQAALARPAVPEPRARSPPQPLGELKRFFEAAAGSGSSAGAGDGAGPQRLPEPGGRPRSAVQGGCRVLGSAPPPFTPSLLEQEVRAVREREQELQRQRRSVYGTAEFKEPTPSLTGVRPAFHPGCRQLVS

SEQ ID NO: 879994 - protein, 224 aa, Homo sapiens
MVAAVLLGLSWLCSPLGALVLDFNNIRSSADLHGARKGSQCLSDTDCNTRKFCLQPRDEKPFCATCRGLRRRCQRDAMCCPGTLCVNDVCTTMEDATPILERQLDEQDGTHAEGTTGHPVQENQPKRKPSIKKSQGRKGQEGESCLRTFDCGPGLCCARHFWTKICKPVLLEGQVCSRRGHKDTAQAPEIFQRCDCGPGLLCRSQLTSNRQHARLRVCQKIEKL

SEQ ID NO: 879995 - protein, 76 aa, Homo sapiens
VVDATPLEVFLLSQHLEEFLPIFKREQIDLEALLLCSDEDLQSIQMQLGPRKKVLNAINRRKQVLQQPGQLVDTSL

SEQ ID NO: 879996 - protein, 76 aa, Homo sapiens; identical to SEQ ID NO: 879995

SEQ ID NO: 879997 - protein, 159 aa, Homo sapiens
PRRGRRGRAPSASRPSAGNVCGKNSESRAVASRGWVTWLLSFRKHCFVQSSDPGPSRAASHHRVRLRFSSWLELSAFFFRDRASFLRGPGVSGQGRGSRLVCPLNGSWASEILRNAHQPWYHRERRLRGFRNGVSGLGSHLSSPHFGRPRQADHMRSGV

SEQ ID NO: 879998 - protein, 461 aa, Homo sapiens
GWKAHSSSSSQQLCLEVPQSLCSCPQIVGLGDSKKAAKDSAGAAPQGPHRLEVLPGFYAQGVFWVPQSPLKHGEAEGSSPISGICSLEATAMAGPRYPVSVQGAALVQIKRLQTFAFSVRWSDGSDTFVRRSWDEFRQLKTLKETFPVEAGLLRRSDRVLPKLLDAPLLGRVGRTSRGLARLQLLETYSRRLLATAERVARSPTITGFFAPQPLDLEPALPPGSRVILPTPEEQPLSRAAGRLSIHSLEAQSLRCLQPFCTQDTRDRPFQAQAQESLDVLLRHPSGWWLVENEDRQTAWFPAPYLEEAAPGQGREGGPSLGSSGPQFCASRAYESSRADELSVPAGARVRVLETSDRGWWLCRYGDRAGLLPAVLLRPEGLGALLSGTGFRGGDDPAGEARGFPEPSQATAPPPTVPTRPSPGAIQSRCCTVTRRALERRPRRQGRPRGCVDSVPHPTTEQ

SEQ ID NO: 879999 - protein, 171 aa, Homo sapiens
PPSADSSKENVEKGAGGPRPLWPRGDSKHPLPPGPQFCASRAYESSRADELSVPAGARVRVLETSDRGWWLCRYGDRAGLLPAVLLRPEGLGALLSGTGFRGGDDPAGEARGFPEPSQATAPPPTVPTRPSPGAIQSRCCTVTRRALERRPRRQGRPRGCVDSVPHPTTEQ

SEQ ID NO: 880000 - protein, 184 aa, Homo sapiens
GWKAHSSSSSQQLCLEVPQSLCSCPQIVGLGDSKKAAKDSAGAAPQGPHRLEVLPGFYAQGVFWVPQSPLKHGEAEGSSPISGICSLEATAMAGPRYPVSVQGAALVQIKRLQTFAFSVRWSDGSDTFVRRSWDEFRQLKTLKETFPVEAGLLRRSDRVLPKLLGQASLGTGAGKAVACLGAPG

SEQ ID NO: 880001 - protein, 176 aa, Homo sapiens
GCLPLDCLPSVTPTGGPSSLLKLPAPAIRVRDPALSRVHSGLWKTNALVPALRRPSRRPSRWRRACCGDLTAFSQSFSVRPAWVRERGRRWLAWGRQGPVKPKAAYHSTFLWCLKMHHCWDAWGARAAAWRACSCWKPILGGCWRLQSAWHGARRSLASSHRNPWTWSPRCHPAGA

SEQ ID NO: 880002 - protein, 1168 aa, Homo sapiens
EATMQDVQGPRPGSPGDAEDRRELGLHRGEVNFGGSGKKRGKFVRVPSGVAPSVLFDLLLAEWHLPAPNLVVSLVGEEQPFAMKSWLRDVLRKGLVKAAQSTGAWILTSALRVGLARHVGQAVRDHSLASTSTKVRVVAVGMASLGRVLHRRILEEAQEDFPVHYPEDDGGSQGPLCSLDSNLSHFILVEPGPPGKGDGLTELRLRLEKHISEQRAGYGGTGSIEIPVLCLLVNGDPNTLERISRAVEQAAPWLILVGSGGIADVLAALVNQPHLLVPKVAEKQFKEKFPSKHFSWEDIVRWTKLLQNITSHQHLLTVYDFEQEGSEELDTVILKALVKACKSHSQEPQDYLDELKLAVAWDRVDIAKSEIFNGDVEWKSCDLEEVMVDALVSNKPEFVRLFVDNGADVADFLTYGRLQELYRSVSRKSLLFDLLQRKQEEARLTLAGLGTQQAREPPAGPPAFSLHEVSRVLKDFLQDACRGFYQDGRPGDRRRAEKGPAKRPTGQKWLLDLNQKSENPWRDLFLWAVLQNRHEMATYFWAMGQEGVAAALAACKILKEMSHLETEAEAARATREAKYERLALDLFSECYSNSEARAFALLVRRNRCWSKTTCLHLATEADAKAFFAHDGVQAFLTRIWWGDMAAGTPILRLLGAFLCPALVYTNLITFSEEAPLRTGLEDLQDLDSLDTEKSPLYGLQSRVEELVEAPRAQGDRGPRAVFLLTRWRKFWGAPVTVFLGNVVMYFAFLFLFTYVLLVDFRPPPQGPSGPEVTLYFWVFTLVLEEIRQGFFTDEDTHLVKKFTLYVGDNWNKCDMVAIFLFIVGVTCRMLPSAFEAGRTVLAMDFMVFTLRLIHIFAIHKQLGPKIIVVERMMKDVFFFLFFLSVWLVAYGVTTQALLHPHDGRLEWIFRRVLYRPYLQIFGQIPLDEIDEARVNCSTHPLLLEDSPSCPSLYANWLVILLLVTFLLVTNVLLMNLLIAMFSYTFQVVQGNADMFWKFQRYNLIVEYHERPALAPPFILLSHLSLTLRRVFKKEAEHKREHLERDLPDPLDQKVVTWETVQKENFLSKMEKRRRDSEGEVLRKTAHRVDFIAKYLGGLREQEKRIKCLESQINYCSVLVSSVADVLAQGGGPRSSQHCGEGSQLVAADHRGGLDGWEQPGAGQPPSDT

SEQ ID NO: 880003 - protein, 1000 aa, Homo sapiens
EATMQDVQGPRPGSPGDAEDRRELGLHRGEVNFGGSGKKRGKFVRVPSGVAPSVLFDLLLAEWHLPAPNLVVSLVGEEQPFAMKSWLRDVLRKGLVKAAQSTGAWILTSALRVGLARHVGQAVRDHSLASTSTKVRVVAVGMASLGRVLHRRILEEAQEDFPVHYPEDDGGSQGPLCSLDSNLSHFILVEPGPPGKGDGLTELRLRLEKHISEQRAGYGGTGSIEIPVLCLLVNGDPNTLERISRAVEQAAPWLILVGSGGIADVLAALVNQPHLLVPKVAEKQFKEKFPSKHFSWEDIVRWTKLLQNITSHQHLLTVYDFEQEGSEELDTVILKALVKACKSHSQEPQDYLDELKLAVAWDRVDIAKSEIFNGDVEWKSCDLEEVMVDALVSNKPEFVRLFVDNGADVADFLTYGRLQELYRSVSRKSLLFDLLQRKQEEARLTLAGLGTQQAREPPAGPPAFSLHEVSRVLKDFLQDACRGFYQDGRPGDRRRAEKGPAKRPTGQKWLLDLNQKSENPWRDLFLWAVLQNRHEMATYFWAMGQEGVAAALAACKILKEMSHLETEAEAARATREAKYERLALDLFSECYSNSEARAFALLVRRNRCWSKTTCLHLATEADAKAFFAHDGVQAFLTRIWWGDMAAGTPILRLLGAFLCPALVYTNLITFSEEAPLRTGLEDLQDLDSLDTEKSPLYGLQSRVEELVEAPRAQGDRGPRAVFLLTRWRKFWGAPVTVFLGNVVMYFAFLFLFTYVLLVDFRPPPQGPSGPEVTLYFWVFTLVLEEIRQGFFTDEDTHLVKKFTLYVGDNWNKCDMVAIFLFIVGVTCRMLPSAFEAGRTVLAMDFMVFTLRLIHIFAIHKQLGPKIIVVERMMKDVFFFLFFLSVWLVAYGVTTQALLHPHDGRLEWIFRRVLYRPYLQIFGQIPLDEIDEARVNCSTHPLLLEDSPSCPSLYANWLVILQPPSRQWPSWCLTTDPHPKEPLLVPPGLPGGTAVSWGCLP

SEQ ID NO: 880004 - protein, 648 aa, Homo sapiens
MVYIHGGSYMEGTGNMIDGSILASYGNVIVITINYRLGILGFLSTGDQAAKGNYGLLDQIQALRWIEENVGAFGGDPKRVTIFGSGAGASCVSLLTLSHYSEGLFQKAIIQSGTALSSWAVNYQPAKYTRILADKVGCNMLDTTDMVECLKNKNYKELIQQTITPATYHIAFGPVIDGDVIPDDPQILMEQGEFLNYDIMLGVNQGEGLKFVDGIVDNEDGVTPNDFDFSVSNFVDNLYGYPEGKDTLRETIKFMYTDWADKENPETRRKTLVALFTDHQWVAPAVATADLHAQYGSPTYFYAFYHHCQSEMKPSWADSAHGDEVPYVFGIPMIGPTELFSCNFSKNDVMLSAVVMTYWTNFAKTGDPNQPVPQDTKFIHTKPNRFEEVAWSKYNPKDQLYLHIGLKPRVRDHYRATKVAFWLELVPHLHNLNEIFQYVSTTTKVPPPDMTSFPYGTRRSPAKIWPTTKRPAITPANNPKHSKDPHKTGPEDTTVLIETKRDYSTELSVTIAVGASLLFLNILAFAALYYKKDKRRHETHRHPSPQRNTTNDITHIQNEEIMSLQMKQLEHDHECESLQAHDTLRLTCPPDYTLTLRRSPDDIPFMTPNTITMIPNTLMGMQPLHTFKTFSGGQNSTNLPHGHSTTRV

SEQ ID NO: 880005 - protein, 236 aa, Homo sapiens
LNSNVLLWITALAIKFTLIDSQAQYPVVNTNYGKIQGLRTPLPSEILGPVEQYLGVPYASPPTGERRFQPPESPSSWTGIRNATQFSAVCPQHLDERFLLHDMLPIWFTTSLDTLMTYVQDQNEDCLYLNIYVPMEDGTNIKRNADDITSNDHGEDKDIHEQNSKKPVMVYIHGGSYMEGTGNMIDGSILASYGNVIVITINYRLGILGMQEARLCGSSKMFNYFKSPFTNLINFF

SEQ ID NO: 880006 - protein, 124 aa, Homo sapiens
MGAVENVRRNEFNQTVSPRVFFLNVPFDSIMERLTLRRIDPVTGERYHLMYKPPPTMEIQARLLQNPKDAEEQVKLKMDLFYRNSADLEQLYGSAITLNGDQDPYTVFEYIESGIINPLPKKIP

SEQ ID NO: 880007 - protein, 118 aa, Homo sapiens
ELIQPFFEEGDGRVFFLNVPFDSIMERLTLRRIDPVTGERYHLMYKPPPTMEIQARLLQNPKDAEEQVKLKMDLFYRNSADLEQLYGSAITLNGDQDPYTVFEYIESGIINPLPKKIP

SEQ ID NO: 880008 - protein, 106 aa, Homo sapiens
MVFFLNVPFDSIMERLTLRRIDPVTGERYHLMYKPPPTMEIQARLLQNPKDAEEQVKLKMDLFYRNSADLEQLYGSAITLNGDQDPYTVFEYIESGIINPLPKKIP

SEQ ID NO: 880009 - protein, 113 aa, Homo sapiens
RLGYNPNRVFFLNVPFDSIMERLTLRRIDPVTGERYHLMYKPPPTMEIQARLLQNPKDAEEQVKLKMDLFYRNSADLEQLYGSAITLNGDQDPYTVFEYIESGIINPLPKKIP

SEQ ID NO: 880010 - protein, 83 aa, Homo sapiens
HPERLGATRRPAGPRPGTPAEPPGLQSQQVSCPSQASSPGQAPGHPLSRAQLKGSRLHKPSRVPEVECLLVIPIPTHPICPVD

SEQ ID NO: 880011 - protein, 112 aa, Homo sapiens
VQTPSPSSFRPRSPDPQPLLPQTQESRPQPLLPQTQESRPPAPPPSDPGVQTPAPPSPRPEGELGLWTCLRKEREGRKEKKGLGGGRSPSPAPCGRSHCPRSLLGVGPAVDS

SEQ ID NO: 880012 - protein, 563 aa, Homo sapiens
AGLDAVSLSRPFLCFRLFLLTASFRQYLFSFLVPSVPGAGKGRIVCRDWSKYPVGGKPGLPRLAGSDVTIAATARWNGRWVQVPAWPGPGCGTNASGERQRQLPRAWRPVGRTLGSEPIALAWSPPLYLFPIPLPSWAVSQPTPTLGTMFADLDYDIEEDKLGIPTVPGKVTLQKDAQNLIGISIGGGAQYCPCLYIVQVFDNTPAALDGTVAAGDEITGVNGRSIKGKTKVEVAKMIQEVKGEVTIHYNKLQADPKQGMSLDIVLKKVKHRLVENMSSGTADALGLSRAILCNDGLVKRLEELERTAELYKGMTEHTKNLLRAFYELSQTHRAFGDVFSVIGVREPQPAASEAFVKFADAHRSIEKFGIRLLKTIKPMLTDLNTYLNKAIPDTRLTIKKYLDVKFEYLSYCLKVKEMDDEEYSCIALGEPLYRVSTGNYEYRLILRCRQEARARFSQMRKDVLEKMELLDQKHVQDIVFQLQRLVSTMSKYYNDCYAVLRDADVFPIEVDLAHTTLAYGLNQEEFTDGEEEEEEEDTAAGEPSRDTRGAAGPLDKGGSWCDS

SEQ ID NO: 880013 - protein, 415 aa, Homo sapiens
MFADLDYDIEEDKLGIPTVPGKVTLQKDAQNLIGISIGGGAQYCPCLYIVQVFDNTPAALDGTVAAGDEITGVNGRSIKGKTKVEVAKMIQEVKGEVTIHYNKLQADPKQGMSLDIVLKKVKHRLVENMSSGTADALGLSRAILCNDGLVKRLEELERTAELYKGMTEHTKNLLRAFYELSQTHRAFGDVFSVIGVREPQPAASEAFVKFADAHRSIEKFGIRLLKTIKPMLTDLNTYLNKAIPDTRLTIKKYLDVKFEYLSYCLKVKEMDDEEYSCIALGEPLYRVSTGNYEYRLILRCRQEARARFSQMRKDVLEKMELLDQKHVQDIVFQLQRLVSTMSKYYNDCYAVLRDADVFPIEVDLAHTTLAYGLNQEEFTDGEEEEEEEDTAAGEPSRDTRGAAGPLDKGGSWCDS

SEQ ID NO: 880014 - protein, 415 aa, Homo sapiens; identical to SEQ ID NO: 880013

SEQ ID NO: 880015 - protein, 485 aa, Homo sapiens
AGLDAVSLSRPFLCFRLFLLTASFRQYLFSFLVPSVPGAGKGRIVCRDWSKYPVGGKPGLPRLAGSDVTIAATARWNGRWVQVPAWPGPGCGTNASGERQRQLPRAWRPVGRTLGSEPIALAWSPPLYLFPIPLPSWAVSQPTPTLGTMFADLDYDIEEDKLGIPTVPGKVTLQKDAQNLIGISIGGGAQYCPCLYIVQVFDNTPAALDGTVAAGDEITGVNGRSIKGKTKVEVAKMIQEVKGEVTIHYNKLQADPKQGMSLDIVLKKVKHRLVENMSSGTADALGLSRAILCNDGLVKRLEELERTAELYKGMTEHTKNLLRAFYELSQTHRAFGDVFSVIGVREPQPAASEAFVKFADAHRSIEKFGIRLLKTIKPMLTDLNTYLNKAIPDTRLTIKKYLDVKFEYLSYCLKVKEMDDEEYSCIVSVGGGGGLVLPPTWSARDSRWLRPTRERPGGLGWTLVPGDLGPSSQSRSLGLGVLGTR

SEQ ID NO: 880016 - protein, 421 aa, Homo sapiens
VRYEAWVWLRLDYDIDEDKLGIPTVPGKVTLQKDAQNLIGISIGGGAQYCPCLYIVQVFDNTPAALDGTVAAGDEITGVNGRSIKGKTKVEVAKMIQEVKGEVTIHYNKLQADPKQGMSLDIVLKKVKHRLVENMSSGTADALGLSRAILCNDGLVKRLEELERTAELYKGMTEHTKNLLRAFYELSQTHRAFGDVFSVIGVREPQPAASEAFVKFADAHRSIEKFGIRLLKTIKPMLTDLNTYLNKAIPDTRLTIKKYLDVKFEYLSYCLKVKEMDDEEYSCIALGEPLYRVSTGNYEYRLILRCRQEARARFSQMRKDVLEKMELLDQKHVQDIVFQLQRLVSTMSKYYNDCYAVLRDADVFPIEVDLAHTTLAYGLNQEEFTDGEEEEEEEDTAAGEPSRDTRGAAGPLDKGGSWCDS

SEQ ID NO: 880017 - protein, 105 aa, Homo sapiens
MRKDVLEKMELLDQKHVQDIVFQLQRLVSTMSKYYNDCYAVLRDADVFPIEVDLAHTTLAYGLNQEEFTDGEEEEEEEDTAAGEPSRDTRGAAGPLDKGGSWCDS

SEQ ID NO: 880018 - protein, 258 aa, Homo sapiens
AGLDAVSLSRPFLCFRLFLLTASFRQYLFSFLVPSVPGAGKGRIVCRDWSKYPVGGKPGLPRLAGSDVTIAATARWNGRWVQVPAWPGPGCGTNASGERQRQLPRAWRPVGRTLGSEPIALAWSPPLYLFPIPLPSWAVSQPTPTLGTMFADLDYDIEEDKLGIPTVPGKVTLQKDAQNLIGISIGGGAQYCPCLYIVQVFDNTPAALDGTVAAGDEITGVNGRSIKGKTKVEVAKMIQEVKVRAAAEQVSRGSNTCF

SEQ ID NO: 880019 - protein, 520 aa, Homo sapiens
MVARVGLLLRALQLLLWGHLDAQPAERGGQELRKEAEAFLEKYGYLNEQVPKAPTSTRFSDAIRAFQWVSQLPVSGVLDRATLRQMTRPRCGVTDTNSYAAWAERISDLFARHRTKMRRKKRFAKQGNKWYKQHLSYRLVNWPEHLPEPAVRGAVRAAFQLWSNVSALEFWEAPATGPADIRLTFFQGDHNDGLGNAFDGPGGALAHAFLPRRGEAHFDQDERWSLSRRRGRNLFVVLAHEIGHTLGLTHSPAPRALMAPYYKRLGRDALLSWDDVLAVQSLYGKPLGGSVAVQLPGKLFTDFETWDSYSPQGRRPETQGPKYCHSSFDAITVDRQQQLYIFKGSHFWEVAADGNVSEPRPLQERWVGLPPNIEAAAVSLNDGDFYFFKGGRCWRFRGPKPVWGLPQLCRAGGLPRHPDAALFFPPLRRLILFKGARYYVLARGGLQVEPYYPRSLQDWGGIPEEVSGALPRPDGSIIFFRDDRYWRLDQAKLQATTSGRWATELPWMGCWHANSGSALF

SEQ ID NO: 880020 - protein, 541 aa, Homo sapiens
MVARVGLLLRALQLLLWGHLDAQPAERGGQELRKEAEAFLEKYGYLNEQVPKAPTSTRFSDAIRAFQWVSQLPVSGVLDRATLRQMTRPRCGVTDTNSYAAWAERISDLFARHRTKMRRKKRFAKQGNKWYKQHLSYRLVNWPEHLPEPAVRGAVRAAFQLWSNVSALEFWEAPATGPADIRLTFFQGDHNDGLGNAFDGPGGALAHAFLPRRGEAHFDQDERWSLSRRRGRNLFVVLAHEIGHTLGLTHSPAPRALMAPYYKRLGRDALLSWDDVLAVQSLYGKPLGGSVAVQLPGKLFTDFETWDSYSPQGRRPETQGPKYCHSSFDAITVDRQQQLYIFKGSHFWEVAADGNVSEPRPLQERWVGLPPNIEAAAVSLNDGDFYFFKVQIRLIDMNTTIVGSSLKESRGGRCWRFRGPKPVWGLPQLCRAGGLPRHPDAALFFPPLRRLILFKGARYYVLARGGLQVEPYYPRSLQDWGGIPEEVSGALPRPDGSIIFFRDDRYWRLDQAKLQATTSGRWATELPWMGCWHANSGSALF

SEQ ID NO: 880021 - protein, 130 aa, Homo sapiens
MVARVGLLLRALQLLLWGHLDAQPAERGGQELRKEAEAFLEKYGYLNEQVPKAPTSTRFSDAIRAFQWVSQLPVSGVLDRATLRQMTRPRCGVTDTNSYAAWAERISDLFARHRTKMRRKKRFAKQGEHC

SEQ ID NO: 880022 - protein, 390 aa, Homo sapiens
MVARVGLLLRALQLLLWGHLDAQPAERGGQELRKEAEAFLEKYGYLNEQVPKAPTSTRFSDAIRAFQWVSQLPVSGVLDRATLRQMTRPRCGVTDTNSYAAWAERISDLFARHRTKMRRKKRFAKQGNKWYKQHLSYRLVNWPEHLPEPAVRGAVRAAFQLWSNVSALEFWEAPATGPADIRLTFFQGDHNDGLGNAFDGPGGALAHAFLPRRGEAHFDQDERWSLSRRRGRNLFVVLAHEIGHTLGLTHSPAPRALMAPYYKRLGRDALLSWDDVLAVQSLYGKPLGGSVAVQLPGKLFTDFETWDSYSPQGRRPETQGPKYCHSSFDAITVDRQQQLYIFKGSHFWEVAADGNVSEPRPLQERWVGLPPNIEAAAVSLNDGDFYFFKA

SEQ ID NO: 880023 - protein, 112 aa, Homo sapiens
DHNDGLGNAFDGPGAGTKPPSRTAGGEPNLEKQFGGGNEAFTLPVALAEAHLPAENPQSPHPKMGTVVPALLCVTCLKGQSDEALQGKCFANSQEYYAFWENLPRFHHPSSA

SEQ ID NO: 880024 - protein, 362 aa, Homo sapiens
NQPWFSFPRSGLTGGVGGEPWAPLASAGFPSQTQREMPWTILLFAAGSLAIPAPSIRLVPPYPSSQEDPIHIACMAPGNFPGANFTLYRGGQVVQLLQAPTDQRGVTFNLSGGSSKAPGGPFHCQYGVLGELNQSQLSDLSEPVNVSFPVPTWILVLSLSLAGALFLLAGLVAVALVVRKVKLRNLQKKREIENPAGPRLTSTAQTCPSITPCLPSPRKRCQKKTRPPWMITQAPLPPPATPGPGRGPLPRPPRLRPPNSALSGPASEAEDWGTPLSPGIRGPEVPPATSGGALSATFSGNWTEERKGNPGLGIFITEEWERGHRHGPGTIQTTGSSPLDLRLLRTTREGDVRTPSCPPAGP

SEQ ID NO: 880025 - protein, 362 aa, Homo sapiens
NQPWFSFPRSGLTGGVGGEPWAPLASAGFPSQTQREMPWTILLFAAGSLAIPAPSIRLVPPYPSSQEDPIHIACMAPGNFPGANFTLYRGGQVVQLLQAPTDQRGVTFNLSGGSSKAPGGPFHCQYGVLGELNQSQLSDLSEPVNVSFPVPTWILVLSLSLAGALFLLAGLVAVALVVRKGNSTQSLAHKEIENPAGPRLTSTAQTCPSITPCLPSPRKRCQKKTRPPWMITQAPLPPPATPGPGRGPLPRPPRLRPPNSALSGPASEAEDWGTPLSPGIRGPEVPPATSGGALSATFSGNWTEERKGNPGLGIFITEEWERGHRHGPGTIQTTGSSPLDLRLLRTTREGDVRTPSCPPAGP

SEQ ID NO: 880026 - protein, 117 aa, Homo sapiens
MLPTMAAGPNSILFAINIDNKDLNGQSKFAPTVSDLLKESTQNVTLLKESTQGVSSVFREITASSAISILIKPEQETDPLPVVSRNVSADAKCKKERKKKKQVTNINSFDDEEDEQN

SEQ ID NO: 880027 - protein, 132 aa, Homo sapiens
LALSPRLECSGTISAPCNLCVAGPNSILFAINIDNKDLNGQSKFAPTVSDLLKESTQNVTLLKESTQGVSSVFREITASSAISILIKPEQETDPLPVVSRNVSADAKCKKERKKKKQVTNINSFDDEEDEQN

SEQ ID NO: 880028 - protein, 126 aa, Homo sapiens
MTAHQQALQTFPFFWTGPNSILFAINIDNKDLNGQSKFAPTVSDLLKESTQNVTLLKESTQGVSSVFREITASSAISILIKPEQETDPLPVVSRNVSADAKCKKERKKKKQVTNINSFDDEEDEQN

SEQ ID NO: 880029 - protein, 110 aa, Homo sapiens
SRDSSRTFQGHGEGKGLIPSPCVVSSSCWGPFPHAPAPPSCVDCFGCGADCRSTGLRAVKDFLPGWAGIFCLALPRAVQAVGASVPGTSGMGGTQHVLSLAQPCLLSAGT

SEQ ID NO: 880030 - protein, 116 aa, Homo sapiens
LGFNIVLYGLGSKRDLLERFRTTMLQDSIHVVINGFFPGISVKSVLNSITEEVLDHMGTWWGQGREYIIILFSWDNGKNRVYRVSTQPRKHRNNTSYIWNSYCLCHDLHDTSEKPG

SEQ ID NO: 880031 - protein, 457 aa, Homo sapiens
MGNSYAGQLKTTRFEEVLHNSIEASLRSNNLVPRPIFSQLYLEAEQQLAALEGGSRVDNEEEEEEGEGGLETNGPPNPFQLHPLPEGCCTTDGFCQAGKDLRLVSISNEPMDVPAGFLLVGVKSPSLPDHLLVCAVDKRFLPDDNGHNALLGFSGNCVGCGKKGFCYFTEFSNHINLKLTTQPKKQKHLKYYLVRNAQGTLTKGPLICWKGSEFRSRQIPASTCSSSLFPALESTAAFPSEPVPGTNPSILMGAQQAGPASDHPSLNAAMGPAVFNGKDSPKCQQLAKNNLLALPRPSALGILSNSGPPKKRHKGWSPESPSAPDGGCPQGGGNRAKYESAGMSCVPQVGLVGPASVTFPVVASGEPVSVPDNLLKICKAKPVIFKGHGNFPYLCGNLNDVVVSPLLYTCYQNSQSVSRAYEQYGASAIQPISEEMQLLLTVYYLVQLAHQIRNPDV

SEQ ID NO: 880032 - protein, 409 aa, Homo sapiens
MGNSYAGQLKTTRFEEVLHNSIEASLRSNNLVPRPIFSQLYLEAEQQLAALEGGSRVDNEEEEEEGEGGLETNGPPNPFQLHPLPEGCCTTDGFCQAGKDLRLVSISNEPMDVPAGFLLVGVKSPSLPDHLLVCAVDKRFLPDDNGHNALLGFSGNCVGCGKKGFCYFTEFSNHINLKLTTQPKKQKHLKYYLVRNAQGTLTKGPLICWKGSEFRSRQIPASTCSSSLFPALESTAAFPSEPVPGTNPSILMGAQQAGPASDHPSLNAAMGPAVFNGKDSPKCQQLAKNNLLALPRPSALGILSNSGPPKKRHKGWSPESPSAPDGGCPQGGGNRAKYESAGMSCVPQVGLVGPASVTFPVVASGEPVSVPDNLLKICKAKPVIFKVFVNGATQMVALGPAEPASPRSL

SEQ ID NO: 880033 - protein, 1061 aa, Homo sapiens
MGNSYAGQLKTTRFEEVLHNSIEASLRSNNLVPRPIFSQLYLEAEQQLAALEGGSRVDNEEEEEEGEGGLETNGPPNPFQLHPLPEGCCTTDGFCQAGKDLRLVSISNEPMDVPAGFLLVGVKSPSLPDHLLVCAVDKRFLPDDNGHNALLGFSGNCVGCGKKGFCYFTEFSNHINLKLTTQPKKQKHLKYYLVRNAQGTLTKGPLICWKGSEFRSRQIPASTCSSSLFPALESTAAFPSEPVPGTNPSILMGAQQAGPASDHPSLNAAMGPAVFNGKDSPKCQQLAKNNLLALPRPSALGILSNSGPPKKRHKGWSPESPSAPDGGCPQGGGNRAKYESAGMSCVPQVGLVGPASVTFPVVASGEPVSVPDNLLKICKAKPVIFKGHGNFPYLCGNLNDVVVSPLLYTCYQNSQSVSRAYEQYGASAIQPISEEMQLLLTVYYLVQLAADQVPLMEDLEQIFLRSWRESHLTEIRQYQQAPPQPFPPAPSAAAPVTSAQLPWLASLAASSCNDSVHVIECAYSLAEGLSEMFRLLVEGKLAKTNYVVIICACRSAAIDSCIAVTGKYQARILSESLLTPAEYQKEVNYELVTGKVDSLGAFFSTLCPEGDIDILLDKFHQENQGHISSSLAASSVTKAASLDVSGTPVCTSYNLEPHSIRPFQLAVAQKLLSHVCSIADSSTQNLDLGSFEKVDFLICIPPSEVTYQQTLLHVWHSGVLLELGLKKEHMTKQRVEQYVLKLDTEAQTKFKAFLQNSFQNPHTLFVLIHDHAHWDLVSSTVHNLYSQSDPSVGLVDRLLNCREVKEAPNIVTLHVTSFPYALQTQHTLISPYNEIHWPASCSNGVDLYHENKKYFGLSEFIESTLSGHSLPLLRYDSSFEAMVTALGKRFPRLHSAVIRTFVLVQHYAAALMAVSGLPQMKNYTSVETLEITQNLLNSPKQCPCGHGLMVLLRVPCSPLAVVAYERLAHVRARLALEEHFEIILGSPSSGVTVGKHFVKQLRMWQKIEDVEWRPQTYLELEGLPCILIFSGMDPHGESLPRSLRYCDLRLINSSCLVRTAL

SEQ ID NO: 880034 - protein, 810 aa, Homo sapiens
MGAQQAGPASDHPSLNAAMGPAVFNGKDSPKCQQLAKNNLLALPRPSALGILSNSGPPKKRHKGWSPESPSAPDGGCPQGGGNRAKYESAGMSCVPQVGLVGPASVTFPVVASGEPVSVPDNLLKICKAKPVIFKGHGNFPYLCGNLNDVVVSPLLYTCYQNSQSVSRAYEQYGASAIQPISEEMQLLLTVYYLVQLAADQVPLMEDLEQIFLRSWRESHLTEIRQYQQAPPQPFPPAPSAAAPVTSAQLPWLASLAASSCNDSVHVIECAYSLAEGLSEMFRLLVEGKLAKTNYVVIICACRSAAIDSCIAVTGKYQARILSESLLTPAEYQKEVNYELVTGKVDSLGAFFSTLCPEGDIDILLDKFHQENQGHISSSLAASSVTKAASLDVSGTPVCTSYNLEPHSIRPFQLAVAQKLLSHVCSIADSSTQNLDLGSFEKVDFLICIPPSEVTYQQTLLHVWHSGVLLELGLKKEHMTKQRVEQYVLKLDTEAQTKFKAFLQNSFQNPHTLFVLIHDHAHWDLVSSTVHNLYSQSDPSVGLVDRLLNCREVKEAPNIVTLHVTSFPYALQTQHTLISPYNEIHWPASCSNGVDLYHENKKYFGLSEFIESTLSGHSLPLLRYDSSFEAMVTALGKRFPRLHSAVIRTFVLVQHYAAALMAVSGLPQMKNYTSVETLEITQNLLNSPKQCPCGHGLMVLLRVPCSPLAVVAYERLAHVRARLALEEHFEIILGSPSSGVTVGKHFVKQLRMWQKIEDVEWRPQTYLELEGLPCILIFSGMDPHGESLPRSLRYCDLRLINSSCLVRTAL

SEQ ID NO: 880035 - protein, 719 aa, Homo sapiens
MSCVPQVGLVGPASVTFPVVASGEPVSVPDNLLKICKAKPVIFKGHGNFPYLCGNLNDVVVSPLLYTCYQNSQSVSRAYEQYGASAIQPISEEMQLLLTVYYLVQLAADQVPLMEDLEQIFLRSWRESHLTEIRQYQQAPPQPFPPAPSAAAPVTSAQLPWLASLAASSCNDSVHVIECAYSLAEGLSEMFRLLVEGKLAKTNYVVIICACRSAAIDSCIAVTGKYQARILSESLLTPAEYQKEVNYELVTGKVDSLGAFFSTLCPEGDIDILLDKFHQENQGHISSSLAASSVTKAASLDVSGTPVCTSYNLEPHSIRPFQLAVAQKLLSHVCSIADSSTQNLDLGSFEKVDFLICIPPSEVTYQQTLLHVWHSGVLLELGLKKEHMTKQRVEQYVLKLDTEAQTKFKAFLQNSFQNPHTLFVLIHDHAHWDLVSSTVHNLYSQSDPSVGLVDRLLNCREVKEAPNIVTLHVTSFPYALQTQHTLISPYNEIHWPASCSNGVDLYHENKKYFGLSEFIESTLSGHSLPLLRYDSSFEAMVTALGKRFPRLHSAVIRTFVLVQHYAAALMAVSGLPQMKNYTSVETLEITQNLLNSPKQCPCGHGLMVLLRVPCSPLAVVAYERLAHVRARLALEEHFEIILGSPSSGVTVGKHFVKQLRMWQKIEDVEWRPQTYLELEGLPCILIFSGMDPHGESLPRSLRYCDLRLINSSCLVRTAL

SEQ ID NO: 880036 - protein, 837 aa, Homo sapiens
GLCGDILSQLTLPDSPGRMQGRILPAWSQGGKTWQAAPSEALEGALPTRCPIGGAGGVTGGGCLALGKSLPPAPSLVKNKRIGRNEPASGTAPLVRKGDSSHPRLQEGEQVHSMSKASQDRALEGPGAAHLSPSVPSPPENPHVWDRKLCTRLGAKSLLSSAGHGNFPYLCGNLNDVVVSPLLYTCYQNSQSVSRAYEQYGASAIQPISEEMQLLLTVYYLVQLAADQVPLMEDLEQIFLRSWRESHLTEIRQYQQAPPQPFPPAPSAAAPVTSAQLPWLASLAASSCNDSVHVIECAYSLAEGLSEMFRLLVEGKLAKTNYVVIICACRSAAIDSCIAVTGKYQARILSESLLTPAEYQKEVNYELVTGKVDSLGAFFSTLCPEGDIDILLDKFHQENQGHISSSLAASSVTKAASLDVSGTPVCTSYNLEPHSIRPFQLAVAQKLLSHVCSIADSSTQNLDLGSFEKVDFLICIPPSEVTYQQTLLHVWHSGVLLELGLKKEHMTKQRVEQYVLKLDTEAQTKFKAFLQNSFQNPHTLFVLIHDHAHWDLVSSTVHNLYSQSDPSVGLVDRLLNCREVKEAPNIVTLHVTSFPYALQTQHTLISPYNEIHWPASCSNGVDLYHENKKYFGLSEFIESTLSGHSLPLLRYDSSFEAMVTALGKRFPRLHSAVIRTFVLVQHYAAALMAVSGLPQMKNYTSVETLEITQNLLNSPKQCPCGHGLMVLLRVPCSPLAVVAYERLAHVRARLALEEHFEIILGSPSSGVTVGKHFVKQLRMWQKIEDVEWRPQTYLELEGLPCILIFSGMDPHGESLPRSLRYCDLRLINSSCLVRTAL

SEQ ID NO: 880037 - protein, 719 aa, Homo sapiens; identical to SEQ ID NO: 880035

SEQ ID NO: 880038 - protein, 137 aa, Homo sapiens
MGNSYAGQLKTTRFEEVLHNSIEASLRSNNLVPRPIFSQLYLEAEQQLAALEGGSRVDNEEEEEEGEGGLETNGPPNPFQLHPLPEGCCTTDGEPLPAPGQAVPAMLPGGSGQAGDWACDCVLQGSSLLFLFAFPEV

SEQ ID NO: 880039 - protein, 150 aa, Homo sapiens
MAVSGLPQMKNYTSVETLEITQNLLNSPKQCPCGHGLMVLLRVPCSPLAVVAYERLAHVRARLALEEHFEIILGSPSSGVTVGKHFVKQLRMWQKIEDVEWRPQTYLELEGLPCILIFSGMDPHGESLPRSLRYCDLRLINSSCLVRTAL

SEQ ID NO: 880040 - protein, 86 aa, Homo sapiens
ILLKMGNSYAGQLKTTRFEEVLHNSIEASLRSNNLVPRPIFSQLYLEAEQQLAALEGGRRTLLLSVYFFYCAQLMLAPELETLFFM

SEQ ID NO: 880041 - protein, 120 aa, Homo sapiens
MSVSSKETCPAPPGPERSPAARAPAAASSLGPVSTAGRAPRGLDMSAQEPPQGRRFPIEAGDSRGLAAAPESQDSPEAVATEHNPVRPLRRCPGCHCLTLLHVPIDVYLAMGGSPRARAT

SEQ ID NO: 880042 - protein, 127 aa, Homo sapiens
MLPSSTPGPGHATETCPAPPGPERSPAARAPAAASSLGPVSTAGRAPRGLDMSAQEPPQGRRFPIEAGDSRGLAAAPESQDSPEAVATEHNPVRPLRRCPGCHCLTLLHVPIDVYLAMGGSPRARAT

SEQ ID NO: 880043 - protein, 105 aa, Homo sapiens
MGAGARRRRPATRERPDRHSPRRAPRGLDMSAQEPPQGRRFPIEAGDSRGLAAAPESQDSPEAVATEHNPVRPLRRCPGCHCLTLLHVPIDVYLAMGGSPRARAT

SEQ ID NO: 880044 - protein, 130 aa, Homo sapiens
MARAPPPPPPVPRPRPPSHLAPPAVRTPHPRPDPRGPQVHSLGAPHRMGQAPASAAPVARQFPQAASSLPWMPLPDAAARAHRRLPRHGREPPGPRHVSAPAPCGSAGAGRERGPQRATTLRSHAPSTRQ

SEQ ID NO: 880045 - protein, 107 aa, Homo sapiens
MSVSSKETCPAPPGPERSPAARAPAAASSLGPVSTAGRAPRGLDMSAQEPPQGRRFPIEAGDSRGLAAAPESQDSPEAVATEHNPVSGPCRASISPGRFVAALDATA

SEQ ID NO: 880046 - protein, 210 aa, Homo sapiens
MDNCLAAAALNGVDRRSLQRSARLALEVLERAKRRAVDWHALERPKGCMGVLAREAPHLEKQPAAGPQRVLPGEREERPPTLSASFRTMAEFMDYTSSQCGKYYSSVPEEGGATHVYRYHRGESKLHMCLDIGNGQRKDRKKTSLGPGGSYQISEHAPEASQPAENISKDLYIEVYPGTYSVTVGSNDLTKKTHVVAVDSGQSVDLVFPV

SEQ ID NO: 880047 - protein, 183 aa, Homo sapiens
MDNCLAAAALNGVDRRSLQRSARLALEVLERAKRRAVDWHALERPKGCMGVLAREAPHLEKQPAAGPQRVLPGEKYYSSVPEEGGATHVYRYHRGESKLHMCLDIGNGQRKDRKKTSLGPGGSYQISEHAPEASQPAENISKDLYIEVYPGTYSVTVGSNDLTKKTHVVAVDSGQSVDLVFPV

SEQ ID NO: 880048 - protein, 156 aa, Homo sapiens
MDNCLAAAALNGVDRRSLQRSARLALEVLERAKRRAVDWHALERPKGCMGVLAREAPHLEKQPAAGPQRVLPGEKYYSSVPEEGGATHVYRYHRGESKLHMCLDIGNGQAENISKDLYIEVYPGTYSVTVGSNDLTKKTHVVAVDSGQSVDLVFPV

SEQ ID NO: 880049 - protein, 168 aa, Homo sapiens
MDNCLAAAALNGVDRRSLQRSARLALEVLERAKRRAVDWHALERPKGCMGVLAREAPHLEKQPAAGPQRVLPGEKYYSSVPEEGGATHVYRYHRGESKLHMCLDIGNGQRKDRKKTSLGPGGSYQISEHAPEASQPVSTELLTHWVSPPLQLHEPVDMVLRGLFELSL

SEQ ID NO: 880050 - protein, 97 aa, Homo sapiens
GVDRRSLQRSARLALEVLERAKRRAVDWHALERPKGCMGVLAREAPHLEKQPAAGPQRVLPGEVRVAVPGAAPVLRAAVARWEPGVRSAEAAEETFP

SEQ ID NO: 880051 - protein, 89 aa, Homo sapiens
NVVFFFLCPNDRLVPDVPALATKITARALPGQAGGGRQPGDAVSVSKLRIWAVSQGRSGSWMRGLEFPGDLQTCTATLPCSCLLASVQC

SEQ ID NO: 880052 - protein, 118 aa, Homo sapiens
TPLYRGSHGIILSSLFREAAPGISHPHPWVGSLTSAHTDPGGGSALRRCPSYQLGCSFWGQGAHRGSHVWPWCALSAREAAVRCWLRGRVVGVGPSRMAAVCRTCWETPGLQTVAPVP

SEQ ID NO: 880053 - protein, 111 aa, Homo sapiens
LQQCLRSVTTQMLGYLRKESFKNCSLHCSHCVLFFVCMYVFIHTEMGSCSVTRVACSGAITACSSGSFCLSLPATDVAEAGESFEPGRCRLQCAEIAPLHPSLGKRAELSL

SEQ ID NO: 880054 - protein, 231 aa, Homo sapiens
PVGSHAGLHTGTDSCAHHQGTWWGCGIQNYIHTSAWHPLIESQGSVTRELHAQVLASAHLAHHSRQEKAITTPSQHPLGPQLPQVIAATGAARGQGPGPQASAGSSSRSAECSLAVSVEEERVEVGGRGGTPRPLASSGVRTRSSGAPATPLLPAPCSSTYFFLGARDLNVAVLRLSEGSQRPASPSPLGSSAGPGAGSPGCSSSGGPSAPGPRSASSSSPSSASSGPDCG

SEQ ID NO: 880055 - protein, 48 aa, Homo sapiens
MGGSGCHNDKGAWLTSRQGCAMGDCQAGQPHPQHKQCPAEKPSPSPAG

SEQ ID NO: 880056 - protein, 54 aa, Homo sapiens
LSRLIPNGRKRSSLCPPTPAPKQMQVSPFPWSYFTPLPPGIRIIISSSLDWLCF

SEQ ID NO: 880057 - protein, 190 aa, Homo sapiens
MPLEVVVELQIRAISCPGVFLPGKQDVYLGVYLMNQYLETNSFPSAFPIMIQESMRFEKVFESAVDPGAVVDLLEMWDELAYYEENTRDFLFPEPKLTPSHPRRCREVLMKTALGFPGIAPKIEFSTRTAIRECVFLHRNRFLGWGNKGKMLVQQEHRSLKKKLNRNGTQTSGEGLLSWMLLQEFEGRKT

SEQ ID NO: 880058 - protein, 306 aa, Homo sapiens
DPSRWEGPGLGGTVGEQGRGTGEASGNICSRYSAKLRKMVQGSAQKDLLIPVLSPTQGTMPLEVVVELQIRAISCPGVFLPGKQDVYLGVYLMNQYLETNSFPSAFPIMIQESMRFEKVFESAVDPGAVVDLLEMWDELAYYEENTRDFLFPEPKLTPSHPRRCREVLMKTALGFPGIAPKIEFSTRTAIRECVFLHRNRFLEERHESRRPLSTSHEPIFPLNTIKMKLKENNLNRLPKGMQARAPSQYSTRHFFQDQPAQLNLGNNFKISGGSKPPFVVRHVSLKLFFRAFCNSEDMDEGGRKEG

SEQ ID NO: 880059 - protein, 165 aa, Homo sapiens
MPLEVVVELQIRAISCPGVFLPGKQDVYLGVYLMNQYLETNSFPSAFPIMIQESMRFEKVFESAVDPGAVVDLLESFLARFELIQLVPPVWDELAYYEENTRDFLFPEPKLTPSHPRRCREVLMKTALGFPGIAPKIEFSTRTAIRECVFLHRNRFLVDSKSWLL

SEQ ID NO: 880060 - protein, 313 aa, Homo sapiens
MPLEVVVELQIRAISCPGVFLPGKQDVYLGVYLMNQYLETNSFPSAFPIMIQESMRFEKVFESAVDPGAVVDLLESFLARFELIQLVPPVWDELAYYEENTRDFLFPEPKLTPSHPRRCREVLMKTALGFPGIAPKIEFSTRTAIRECVFLHRNRFLEERHESRRPLSTSHEPIFPLNTIKMKLKENNLNRLPKGMQARAPSQYSTRHFFQDQPAQLNLGNNFKISGGSKPPFVVRHVDSAKPFGENISEHHLRRSRRKSKFSDFPFPTRRASSLDSLAANVKVIKEPDERIVLRSDSSSCLDSSQFGKSSSQ

SEQ ID NO: 880061 - protein, 151 aa, Homo sapiens [sequence omitted]

SEQ ID NO: 880062 - protein, 158 aa, Homo sapiens
DPSRWEGPGLGGTVGEQGRGTGEASGNICSRYSAKLRKMVQGSAQKDLLIPVLSPTQGTMPLEVVVELQIRAISCPGVFLPGKQDVYLGVYLMNQYLETNSFPSAFPIMIQESMRFEKVFESAVDPGAVVDLLESFLARFELIQLVPPGNVAVNPFLN

SEQ ID NO: 880063 - protein, 685 aa, Homo sapiens
ARIRRAVFRAGLGAESMGSDPSAPGRPGWTGSLLGDREEAARPRLLPLLLVLLGCLGLGVAAEDAEVHAENWLRLYGYLPQPSRHMSTMRSAQILASALAEMQRFYGIPVTGVLDEETKEWMKRPRCGVPDQFGVRVKANLRRRRKRYALTGRKWNNHHLTFSIQNYTEKLGWYHSMEAVRRAFRVWEQATPLVFQEVPYEDIRLRRQKEADIMVLFASGFHGDSSPFDGTGGFLAHAYFPGPGLGGDTHFDADEPWTFSSTDLHGNNLFLVAVHELGHALGLEHSSNPNAIMAPFYQWKDVDNFKLPEDDLRGIQQLYGTPDGQPQPTQPLPTVTPRRPGRPDHRPPRPPQPPPPGGKPERPPKPGPPVQPRATERPDQYGPNICDGDFDTVAMLRGEMFVFKGRWFWRVRHNRVLDNYPMPIGHFWRGLPGDISAAYERQDGRFVFFKGDRYWLFREANLEPGYPQPLTSYGLGIPYDRIDTAIWWEPTGHTFFFQEDRYWRFNEETQRGDPGYPKPISVWQGIPASPKGAFLSNDAAYTYFYKGTKYWKFDNERLRMEPGYPKSILRDFMGCQEHVEPGPRWPDVARPPFNPHGGAEPGADSAEGDVGDGDGDFGAGVNKDGGSRVVVQMEEVARTVNVVMVLVPLLLLLCVLGLTYALVQMQRKGAPRVLLYCKRSLQEWV

SEQ ID NO: 880064 - protein, 264 aa, Homo sapiens [sequence omitted]

SEQ ID NO: 880065 - protein, 685 aa, Homo sapiens; identical to SEQ ID NO: 880063

SEQ ID NO: 880066 - protein, 85 aa, Homo sapiens
PRILGGETLLGIGHTAHQTVTHRRTPYSLRAPLLCSVLSDRGLLPRMPSPSKQEPVATVENGTVTARLSLPSWRLSGPPGPLLPK

SEQ ID NO: 880067 - protein, 90 aa, Homo sapiens
NNLFLVAVHELGHALGLEHSSNPNAIMAPFYQWKDVDNFKLPEDDLRGIQQLYGAWAVTSGLCMPLSSPWPMRSRHCCHPHFVDEEPKAQ

SEQ ID NO: 880068 - protein, 685 aa, Homo sapiens; identical to SEQ ID NO: 880063

SEQ ID NO: 880069 - protein, 685 aa, Homo sapiens; identical to SEQ ID NO: 880063

SEQ ID NO: 880070 - protein, 141 aa, Homo sapiens
IESAPFVVSSNERLRMEPGYPKSILRDFMGCQEHVEPGPRWPDVARPPFNPHGGAEPGADSAEGDVGDGDGDFGAGVNKDGGSRVVVQMEEVARTVNVVMVLVPLLLLLCVLGLTYALVQMQRKGAPRVLLYCKRSLQEWV

SEQ ID NO: 880071 - protein, 158 aa, Homo sapiens
LLGCLGLGVAAEDAEVHAEVRPPPCPLAAGWGLGGRGATSAGWDLEVEGAETRPLFWAVAGKQADLAVCPSPARPLQRTSSQTLEGAGPRSPPRYSYSPVLGTEPPPRPPYIQPVSREPLPPPPALASPPSFPPGQPIPREPGWRAVALFASGEGAAL

SEQ ID NO: 880072 - protein, 528 aa, Homo sapiens
SVHSSFQPWRGPVVNSLSLWRLDAVGSCSSTGSASRRCAGPAGAVARPGGAPGLWVQKGARVKLSAGSAALRCHAGGGQHWESSFSCCSGFLDGMPSEILLKIFSYLDAVSLLCTGCVSRRFYHLANDNFIWIGIYSTAFSPARSNWKFNSVEKIAMSMSFLSVQDKEAGYWKKEYITKQIASVKAALADILKPVNPYTGLPVKTKEALRIFGLGWAIILKEKGGKEYIMEHVDLSINDTSVTVIWYGKKWPCLASLSTLDLCGMTPVFTDWYKTPTKHRLRWHSLIAKYNLSHLTISTMIGCDRLIRIFCLHPGLLVGVWKKEEELAFVMANLHFHHLVERSTLGSATIPYELPPHSPFLDDSPEYGLHGYQLHVDLHSGGVFYLCGTFRNLFTKRGNIENGHVKLIVIHLKNNREHLPLIGKVGLSWKTDIFDGCIKSCSMMDVTLLDEHGKPFWCFSSPVCLRSPATPSDSSSFLGQTYNVDYVDAEGRVHVELVWIRETEEYLIVNLVLYLSIAKINHWFGTEY

SEQ ID NO: 880073 - protein, 528 aa, Homo sapiens; identical to SEQ ID NO: 880072

SEQ ID NO: 880074 - protein, 528 aa, Homo sapiens; identical to SEQ ID NO: 880072

SEQ ID NO: 880075 - protein, 528 aa, Homo sapiens; identical to SEQ ID NO: 880072

SEQ ID NO: 880076 - protein, 571 aa, Homo sapiens
SVHSSFQPWRGPVVNSLSLWRLDAVGSCSSTGSASRRCAGPAGAVARPGGAPGLWVQVTVGPAGGVPWREARHCAAPLSSPCILFVQLGARPVAVFNVRRKGARVKLSAGSAALRCHAGGGQHWESSFSCCSGFLDGMPSEILLKIFSYLDAVSLLCTGCVSRRFYHLANDNFIWIGIYSTAFSPARSNWKFNSVEKIAMSMSFLSVQDKEAGYWKKEYITKQIASVKAALADILKPVNPYTGLPVKTKEALRIFGLGWAIILKEKGGKEYIMEHVDLSINDTSVTVIWYGKKWPCLASLSTLDLCGMTPVFTDWYKTPTKHRLRWHSLIAKYNLSHLTISTMIGCDRLIRIFCLHPGLLVGVWKKEEELAFVMANLHFHHLVERSTLGSATIPYELPPHSPFLDDSPEYGLHGYQLHVDLHSGGVFYLCGTFRNLFTKRGNIENGHVKLIVIHLKNNREHLPLIGKVGLSWKTDIFDGCIKSCSMMDVTLLDEHGKPFWCFSSPVCLRSPATPSDSSSFLGQTYNVDYVDAEGRVHVELVWIRETEEYLIVNLVLYLSIAKINHWFGTEY

SEQ ID NO: 880077 - protein, 209 aa, Homo sapiens
MTKKEEELAFVMANLHFHHLVERSTLGSATIPYELPPHSPFLDDSPEYGLHGYQLHVDLHSGGVFYLCGTFRNLFTKRGNIENGHVKLIVIHLKNNREHLPLIGKVGLSWKTDIFDGCIKSCSMMDVTLLDEHGKPFWCFSSPVCLRSPATPSDSSSFLGQTYNVDYVDAEGRVHVELVWIRETEEYLIVNLVLYLSIAKINHWFGTEY

SEQ ID NO: 880078 - protein, 588 aa, Homo sapiens
SVHSSFQPWRGPVVNSLSLWRLDAVGSCSSTGSASRRCAGPAGAVARPGGAPGLWVQVTVGPAGGVPWREARHCAAPLSSPCILFVQLGARPVAVFNVRRPTVRVYISKPLGESTSEKGPGVKLSAGSAALRCHAGGGQHWESSFSCCSGFLDGMPSEILLKIFSYLDAVSLLCTGCVSRRFYHLANDNFIWIGIYSTAFSPARSNWKFNSVEKIAMSMSFLSVQDKEAGYWKKEYITKQIASVKAALADILKPVNPYTGLPVKTKEALRIFGLGWAIILKEKGGKEYIMEHVDLSINDTSVTVIWYGKKWPCLASLSTLDLCGMTPVFTDWYKTPTKHRLRWHSLIAKYNLSHLTISTMIGCDRLIRIFCLHPGLLVGVWKKEEELAFVMANLHFHHLVERSTLGSATIPYELPPHSPFLDDSPEYGLHGYQLHVDLHSGGVFYLCGTFRNLFTKRGNIENGHVKLIVIHLKNNREHLPLIGKVGLSWKTDIFDGCIKSCSMMDVTLLDEHGKPFWCFSSPVCLRSPATPSDSSSFLGQTYNVDYVDAEGRVHVELVWIRETEEYLIVNLVLYLSIAKINHWFGTEY

SEQ ID NO: 880079 - protein, 401 aa, Homo sapiens
SVHSSFQPWRGPVVNSLSLWRLDAVGSCSSTGSASRRCAGPAGAVARPGGAPGLWVQKGARVKLSAGSAALRCHAGGGQHWESSFSCCSGFLDGMPSEILLKIFSYLDAVSLLCTGCVSRRFYHLANDNFIWIGIYSTAFSPARSNWKFNSVEKIAMSMSFLSVQDKEAGYWKKEYITKQIASVKAALADILKPVNPYTGLPVKTKEALRIFGLGWAIILKEKGGKEYIMEHVDLSINDTSVTVIWYGKKWPCLASLSTLDLCGMTPVFTDWYKTPTKHRLRWHSLIAKYNLSHLTISTMIGCDRLIRIFCLHPGLLVGVWKKEEELAFVMANLHFHHLVERSTLGSATIPYELPPHSPFLDDSPEYGLHGYQLHVDLHSGGVFYLCGTFRNLFTKRGEID

SEQ ID NO: 880080 - protein, 98 aa, Homo sapiens
LQPWRWTWGSGLKKLSGRGCASQGVQTSHSWLSPLHCSASLHPDSSSPAASGQPVSLKNISTDTSGYYICTSSNEEGTQFCNITVAVRSRKSSLRGEG

SEQ ID NO: 880081 - protein, 319 aa, Homo sapiens
MVGKMWPVLWTLCAVRVTVDAISVETPQDVLRASQGKSVTLPCTYHTSTSSREGLIQWDKLLLTHTERVVIWPFSNKNYIHGELYKNRVSISNNAEQSDASITIDQLTMADNGTYECSVSLMSDLEGNTKSRVRLLVLVPPSKPECGIEGETIIGNNIQLTCQSKEGSPTPQYSWKRYNILNQEQPLAQPASGQPVSLKNISTDTSGYYICTSSNEEGTQFCNITVAVRSPSMNVALYVGIAVGVVAALIIIGIIIYCCCCRGKDDNTEDKEDARPNREAYEEPPEQLRELSREREEEDDYRQEEQRSTGRESPDHLDQ

SEQ ID NO: 880082 - protein, 80 aa, Homo sapiens
AAASLPEEPDGGGGPDDLLPLPLWLVAEGIFRPQGERRKSGRKDKSGQSGDGRGETRDKTRSSGLPNTVKRTFNEIQRKR

SEQ ID NO: 880083 - protein, 513 aa, Homo sapiens
MASVLSRRLGKRSLLGARVLGPSASEGPSAAPPSEPLLEGAAPQPFTTSDDTPCQEQPKEVLKAPSTSGLQQVAFQPGQKVYVWYGGQECTGLVEQHSWMEGQVTVWLLEQKLQVCCRVEEVWLAELQGPCPQAPPLEPGAQALAYRPVSRNIDVPKRKSDAVEMDEMMAAMVLTSLSCSPVVQSPPGTEANFSASRAACDPWKESGDISDSGSSTTSGHWSGSSGVSTPSPPHPQASPKYLGDAFGSPQTDHGFETDPDPFLLDEPAPRKRKNSVKVMYKCLWPNCGKVLRSIVGIKRHVKALHLGDTVDSDQFKREEDFYYTEVQLKEESAAAAAAAAAGTPVPGTPTSEPAPTPSMTGLPLSALPPPLHKAQSSGPEHPGPESSLPSGALSKSAPGSFWHIQADHAYQALPSFQIPVSPHIYTSVSWAAAPSAACSLSPVRSRSLSFSEPQQPAPAMKSHLIVTSPPRAQSGARKARGEAKKCRKVYGIEHRDQWCTACRWKKACQRFLD

SEQ ID NO: 880084 - protein, 513 aa, Homo sapiens; identical to SEQ ID NO: 880083

SEQ ID NO: 880085 - protein, 513 aa, Homo sapiens; identical to SEQ ID NO: 880083

SEQ ID NO: 880086 - protein, 513 aa, Homo sapiens; identical to SEQ ID NO: 880083

SEQ ID NO: 880087 - protein, 540 aa, Homo sapiens
RVLWTQAGSLRGSAEQGPGEEERRGSSMASVLSRRLGKRSLLGARVLGPSASEGPSAAPPSEPLLEGAAPQPFTTSDDTPCQEQPKEVLKAPSTSGLQQVAFQPGQKVYVWYGGQECTGLVEQHSWMEGQVTVWLLEQKLQVCCRVEEVWLAELQGPCPQAPPLEPGAQALAYRPVSRNIDVPKRKSDAVEMDEMMAAMVLTSLSCSPVVQSPPGTEANFSASRAACDPWKESGDISDSGSSTTSGHWSGSSGVSTPSPPHPQASPKYLGDAFGSPQTDHGFETDPDPFLLDEPAPRKRKNSVKVMYKCLWPNCGKVLRSIVGIKRHVKALHLGDTVDSDQFKREEDFYYTEVQLKEESAAAAAAAAAGTPVPGTPTSEPAPTPSMTGLPLSALPPPLHKAQSSGPEHPGPESSLPSGALSKSAPGSFWHIQADHAYQALPSFQIPVSPHIYTSVSWAAAPSAACSLSPVRSRSLSFSEPQQPAPAMKSHLIVTSPPRAQSGARKARGEAKKCRKVYGIEHRDQWCTACRWKKACQRFLD

SEQ ID NO: 880088 - protein, 470 aa, Homo sapiens
TLAGSSVAVSGDHECTGLVEQHSWMEGQVTVWLLEQKVYVWYGGQECTGLVEQHSWMEGQVTVWLLEQKLQVCCRVEEVWLAELQGPCPQAPPLEPGAQALAYRPVSRNIDVPKRKSDAVEMDEMMAAMVLTSLSCSPVVQSPPGTEANFSASRAACDPWKESGDISDSGSSTTSGHWSGSSGVSTPSPPHPQASPKYLGDAFGSPQTDHGFETDPDPFLLDEPAPRKRKNSVKVMYKCLWPNCGKVLRSIVGIKRHVKALHLGDTVDSDQFKREEDFYYTEVQLKEESAAAAAAAAAGTPVPGTPTSEPAPTPSMTGLPLSALPPPLHKAQSSGPEHPGPESSLPSGALSKSAPGSFWHIQADHAYQALPSFQIPVSPHIYTSVSWAAAPSAACSLSPVRSRSLSFSEPQQPAPAMKSHLIVTSPPRAQSGARKARGEAKKCRKVYGIEHRDQWCTACRWKKACQRFLD

SEQ ID NO: 880089 - protein, 513 aa, Homo sapiens; identical to SEQ ID NO: 880083

SEQ ID NO: 880090 - protein, 149 aa, Homo sapiens [sequence omitted]

SEQ ID NO: 880091 - protein, 513 aa, Homo sapiens; identical to SEQ ID NO: 880083

SEQ ID NO: 880092 - protein, 513 aa, Homo sapiens; identical to SEQ ID NO: 880083

SEQ ID NO: 880093 - protein, 1070 aa, Homo sapiens
MCFSFIMPPAMADILDIWAVDSQIASDGSIPVDFLLPTGIYIQLEVPREATISYIKQMLWKQVHNYPMFNLLMDIDSYMFACVNQTAVYEELEDETRRLCDVRPFLPVLKLVTRSCDPGEKLDSKIGVLIGKGLHEFDSLKDPEVNEFRRKMRKFSEEKILSLVGLSWMDWLKQTYPPEHEPSIPENLEDKLYGGKLIVAVHFENCQDVFSFQVSPNMNPIKVNELAIQKRLTIHGKEDEVSPYDYVLQVSGRVEYVFGDHPLIQFQYIRNCVMNRALPHFILVECCKIKKMYEQEMIAIEAAINRNSSNLPLPLPPKKTRIISHVWENNNPFQIVLVKGNKLNTEETVKVHVRAGLFHGTELLCKTIVSSEVSGKNDHIWNEPLEFDINICDLPRMARLCFAVYAVLDKVKTKKSTKTINPSKYQTIRKAGKVHYPVAWVNTMVFDFKGQLRTGDIILHSWSSFPDELEEMLNPMGTVQTNPYTENATALHVKFPENKKQPYYYPPFDKIIEKAAEIASSDSANVSSRGGKKFLPVLKEILDRDPLSQLCENEMDLIWTLRQDCREIFPQSLPKLLLSIKWNKLEDVAQLQALLQIWPKLPPREALELLDFNYPDQYVREYAVGCLRQMSDEELSQYLLQLVQVLKYEPFLDCALSRFLLERALGNRRIGQFLFWHLRSEVHIPAVSVQFGVILEAYCRGSVGHMKVLSKQVEALNKLKTLNSLIKLNAVKLNRAKGKEAMHTCLKQSAYREALSDLQSPLNPCVILSELYVEKCKYMDSKMKPLWLVYNNKVFGEDSVGVIFKNGDDLRQDMLTLQMLRLMDLLWKEAGLDLRMLPYGCLATGDRSGLIEVVSTSETIADIQLNSSNVAAAAAFNKDALLNWLKEYNSGDDLDRAIEEFTLSCAGYCVASYVLGIGDRHSDNIMVKKTGQLFHIDFGHILGNFKSKFGIKRERVPFILTYDFIHVIQQGKTGNTEKFGRFRQCCEDAYLILRRHGNLFITLFALMLTAGLPELTSVKDIQYLKDSLALGKSEEEALKQFKQKFDEALRESWTTKVNWMAHTVRKDYRS

SEQ ID NO: 880094 - protein, 1070 aa, Homo sapiens; identical to SEQ ID NO: 880093

SEQ ID NO: 880095 - protein, 1053 aa, Homo sapiens
MCFSFIMPPAMADILDIWAVDSQIASDGSIPVDFLLPTGIYIQLEVPREATISYIKQMLWKQVHNYPMFNLLMDIDSYMFACVNQTAVYEELEDETRRLCDVRPFLPVLKLVTRSCDPGEKLDSKIGVLIGKGLHEFDSLKDPEVNEFRRKMRKFSEEKILSLVGLSWMDWLKQTYPPEHEPSIPENLEDKLYGGKLIVAVHFENCQDVFSFQVSPNMNPIKVNELAIQKRLTIHGKEDEVSPYDYVLQVSGRVEYVFGDHPLIQFQYIRNCVMNRALPHFILVECCKIKKMYEQEMIAIEAAINRNSSNLPLPLPPKKTRIISHVWENNNPFQIVLVKGNKLNTEETVKVHVRAGLFHGTELLCKTIVSSEVSGKNDHIWNEPLEFDINICDLPRMARLCFAVYAVLDKVKTKKSTKTINPSKYQTIRKAGKVHYPVAWVNTMVFDFKGQLRTGDIILHSWSSFPDELEEMLNPMGTVQTNPYTENATALHVKFPENKKQPYYYPPFDKSRGGKKFLPVLKEILDRDPLSQLCENEMDLIWTLRQDCREIFPQSLPKLLLSIKWNKLEDVAQLQALLQIWPKLPPREALELLDFNYPDQYVREYAVGCLRQMSDEELSQYLLQLVQVLKYEPFLDCALSRFLLERALGNRRIGQFLFWHLRSEVHIPAVSVQFGVILEAYCRGSVGHMKVLSKQVEALNKLKTLNSLIKLNAVKLNRAKGKEAMHTCLKQSAYREALSDLQSPLNPCVILSELYVEKCKYMDSKMKPLWLVYNNKVFGEDSVGVIFKNGDDLRQDMLTLQMLRLMDLLWKEAGLDLRMLPYGCLATGDRSGLIEVVSTSETIADIQLNSSNVAAAAAFNKDALLNWLKEYNSGDDLDRAIEEFTLSCAGYCVASYVLGIGDRHSDNIMVKKTGQLFHIDFGHILGNFKSKFGIKRERVPFILTYDFIHVIQQGKTGNTEKFGRFRQCCEDAYLILRRHGNLFITLFALMLTAGLPELTSVKDIQYLKDSLALGKSEEEALKQFKQKFDEALRESWTTKVNWMAHTVRKDYRS

SEQ ID NO: 880096 - protein, 1027 aa, Homo sapiens
MCFSFIMPPAMADILDIWAVDSQIASDGSIPVDFLLPTGIYIQLEVPREATISYIKQMLWKQVHNYPMFNLLMDIDSYMFACVNQTAVYEELEDETRRLCDVRPFLPVLKLVTRSCDPGEKLDSKIGVLIGKGLHEFDSLKDPEVNEFRRKMRKFSEEKILSLVGLSWMDWLKQTYPPEHEPSIPENLEDKLYGGKLIVAVHFENCQDVFSFQVSPNMNPIKVNELAIQKRLTIHGKEDEVSPYDYVLQVSGRVEYVFGDHPLIQFQYIRNCVMNRALPHFILVECCKIKKMYEQEMIAIEAAINRNSSNLPLPLPPKKTRIISHVWENNNPFQIVLVKGNKLNTEETVKVHVRAGLFHGTELLCKTIVSSEVSGKNDHIWNEPLEFDINICDLPRMARLCFAVYAVLDKVKTKKSTKTINPSKYQTIRKAGKVHYPVAWVNTMVFDFKGQLRTGDIILHSWSSFPDELEEMLNPMGTVQTNPYTENATALHVKFPENKKQPYYYPPFDKIIEKAAEIASSDSANVSSRGGKKFLPVLKEILDRDPLSQLCENEMDLIWTLRQDCREIFPQSLPKLLLSIKWNKLEDVAQLQALLQIWPKLPPREALELLDFNYPDQYVREYAVGCLRQMSDEELSQYLLQLVQVLKYEPFLDCALSRFLLERALGNRRIGQFLFWHLRSEVHIPAVSVQFGVILEAYCRGSVGHMKVLSKQVEALNKLKTLNSLIKLNAVKLNRAKGKEAMHTCLKQSAYREALSDLQSPLNPCVILSELYVEKCKYMDSKMKPLWLVYNNKVFGEDSVGVIFKNGDDLRQDMLTLQMLRLMDLLWKEAGLDLRMLPYGCLATGDRSGLIEVVSTSETIADIQLNSSNVAAAAAFNKDALLNWLKEYNSGDDLDRAIEEFTLSCAGYCVASYVLGIGDRHSDNIMVKKTGQLFHIDFGHILGNFKSKFGIKRERVPFILTYDFIHVIQQGKTGNTEKFGRFRQCCEDAYLILRRHGNLFITLFALMLTAGLPELTSVKDIQYLKDY

SEQ ID NO: 880097 - protein, 981 aa, Homo sapiens
MCFSFIMPPAMADILDIWAVDSQIASDGSIPVDFLLPTGIYIQLEVPREATISYIKQMLWKQVHNYPMFNLLMDIDSYMFACVNQTAVYEELEDETRRLCDVRPFLPVLKLVTRSCDPGEKLDSKIGVLIGKGLHEFDSLKDPEVNEFRRKMRKFSEEKILSLVGLSWMDWLKQTYPPEHEPSIPENLEDKLYGGKLIVAVHFENCQDVFSFQVSPNMNPIKVNELAIQKRLTIHGKEDEVSPYDYVLQVSGRVEYVFGDHPLIQFQYIRNCVMNRALPHFILVECCKIKKMYEQEMIAIEAAINRNSSNLPLPLPPKKTRIISHVWENNNPFQIVLVKGNKLNTEETVKVHVRAGLFHGTELLCKTIVSSEVSGKNDHIWNEPLEFDINICDLPRMARLCFAVYAVLDKVKTKKSTKTINPSKYQTIRKAGKVHYPVAWVNTMVFDFKGQLRTGDIILHSWSSFPDELEEMLNPMGTVQTNPYTENATALHVKFPENKKQPYYYPPFDKIIEKAAEIASSDSANVSSRGGKKFLPVLKEILDRDPLSQLCENEMDLIWTLRQDCREIFPQSLPKLLLSIKWNKLEDVAQLQALLQIWPKLPPREALELLDFNYPDQYVREYAVGCLRQMSDEELSQYLLQLVQVLKYEPFLDCALSRFLLERALGNRRIGQFLFWHLRSEVHIPAVSVQFGVILEAYCRGSVGHMKVLSKQVEALNKLKTLNSLIKLNAVKLNRAKGKEAMHTCLKQSAYREALSDLQSPLNPCVILSELYVEKCKYMDSKMKPLWLVYNNKVFGEDSVGVIFKNGDDLRQDMLTLQMLRLMDLLWKEAGLDLRMLPYGCLATGDRSGLIEVVSTSETIADIQLNSSNVAAAAAFNKDALLNWLKEYNSGDDLDRAIEEFTLSCAGYCVASYVLGIGDRHSDNIMVKKTGQLFHIDFGHILGNFKSKFGIKRERVPFILTYDFIHVIQQGKTGNTEKFGR

SEQ ID NO: 880098 - protein, 876 aa, Homo sapiens
MCFSFIMPPAMADILDIWAVDSQIASDGSIPVDFLLPTGIYIQLEVPREATISYIKQMLWKQVHNYPMFNLLMDIDSYMFACVNQTAVYEELEDETRRLCDVRPFLPVLKLVTRSCDPGEKLDSKIGVLIGKGLHEFDSLKDPEVNEFRRKMRKFSEEKILSLVGLSWMDWLKQTYPPEHEPSIPENLEDKLYGGKLIVAVHFENCQDVFSFQVSPNMNPIKVNELAIQKRLTIHGKEDEVSPYDYVLQVSGRVEYVFGDHPLIQFQYIRNCVMNRALPHFILVECCKIKKMYEQEMIAIEAAINRNSSNLPLPLPPKKTRIISHVWENNNPFQIVLVKGNKLNTEETVKVHVRAGLFHGTELLCKTIVSSEVSGKNDHIWNEPLEFDINICDLPRMARLCFAVYAVLDKVKTKKSTKTINPSKYQTIRKAGKVHYPVAWVNTMVFDFKGQLRTGDIILHSWSSFPDELEEMLNPMGTVQTNPYTENATALHVKFPENKKQPYYYPPFDKIIEKAAEIASSDSANVSSRGGKKFLPVLKEILDRDPLSQLCENEMDLIWTLRQDCREIFPQSLPKLLLSIKWNKLEDVAQLQALLQIWPKLPPREALELLDFNYPDQYVREYAVGCLRQMSDEELSQYLLQLVQVLKYEPFLDCALSRFLLERALGNRRIGQFLFWHLRSEVHIPAVSVQFGVILEAYCRGSVGHMKVLSKQVEALNKLKTLNSLIKLNAVKLNRAKGKEAMHTCLKQSAYREALSDLQSPLNPCVILSELYVEKCKYMDSKMKPLWLVYNNKVFGEDSVGVIFKNGDDLRQDMLTLQMLRLMDLLWKEAGLDLRWIQWLLLVILIFWKAKVRGSLEPGSSRLSWATEQDPSSVNK

SEQ ID NO: 880099 - protein, 587 aa, Homo sapiens
MCFSFIMPPAMADILDIWAVDSQIASDGSIPVDFLLPTGIYIQLEVPREATISYIKQMLWKQVHNYPMFNLLMDIDSYMFACVNQTAVYEELEDETRRLCDVRPFLPVLKLVTRSCDPGEKLDSKIGVLIGKGLHEFDSLKDPEVNEFRRKMRKFSEEKILSLVGLSWMDWLKQTYPPEHEPSIPENLEDKLYGGKLIVAVHFENCQDVFSFQVSPNMNPIKVNELAIQKRLTIHGKEDEVSPYDYVLQVSGRVEYVFGDHPLIQFQYIRNCVMNRALPHFILVECCKIKKMYEQEMIAIEAAINRNSSNLPLPLPPKKTRIISHVWENNNPFQIVLVKGNKLNTEETVKVHVRAGLFHGTELLCKTIVSSEVSGKNDHIWNEPLEFDINICDLPRMARLCFAVYAVLDKVKTKKSTKTINPSKYQTIRKAGKVHYPVAWVNTMVFDFKGQLRTGDIILHSWSSFPDELEEMLNPMGTVQTNPYTENATALHVKFPENKKQPYYYPPFDKSRGGKKFLPVLKEILDRDPLSQLCENEMDLIWTLRQDCREIFPQSLPKLLLSIKWNKLEDVAQVTKDRFYNFFWVYG

SEQ ID NO: 880100 - protein, 1070 aa, Homo sapiens; identical to SEQ ID NO: 880093

SEQ ID NO: 880101 - protein, 1070 aa, Homo sapiens; identical to SEQ ID NO: 880093

SEQ ID NO: 880102 - protein, 292 aa, Homo sapiens
MDSKMKPLWLVYNNKVFGEDSVGVIFKNGDDLRQDMLTLQMLRLMDLLWKEAGLDLRMLPYGCLATGDRSGLIEVVSTSETIADIQLNSSNVAAAAAFNKDALLNWLKEYNSGDDLDRAIEEFTLSCAGYCVASYVLGIGDRHSDNIMVKKTGQLFHIDFGHILGNFKSKFGIKRERVPFILTYDFIHVIQQGKTGNTEKFGRFRQCCEDAYLILRRHGNLFITLFALMLTAGLPELTSVKDIQYLKDSLALGKSEEEALKQFKQKFDEALRESWTTKVNWMAHTVRKDYRS

SEQ ID NO: 880103 - protein, 235 aa, Homo sapiens
MLPYGCLATGDRSGLIEVVSTSETIADIQLNSSNVAAAAAFNKDALLNWLKEYNSGDDLDRAIEEFTLSCAGYCVASYVLGIGDRHSDNIMVKKTGQLFHIDFGHILGNFKSKFGIKRERVPFILTYDFIHVIQQGKTGNTEKFGRFRQCCEDAYLILRRHGNLFITLFALMLTAGLPELTSVKDIQYLKDSLALGKSEEEALKQFKQKFDEALRESWTTKVNWMAHTVRKDYRS

SEQ ID NO: 880104 - protein, 193 aa, Homo sapiens
MCFSFIMPPAMADILDIWAVDSQIASDGSIPVDFLLPTGIYIQLEVPREATISYIKQMLWKQVHNYPMFNLLMDIDSYMFACVNQTAVYEELEDETRRLCDVRPFLPVLKLVTRSCDPGEKLDSKIGVLIGKEMESYCVTQDVGQVSSRHWYLSEIYLLPNIYQNMDSLATITSSYACQMWQIKILKIEILKK

SEQ ID NO: 880105 - protein, 134 aa, Homo sapiens [sequence omitted]

SEQ ID NO: 880106 - protein, 67 aa, Homo sapiens
RPYYYYICDRPPGVSAVTAASGERCVPLAFLAWERGQLPVFGQQDVQRLVWSHLDAPFSSRDGKLLS

SEQ ID NO: 880107 - protein, 284 aa, Homo sapiens
CRSSVRVPLFGLTPTVDYPIFRFSSGMSHVVVKNDPELDQQLANLDLNSEKQSGGASTASKGRYIPPHLRNREASKGFHDKDSSGWSCSKDKDAYSSFGSRDSRGKPGYFSERGSGSRGRFDDRGRSDYDGIGNRERPGFGRFERSGHSRWCDKSVEDDWSKPLPPSERLEQELFSGGNTGINFEKYDDIPVEATGSNCPPHIENFSDIDMGEIIMGNIELTRYTRPTPVQKHAIPIIKGKRDLMACAQTGSGKTAAFLLPILSQIYTDGPGEALKAVKVKVLL

SEQ ID NO: 880108 - protein, 333 aa, Homo sapiens
MMERGKIGLDFCKYLVLDEADRMLDMGFEPQIRRIVEQDTMPPKGVRHTMMFSATFPKEIQMLARDFLDEYIFLAVGRVGSTSENITQKVVWVEDLDKRSFLLDILGATGSDSLTLVFVETKKGADSLEDFLYHEGYACTSIHGDRSQRDREEALHQFRSGKSPILVATAVAARGLDISNVRHVINFDLPSDIEEYVHRIGRTGRVGNLGLATSFFNEKNMNITKDLLDLLVEAKQEVPSWLENMAYEHHYKGGSRGRSKSNRFSGGFGARDYRQSSGSSSSGFGASRGSSSRSGGGGYGNSRGFGGGGYGGFYNSDGYGGNYNSQGVDWWGN

SEQ ID NO: 880109 - protein, 284 aa, Homo sapiens; identical to SEQ ID NO: 880107

SEQ ID NO: 880110 - protein, 686 aa, Homo sapiens
CRSSVRVPLFGLTPTVDYPIFRFSSGMSHVVVKNDPELDQQLANLDLNSEKQSGGASTASKGRYIPPHLRNREASKGFHDKDSSGWSCSKDKDAYSSFGSRDSRGKPGYFSERGSGSRGRFDDRGRSDYDGIGNRERPGFGRFERSGHSRWCDKSVEDDWSKPLPPSERLEQELFSGGNTGINFEKYDDIPVEATGSNCPPHIENFSDIDMGEIIMGNIELTRYTRPTPVQKHAIPIIKGKRDLMACAQTGSGKTAAFLLPILSQIYTDGPGEALKAVKENGRYGRRKQYPISLVLAPTRELAVQIYEEARKFSYRSRVRPCVVYGGADIGQQIRDLERGCHLLVATPGRLVDMMERGKIGLDFCKYLVLDEADRMLDMGFEPQIRRIVEQDTMPPKGVRHTMMFSATFPKEIQMLARDFLDEYIFLAVGRVGSTSENITQKVVWVEDLDKRSFLLDILGATGSDSLTLVFVETKKGADSLEDFLYHEGYACTSIHGDRSQRDREEALHQFRSGKSPILVATAVAARGLDISNVRHVINFDLPSDIEEYVHRIGRTGRVGNLGLATSFFNEKNMNITKDLLDLLVEAKQEVPSWLENMAYEHHYKGGSRGRSKSNRFSGGFGARDYRQSSGSSSSGFGASRGSSSRSGGGGYGNSRGFGGGGYGGFYNSDGYGGNYNSQGVDWWGN

SEQ ID NO: 880111 - protein, 258 aa, Homo sapiens
MSHVVVKNDPELDQQLANLDLNSEKQSGGASTASKGRYIPPHLRNREASKGFHDKDSSGWSCSKDKDAYSSFGSRDSRGKPGYFSERGSGSRGRFDDRGRSDYDGIGNRERPGFGRFERSGHSRWCDKSVEDDWSKPLPPSERLEQELFSGGNTGINFEKYDDIPVEATGSNCPPHIENFSDIDMGEIIMGNIELTRYTRPTPVQKHAIPIIKGKRDLMACAQTGSGKTAAFLLPILSQIYTDGPGEALKAVKVKVLL

SEQ ID NO: 880112 - protein, 284 aa, Homo sapiens; identical to SEQ ID NO: 880107

SEQ ID NO: 880113 - protein, 102 aa, Homo sapiens [sequence omitted]

SEQ ID NO: 880114 - protein, 127 aa, Homo sapiens
MEMMESQTLLLTLLSVKMENNLAEFERRAEKNLLIMCKEKEKLQKKAHELKRRLLLSQRKRELADVLDAQIEMLSPFEAVATRFKEQYRTFATALDTTRHELPVRSIHLEGDGQQLLGRKRGVPVRV

SEQ ID NO: 880115 - protein, 369 aa, Homo sapiens
MADSSGRGAGKPATGPTNSSSAKKKDKRVQGGRVIESRYLQYEKKTTQKAPAGDGSQTRGKMSEGGRKSSLLQKSKADSSGVRKGDLQSTLLEGHGTAPPDLDLSAINDKSIVKKTPQLAKTISKKPESTSFSAPRKKSPDLSEAMEMMESQTLLLTLLSVKMENNLAEFERRAEKNLLIMCKEKEKLQKKAHELKRRLLLSQRKRELADVLDAQVSCKELYALQHELVTTQRLLGELDVGDSEENVQVLDLLSELKDVTAKKDLELRRSFAQVLELSAEASKEAALANQEVWEETQGMAPPSRWYFNQDSACRESGGAPKNTPLSEDDNPGASSAPAQATFISPSEDFSSSSQAEVPPSLSRSGRDLS

SEQ ID NO: 880116 - protein, 106 aa, Homo sapiens
HHDRSLSAAPLVCALRGAPCHPSPTIPLPLHALQHELVTTQRLLGELDVGDSEENVQVLDLLSELKDVTAKKDLELRRYLGKCFKKEVAPCLLRAVGGCTVGVVPS

SEQ ID NO: 880117 - protein, 410 aa, Homo sapiens [sequence omitted]

SEQ ID NO: 880118 - protein, 410 aa, Homo sapiens [sequence omitted]

SEQ ID NO: 880119 - protein, 80 aa, Homo sapiens
SSVPPPGPGPGIQASQALGDQAWGPPRLGKVHSWPPATLEGLGPHPGDLSHTVKAGTELHAWGCLKVQKELRRGVGGPPG

SEQ ID NO: 880120 - protein, 519 aa, Homo sapiens
MTSTFNPRECKLSKQEGQNYGFFLRIEKDTEGHLVRVVEKCSPAEKAGLQDGDRVLRINGVFVDKEEHMQVVDLVRKSGNSVTLLVLDGDSYEKAVKTRVDLKELGQSQKEQGLSDNILSPVMNGGVQTWTQPRLCYLVKEGGSYGFSLKTVQGKKGVYMTDITPQGVAMRAGVLADDHLIEVNGENVEDASHEEVVEKVKKSGSRVMFLLVDKETDKRHVEQKIQFKRETASLKLLPHQPRIVEMKKGSNGYGFYLRAGSEQKGQIIKDIDSGSPAEEAGLKNNDLVVAVNGESVETLDHDSVVEMIRKGGDQTSLLVVDKETDNMYRLAHFSPFLYYQSQELPNGSVKEAPAPTPTSLEVSSPPDTTEEVDHKPKLCRLAKGENGYGFHLNAIRGLPGSFIKEVQKGGPADLAGLEDEDVIIEVNGVNVLDEPYEKVVDRIQSSGKNVTLLVCGKKAYDYFQAKKIPIVSSLADPLDTPPDSKEGIVVESNHDSHMAKERAHSTASHSSSNSEDTEM

SEQ ID NO: 880121 - protein, 407 aa, Homo sapiens [sequence omitted]

SEQ ID NO: 880122 - protein, 519 aa, Homo sapiens; identical to SEQ ID NO: 880120

SEQ ID NO: 880123 - protein, 407 aa, Homo sapiens [sequence omitted]

SEQ ID NO: 880124 - protein, 407 aa, Homo sapiens [sequence omitted]

SEQ ID NO: 880125 - protein, 519 aa, Homo sapiens; identical to SEQ ID NO: 880120

SEQ ID NO: 880126 - protein, 519 aa, Homo sapiens; identical to SEQ ID NO: 880120

SEQ ID NO: 880127 - protein, 407 aa, Homo sapiens [sequence omitted]

SEQ ID NO: 880128 - protein, 108 aa, Homo sapiens
QVQKGGPADLAGLEDEDVIIEVNGVNVLDEPYEKVVDRIQSSGKNVTLLVCGKKAYDYFQAKKIPIVSSLADPLDTPPDSKEGIVVESNHDSHMAKERVSGGLFLFMI

SEQ ID NO: 880129 - protein, 78 aa, Homo sapiens
EKGKNRKGTELQVQVNHLCFSHIVIDIYPSIILIASSLLPPQPICLLCIRLEDRDPPGSQLKALEGYTLRTEVNRRYT

SEQ ID NO: 880130 - protein, 94 aa, Homo sapiens
SGIMALHDIHLKQDETEQAEKETFLTMFCYEESTFPRSPSEPPIGLIGANWLKGSFQDQAQVQGPKLARTGMTHLFSFSVISSQGHRSVWLVCE

SEQ ID NO: 880131 - protein, 762 aa, Homo sapiens
MEKLEVLEEWQSHIEGWEGSNITDTCTEMLMCGVLLKISSGNIQERVFFLFDNLLVYCKRKHRRLKNSKASTDGHRYLFRGRINTEVMEVENVDDGTADFHSSGHIVVNGWKIHNTAKNKWFVCMAKTPEEKHEWFEAILKERERRKGLKLGMEQDTWVMISEQGEKLYKMMCRQGNLIKDRKRKLTTFPKCFLGSEFVSWLLEIGEIHRPEEGVHLGQALLENGIIHHVTDKHQFKPEQMLYRFRYDDGTFYPRNEMQDVISKGVRLYCRLHSLFTPVIRDKDYHLRTYKSVVMANKLIDWLIAQGDCRTREEAMIFGVGLCDNGFMHHVLEKSEFKDEPLLFRFFSDEEMEGSNMKHRLMKHDLKVVENVIAKSLLIKSNEGSYGFGLEDKNKVPIIKLVEKGSNAEMAGMEVGKKIFAINGDLVFMRPFNEVDCFLKSCLNSRKPLRVLVSTKPRETVKIPDSADGLGFQIRGFGPSVVHAVGRGTVAAAAGLHPGQCIIKVNGINVSKETHASVIAHVTACRKYRRPTKQDSIQWVYNSIESAQEDLQKSHSKPPGDEAGDAFDCKVEEVIDKFNTMAIIDGKKEHVSLTVDNVHLEYGVVYEYDSTAGIKCNVVEKMIEPKGFFSLTAKILEALAKSDEHFVQNCTSLNSLNEVIPTDLQSKFSALCSERIEHLCQRISSYKKVQASERFYNFTARHAVWEHSFDLHSVSSTFPVPVTMEFLLLPPPLLGISQDGRQHCIPEDLPSQEMLLAERAPV

SEQ ID NO: 880132 - protein, 1389 aa, Homo sapiens
MEKLEVLEEWQSHIEGWEGSNITDTCTEMLMCGVLLKISSGNIQERVFFLFDNLLVYCKRKHRRLKNSKASTDGHRYLFRGRINTEVMEVENVDDGTADFHSSGHIVVNGWKIHNTAKNKWFVCMAKTPEEKHEWFEAILKERERRKGLKLGMEQDTWVMISEQGEKLYKMMCRQGNLIKDRKRKLTTFPKCFLGSEFVSWLLEIGEIHRPEEGVHLGQALLENGIIHHVTDKHQFKPEQMLYRFRYDDGTFYPRNEMQDVISKGVRLYCRLHSLFTPVIRDKDYHLRTYKSVVMANKLIDWLIAQGDCRTREEAMIFGVGLCDNGFMHHVLEKSEFKDEPLLFRFFSDEEMEGSNMKHRLMKHDLKVVENVIAKSLLIKSNEGSYGFGLEDKNKVPIIKLVEKGSNAEMAGMEVGKKIFAINGDLVFMRPFNEVDCFLKSCLNSRKPLRVLVSTKPRETVKIPDSADGLGFQIRGFGPSVVHAVGRGTVAAAAGLHPGQCIIKVNGINVSKETHASVIAHVTACRKYRRPTKQDSIQWVYNSIESAQEDLQKSHSKPPGDEAGDAFDCKVEEVIDKFNTMAIIDGKKEHVSLTVDNVHLEYGVVYEYDSTAGIKCNVVEKMIEPKGFFSLTAKILEALAKSDEHFVQNCTSLNSLNEVIPTDLQSKFSALCSERIEHLCQRISSYKKFSRVLKNRAWPTFKQAKSKISPLHSSDFCPTNCHVNVMEVSYPKTSTSLGSAFGVQLDSRKHNSHDKENKSSEQGKLSPMVYIQHTITTMAAPSGLSLGQQDGHGLRYLLKEEDLETQDIYQKLLGKLQTALKEVEMCVCQIDDLLSSITYSPKLERKTSEGIIPTDSDNEKGERNSKRVCFNVAGDEQEDSGHDTISNRDSYSDCNSNRNSIASFTSICSSQCSSYFHSDEMDSGDELPLSVRISHDKQDKIHSCLEHLFSQVDSITNLLKGQAVVRAFDQTKYLTPGRGLQEFQQEMEPKLSCPKRLRLHIKQDPWNLPSSVRTLAQNIRKFVEEVKCRLLLALLEYSDSETQLRRDMVFCQTLVATVCAFSEQLMAALNQMFDNSKENEMETWEASRRWLDQIANAGVLFHFQSLLSPNLTDEQAMLEDTLVALFDLEKVSFYFKPSEEEPLVANVPLTYQAEGSRQALKVYFYIDSYHFEQLPQRLKNGGGFKIHPVLFAQALESMEGYYYRDNVSVEEFQAQINAASLEKVKQYNQKLRAFYLDKSNSPPNSTSKAAYVDKLMRPLNALDELYRLVASFIRSKRTAACANTACSASGVGLLSVSSELCNRLGACHIIMCSSGVHRCTLSVTLEQAIILARSHGLPPRYIMQATDVMRKQGARVQNTAKNLGVRDRTPQSAPRLYKLCEPPPPAGEE

SEQ ID NO: 880133 - protein, 1388 aa, Homo sapiens
MEKLEVLEEWQSHIEGWEGSNITDTCTEMLMCGVLLKISSGNIQERVFFLFDNLLVYCKRKHRRLKNSKASTDGHRYLFRGRINTEVMEVENVDDGTADFHSSGHIVVNGWKIHNTAKNKWFVCMAKTPEEKHEWFEAILKERERRKGLKLGMEQDTWVMISEQGEKLYKMMCRQGNLIKDRKRKLTTFPKCFLGSEFVSWLLEIGEIHRPEEGVHLGQALLENGIIHHVTDKHQFKPEQMLYRFRYDDGTFYPRNEMQDVISKGVRLYCRLHSLFTPVIRDKDYHLRTYKSVVMANKLIDWLIAQGDCRTREEAMIFGVGLCDNGFMHHVLEKSEFKDEPLLFRFFSDEEMEGSNMKHRLMKHDLKVVENVIAKSLLIKSNEGSYGFGLEDKNKVPIIKLVEKGSNAEMAGMEVGKKIFAINGDLVFMRPFNEVDCFLKSCLNSRKPLRVLVSTKPRETVKIPDSADGLGFQIRGFGPSVVHAVGRGTVAAAAGLHPGQCIIKVNGINVSKETHASVIAHVTACRKYRRPTKQDSIQWVYNSIESAQEDLQKSHSKPPGDEAGDAFDCKVEEVIDKFNTMAIIDGKKEHVSLTVDNVHLEYGVVYEYDSTAGIKCNVVEKMIEPKGFFSLTAKILEALAKSDEHFVQNCTSLNSLNEVIPTDLQSKFSALCSERIEHLCQRISSYKKFSRVLKNRAWPTFKQAKSKISPLHSSDFCPTNCHVNVMEVSYPKTSTSLGSAFGVQLDSRKHNSHDKENKSSEQGKLSPMVYIQHTITTMAAPSGLSLGQQDGHGLRYLLKEEDLETQDIYQKLLGKLQTALKEVEMCVCQIDDLLSSITYSPKLERKTSEGIIPTDSDNEKGERNSKRVCFNVAGDEQEDSGHDTISNRDSYSDCNSNRNSIASFTSICSSQCSSYFHSDEMDSGDELPLSVRISHDKQDKIHSCLEHLFSQVDSITNLLKGQAVVRAFDQTKYLTPGRGLQEFQQEMEPKLSCPKRLRLHIKQDPWNLPSSVRTLAQNIRKFVEEVKCRLLLALLEYSDSETQLRRDMVFCQTLVATVCAFSEQLMAALNQMFDNSKENEMETWEASRRWLDQIANAGVLFHFQSLLSPNLTDEQAMLEDTLVALFDLEKVSFYFKPSEEEPLVANVPLTYQAEGSRQALKVYFYIDSYHFEQLPQRLKNGGGFKIHPVLFAQALESMEGYYYRDNVSVEEFQAQINAASLEKVKQYNQKLRAFYLDKSNSPPNSTSKAAYVDKLMRPLNALDELYRLVASFIRSKRTAACANTACSASGVGLLSVSSELCNRLGACHIIMCSSGVHRCTLSVTLEQAIILARSHGLPPRYIMQATDVMRKQILCIYFSYSCYFNSLLEFEGKIKDRREGYYVFMMFC

SEQ ID NO: 880134 - protein, 74 aa, Homo sapiens
WVDRGLWVDRGLWVERGLGIETCGLFLCALFAQVLLRARSGSLGGRVMGAMGGRMGAGSSGGTWFFQDFVYPSS

SEQ ID NO: 880135 - protein, 103 aa, Homo sapiens
VRLSLPLLPRFECSGVISAHCNLHLPGSDNPPATASGGAGITGMCHHARLIFVFFVETGFHHVGQAGLELLTSGDLPASASQSAGITGVRHCTRPDFTILAST

SEQ ID NO: 880136 - protein, 617 aa, Homo sapiens
MHTLKYYYWVINPADSSGITPKGLDGPRPSQKEIISLRAFMLLFLKQLILKDRGVKEDELQSILNYLLTMHEDENIHDVLQLLVALMSEHPASMIPAFDQRNGIRVIYKLLASKSESIWVQALKVLGYFLKHLGHKRKVEIMHTHSLFTLLGERLMLHTNTVTVTTYNTLYEILTEQVCTQVVHKPHPEPDSTVKIQNPMILKVVATLLKNSTPSAELMEVRRLFLSDMIKLFSNSRENRRCLLQCSVWQDWMFSLGYINPKNSEEQKITEMVYNIFRILLYHAIKYEWGGWRVWVDTLSIAHSKVTYEAHKEYLAKMYEEYQRQEEENIKKGKKGNVSTISGLSSQTTGAKGGMEIREIEDLSQSQSPESETDYPVSTDTRDLLMSTKVSDDILGNSDRPGSGVHVEVHDLLVDIKAEKVEATEVKLDDMDLSPETLVGGENGALVEVESLLDNVYSAAVEKLQNNVHGSVGIIKKNEEKDNGPLITLADEKEDLPNSSTSFLFDKIPKQEEKLLPELSSNHIIPNIQDTQVHLGVSDDLGLLAHMTGSVDLTCTSSIIEEKEFKIHTTSDGMSSISERDLASSTKGLEYAEMTATTLETESSSSKIVPNIDAGSI

SEQ ID NO: 880137 - protein, 104 aa, Homo sapiens
MQQRPRVVHRARNICDLALPRKSAGPWADHTICNNQNSVKLQCFWSLRVLRPGWQLPAQPQYSLVFCCLPELALGLDSHCPGDAIGLQLSRTILEPGPGIGGPV

SEQ ID NO: 880138 - protein, 276 aa, Homo sapiens
AARTRTAPSMRVAALISGGKDSCYNMMQCIAAGHQIVALANLRPAENQVGSDELDSYMYQTVGHHAIDLYAEAMALPLYRRTIRGRSLDTRQVYTKCEGDEVEDLYELLKLVKEKEEVEGISVGAILSDYQRIRVENVCKRLNLQPLAYLWQRNQEDLLREMISSNIQAMIIKVAALGLDPDKHLGKTLDQMEPYLIELSKKYGVHVCGEGGEYETFTLDCPLFKKKIIVDSSEVVIHSADAFAPVAYLRFLELHLEDKVSSVPDNYRTSNYIYNF

SEQ ID NO: 880139 - protein, 115 aa, Homo sapiens
MISSNIQAMIIKVAALGLDPDKHLGKTLDQMEPYLIELSKKYGVHVCGEGGEYETFTLDCPLFKKKIIVDSSEVVIHSADAFAPVAYLRFLELHLEDKVSSVPDNYRTSNYIYNF

SEQ ID NO: 880140 - protein, 276 aa, Homo sapiens; identical to SEQ ID NO: 880138

SEQ ID NO: 880141 - protein, 467 aa, Homo sapiens
MKLGSKSPGALRGPGLVPWIPEDTFSLLLAPDPVQIGRVQQDTPGKVLSIVNQLYLETHRGWGREQTPQETEPEAAQRHDPAPRNPAPHGVSWVKGPLSPEVDHPGPALASLLEEEEEDLEGKEEGREDDPEEEGPEDVLTIHVQSLVRARSSYVARQYRSLRVRIASDSGGPHGSGDPATELLQDVRHLLTDLQDHLAKDSYIRAVFGSRGPGLPKKDEDPGPALETAVCQAVLAPLKPALWTRLRTLRAPELRRLRRRQTALRAGAGPPGAQGPGPEGQSLAPALRSRIHERLAHLHAACAPRRKVALLLEVCRDVYAGLARGENQDPLGADAFLPALTEELIWSPDIGDTQLDVEFLMELLDPDELRGEAGYYLTTWFGALHHIAHYQPETDRAPRGLSSEARASLHQWHRRRTLHRKDHPRAQVTAHLAASRREGETWCPSDPAPTSPHRPTCPLRSHGQKRL

SEQ ID NO: 880142 - protein, 369 aa, Homo sapiens
MIQPPGTLRLTVVSWVKGPLSPEVDHPGPALASLLEEEEEDLEGKEEGREDDPEEEGPEDVLTIHVQSLVRARSSYVARQYRSLRVRIASDSGGPHGSGDPATELLQDVRHLLTDLQDHLAKDSYIRAVFGSRGPGLPKKDEDPGPALETAVCQAVLAPLKPALWTRLRTLRAPELRRLRRRQTALRAGAGPPGAQGPGPEGQSLAPALRSRIHERLAHLHAACAPRRKVALLLEVCRDVYAGLARGENQDPLGADAFLPALTEELIWSPDIGDTQLDVEFLMELLDPDELRGEAGYYLTTWFGALHHIAHYQPETDRAPRGLSSEARASLHQWHRRRTLHRKDHPRAQANLPFKEPWAEETVTGTSDN

SEQ ID NO: 880143 - protein, 435 aa, Homo sapiens
MKLGSKSPGALRGPGLVPWIPEDTFSLLLAPDPVQIGRVQQDTPGKVLSIVNQLYLETHRGWGREQTPQETEPEAAQRHDPAPRNPAPHGVSWVKGPLSPEVDHPGPALASLLEEEEEDLEGKEEGREDDPEEEGPEDVLTIHVQSLVRARSSYVARQYRSLRDHLAKDSYIRAVFGSRGPGLPKKDEDPGPALETAVCQAVLAPLKPALWTRLRTLRAPELRRLRRRQTALRAGAGPPGAQGPGPEGQSLAPALRSRIHERLAHLHAACAPRRKVALLLEVCRDVYAGLARGENQDPLGADAFLPALTEELIWSPDIGDTQLDVEFLMELLDPDELRGEAGYYLTTWFGALHHIAHYQPETDRAPRGLSSEARASLHQWHRRRTLHRKDHPRAQVTAHLAASRREGETWCPSDPAPTSPHRPTCPLRSHGQKRL

SEQ ID NO: 880144 - protein, 147 aa, Homo sapiens
RGGESLESWSQAGEGSTGGRNLCGPEDSDPLGADAFLPALTEELIWSPDIGDTQLDVEFLMELLDPDELRGEAGYYLTTWFGALHHIAHYQPETDRAPRGLSSEARASLHQWHRRRTLHRKDHPRAQANLPFKEPWAEETVTGTSDN

SEQ ID NO: 880145 - protein, 191 aa, Homo sapiens [sequence omitted]

SEQ ID NO: 880146 - protein, 139 aa, Homo sapiens
AVLRREHTGLPCSDEDNDVWPTHPPTFSLVIGRARPRTFYPGPLPYDLIPVPCPILISGELWSSLVFPPHSSLSPYHGRGVLFHRRVRCVWEVLRAAWSFKAFLKTFLPNQMVSVVGKAPFMRSSWGYRLMFLATPVQL

SEQ ID NO: 880147 - protein, 150 aa, Homo sapiens
FSHIPFSFCFTAVLRREHTGLPCSDEDNDVWPTHPPTFSLVIGRARPRTFYPGPLPYDLIPVPCPILISGELWSSLVFPPHSSLSPYHGRGVLFHRRVRCVWEVLRAAWSFKAFLKTFLPNQMVSVVGKAPFMRSSWGYRLMFLATPVQL

SEQ ID NO: 880148 - protein, 62 aa, Homo sapiens
SFNMGKGNEDPYLHCSSIQCSTDQPPFQQISFTGKGSDEKKPFKGKGKTASSHSSEKHIQRQ

SEQ ID NO: 880149 - protein, 69 aa, Homo sapiens
LISFSNAAHRGALICKERSTLFNSSSSFSVSGVSTVMTSSVDWHCGQTYSSMSSASLCKMPMQHPWYQF

SEQ ID NO: 880150 - protein, 502 aa, Homo sapiens
MLLRSAGKLNVGTKKEDGESTAPTPRPKVLRCKCHHHCPEDSVNNICSTDGYCFTMIEEDDSGLPVVTSGCLGLEGSDFQCRDTPIPHQRRSIECCTERNECNKDLHPTLPPLKNRDFVDGPIHHRALLISVTVCSLLLVLIILFCYFRYKRQETRPRYSIGLEQDETYIPPGESLRDLIEQSQSSGSGSGLPLLVQRTIAKQIQMVKQIGKGRYGEVWMGKWRGEKVAVKVFFTTEEASWFRETEIYQTVLMRHENILGFIAADIKGTGSWTQLYLITDYHENGSLYDYLKSTTLDAKSMLKLAYSSVSGLCHLHTEIFSTQGKPAIAHRDLKSKNILVKKNGTCCIADLGLAVKFISDTNEVDIPPNTRVGTKRYMPPEVLDESLNRNHFQSYIMADMYSFGLILWEVARRCVSGGIVEEYQLPYHDLVPSDPSYEDMREIVCIKKLRPSFPNRWSSDECLRQMGKLMTECWAHNPASRLTALRVKKTLAKMSESQDIKL

SEQ ID NO: 880151 - protein, 541 aa, Homo sapiens
RHVKMCLLPLCPSTVIVSFLRPHQPCLLYSLWNSNFLDNMLLRSAGKLNVGTKKEDGESTAPTPRPKVLRCKCHHHCPEDSVNNICSTDGYCFTMIEEDDSGLPVVTSGCLGLEGSDFQCRDTPIPHQRRSIECCTERNECNKDLHPTLPPLKNRDFVDGPIHHRALLISVTVCSLLLVLIILFCYFRYKRQETRPRYSIGLEQDETYIPPGESLRDLIEQSQSSGSGSGLPLLVQRTIAKQIQMVKQIGKGRYGEVWMGKWRGEKVAVKVFFTTEEASWFRETEIYQTVLMRHENILGFIAADIKGTGSWTQLYLITDYHENGSLYDYLKSTTLDAKSMLKLAYSSVSGLCHLHTEIFSTQGKPAIAHRDLKSKNILVKKNGTCCIADLGLAVKFISDTNEVDIPPNTRVGTKRYMPPEVLDESLNRNHFQSYIMADMYSFGLILWEVARRCVSGGIVEEYQLPYHDLVPSDPSYEDMREIVCIKKLRPSFPNRWSSDECLRQMGKLMTECWAHNPASRLTALRVKKTLAKMSESQDIKL

SEQ ID NO: 880152 - protein, 107 aa, Homo sapiens
VTKLVTTQGNSSVKFLPLTKSSSPCTVNLIVTEYRRMGKLGFACSRADKPVQTGIPVIGWVTAKEGTSFSFLPPPSLNNSTGMSVRVPTYYFCCLYNPDEAVVRIVQ

SEQ ID NO: 880153 - protein, 81 aa, Homo sapiens
VTKLVTTQGNSSVKFLPLTKSSSPCTVNLIVTEYRRMGKLGFACSRADKPVQTGIPVIGWVTAKEDPPGHIPISPGHPKQV

SEQ ID NO: 880154 - protein, 128 aa, Homo sapiens
MRVARRTRNVCRCPRAAGPGVPEPRAAPLPLLAMAPPPACRSPMSPPPPLLLLLLLSLALLGARARAEPAGSAVPAQSRPCVDCHAFEFMQRALQDLRKTACSLDARTETLLLQAERRALCACWPAGH

SEQ ID NO: 880155 - protein, 164 aa, Homo sapiens
MRVARRTRNVCRCPRAAGPGVPEPRLRAVVRASEWAFSRYGARTRGSLGPETGGLESGNRRAAPLPLLAMAPPPACRSPMSPPPPLLLLLLLSLALLGARARAEPAGSAVPAQSRPCVDCHAFEFMQRALQDLRKTACSLDARTETLLLQAERRALCACWPAGH

SEQ ID NO: 880156 - protein, 256 aa, Homo sapiens
  misc_feature (5)..(5): Xaa can be any naturally occurring amino acid
  misc_feature (29)..(29): Xaa can be any naturally occurring amino acid
  misc_feature (36)..(36): Xaa can be any naturally occurring amino acid
  misc_feature (45)..(45): Xaa can be any naturally occurring amino acid
  misc_feature (60)..(60): Xaa can be any naturally occurring amino acid
  misc_feature (95)..(95): Xaa can be any naturally occurring amino acid
  misc_feature (111)..(111): Xaa can be any naturally occurring amino acid
  misc_feature (118)..(118): Xaa can be any naturally occurring amino acid
  misc_feature (154)..(154): Xaa can be any naturally occurring amino acid
  misc_feature (169)..(169): Xaa can be any naturally occurring amino acid
KLLEXTQQNMNEFYNLLQPFIKTCTKNAXSAGKNWXFRNAKSPPXCELMAGHLRYRFTAXGAHFVLLLHLIYLFNYVLHHCLRMQARGLLAALQXVVVPFYCSCFLAVEVXMLQLFAXLLLLWEKYGYFVYSFILLLQSPALGLGQFQATLFYXYSSVVQPVLLAFLLXIQTLKTLHEEFVTSLILALLGARARAEPAGSAVPAQSRPCVDCHAFEFMQRALQDLRKTACSLDARTETLLLQAERRALCACWPAGH

SEQ ID NO: 880157 - protein, 128 aa, Homo sapiens; identical to SEQ ID NO: 880154

SEQ ID NO: 880158 - protein, 102 aa, Homo sapiens
MGQKDLNSSFQPWTFPLTEPTQMRRNEKTNAGNMTKQGFSTLPQNHTSLPAMNPNQEEIPDLPEKEFRRSAIKLIREGPEKGEAQCKEIQNMIQEVKGEIFK

SEQ ID NO: 880159 - protein, 69 aa, Homo sapiens
LIQRSGRDTYADDESRTKSKQADRDPEHEFEITFVKYEHRDTSENSCSYLKLQIWAMFDKVNGTEIMMH

SEQ ID NO: 880160 - protein, 96 aa, Homo sapiens
MNKRLGSLVDEFKELVYPPDYNPEGKVTKRKHNNEGSGSKRPKVEYGEEKLKTHISKVMLGKFTVPMLKEACRVDGLKSVLKKQDLLKALTTHFQD

SEQ ID NO: 880161 - protein, 82 aa, Homo sapiens
PVQKSEELNRKPSLPYPSQNRTPEGPAIGLANPPPFLTGKRNPGRGLCLSSPAEPEGPTSLKQLLPKIHMTQAAVSPETWDL

SEQ ID NO: 880162 - protein, 69 aa, Homo sapiens
DAMTTSVCWGPGRLPVRIQGGSSVYPIPIVRCGLGSPEIAWPGSLTTQTPSSCMASPSAPPRLNSQTSE

SEQ ID NO: 880163 - protein, 72 aa, Homo sapiens
RDRPASGERGGGGNEAWVDLGVESKAYRSVLLELGLHWDSPRAGSWAGFDLSSSPSIPSACHDARNITVLHK

SEQ ID NO: 880164 - protein, 895 aa, Homo sapiens
LDGLAGAMAGAAAESGRELWTFAGSRDPSAPRLAYGYGPGSLRELRAREFSRLAGTVYLDHAGATLFSQSQLESFTSDLMENTYGNPHSQNISSKLTHDTVEQVRYRILAHFHTTAEDYTVIFTAGSTAALKLVAEAFPWVSQGPESSGSRFCYLTDSHTSVVGMRNVTMAINVISIPVRPEDLWSAEERGASASNPDCQLPHLFCYPAQSNFSGVRYPLSWIEEVKSGRLRPVSTPGKWFVLLDAASYVSTSPLDLSAHQADFVPISFYKIFGFPTGLGALLVHNRAAPLLRKTYFGGGTASAYLAGEDFYIPRQSVAQRFEDGTISFLDVIALKHGFDTLERLTGGMENIKQHTFTLAQYTYMALSSLQYPNGAPVVRIYSDSEFSSPEVQGPIINFNVLDDKGNIIGYSQVDKMASLYNIHLRTGCFCNTGACQRHLGISNEMVRKHFQAGHVCGDNMDLIDGQPTGSVRISFGYMSTLDDVQAFLRFIIDTRLHSSGDWPVPQAHADTGETGAPSADSQADVIPAVMGRRSLSPQEDALTGSRVWNNSSTVNAVPVAPPVCDVARTQPTPSEKAAGVLEGALGPHVVTNLYLYPIKSCAAFEVTRWPVGNQGLLYDRSWMVVNHNGVCLSQKQEPRLCLIQPFIDLRQRIMVIKAKGMEPIEVPLEENSERTQIRQSRVCADRVSTYDCGEKISSWLSTFFGRPCNLIKQSSNSQRNAKKKHGKDQLPGTMATLSLVNEAQYLLINTSSILELHRQLNTSDENGKEELFSLKDLSLRFRANIIINGKRAFEEEKWDEISIGSLRFQVLGPCHRCQMICIDQQTGQRNQHVFQKLSESRETKVNFGMYLMHASLDLSSPCFLSVGSQVLPVLKENVEGHDLPASEKHQDVTS

SEQ ID NO: 880165 - protein, 895 aa, Homo sapiens; identical to SEQ ID NO: 880164

SEQ ID NO: 880166 - protein, 352 aa, Homo sapiens
YRRPRGPNSSTVNAVPVAPPVCDVARTQPTPSEKAAGVLEGALGPHVVTNLYLYPIKSCAAFEVTRWPVGNQGLLYDRSWMVVNHNGVCLSQKQEPRLCLIQPFIDLRQRIMVIKAKGMEPIEVPLEENSERTQIRQSRVCADRVSTYDCGEKISSWLSTFFGRPCNLIKQSSNSQRNAKKKHGKDQLPGTMATLSLVNEAQYLLINTSSILELHRQLNTSDENGKEELFSLKDLSLRFRANIIINGKRAFEEEKWDEISIGSLRFQVLGPCHRCQMICIDQQTGQRNQHVFQKLSESRETKVNFGMYLMHASLDLSSPCFLSVGSQVLPVLKENVEGHDLPASEKHQDVTS

SEQ ID NO: 880167 - protein, 868 aa, Homo sapiens
LDGLAGAMAGAAAESGRELWTFAGSRDPSAPRLAYGYGPGSLRELRAREFSRLAGTVYLDHAGATLFSQSQLESFTSDLMENTYGNPHSQNISSKLTHDTVEQVRYRILAHFHTTAEDYTVIFTAGSTAALKLVAEAFPWVSQGPESSGSRFCYLTDSHTSVVGMRNVTMAINVISIPVRPEDLWSAEERGASASNPDCQLPHLFCYPAQSNFSGVRYPLSWIEEVKSGRLRPVSTPGKWFVLLDAASYVSTSPLDLSAHQADFVPISFYKIFGFPTGLGALLVHNRAAPLLRKTYFGGGTASAYLAGEDFYIPRQSVAQRFEDGTISFLDVIALKHGFDTLERLTGGMENIKQHTFTLAQYTYMALSSLQYPNGAPVVRIYSDSEFSSPEVQGPIINFNVLDDKGNIIGYSQVDKMASLYNIHLRTGCFCNTGACQRHLGISNEMVRKHFQAGHVCGDNMDLIDGQPTGSVRISFGYMSTLDDVQAFLRFIIDTRLHSSGDWPVPQAHADTGETGAPSADSQADVIPAVMGRRSLSPQEDALTGSRVWNNSSTVNAVPVAPPVCDVARTQPTPSEKAAGVLEGALGPHVVTNLYLYPIKSCAAFEVTRWPVGNQGLLYDRSWMVVNHNGVCLSQKQEPRLCLIQPFIDLRQRIMVIKAKGMEPIEVPLEENSERTQIRQSRVCADRVSTYDCGEKISSWLSTFFGRPCNLIKQSSNSQRNAKKKHGKDQLPGTMATLSLVNEAQYLLINTSSILELHRQLNTSDENGKEELFSLKDLSLRFRANIIINGKRAFEEEKWDEISIGSLRFQVLGPCHRCQMICIDQQTGQRNQHVFQKLSESRETKVSVIAKYDTWFPILVLSIPELCS

SEQ ID NO: 880168 - protein, 818 aa, Homo sapiens
LDGLAGAMAGAAAESGRELWTFAGSRDPSAPRLAYGYGPGSLRELRAREFSRLAGTVYLDHAGATLFSQSQLESFTSDLMENTYGNPHSQNISSKLTHDTVEQVRYRILAHFHTTAEDYTVIFTAGSTAALKLVAEAFPWVSQGPESSGSRFCYLTDSHTSVVGMRNVTMAINVISIPVRPEDLWSAEERGASASNPDCQLPHLFCYPAQSNFSGVRYPLSWIEEVKSGRLRPVSTPGKWFVLLDAASYVSTSPLDLSAHQADFVPISFYKIFGFPTGLGALLVHNRAAPLLRKTYFGGGTASAYLAGEDFYIPRQSVAQRFEDGTISFLDVIALKHGFDTLERLTGGMENIKQHTFTLAQYTYMALSSLQYPNGAPVVRIYSDSEFSSPEVQGPIINFNVLDDKGNIIGYSQVDKMASLYNIHLRTGCFCNTGACQRHLGISNEMVRKHFQAGHVCGDNMDLIDGQPTGSVRISFGYMSTLDDVQAFLRFIIDTRLHSSGDWPVPQAHADTGETGAPSADSQADVIPAVMGRRSLSPQEDALTGSRVWNNSSTVNAVPVAPPVCDVARTQPTPSEKAAGVLEGALGPHVVTNLYLYPIKSCAAFEVTRWPVGNQGLLYDRSWMVVNHNGVCLSQKQEPRLCLIQPFIDLRQRIMVIKAKGMEPIEVPLEENSERTQIRQSRVCADRVSTYDCGEKISSWLSTFFGRPCNLIKQSSNSQRNAKKKHGKDQLPGTMATLSLVNEAQYLLINTSSILELHRQLNTSDENGKEELFSLKDLSLRFRANIIINGKRAFEEEKWDEISIGSLRFQFWAHRGSL

SEQ ID NO: 880169 - protein, 742 aa, Homo sapiens
LDGLAGAMAGAAAESGRELWTFAGSRDPSAPRLAYGYGPGSLRELRAREFSRLAGTVYLDHAGATLFSQSQLESFTSDLMENTYGNPHSQNISSKLTHDTVEQVRYRILAHFHTTAEDYTVIFTAGSTAALKLVAEAFPWVSQGPESSGSRFCYLTDSHTSVVGMRNVTMAINVISIPVRPEDLWSAEERGASASNPDCQLPHLFCYPAQSNFSGVRYPLSWIEEVKSGRLRPVSTPGKWFVLLDAASYVSTSPLDLSAHQADFVPISFYKIFGFPTGLGALLVHNRAAPLLRKTYFGGGTASAYLAGEDFYIPRQSVAQRFEDGTISFLDVIALKHGFDTLERLTGGMENIKQHTFTLAQYTYMALSSLQYPNGAPVVRIYSDSEFSSPEVQGPIINFNVLDDKGNIIGYSQVDKMASLYNIHLRTGCFCNTGACQRHLGISNEMVRKHFQAGHVCGDNMDLIDGQPTGSVRISFGYMSTLDDVQAFLRFIIDTRLHSSGDWPVPQAHADTGETGAPSADSQADVIPAVMGRRSLSPQEDALTGSRVWNNSSTVNAVPVAPPVCDVARTQPTPSEKAAGVLEGALGPHVVTNLYLYPIKSCAAFEVTRWPVGNQGLLYDRSWMVVNHNGVCLSQKQEPRLCLIQPFIDLRQRIMVIKAKGMEPIEVPLEENSERTQIRQSRVCADRVSTYDCGEKISSWLSTFFGRPCNLIKQSSNSQRNAKKKHGKDQLPGTMDLKDGYR

SEQ ID NO: 880170 - protein, 101 aa, Homo sapiens
FQAAEPVPWLGSVGLGASRSKSPLGSARNPWGRLSSGCPPSLESRCHWGRGGARSSDFCFGKFLQAHPPPALGPRAKNFRNPGHKNASVCGQGLKARGVFI

SEQ ID NO: 880171 - protein, 116 aa, Homo sapiens
RVSLECNGMNLASLKPLPASASHVAGITGAHHHAQLIFVFLVETGFHHIGRAGLKLLTSDDPPVSASQSAGITGMSHRAWPLLKYFSALQTLNILQKNKNKNLIKTYFISLHVKIF

SEQ ID NO: 880172 - protein, 136 aa, Homo sapiens
MTKEKRRLLKTPPCSPMSLVSQDTKKLQETREFSGWGCPWMKHRTNWSPQGRRPATQHHRSRRLPFAGSPPLLARDAPPRFAAPPARESGGGRPARRHSVPCLPEAAAQRRGAAGTHPVLAFPVLRTSRPSLGSAG

SEQ ID NO: 880173 - protein, 57 aa, Homo sapiens
MTGLFYGPSGAQTRVQALTLPQSRGASTYEDAKLRSSPCGVSANWASNSPINLDINT

SEQ ID NO: 880174 - protein, 145 aa, Homo sapiens
MRSLRLREAEATCSEPHSKPTTLNLQITNSALCPDSVIIDGQHRHLGSTEAQSGRDWLKTMASPGLTVSDAVMDGFLEEVVPGLWEVGVSILVSGSICSRWFPWGPQKQVFALTALQAESFSAWPFLPLFPGTCCSPGAEYPTYL

SEQ ID NO: 880175 - protein, 169 aa, Homo sapiens
RGQGWSPGTKKGRGSARPEEWEEMGPGCRVPRGLGQGPRCRRKMREFGFGDLVHPGPVLPPLPPQRRASCIPFLWPEGSSVHPSQALASSHSPALGPIRLGRMGEPVVAPGRGKGGRLGKPLLGRTQYSGSSLSGKERICVTRSYRGTLRGLRGRAWSPPRGKEKFFES

SEQ ID NO: 880176 - protein, 85 aa, Homo sapiens
QSPRQQGTERLAQQGLSGPTEQGDRAQERSCCLHKGRWSQGISVHGILAVPTVSWLNLTRTEASEAQVASHLKGEVLITKGLKAA

SEQ ID NO: 880177 - protein, 112 aa, Homo sapiens
MHCEVPADGDFAAQSHLNQQLFYDGCKYTHSLTLANNMAENSKSRPHACMCAKHLHKAHKVREIRGCMLPLRFFTVENIRHKGNSLLIYRGLLSTMHAYNINILFNLCAVDP

SEQ ID NO: 880178 - protein, 193 aa, Homo sapiens [sequence omitted]

SEQ ID NO: 880179 - protein, 107 aa, Homo sapiens
MGSWVQLITSVGTSGLFLGVRVREEGAGMRCSKTIQAGQWLDSSKGPLGPSPPPVPTAGYSSSFCVHYVNLLPGVLVLSVTSQYPHLSMALCQLAAHDWPRLSCVCV

SEQ ID NO: 880180 - protein, 193 aa, Homo sapiens [sequence omitted]

SEQ ID NO: 880181 - protein, 127 aa, Homo sapiens [sequence omitted]

SEQ ID NO: 880182 - protein, 118 aa, Homo sapiens
MKSNLTLLTCLTLHGGEGWKGAAVCFETVEQFCSLRKWHVTYLTKDSGLCQQQEKLYTKFLVCIREHQMKKLRKPTGWKIPSPKGTWLLSYYQQGVLGASEAGDKPNKPKKHRKDSEK

SEQ ID NO: 880183 - protein, 199 aa, Homo sapiens
MACNIPNQRQRTLSTTGEALYEILGLHKGASNEEIKKTYRKLALKHHPDKNPDDPAATEKFKEINNAHAILTDISKRSIYDKYGSLGLYVAEQFGDENVNTYFMLSSWWAKALFVIVGLLTGCYFCCCLCCCCNCCCGHCRPESSVPEEDFYVSPEDLEEQIKSDMEKDVDFPVFLQPTNANEKTQLIKEGSRSYCTDS

SEQ ID NO: 880184 - protein, 199 aa, Homo sapiens; identical to SEQ ID NO: 880183

SEQ ID NO: 880185 - protein, 77 aa, Homo sapiens
HPETELALMLNWHLHKGMTAPDELAIQALELSLMESVCNTAGVVIDGYPVTKHQMNLLEARSIIPMVIFELSVPSKE

SEQ ID NO: 880186 - protein, 310 aa, Homo sapiens
MSLTNTKTGFSVKDILDLPDTNDEEGSVAEGPEEENEGPEPAKRAGPLGQGALDAVQSLPLKNPFYDSSDNPYTRWLASTEGLQYSLHGLAAGAPPQDSSSKSPEPSADESPDNDKETPGGGGDAGKKRKRRVLFSKAQTYELERRFRQQRYLSAPEREHLASLIRLTPTQVKIWFQNHRYKMKRARAEKGMEVTPLPSPRRVAVPVLVRDGKPCHALKAQDLAAATFQAGIPFSAYSAQSLQHMQYNAQYSSASTPQYPTAHPPALPMPLLLNLGRGLNSTPCLQNVCAASLLCLSPGGPNRPSVNVVT

SEQ ID NO: 880187 - protein, 273 aa, Homo sapiens
MSLTNTKTGFSVKDILDLPDTNDEEGSVAEGPEEENEGPEPAKRAGPLGQGALDAVQSLPLKNPFYDSSDNPYTRWLASTEGLQYSLHGLAAGAPPQDSSSKSPEPSADESPDNDKETPGGGGDAGKKRKRRVLFSKAQTYELERRFRQQRYLSAPEREHLASLIRLTPTQVKIWFQNHRYKMKRARAEKGMEVTPLPSPRRVAVPVLVRDGKPCHALKAQDLAAATFQAGIPFSAYSAQSLQHMQYNAQYSSASTPQYPTAHPLVQAQQWTW

SEQ ID NO: 880188 - protein, 523 aa, Homo sapiens
LTARYEAPVLNRKSPRVTGCDAQAFGKEMQLRSRGRGRLPLTKARAPVSQEDALNLMNENIDILETAIKQAAEQGARIIVTPEDALYGWKFTRETVFPYLEDIPDPQVNWIPCQDPHRFGHTPVQARLSCLAKDNSIYVLANLGDKKPCNSRDSTCPPNGYFQYNTNVVYNTEGKLVARYHKYHLYSEPQFNVPEKPELVTFNTAFGRFGIFTCFDIFFYDPGVTLVKDFHVDTILFPTAWMNVLPLLTAIEFHSAWAMGMGVNLLVANTHHVSLNMTGSGIYAPNGPKVYHYDMKTELGKLLLSEVDSHPLSSLAYPTAVNWNAYATTIKPFPVQKNTFRGFISRDGFNFTELFENAGNLTVCQKELCCHLSYRMLQKEENEVYVLGAFTGLHGRRRREYWQVCTMLKCKTTNLTTCGRPVETASTRFEMFSLSGTFGTEYVFPEVLLTEIHLSPGKFEVLKDGRLVNKNGSSGPILTVSLFGRWYTKDSLYSSCGTSNSAITYLLIFILLMIIALQNIVML

SEQ ID NO: 880189 - protein, 282 aa, Homo sapiens [sequence omitted]

SEQ ID NO: 880190 - protein, 520 aa, Homo sapiens
MVTSSFPISVAVFALITLQVGTQDSFIAAVYEHAVILPNKTETPVSQEDALNLMNENIDILETAIKQAAEQGARIIVTPEDALYGWKFTRETVFPYLEDIPDPQVNWIPCQDPHRFGHTPVQARLSCLAKDNSIYVLANLGDKKPCNSRDSTCPPNGYFQYNTNVVYNTEGKLVARYHKYHLYSEPQFNVPEKPELVTFNTAFGRFGIFTCFDIFFYDPGVTLVKDFHVDTILFPTAWMNVLPLLTAIEFHSAWAMGMGVNLLVANTHHVSLNMTGSGIYAPNGPKVYHYDMKTELGKLLLSEVDSHPLSSLAYPTAVNWNAYATTIKPFPVQKNTFRGFISRDGFNFTELFENAGNLTVCQKELCCHLSYRMLQKEENEVYVLGAFTGLHGRRRREYWQVCTMLKCKTTNLTTCGRPVETASTRFEMFSLSGTFGTEYVFPEVLLTEIHLSPGKFEVLKDGRLVNKNGSSGPILTVSLFGRWYTKDSLYSSCGTSNSAITYLLIFILLMIIALQNIVML

SEQ ID NO: 880191 - protein, 278 aa, Homo sapiens
MVTSSFPISVAVFALITLQVGTQDSFIAAVYEHAVILPNKTETPVSQEDALNLMNENIDILETAIKQAAEQGARIIVTPEDALYGWKFTRETVFPYLEDIPDPQVNWIPCQDPHRFGHTPVQARLSCLAKDNSIYVLANLGDKKPCNSRDSTCPPNGYFQYNTNVVYNTEGKLVARYHKYHLYSEPQFNVPEKPELVTFNTAFGRFGIFTCFDIFFYDPGVTLVKDFHVDTILFPTAWMNVLPLLTAIEFHSAWAMGMGVNLLVANTHHVSLNMTGNS

SEQ ID NO: 880192 - protein, 579 aa, Homo sapiens
MSALRPLLLLLLPLCPGPGPGPGSEAKVTRSCAETRQVLGARGYSLNLIPPALISGEHLRVCPQEYTCCSSETEQRLIRETEATFRGLVEDSGSFLVHTLAARHRKFDEFFLEMLSVAQHSLTQLFSHSYGRLYAQHALIFNGLFSRLRDFYGESGEGLDDTLADFWAQLLERVFPLLHPQYSFPPDYLLCLSRLASSTDGSLQPFGDSPRRLRLQITRTLVAARAFVQGLETGRNVVSEALKVPVSEGCSQALMRLIGCPLCRGVPSLMPCQGFCLNVVRGCLSSRGLEPDWGNYLDGLLILADKLQGPFSFELTAESIGVKISEGLMYLQENSAKVSAQVFQECGPPDPVPARNRRAPPPREEAGRLWSMVTEEERPTTAAGTNLHRLVWELRERLARMRGFWARLSLTVCGDSRMAADASLEAAPCWTGAGRGRYLPPVVGGSPAEQVNNPELKVDASGPDVPTRRRRLQLRAATARMKTAALGHDLDGQDADEDASGSGGGQQYADDWMAGAVAPPARPPRPPYPPRRDGSGGKGGGGSARYNQGRSRSGGASIGFHTQTILILSLSALALLGPR

SEQ ID NO: 880193 - protein, 321 aa, Homo sapiens
MSALRPLLLLLLPLCPGPGPGPGSEAKVTRSCAETRQVLGARGYSLNLIPPALISGEHLRVCPQEYTCCSSETEQRLIRETEATFRGLVEDSGSFLVHTLAARHRKFDEFFLEMLSVAQHSLTQLFSHSYGRLYAQHALIFNGLFSRLRDFYGESGEGLDDTLADFWAQLLERVFPLLHPQYSFPPDYLLCLSRLASSTDGSLQPFGDSPRRLRLQITRTLVAARAFVQGLETGRNVVSEALKVPVSEGCSQALMRLIGCPLCRGVPSLMPCQGFCLNVVRGCLSSRGLEPDWGNYLGEGIQESLEPGMVAHTCNHSTLRG

SEQ ID NO: 880194 - protein, 364 aa, Homo sapiens [sequence omitted]

SEQ ID NO: 880195 - protein, 98 aa, Homo sapiens
SQAESSHSVCGGHSPTLCPQVPVSEGCSQALMRLIGCPLCRGVPSLMPCQGFCLNVVRGCLSSRGLEPDWGNYLGEGIQESLEPGMVAHTCNHSTLRG

SEQ ID NO: 880196 - protein, 135 aa, Homo sapiens
MKTRALFRSAHRVHPLFCPSPPSVRSNKTYPISEEARPVPKSHWGARRPSSIYHQITRKTKTLHSCGITTLDSNTIAQYWYFRAWMFFQSSSRNRRSTKLSGKGCCSYKTLCHFTSLVFVTGWVHIILSFKLRLV

SEQ ID NO: 880197 - protein, 118 aa, Homo sapiens
VLIAVLVQSSIKNSHFETESPCPLYLSRPSLSESLLSSSALCCRKVTLGISQSTLSADFCMGSASGRGSTGKILVARKKGSPSVGQAWWLMHVIPALWESKAGGSPEVRSSRPAWLTW

SEQ ID NO: 880198 - protein, 139 aa, Homo sapiens
LGSKLSLDELTKIWKIQSGQSSTVIENIHTIIAAAAVKFNSDQLNHLFVLIQKSWETESDRVRQKLLSLIGRIGREARFETTSGKVLDVLWELAHLPTLPSSLIQQALEEHLTILSDAYAVKEAIKRSYIIKCIEDIKR

SEQ ID NO: 880199 - protein, 183 aa, Homo sapiens
AAARAPALGYKMAALSGGGGGGAEPGQALFNGDMEPEAGAGAGAAASSAADPAIPEEVWNIKQMIKLTQEHIEALLDKFGGEHNPPSIYLEAYEEYTSKLDALQQREQQLLESLGNGTDFSVSSSASMDTVTSSSSSSLSVLPSSLSVFQNPTDVARSNPKSPQKPIVRVFLPNKQRTVVSQF

SEQ ID NO: 880200 - protein, 215 aa, Homo sapiens
MRNEVVLISSKERCSLAPGNSLGASTTPWLPAYTAGFSGGTGPAGTASPRVRTGERRGQAQDTATSHPLQSTEITQRRAWAMWPLQEPHSARVRIAQGRAGHLPRQASQRRLVTRSQAGNTQPWWGLRTEEAQEHRGERWRDTGRARSVDTARTHHRGWRPAPGHVQQEQAATLGAPGGEARCQRGCPCSCESGAAGHECWTEAPTLCCPHHAVP

SEQ ID NO: 880201 - protein, 179 aa, Homo sapiens
MALCLCSRPLSPDTPPFQTLCIAGLPQTSAAWCMQGAGDQVSPQQDVPALQTPGAWTQPELITEAGVQPRVTCSRNKQPLWGHQVERQDAKEGARVLAKAGLLATSAGQRPPRSAAPITPFRDCHAESADRKGGSSGTAASACLGRQGGLPGSLEGGATISALVAFLLLLNFLKLINCL

SEQ ID NO: 880202 - protein, 215 aa, Homo sapiens; identical to SEQ ID NO: 880200

SEQ ID NO: 880203 - protein, 107 aa, Homo sapiens
MCPWELKQVMAKHPRNTPSGPVSVASMPSSSCVSTYSFMPTSPDTAILDRKAGALSPQVHPFPSWGSRGPKRGRFPSQLHSSSVPKNWPSQQSGSPEKLGGKWEKIM

SEQ ID NO: 880204 - protein, 120 aa, Homo sapiens
THDFNSFNFFSNVPWNKAHTFFKESLAHNITKFETLQLVYIIRIQFYIDFNCLSSFLPVSFNFSTVHKSCPAKDWKVHKGKCYWIAETKKSWNKSQNDCAINNSYLMVIQDITAMVRFNI

SEQ ID NO: 880205 - protein, 30 aa, Homo sapiens
RVVKRKVKSAGTGLRSDCSILKSPCPYPHS

SEQ ID NO: 880206 - protein, 130 aa, Homo sapiens
MSCPPSSAQPPPPISYEEEFTTTWTTTTCVTSRPEGSAQQRPDAAGAGVRTYRLAPGRHECRVAQKLLNGRRKCQPAPAAALAAHSPQLSLGPSPSLSSGEFVPIRNLPPGSGTMLVACPFPADKKERYR

SEQ ID NO: 880207 - protein, 111 aa, Homo sapiens
MADWARAQSPGAVEEILDRENKRMADSLASKVTRLKSLALDIDRDAEDQNRYLDGMDSDFTSMTSLLTGSVKRFSTMARSGQDNRKLLCGMAVGLIVAFFILSYFLSRART

SEQ ID NO: 880208 - protein, 37 aa, Homo sapiens
LGQQTDCFPLVGVGSLSSLITRTLCGCGVLLKRRVNP

SEQ ID NO: 880209 - protein, 86 aa, Homo sapiens
VGMTTLVMEETSVVVVALVAAMVVVDMVAVGMAIMDLVMMEAILEVVEATMTLAITTVFKFWTHEGRIGGRTSGPYGGGDQYLAKP

SEQ ID NO: 880210 - protein, 74 aa, Homo sapiens
LSQRGKVASQADQSKANSKSLPLHGKNTQIGAGLVRKDTGSVSVAILNRSQAKSSILGGTDYRGPWLPLNRGSC

SEQ ID NO: 880211 - protein, 105 aa, Homo sapiens
APPAGVFSEAFGPAEEPLPAGSLLRGVRVRPRWASPWDRQPPSGRASPDAPRSPCPAPTVRITPSLSAGAPGPPGLDPAHLVPVSPTPYSSTVPSPGTECVLSTQ

SEQ ID NO: 880212 - protein, 105 aa, Homo sapiens [sequence omitted]

SEQ ID NO: 880213 - protein, 106 aa, Homo sapiens
MPQSVKHEPPLKEHLLSQDLWACCPFYLEYPSFKTQSQKQKAFADRRGGEGCGRAWGAELVATSSGRSQAKFPWCGTWHSVIVPVSLWSGPVPIGPITLGVIQICK

SEQ ID NO: 880214 - protein, 115 aa, Homo sapiens
LITYVHQSAGMHIGITNHTLAITFFTQSSDSNTSLLAAKDQIGMTFSHSSQRSQPPDASGQFLFILQCICYSCLYKRKLKRTLGFYFISSPCIPFMCSITTVDVKQFVSTRILTD

SEQ ID NO: 880215 - protein, 157 aa, Homo sapiens
TADSAGASGVQRTKKPHRPGWGRGRSRKEPGRGGEEGDEVTAGPPHPVPGVGDPSRSARPPAGSAPQVEAPARTTRSQESGPRCGPGVPEVRVARVPGAQRGRGRLAHTAGPTSPGPTHFPRPPALDSRGQRRGWPGLGPRPAVQSLGTSTQLRQAP

SEQ ID NO: 880216 - protein, 136 aa, Homo sapiens; identical to SEQ ID NO: 741065

SEQ ID NO: 880217 - protein, 166 aa, Homo sapiens
MSSKDFFACGHSGHWARGCPRGGAGGRRGGGHGRGSQCGSTTLSYTCYCCGESGRNAKNCVLLGNICYNCGRSGHIAKDCKDPKRERRQHCYTCGRLGHLARDCDRQKEQKCYSCGKLGHIQKDCAQVKCYRCGEIGHVAINCSKARPGQLLPLRQIPTSSQGMSQ

SEQ ID NO: 880218 - protein, 86 aa, Homo sapiens
AIIYNLWFGYDVKRAVEEPRLHNQLLPNVTTVERNIDQAVTAALETRHHHTQIASTFIAVVQAIVHTAGGWAAASDSRKGGEPAGY

SEQ ID NO: 880219 - protein, 163 aa, Homo sapiens
MGIQRRSGPLLTGLSVGLLLLFSWVTLVQPTSLSALVHHPHLCQTTRDVHGRHYPGFFCPRLSDSPEEAYCCHLQAAGGSCCTRAEFEALYQVNLSALPPPPILRGPGPLLVLGLYNLLVVTLMTVDLVHFCCGRGRSLGWSHRRPPSGSSAASSLQVSAGTA

SEQ ID NO: 880220 - protein, 114 aa, Homo sapiens
GPCPAQHTGVALRQHLGCCTHGASQPEGLPAALETPAVTSPGPSPSPSSSLLGIKTLKELLLPAREAVARKKGCCKKRKKGCCQHCISVKKLPRKIYGCMLYAPNSKLYWMNGL

SEQ ID NO: 880221 - protein, 738 aa, Homo sapiens
NLSKHSSPSVPKAKMLRTSTPNLCGGLHCRAPWLSSGILCLCLIFLLGQVGLLQGHPQCLDYGPPFQPPLHLEFCSDYESFGCCDQHKDRRIAARYWDIMEYFDLKRHELCGDYIKDILCQECSPYAAHLYDAENTQTPLRNLPGLCSDYCSAFHSNCHSAISLLTNDRGLQESHGRDGTRFCHLLDLPDKDYCFPNVLRNDYLNRHLGMVAQDPQGCLQLCLSEVANGLRNPVSMVHAGDGTHRFFVAEQVGVVWVYLPDGSRLEQPFLDLKNIVLTTPWIGDERGFLGLAFHPKFRHNRKFYIYYSCLDKKKVEKIRISEMKVSRADPNKADLKSERVILEIEEPASNHNGGQLLFGLDGYMYIFTGDGGQAGDPFGLFGNAQNKSSLLGKVLRIDVNRAGSHGKRYRVPSDNPFVSEPGAHPAIYAYGIRNMWRCAVDRGDPITRQGRGRIFCGDVGQNRFEEVDLILKGGNYGWRAKEGFACYDKKLCHNASLDDVLPIYAYGHAVGKSVTGGYVYRGCESPNLNGLYIFGDFMSGRLMALQEDRKNKKWKKQDLCLGSTTSCAFPGLISTHSKFIISFAEDEAGELYFLATSYPSAYAPRGSIYKFVDPSRRAPPGKCKYKPVPVRTKSKRIPFRPLAKTVLDLLKEQSEKAARKSSSATLASGPAQGLSEKGSSKKLASPTSSKNTLRGPGTKKKARVGPHVRQGKRRKSLKSHSGRMRPSAEQKRAGRSLP

SEQ ID NO: 880222 - protein, 105 aa, Homo sapiens
VPLRKCAYREAELPGDSSKLLHLSIIHFLLLLGLCRNEQRQPTCEAGSKMESAMLDFSHCHHLCKGSFISGSPVFQLGPQVRHLSRAPPAALKTHSLKQSFSCGP

SEQ ID NO: 880223 - protein, 139 aa, Homo sapiens
LTAPTASTASSPSPQRPHRVHSVLTAPTAPSPRPQRPHRVHSVLTALTAPSPRPQRPHGPDSVLTVPTASSPSPQRPHRVHSVLTAPTASSRSPQRPHRPHSVLTASTAPSPPPQRPQCPQRSHRPHSVLIVPNVLIVT

SEQ ID NO: 880224 - protein, 129 aa, Homo sapiens
STASFLKSARPRTHRKEPIPDTRSDGSTEKKDSKDSELGVETEATDRRERRKIWGNSHWEQRLGRDYVQKNAWTSGTSDHLPIFRQKLSRSRKMEKSKVPFSGHLEPLLSLYWGQAVLQKKIKHLGFKS

SEQ ID NO: 880225 - protein, 95 aa, Homo sapiens
GLSPGAESVAGARGGREGVTSTAPASSSHTAPSPGHSGSYGGRDQGVQPGLLCLTGEGLLSFSRAAALLLKALLLLLLGVFACLQEVLESKKRSL

SEQ ID NO: 880226 - protein, 1369 aa, Homo sapiens
PRQGKSTLLEILQTGRAPQVVHGEATIRTTKWELQRPAGSRAKVESVEFNVWDIGGPASMATVNQCFFTDKALYVVVWNLALGEEAVANLQFWLLNIEAKAPNAVVLVVGTHLDLIEAKFRVERIATLRAYVLALCRSPSGSRATGFPDITFKHLHEISCKSLEGQEGLRQLIFHVTCSMKDVGSTIGCQRLAGRLIPRSYLSLQEAVLAEQQRRSRDDDVQYLTDRQLEQLVEQTPDNDIKDYEDLQSAISFLIETGTLLHFPDTSHGLRNLYFLDPIWLSECLQRIFNIKGSRSVAKNGVIRAEDLRMLLVGTGFTQQTEEQYFQFLAKFEIALPVANDSYLLPHLLPSKPGLDTHGMRHPTANTIQRVFKMSFVPVGFWQRFIARMLISLAEMDLQLFENKKNTKSRNRKVTIYSFTGNQRNRCSTFRVKRNQTIYWQEGLLVTFDGGYLSVESSDVNWKKKKSGGMKIVCQSEVRDFSAMAFITDHVNSLIDQWFPALTATESDGTPLMEQYVPCPVCETAWAQHTDPSEKSEDVQYFDMEDCVLTAIERDFISCPRHPDLPVPLQELVPELFMTDFPARLFLENSKLEHSEDEGSVLGQGGSGTVIYRARYQGQPVAVKRFHIKKFKNFANVPADTMLRHLRATDAMKNFSEFRQEASMLHALQHPCIVALIGISIHPLCFALELAPLSSLNTVLSENARDSSFIPLGHMLTQKIAYQIASGLAYLHKKNIIFCDLKSDNILVWSLDVKEHINIKLSDYGISRQSFHEGALGVEGTPGYQAPEIRPRIVYDEKVDMFSYGMVLYELLSGQRPALGHHQLQIAKKLSKGIRPVLGQPEEVQFRRLQALMMECWDTKPEKRPLALSVVSQMKDPTFATFMYELCCGKQTAFFSSQGQEYTVVFWDGKEESRNYTVVNTEKGLMEVQRMCCPGMKVSCQLQVQRSLWTATEDQKIYIYTLKGMCPLNTPQQALDTPAVVTCFLAVPVIKKNSYLVLAGLADGLVAVFPVVRGTPKDSCSYLCSHTANRSKFSIADEDARQNPYPVKAMEVVNSGSEVWYSNGPGLLVIDCASLEICRRLEPYMAPSMVTSVVCSSEGRGEEVVWCLDDKANSLVMYHSTTYQLCARYFCGVPSPLRDMFPVRPLDTEPPAASHTANPKVPEGDSIADVSIMYSEELGTQILIHQESLTDYCSMSSYSSSPPRQAARSPSSLPSSPASSSSVPFSTDCEDSDMLHTPGAASDRSEHDLTPMDGETFSQHLQAVKILAVRDLIWVPRRGGDVIVIGLEKDSEAQRGRVIAVLKARELTPHGVLVDAAVVAKDTVVCTFENENTEWCLAVWRGWGAREFDIFYQSYEELGRLEACTRKRR

SEQ ID NO: 880227 - protein, 1337 aa, Homo sapiens
PRQGKSTLLEILQTGRAPQVVHGEATIRTTKWELQRPAGSRAKVESVEFNVWDIGGPASMATVNQCFFTDKALYVVVWNLALGEEAVANLQFWLLNIEAKAPNAVVLVVGTHLDLIEAKFRVERIATLRAYVLALCRSPSGSRATGFPDITFKHLHEISCKSLEGQEGLRQLIFHVTCSMKDVGSTIGCQRLAGRLIPRSYLSLQEAVLAEQQRRSRDDDVQYLTDRQLEQLVEQTPDNDIKDYEDLQSAISFLIETGTLLHFPDTSHGLRNLYFLDPIWLSECLQRIFNIKGSRSVAKNGVIRAEDLRMLLVGTGFTQQTEEQYFQFLAKFEIALPVANDSYLLPHLLPSKPGLDTHGMRHPTANTIQRVFKMSFVPVGFWQRFIARMLISLAEMDLQLFENKKNTKSRNRKVTIYSFTGNQRNRCSTFRVKRNQTIYWQEGLLVTFDGGYLSVESSDVNWKKKKSGGMKIVCQSEVRDFSAMAFITDHVNSLIDQWFPALTATESDGTPLMEQYVPCPVCETAWAQHTDPSEKSEDVQYFDMEDCVLTAIERDFISCPRHPDLPVPLQELVPELFMTDFPARLFLENSKLEHSEDEGSVLGQGGSGTVIYRARYQGQPVAVKRFHIKKFKNFANVPADTMLRHLRATDAMKNFSEFRQEASMLHALQHPCIVALIGISIHPLCFALELAPLSSLNTVLSENARDSSFIPLGHMLTQKIAYQIASGLAYLHKKNIIFCDLKSDNILVWSLDVKEHINIKLSDYGISRQSFHEGALGVEGTPGYQAPEIRPRIVYDEKVDMFSYGMVLYELLSGQRPALGHHQLQIAKKLSKGIRPVLGQPEEVQFRRLQALMMECWDTKPEKRPLALSVVSQMKDPTFATFMYELCCGKQTAFFSSQGQEYTVVFWDGKEESRNYTVVNTEKGLMEVQRMCCPGMKVSCQLQVQRSLWTATEDQKIYIYTLKGMCPLNTPQQALDTPAVVTCFLAVPVIKKNSYLVLAGLADGLVAVFPVVRGTPKDSCSYLCSHTANRSKFSIADEDARQNPYPVKAMEVVNSGSEVWYSNGPGLLVIDCASLEICRRLEPYMAPSMVTSVVCSSEGRGEEVVWCLDDKANSLVMYHSTTYQLCARYFCGVPSPLRDMFPVRPLDTEPPAASHTANPKVPEGDSIADVSIMYSEELGTQILIHQESLTDYCSMSSYSSSPPRQAARSPSSLPSSPASSSSVPFSTDCEDSDMLHTPGAASDRSEHDLTPMDGETFSQHLQAVKILAVRDLIWVPRRGGDVIVIGLEKDSEAQRGRVIAVLKARELTPHGIMPVSSVKVCWAGWPVRDMVYMAAVM

SEQ ID NO: 880228 - protein, 534 aa, Homo sapiens
PLTGFGASTRCTHKYHRELLRGCAPRSQCWFSLGNRLRAIFCFLFRLVCLFQRFYKEQKSINNPPERVNPCNFPRPIGDPQVQVHPHGNGLGNARHFPAWVSQWTCLPLQDQKIYIYTLKGMCPLNTPQQALDTPAVVTCFLAVPVIKKNSYLVLAGLADGLVAVFPVVRGTPKDSCSYLCSHTANRSKFSIADEDARQNPYPVKAMEVVNSGSEVWYSNGPGLLVIDCASLEICRRLEPYMAPSMVTSVVCSSEGRGEEVVWCLDDKANSLVMYHSTTYQLCARYFCGVPSPLRDMFPVRPLDTEPPAASHTANPKVPEGDSIADVSIMYSEELGTQILIHQESLTDYCSMSSYSSSPPRQAARSPSSLPSSPASSSSVPFSTDCEDSDMLHTPGAASDRSEHDLTPMDGETFSQHLQAVKILAVRDLIWVPRRGGDVIVIGLEKDSEAQRGRVIAVLKARELTPHGVLVDAAVVAKDTVVCTFENENTEWCLAVWRGWGAREFDIFYQSYEELGRLEACTRKRSLQHSASGL

SEQ ID NO: 880229 - protein, 77 aa, Homo sapiens
TYIPSTDHDPTNQSRMQQRHQPKPADSNKSDPLALTANKHKDSPTSAMTVYKCHGNNPEVSLYGSRNSPTPFLENSE

SEQ ID NO: 880230 - protein, 65 aa, Homo sapiens
MAGNFDSEERSSWYWGRLSRQEAVALLQGQRHGVFLVRDSSTSPGDYVLSVSENSRVSHYIINSS

SEQ ID NO: 880231 - protein, 572 aa, Homo sapiens
MSFQGKKSIPRITSDRLLIRGGRIVNDDQSFYADVHVEDGLIKQIGENLIVPGGIKTIDAHGLMVLPGGVDVHTRLQMPVLGMTPADDFCQGTKAALAGGTTMILDHVFPDTGVSLLAAYEQWRERADSAACCDYSLHVDITRWHESIKEELEALVKEKGVNSFLVFMAYKDRCQCSDSQMYEIFSIIRDLGALAQVHAENGDIVEEEQKRLLELGITGPEGHVLSHPEEVEAEAVYRAVTIAKQANCPLYVTKVMSKGAADAIAQAKRRGVVVFGEPITASLGTDGSHYWSKNWAKAAAFVTSPPVNPDPTTADHLTCLLSSGDLQVTGSAHCTFTTAQKAVGKDNFALIPEGTNGIEERMSMVWEKCVASGKMDENEFVAVTSTNAAKIFNFYPRKGRVAVGSDADLVIWNPKATKIISAKTHNLNVEYNIFEGVECRGAPAVVISQGRVALEDGKMFVTPGAGRFVPRKTFPDFVYKRIKARNRLAEIHGVPRGLYDGPVHEVMVPAKPGSGAPARASCPGKISVPPVRNLHQSGFSLSGSQADDHIARRTAQKIMAPPGGRSNITSLS

SEQ ID NO: 880232 - protein, 154 aa, Homo sapiens
EDCKEGGVCELGLSTPPGQPQIPEAGTGEAQSRPSPPAAHAQPLMPHLWPHSCPGSAPHALSLPPPPRQLAEIHGVPRGLYDGPVHEVMVPAKPGSGAPARASCPGKISVPPVRNLHQSGFSLSGSQADDHIARRTAQKIMAPPGGRSNITSLS

SEQ ID NO: 880233 - protein, 509 aa, Homo sapiens
MVLPGGVDVHTRLQMPVLGMTPADDFCQGTKAALAGGTTMILDHVFPDTGVSLLAAYEQWRERADSAACCDYSLHVDITRWHESIKEELEALVKEKGVNSFLVFMAYKDRCQCSDSQMYEIFSIIRDLGALAQVHAENGDIVEEEQKRLLELGITGPEGHVLSHPEEVEAEAVYRAVTIAKQANCPLYVTKVMSKGAADAIAQAKRRGVVVFGEPITASLGTDGSHYWSKNWAKAAAFVTSPPVNPDPTTADHLTCLLSSGDLQVTGSAHCTFTTAQKAVGKDNFALIPEGTNGIEERMSMVWEKCVASGKMDENEFVAVTSTNAAKIFNFYPRKGRVAVGSDADLVIWNPKATKIISAKTHNLNVEYNIFEGVECRGAPAVVISQGRVALEDGKMFVTPGAGRFVPRKTFPDFVYKRIKARNRLAEIHGVPRGLYDGPVHEVMVPAKPGSGAPARASCPGKISVPPVRNLHQSGFSLSGSQADDHIARRTAQKIMAPPGGRSNITSLS

SEQ ID NO: 880234 - protein, 105 aa, Homo sapiens [sequence omitted]

SEQ ID NO: 880235 - protein, 549 aa, Homo sapiens
MSFQGKKSIPRITSDRLLIRGGRIVNDDQSFYADVHVEDGLIKQIGENLIVPGGIKTIDAHGLMVLPGGVDVHTRLQMPVLGMTPADDFCQGTKAALAGGTTMILDHVFPDTGVSLLAAYEQWRERADSAACCDYSLHVDITRWHESIKEELEALVKEKGVNSFLVFMAYKDRCQCSDSQMYEIFSIIRDLGALAQVHAENGDIVEEVEAEAVYRAVTIAKQANCPLYVTKVMSKGAADAIAQAKRRGVVVFGEPITASLGTDGSHYWSKNWAKAAAFVTSPPVNPDPTTADHLTCLLSSGDLQVTGSAHCTFTTAQKAVGKDNFALIPEGTNGIEERMSMVWEKCVASGKMDENEFVAVTSTNAAKIFNFYPRKGRVAVGSDADLVIWNPKATKIISAKTHNLNVEYNIFEGVECRGAPAVVISQGRVALEDGKMFVTPGAGRFVPRKTFPDFVYKRIKARNRLAEIHGVPRGLYDGPVHEVMVPAKPGSGAPARASCPGKISVPPVRNLHQSGFSLSGSQADDHIARRTAQKIMAPPGGRSNITSLS

SEQ ID NO: 880236 - protein, 512 aa, Homo sapiens
MSFQGKKSIPRITSDRLLIRGGRIVNDDQSFYADVHVEDGLIKQIGENLIVPGGIKTIDAHGLMVLPGGVDVHTRLQMPVLGMTPADDFCQGTKAALAGGTTMILDHVFPDTGVSLLAAYEQWRERADSAACCDYSLHVDITRWHESIKEELEALVKEKGVNSFLVFMAYKDRCQCSDSQMYEIFSIIRDLGALAQVHAENGDIVEEEQKRLLELGITGPEGHVLSHPEEVEAEAVYRAVTIAKQANCPLYVTKVMSKGAADAIAQAKRRGVVVFGEPITASLGTDGSHYWSKNWAKAAAFVTSPPVNPDPTTADHLTCLLSSGDLQVTGSAHCTFTTAQKAVGKDNFALIPEGTNGIEERMSMVWEKCVASGKMDENEFVAVTSTNAAKIFNFYPRKGRVAVGSDADLVIWNPKATKIISAKTHNLLAEIHGVPRGLYDGPVHEVMVPAKPGSGAPARASCPGKISVPPVRNLHQSGFSLSGSQADDHIARRTAQKIMAPPGGRSNITSLS

SEQ ID NO: 880237 - protein, 829 aa, Homo sapiens
EQSPFTHLRNTFRLPAPQTHLQPCPAGFAHPLLVNAPDMSQPRPRYVVDRAAYSLTLFDDEFEKKDRTYPVGEKLRNAFRCSSAKIKAVVFGLLPVLSWLPKYKIKDYIIPDLLGGLSGGSIQVPQGMAFALLANLPAVNGLYSSFFPLLTYFFLGGVHQMVPGTFAVISILVGNICLQLAPESKFQVFNNATNESYVDTAAMEAERLHVSATLACLTAIIQMGLGFMQFGFVAIYLSESFIRGFMTAAGLQILISVLKYIFGLTIPSYTGPGSIVFTFIDICKNLPHTNIASLIFALISGAFLVLVKELNARYMHKIRFPIPTEMIVVVVATAISGGCKMPKKYHMQIVGEIQRGFPTPVSPVVSQWKDMIGTAFSLAIVSYVINLAMGRTLANKHGYDVDSNQEMIALGCSNFFGSFFKIHVICCALSVTLAVDGAGGKSQVASLCVSLVVMITMLVLGIYLYPLPKSVLGALIAVNLKNSLKQLTDPYYLWRKSKLDCCIWVVSFLSSFFLSLPYGVAVGVAFSVLVVVFQTQFRNGYALAQVMDTDIYVNPKTYNRAQDIQGIKIITYCSPLYFANSEIFRQKVIAKTGMDPQKVLLAKQKYLKKQEKRRMRPTQQRRSLFMKTKTVSLQELQQDFENAPPTDPNNNQTPANGTSVSYITFSPDSSSPAQSEPPASAEAPGEPSDMLASVPPFVTFHTLILDMSGVSFVDLMGIKALAKLSSTYGKIGVKVFLVNIHAQVYNDISHGGVFEDGSLECKHVFPSIHDAVLFAQANARDVTPGHNFQGAPGDAELSLYDSEEDIRSYWDLEQEMFGSMFHAETLTAL

SEQ ID NO: 880238 - protein, 374 aa, Homo sapiens
MLFKEKKEKRGSEVVLTENGLGYIQEDFLKEVVFSPGLLLTSLFSQCIWVVSFLSSFFLSLPYGVAVGVAFSVLVVVFQTQFRNGYALAQVMDTDIYVNPKTYNRAQDIQGIKIITYCSPLYFANSEIFRQKVIAKTGMDPQKVLLAKQKYLKKQEKRRMRPTQQRRSLFMKTKTVSLQELQQDFENAPPTDPNNNQTPANGTSVSYITFSPDSSSPAQSEPPASAEAPGEPSDMLASVPPFVTFHTLILDMSGVSFVDLMGIKALAKLSSTYGKIGVKVFLVNIHAQVYNDISHGGVFEDGSLECKHVFPSIHDAVLFAQANARDVTPGHNFQGAPGDAELSLYDSEEDIRSYWDLEQEMFGSMFHAETLTAL

SEQ ID NO: 880239 - protein, 839 aa, Homo sapiens
EQSPFTHLRNTFRLPAPQTHLQPCPAGFAHPLLVNAPDMSQPRPRYVVDRAAYSLTLFDDEFEKKDRTYPVGEKLRNAFRCSSAKIKAVVFGLLPVLSWLPKYKIKDYIIPDLLGGLSGGSIQVPQGMAFALLANLPAVNGLYSSFFPLLTYFFLGGVHQMVPGTFAVISILVGNICLQLAPESKFQVFNNATNESYVDTAAMEAERLHVSATLACLTAIIQMGLGFMQFGFVAIYLSESFIRGFMTAAGLQILISVLKYIFGLTIPSYTGPGSIVFTFIDICKNLPHTNIASLIFALISGAFLVLVKELNARYMHKIRFPIPTEMIVVVVATAISGGCKMPKKYHMQIVGEIQRGFPTPVSPVVSQWKDMIGTAFSLAIVSYVINLAMGRTLANKHGYDVDSNQEMIALGCSNFFGSFFKIHVICCALSVTLAVDGAGGKSQVASLCVSLVVMITMLVLGIYLYPLPKSVLGALIAVNLKNSLKQLTDPYYLWRKSKLDCVCFVTSLFSQCIWVVSFLSSFFLSLPYGVAVGVAFSVLVVVFQTQFRNGYALAQVMDTDIYVNPKTYNRAQDIQGIKIITYCSPLYFANSEIFRQKVIAKTGMDPQKVLLAKQKYLKKQEKRRMRPTQQRRSLFMKTKTVSLQELQQDFENAPPTDPNNNQTPANGTSVSYITFSPDSSSPAQSEPPASAEAPGEPSDMLASVPPFVTFHTLILDMSGVSFVDLMGIKALAKLSSTYGKIGVKVFLVNIHAQVYNDISHGGVFEDGSLECKHVFPSIHDAVLFAQANARDVTPGHNFQGAPGDAELSLYDSEEDIRSYWDLEQEMFGSMFHAETLTAL

SEQ ID NO: 880240 - protein, 138 aa, Homo sapiens
VRAANSKVAFSAVRSTNHEPSEMSNKTRIIYFDQILVNVGNFFTLESVFVAPRKGIYSFSFHVIKVYQSQTIQVNLMLNGKPVISAFAGDKDVTREAATNGVLLYLDKEDKVYLKLEKGNLVGGWQYSTFSGFLVFPL

SEQ ID NO: 880241 - protein, 208 aa, Homo sapiens
SPTRGTLGGVTRTTNEAILLCEGAGYDIILIETVGVGQSEFAVADMVDMFVLLLPPAGGDELQGIKRGIIEMADLVAVTKSDGDLIVPARRIQAEYVSALKLLRKRSQVWKPKVIRISARSGEGISEMWDKMKDFQDLMLASGELTAKRRKQQKVWMWNLIQESVLEHFRTHPTVREQIPLLEQKVLIGALSPGLAADFLLKAFKSRD

SEQ ID NO: 880242 - protein, 155 aa, Homo sapiens
MKLFCCVKERGIKRGIIEMADLVAVTKSDGDLIVPARRIQAEYVSALKLLRKRSQVWKPKVIRISARSGEGISEMWDKMKDFQDLMLASGELTAKRRKQQKVWMWNLIQESVLEHFRTHPTVREQIPLLEQKVLIGALSPGLAADFLLKAFKSRD

SEQ ID NO: 880243 - protein, 99 aa, Homo sapiens
PVQLLRSALNTLPTLGLCCPTRSPHFNRCRHPKAPSQQPEEKPSSEETAEKQSPLGRPPRPPRLPSTRRGGGACTSRGCGNKLPHTGRLNTAEVYSTQS

SEQ ID NO: 880244 - protein, 112 aa, Homo sapiens
HLHCCQGAKRIWVTAAQAIRQARDSELSFLTASWKSHGLCVYCCLWDVILYCLGLCFANCKTTKWTRTTVLGTFQPKHPAAQPGSLAVPPGPWVVATLLALVTPWAAVVLPA

SEQ ID NO: 880245 - protein, 855 aa, Homo sapiens
MILIPRMLLVLFLLLPILSSAKAQVNPAICRYPLGMSGGQIPDEDITASSQWSESTAAKYGRLDSEEGDGAWCPEIPVEPDDLKEFLQIDLHTLHFITLVGTQGRHAGGHGIEFAPMYKINYSRDGTRWISWRNRHGKQVLDGNSNPYDIFLKDLEPPIVARFVRFIPVTDHSMNVCMRVELYGCVWLDGLVSYNAPAGQQFVLPGGSIIYLNDSVYDGAVGYSMTEGLGQLTDGVSGLDDFTQTHEYHVWPGYDYVGWRNESATNGYIEIMFEFDRIRNFTTMKVHCNNMFAKGVKIFKEVQCYFRSEASEWEPNAISFPLVLDDVNPSARFVTVPLHHRMASAIKCQYHFADTWMMFSEITFQSDAAMYNNSEALPTSPMAPTTYDPMLKVDDSNTRILIGCLVAIIFILLAIIVIILWRQFWQKMLEKASRRMLDDEMTVSLSLPSDSSMFNNNRSSSPSEQGSNSTYDRIFPLRPDYQEPSRLIRKLPEFAPGEEESGCSGVVKPVQPSGPEGVPHYAEADIVNLQGVTGGNTYSVPAVTMDLLSGKDVAVEEFPRKLLTFKEKLGEGQFGEVHLCEVEGMEKFKDKDFALDVSANQPVLVAVKMLRADANKNARNDFLKEIKIMSRLKDPNIIHLLAVCITDDPLCMITEYMENGDLNQFLSRHEPPNSSSSDVRTVSYTNLKFMATQIASGMKYLSSLNFVHRDLATRNCLVGKNYTIKIADFGMSRNLYSGDYYRIQGRAVLPIRWMSWESILLGKFTTASDVWAFGVTLWETFTFCQEQPYSQLSDEQVIENTGEFFRDQGRQTYLPQPAICPDSVYKLMLSCWRRDTKNRPSFQEIHLLLLQQGDE

SEQ ID NO: 880246 - protein, 855 aa, Homo sapiens; identical to SEQ ID NO: 880245

SEQ ID NO: 880247 - protein, 842 aa, Homo sapiens
MILIPRMLLVLFLLLPILSSAKAQVNPAICRYPLGMSGGQIPDEDITASSQWSESTAAKYGRLDSEEGDGAWCPEIPVEPDDLKEFLQIDLHTLHFITLVGTQGRHAGGHGIEFAPMYKINYSRDGTRWISWRNRHGKQVLDGNSNPYDIFLKDLEPPIVARFVRFIPVTDHSMNVCMRVELYGCVWLDGLVSYNAPAGQQFVLPGGSIIYLNDSVYDGAVGYSMTEGLGQLTDGVSGLDDFTQTHEYHVWPGYDYVGWRNESATNGYIEIMFEFDRIRNFTTMKVHCNNMFAKGVKIFKEVQCYFRSEASEWEPNAISFPLVLDDVNPSARFVTVPLHHRMASAIKCQYHFADTWMMFSEITFQSDAAMYNNSEALPTSPMAPTTYDPMLKVDDSNTRILIGCLVAIIFILLAIIVIILWRQFWQKMLEKASRRMLDDEMTVSLSLPSDSSMFNNNRSSSPSEQGSNSTYDRIFPLRPDYQEPSRLIRKLPEFAPGEEESGCSGVVKPVQPSGPEGVPHYAEADIVNLQGVTGGNTYSVPAVTMDLLSGKDVAVEEFPRKLLTFKEKLGEGQFGEVHLCEVEGMEKFKDKDFALDVSANQPVLVADDFLKEIKIMSRLKDPNIIHLLAVCITDDPLCMITEYMENGDLNQFLSRHEPPNSSSSDVRTVSYTNLKFMATQIASGMKYLSSLNFVHRDLATRNCLVGKNYTIKIADFGMSRNLYSGDYYRIQGRAVLPIRWMSWESILLGKFTTASDVWAFGVTLWETFTFCQEQPYSQLSDEQVIENTGEFFRDQGRQTYLPQPAICPDSVYKLMLSCWRRDTKNRPSFQEIHLLLLQQGDE

SEQ ID NO: 880248 - protein, 556 aa, Homo sapiens
MILIPRMLLVLFLLLPILSSAKAQVNPAICRYPLGMSGGQIPDEDITASSQWSESTAAKYGRLDSEEGDGAWCPEIPVEPDDLKEFLQIDLHTLHFITLVGTQGRHAGGHGIEFAPMYKINYSRDGTRWISWRNRHGKQVLDGNSNPYDIFLKDLEPPIVARFVRFIPVTDHSMNVCMRVELYGCVWLDGLVSYNAPAGQQFVLPGGSIIYLNDSVYDGAVGYSMTEGLGQLTDGVSGLDDFTQTHEYHVWPGYDYVGWRNESATNGYIEIMFEFDRIRNFTTMKVHCNNMFAKGVKIFKEVQCYFRSEASEWEPNAISFPLVLDDVNPSARFVTVPLHHRMASAIKCQYHFADTWMMFSEITFQSDAAMYNNSEALPTSPMAPTTYDPMLKVDDSNTRILIGCLVAIIFILLAIIVIILWRQFWQKMLEKASRRMLDDEMTVSLSLPSDSSMFNNNRSSSPSEQGSNSTYDRIFPLRPDYQEPSRLIRKLPEFAPGEEESGEDDVVGRASREKPQQASGRYDTPAPSSLHLFLVSANLLRSPHSLSRFGLPLLLA

SEQ ID NO: 880249 - protein, 855 aa, Homo sapiens; identical to SEQ ID NO: 880245

SEQ ID NO: 880250 - protein, 842 aa, Homo sapiens; identical to SEQ ID NO: 880247

SEQ ID NO: 880251 - protein, 829 aa, Homo sapiens
MILIPRMLLVLFLLLPILSSAKAQVNPAICRYPLGMSGGQIPDEDITASSQWSESTAAKYGRLDSEEGDGAWCPEIPVEPDDLKEFLQIDLHTLHFITLVGTQGRHAGGHGIEFAPMYKINYSRDGTRWISWRNRHGKQVLDGNSNPYDIFLKDLEPPIVARFVRFIPVTDHSMNVCMRVELYGCVWLDGLVSYNAPAGQQFVLPGGSIIYLNDSVYDGAVGYSMTEGLGQLTDGVSGLDDFTQTHEYHVWPGYDYVGWRNESATNGYIEIMFEFDRIRNFTTMKVHCNNMFAKGVKIFKEVQCYFRSEASEWEPNAISFPLVLDDVNPSARFVTVPLHHRMASAIKCQYHFADTWMMFSEITFQSDAAMYNNSEALPTSPMAPTTYDPMLKVDDSNTRILIGCLVAIIFILLAIIVIILWRQFWQKMLEKLSLPSDSSMFNNNRSSSPSEQGSNSTYDRIFPLRPDYQEPSRLIRKLPEFAPGEEESGCSGVVKPVQPSGPEGVPHYAEADIVNLQGVTGGNTYSVPAVTMDLLSGKDVAVEEFPRKLLTFKEKLGEGQFGEVHLCEVEGMEKFKDKDFALDVSANQPVLVADDFLKEIKIMSRLKDPNIIHLLAVCITDDPLCMITEYMENGDLNQFLSRHEPPNSSSSDVRTVSYTNLKFMATQIASGMKYLSSLNFVHRDLATRNCLVGKNYTIKIADFGMSRNLYSGDYYRIQGRAVLPIRWMSWESILLGKFTTASDVWAFGVTLWETFTFCQEQPYSQLSDEQVIENTGEFFRDQGRQTYLPQPAICPDSVYKLMLSCWRRDTKNRPSFQEIHLLLLQQGDE

SEQ ID NO: 880252 - protein, 71 aa, Homo sapiens
GMEKFKDKDFALDVSANQPVLVAVKMLRADANKNARSVVYILNFPLCISSLGPGILLDTSEQFFLLRWEGQ

SEQ ID NO: 880253 - protein, 129 aa, Homo sapiens
MEEEFLKSQISSLLKRQEQMAIKLCQELIIHTSDHRCNPCPKMWQWYQNSCYYFTTNEEKTWANSRKDCIDKNSTLVKIDSLEEKDFLMSQPLLMFSFFWLGLSWDSSGRSWFWEDGSVPSPSLYVSNY

SEQ ID NO: 880254 - protein, 129 aa, Homo sapiens; identical to SEQ ID NO: 880253

SEQ ID NO: 880255 - protein, 268 aa, Homo sapiens
MEDFLLSNGYQLGKTIGEGTYSKVKEAFSKKHQRKVAIKVIDKMGGPEEFIQRFLPRELQIVRTLDHKNIIQVYEMLESADGKICLVMELAEGGDVFDCVLNGGPLPESRAKALFRQMVEAIRYCHGCGVAHRDLKCENALLQGFNLKLTDFGFAKVLPKSHRELSQTFCGSTAYAAPEVLQGIPHDSKKGDVWSMGVVLYVMLCASLPFDDTDIPKMLWQQQKGVSFPTHLSISADCQDLLKRLLEPDMILRPSIEEVSWHPWLAST

SEQ ID NO: 880256 - protein, 83 aa, Homo sapiens
GTGGLWPWRLETGSRRPRTPEGGAAGQGNPPRGGVHAEEPRIPGPHRRGGAPSQAGLQLNAWHGGGLGGDLIRAEFGGGSEGR

SEQ ID NO: 880257 - protein, 201 aa, Homo sapiens
MEDFLLSNGYQLGKTIGEGTYSKVKEAFSKKHQRKVAIKVIDKMGGPEEFIQRFLPRELQIVRTLDHKNIIQVYEMLESADGKICLVMELAEGGDVFDCVLNGGPLPESRAKALFRQMVEAIRYCHGCGVAHRDLKCENALLQGFNLKLTDFGFAKVLPKSHRELSQTFCGSTAYAAPEVLQGISPRCCGSSRRGCPSPLI

SEQ ID NO: 880258 - protein, 113 aa, Homo sapiens
PQDFFLASQVKFEDLIKDLRKLKRQLEASEKQMVVVCKESPKEYLQPFKDKLEEFFQKGHPFPMSACCASVGVKHLFLLESAQRGFSKKWKTIATLTSDGSHVKQSAVPLFPR

SEQ ID NO: 880259 - protein, 90 aa, Homo sapiens
PQDFFLASQVKFEDLIKDLRKLKRQLEASEKQMVVVCKESPKEYLQPFKDKLEEFFQKGRKLCQPHIHVALKHPSFHESFSEAHGPWHPG

SEQ ID NO: 880260 - protein, 237 aa, Homo sapiens [sequence omitted]

SEQ ID NO: 880261 - protein, 237 aa, Homo sapiens [sequence omitted]

SEQ ID NO: 880262 - protein, 237 aa, Homo sapiens [sequence omitted]

SEQ ID NO: 880263 - protein, 237 aa, Homo sapiens [sequence omitted]

SEQ ID NO: 880264 - protein, 236 aa, Homo sapiens
VNRKGDGRIAERQRYTFELSAGPPSLALAIWVRVSNDSQAIFGSEDVGSSSYVAVDILIAVGAIIMILGFLACCGAIKESRCMLLLFFIGLLLILLLQVATGILGAVFKSKSDRIVNETLYENTKLLSATGESEKQFQEAIIVFQEEFKCCGLVNGAADWGNNFQHYPELCACLDKQRPCQSYNGKQVYKETCISFIKDFLAKNLIIVIGISFGLAVIEILGLVFSMVLYCQIGNK

SEQ ID NO: 880265 - protein, 198 aa, Homo sapiens
MAGVSACIKYSMFTFNFLFWLCGILILALAIWVRVSNDSQAIFGSEDVGSSSYVAVDILIAVGAIIMILGFLACCGAIKESRCMLLLFFIGLLLILLLQVATGILGAVFKSKSDRIVNETLYENTKLLSATGESEKQFQEAIIVFQEEFKCCGLVNGAADWGNNFQHYPELCACLDKQRPCQSYNGKQVYKETSWQKI

SEQ ID NO: 880266 - protein, 237 aa, Homo sapiens [sequence omitted]

SEQ ID NO: 880267 - protein, 195 aa, Homo sapiens
MAGVSACIKYSMFTFNFLFWLCGILILALAIWVRVSNDSQAIFGSEDVGSSSYVAVDILIAVGAIIMILGFLACCGAIKESRCMLLLFFIGLLLILLLQVATGILGAVFKSKSDRIVNETLYENTKLLSATGESEKQFQEAIIVFQEEFKCCGLVNGAADWGNNFQHYPELCACLDKQRPCQALWHTRSTETGSF

SEQ ID NO: 880268 - protein, 237 aa, Homo sapiens [sequence omitted]

SEQ ID NO: 880269 - protein, 232 aa, Homo sapiens [sequence omitted]

SEQ ID NO: 880270 - protein, 154 aa, Homo sapiens
MNPSFFIGLLLILLLQVATGILGAVFKSKSDRIVNETLYENTKLLSATGESEKQFQEAIIVFQEEFKCCGLVNGAADWGNNFQHYPELCACLDKQRPCQSYNGKQVYKETCISFIKDFLAKNLIIVIGISFGLAVIEILGLVFSMVLYCQIGNK

SEQ ID NO: 880271 - protein, 221 aa, Homo sapiens
MAGVSACIKYSMFTFNFLFWLCGILILALAIWVRVSNDSQAIFGSEDVGSSSYVAVDILIAVGAIIMILGFLACCGAIKESRCMLLLFFIGLLLILLLQVATGILGAVFKSKSDRIVNETLYENTKLLSATGFKCCGLVNGAADWGNNFQHYPELCACLDKQRPCQSYNGKQVYKETCISFIKDFLAKNLIIVIGISFGLAVIEILGLVFSMVLYCQIGNK

SEQ ID NO: 880272 - protein, 81 aa, Homo sapiens
CSRIPSRERKHPRPPASSRAPPASPARRNEDNPVEPDPGVDRWPETGYVKKLQRRDNTFYYYNKQRECDDKEVHKVKIYAY

SEQ ID NO: 880273 - protein, 101 aa, Homo sapiens
HLSDIIDNKASVTMASSDVKPKSVSHAKKWSEEIENLYRFQQAGYRDETEYRQVKQVSMVDRWPETGYVKKLQRRDNTFYYYNKQRECDDKEVHKVKIYAY

SEQ ID NO: 880274 - protein, 126 aa, Homo sapiens
CSRIPSRERKHPRPPASSRAPPASPARRNEDNPVEPDPGARKFPRSNGNDQVESQEEKKVQRCQGTSKGKMSRSQQAKEQLSCPKDCPISSSSAPDVRKRHWLYCFLTGSDGFQIICSWPQEGRGL

SEQ ID NO: 880275 - protein, 153 aa, Homo sapiens
CSRIPSRERKHPRPPASSRAPPASPARRNEDNPVEPDPGVDRWPETGYVKKLQRRDNTFYYYNKQRECDDKEVHKRRGFTMLAKRVSNSWTQVIPATQPPRVEKLRGVTDKMRDFHILDDGELSHNPTVQLGIQQAKEKGHQNEEDTEKKISV

SEQ ID NO: 880276 - protein, 126 aa, Homo sapiens; identical to SEQ ID NO: 880274

SEQ ID NO: 880277 - protein, 109 aa, Homo sapiens
TVLKKRHGEEESSPLLNYVSCHDPNNNAPLRWPDVQYQILGGRTANQIIFGHNGFYVFYISIVDPYYSYCQLETIFSIYVYGAFPVQLVSAGVVILLIISSILGSVWLA

SEQ ID NO: 880278 - protein, 113 aa, Homo sapiens
MSGHQRTRSRSRERRDDQDSNHPVGAVVAQELPSDDQLQQEEPPIESQDYTPGQERDEGALDFQVLGLAAYLWELTRSKTGGERGDGPNVKGEFLPNLEPVKIPEAGEGQPSV

SEQ ID NO: 880279 - protein, 120 aa, Homo sapiens
FSLRNACYYASNKGLKSRIYKELNSTRKNNLINKWGKDRNRHFSKEDIQEDKKHKIKCSISLTVSEMQVKTTMRCHITPVGMAIIKKSKNHRCRQRCREKGALIHRWCEYELVQPLWTTV

SEQ ID NO: 880280 - protein, 904 aa, Homo sapiens
MTKLKEALIETVQRQKEIKLVVTFKSGKFIRIFQLSNNIRSVVLRHCKKRQSHLRLTLKNNVFLFIDKLSYRDAKQLNMFLDIIHQNKSQQPMKSDDDWSVFESRNMLKEIDKTSFYSICNKPSYQKMPLFMSKSPTHVKKGILENQGGKGQNTLSSDVQTNEDILKEDNPVPNKKYKTDSLKYIQSNRKNPSSLEDLEKDRDLKLGPSFNTNCNGNPNLDETVLATQTLNAKNGLTSPLEPEHSQGDPRCNKAQVPLDSHSQQLQQGFPNLGNTCYMNAVLQSLFAIPSFADDLLTQGVPWEYIPFEALIMTLTQLLALKDFCSTKIKRELLGNVKKVISAVAEIFSGNMQNDAHEFLGQCLDQLKEDMEKLNATLNTGKECGDENSSPQMHVGSAATKVFVCPVVANFEFELQLSLICKACGHAVLKVEPNNYLSINLHQETKPLPLSIQNSLDLFFKEEELEYNCQMCKQKSCVARHTFSRLSRVLIIHLKRYSFNNAWLLVKNNEQVYIPKSLSLSSYCNESTKPPLPLSSSAPVGKCEVLEVSQEMISEINSPLTPSMKLTSESSDSLVLPVEPDKNADLQRFQRDCGDASQEQHQRDLENGSALESELVHFRDRAIGEKELPVADSLMDQGDISLPVMYEDGGKLISSPDTRLVEVHLQEVPQHPELQKYEKTNTFVEFNFDSVTESTNGFYDCKENRIPEGSQGMAEQLQQCIEESIIDEFLQQAPPPGVRKLDAQEHTEETLNQSTELRLQKADLNHLGALGSDNPGNKNILDAENTRGEAKELTRNVKMGDPLQAYRLISVVSHIGSSPNSGHYISDVYDFQKQAWFTYNDLCVSEISETKMQEARLHSGYIFFYMHNGIFEELLRKAENSRLPSTQAGVIPQGEYEGDSLYRPA

SEQ ID NO: 880281 - protein, 98 aa, Homo sapiens
LAAISPQEVGVLTGPDRHTFLQAGLSVGGRRCCVIRDHLLAEGDGVLDARTKGLDARAVCVGRAPRALLVLMGRRGVHGGILNKTVHELIRGLRMQGA

SEQ ID NO: 880282 - protein, 532 aa, Homo sapiens
MTQLYIYIRLLGAYLFIISRVQGQNLDSMLHGTGMKSDSDQKKSENGVTLAPEDTLPFLKCYCSGHCPDDAINNTCITNGHCFAIIEEDDQGETTLASGCMKYEGSDFQCKDSPKAQLRRTIECCRTNLCNQYLQPTLPPVVIGPFFDGSIRWLVLLISMAVCIIAMIIFSSCFCYKHYCKSISSRRRYNRDLEQDEAFIPVGESLKDLIDQSQSSGSGSGLPLLVQRTIAKQIQMVRQVGKGRYGEVWMGKWRGEKVAVKVFFTTEEASWFRETEIYQTVLMRHENILGFIAADIKGTGSWTQLYLITDYHENGSLYDFLKCATLDTRALLKLAYSAACGLCHLHTEIYGTQGKPAIAHRDLKSKNILIKKNGSCCIADLGLAVKFNSDTNEVDVPLNTRVGTKRYMAPEVLDESLNKNHFQPYIMADIYSFGLIIWEMARRCITGGIVEEYQLPYYNMVPSDPSYEDMREVVCVKRLRPIVSNRWNSDECLRAVLKLMSECWAHNPASRLTALRIKKTLAKMVESQDVKI

SEQ ID NO: 880283 - protein, 73 aa, Homo sapiens
AWRGAFSPYLARTFQDCGPALALSWSAMPGLGQVSVDSTLPTHTHTDTHTHALLPHMGERAWVPLPTGFPGPF

SEQ ID NO: 880284 - protein, 772 aa, Homo sapiens
YSHIFLFIDHLLRTASQHSDSSGFAEDSTDCLSLNHLQVQESLQAMGSSADSCDSETTVTSLGEDLATPTAQDQPYFNESEEESLVPLQKGLEKAAAVADKRKSGSQDFPQCNTIENTGTKQSTCSPGDHIIEITEVEEDLFPAETVELLREASAESDVGKSSESEFTQYTTHHILKSLASIEAKCSDMSSENTTGPPSSMDRVNTALQRAQMKVCSLSNQRMGRSLLKSKDLLKQRYLFAKAGYPLRRSQSLPTTLLSPVRVVSSVNVRLSPGKETRCSPPSFTYKYTPEEEQELEKRVMEHDGQSLVKSTIFISPSSVKKEEAPQSEAPRVEECHHGRTPTCSRLAPPPMSQSTCSLHSIHSEWQERPLCEHTRTLSTHSVPNISGATCSAFASPFGCPYSHRHATYPYRVCSVNPPSAIEMQLRRVLHDIRNSLQNLSQYPMMRGPDPAAAPYSTQKSSVLPLYENTFQELQVMRRSLNLFRTQMMDLELAMLRQQTMVYHHMTEEERFEVDQLQGLRNSVRMELQDLELQLEERLLGLEEQLRAVRMPSPFRSSALMGMCGSRSADNLSCPSPLNVMEPVTELMQEQSYLKSELGLGLGEMGFEIPPGESSESVFSQATSESSSVCSGPSHANRRTGVPSTASVGKSKTPLVARKKVFRASVALTPTAPSRTGSVQTPPDLESSEEVDAAEGAPEVVGPKSEVEEGHGKLPSMPAAEEMHKNVEQDELQQVIREIKESIVGEIRREIVSGLLAAVSSSKASNSKQDYH

SEQ ID NO: 880285 - protein, 226 aa, Homo sapiens
ASAPRGPLPGRALTARAGVPAAALSRAGSGWGSGAPSAAMDRPLSSSAEAEEELEWQVASRRRKAWAKCRSSWQASETEDLSTEATTQDEEEDEEEDLPGAQLPAAGGRGNVPNEKIAIWLKDCRTPLGASLDEQSSSTLKGVLVRNGGSFEDDLSLGAEANHLHCTVMLKLDNCHNISATDETITVSSDKGAQYDSHWIWHTVVATVPSASRTVATPHERQLPRP

SEQ ID NO: 880286 - protein, 1096 aa, Homo sapiens
ASAPRGPLPGRALTARAGVPAAALSRAGSGWGSGAPSAAMDRPLSSSAEAEEELEWQVASRRRKAWAKCRSSWQASETEDLSTEATTQDEEEDEEEDLPGAQLPAAGGRGNVPNEKIAIWLKDCRTPLGASLDEQSSSTLKGVLVRNGGSFEDDLSLGAEANHLHESDAQIENCNNILAKERRLQFHQKGRSMNSTGSGKSSGTVSSVSELLELYEEDPEEILYNLGFGRDEPDIASKIPSRFFNSSSFAKGIDIKVFLSAQMQRMEVENPNYALTSRFRQIEVLTTVAMRFLLYILKSPGRPCRELEVQSTEGEAPHVPATYQLGLTKSKRDHLLRTASQHSDSSGFAEDSTDCLSLNHLQVQESLQAMGSSADSCDSETTVTSLGEDLATPTAQDQPYFNESEEESLVPLQKGLEKAAAVADKRKSGSQDFPQCNTIENTGTKQSTCSPGDHIIEITEVEEDLFPAETVELLREASAESDVGKSSESEFTQYTTHHILKSLASIEAKCSDMSSENTTGPPSSMDRVNTALQRAQMKVCSLSNQRMGRSLLKSKDLLKQRYLFAKAGYPLRRSQSLPTTLLSPVRVVSSVNVRLSPGKETRCSPPSFTYKYTPEEEQELEKRVMEHDGQSLVKSTIFISPSSVKKEEAPQSEAPRVEECHHGRTPTCSRLAPPPMSQSTCSLHSIHSEWQERPLCEHTRTLSTHSVPNISGATCSAFASPFGCPYSHRHATYPYRVCSVNPPSAIEMQLRRVLHDIRNSLQNLSQYPMMRGPDPAAAPYSTQKSSVLPLYENTFQELQVMRRSLNLFRTQMMDLELAMLRQQTMVYHHMTEEERFEVDQLQGLRNSVRMELQDLELQLEERLLGLEEQLRAVRMPSPFRSSALMGMCGSRSADNLSCPSPLNVMEPVTELMQEQSYLKSELGLGLGEMGFEIPPGESSESVFSQATSESSSVCSGPSHANRRTGVPSTASVGKSKTPLVARKKVFRASVALTPTAPSRTGSVQTPPDLESSEEVDAAEGAPEVVGPKSEVEEGHGKLPSMPAAEEMHKNVEQDELQQVIREIKESIVGEIRREIVSGLLAAVSSSKASNSKQDYH

SEQ ID NO: 880287 - protein, 1039 aa, Homo sapiens
GLLPSGSRLVGDGYRTGHMSEMAACERVYAKESMGHTSISRIILFSEAARLRKPVQCLGTSRSESKSKAVLEKTALLALKKVKPEKTPVLLSYLMGRRRIFVPSAWNNVSVIEESGNKNDQKSQKIMKKKESSSMLATVKEEVSGSSAAVTENADSDRISDEANSNFNQGTENEQSKETQSHESKLGEESGIVESKLDSDFNISSHSELENSSELKSVHISTPEKEPCAPLTIPSIRNIMTQQKDSFEMEEVQSTEGEAPHVPATYQLGLTKSKRDHLLRTASQHSDSSGFAEDSTDCLSLNHLQVQESLQAMGSSADSCDSETTVTSLGEDLATPTAQDQPYFNESEEESLVPLQKGLEKAAAVADKRKSGSQDFPQCNTIENTGTKQSTCSPGDHIIEITEVEEDLFPAETVELLREASAESDVGKSSESEFTQYTTHHILKSLASIEAKCSDMSSENTTGPPSSMDRVNTALQRAQMKVCSLSNQRMGRSLLKSKDLLKQRYLFAKAGYPLRRSQSLPTTLLSPVRVVSSVNVRLSPGKETRCSPPSFTYKYTPEEEQELEKRVMEHDGQSLVKSTIFISPSSVKKEEAPQSEAPRVEECHHGRTPTCSRLAPPPMSQSTCSLHSIHSEWQERPLCEHTRTLSTHSVPNISGATCSAFASPFGCPYSHRHATYPYRVCSVNPPSAIEMQLRRVLHDIRNSLQNLSQYPMMRGPDPAAAPYSTQKSSVLPLYENTFQELQVMRRSLNLFRTQMMDLELAMLRQQTMVYHHMTEEERFEVDQLQGLRNSVRMELQDLELQLEERLLGLEEQLRAVRMPSPFRSSALMGMCGSRSADNLSCPSPLNVMEPVTELMQEQSYLKSELGLGLGEMGFEIPPGESSESVFSQATSESSSVCSGPSHANRRTGVPSTASVGKSKTPLVARKKVFRASVALTPTAPSRTGSVQTPPDLESSEEVDAAEGAPEVVGPKSEVEEGHGKLPSMPAAEEMHKNVEQDELQQVIREIKESIVGEIRREIVSGLLAAVSSSKASNSKQDYH

SEQ ID NO: 880288 - protein, 713 aa, Homo sapiens
ANSSSCCANSSSCCANSSSCSEEESLVPLQKGLEKAAAVADKRKSGSQDFPQCNTIENTGTKQSTCSPGDHIIEITEVEEDLFPAETVELLREASAESDVGKSSESEFTQYTTHHILKSLASIEAKCSDMSSENTTGPPSSMDRVNTALQRAQMKVCSLSNQRMGRSLLKSKDLLKQRYLFAKAGYPLRRSQSLPTTLLSPVRVVSSVNVRLSPGKETRCSPPSFTYKYTPEEEQELEKRVMEHDGQSLVKSTIFISPSSVKKEEAPQSEAPRVEECHHGRTPTCSRLAPPPMSQSTCSLHSIHSEWQERPLCEHTRTLSTHSVPNISGATCSAFASPFGCPYSHRHATYPYRVCSVNPPSAIEMQLRRVLHDIRNSLQNLSQYPMMRGPDPAAAPYSTQKSSVLPLYENTFQELQVMRRSLNLFRTQMMDLELAMLRQQTMVYHHMTEEERFEVDQLQGLRNSVRMELQDLELQLEERLLGLEEQLRAVRMPSPFRSSALMGMCGSRSADNLSCPSPLNVMEPVTELMQEQSYLKSELGLGLGEMGFEIPPGESSESVFSQATSESSSVCSGPSHANRRTGVPSTASVGKSKTPLVARKKVFRASVALTPTAPSRTGSVQTPPDLESSEEVDAAEGAPEVVGPKSEVEEGHGKLPSMPAAEEMHKNVEQDELQQVIREIKESIVGEIRREIVSGLLAAVSSSKASNSKQDYH

SEQ ID NO: 880289 - protein, 247 aa, Homo sapiens [sequence omitted]

SEQ ID NO: 880290 - protein, 332 aa, Homo sapiens
MKYPMMRGPDPAAAPYSTQKSSVLPLYENTFQELQVMRRSLNLFRTQMMDLELAMLRQQTMVYHHMTEEERFEVDQLQGLRNSVRMELQDLELQLEERLLGLEEQLRAVRMPSPFRSSALMGMCGSRSADNLSCPSPLNVMEPVTELMQEQSYLKSELGLGLGEMGFEIPPGESSESVFSQATSESSSVCSGPSHANRRTGVPSTASVGKSKTPLVARKKVFRASVALTPTAPSRTGSVQTPPDLESSEEVDAAEGAPEVVGPKSEVEEGHGKLPSMPAAEEMHKNVEQDELQQVIREIKESIVGEIRREIVSGLLAAVSSSKASNSKQDYH

SEQ ID NO: 880291 - protein, 247 aa, Homo sapiens [sequence omitted]

SEQ ID NO: 880292 - protein, 1253 aa, Homo sapiens
ASAPRGPLPGRALTARAGVPAAALSRAGSGWGSGAPSAAMDRPLSSSAEAEEELEWQVASRRRKAWAKCRSSWQASETEDLSTEATTQDEEEDEEEDLPGAQLPAAGGRGNVPNEKIAIWLKDCRTPLGASLDEQSSSTLKGVLVRNGGSFEDDLSLGAEANHLHESDAQIENCNNILAKERRLQFHQKGRSMNSTGSGKSSGTVSSVSELLELYEEDPEEILYNLGFGRDEPDIASKIPSRFFNSSSFAKGIDIKVFLSAQMQRMEVENPNYALTSRFRQIEVLTTVANAFSSLYSQVSGTPLQRIGSMSSVTSNKETDPPPPLTRSNTANRLMKTLSKLNLCVDKTEKGESSSPSPSAEKGKILNVSVIEESGNKNDQKSQKIMKKKESSSMLATVKEEVSGSSAAVTENADSDRISDEANSNFNQGTENEQSKETQSHESKLGEESGIVESKLDSDFNISSHSELENSSELKSVHISTPEKEPCAPLTIPSIRNIMTQQKDSFEMEEVQSTEGEAPHVPATYQLGLTKSKRDHLLRTASQHSDSSGFAEDSTDCLSLNHLQVQESLQAMGSSADSCDSETTVTSLGEDLATPTAQDQPYFNESEEESLVPLQKGLEKAAAVADKRKSGSQDFPQCNTIENTGTKQSTCSPGDHIIEITEVEEDLFPAETVELLREASAESDVGKSSESEFTQYTTHHILKSLASIEAKCSDMSSENTTGPPSSMDRVNTALQRAQMKVCSLSNQRMGRSLLKSKDLLKQRYLFAKAGYPLRRSQSLPTTLLSPVRVVSSVNVRLSPGKETRCSPPSFTYKYTPEEEQELEKRVMEHDGQSLVKSTIFISPSSVKKEEAPQSEAPRVEECHHGRTPTCSRLAPPPMSQSTCSLHSIHSEWQERPLCEHTRTLSTHSVPNISGATCSAFASPFGCPYSHRHATYPYRVCSVNPPSAIEMQLRRVLHDIRNSLQNLSQYPMMRGPDPAAAPYSTQKSSVLPLYENTFQELQVMRRSLNLFRTQMMDLELAMLRQQTMVYHHMTEEERFEVDQLQGLRNSVRMELQDLELQLEERLLGLEEQLRAVRMPSPFRSSALMGMCGSRSADNLSCPSPLNVMEPVTELMQEQSYLKSELGLGLGEMGFEIPPGESSESVFSQATSESSSVCSGPSHANRRTGVPSTASVGKSKTPLVARKKVFRASVALTPTAPSRTGSVQTPPDLESSEEVDAAEGAPEVVGPKSEVEEGHGKLPSMPAAEEMHKND

SEQ ID NO: 880293 - protein, 1295 aa, Homo sapiens
ASAPRGPLPGRALTARAGVPAAALSRAGSGWGSGAPSAAMDRPLSSSAEAEEELEWQVASRRRKAWAKCRSSWQASETEDLSTEATTQDEEEDEEEDLPGAQLPAAGGRGNVPNEKIAIWLKDCRTPLGASLDEQSSSTLKGVLVRNGGSFEDDLSLGAEANHLHESDAQIENCNNILAKERRLQFHQKGRSMNSTGSGKSSGTVSSVSELLELYEEDPEEILYNLGFGRDEPDIASKIPSRFFNSSSFAKGIDIKVFLSAQMQRMEVENPNYALTSRFRQIEVLTTVANAFSSLYSQVSGTPLQRIGSMSSVTSNKETDPPPPLTRSNTANRLMKTLSKLNLCVDKTEKGESSSPSPSAEKGKILNVSVIEESGNKNDQKSQKIMKKKESSSMLATVKEEVSGSSAAVTENADSDRISDEANSNFNQGTENEQSKETQSHESKLGEESGIVESKLDSDFNISSHSELENSSELKSVHISTPEKEPCAPLTIPSIRNIMTQQKDSFEMEEVQSTEGEAPHVPATYQLGLTKSKRDHLLRTASQHSDSSGFAEDSTDCLSLNHLQVQESLQAMGSSADSCDSETTVTSLGEDLATPTAQDQPYFNESEEESLVPLQKGLEKAAAVADKRKSGSQDFPQCNTIENTGTKQSTCSPGDHIIEITEVEEDLFPAETVELLREASAESDVGKSSESEFTQYTTHHILKSLASIEAKCSDMSSENTTGPPSSMDRVNTALQRAQMKVCSLSNQRMGRSLLKSKDLLKQRYLFAKAGYPLRRSQSLPTTLLSPVRVVSSVNVRLSPGKETRCSPPSFTYKYTPEEEQELEKRVMEHDGQSLVKSTIFISPSSVKKEEAPQSEAPRVEECHHGRTPTCSRLAPPPMSQSTCSLHSIHSEWQERPLCEHTRTLSTHSVPNISGATCSAFASPFGCPYSHRHATYPYRVCSVNPPSAIEMQLRRVLHDIRNSLQNLSQYPMMRGPDPAAAPYSTQKSSVLPLYENTFQELQVMRRSLNLFRTQMMDLELAMLRQQTMVYHHMTEEERFEVDQLQGLRNSVRMELQDLELQLEERLLGLEEQLRAVRMPSPFRSSALMGMCGSRSADNLSCPSPLNVMEPVTELMQEQSYLKSELGLGLGEMGFEIPPGESSESVFSQATSESSSVCSGPSHANRRTGVPSTASVGKSKTPLVARKKVFRASVALTPTAPSRTGSVQTPPDLESSEEVDAAEGAPEVVGPKSEVEEGHGKLPSMPAAEEMHKNVEQDELQQVIREVGMDPISCVILELSMICTGGGVICALEDTCC

SEQ ID NO: 880294 - protein, 197 aa, Homo sapiens
GQALKPGQALKPGQALKPGQALKPGQPLKLGFEIPPGESSESVFSQATSESSSVCSGPSHANRRTGVPSTASVGKSKTPLVARKKVFRASVALTPTAPSRTGSVQTPPDLESSEEVDAAEGAPEVVGPKSEVEEGHGKLPSMPAAEEMHKNVEQDELQQVIREIKESIVGEIRREIVSGLLAAVSSSKASNSKQDYH

SEQ ID NO: 880295 - protein, 1298 aa, Homo sapiens
ASAPRGPLPGRALTARAGVPAAALSRAGSGWGSGAPSAAMDRPLSSSAEAEEELEWQVASRRRKAWAKCRSSWQASETEDLSTEATTQDEEEDEEEDLPGAQLPAAGGRGNVPNEKIAIWLKDCRTPLGASLDEQSSSTLKGVLVRNGGSFEDDLSLGAEANHLHESDAQIENCNNILAKERRLQFHQKGRSMNSTGSGKSSGTVSSVSELLELYEEDPEEILYNLGFGRDEPDIASKIPSRFFNSSSFAKGIDIKVFLSAQMQRMEVENPNYALTSRFRQIEVLTTVANAFSSLYSQVSGTPLQRIGSMSSVTSNKETDPPPPLTRSNTANRLMKTLSKLNLCVDKTEKGESSSPSPSAEKGKILNVSVIEESGNKNDQKSQKIMKKKESSSMLATVKEEVSGSSAAVTENADSDRISDEANSNFNQGTENEQSKETQSHESKLGEESGIVESKLDSDFNISSHSELENSSELKSVHISTPEKEPCAPLTIPSIRNIMTQQKDSFEMEEVQSTEGEAPHVPATYQLGLTKSKRDHLLRTASQHSDSSGFAEDSTDCLSLNHLQVQESLQAMGSSADSCDSETTVTSLGEDLATPTAQDQPYFNESEEESLVPLQKGLEKAAAVADKRKSGSQDFPQCNTIENTGTKQSTCSPGDHIIEITEVEEDLFPAETVELLREASAESDVGKSSESEFTQYTTHHILKSLASIEAKCSDMSSENTTGPPSSMDRVNTALQRAQMKVCSLSNQRMGRSLLKSKDLLKQRYLFAKAGYPLRRSQSLPTTLLSPVRVVSSVNVRLSPGKETRCSPPSFTYKYTPEEEQELEKRVMEHDGQSLVKSTIFISPSSVKKEEAPQSEAPRVEECHHGRTPTCSRLAPPPMSQSTCSLHSIHSEWQERPLCEHTRTLSTHSVPNISGATCSAFASPFGCPYSHRHATYPYRVCSVNPPSAIEMQLRRVLHDIRNSLQNLSQYPMMRGPDPAAAPYSTQKSSVLPLYENTFQELQVMRRSLNLFRTQMMDLELAMLRQQTMVYHHMTEEERFEVDQLQGLRNSVRMELQDLELQLEERLLGLEEQLRAVRMPSPFRSSALMGMCGSRSADNLSCPSPLNVMEPVTELMQEQSYLKSELGLGLGEMGFEIPPGESSESVFSQATSESSSVCSGPSHANRRTGVPSTASVGKSKTPLVARKKVFRASVALTPTAPSRTGSVQTPPDLESSEEVDAAEGAPEVVGPKSEVEEGHGKLPSMPAAEEMHKNVEQDELQQVIREIKESIVGEIRREIVSGLLAAVSSSKASNSKQDYH

SEQ ID NO: 880296 - protein, 1298 aa, Homo sapiens; identical to SEQ ID NO: 880295

SEQ ID NO: 880297 - protein, 1280 aa, Homo sapiens
ASAPRGPLPGRALTARAGVPAAALSRAGSGWGSGAPSAAMDRPLSSSAEAEEELEWQVASRRRKAWAKCRSSWQASETEDLSTEATTQDEEEDEEEDLPGAQLPAAGGRGNVPNEKIAIWLKDCRTPLGASLDEQSSSTLKGVLVRNGGSFEDDLSLGAEANHLHESDAQIENCNNILAKERRLQFHQKGRSMNSTGSGKSSGTVSSVSELLELYEEDPEEILYNLGFGRDEPDIASKIPSRFFNSSSFAKGIDIKVFLSAQMQRMEVENPNYALTSRFRQIEVLTTVANAFSSLYSQVSGTPLQRIGSMSSVTSNKETDPPPPLTRSNTANRLMKTLSKLNLCVDKTEKGESSSPSPSAEKGKILNVSVIEESGNKNDQKSQKIMKKKESSSMLATVKEEVSGSSAAVTENADSDRISDEANSNFNQGTENEQSKETQSHESKLGEESGIVESKLDSDFNISSHSELENSSELKSVHISTPEKEPCAPLTIPSIRNIMTQQKDSFEMEEVQSTEGEAPHVPATYQLGLTKSKRDHLLRTASQHSDSSGFAEDSTDCLSLNHLQVQESLQAMGSSADSCDSETTVTSLGEDLATPTAQDQPYFNESEEESLVPLQKGLEKAAAVADKRKSGSQDFPQCNTIENTGTKQSTCSPGDHIIEITEVEEDLFPAETVELLREASAESDVGKSSESEFTQYTTHHILKSLASIEAKCSDMSSENTTGPPSSMDRVNTALQRAQMKVCSLSNQRMGRSLLKSKDLLKQRYLFAKAGYPLRRSQSLPTTLLSPVRVVSSVNVRLSPGKETRCSPPSFTYKYTPEEEQELEKRVMEHDGQSLVKSTIFISPSSVKKEEAPQSEAPRVEECHHGRTPTCSRLAPPPMSQSTCSLHSIHSEWQERPLCEHTRTLSTHSVPNISGATCSAFASPFGCPYSHRHATYPYRVCSVNPPSAIEMQLRRVLHDIRNSLQNLSQYPMMRGPDPAAAPYSTQKSSVLPLYENTFQELQVMRRSLNLFRTQMMDLELAMLRQQTMVYHHMTEEERFEVDQLQGLRNSVRMELQDLELQLEERLLGLEEQLRAVRMPSPFRSSALMGMCGSRSADNLSCPSPLNVMEPVTELMQEQSYLKSELGLGLGEMGFEIPPGESSESVFSQATSESSSVCSGPSHANRRTGVPSTASVGKSKTPLVARKKVFRASVALTPTAPSRTGSVQTPPDLESSEEVDAAEGAPEVVGPKSEVEEGHGKLPSMPAAEEMHKNGHMRWERHMRVERHMRWERHMRWERHMR

SEQ ID NO: 880298 - protein, 125 aa, Homo sapiens
ASAPRGPLPGRALTARAGVPAAALSRAGSGWGSGAPSAAMDRPLSSSAEAEEELEWQVASRRRKAWAKCRSSWQASETEDLSTEATTQDEEEDEEEDLPGAQLPAAGGRGNVPNEKIAIWLKDCR

SEQ ID NO: 880299 - protein, 433 aa, Homo sapiens
ASAPRGPLPGRALTARAGVPAAALSRAGSGWGSGAPSAAMDRPLSSSAEAEEELEWQVASRRRKAWAKCRSSWQASETEDLSTEATTQDEEEDEEEDLPGAQLPAAGGRGNVPNEKIAIWLKDCRTPLGASLDEQSSSTLKGVLVRNGGSFEDDLSLGAEANHLHESDAQIENCNNILAKERRLQFHQKGRSMNSTGSGKSSGTVSSVSELLELYEEDPEEILYNLGFGRDEPDIASKIPSRFFNSSSFAKGIDIKVFLSAQMQRMEVENPNYALTSRFRQIEVLTTVANAFSSLYSQVSGTPLQRIGSMSSVTSNKETDPPPPLTRSNTANRLMKTLSKLNLCVDKTEKGESSSPSPSAEKGKILNVSVIEESGNKNDQKSQKIMKKKESSSMLATVKEEVSGSSAAVTENADSDRISDGRRWRSLLPSGGA

SEQ ID NO: 880300 - protein, 385 aa, Homo sapiens
ASAPRGPLPGRALTARAGVPAAALSRAGSGWGSGAPSAAMDRPLSSSAEAEEELEWQVASRRRKAWAKCRSSWQASETEDLSTEATTQDEEEDEEEDLPGAQLPAAGGRGNVPNEKIAIWLKDCRTPLGASLDEQSSSTLKGVLVRNGGSFEDDLSLGAEANHLHESDAQIENCNNILAKERRLQFHQKGRSMNSTGSGKSSGTVSSVSELLELYEEDPEEILYNLGFGRDEPDIASKIPSRFFNSSSFAKGIDIKVFLSAQMQRMEVENPNYALTSRFRQIEVLTTVANAFSSLYSQVSGTPLQRIGSMSSVTSNKETDPPPPLTRSNTANRLMKTLSKLNLCVDKTEKGESSSPSPSAEKGKILNVSVIEESGNKNDLSVTSS

SEQ ID NO: 880301 - protein, 1298 aa, Homo sapiens; identical to SEQ ID NO: 880295

SEQ ID NO: 880302 - protein, 1280 aa, Homo sapiens
ASAPRGPLPGRALTARAGVPAAALSRAGSGWGSGAPSAAMDRPLSSSAEAEEELEWQVASRRRKAWAKCRSSWQASETEDLSTEATTQDEEEDEEEDLPGAQLPAAGGRGNVPNEKIAIWLKDCRTPLGASLDEQSSSTLKGVLVRNGGSFEDDLSLGAEANHLHESDAQIENCNNILAKERRLQFHQKGRSMNSTGSGKSSGTVSSVSELLELYEEDPEEILYNLGFGRDEPDIASKIPSRFFNSSSFAKGIDIKVFLSAQMQRMEVENPNYALTSRFRQIEVLTTVANAFSSLYSQVSGTPLQRIGSMSSVTSNKETDPPPPLTRSNTANRLMKTLSKLNLCVDKTEKGESSSPSPSAEKGKILNVSVIEESGNKNDQKSQKIMKKKESSSMLATVKEEVSGSSAAVTENADSDRISDEANSNFNQGTENEQSKETQSHESKLGEESGIVESKLDSDFNISSHSELENSSELKSVHISTPEKEPCAPLTIPSIRNIMTQQKDSFEMEEVQSTEGEAPHVPATYQLGLTKSKRDHLLRTASQHSDSSGFAEDSTDCLSLNHLQVQESLQAMGSSADSCDSETTVTSLGEDLATPTAQDQPYFNESEEESLVPLQKGLEKAAAVADKRKSGSQDFPQCNTIENTGTKQSTCSPGDHIIEITEVEEDLFPAETVELLREASAESDVGKSSESEFTQYTTHHILKSLASIEAKCSDMSSENTTGPPSSMDRVNTALQRAQMKVCSLSNQRMGRSLLKSKDLLKQRYLFAKAGYPLRRSQSLPTTLLSPVRVVSSVNVRLSPGKETRCSPPSFTYKYTPEEEQELVSPSSVKKEEAPQSEAPRVEECHHGRTPTCSRLAPPPMSQSTCSLHSIHSEWQERPLCEHTRTLSTHSVPNISGATCSAFASPFGCPYSHRHATYPYRVCSVNPPSAIEMQLRRVLHDIRNSLQNLSQYPMMRGPDPAAAPYSTQKSSVLPLYENTFQELQVMRRSLNLFRTQMMDLELAMLRQQTMVYHHMTEEERFEVDQLQGLRNSVRMELQDLELQLEERLLGLEEQLRAVRMPSPFRSSALMGMCGSRSADNLSCPSPLNVMEPVTELMQEQSYLKSELGLGLGEMGFEIPPGESSESVFSQATSESSSVCSGPSHANRRTGVPSTASVGKSKTPLVARKKVFRASVALTPTAPSRTGSVQTPPDLESSEEVDAAEGAPEVVGPKSEVEEGHGKLPSMPAAEEMHKNVEQDELQQVIREIKESIVGEIRREIVSGLLAAVSSSKASNSKQDYH

SEQ ID NO: 880303 - protein, 1129 aa, Homo sapiens
ASAPRGPLPGRALTARAGVPAAALSRAGSGWGSGAPSAAMDRPLSSSAEAEEELEWQVASRRRKAWAKCRSSWQASETEDLSTEATTQDEEEDEEEDLPGAQLPAAGGRGNVPNEKIAIWLKDCRTPLGASLDEQSSSTLKGVLVRNGGSFEDDLSLGAEANHLHESDAQIENCNNILAKERRLQFHQKGRSMNSTGSGKSSGTVSSVSELLELYEEDPEEILYNLGFGRDEPDIASKIPSRFFNSSSFAKGIDIKVFLSAQMQRMEVENPNYALTSRFRQIEVLTTVANAFSSLYSQVSGTPLQRIGSMSSVTSNKETDPPPPLTRSNTANRLMKTLSKLNLCVDKTEKGESSSPSPSAEKGKILNVSVIEESGNKNDQKSQKIMKKKESSSMLATVKEEVSGSSAAVTENADSDRISDEANSNFNQGTENEQSKETQSHESKLGEESGIVESKLDSDFNISSHSELENSSELKSVHISTPEKEPCAPLTIPSIRNIMTQQKDSFEMEEVQSTEGEAPHVPATYQLGLTKSKRDHLLRTASQHSDSSGFAEDSTDCLSLNHLQVQESLQAMGSSADSCDSETTVTSLGEDLATPTAQDQPYFNESEEESLVPLQKGLEKAAAVADKRKSGKETRCSPPSFTYKYTPEEEQELEKRVMEHDGQSLVKSTIFISPSSVKKEEAPQSEAPRVEECHHGRTPTCSRLAPPPMSQSTCSLHSIHSEWQERPLCEHTRTLSTHSVPNISGATCSAFASPFGCPYSHRHATYPYRVCSVNPPSAIEMQLRRVLHDIRNSLQNLSQYPMMRGPDPAAAPYSTQKSSVLPLYENTFQELQVMRRSLNLFRTQMMDLELAMLRQQTMVYHHMTEEERFEVDQLQGLRNSVRMELQDLELQLEERLLGLEEQLRAVRMPSPFRSSALMGMCGSRSADNLSCPSPLNVMEPVTELMQEQSYLKSELGLGLGEMGFEIPPGESSESVFSQATSESSSVCSGPSHANRRTGVPSTASVGKSKTPLVARKKVFRASVALTPTAPSRTGSVQTPPDLESSEEVDAAEGAPEVVGPKSEVEEGHGKLPSMPAAEEMHKNVEQDELQQVIREIKESIVGEIRREIVSGLLAAVSSSKASNSKQDYH

SEQ ID NO: 880304 - protein, 328 aa, Homo sapiens [sequence omitted]

SEQ ID NO: 880305 - protein, 296 aa, Homo sapiens [sequence omitted]

SEQ ID NO: 880306 - protein, 1276 aa, Homo sapiens
ASAPRGPLPGRALTARAGVPAAALSRAGSGWGSGAPSAAMDRPLSSSAEAEEELEWQVASRRRKAWAKCRSSWQASETEDLSTEATTQDEEEDEEEDLPGAQLPAAGGRGNVPNEKIAIWLKDCRTPLGASLDEQSSSTLKGVLVRNGGSFEDDLSLGAEANHLHESDAQIENCNNILAKERRLQFHQKGRSMNSTGSGKSSGTVSSVSELLELYEEDPEEILYNLGFGRDEPDIASKIPSRFFNSSSFAKGIDIKVFLSAQMQRMEVENPNYALTSRFRQIEVLTTVANAFSSLYSQVSGTPLQRIGSMSSVTSNKETDPPPPLTRSNTANRLMKTLSKLNLCVDKTEKGESSSPSPSAEKGKILNVSVIEESGNKNDQKSQKIMKKKESSSMLATVKEEVSGSSAAVTENADSDRISDEANSNFNQGTENEQSKETQSHESKLGEESGIVESKLDSDFNISSHSELENSSELKSVHISTPEKEPCAPLTIPSIRNIMTQQKDSFEMEEVQSTEGEAPHVPATYQLGLTKSKRDHLLRTASQHSDSSGFAEDSTDCLSLNHLQVQESLQAMGSSADSCDSETTVTSLGEDLATPTAQDQPYFNESEEESLVPLQKGLEKAAAVADKRKSGSQDFPQCNTIENTGTKQSTCSPGDHIIEITEVEEDLFPAETVELLREASAESDVGKSSESEFTQYTTHHILKSLASIEAKCSDMSSENTTGPPSSMDRVNTALQRAQMKVCSLSNQRMGRSLLKSKDLLKQRYLFAKAGYPLRRSQSLPTTLLSPVRVVSSVNVRLSPGKETRCSPPSFTYKYTPEEEQELEKRVMEHDGQSLVKSTIFISPSSVKKEEAPQSEAPRVEECHHGRTPTCSRLAPPPMSQSTCSLHSIHSEWQERPLCEHTRTLSTHSVPNISGATCSAFASPFGCPYSHRHATYPYRVCSVNPPSAIEMQLRRVLHDIRNSLQNLSQYPMMRGPDPAAAPYSTQKSSVLPLYENTFQELQVMRRSLNLFRTQMMDLELAMLRQQTMVYHHMTEEERFEVDQLQGLRNSVRMELQDLELQLEERLLGLEEQLRAVRMPSPFRSSALMVTELMQEQSYLKSELGLGLGEMGFEIPPGESSESVFSQATSESSSVCSGPSHANRRTGVPSTASVGKSKTPLVARKKVFRASVALTPTAPSRTGSVQTPPDLESSEEVDAAEGAPEVVGPKSEVEEGHGKLPSMPAAEEMHKNVEQDELQQVIREIKESIVGEIRREIVSGLLAAVSSSKASNSKQDYH

SEQ ID NO: 880307 - protein, 247 aa, Homo sapiens [sequence omitted]

SEQ ID NO: 880308 - protein, 1298 aa, Homo sapiens; identical to SEQ ID NO: 880295

SEQ ID NO: 880309 - protein, 1298 aa, Homo sapiens; identical to SEQ ID NO: 880295

SEQ ID NO: 880310 - protein, 1284 aa, Homo sapiens
ASAPRGPLPGRALTARAGVPAAALSRAGSGWGSGAPSAAMDRPLSSSAEAEEELEWQVASRRRKAWAKCRSSWQASETEDLSTEATTQDEEEDEEEDLPGAQLPAAGGRGNVPNEKIAIWLKDCRTPLGASLDEQSSSTLKGVLVRNGGSFEDDLSLGAEANHLHESDAQIENCNNILAKERRLQFHQKGRSMNSTGSGKSSGTVSSVSELLELYEEDPEEILYNLGFGRDEPDIASKIPSRFFNSSSFAKGIDIKVFLSAQMQRMEVENPNYALTSRFRQIEVLTTVANAFSSLYSQVSGTPLQRIGSMSSVTSNKETDPPPPLTRSNTANRLMKTLSKLNLCVDKTEKGESSSPSPSAEKGKILNVSVIEESGNKNDQKSQKIMKKKESSSMLATVKEEVSGSSAAVTENADSDRISDEANSNFNQGTENEQSKETQSHESKLGEESGIVESKLDSDFNISSHSELENSSELKSVHISTPEKEPCAPLTIPSIRNIMTQQKDSFEMEEVQSTEGEAPHVPATYQLGLTKSKRDHLLRTASQHSDSSGFAEDSTDCLSLNHLQVQESLQAMGSSADSCDSETTVTSLGEDLATPTAQDQPYFNESEEESLVPLQKGLEKAAAVADKRKSGSQDFPQCNTIENTGTKQSTCSPGDHIIEITEVEEDLFPAETVELLREASAESDVGKSSESEFTQYTTHHILKSLASIEAKCSDMSSENTTGPPSSMDRVNTALQRAQMKVCSLSNQRMGRSLLKSKDLLKQRYLFAKAGYPLRRSQSLPTTLLSPVRVVSSVNVRLSPGKETRCSPPSFTYKYTPEEEQELEKRVMEHDGQSLVKSTIFISPSSVKKEEAPQSEAPRVEECHHGRTPTCSRLAPPPMSQSTCSLHSIHSEWQERPLCEHTRTLSTHSVPNISGATCSAFASPFGCPYSHRHATYPYRVCSVNPPSAIEMQLRRVLHDIRNSLQNLSQYPMMRGPDPAAAPYSTQKSSVLPLYENTFQELQVMRRSLNLFRTQMMDLELAMLRQQTMVYHHMTEEERFEVDQLQGLRNSVRMELQDLELQLEERLLGLEEQLRAVRMPSPFRSSALMGMCGSRSADNLSCPSPLNVMEPVTELMQEQSYLKSELGLGLGEMGFEIPPGESSESVFSQATSESSSVCSGPSHANRRTGVPSTASVGKSKTPLVARKKVFRASVALTPTAPSRTGSVQTPPDLESSEEVDAAEGAPEVVGPKSEVEEGHGKLPSMPAAEEMHKNVEQDELQQVIREVGKICVSFIYLEVYVRGDFV

SEQ ID NO: 880311 - protein, 1288 aa, Homo sapiens
ASAPRGPLPGRALTARAGVPAAALSRAGSGWGSGAPSAAMDRPLSSSAEAEEELEWQVASRRRKAWAKCRSSWQASETEDLSTEATTQDEEEDEEEDLPGAQLPAAGGRGNVPNEKIAIWLKDCRTPLGASLDEQSSSTLKGVLVRNGGSFEDDLSLGAEANHLHESDAQIENCNNILAKERRLQFHQKGRSMNSTGSGKSSGTVSSVSELLELYEEDPEEILYNLGFGRDEPDIASKIPSRFFNSSSFAKGIDIKVFLSAQMQRMEVENPNYALTSRFRQIEVLTTVANAFSSLYSQVSGTPLQRIGSMSSVTSNKETDPPPPLTRSNTANRLMKTLSKLNLCVDKTEKGESSSPSPSAEKGKILNVSVIEESGNKNDQKSQKIMKKKESSSMLATVKEEVSGSSAAVTENADSDRISDEANSNFNQGTENEQSKETQSHESKLGEESGIVESKLDSDFNISSHSELENSSELKSVHISTPEKEPCAPLTIPSIRNIMTQQKDSFEMEEVQSTEGEAPHVPATYQLGLTKSKRDHLLRTASQHSDSSGFAEDSTDCLSLNHLQVQESLQAMGSSADSCDSETTVTSLGEDLATPTAQDQPYFNESEEESLVPLQKGLEKAAAVADKRKSGSQDFPQCNTIENTGTKQSTCSPGDHIIEITEVEEDLFPAETVELLREASAESDVGKSSESEFTQYTTHHILKSLASIEAKCSDMSSENTTGPPSSMDRVNTALQRAQMKVCSLSNQRMGRSLLKSKDLLKQRYLFAKAGYPLRRSQSLPTTLLSPVRVVSSVNVRLSPGKETRCSPPSFTYKYTPEEEQELEKRVMEHDGQSLVKSTIFISPSSVKKEEAPQSEAPRVEECHHGRTPTCSRLAPPPMSQSTCSLHSIHSEWQERPLCEHTRTLSTHSVPNISGATCSAFASPFGCPYSHRHATYPYRVCSVNPPSAIEMQLRRVLHDIRNSLQNLSQYPMMRGPDPAAAPYSTQKSSVLPLYENTFQELQVMRRSLNLFRTQMMDLELAMLRQQTMVYHHMTEEERFEVDQLQGLRNSVRMELQDLELQLEERLLGLEEQLRAVRMPSPFRSSALMGMCGSRSADNLSCPSPLNVMEPVTELMQEQSYLKSELGLGLGEMGFEIPPGESSESVFSQATSESSSVCSGPSHANRRTGVPSTASVGKSKTPLVARKKVFRASVALTPTAPSRTGSVQTPPDLESSEEVDAAEGAPEVVGPKSEVEEGHGKLPSMPAAEEMHKNVTTALQSHCLHQLIKSQYSCEKVPFSLNITTLIPSI

SEQ ID NO: 880312 - protein, 137 aa, Homo sapiens
ASAPRGPLPGRALTARAGVPAAALSRAGSGWGSGAPSAAMDRPLSSSAEAEEELEWQVASRRRKAWAKCRSSWQASETEDLSTEATTQDEEEDEEEDLPGAQLPAAGGRGNVPNEKIAIWLKDCRTRTLYWKCHRPF

SEQ ID NO: 880313 - protein, 237 aa, Homo sapiens
ERFHLREKDPLKRSVKSSKEPLEGTPESRVAEVSHDPAMLPVQRRKLDPLLKKYRHHKKATRTKRRRKEKMEAQCSPVPPTPSTPPQSEEDEAVDKKPTLLSAQEDTPDLLHEDRLQYLQEEGSGVMHQECQIQSCELSVAQKPRPSSPAVTSLASPPLCFGSFLSCVCQTFSRSRKQKPPRRKGNNQAEAGGDAEVLRPGPAKPELSLSKTCSHLKLIELSFVFSFIVLSVCHCSS

SEQ ID NO: 880314 - protein, 194 aa, Homo sapiens
ERFHLREKDPLKRSVKSSKEPLEGTPESRVAEVSHDPAMLPVQRRKLDPLLKKYRHHKKATRTKRRRKEKMEAQCSPVPPTPSTPPQSEEDEAVDKKPTLLSAQEDTPDLLHEDRLQYLQEEGSGVMHQECQIQSCELSVAQKPRPSSPAVTSLASPPLCFGSFLSCVCQTFSRSRKQKPPRRKGNNQAEAGER

SEQ ID NO: 880315 - protein, 119 aa, Homo sapiens
LSPLEKRSIQVGVTLFSRCRLSPLSLTRKGNSLTPCASQVRQCSPCFGPRTCAHPLTCAHCLALPREMNPVPQMEMQKSPSSASLTLGAADGSCSYSAILAPPIGHLSKVSHALILLVV

SEQ ID NO: 880316 - protein, 125 aa, Homo sapiens
STANMAEPSVESSSPGGSATSDDHEFDPSADMLVHDFDDERNHLKQKKQKKKTKQQVRGARAAGPPGKRFLRTPHGGGRPRGPARQENREDKRGPKKRVSHQEEKHAGAERERGGEGDSLHHKYI

SEQ ID NO: 880317 - protein, 512 aa, Homo sapiens
MAEPSVESSSPGGSATSDDHEFDPSADMLVHDFDDERTLEEEEMMEGETNFSSEIEDLAREGDMPIHELLSLYGYGSTVRLPEEDEEEEEEEEEGEDDEDADNDDNSGCSGENKEENIKDSSGQEDETQSSNDDPSQSVASQDAQEIIRPRRCKYFDTNSEVEEESEEDEDYIPSEDWKKEIMVGSMFQAEIPVGICRYKENEKVYENDDQLLWDPEYLPEDKVIIFLKDASRRTGDEKGVEAIPEGSHIKDNEQALYELVKCNFDTEEALRRLRFNVKAAREELSVWTEEECRNFEQGLKAYGKDFHLIQANKVRTRSVGECVAFYYMWKKSERYDFFAQQTRFGKKKYNLHPGVTDYMDRLLDESESAASSRAPSPPPTASNSSNSQSEKEDGTVSTANQNGVSSNGPGEILNKEEVKVEGLHINGPTGGNKKPLHADMDTNGYETDNLTTDPKLAHMTARNENDFDEKSERPAKRRRVNSNGKESPGSSEFFQEAVSHGKFEELENTDD

SEQ ID NO: 880318 - protein, 587 aa, Homo sapiens
KKEAGGPGLRPLPGSESPGCRRMDGASSGGGGSSEGGGGSSGSGYGVVARFSQCLAEFRTWLRTNWLRFNADKTDVMLPSVESSSPGGSATSDDHEFDPSADMLVHDFDDERTLEEEEMMEGETNFSSEIEDLAREGDMPIHELLSLYGYGSTVRLPEEDEEEEEEEEEGEDDEDADNDDNSGCSGENKEENIKDSSGQEDETQSSNDDPSQSVASQDAQEIIRPRRCKYFDTNSEVEEESEEDEDYIPSEDWKKEIMVGSMFQAEIPVGICRYKENEKVYENDDQLLWDPEYLPEDKVIIFLKDASRRTGDEKGVEAIPEGSHIKDNEQALYELVKCNFDTEEALRRLRFNVKAAREELSVWTEEECRNFEQGLKAYGKDFHLIQANKVRTRSVGECVAFYYMWKKSERYDFFAQQTRFGKKKYNLHPGVTDYMDRLLDESESAASSRAPSPPPTASNSSNSQSEKEDGTVSTANQNGVSSNGPGEILNKEEVKVEGLHINGPTGGNKKPLHADMDTNGYETDNLTTDPKLAHMTARNENDFDEKSERPAKRRRVNSNGKESPGSSEFFQEAVSHGKFEELENTDD

SEQ ID NO: 880319 - protein, 485 aa, Homo sapiens
MLVHDFDDERTLEEEEMMEGETNFSSEIEDLAREGDMPIHELLSLYGYGSTVRLPEEDEEEEEEEEEGEDDEDADNDDNSGCSGENKEENIKDSSGQEDETQSSNDDPSQSVASQDAQEIIRPRRCKYFDTNSEVEEESEEDEDYIPSEDWKKEIMVGSMFQAEIPVGICRYKENEKVYENDDQLLWDPEYLPEDKVIIFLKDASRRTGDEKGVEAIPEGSHIKDNEQALYELVKCNFDTEEALRRLRFNVKAAREELSVWTEEECRNFEQGLKAYGKDFHLIQANKVRTRSVGECVAFYYMWKKSERYDFFAQQTRFGKKKYNLHPGVTDYMDRLLDESESAASSRAPSPPPTASNSSNSQSEKEDGTVSTANQNGVSSNGPGEILNKEEVKVEGLHINGPTGGNKKPLHADMDTNGYETDNLTTDPKLAHMTARNENDFDEKSERPAKRRRVNSNGKESPGSSEFFQEAVSHGKFEELENTDD

SEQ ID NO: 880320 - protein, 512 aa, Homo sapiens; identical to SEQ ID NO: 880317

SEQ ID NO: 880321 - protein, 449 aa, Homo sapiens
MPIHELLSLYGYGSTVRLPEEDEEEEEEEEEGEDDEDADNDDNSGCSGENKEENIKDSSGQEDETQSSNDDPSQSVASQDAQEIIRPRRCKYFDTNSEVEEESEEDEDYIPSEDWKKEIMVGSMFQAEIPVGICRYKENEKVYENDDQLLWDPEYLPEDKVIIFLKDASRRTGDEKGVEAIPEGSHIKDNEQALYELVKCNFDTEEALRRLRFNVKAAREELSVWTEEECRNFEQGLKAYGKDFHLIQANKVRTRSVGECVAFYYMWKKSERYDFFAQQTRFGKKKYNLHPGVTDYMDRLLDESESAASSRAPSPPPTASNSSNSQSEKEDGTVSTANQNGVSSNGPGEILNKEEVKVEGLHINGPTGGNKKPLHADMDTNGYETDNLTTDPKLAHMTARNENDFDEKSERPAKRRRVNSNGKESPGSSEFFQEAVSHGKFEELENTDD

SEQ ID NO: 880322 - protein, 293 aa, Homo sapiens
MAEPSVESSSPGGSATSDDHEFDPSADMLVHDFDDERTLEEEEMMEGETNFSSEIEDLAREGDMPIHELLSLYGYGSTVRLPEEDEEEEEEEEEGEDDEDADNDDNSGCSGENKEENIKDSSGQEDETQSSNDDPSQSVASQDAQEIIRPRRCKYFDTNSEVEEESEEDEDYIPSEDWKKEIMVGSMFQAEIPVGICRYKENEKVYENDDQLLWDPEYLPEDKVIIFLKDASRRTGDEKGVEAIPEGSHIKDNEQALYELVKCNFDTEEALRRLRFNVKAARVTGFGNSTTIT

SEQ ID NO: 880323 - protein, 196 aa, Homo sapiens
MAEPSVESSSPGGSATSDDHEFDPSADMLVHDFDDERTLEEEEMMEGETNFSSEIEDLAREGDMPIHELLSLYGYGSTVRLPEEDEEEEEEEEEGEDDEDADNDDNSGCSGENKEENIKDSSGQEDETQSSNDDPSQSVASQDAQEIIRPRRCKYFDTNSEVEEESEEDEDYIPSEDWKKVVRTIFSQNLDKLIFF

SEQ ID NO: 880324 - protein, 138 aa, Homo sapiens
KKEAGGPGLRPLPGSESPGCRRMDGASSGGGGSSEGGGGSSGSGYGVVARFSQCLAEFRTWLRTNWLRFNADKTDVMLKMCIRCLCLIGLQTVCGLFSCQITSHLLNLQVQEVQQHQMTMNLIHQLTCWFMILMMNEH

SEQ ID NO: 880325 - protein, 126 aa, Homo sapiens
MAEPSVESSSPGGSATSDDHEFDPSADMLVHDFDDERTLEEEEMMEGETNFSSEIEDLAREGDMPIHELLSLYGYGSTVRLPEEDEEEEEEEEEGEDDEDADNDDNSGCSGENKDAIFYDFLGQVD

SEQ ID NO: 880326 - protein, 612 aa, Homo sapiens
KKEAGGPGLRPLPGSESPGCRRMDGASSGGGGSSEGGGGSSGSGYGVVARFSQCLAEFRTWLRTNWLRFNADKTDVMLKMCIRCLCLIGLQTVCGLFFLSNYQPSVESSSPGGSATSDDHEFDPSADMLVHDFDDERTLEEEEMMEGETNFSSEIEDLAREGDMPIHELLSLYGYGSTVRLPEEDEEEEEEEEEGEDDEDADNDDNSGCSGENKEENIKDSSGQEDETQSSNDDPSQSVASQDAQEIIRPRRCKYFDTNSEVEEESEEDEDYIPSEDWKKEIMVGSMFQAEIPVGICRYKENEKVYENDDQLLWDPEYLPEDKVIIFLKDASRRTGDEKGVEAIPEGSHIKDNEQALYELVKCNFDTEEALRRLRFNVKAAREELSVWTEEECRNFEQGLKAYGKDFHLIQANKVRTRSVGECVAFYYMWKKSERYDFFAQQTRFGKKKYNLHPGVTDYMDRLLDESESAASSRAPSPPPTASNSSNSQSEKEDGTVSTANQNGVSSNGPGEILNKEEVKVEGLHINGPTGGNKKPLHADMDTNGYETDNLTTDPKLAHMTARNENDFDEKSERPAKRRRVNSNGKESPGSSEFFQEAVSHGKFEELENTDD

SEQ ID NO: 880327 - protein, 511 aa, Homo sapiens
MKGLTAHESTGGSATSDDHEFDPSADMLVHDFDDERTLEEEEMMEGETNFSSEIEDLAREGDMPIHELLSLYGYGSTVRLPEEDEEEEEEEEEGEDDEDADNDDNSGCSGENKEENIKDSSGQEDETQSSNDDPSQSVASQDAQEIIRPRRCKYFDTNSEVEEESEEDEDYIPSEDWKKEIMVGSMFQAEIPVGICRYKENEKVYENDDQLLWDPEYLPEDKVIIFLKDASRRTGDEKGVEAIPEGSHIKDNEQALYELVKCNFDTEEALRRLRFNVKAAREELSVWTEEECRNFEQGLKAYGKDFHLIQANKVRTRSVGECVAFYYMWKKSERYDFFAQQTRFGKKKYNLHPGVTDYMDRLLDESESAASSRAPSPPPTASNSSNSQSEKEDGTVSTANQNGVSSNGPGEILNKEEVKVEGLHINGPTGGNKKPLHADMDTNGYETDNLTTDPKLAHMTARNENDFDEKSERPAKRRRVNSNGKESPGSSEFFQEAVSHGKFEELENTDD

SEQ ID NO: 880328 - protein, 512 aa, Homo sapiens; identical to SEQ ID NO: 880317

SEQ ID NO: 880329 - protein, 479 aa, Homo sapiens
MAEPSVESSSPGGSATSDDHEFDPSADMLVHDFDDERTLEEEEMMEGETNFSSEIEDLAREGDMPIHELLSLYGYGSTVRLPEEDEEEEEEEEEGEDDEDADNDDNSGCSGENKEENIKDSSGQEDETQSSNDDPSQSVASQDAQEIIRPRRCKYFDTNSEVEEESEEDEDYIPSEDWKKEIMVGSMFQAEIPVGICRYKENEKVYENDDQLLWDPEYLPEDKVIIFLKDASRRTGDEKGVEAIPEGSHIKDNEQALYELVKCNFDTEEALRRLRFNVKAAREELSVWTEEECRNFEQGLKAYGKDFHLIQANKVRTRSVGECVAFYYMWKKSERYDFFAQQTRFGKKKYNLHPGVTDYMDRLLDESESAASSRAPSPPPTASNSSNSQSEKEDGTVSTANQNGVSSNGPGEILNKEEVKVEGLHINGPTGGNKKPLHADMDTNGYETDNLTTDPKLAHMTARNENEKVYENDDQLLWD

SEQ ID NO: 880330 - protein, 149 aa, Homo sapiens
GTTEAEISSGNTPGSTGVTSSQEGTTVVSSGITGIPETSISGPSKEASDKTTAPGPPTTVTASTGVKETSETGVQTGSTLVTAGVPTRPQVSQPETTVVATREVETENKTECLASLPPAPGNNSTTSELFHINGSSCQSNFRGHANKSH

SEQ ID NO: 880331 - protein, 645 aa, Homo sapiens
AEKALEAVGCGLGPGAVAMAVTLEDGAEPPVLTTHLKKVENHITEAQRFSHLPKRSAVDIEFVELSYSVREGPCWRKRGYKTLLKCLSGKFCRRELIGIMGPSGAGKSTFMNILAGYRESGMKGQILVNGRPRELRTFRKMSCYIMQDDMLLPHLTVLEAMMVSANLKLSEKQEVKKELVTEILTALGLMSCSHTRTALLSGGQRKRLAIALELVNNPPVMFFDEPTSGLDSASCFQVVSLMKSLAQGGRTIICTIHQPSAKLFEMFDKLYILSQGQCIFKGVVTNLIPYLKGLGLHCPTYHNPADFIIEVASGEYGDLNPMLFRAVQNGLCAMAEKKSSPEKNEVPAPCPPCPPEVDPIESHTFATSTLTQFCILFKRTFLSILRDTVLTHLRFMSHVVIGVLIGLLYLHIGDDASKVFNNTGCLFFSMLFLMFAALMPTVLTFPLEMAVFMREHLNYWYSLKAYYLAKTMADVPFQVVCPVVYCSIVYWMTGQPAETSRFLLFSALATATALVAQSLGLLIGAASNSLQVATFVGPVTAIPVLLFSGFFVSFKTIPTYLQWSSYLSYVRYGFEGVILTIYGMERGDLTCLEERCPFREPQSILRALDVEDAKLYMDFLVLGIFFLALRLLAYLVLRYRVKSER

SEQ ID NO: 880332 - protein, 127 aa, Homo sapiens
RGGLSLTCGSAALGTSLAFHLLLVCFTSYRYGVRAQAVARLDTVLLALLVCLGALVDAYPIKPEAPGEDASPEELNRYYASLRHYLNLVTRQRYGKRDGPDRLLSKTFFPDGEDRPVRSRSEGPDLW

SEQ ID NO: 880333 - protein, 113 aa, Homo sapiens
MVFVRRPWPALTTVLLALLVCLGALVDAYPIKPEAPGEDASPEELNRYYASLRHYLNLVTRQRYGKRDGPDRLLSKTFFPDGEDRPVRSRYKAPVTTHPASESAAWPYPGNIT

SEQ ID NO: 880334 - protein, 70 aa, Homo sapiens
YFLGDTDPLLEEAHDHTAGVPFRDCQAPVAVQTLSSLHAQQGHQQDQGKGLHGIGTAHSSSLASHLVSIN

SEQ ID NO: 880335 - protein, 82 aa, Homo sapiens
VDPEGLLGGSCRLTSPAGSTSARPRNRQNVPTAVSLRWLIAPRAKMKPCQNSGSSAKASHAPSSLQKSHGSRLFRSPQIPVD

SEQ ID NO: 880336 - protein, 136 aa, Homo sapiens
HTALLHGAAAPQPRRSLLLADWLGRRVGGCYTGDLLVRKHILSHWRNDAPILSYLFLDVAQSGFSVVAARGGAPRATPLLLLHAGAGWALSPPLTWGRQGAGRGRLCLVLPLRSYLFLQISPLADSSPGKNETLPE

SEQ ID NO: 880337 - protein, 72 aa, Homo sapiens
SGAGPRRRVSGRAWLGPVLGWGQGLGPGPGVSRNLGVGRGGKWGAVRLGAGPELVLRRGSRAQGAPELEVEA

SEQ ID NO: 880338 - protein, 94 aa, Homo sapiens
SGAGPRRRVSGRAWLGPVLGWGQGLGPGPGDMAAYQQEGQMQLPRADAIRSRLIDTFSLIEHLQGLSQAVLRHTIRSYLILPARRNLCWEINTS

SEQ ID NO: 880339 - protein, 72 aa, Homo sapiens; identical to SEQ ID NO: 880337

SEQ ID NO: 880340 - protein, 199 aa, Homo sapiens
EPALSSSCVGVAGLRGRLSWRWKREVRTEWAKRTWAEVRPRSENGGEKELAPEGVLEWTHLGRDPFSKCQALAFCPISLHLVSLAWAGQALPQLHLIARFSQAQVGPRFFFVQPRAPALVAAPFLLSFLFCFVLFCLRCRLALSPTLECSGAISAHCKLCLPGSRHSPASASRVAGPTGARHHARLIFCIFSRDRVSPC

SEQ ID NO: 880341 - protein, 408 aa, Homo sapiens
MPVISSRQDCDSATSTVTDILCAAEVKSSKGTEDRGRILGDSNLEVSKLLSQFPLKSTETSKVPDNKNVLDKTRVTKDFLQDNLFSGPGPKEPTGLSPFLLLPPRPPPARPEKLPELPAQKRQLPVFAKICSKPKADPAVERHHLMEWSPGTKEPKKGQGSLFLSQWPQSQKDACGEEGCCDAVGTASLTLPPKKPTCPAEKNLLYEFLGATKNPSGQPRLRNKVEVDGPELKFNAPVTVADKNNPKYTGNVFTPHFPTAMTSATLNQPLWLNLNYPPPPVFTNHSTFLQYQGLYPQQAARMPYQQALHPQLGCYSQQVMPYNPQQMGQQIFRSSYTPLLSYIPFVQPNYPYPQRTPPKMSANPRDPPLMAGDGPQYLFPQGYGFGSTSGGPLMHSPYFSSSGNGINF

SEQ ID NO: 880342 - protein, 133 aa, Homo sapiens
SDSAHLHPGEINSHVAHTKPVWWSLHMDAHEIWCRDSDRGTSLGRSIPRPPALCSVRKIHLQPQVLRPTSPRNISPISNPDQKIFLFQSVSFIYDQRLNPVIKSEAPGYLYITGPMIHCFRTYLHMGWDDFLN

SEQ ID NO: 880343 - protein, 429 aa, Homo sapiens
MPLCRPEHLMPRASRVPVAASLPLSHAVIPTQLPSRSGHRPPGRPRRCPKASCLPPPVGPSSTQTAKRVTMGWPRPGRALVAVKALLVLSLLQVPAQAVVRAVLEDNSSSVDFADLPALFGVPLAPEGIRGYLMEVKPANACHPIEAPRLGNRSLGSIALIRRYDCTFDLKVLNAQRAGFEAAIVHNVHSDDLVSMTHVYEDLRGQIAIPSVFVSEAASQDLRVILGCNKSAHALLLPDDPPCHDLGCHPVLTVSWVLGCTLALVVSAFFVLNHLWLWAQACCSHRRPVKTSTCQKAQVRTFTWHNDLCAICLDEYEEGDQLKILPCSHTYHCKCIDPWFSQAPRRSCPVCKQSVAATEDSFDSTTYSFRDEDPSLPGHRPPIWAIQVQLRSRRLELLGRASPHCHCSTTSLEAEYTTVSSAPPEAPGQ

SEQ ID NO: 880344 - protein, 88 aa, Homo sapiens
PQSTFKNKEVSAHGSPSRFPSIMTAIRLREFIERRPVIPPSIFIAHQGRDVQGYYPGQLARLHFDHSAKRAPRLEPEISHSFAESSTA

SEQ ID NO: 880345 - protein, 103 aa, Homo sapiens
LLTFCSSIFIAHQGRDVQGYYPGQLARLHFDHSAKRAPRHSKPAEPWYKETTYRRDYSLPFYEIDWNQKLATVSLNPRPLNSLPELYCCEERSSFERNAFKLK

SEQ ID NO: 880346 - protein, 60 aa, Homo sapiens
MALPCGMGTAWYLDSTENALTVNVPRAQNHKASHNSMWKLGSHFYCILLVTKDPPGFTMV

SEQ ID NO: 880347 - protein, 153 aa, Homo sapiens [sequence omitted]

SEQ ID NO: 880348 - protein, 75 aa, Homo sapiens
EQEGKAEGGCMYARTCKIRRDFLRILSLTLLFLCRNFACEPLESLLMSRSQWLMPVIPALWEAEAGGSPEARNRD

SEQ ID NO: 880349 - protein, 109 aa, Homo sapiens
YVGQADLELPTSGDPPASASQSAGITGVSHCTRLSLVLRHLLDTPSLRAERSPRPVPRDKAQGRVYLGSRGGEGVEKAELESITLPTNHQTAGTLQPNAGRRTWRVSLC

SEQ ID NO: 880350 - protein, 122 aa, Homo sapiens
VLPRLVLHSWAQEILPPWSPKVLGCQVCTAILGLTLLFLSQPLCLTIPLSVPSPTQPPTLLLSLIFSFPYEAILMKSGTGRSLGTDKCQLSLAVSLPHGCSREGGQRAEVTVAKPETEAQLW

SEQ ID NO: 880351 - protein, 66 aa, Homo sapiens
PMTWCTTLDTIILEQHCTLTSQSVDILKARATFKTLDFIDALVLSKILVRVKHSMGTRAVRNILTT

SEQ ID NO: 880352 - protein, 115 aa, Homo sapiens
MSWDRKPGTLALLLLMPYTRADLGENRKYCSHNTNWFYRHCSLAFVFSFLLGTRIFEGGIISPTILHLTFPTVLSTTEASHSPREEVICFLEILTVSRFPPRGAISSHGWHFFSS

SEQ ID NO: 880353 - protein, 116 aa, Homo sapiens
FLGHRPGALWGLPYASPPSSPELVVTRAASYREHGWDADGERADREGGRHGVGKPALTATAEPGLARIHRGGRQILSREICPSHETCACFLSRSQQAADCLDGETTGESYLLLWEQ

SEQ ID NO: 880354 - protein, 116 aa, Homo sapiens; identical to SEQ ID NO: 880353

SEQ ID NO: 880355 - protein, 133 aa, Homo sapiens
TGRVLCGAYPTPLRRPPPNWWLRGPRVTVSTAGMLTGKELTEKADGMVLGSPLSQQPPNPAWPESTEEGAKSSLVRSALLTKLALASSRGNFMALLGPDIAIFPGGRCNTENLLRCCGTCARSARRPRASLVR

SEQ ID NO: 880356 - protein, 557 aa, Homo sapiens
MDSTVPSALELPQRLALNPRESPRSPEEEEPHLLSSLAAVQTLASVIRPCYGPHGRQKFLVTMKGETVCTGCATAILRALELEHPAAWLLREAGQTQAENSGDGTAFVVLLTEALLEQAEQLLKAGLPRPQLREAYATATAEVLATLPSLAIQSLGPLEDPSWALHSVMNTHTLSPMDHLTKLVAHACWAIKELDGSFKPERVGVCALPGGTLEDSCLLPGLAISGKLCGQMATVLSGARVALFACPFGPAHPNAPATARLSSPADLAQFSKGSDQLLEKQVGQLAAAGINVAVVLGEVDEETLTLADKYGIVVIQARSWMEIIYLSEVLDTPLLPRLLPPQRPGKCQRVYRQELGDGLAVVFEWECTGTPALTVVLRGATTQGLRSAEQAVYHGIDAYFQLCQDPRLIPGAGATEMALAKMLSDKGSRLEGPSGPAFLAFAWALKYLPKTLAENAGLAVSDVMAEMSGVHQGGNLLMGVGTEGIINVAQEGVWDTLIVKAQGFRAVAEVVLQLVTVDEIVVAKKSPTHQEIWNPDSKKTKKHPPPVETKKILGLNN

SEQ ID NO: 880357 - protein, 342 aa, Homo sapiens
MEEELAIQQGQLETTLKELQTLRNMQKEAIAAHKQENKLHLQQHVSMEFLKLHQFLHSKEKDILTELREEGKALNEEMELNLSQLQEQCLLAKDMLVSIQAKTEQQNSFDFLKDITTLLHSLEQGMKVLATRELISRKLNLGQYKGPIQYMVWREMQDTLCPGLSPLTLDPKTAHPNLVLSKSQTSVWHGDIKKIMPDDPERFDSSVAVLGSRGFTSGKWYWEVEVAKKTKWTVGVVRESIIRKGSCPLTPEQGFWLLRLRNQTDLKALDLPSFSLTLTNNLDKVGIYLDYEGGQLSFYNAKTMTHIYTFSNTFMEKLYPYFCPCLNDGGENKEPLHILHPQ

SEQ ID NO: 880358 - protein, 263 aa, Homo sapiens
MEEELAIQQGQLETTLKELQTLRNMQKEAIAAHKDITTLLHSLEQGMKVLATRELISRKLNLGQYKGPIQYMVWREMQDTLCPGLSPLTLDPKTAHPNLVLSKSQTSVWHGDIKKIMPDDPERFDSSVAVLGSRGFTSGKWYWEVEVAKKTKWTVGVVRESIIRKGSCPLTPEQGFWLLRLRNQTDLKALDLPSFSLTLTNNLDKVGIYLDYEGGQLSFYNAKTMTHIYTFSNTFMEKLYPYFCPCLNDGGENKEPLHILHPQ

SEQ ID NO: 880359 - protein, 239 aa, Homo sapiens
ARGLLAKDMLDITTLLHSLEQGMKVLATRELISRKLNLGQYKGPIQYMVWREMQDTLCPGLSPLTLDPKTAHPNLVLSKSQTSVWHGDIKKIMPDDPERFDSSVAVLGSRGFTSGKWYWEVEVAKKTKWTVGVVRESIIRKGSCPLTPEQGFWLLRLRNQTDLKALDLPSFSLTLTNNLDKVGIYLDYEGGQLSFYNAKTMTHIYTFSNTFMEKLYPYFCPCLNDGGENKEPLHILHPQ

SEQ ID NO: 880360 - protein, 501 aa, Homo sapiens
MEVSTNPSSNIDPGDYVEMNDSITHLPSKVVIQDITMELHCPLCNDWFRDPLMLSCGHNFCEACIQDFWRLQAKETFCPECKMLCQYNNCTFNPVLDKLVEKIKKLPLLKGHPQCPEHGENLKLFSKPDGKLICFQCKDARLSVGQSKEFLQISDAVHFFMEELAIQQGQLETTLKELQTLRNMQKEAIAAHKQENKLHLQQHVSMEFLKLHQFLHSKEKDILTELREEGKALNEEMELNLSQLQEQCLLAKDMLVSIQAKTEQQNSFDFLKDITTLLHSLEQGMKVLATRELISRKLNLGQYKGPIQYMVWREMQDTLCPGLSPLTLDPKTAHPNLVLSKSQTSVWHGDIKKIMPDDPERFDSSVAVLGSRGFTSGKWYWEVEVAKKTKWTVGVVRESIIRKGSCPLTPEQGFWLLRLRNQTDLKALDLPSFSLTLTNNLDKVGIYLDYEGGQLSFYNAKTMTHIYTFSNTFMEKLYPYFCPCLNDGGENKEPLHILHPQ

SEQ ID NO: 880361 - protein, 328 aa, Homo sapiens
MAANSTSDLHTPGTQLSVADIIVITVYFALNVAVGIWSSCRASRNTVNGYFLAGRDMTWWPIGASLFASSEGSGLFIGLAGSGAAGGLAVAGFEWNATYVLLALAWVFVPIYISSEIVTLPEYIQKRYGGQRIRMYLSVLSLLLSVFTKISLDLYAGALFVHICLGWNFYLSTILTLGITALYTIAGGLAAVIYTDALQTLIMVVGAVILTIKAFDQIGGYGQLEAAYAQAIPSRTIANTTCHLPRTDAMHMFRDPHTGDLPWTGMTFGLTIMATWYWCTDQVIVQRSLSARDLNHAKAGSILASYLKMLPMGLIIMPGMISRALFPG

SEQ ID NO: 880362 - protein, 301 aa, Homo sapiens
MAANSTSDLHTPGTQLSVADIIVITVYFALNVAVGIWSSCRASRNTVNGYFLAGRDMTWWPIGASLFASSEGSGLFIGLAGSGAAGGLAVAGFEWNATYVLLALAWVFVPIYISSEIVTLPEYIQKRYGGQRIRMYLSVLSLLLSVFTKISLDLYAGALFVHICLGWNFYLSTILTLGITALYTIAAFDQIGGYGQLEAAYAQAIPSRTIANTTCHLPRTDAMHMFRDPHTGDLPWTGMTFGLTIMATWYWCTDQVIVQRSLSARDLNHAKAGSILASYLKMLPMGLIIMPGMISRALFPG

SEQ ID NO: 880363 - protein, 130 aa, Homo sapiens
MAANSTSDLHTPGTQLSVADIIVITVYFALNVAVGIWSSCRASRNTVNGYFLAGRDMTWWPIGASLFASSEGSGLFIGLAGSGAAGGLAYCRRFAFSGSPLESGGTWPWPALKAEFRAFHSYSSFLSHIS

SEQ ID NO: 880364 - protein, 171 aa, Homo sapiens
MAANSTSDLHTPGTQLSVADIIVITVYFALNVAVGIWSSCRASRNTVNGYFLAGRDMTWWPIGASLFASSEGSGLFIGLAGSGAAGGLAVAGFEWNATYVLLALAWVFVPIYISSEQQTPYRSLRQMPLAYCRRFAFSGSPLESGGTWPWPALKAEFRAFHSYSSFLSHIS

SEQ ID NO: 880365 - protein, 146 aa, Homo sapiens
MCMERGGESTKGMVLAYRHEAPTTQGRPGGPGSSAAPHVPISHAARHQQPSPLHFSQETESCSIPQVGVQWHDLGSLQPPPPGFKWFSCLSLSSIWDYRWRKEVPSQGMQHGPLEAGMTLTSRPARNQGTQSYPSEQEIDSPLQPL

SEQ ID NO: 880366 - protein, 122 aa, Homo sapiens
LNIILDHFKYHLCTHAICAWNVEARVQKAWCLPIDMRPLQPREGPVVQDPVLLPMCPSHMLLGTSSHHHSTSLKRWRKEVPSQGMQHGPLEAGMTLTSRPARNQGTQSYPSEQEIDSPLQPL

SEQ ID NO: 880367 - protein, 84 aa, Homo sapiens
VETSGLRPSRGRLWLMNPCLQPGTLLLQPCSTDRFSSFILMFHKVFQKSSAPFHTPTAVAWSSDFKWVLTTKKRKMDKLLLASL

SEQ ID NO: 880368 - protein, 763 aa, Homo sapiens
PGRGEDGPAGQTDRGPGGRRAAQPRPPWIRRQPGPGLSTCPPGECAGQTMLDTMEAPGHSRQLLLQLNNQRTKGFLCDVIIVVQNALFRAHKNVLAASSAYLKSLVVHDNLLNLDHDMVSPAVFRLVLDFIYTGRLADGAEAAAAAAVAPGAEPSLGAVLAAASYLQIPDLVALCKKRLKRHGKYCHLRGGGGGGGGYAPYGRPGRGLRAATPVIQACYPSPVGPPPPPAAEPPSGPEAAVNTHCAELYASGPGPAAALCASERRCSPLCGLDLSKKSPPGSAAPERPLAERELPPRPDSPPSAGPAAYKEPPLALPSLPPLPFQKLEEAAPPSDPFRGGSGSPGPEPPGRPDGPSLLYRWMKHEPGLGSYGDELGRERGSPSERCEERGGDAAVSPGGPPLGLAPPPRYPGSLDGPGAGGDGDDYKSSSEETGSSEDPSPPGGHLEGYPCPHLAYGEPESFGDNLYVCIPCGKGFPSSEQLNAHVEAHVEEEEALYGRAEAAEVAAGAAGLGPPFGGGGDKVAGAPGGLGELLRPYRCASCDKSYKDPATLRQHEKTHWLTRPYPCTICGKKFTQRGTMTRHMRSHLGLKPFACDACGMRFTRQYRLTEHMRIHSGEKPYECQVCGGKFAQQRNLISHMKMHAVGGAAGAAGALAGLGGLPGVPGPDGKGKLDFPEGVFAVARLTAEQLSLKQQDKAAAAELLAQTTHFLHDPKVALESLYPLAKFTAELGLSPDKAAEVLSQGAHLAAGPDGRTIDRFSPT

SEQ ID NO: 880369 - protein, 108 aa, Homo sapiens
ARRPGRRTALTRPVCVPAGECAGQTMLDTMEAPGHSRQLLLQLNNQRTKGFLCDVIIVVQNALFRAHKNVLAASSAYLKSLVVHDNLLNLDHDMVSPAVFRLVLDFIY

SEQ ID NO: 880370 - protein, 129 aa, Homo sapiens
MIPGVGNVLVGPELSCSLCRLMLLILTRGLVLTQRSNSSLVNLIFGTIRGEDKKPGNWGDAKVITFCLLKFACSFQLDAVPSISHPTFLQSCDTVLQRRATNLHPHAGRNPEGCTLSHDSIYETRMVGF

SEQ ID NO: 880371 - protein, 569 aa, Homo sapiens
PAHLPRRPGRPPAPGSSGPPMMGSVLPAEALVLKTGLKAPGLALAEVITSDILHSFLYGRWRNVLGEQLFEDKSHHASPKTAFTAEVLAQSFSGEVQKLSSLVLPAEVIIAQSSIPGEGLGIFSKTWIKAGTEMGPFTGRVIAPEHVDICKNNNLMWEVFNEDGTVRYFIDASQEDHRSWMTYIKCARNEQEQNLEVVQIGTSIFYKAIEMIPPDQELLVWYGNSHNTFLGIPGVPGLEEDQKKNKHEDFHPADSAAGPAGRMRCVICHRGFNSRSNLRSHMRIHTLDKPFVCRFCNRRFSQSSTLRNHVRLHTGERPYKCQVCQSAYSQLAGLRAHQKSARHRPPSTALQAHSPALPAPHAHAPALAAAAAAAAAAAAHHLPAMVLLSAPAPPPGPARSWVPGTPAPQRDSPSSPNPRPGAAAEPRALGLRPGGGSQAPPPWPVSQMRTLRAASLTQATQLVRLFGRLLWEGVPLPGLAPESPCCCRAGRPGRHPPRGWQESGLRAPEGPSAEEGESPPPPPRVLCFGMKGGRPPCPGVVGRGGCGGAISSSGPWDWCPEVSGVLTQP

SEQ ID NO: 880372 - protein, 233 aa, Homo sapiens
MFPLTEENKHVAQLLLNTGTCPRCIFRFCGVDFHAPYKLPYKELLNELQKFLETEKDELILEVMNPPPKKIRLQELEDSIDNLSQNGEGRISVSHVGSTASKNSNLNVCNVCLGILQEFCEKDFIKKVCQKVEASGFEFTSLVFSVSFPPQLSVREHAAWLLVKQEMGKQSLSLGRDDIVQLKEAYKWITHPLFSEELGVPIDGKSLFEVSVGFAHPETVEDCHFLAAICPDC

SEQ ID NO: 880373 - protein, 233 aa, Homo sapiens; identical to SEQ ID NO: 880372

SEQ ID NO: 880374 - protein, 111 aa, Homo sapiens
STLAPTSDRKILTSLIRLAGSLSPHQFEGLPISIIHLEAHQLSQKAWEPFNTPIRLGLPISPIKLELHCLTHQSITPGQVQWLPPVIQALWEAEAGGSPEVRNSRQTWPTR

SEQ ID NO: 880375 - protein, 768 aa, Homo sapiens
MDVKERKPYRSLTRRRDAERRYTSSSADSEEGKAPQKSYSSSETLKAYDQDARLAYGSRVKDIVPQEAEEFCRTGANFTLRELGLEEVTPPHGTLYRTDIGLPHCGYSMGAGSDADMEADTVLSPEHPVRLWGRSTRSGRSSCLSSRANSNLTLTDTEHENTETDHPGGLQNHARLRTPPPPLSHAHTPNQHHAASINSLNRGNFTPRSNPSPAPTDHSLSGEPPAGGAQEPAHAQENWLLNSNIPLETRNLGKQPFLGTLQDNLIEMDILGASRHDGAYSDGHFLFKPGGTSPLFCTTSPGYPLTSSTVYSPPPRPLPRSTFARPAFNLKKPSKYCNWKCAALSAIVISATLVILLAYFVAMHLFGLNWHLQPMEGQMYEITEDTASSWPVPTDVSLYPSGGTGLETPDRKGKGTTEGKPSSFFPEDSFIDSGEIDVGRRASQKIPPGTFWRSQVFIDHPVHLKFNVSLGKAALVGIYGRKGLPPSHTQFDFVELLDGRRLLTQEARSLEGTPRQSRGTVPPSSHETGFIQYLDSGIWHLAFYNDGKESEVVSFLTTAIALPPRLKEMKSQESAAGSKLVLRCETSSEYSSLRFKWFKNGNELNRKNKPQNIKIQKKPGKSELRINKASLADSGEYMCKVISKLGNDSASANITIVESNEIITGMPASTEGAYVSSESPIRISVSTEGANTSSSTSTSTTGTSHLVKCAEKEKTFCVNGGECFMVKDLSNPSRYLCKCPNEFTGDRCQNYVMASFYSTSTPFLSLPE

SEQ ID NO: 880376 - protein, 299 aa, Homo sapiens
MLESHLIIYFLLAVIQFLLGIFTNGIIVVVNGIDLIKHRKMAPLDLLLSCLAVSRIFLQLFIFYVNVIVIFFIEFIMCSANCAILLFINELELWLATWLGVFYCAKVASVRHPLFIWLKMRISKLVPWMILGSLLYVSMICVFHSKYAGFMVPYFLRKFFSQNATIQKEDTLAIQIFSFVAEFSVPLLIFLFAVLLLIFSLGRHTRQMRNTVAGSRVPGRGAPISALLSILSFLILYFSHCMIKVFLSSLKFHIRRFIFLFFILVIGIYPSGHSLILILGNPKLKQNAKKFLLHSKCCQ

SEQ ID NO: 880377 - protein, 259 aa, Homo sapiens
MAPLDLLLSCLAVSRIFLQLFIFYVNVIVIFFIEFIMCSANCAILLFINELELWLATWLGVFYCAKVASVRHPLFIWLKMRISKLVPWMILGSLLYVSMICVFHSKYAGFMVPYFLRKFFSQNATIQKEDTLAIQIFSFVAEFSVPLLIFLFAVLLLIFSLGRHTRQMRNTVAGSRVPGRGAPISALLSILSFLILYFSHCMIKVFLSSLKFHIRRFIFLFFILVIGIYPSGHSLILILGNPKLKQNAKKFLLHSKCCQ

SEQ ID NO: 880378 - protein, 152 aa, Homo sapiens [sequence omitted]

SEQ ID NO: 880379 - protein, 205 aa, Homo sapiens
MPGFEGAGDGLVQTWGLLAAGAGSEEVSSQPRQGINLGHSSHSQDLPVTMAVGKFLLGSLLLLSLQLGQGWGPDARGVPVADGEFSSEQVAKAGGTWLGTHRPLARLRRALSGPCQLWSLTLSVAELGLGYASEEKVIFRYCAGSCPRGARTQHGLALARLQGQGRAHGGPCCRPTRYTDVAFLDDRHRWQRLPQLSAAACGCGG

SEQ ID NO: 880380 - protein, 226 aa, Homo sapiens
RWRRAARGHLLFFAKSEPERQAAAAAEGSATVSAGARTARAREEPPRARALRATPATSSRELCPGDRARVMTTNPKPNKALKVKKEAGENAPVLSDDELVSMSVRELNQHLRGLTKEEVTRLKQRRRTLKNRGYAASCRIKRVTQKEELERQRVELQQEVEKLARENSSMRLELDALRSKYEALQTFARTVARGPVAPSKVATTSVITIVKSTELSSTSVPFSAAS

SEQ ID NO: 880381 - protein, 226 aa, Homo sapiens; identical to SEQ ID NO: 880380

SEQ ID NO: 880382 - protein, 106 aa, Homo sapiens
MVCRQLRPSSCPVAVPVIRVCLSRGLREWARCGRSPAWGGVCVCARTPAIKAAGLRGCSLLVFTGGGPVGTHGRESVPHRESVPHRESVNSTPHQREVGILKITAA

SEQ ID NO: 880383 - protein, 202 aa, Homo sapiens
MATLIYVDKENEEPGILVATKDGLKLGSGPSIKALDGRSQVSISCFGKTFDAPTSLPKATRKALGTVNRATEKSVKTNGPLKQKQPSFSAKKMTEKTVKAKNSVPASDDGYPEIEKLFPFNPLGFESFDLPEEHQIAHLPLSEVPLMILDEERELEKLFQLGPPSPLKMPSPPWKSNLLQSPLSILLTLDVELPPVCCDIDI

SEQ ID NO: 880384 - protein, 954 aa, Homo sapiens
DLDSVSRSEIALGCKDLNHVSLSSLIPELDVTSEYINSDTLVREINKHTSPEEYNLNLFLQEKKHINLTKLGLNVQKHPGNEKEDSLQYLANKKYTQGRGSHSQEMRYNRQNRWKRQNFHEFPPLFAFPSLSQTDLEELTYFFPEDHAEDVQQEFFPSWPTPSGLTEYSTLTLCQETLANSSIGRLCLAFLGKRLDSVIEMCVKDVLLKDDLSWAEAGVALLENECEKRIVEEGKYNTEEYGTSIEDILSVLKCPNLCSGNGQCMEWGCACSPSFSSYDCSDSYDKAPEITELGNAGFCDVQKYNCMMVRVFGKGFKELPSIKCEVTKLQYNSSEWMPGEPIYTQTVFHNSRAVDCQLPTDVQQFDTMDLVGGKPTGKWQLKVSNDGYKFSNPKITVIYDGACQVCGLYKNDSCTIKENVCIIDGLCYVEGDKNPTSPCLICRPKISRFTWSFLENNQPPVIQALQDKLQTFYGENFEYQFVAFDPEGSDIHFTLDSGPEGASVSSAGLFMWKTDLLTTQQITVRLNDDCDAETRVTIEVTVKSCDCLNGGSCVSDRNFSPGSGVYLCVCLPGFHGSLCEVDISGCQSNPCGLGSYISGFHSYSCDCPPELKVETQFVNQFTTQTVVLTRSDKSVNKEEDDKNAQGRKRHVKPTSGNAFTICKYPCGKSRECVAPNICKCKPGYIGSNCQTALCDPDCKNHGKCIKPNICQCLPGHGGATCDEEHCNPPCQHGGTCLAGNLCTCPYGFVGPRCETMVCNRHCENGGQCLTPDICQCKPGWYGPTCSTALCDPVCLNGGSCNKPNTCLCPNGFFGEHCQNAFCHPPCKNGGHCMRNNVCVCREGYTGRRFQKSICDPTCMNGGKCVGPSTCSCPSGWSGKRCNTPICLQKCKNGGECIAPSICHCPSSWEGVRCQIPICNPKCLYGGRCIFPNVCSCRTEYSGVKCEKKIQIRRH

SEQ ID NO: 880385 - protein, 796 aa, Homo sapiens
MEAGGERFLRQRQVLLLFVFLGGSLAGSESRRYSVAEEKEKGFLIANLAKDLGLRVEELAARGAQVVSKGNKQHFQLSHQTGDLLLNEKLDREELCGPTEPCILHFQILLQNPLQFVTNELRIIDVNDHSPVFFENEMHLKILESTLPGTVIPLGNAEDLDVGRNSLQNYTITPNSHFHVLTRSRRDGRKYPELVLDKALDREEQPELSLTLTALDGGSPPRSGTAQINIQVLDINDNAPEFAQPLYEVAVLENTPVNSVIVTVSASDLDTGSFGTISYAFFHASEEIRKTFQLNPITGDMQLVKYLNFEAINSYEVDIEAKDGGGLSGKSTVIVQVVDVNDNPPELTLSSVNSPIPENSGETVLAVFSVSDLDSGDNGRVMCSIENNLPFFLKPSVENFYTLVSEGALDRETRSEYNITITITDLGTPRLKTKYNITVLVSDVNDNAPAFTQISYTLFVRENNSPALHIGSVSATDRDSGTNAQVTYSLLPPQDPHLPLSSLVSINADNGHLFALRSLDYEALQAFEFRVGATDRGSPALSSEALVRVLVLDANDNSPFVLYPLQNGSAPCTELVPRAAEPGYLVTKVVAVDGDSGQNAWLSYQLLKATEPGLFGVWAHNGEVRTARLLSERDAAKHRLVVLVKDNGEPPRSATATLHVLLVDGFSQPYLPLPEAAPAQAQADLLTVYLVVALASVSSLFLFSVLLFVAVRLCRRSRAASVGRCSVPEGPFPGQMVDVSGTGTLSQSYQYEVCLTGGSGTNEFKFLKPIIPNFVAQGAERVSEANPSFRKSFEFS

SEQ ID NO: 880386 - protein, 375 aa, Homo sapiens
MSLMVISMACVGFFLLQGAWTHEGGQDKPLLSAWPSAVVPRGGHVTLLCRSRLGFTIFSLYKEDGVPVPELYNKIFWKSILMGPVTPAHAGTYRCRGSHPRSPIEWSAPSNPLVIVVTGLFGKPSLSAQPGPTVRTGENVTLSCSSRSSFDMYHLSREGRAHEPRLPAVPSVNGTFQADFPLGPATHGGTYTCFGSLHDSPYEWSDPSDPLLVSVTGNSSSSSSSPTEPSSKTGIRRHLHILIGTSVAIILFIILFFFLLHCCCSNKKNAAVMDQEPAGDRTVNREDSDDQDPQEVTYAQLDHCVFTQTKITSPSQRPKTPPTDTTMYMELPNAKPRSLSPAHKHHSQALRGSSRETTALSQNRVASSHVPAAGI

SEQ ID NO: 880387 - protein, 84 aa, Homo sapiens
FLEVGINYQSPTVVPGGAVAKVQRAVCVLNNTTAITEAWARLNQKFDLMYAKRAFMHCYVDRGMEEGELSGPERTWLPWRRIMK

SEQ ID NO: 880388 - protein, 102 aa, Homo sapiens
MMFHATFYSCLHKSRKRKREHISPYLLISNSLLRGQDYLQGKKRGMPSPPSRSYVPVPEHLFPSTLKRSKCFASNSQIIYSQGEKCFKTEVLNGIKYCQQTK

SEQ ID NO: 880389 - protein, 134 aa, Homo sapiens
EHHVGAQKASDFGAFGFRIFPDLGCATWTNIWIPAVDPSMAPALAEMGKAAPWASLALRPRRVLPALLFLPGLWNSVRQGAGDLRLASPTSPGQWWTPGLCCCSALASPGGLGPTQRGPGWRPPQSTQNTQGSL

SEQ ID NO: 880390 - protein, 138 aa, Homo sapiens
SSTYAFAISLLPSVFQPKNLIVILKTCGTLPLPSNTLTVQQQVLLPTNAKYFSNLSPFVYLPCCHPSANHHCHQLCSSSLSWPPGLLQSILHAETKATKKKKSKLDYVISLSESSEWLPTAFMIKYKLLALACNTPHD

SEQ ID NO: 880391 - protein, 76 aa, Homo sapiens
CVGTFSRKYLLQIASSGDDSKGQFWSTQAIADRVTSGLYTVPGLSLPDITLGSSRLKQGAPSKGPQRKQLSLRVKK

SEQ ID NO: 880392 - protein, 103 aa, Homo sapiens
MRQSLGCKKLTRDQHLCKEAGGSTIEVEKDEEVELPCRPDRALPNQWGTRRKSCLPVSHVEPKQSCFYLSTLLSHQMQATPRRVCFSLQLRLMLRSWELEATC

SEQ ID NO: 880393 - protein, 103 aa, Homo sapiens; identical to SEQ ID NO: 880392

SEQ ID NO: 880394 - protein, 106 aa, Homo sapiens [sequence omitted]

SEQ ID NO: 880395 - protein, 67 aa, Homo sapiens
FAATMRTELPLPRTRMGETAASRHLGTPGDTWGGVRGEDWETLLHLRDTTWGRGQGPTQEGPWLRDT

SEQ ID NO: 880396 - protein, 130 aa, Homo sapiens
MFRKHHWSRSRIGAASMSSNLASLLKSSRASRAQTTARPARSGPNHRPLRDQLGRAQTTAHCGTSSVGPKPPPTAGPARSGPNHCPLRDQLGRGDPNPAALEELKKHTQKYRYLARVFCMSDTYGSNRTH

SEQ ID NO: 880397 - protein, 31 aa, Homo sapiens
MAPPGPANYSCSPTQKRFSTREDPVSHPTMA

SEQ ID NO: 880398 - protein, 291 aa, Homo sapiens
MGVAARPPALRHWFSHSIPLAIFALLLLYLSVRSLGARSGCGPRAQPCVPGETAPFQVRQESGTLEAPERKQPPCLGPRGMLGRMMRRFHASLKPEGDVGLSPYLAGWRALVEFLTPLGSVFAFATREAFTKVTDLEARVHGPDAEHYWSLAAMAAWERRAGLLEQPGAAPRDPTRSSGSRTLLLLHRALRWSQLCLHRVATGALGGPEAGVQCSDAYRAALGPHHPWLVRQTARLAFLAFPGRRRLLELACPGATEAEARAALLRAAGTLEDVYNRTQSLLAERGLLQLA

SEQ ID NO: 880399 - protein, 184 aa, Homo sapiens
MGVAARPPALRHWFSHSIPLAIFALLLLYLSVRSLGARSGCGPRAQPCVPGETAPFQVRQESGTLEAPERKQPPCLGPRGMLGRMMRRFHASLKPEGDVGLSPYLAGWRALVEFLTPLGSVFAFATAPAGLRRRLRGPAGTERTARGGAAQPGVSPAARAAAASVSRLFRDVAAARAAPGREWR

SEQ ID NO: 880400 - protein, 114 aa, Homo sapiens
RRDTDWLGAGEGAAVPAAGMGVAARPPALRHWFSHSIPLAIFALLLLYLSVRSLGELPLPSLAPGGSPESRPSRLKPLSRALTAPLLLYPGARSGCGPRAQPCVPGETAPFQVR

SEQ ID NO: 880401 - protein, 122 aa, Homo sapiens
APRDPTRSSGSRTLLLLHRALRWSQLCLHRVATGALGGPEAGVQCSDAYRAALGPHHPWLVRQTARLAFLAFPGRRRLLELACPGATEAEARAALLRAAGTLEDVYNRTQSLLAERGLLQLA

SEQ ID NO: 880402 - protein, 114 aa, Homo sapiens
WFVGRFPGFFFYYQLGCHICLYACFMINTCKRPGYAKCQLYKIMSSCFATWYCQFRLTQVVKKHPQCPKSLPTLSVTRLLNFYQSGQWIIALKSYFYCDLESNIFSVRNACTML

SEQ ID NO: 880403 - protein, 79 aa, Homo sapiens
MRVHQKMTYSSKVSAKHTSLRRQLQLEDKQEDLEARAEAEHQRAFRDYTTWKLTLTKVAGAESEVSTIQQDILRKRPFA

SEQ ID NO: 880404 - protein, 133 aa, Homo sapiens
CLLCFLPLQVSMVGVQLSPPVTFQLRAGSGPVFLSGQERYEASDLTWEEEEEEEGEEEEEEEEDDEDEDADISLEEQSPVKQVKRLVPQKQASVAKKKKLEKEEEEIRASVRDKSPVKKAKATARAKKPGFKK

SEQ ID NO: 880405 - protein, 73 aa, Homo sapiens
ASDLTWEEEEEEEGEEEEEEEEDDEDEDADISLEEQSPVKQVKRLVPQKQASVAKVGEGAWLFGRKWYPYRST

SEQ ID NO: 880406 - protein, 163 aa, Homo sapiens
VGGPENPYLIDPENQNVTLNGPGGCGTREDCVLSLGRTRTEAHTALSRLRASMWIDRSTRAVSVHFTLYNPPTQLFTSVSLRVEILPTGSLVPSSLVESFSIFRSDSALQYHLMLPQLVFLALSLIHLCVQLYRMMDKGVLSYWRKPRNWLEVASLVSFSFEK

SEQ ID NO: 880407 - protein, 277 aa, Homo sapiens
VGGPENPYLIDPENQNVTLNGPGGCGTREDCVLSLGRTRTEAHTALSRLRASMWIDRSTRAVSVHFTLYNPPTQLFTSVSLRVEILPTGSLVPSSLVESFSIFRSDSALQYHLMLPQLVFLALSLIHLCVQLYRMMDKGVLSYWRKPRNWLELSVVGVSLTYYAVSGHLVTLAGDVTNQFHRGLCRAFMDLTLMASWNQRARWLRGILLFLFTLKCVYLPGIQNTMASCSSMMRHSLPSIFVAGLVGALMLAALSHLHRFLLSMWVLPPGTFTDAFP

SEQ ID NO: 880408 - protein, 123 aa, Homo sapiens
LLLDPLHRHLDPVGSPIKAREPGKGLESPCVDYVASTNVINTKVKLFNSAMIIHRTLLELQSRPIFTIDAEGSAGSARGLRNAAPKPFCVAQALRGHALGSHILEMFVIPGRCLSEENFKQNK

SEQ ID NO: 880409 - protein, 123 aa, Homo sapiens; identical to SEQ ID NO: 880408

SEQ ID NO: 880410 - protein, 105 aa, Homo sapiens
SVHTATFTIPYPRFAETPAKTLAMQDSATTEPQSVTSRGHLDKEPQEKPKRWVKNQERRLQRKVKTRGQAPKKEMRTANFALSQPKVLQVNVRSQQMPWGADTEP

SEQ ID NO: 880411 - protein, 248 aa, Homo sapiens
MDQRQRRILGQPLSIPTSQPKQKRTSMISFFSKVSWKLRFQKREPLKNVFFILAERARDPSAKKRHMAMRNLGTMAYEAPDKVRKYKKIVLDLLVYGLYDPVNLEVIHESMKTLTVVLGKIQGKGLGSFFIDIALQTRTLLDDENDSLRYSAFVLFGQLAAFAGRKWKKFFTSQVKQTRDSLLIHLQDRNPQVAKACKTTFQACSPYLKLKEEYSFQSEEDQRNTKLYQQLSHYHPEILQFFYANKIL

SEQ ID NO: 880412 - protein, 248 aa, Homo sapiens; identical to SEQ ID NO: 880411

SEQ ID NO: 880413 - protein, 196 aa, Homo sapiens
MDQRQRRILGQPLSIPTSQPKQKRTSMISFFSKVSWKLRFQKREPLKNVFFILAERARDPSAKKRHMAMRNLGTMAYEAPDKVRKYKKIVLDLLVYGLYDPVNLEVIHESMKTLTVVLGKIQGKGLGSFFIDIALQTRTLLDDACKTTFQACSPYLKLKEEYSFQSEEDQRNTKLYQQLSHYHPEILQFFYANKIL

SEQ ID NO: 880414 - protein, 111 aa, Homo sapiens
MGKNGTLDTNSFGLVLPCGCPCSVICDTRNMFHTNRIASLPIRASAWNYIIIHLFINSFICSLPLYIGLESHYSKPSLTSGSRDTKMRLKKTHGFLHSWTPMRMATTWAET

SEQ ID NO: 880415 - protein, 364 aa, Homo sapiens
PVVVESSHPYTDDTSTSGTVKIPGAEGLRVEFDRQCSTERRHDPLTVMDGVNRIVSVRSGREWSDWSSELRIPGDELKWKFISDGSVNGWGWRFTVYPIMPAAGPKELLSDRCVLSCPSMDLVTCLLDFRLNLASNRSIVPRLVASLAACAQLSGLATSHRMWALQKLRKLLTTEFGQSININRLLGENDGEARALSFTGSALAALVKGLPEALQRQFEYEDPIVRGGKQLLHSPFFKVLVALACDLELDTLPCCAETHKWAWFRRYCMASRVAVALDKRTPLPRLFLDEVAKKIRELMADSENMDVLHESHDIFKREQDEQLVQWMNRRPDDWTLSAGGSGTIYGWGHNHRGQLGGIEGAKVK

SEQ ID NO: 880416 - protein, 323 aa, Homo sapiens
VWLSCMHGAPGLAVLELLQLTGDQSLGLSQRHMAALDALVHLLHGEPGWGWRFTVYPIMPAAGPKELLSDRCVLSCPSMDLVTCLLDFRLNLASNRSIVPRLVASLAACAQLSGLATSHRMWALQKLRKLLTTEFGQSININRLLGENDGEARALSFTGSALAALVKGLPEALQRQFEYEDPIVRGGKQLLHSPFFKVLVALACDLELDTLPCCAETHKWAWFRRYCMASRVAVALDKRTPLPRLFLDEVAKKIRELMADSENMDVLHESHDIFKREQDEQLVQWMNRRPDDWTLSAGGSGTIYGWGHNHRGQLGGIEGAKVK

SEQ ID NO: 880417 - protein, 111 aa, Homo sapiens
RNVTVDSSAWKELCHLYRRRCCALGLGVLMKDLLQELSSYNGEEEDPEDVKKSSGVIQKDTLMLASQNWKTPPLQVATSRCQQVLPLHLQKKQQKRQKWKRKCEGKWKQAE

SEQ ID NO: 880418 - protein, 122 aa, Homo sapiens
GSHPPSDSIRRCLSQGAVLQQHHVKLETKPKKFEDRVLALTSWRLHLFLLKVPAKVESSFNVLEIRAFNTLSQNQILVETERGMVSMRLPSAESVDQVTRHVSSALSKVCPGPGCLIRRGNA

SEQ ID NO: 880419 - protein, 106 aa, Homo sapiens
IPVTLQKQQLNLGKWTGTPRQTHRSEMEHKGHFWASGLHRCMVWVLFSAQCLQHCLCPLCTPAFLTFRLPCFSVTSPKNRQSLRCACTHSSLKLVSVSISRDMNKN

SEQ ID NO: 880420 - protein, 73 aa, Homo sapiens
KRCLDNWQATCRIMKLDSHLSPYTKIYSRLIKDLNLRPEIIKILEDNIGKTLLDIGLGRVHDQEPKSKCNEDK

SEQ ID NO: 880421 - protein, 90 aa, Homo sapiens
YAGVHAENAEDYEGRDVFNTKPIAQLIEEALSNNPQQVVEGCCSDMAITFNGLTPQKMEVMMYGLYRLRAFGHYFNDTLVFLPPVGSEND

SEQ ID NO: 880422 - protein, 136 aa, Homo sapiens
MGKGTVSGLVQVVDAETGKVVIISQDLVQVKVLLLGAVRIRSPIMQIRMGTQLGKNWIHLPLLEGGSTASGGIPSAGTPLVTRPDFSPPMSIYITWITNHQNPFSFGNAMPGLTFHWSVTKRDILDLQGQHHKMSH

SEQ ID NO: 880423 - protein, 105 aa, Homo sapiens
LGLLASYAVILCHVRRAASEGKNKAMSMCTTRVIIILLMFGPAIFIYMCPFRALPADKMVSLFHTVIFPLMNPMIYTLRNQEVKTSMKRLLSRHVVCQVDFIIRN

SEQ ID NO: 880424 - protein, 112 aa, Homo sapiens
AAVLLFSFSSSSPGLTSPTKYNLLELKESCIRNQDCETGCCQRAPDNCESHCAEKGSEGSLCQTQVFFGQYRACPCLRNLTCIYSKNEKWLSIAYGRCQKIGRQKLAKKMFF

SEQ ID NO: 880425 - protein, 80 aa, Homo sapiens
AAVLLFSFSSSSPGLTSPTKYNLLELKESCIRNQDCETGCCQRAPDNCESHCAEKGSEGSLCQTQLPATPCFLPSNTVRT

SEQ ID NO: 880426 - protein, 102 aa, Homo sapiens
TGMVLDREPRCPWGLTNSPWDRRGFLDGMTWSRALRKAWSSSGLGREGADGRQGLQSLATTISTFVLPGPGAGLHPQPPLVHPGLQRRHRGEPAAGHRLAPG

SEQ ID NO: 880427 - protein, 108 aa, Homo sapiens
MASLGSGQRRPQAHAGLPAGLQSLLVDERLDRATLLIFANKQDLPGALSSNAIREVLELDSIRSRPNYNSPSSTPCLLCYCSAVTGENLLPGIDWLLDDISSRIFTAD

SEQ ID NO: 880428 - protein, 115 aa, Homo sapiens
WSRGRNYDGGFECVARTACPGGPHPGPRLPRVSVGGCHPAPPQPSRAAPAFSLAYILGLRTFSKINSVEISSVWTQCDESLFLRQRFAALLVPFCPLWFSFHSVLEKISITSFCL

SEQ ID NO: 880429 - protein, 128 aa, Homo sapiens
RLWSPSSKGTQGATPPVQAKSTSPGPLGRQHLPSSRTGRTLLGQPCTSPPRQPCTSPPRQPCTSPPRQPCTSPSRQPCSQPSKSLLEGVTHLDTCTQNPIKVLVRLRKRLSPGRGQASSAHQPQERPM

SEQ ID NO: 880430 - protein, 71 aa, Homo sapiens
PLFLGIGRIQFPPEPFDRFRFYPTPIEICPWAKNFARGVQRDFGRTLSHDKGKLKCPLEFHVWALWACLIV

SEQ ID NO: 880431 - protein, 381 aa, Homo sapiens
MKQQQWCGMTAKMGTVLSGVFTIMAVDMYLIFEQKHLGNGSCTEITPKYRGASNIINNFIICWSFKIVLFLSFITILISCFLLYSVYAQIFRGLVIYIVWIFFYETANVVIQILTNNDFDIKEVRIMRWFGLVSRTVMHCFWMFFVINYAHITYKNRSQGNIISYKRRISTAEILHSRNKRLSISSGFSGSHLESQYFERQRRCSGENKYKMNVRMFSLMVGIFSVLNTTQFFIFDLNQKTHICYEAKFSIYVDSKSELVTWTLFHRANISTGLSLTTIIIGCFLLYCIHKNIYMGLLIYAMWIITYELINFSIVLLLNGIIKDHFKTLSYLHWIFQISHMLLHFFCLPFIVKHAYNLYKESQTVGRKRRHRLCSTIAVNL

SEQ ID NO: 880432 - protein, 170 aa, Homo sapiens [sequence omitted]

SEQ ID NO: 880433 - protein, 170 aa, Homo sapiens [sequence omitted]

SEQ ID NO: 880434 - protein, 88 aa, Homo sapiens
SREVAKPDGIQGKETDSASDGCNSMHIQGGKELAVVIFLDHLPQWLKLTPRKEGRVFSFFDCCSRCQTLKGELTLKTEWLFFPEEEKD

SEQ ID NO: 880435 - protein, 129 aa, Homo sapiens
VSEQWFLLNPFQDGEAPPTGLTGLGAARLFCPRASSLAASSWSSNGRYTSLRALNPSGGNPGLGLVYPAWHILADICDWKKASVLVVCCQETPSAGWHCDSTNGNHPFSFLHFAFLSFLLLPTKQNKHT

SEQ ID NO: 880436 - protein, 244 aa, Homo sapiens
GKAFTQNSQLTLHQRLHTGEKLYECKECRKVFTQLSQLILHKRIHTGEKPYECKECGKAFICGSQLSQHQKIHNGEKPYECKECGRAFIRGSLLMQHQRIHTGEKPYKCEECGKAFIRGSQLTQHQRIHTNEKPYECKECGKMFSHGSQLTQHQRIHTGEKPYQCKECGKAFNRGSLLTRHQRIHTGEKPYECKECGKTFIVAQNLLNMSEFTQLELRYSHGDFENGIWVLWIMEQKYRRSLQP

SEQ ID NO: 880437 - protein, 68 aa, Homo sapiens
MFLLLFSSSLSYFPVFLQLVVFQKCLQRDCCSSNHQAVPKMKLLYMYQTKWYSGNVFHYQLSFSLLNF

SEQ ID NO: 880438 - protein, 78 aa, Homo sapiens
CSRDCVERWKAGHREELQMVPPLTTAGSVALEEYVPFPSLGVSRIQQGAQARTFRHFYQKSSTAEEGKNTEVREHGMN

SEQ ID NO: 880439 - protein, 235 aa, Homo sapiens
MALKAEGAALDCFEVTLKCEEGEDEEEAMVVAVIPRPEPMLRVTQQEKTPPPRPSPLEAGSDGCEEPKQQVSWEQEFLVGSSPGGSGRALCMVCGAEIRAPSADTARSHILEQHPHTLDLSPSEKSNILEAWSEGVALLQDVRAEQPSPPNSDSGQDAHPDPDANPDAARMPAEIVVLLDSEDNPSLPKRSRPRGLRPLELPAVPATEPGNKKPRGQRWKEPQGKSQSERKEADL

SEQ ID NO: 880440 - protein, 164 aa, Homo sapiens
MALKAEGAALDCFEVTLKCEEGEDEEEAMVVAVIPRPEPMLRVTQQEKTPPPRPSPLEAGSDGCEEPKQQVSWEQEFLVGSSPGGSGRALCMVCGAEIRAPSADTARSHILEQHPHTLDLSPSEKRPPLPLPVPTLQRPEAGPGHPIHSRSHLHLFSCCIYHLC

SEQ ID NO: 880441 - protein, 601 aa, Homo sapiens
NSGPKVPGLAHSVTVTATMPGRTWELCLLLLLGLGLGSQEALPPPCESEIYCHGELLNQVQMAKLYQDDKQFVDMPLSIAPEQVLQTFTELSRDHNHSIPREQLQAFVHEHFQAKGQELQPWTPADWKDSPQFLQKISDAKLRAWAGQLHQLWKKLGKKMKPEVLSHPERFSLIYSEHPFIVPGGRFVEFYYWDSYWVMEGLLLSEMAETVKGMLQNFLDLVKTYGHVPNGGRVYYLQRSQPPLLTLMMDCYLTHTNDTAFLQENIETLALELDFWTKNRTVSVSLEGKNYLLNRYYVPYGGPRPESYSKDVELADTLPEGDREALWAELKAGAESGWDFSSRWLIGGPNPNSLSGIRTSKLVPVDLNAFLCQAEELMSNFYSRLGNDSQATKYRILRSQRLAALNTVLWDEQTGAWFDYDLEKKKKNREFYPSNLTPLWAGCFSDPGVADKALKYLEDNRILTYQYGIPTSLQKTGQQWDFPNAWAPLQDLVIRGLAKAPLRRAQEVAFQLAQNWIRTNFDVYSQKSAMYEKYDVSNGGQPGGGGEYEVQEGFGWTNGVVLMLLDRYGDRLTSGAKLAFLEPHCLAATLLPSLLLSLLPW

SEQ ID NO: 880442 - protein, 685 aa, Homo sapiens
NSGPKVPGLAHSVTVTATMPGRTWELCLLLLLGLGLGSQEALPPPCESEIYCHGELLNQVQMAKLYQDDKQFVDMPLSIAPGEAPRAERPLQRTFSPKKAGARPSREAPVIRELACDTLLTPPAACSPEQVLQTFTELSRDHNHSIPREQLQAFVHEHFQAKGQELQPWTPADWKDSPQFLQKISDAKLRAWAGQLHQLWKKLGKKMKPEVLSHPERFSLIYSEHPFIVPGGRFVEFYYWDSYWVMEGLLLSEMAETVKGMLQNFLDLVKTYGHVPNGGRVYYLQRSQPPLLTLMMDCYLTHTNDTAFLQWVPPSLCCSADPPIPQTSQGWEMGSTPGLRCCLLHSRENIETLALELDFWTKNRTVSVSLEGKNYLLNRYYVPYGGPRPESYSKDVELADTLPEGDREALWAELKAGAESGWDFSSRWLIGGPNPNSLSGIRTSKLVPVDLNAFLCQAEELMSNFYSRLGNDSQATKYRILRSQRLAALNTVLWDEQTGAWFDYDLEKKKKNREFYPSNLTPLWAGCFSDPGVADKALKYLEDNRILTYQYGIPTSLQKTGQQWDFPNAWAPLQDLVIRGLAKAPLRRAQEVAFQLAQNWIRTNFDVYSQKSAMYEKYDVSNGGQPGGGGEYEVQEGFGWTNGVVLMLLDRYGDRLTSGAKLAFLEPHCLAATLLPSLLLSLLPW

SEQ ID NO: 880443 - protein, 105 aa, Homo sapiens
NSGPKVPGLAHSVTVTATMPGRTWELCLLLLLGLGLGSQEALPPPCESEIYCHGELLNQVQMAKLYQDDKQFVDMPLSIAPGEAPRAERPLQRTFSPKKAGGKTK

SEQ ID NO: 880444 - protein, 671 aa, Homo sapiens
DKDNSGPTVLHLTARFGHPKVVNWLLHHGGGDPTAATDMGALPIHYAAAKGDFPSLRLLVRHYPEGVNAQTKNGATPLYLACQEGHLEVTQYLVQECGADPHARAHDGMTPLHAAAQMGHSPVIVWLVSCTDVSLSEQDKDGATATHFAASRGHSKVLSWLLLHGGEISADLWGGTALYDAAENGELECCQILVVNGAELEVRDRDGYAAADLSDFNGHSHCTHCLRTVENLSMEHCVLSRDPSVELEAKQPDSGMSSPNTTVSVQPLNFDLSSPTSTLSNYDSCSSSHSSIKGQHPPRGLSSTRAADIQSYMDMLNPELGLPWGTIGKPIPPPPPPSFPPPPPPPGTQLPPPPPSYPSPKPPVGPQAADIYMQTKNKLRHVETEALKKEPSSCDGHDGLRRQDSSRKPRAFSKQPSTGDYYRQLGRCPGETLVARPGMAHREEAELPGNHVPNGCAADPKASREQQLPPPPPPPPLPEAASSPPPVPPLPLEGAGPGCGQRRSSSPTGSTKSFNVMFPMGDNSELLAEIKAGKSLKPTPQSKGLTTVFSGSRQPAFQPDWPLPSVSPALLPVRSPTPPAAGFQPLLNGSLVPVPPTTPAPGVQLDVEALIPTHDEQGRPKPEWKRQVMVGKMQLKMEEEEEQRWKEEEEARLASMPAWRWDLLRKKLEEE

SEQ ID NO: 880445 - protein, 286 aa, Homo sapiens
DKDNSGPTVLHLTARFGHPKVVNWLLHHGGGDPTAATDMGALPIHYAAAKGDFPSLRLLVRHYPEGVNAQTKNGATPLYLACQEGHLEVTQYLVQECGADPHARAHDGMTPLHAAAQMGHSPVIVWLVSCTDVSLSEQDKDGATATHFAASRGHSKVLSWLLLHGGEISADLWGGTALYDAAENGELECCQILVVNGAELEVRDRDGYAAADLSDFNGHSHCTHCLRTVENLVRSLRCSCCILSSRPSTPVVGVVTPFTKEEAEVQRREARYPTRPVSPEPLPAGD

SEQ ID NO: 880446 - protein, 453 aa, Homo sapiens
DKDNSGPTVLHLTARFGHPKVVNWLLHHGGGDPTAATDMGALPIHYAAAKGDFPSLRLLVRHYPEGVNAQTKNGATPLYLACQEGHLEVTQYLVQECGADPHARAHDGMTPLHAAAQMGHSPVIVWLVSCTDVSLSEQDKDGATATHFAASRGHSKVLSWLLLHGGEISADLWGGTALYDAAENGELECCQILVVNGAELEVRDRDGYAAADLSDFNGHSHCTHCLRTVENLSMEHCVLSRDPSVELEAKQPDSGMSSPNTTVSVQPLNFDLSSPTSTLSNYDSCSSSHSSIKGQHPPRGLSSTRAADIQSYMDMLNPELGLPWGTIGKPIPPPPPPSFPPPPPPPGTQLPPPPPSYPSPKPPVGPQAADIYMQTKNKLRHVETEALKKEVVSPHPLPASQQGYWADGGQSGQRPGLTSGHRVGVPGSMAYSRVKAPGESHEGSGLDTGLGGE

SEQ ID NO: 880447 - protein, 79 aa, Homo sapiens
RVLRCVRVPRRGFSPPVTMGPLYRAGLVGLRLAHTHPWELLVWKAGLLLRDEPEPCQAPQGIEALAHLIRMVIGHLDLS

SEQ ID NO: 880448 - protein, 79 aa, Homo sapiens; identical to SEQ ID NO: 880447

SEQ ID NO: 880449 - protein, 68 aa, Homo sapiens
VAAVTERTSGNLSASSVKCDHKYRVPGSARDRSHYVDRAGLKLLASSSPPAATSQQHWNDRRTPLNIH

SEQ ID NO: 880450 - protein, 35 aa, Homo sapiens
MTHEPQATVLPSSQVRYQPFGLEILYPSLGLADFL

SEQ ID NO: 880451 - protein, 35 aa, Homo sapiens; identical to SEQ ID NO: 880450

SEQ ID NO: 880452 - protein, 53 aa, Homo sapiens
MTHEPQATVLPSSQVRYQPFGLEILYPSLGLADFLLQPLCLCTHIHTCTHAHA

SEQ ID NO: 880453 - protein, 1692 aa, Homo sapiens
FIRIHFGPSGKLASADIDSYLLEKSRVIFQLPGERSYHVYYQILSGRKPELQDMLLLSMNPYDYHFCSQGVITVDNMNDGEELIATDHAMDILGFSVDEKCACYKIVGALLHFGNMKFKQKQREEQAEADGTESADKAAYLMGVSSGDLLKGLLHPRVRVGNEYVTKGQSVEQVVFAVGALAKATYDRLFRWLVSRINQTLDTKLPRQFFIGVLDIAGFEIFEFNSFEQLCINFTNEKLQQFFNQHMFVLEQEEYKREGIDWVFIDFGLDLQPCIDLIEKPLGILSILEEECMFPKASDASFRAKLYDNHAGKSPNFQQPRPDKKRKYQAHFEVVHYAGVVPYSIVGWLEKNKDPLNETVVPIFQKSQNRLLATLYENYAGSCSTEPPKSGVKEKRKKAASFQTVSQLHKENLNKLMTNLRATQPHFVRCIVPNENKTPGVMDAFLVLHQLRCNGVLEGIRICRQGFPNRLLYTDFRQRYRILNPSAIPDDTFMDSRKATEKLLGSLDLDHTQYQFGHTKVFFKAGLLGVLEELRDQRLAKVLTLLQARSRGRLMRLEYQRLLGGRDALFTIQWNIRAFNAVKNWSWMKLFFKMKPLLRSAQAEEELAALRAELRGLRGALAAAEAKRQELEETHVSITQEKNDLALQLQAEQDNLADAEERCHLLIKSKVQLEGKVKELSERLEDEEEVNADLAARRRKLEDECTELKKDIDDLELTLAKAEKEKQATENKVKNLTEEMAALDESVARLTKEKKALQEAHQQALGDLQAEEDRVSALTKAKLRLEQQVEDLECSLEQEKKLRMDTERAKRKLEGDLKLTQESVADAAQDKQQLEEKLKKKDSELSQLSLRVEDEQLLGAQMQKKIKELQARAEELEEELEAERAARARVEKQRAEAARELEELSERLEEAGGASAGQREGCRKREAELGRLRRELEEAALRHEATVAALRRKQAEGAAELGEQVDSLQRVRQKLEKEKSELRMEVDDLAANVETLTRAKASAEKLCRTYEDQLSEAKIKVEELQRQLADASTQRGRLQTESGELSRLLEEKECLISQLSRGKALAAQSLEELRRQLEEESKAKSALAHAVQALRHDCDLLREQHEEEAEAQAELQRLLSKANAEVAQWRSKYEADAIQRTEELEEAKKKLALRLQEAEEGVEAANAKCSSLEKAKLRLQTESEDVTLELERATSAAAALDKKQRHLERALEERRRQEEEMQRELEAAQRESRGLGTELFRLRHGHEEALEALETLKRENKNLQEEISDLTDQVSLSGKSIQELEKTKKALEGEKSEIQAALEEAEGALELEETKTLRIQLELSQVKAEVDRKLAEKDEECANLRRNHQRAVESLQASLDAETRARNEALRLKKKMEGDLNDLELQLGHATRQATEAQAATRLMQAQLKEEQAGRDEEQRLAAELHEQAQALERRASLLAAELEELRAALEQGERSRRLAEQELLEATERLNLLHSQNTGLLNQKKKLEADLAQLSGEVEEAAQERREAEEKAKKAITDAAMMAEELKKEQDTSAHLERMKKTLEQTVRELQARLEEAEQAALRGGKKQVQKLEAKVRELEAELDAEQKKHAEALKGVRKHERRVKELAYQAEEDRKNLARMQDLVDKLQSKVKSYKRQFEEAEQQANTNLAKYRKAQHELDDAEERADMAETQANKLRARTRDALGPKHKE

SEQ ID NO: 880454 - protein, 135 aa, Homo sapiens
FFLFVFFFLRILYIVVGDSVRELEAELDAEQKKHAEALKGVRKHERRVKELAYQAEEDRKNLARMQDLVDKLQSKVKSYKRQFEEAEQQANTNLAKYRKAQHELDDAEERADMAETQANKLRARTRDALGPKHKE

SEQ ID NO: 880455 - protein, 129 aa, Homo sapiens
  misc_feature (1)..(1): Xaa can be any naturally occurring amino acid
  misc_feature (3)..(4): Xaa can be any naturally occurring amino acid
XKXXKISVRELEAELDAEQKKHAEALKGVRKHERRVKELAYQAEEDRKNLARMQDLVDKLQSKVKSYKRQFEEAEQQANTNLAKYRKAQHELDDAEERADMAETQANKLRARTRDALGPKLSLSPQHKE

SEQ ID NO: 880456 - protein, 134 aa, Homo sapiens
  misc_feature (15)..(15): Xaa can be any naturally occurring amino acid
VARAYIDRHLVATPXIFLVRELEAELDAEQKKHAEALKGVRKHERRVKELAYQAEEDRKNLARMQDLVDKLQSKVKSYKRQFEEAEQQANTNLAKYRKAQHELDDAEERADMAETQANKLRARTRDALGPKHKE

SEQ ID NO: 880457 - protein, 133 aa, Homo sapiens
TPPEPVGDSHTTTHQNLVRELEAELDAEQKKHAEALKGVRKHERRVKELAYQAEEDRKNLARMQDLVDKLQSKVKSYKRQFEEAEQQANTNLAKYRKAQHELDDAEERADMAETQANKLRARTRDALGPKHKE

SEQ ID NO: 880458 - protein, 1692 aa, Homo sapiens; identical to SEQ ID NO: 880453

SEQ ID NO: 880459 - protein, 1719 aa, Homo sapiens
FIRIHFGPSGKLASADIDSYLLEKSRVIFQLPGERSYHVYYQILSGRKPELQDMLLLSMNPYDYHFCSQGVITVDNMNDGEELIATDHAMDILGFSVDEKCACYKIVGALLHFGNMKFKQKQREEQAEADGTESADKAAYLMGVSSGDLLKGLLHPRVRVGNEYVTKGQSVEQVVFAVGALAKATYDRLFRWLVSRINQTLDTKLPRQFFIGVLDIAGFEIFEFNSFEQLCINFTNEKLQQFFNQHMFVLEQEEYKREGIDWVFIDFGLDLQPCIDLIEKPLGILSILEEECMFPKASDASFRAKLYDNHAGKSPNFQQPRPDKKRKYQAHFEVVHYAGVVPYSIVGWLEKNKDPLNETVVPIFQKSQNRLLATLYENYAGSCSTEPPKSGVKEKRKKAASFQTVSQLHKENLNKLMTNLRATQPHFVRCIVPNENKTPGVMDAFLVLHQLRCNGVLEGIRICRQGFPNRLLYTDFRQRYRILNPSAIPDDTFMDSRKATEKLLGSLDLDHTQYQFGHTKVFFKAGLLGVLEELRDQRLAKVLTLLQARSRGRLMRLEYQRLLGGRDALFTIQWNIRAFNAVKNWSWMKLFFKMKPLLRSAQAEEELAALRAELRGLRGALAAAEAKRQELEETHVSITQEKNDLALQLQAEQDNLADAEERCHLLIKSKVQLEGKVKELSERLEDEEEVNADLAARRRKLEDECTELKKDIDDLELTLAKAEKEKQATENKVKNLTEEMAALDESVARLTKEKKALQEAHQQALGDLQAEEDRVSALTKAKLRLEQQVEDLECSLEQEKKLRMDTERAKRKLEGDLKLTQESVADAAQDKQQLEEKLKKKDSELSQLSLRVEDEQLLGAQMQKKIKELQARAEELEEELEAERAARARVEKQRAEAARELEELSERLEEAGGASAGQREGCRKREAELGRLRRELEEAALRHEATVAALRRKQAEGAAELGEQVDSLQRVRQKLEKEKSELRMEVDDLAANVETLTRAKASAEKLCRTYEDQLSEAKIKVEELQRQLADASTQRGRLQTESGELSRLLEEKECLISQLSRGKALAAQSLEELRRQLEEESKAKSALAHAVQALRHDCDLLREQHEEEAEAQAELQRLLSKANAEVAQWRSKYEADAIQRTEELEEAKKKLALRLQEAEEGVEAANAKCSSLEKAKLRLQTESEDVTLELERATSAAAALDKKQRHLERALEERRRQEEEMQRELEAAQRESRGLGTELFRLRHGHEEALEALETLKRENKNLQEEISDLTDQVSLSGKSIQELEKTKKALEGEKSEIQAALEEAEGALELEETKTLRIQLELSQVKAEVDRKLAEKDEECANLRRNHQRAVESLQASLDAETRARNEALRLKKKMEGDLNDLELQLGHATRQATEAQAATRLMQAQLKEEQAGRDEEQRLAAELHEQAQALERRASLLAAELEELRAALEQGERSRRLAEQELLEATERLNLLHSQNTGLLNQKKKLEADLAQLSGEVEEAAQERREAEEKAKKAITDAAMMAEELKKEQDTSAHLERMKKTLEQTVRELQARLEEAEQAALRGGKKQVQKLEAKVRELEAELDAEQKKHAEALKGVRKHERRVKELAYQVGDRVSLGSGPGAGPAQASPESPLPAQAEEDRKNLARMQDLVDKLQSKVKSYKRQFEEAEQQANTNLAKYRKAQHELDDAEERADMAETQANKLRARTRDALGPKHKE

SEQ ID NO: 880460 - protein, 194 aa, Homo sapiens
MRGLHSVAVAHLTHTALCMCPLRSGQAGSPGSFALNFPPNGLGIRLSPCLQVRELEAELDAEQKKHAEALKGVRKHERRVKELAYQVGDRVSLGSGPGAGPAQASPESPLPAQAEEDRKNLARMQDLVDKLQSKVKSYKRQFEEAEQQANTNLAKYRKAQHELDDAEERADMAETQANKLRARTRDALGPKHKE

SEQ ID NO: 880461 - protein, 1692 aa, Homo sapiens; identical to SEQ ID NO: 880453

SEQ ID NO: 880462 - protein, 1698 aa, Homo sapiens
FIRIHFGPSGKLASADIDSYLLEKSRVIFQLPGERSYHVYYQILSGRKPELQDMLLLSMNPYDYHFCSQGVITVDNMNDGEELIATDHAMDILGFSVDEKCACYKIVGALLHFGNMKFKQKQREEQAEADGTESADKAAYLMGVSSGDLLKGLLHPRVRVGNEYVTKGQSVEQVVFAVGALAKATYDRLFRWLVSRINQTLDTKLPRQFFIGVLDIAGFEIFEFNSFEQLCINFTNEKLQQFFNQHMFVLEQEEYKREGIDWVFIDFGLDLQPCIDLIEKPLGILSILEEECMFPKASDASFRAKLYDNHAGKSPNFQQPRPDKKRKYQAHFEVVHYAGVVPYSIVGWLEKNKDPLNETVVPIFQKSQNRLLATLYENYAGSCSTEPPKSGVKEKRKKAASFQTVSQLHKENLNKLMTNLRATQPHFVRCIVPNENKTPGVMDAFLVLHQLRCNGVLEGIRICRQGFPNRLLYTDFRQRYRILNPSAIPDDTFMDSRKATEKLLGSLDLDHTQYQFGHTKVFFKAGLLGVLEELRDQRLAKVLTLLQARSRGRLMRLEYQRLLGGRDALFTIQWNIRAFNAVKNWSWMKLFFKMKPLLRSAQAEEELAALRAELRGLRGALAAAEAKRQELEETHVSITQEKNDLALQLQAEQDNLADAEERCHLLIKSKVQLEGKVKELSERLEDEEEVNADLAARRRKLEDECTELKKDIDDLELTLAKAEKEKQATENKVKNLTEEMAALDESVARLTKEKKALQEAHQQALGDLQAEEDRVSALTKAKLRLEQQVEDLECSLEQEKKLRMDTERAKRKLEGDLKLTQESVADAAQDKQQLEEKLKKKDSELSQLSLRVEDEQLLGAQMQKKIKELQARAEELEEELEAERAARARVEKQRAEAARELEELSERLEEAGGASAGQREGCRKREAELGRLRRELEEAALRHEATVAALRRKQAEGAAELGEQVDSLQRVRQKLEKEKSELRMEVDDLAANVETLTRAKASAEKLCRTYEDQLSEAKIKVEELQRQLADASTQRGRLQTESGELSRLLEEKECLISQLSRGKALAAQSLEELRRQLEEESKAKSALAHAVQALRHDCDLLREQHEEEAEAQAELQRLLSKANAEVAQWRSKYEADAIQRTEELEEAKKKLALRLQEAEEGVEAANAKCSSLEKAKLRLQTESEDVTLELERATSAAAALDKKQRHLERALEERRRQEEEMQRELEAAQRESRGLGTELFRLRHGHEEALEALETLKRENKNLQEEISDLTDQVSLSGKSIQELEKTKKALEGEKSEIQAALEEAEGALELEETKTLRIQLELSQVKAEVDRKLAEKDEECANLRRNHQRAVESLQASLDAETRARNEALRLKKKMEGDLNDLELQLGHATRQATEAQAATRLMQAQLKEEQAGRDEEQRLAAELHEQAQALERRASLLAAELEELRAALEQGERSRRLAEQELLEATERLNLLHSQNTGLLNQKKKLEADLAQLSGEVEEAAQERREAEEKAKKAITDAAMMAEELKKEQDTSAHLERMKKTLEQTVRELQARLEEAEQAALRGGKKQVQKLEAKVRELEAELDAEQKKHAEALKGVRKHERRVKELAYQAEEDRKNLARMQDLVDKLQSKVKSYKRQFEEAEQQANTNLAKYRKAQHELDDAEERADMAETQANKLRARTRDALGPKLSLSPQHKE

SEQ ID NO: 880463 - protein, 1692 aa, Homo sapiens; identical to SEQ ID NO: 880453

SEQ ID NO: 880464 - protein, 1698 aa, Homo sapiens; identical to SEQ ID NO: 880462

SEQ ID NO: 880465 - protein, 1725 aa, Homo sapiens
FIRIHFGPSGKLASADIDSYLLEKSRVIFQLPGERSYHVYYQILSGRKPELQDMLLLSMNPYDYHFCSQGVITVDNMNDGEELIATDHAMDILGFSVDEKCACYKIVGALLHFGNMKFKQKQREEQAEADGTESADKAAYLMGVSSGDLLKGLLHPRVRVGNEYVTKGQSVEQVVFAVGALAKATYDRLFRWLVSRINQTLDTKLPRQFFIGVLDIAGFEIFEFNSFEQLCINFTNEKLQQFFNQHMFVLEQEEYKREGIDWVFIDFGLDLQPCIDLIEKPLGILSILEEECMFPKASDASFRAKLYDNHAGKSPNFQQPRPDKKRKYQAHFEVVHYAGVVPYSIVGWLEKNKDPLNETVVPIFQKSQNRLLATLYENYAGSCSTEPPKSGVKEKRKKAASFQTVSQLHKENLNKLMTNLRATQPHFVRCIVPNENKTPGVMDAFLVLHQLRCNGVLEGIRICRQGFPNRLLYTDFRQRYRILNPSAIPDDTFMDSRKATEKLLGSLDLDHTQYQFGHTKVFFKAGLLGVLEELRDQRLAKVLTLLQARSRGRLMRLEYQRLLGGRDALFTIQWNIRAFNAVKNWSWMKLFFKMKPLLRSAQAEEELAALRAELRGLRGALAAAEAKRQELEETHVSITQEKNDLALQLQAEQDNLADAEERCHLLIKSKVQLEGKVKELSERLEDEEEVNADLAARRRKLEDECTELKKDIDDLELTLAKAEKEKQATENKVKNLTEEMAALDESVARLTKEKKALQEAHQQALGDLQAEEDRVSALTKAKLRLEQQVEDLECSLEQEKKLRMDTERAKRKLEGDLKLTQESVADAAQDKQQLEEKLKKKDSELSQLSLRVEDEQLLGAQMQKKIKELQARAEELEEELEAERAARARVEKQRAEAARELEELSERLEEAGGASAGQREGCRKREAELGRLRRELEEAALRHEATVAALRRKQAEGAAELGEQVDSLQRVRQKLEKEKSELRMEVDDLAANVETLTRAKASAEKLCRTYEDQLSEAKIKVEELQRQLADASTQRGRLQTESGELSRLLEEKECLISQLSRGKALAAQSLEELRRQLEEESKAKSALAHAVQALRHDCDLLREQHEEEAEAQAELQRLLSKANAEVAQWRSKYEADAIQRTEELEEAKKKLALRLQEAEEGVEAANAKCSSLEKAKLRLQTESEDVTLELERATSAAAALDKKQRHLERALEERRRQEEEMQRELEAAQRESRGLGTELFRLRHGHEEALEALETLKRENKNLQEEISDLTDQVSLSGKSIQELEKTKKALEGEKSEIQAALEEAEGALELEETKTLRIQLELSQVKAEVDRKLAEKDEECANLRRNHQRAVESLQASLDAETRARNEALRLKKKMEGDLNDLELQLGHATRQATEAQAATRLMQAQLKEEQAGRDEEQRLAAELHEQAQALERRASLLAAELEELRAALEQGERSRRLAEQELLEATERLNLLHSQNTGLLNQKKKLEADLAQLSGEVEEAAQERREAEEKAKKAITDAAMMAEELKKEQDTSAHLERMKKTLEQTVRELQARLEEAEQAALRGGKKQVQKLEAKVRELEAELDAEQKKHAEALKGVRKHERRVKELAYQAEEDRKNLARMQDLVDKLQSKVKSYKRQFEEAEQQANTNLAKYRKAQHELDDAEERADMAETQANKLRARTRDALGPKVRSGRGIALCAGGLWGLTGSTAHSAIPFSSAQGVTA

SEQ ID NO: 880466 - protein, 1720 aa, Homo sapiens
FIRIHFGPSGKLASADIDSYLLEKSRVIFQLPGERSYHVYYQILSGRKPELQDMLLLSMNPYDYHFCSQGVITVDNMNDGEELIATDHAMDILGFSVDEKCACYKIVGALLHFGNMKFKQKQREEQAEADGTESADKAAYLMGVSSGDLLKGLLHPRVRVGNEYVTKGQSVEQVVFAVGALAKATYDRLFRWLVSRINQTLDTKLPRQFFIGVLDIAGFEIFEFNSFEQLCINFTNEKLQQFFNQHMFVLEQEEYKREGIDWVFIDFGLDLQPCIDLIEKPLGILSILEEECMFPKASDASFRAKLYDNHAGKSPNFQQPRPDKKRKYQAHFEVVHYAGVVPYSIVGWLEKNKDPLNETVVPIFQKSQNRLLATLYENYAGSCSTEPPKSGVKEKRKKAASFQTVSQLHKENLNKLMTNLRATQPHFVRCIVPNENKTPGVMDAFLVLHQLRCNGVLEGIRICRQGFPNRLLYTDFRQRYRILNPSAIPDDTFMDSRKATEKLLGSLDLDHTQYQFGHTKVFFKAGLLGVLEELRDQRLAKVLTLLQARSRGRLMRLEYQRLLGGRDALFTIQWNIRAFNAVKNWSWMKLFFKMKPLLRSAQAEEELAALRAELRGLRGALAAAEAKRQELEETHVSITQEKNDLALQLQAEQDNLADAEERCHLLIKSKVQLEGKVKELSERLEDEEEVNADLAARRRKLEDECTELKKDIDDLELTLAKAEKEKQATENKVKNLTEEMAALDESVARLTKEKKALQEAHQQALGDLQAEEDRVSALTKAKLRLEQQVEDLECSLEQEKKLRMDTERAKRKLEGDLKLTQESVADAAQDKQQLEEKLKKKDSELSQLSLRVEDEQLLGAQMQKKIKELQARAEELEEELEAERAARARVEKQRAEAARELEELSERLEEAGGASAGQREGCRKREAELGRLRRELEEAALRHEATVAALRRKQAEGAAELGEQVDSLQRVRQKLEKEKSELRMEVDDLAANVETLTRAKASAEKLCRTYEDQLSEAKIKVEELQRQLADASTQRGRLQTESGELSRLLEEKECLISQLSRGKALAAQSLEELRRQLEEESKAKSALAHAVQALRHDCDLLREQHEEEAEAQAELQRLLSKANAEVAQWRSKYEADAIQRTEELEEAKKKLALRLQEAEEGVEAANAKCSSLEKAKLRLQTESEDVTLELERATSAAAALDKKQRHLERALEERRRQEEEMQRELEAAQRESRGLGTELFRLRHGHEEALEALETLKRENKNLQEEISDLTDQVSLSGKSIQELEKTKKALEGEKSEIQAALEEAEGALELEETKTLRIQLELSQVKAEVDRKLAEKDEECANLRRNHQRAVESLQASLDAETRARNEALRLKKKMEGDLNDLELQLGHATRQATEAQAATRLMQAQLKEEQAGRDEEQRLAAELHEQAQALERRASLLAAELEELRAALEQGERSRRLAEQELLEATERLNLLHSQNTGLLNQKKKLEADLAQLSGEVEEAAQERREAEEKAKKAITDAAMMAEELKKEQDTSAHLERMKKTLEQTVRELQARLEEAEQAALRGGKKQVQKLEAKVRELEAELDAEQKKHAEALKGVRKHERRVKELAYQAEEDRKNLARMQDLVDKLQSKVKSYKRQFEEAVSALGPGHLDRAPQLCPRVCGQEQQANTNLAKYRKAQHELDDAEERADMAETQANKLRARTRDALGPKLSLSPQHKE

SEQ ID NO: 880467 - protein, 327 aa, Homo sapiens
FIRIHFGPSGKLASADIDSYLLEKSRVIFQLPGERSYHVYYQILSGRKPELQDMLLLSMNPYDYHFCSQGVITVDNMNDGEELIATDHAMDILGFSVDEKCACYKIVGALLHFGNMKFKQKQREEQAEADGTESADKAAYLMGVSSGDLLKGLLHPRVRVGNEYVTKGQSVEQVVFAVGALAKATYDRLFRWLVSRINQTLDTKLPRQFFIGVLDIAGFEIFEFNSFEQLCINFTNEKLQQFFNQHMFVLEQEEYKREGIDWVFIDFGLDLQPCIDLIEKPRMLKITTVFSHAQTVVLCVGCSTVLCQPTGGKARLTEGCSFRRKQH

SEQ ID NO: 880468 - protein, 154 aa, Homo sapiens [sequence omitted]

SEQ ID NO: 880469 - protein, 502 aa, Homo sapiens
PGVGWAETLSPNCQKEPEAEVEAGSLGLWVDPLKAMESSTGPRMPLLKYCSVATSLKAPGWDGAAPPWDLSFTYPFALQAPWLTGHKPLARHASSCPCLHVADPAWQGPGWLGRAGDAANTWVLARREADGFYYRAQIKATPELERQGVLLVEFEAPLVAGPKLPAQQQRVVLEEDVIPLSPSVGYSLRPGDKVLALWEPGQQQYGPGTVLLGLEMRDPQRASKEKEITVHFWNGKAAKVPLGGVQSVSLTIWKKAVERLHKSFTREHPRPLHWAPCCSLLGPITGRITNELPPDAPFLCPLCHHHACCQLLCQGCLCGCPPCGTTWWPLTRTSEVMARELPELEPTAQLLPLEGPKEEKVAMHAPLAVSSSSSSSCEQDGVENDLEMGPPQRLMVNSAVNTDPIFLEMPLRQSGLCQPEWRYWKRNGPEPCPGKPGTRYSNICKEEKDHKQQRAQTVVVGTTKELVSKATHMKPPRTPPGEAEHRKRSQSLAICQWNKNSR

SEQ ID NO: 880470 - protein, 74 aa, Homo sapiens
LWVPSLGRAFALGSPVLDPAPPRGPGLFSALSVLAAMVPSLAPPGDTRTTVHVSTPWHLPRMIGEDEGPEVQEH

SEQ ID NO: 880471 - protein, 102 aa, Homo sapiens
FLNWRSSPRRLCLHLGCEVCSGGAWLWPAFHSFMSFIYLFEMESCCVAQAGVQWHDLGSLQPPPTQIQGVYTNRGEATSHQHAEENNNNNKNRPQGIRRRTV

SEQ ID NO: 880472 - protein, 646 aa, Homo sapiens
AQRGLCCEGLCCARGGPAPGKPRGECALTEPSWQGRVSGAADPCPSGRSTAASQLGLSQHSPCWRAHPRVLSTPVLSALTCRGEPVLVPGVCVAPGCPSAPLALLWASVEPCHRGSVQGPDVALRRGQLPGLLPAQWALVSALGQARQPPMMSSAAFPRWLSMGVPRTPSRTVLFERERTGLTYRVPSLLPVPPGPTLLAFVEQRLSPDDSHAHRLVLRRGTLAGGSVRWGALHVLGTAALAEHRSMNPCPVHDAGTGTVFLFFIAVLGHTPEAVQIATGRNAARLCCVASRDAGLSWGSARDLTEEAIGGAVQDWATFAVGPGHGVQLPSGRLLVPAYTYRVDRRECFGKICRTSPHSFAFYSDDHGRTWRCGGLVPNLRSGECQLAAVDGGQAGSFLYCNARSPLGSRVQALSTDEGTSFLPAERVASLPETAWGCQGSIVGFPAPAPNRPRDDSWSVGPGSPLQPPLLGPGVHEPPEEAAVDPRGGQVPGGPFSRLQPRGDGPRQPGPRPGVSGDVGSWTLALPMPFAAPPQSPTWLLYSHPVGRRARLHMGIRLSQSPLDPRSWTEPWVIYEGPSGYSDLASIGPAPEGGLVFACLYESGARTSYDEISFCTFSLREVLENVPASPKPPNLGDKPRGCCWPS

SEQ ID NO: 880473 - protein, 611 aa, Homo sapiens
MGVPRTPSRTVLFERERTGLTYRVPSLLPVPPGPTLLAFVEQRLSPDDSHAHRLVLRRGTLAGGSVRWGALHVLGTAALAEHRSMNPCPVHDAGTGTVFLFFIAVLGHTPEAVQIATGRNAARLCCVASRDAGLSWGSARDLTEEAIGGAVQEEKAGRWGVSQLPNQQPPRPTPSSYSLLPSHPAQGLARPHPQLSLHPILCGHLTPARGSYSRECSRHMANPGTPLQGLMPPACPPLSLCGQRSPASLGAVHLGSAAKGCERLVQPGRTQGGWDESCGRAVRVRWSYPEAPAPPSPSPCAFLQPPDLRDPAAPPTSALLPADWATFAVGPGHGVQLPSGRLLVPAYTYRVDRRECFGKICRTSPHSFAFYSDDHGRTWRCGGLVPNLRSERVASLPETAWGCQGSIVGFPAPAPNRPRDDSWSVGPGSPLQPPLLGPGVHEPPEEAAVDPRGGQVPGGPFSRLQPRGDGPRQPGPRPGVSGDVGSWTLALPMPFAAPPQSPTWLLYSHPVGRRARLHMGIRLSQSPLDPRSWTEPWVIYEGPSGYSDLASIGPAPEGGLVFACLYESGARTSYDEISFCTFSLREVLENVPASPKPPNLGDKPRGCCWPS

SEQ ID NO: 880474 - protein, 210 aa, Homo sapiens
AQRGLCCEGLCCARGGPAPGKPRGECALTEPSWQGRVSGAADPCPSGRSTAASQLGLSQHSPCWRAHPRVLSTPVLSALTCRGEPVLVPGVCVAPGCPSAPLALLWASVEPCHRGSVQGPDVALRRGQLPGLLPAQWALVSALGQARQPPMMSSAAFPRWLSMGVPRTPSRTVLFERERTGLTYRVPSLLPVPLVSTMRCSWESSGMTAD

SEQ ID NO: 880475 - protein, 484 aa, Homo sapiens
MGVPRTPSRTVLFERERTGLTYRVPSLLPVPPGPTLLAFVEQRLSPDDSHAHRLVLRRGTLAGGSVRWGALHVLGTAALAEHRSMNPCPVHDAGTGTVFLFFIAVLGHTPEAVQIATGRNAARLCCVASRDAGLSWGSARDLTEEAIGGAVQDWATFAVGPGHGVQLPSGRLLVPAYTYRVDRRECFGKICRTSPHSFAFYSDDHGRTWRCGGLVPNLRSGECQLAAVDGGQAGSFLYCNARSPLGSRVQALSTDEGTSFLPAERVASLPETAWGCQGSIVGFPAPAPNRPRDDSWSVGPGSPLQPPLLGPGVHEPPEEAAVDPRGGQVPGGPFSRLQPRGDGPRQPGPRPGVSGDVGSWTLALPMPFAAPPQSPTWLLYSHPVGRRARLHMGIRLSQSPLDPRSWTEPWVIYEGPSGYSDLASIGPAPEGGLVFACLYESGARTSYDEISFCTFSLREVLENVPASPKPPNLGDKPRGCCWPS

SEQ ID NO: 880476 - protein, 561 aa, Homo sapiens
AQRGLCCEGLCCARGGPAPGKPRGECALTEPSWQGRVSGAADPCPSGRSTAASQLGLSQHSPCWRAHPRVLSTPVLSALTCRGEPVLVPGVCVAPGCPSAPLALLWASVEPCHRGSVQGPDVALRRGQLPGLLPAQWALVSALGQARQPPMMSSAAFPRWLSMGVPRTPSRTVLFERERTGLTYRVPSLLPVPPGPTLLAFVEQRLSPDDSHAHRLVLRRGTLAGGSVRTGPHSLWVPATACSCPQAACWYPPTPTAWTAESVLARSAGPALTPSPSTAMTTAAPGAVEASCPTCAQASASWRRWTVGRPAASSTAMPGAHWAAVCRRSALTRAPPSCPQERVASLPETAWGCQGSIVGFPAPAPNRPRDDSWSVGPGSPLQPPLLGPGVHEPPEEAAVDPRGGQVPGGPFSRLQPRGDGPRQPGPRPGVSGDVGSWTLALPMPFAAPPQSPTWLLYSHPVGRRARLHMGIRLSQSPLDPRSWTEPWVIYEGPSGYSDLASIGPAPEGGLVFACLYESGARTSYDEISFCTFSLREVLENVPASPKPPNLGDKPRGCCWPS

SEQ ID NO: 880477 - protein, 109 aa, Homo sapiens
AAAPNLPGAPSPLRPRFPFPTRAPLCSLALLTLSLQPPGPGRGWVAGVLLPAPWLTFPHPRTRSGEPGTKNCRPREVRLAPSTWVLKKSHRFRARRIQGGETEAEREGR

SEQ ID NO: 880478 - protein, 109 aa, Homo sapiens
AAAPNLPGAPSPLRPRFPFPTRAPLCSLALLTLSLQPPGPGRGWVAGVLLPAPWLTFPHPRTRSGEPGTKNCRPREVRLAPSTWVLKKSHRFRARRIQGGETEAEREGP

SEQ ID NO: 880479 - protein, 160 aa, Homo sapiens
QIPAEGVPAYISLHRLLRKMLRGSGLPAVSRENPVASDSYEAAVLSLATGLAHSGTDCSQLAQGLGTWTCSSSLYPSKHPITVEINGINPGNNDCWVSTGLYLLEGQNAEVSLSEAAASAGLRVQIGCHTDDLTKARKLSRAPVVTHQCWMDRTERSVSC

SEQ ID NO: 880480 - protein, 89 aa, Homo sapiens
PLGEARRGPGMERPGPLEAQWRVGLQGAQSSLVQGPESDTRGRVVGGTPQCVTTEASSPSYVSLFLSLEVQHLREDSKHRVTSSYVHFL

SEQ ID NO: 880481 - protein, 86 aa, Homo sapiens
SADLGQPVLQPKPSAETLRAALSTEGSGSSPCYLTSPGTPSSAHYRQHPSKQDPCFNGTSDLDIQVSGAPLCTAGASPTRPRFSLP

SEQ ID NO: 880482 - protein, 86 aa, Homo sapiens; identical to SEQ ID NO: 880481

SEQ ID NO: 880483 - protein, 145 aa, Homo sapiens
TKPAELLLARVPDAGVEIPEEEAVVAGLPAVERAARGAVPRGGGGGGGGGGGGGAVGRGVGARVGAVGAPALAAARLGDPLRALAPVRGEESGGGEQQRQQVQGHGQERSAAAASLHAARAAGTGLHRRGAPRAKLAAGAPRQRP

SEQ ID NO: 880484 - protein, 165 aa, Homo sapiens
ARGLVGRTGAVELGRSCGSGGGRGGRGYGGWSQKMAEAGDFAVIGLLYPCIDRHLGEPHKFKREWSSVMRCVAVFVGINHASAKVDFDNNIQLSLTLAALSIGLWWTFDRSRSGFGLGVGIAFLATVVTQLLVYNGVYHTNVKLSQKNLIRNEEGKKYLLYRKAR

SEQ ID NO: 880485 - protein, 225 aa, Homo sapiens
MAEGETESPGPKKCGPYISSVTSQSVNLMIRGVVLFFIGVFLALVLNLLQIQRNVTLFPPDVIASIFSSAWWVPPCCGTASAVIGLLYPCIDRHLGEPHKFKREWSSVMRCVAVFVGINHASAKVDFDNNIQLSLTLAALSIGLWWTFDRSRSGFGLGVGIAFLATVVTQLLVYNGVYQYTSPDFLYVRSWLPCIFFAGGITMGNIGRQLAMYECKVIAEKSHQE

SEQ ID NO: 880486 - protein, 225 aa, Homo sapiens; identical to SEQ ID NO: 880485

SEQ ID NO: 880487 - protein, 117 aa, Homo sapiens
MRCVAVFVGINHASAKVDFDNNIQLSLTLAALSIGLWWTFDRSRSGFGLGVGIAFLATVVTQLLVYNGVYQYTSPDFLYVRSWLPCIFFAGGITMGNIGRQLAMYECKVIAEKSHQE

SEQ ID NO: 880488 - protein, 225 aa, Homo sapiens; identical to SEQ ID NO: 880485

SEQ ID NO: 880489 - protein, 185 aa, Homo sapiens
ARGLVGRTGAVELGRSCGSGGGRGGRGYGGWSQKMAEAGDFAVIGLLYPCIDRHLGEPHKFKREWSSVMRCVAVFVGINHASAKVDFDNNIQLSLTLAALSIGLWWTFDRSRSGFGLGVGIAFLATVVTQLLVYNGVYQYTSPDFLYVRSWLPCIFFAGGITMGNIGRQLAMYECKVIAEKSHQE

SEQ ID NO: 880490 - protein, 117 aa, Homo sapiens; identical to SEQ ID NO: 880487

SEQ ID NO: 880491 - protein, 1591 aa, Homo sapiens
MGNAESQHVEHEFYGEKHASLGRNDTSRSLRLSHKTRRTRHASSGKVIHRNSEVSTRSSSTPSIPQSLAENGLEPFSQDGTLEDFGSPIWVDRVDMGLRPVSYTDSSVTPSVDSSIVLTAASVQSMPDTEESRLYGDDATYLAEGGRRQHSYTSNGPTFMETASFKKKRSKSADIWREDSLEFSLSDLSQEHLTSNEEILGSAEEKDCEEARGMETRASPRQLSTCQRANSLGDLYAQKNSGVTANMGPGSKFAGYCRNLVSDIPNLANHKMPPAAAEETPPYSNYNTLPCRKSHCLSEGATNPQISHSNSMQGRRAKTTQDVNAGEGSEFADSGIEGATTDTDLLSRRSNATNSSYSPTTGRAFVGSDSGSSSTGDAARQGVYENFRRELEMSTTNSESLEEAGSAHSDEQSSGTLSSPGQSDILLTAAQGTVRKAGALAVKNFLVHKKNKKVESATRRKWKHYWVSLKGCTLFFYESDGRSGIDHNSIPKHAVWVENSIVQAVPEHPKKDFVFCLSNSLGDAFLFQTTSQTELENWITAIHSACATAVARHHHKEDTLRLLKSEIKKLEQKIDMDEKMKKMGEMQLSSVTDSKKKKTILDQIFVWEQNLEQFQMDLFRFRCYLASLQGGELPNPKRLLAFASRPTKVAMGRLGIFSVSSFHALVAARTGETGVRRRTQAMSRSASKRRSRFSSLWGLDTTSKKKQGRPSINQVFGEGTEAVKKSLEGIFDDIVPDGKREKEVVLPNVHQHNPDCDIWVHEYFTPSWFCLPNNQPALTVVRPGDTARDTLELICKTHQLDHSAHYLRLKFLIENKMQLYVPQPEEDIYELLYKEIEICPKVTHSIHIEKSDTAADTYGFSLSSVEEDGIRRLYVNSVKETGLASKKGLKAGDEILEINNRAADALNSSMLKDFLSQPSLGLLVRTYPELEEGVELLESPPHRVDGPADLGESPLAFLTSNPGHSLCSEQGSSAETAPEETEGPDLESSDETDHSSKSTEQVAAFCRSLHEMNPSDQNPSPQDSTGPQLATMRQLSDADNVRKVICELLETERTYVKDLNCLMERYLKPLQKETFLTQDELDVLFGNLTEMVEFQVEFLKTLEDGVRLVPDLEKLEKVDQFKKVLFSLGGSFLYYADRFKLYSAFCASHTKVPKVLVKAKTDTAFKAFLDAQNPKQQHSSTLESYLIKPIQRILKYPLLLRELFALTDAESEEHYHLDVAIKTMNKVASHINEMQKIHEEFGAVFDQLIAEQTGEKKEVADLSMGDLLLHTTVIWLNPPASLGKWKKEPELAAFVFKTAVVLVYKDGSKQKKKLVGSHRLSIYEDWDPFRFRHMIPTEALQVRALASADAEANAVCEIVHVKSESEGRPERVFHLCCSSPESRKDFLKAVHSILRDKHRRQLLKTESLPSSQQYVPFGGKRLCALKGARPAMSRAVSAPSKSLGRRRRRLARNRFTIDSDAVSASSPEKESQQPPGGGDTDRWVEEQFDLAQYEEQDDIKETDILSDDDEFCESVKGASVDRDLQERLQATSISQRERGRKTLDSHASRMAQLKKQAALSGINGGLESASEEVIWVRREDFAPSRKLNTEI

SEQ ID NO: 880492 - protein, 1477 aa, Homo sapiens
MGNAESQHVEHEFYGEKHASLGRNDTSRSLRLSHKTRRTRHASSGKVIHRNSEVSTRSSSTPSIPQSLAENGLEPFSQDGTLEDFGSPIWVDRVDMGLRPVSYTDSSVTPSVDSSIVLTAASVQSMPDTEESRLYGDDATYLAEGGRRQHSYTSNGPTFMETASFKKKRSKSADIWREDSLEFSLSDLSQEHLTSNEEILGSAEEKDCEEARGMETRASPRQLSTCQRANSLGDLYAQKNSGVTANVGPGSKFAGYCRNLVSDIPNLANHKMPPAAAEETPPYSNYNTLPCRKSHCLSEGATNPQISHSNSMQGRRAKTTQDVNAGEGSEFADSGIEGATTDTDLLSRRSNATNSSYSPTTGRAFVGSDSGSSSTGDAARQGVYENFRRELEMSTTNSESLEEAGSAHSDEQSSGTLSSPGQSDILLTAAQGTVRKAGALAVKNFLVHKKNKKVESATRRKWKHYWVSLKGCTLFFYESDGRSGIDHNSIPKHAVWVENSIVQAVPEHPKKDFVFCLSNSLGDAFLFQTTSQTELENWITAIHSACATAVARHHHKEDTLRLLKSEIKKLEQKIDMDEKMKKMGEMQLSSVTDSKKKKTILDQIFVWEQNLEQFQMDLFRFRCYLASLQGGELPNPKRLLAFASRPTKVAMGRLGIFSVSSFHALVAARTGETGVRRRTQAMSRSASKRRSRFSSLWGLDTTSKKKQGRPSINQVFGEGTEAVKKSLEGIFDDIVPDGKREKEVVLPNVHQHNPDCDIWVHEYFTPSWFCLPNNQPALTVVRPGDTARDTLELICKTHQLDHSAHYLRLKFLIENKMQLYVPQPEEDIYELLYKEIEICPKVTHSIHIEKSDTAADTYGFSLSSVEEDGIRRLYVNSVKETGLASKKGLKAGDEILEINNRAADALNSSMLKDFLSQPSLGLLVRTYPELEEGVELLESPPHRVDGPADLGESPLAFLTSNPGHSLCSEQGSSAETAPEETEGPDLESSDETDHSSKSTEQVAAFCRSLHEMNPSDQSPSPQDSTGPQLATMRQLSDADNVRKVICELLETERTYVKDLNCLMERYLKPLQKETFLTQDELDVLFGNLTEMVEFQVEFLKTLEDGVRLVPDLEKLEKVDQFKKVLFSLGGSFLYYADRFKLYSAFCASHTKVPKVLVKAKTDTAFKAFLDAQNPKQQHSSTLESYLIKPIQRILKYPLLLRELFALTDAESEEHYHLDVAIKTMNKVASHINEMQKIHEEFGAVFDQLIAEQTGEKKEVADLSMGDLLLHTTVIWLNPPASLGKWKKEPELAAFVFKTAVVLVYKDGSKQKKKLVGSHRLSIYEDWDPFRFRHMIPTEALQVRALASADAEANAVCEIVHVKSESEGRPERVFHLCCSSPESRKDFLKAVHSILRDKHRRQLLKTESLPSSQQYVPFGGKRLCALKGARPAMSRADGKRKQRLLIVAFTGSSATHPSENTRKSGAWRGCHCLLYIRS

SEQ ID NO: 880493 - protein, 1199 aa, Homo sapiens
MGNAESQHVEHEFYGEKHASLGRNDTSRSLRLSHKTRRTRHASSGKVIHRNSEVSTRSSSTPSIPQSLAENGLEPFSQDGTLEDFGSPIWVDRVDMGLRPVSYTDSSVTPSVDSSIVLTAASVQSMPDTEESRLYGDDATYLAEGGRRQHSYTSNGPTFMETASFKKKRSKSADIWREDSLEFSLSDLSQEHLTSNEEILGSAEEKDCEEARGMETRASPRQLSTCQRANSLGDLYAQKNSGVTANMGPGSKFAGYCRNLVSDIPNLANHKMPPAAAEETPPYSNYNTLPCRKSHCLSEGATNPQISHSNSMQGRRAKTTQDVNAGEGSEFADSGIEGATTDTDLLSRRSNATNSSYSPTTGRAFVGSDSGSSSTGDAARQGVYENFRRELEMSTTNSESLEEAGSAHSDEQSSGTLSSPGQSDILLTAAQGTVRKAGALAVKNFLVHKKNKKVESATRRKWKHYWVSLKGCTLFFYESDGRSGIDHNSIPKHAVWVENSIVQAVPEHPKKDFVFCLSNSLGDAFLFQTTSQTELENWITAIHSACATAVARHHHKEDTLRLLKSEIKKLEQKIDMDEKMKKMGEMQLSSVTDSKKKKTILDQIFVWEQNLEQFQMDLFRFRCYLASLQGGELPNPKRLLAFASRPTKVAMGRLGIFSVSSFHALVAARTGETGVRRRTQAMSRSASKRRSRFSSLWGLDTTSKKKQGRPSINQVFGEGTEAVKKSLEGIFDDIVPDGKREKEVVLPNVHQHNPDCDIWVHEYFTPSWFCLPNNQPALTVVRPGDTARDTLELICKTHQLDHSAHYLRLKFLIENKMQLYVPQPEEDIYELLYKEIEICPKVTHSIHIEKSDTAADTYGFSLSSVEEDGIRRLYVNSVKETGLASKKGLKAGDEILEINNRAADALNSSMLKDFLSQPSLGLLVRTYPELEEGVELLESPPHRVDGPADLGESPLAFLTSNPGHSLCSEQGSSAETAPEETEGPDLESSDETDHSSKSTEQVAAFCRSLHEMNPSDQNPSPQDSTGPQLATMRQLSDADNVRKVICELLETERTYVKDLNCLMERYLKPLQKETFLTQDELDVLFGNLTEMVEFQVEFLKTLEDGVRLVPDLEKLEKVDQFKKVLFSLGGSFLYYADRFKLYSAFCASHTKVPKVLVKAKTDTAFKAFLDAQNPKQQHSSTLESYLIKPIQMENGSRGF

SEQ ID NO: 880494 - protein, 68 aa, Homo sapiens
MCVQDGLMTGPAFPVEISKAQGTLFSHRAVLLQIHLSPMGSFIMLLLFLILGKGEYLEDFAVDRDTEA

SEQ ID NO: 880495 - protein, 1591 aa, Homo sapiens
MGNAESQHVEHEFYGEKHASLGRNDTSRSLRLSHKTRRTRHASSGKVIHRNSEVSTRSSSTPSIPQSLAENGLEPFSQDGTLEDFGSPIWVDRVDMGLRPVSYTDSSVTPSVDSSIVLTAASVQSMPDTEESRLYGDDATYLAEGGRRQHSYTSNGPTFMETASFKKKRSKSADIWREDSLEFSLSDLSQEHLTSNEEILGSAEEKDCEEARGMETRASPRQLSTCQRANSLGDLYAQKNSGVTANMGPGSKFAGYCRNLVSDIPNLANHKMPPAAAEETPPYSNYNTLPCRKSHCLSEGATNPQISHSNSMQGRRAKTTQDVNAGEGSEFADSGIEGATTDTDLLSRRSNATNSSYSPTTGRAFVGSDSGSSSTGDAARQGVYENFRRELEMSTTNSESLEEAGSAHSDEQSSGTLSSPGQSDILLTAAQGTVRKAGALAVKNFLVHKKNKKVESATRRKWKHYWVSLKGCTLFFYESDGRSGIDHNSIPKHAVWVENSIVQAVPEHPKKDFVFCLSNSLGDAFLFQTTSQTELENWITAIHSACATAVARHHHKEDTLRLLKSEIKKLEQKIDMDEKMKKMGEMQLSSVTDSKKKKTILDQIFVWEQNLEQFQMDLFRFRCYLASLQGGELPNPKRLLAFASRPTKVAMGRLGIFSVSSFHALVAARTGETGVRRRTQAMSRSASKRRSRFSSLWGLDTTSKKKQGRPSINQVFGEGTEAVKKSLEGIFDDIVPDGKREKEVVLPNVHQHNPDCDIWVHEYFTPSWFCLPNNQPALTVVRPGDTARDTLELICKTHQLDHSAHYLRLKFLIENKMQLYVPQPEEDIYELLYKEIEICPKVTHSIHIEKSDTAADTYGFSLSSVEEDGIRRLYVNSVKETGLASKKGLKAGDEILEINNRAADALNSSMLKDFLSQPSLGLLVRTYPELEEGVELLESPPHRVDGPADLGESPLAFLTSNPGHSLCSEQGSSAETAPEETEGPDLESSDETDHSSKSTEQVAAFCRSLHEMNPSDQNPSPQDSTGPQLATMRQLSDADKLRKVICELLETERTYVKDLNCLMERYLKPLQKETFLTQDELDVLFGNLTEMVEFQVEFLKTLEDGVRLVPDLEKLEKVDQFKKVLFSLGGSFLYYADRFKLYSAFCASHTKVPKVLVKAKTDTAFKAFLDAQNPKQQHSSTLESYLIKPIQRILKYPLLLRELFALTDAESEEHYHLDVAIKTMNKVASHINEMQKIHEEFGAVFDQLIAEQTGEKKEVADLSMGDLLLHTTVIWLNPPASLGKWKKEPELAAFVFKTAVVLVYKDGSKQKKKLVGSHRLSIYEDWDPFRFRHMIPTEALQVRALASADAEANAVCEIVHVKSESEGRPERVFHLCCSSPESRKDFLKAVHSILRDKHRRQLLKTESLPSSQQYVPFGGKRLCALKGARPAMSRAVSAPSKSLGRRRRRLARNRFTIDSDAVSASSPEKESQQPPGGGDTDRWVEEQFDLAQYEEQDDIKETDILSDDDEFCESVKGASVDRDLQERLQATSISQRERGRKTLDSHASRMAQLKKQAALSGINGGLESASEEVIWVRREDFAPSRKLNTEI

SEQ ID NO: 880496 - protein, 1274 aa, Homo sapiens
MGNAESQHVEHEFYGEKHASLGRNDTSRSLRLSHKTRRTRHASSGKVIHRNSEVSTRSSSTPSIPQSLAENGLEPFSQDGTLEDFGSPIWVDRVDMGLRPVSYTDSSVTPSVDSSIVLTAASVQSMPDTEESRLYGDDATYLAEGGRRQHSYTSNGPTFMETASFKKKRSKSADIWREDSLEFSLSDLSQEHLTSNEEILGSAEEKDCEEARGMETRASPRQLSTCQRANSLGDLYAQKNSGVTANMGPGSKFAGYCRNLVSDIPNLANHKMPPAAAEETPPYSNYNTLPCRKSHCLSEGATNPQISHSNSMQGRRAKTTQDVNAGEGSEFADSGIEGATTDTDLLSRRSNATNSSYSPTTGRAFVGSDSGSSSTGDAARQGVYENFRRELEMSTTNSESLEEAGSAHSDEQSSGTLSSPGQSDILLTAAQGTVRKAGALAVKNFLVHKKNKKVESATRRKWKHYWVSLKGCTLFFYESDGRSGIDHNSIPKHAVWVENSIVQAVPEHPKKDFVFCLSNSLGDAFLFQTTSQTELENWITAIHSACATAVARHHHKEDTLRLLKSEIKKLEQKIDMDEKMKKMGEMQLSSVTDSKKKKTILDQIFVWEQNLEQFQMDLFRFRCYLASLQGGELPNPKRLLAFASRPTKVAMGRLGIFSVSSFHALVAARTGETGVRRRTQAMSRSASKRRSRFSSLWGLDTTSKKKQGRPSINQVFGEGTEAVKKSLEGIFDDIVPDGKREKEVVLPNVHQHNPDCDIWVHEYFTPSWFCLPNNQPALTVVRPGDTARDTLELICKTHQLDHSAHYLRLKFLIENKMQLYVPQPEEDIYELLYKEIEICPKVTHSIHIEKSDTAADTYGFSLSSVEEDGIRRLYVNSVKETGLASKKGLKAGDEILEINNRAADALNSSMLKDFLSQPSLGLLVRTYPELEEGVELLESPPHRVDGPADLGESPLAFLTSNPGHSLCSEQGSSAETAPEETEGPDLESSDETDHSSKSTEQVAAFCRSLHEMNPSDQNPSPQDSTGPQLATMRQLSDADNVRKVICELLETERTYVKDLNCLMERYLKPLQKETFLTQDELDVLFGNLTEMVEFQVEFLKTLEDGVRLVPDLEKLEKVDQFKKVLFSLGGSFLYYADRFKLYSAFCASHTKVPKVLVKAKTDTAFKAFLDAQNPKQQHSSTLESYLIKPIQRILKYPLLLRELFALTDAESEEHYHLDVAIKTMNKVASHINEMQKIHEEFGAVFDQLIAEQTGEKKEVADLSMGDLLLHTTEI

SEQ ID NO: 880497 - protein, 1591 aa, Homo sapiens; identical to SEQ ID NO: 880491

SEQ ID NO: 880498 - protein, 107 aa, Homo sapiens
GGSSGLEMTDLLSPLPAILGPRGQERPGIQGVPQLSFTRIYRPALPTSQHPAWQRNGTEDGAAGRYQHFRNCDRILLRCQGWSALVQSRLTANSASQVQVILLCQFL

SEQ ID NO: 880499 - protein, 77 aa, Homo sapiens
WPRARRHHHSNSAAGGRRTCPHISCVAGTASGPLGSLHVPGFVSDTSDAVLSRKRKVSVFVTFMTVRGEREREKVGE

SEQ ID NO: 880500 - protein, 107 aa, Homo sapiens
QTHRAKSASSCPNLLVPETWPHQVSASHAGRSKQPQGGILKINEEHRRGAIQDLLASPGFTFGKRVVFDSHCLKRQHTFADGLHSSCTSVPLSEIWHTLTRRENYIY

SEQ ID NO: 880501 - protein, 128 aa, Homo sapiens
QTHRAKSASSCPNLLVPETWPHQVSASHAGRSKQPQGGILKINEEHRRGAIQDLLASPGFTFGKRVVFDSHCLKRQHTFADGLHSSCTSSKLAPSATVLPSTLLNHCAGVSEPPDVFCTIIPILQLGD

SEQ ID NO: 880502 - protein, 783 aa, Homo sapiens [sequence omitted]

SEQ ID NO: 880503 - protein, 829 aa, Homo sapiens
MAKYNTGGNPTEDVSVNSRPFRVTGPNSSSGIQARKNLFNNQGNASPPAGPSNVPKFGSPKPPVAVKPSSEEKPDKEPKPPFLKPTGAGQRFGTPASLTTRDPEAKVGFLKPVGPKPINLPKEDSKPTFPWPPGNKPSLHSVNQDHDLKPLGPKSGPTPPTSENEQKQAFPKLTGVKGKFMSASQDLEPKPLFPKPAFGQKPPLSTENSHEDESPMKNVSSSKGSPAPLGVRSKSGPLKPAREDSENKDHAGEISSLPFPGVVLKPAASRGGPGLSKNGEEKKEDRKIDAAKNTFQSKINQEELASGTPPARFPKAPSKLTVGGPWGQSQEKEKGDKNSATPKQKPLPPLFTLGPPPPKPNRPPNVDLTKFHKTSSGNSTSKGQTSYSTTSLPPPPPSHPASQPPLPASHPSQPPVPSLPPRNIKPPFDLKSPVNEDNQDGVTHSDGAGNLDEEQDSEGETYEDIEASKEREKKREKEEKKRLELEKKEQKEKEKKEQEIKKKFKLTGPIQVIHLAKACCDVKGGKNELSFKQGEQIEIIRITDNPEGKWLGRTARGSYGYIKTTAVEIDYDSLKLKKDSLGAPSRPIEDDQEVYDDVAEQDDISSHSQSGSGGIFPPPPDDDIYDGIEEEDADDGSTLQVQEKSNTWSWGILKMLKGKDDRKKSIREKPKVSDSDNNEGSSFPAPPKQLDMGDEVYDDVDTSDFPVSSAEMSQGTNFGKAKTEEKDLKKLKKQEKEEKDFRKKFKYDGEIRVLYSTKVTTSITSKKWGTRDLQVKPGESLEVIQTTDDTKVLCRNEEGKYGYVLRSYLADNDGEIYDDIADGCIYDND

SEQ ID NO: 880504 - protein, 639 aa, Homo sapiens
MAKYNTGGNPTEDVSVNSRPFRVTGPNSSSGIQARKNLFNNQGNASPPAGPSNVPKFGSPKPPVAVKPSSEEKPDKEPKPPFLKPTGAGQRFGTPASLTTRDPEAKVGFLKPVGPKPINLPKEDSKPTFPWPPGNKPSLHSVNQDHDLKPLGPKSGPTPPTSENEQKQAFPKLTGVKGKFMSASQDLEPKPLFPKPAFGQKPPLSTENSHEDESPMKNVSSSKGSPAPLGVRSKSGPLKPAREDSENKDHAGEISSLPFPGVVLKPAASRGGPGLSKNGEEKKEDRKIDAAKNTFQSKINQEELASGTPPARFPKAPSKLTVGGPWGQSQEKEKGDKNSATPKQKPLPPLFTLGPPPPKPNRPPNVDLTKFHKTSSGNSTSKGQTSYSTTSLPPPPPSHPASQPPLPASHPSQPPVPSLPPRNIKPPFDLKSPVNEDNQDGVTHSDGAGNLDEEQDSEGETYEDIEASKEREKKREKEEKKRLELEKKEQKEKEKKEQEIKKKFKLTGPIQVIHLAKACCDVKGGKNELSFKQGEQIEIIRITDNPEGKWLGRTARGSYGYIKTTAVEIDYDSLKLKKDSLGAPSRPIEDDQEVYDDVAEQDDISSHSQSGSGGIFPPPPDDDIYDGLEEGTPYRLWFS

SEQ ID NO: 880505 - protein, 392 aa, Homo sapiens
MAKYNTGGNPTEDVSVNSRPFRVTGPNSSSGIQARKNLFNNQGNASPPAGPSNVPKFGSPKPPVAVKPSSEEKPDKEPKPPFLKPTGAGQRFGTPASLTTRDPEAKVGFLKPVGPKPINLPKEDSKPTFPWPPGNKPSLHSVNQDHDLKPLGPKSGPTPPTSENEQKQAFPKLTGVKGKFMSASQDLEPKPLFPKPAFGQKPPLSTENSHEDESPMKNVSSSKGSPAPLGVRSKSGPLKPAREDSENKDHAGEISSLPFPGVVLKPAASRGGPGLSKNGEEKKEDRKIDAAKNTFQSKINQEELASGTPPARFPKAPSKLTVGGPWGQSQEKEKGDKNSATPKQKPLPPLFTLGPPPPKPNRPPNVDLTKFHKTSSGNSTSKGQTSYSTPTT

SEQ ID NO: 880506 - protein, 102 aa, Homo sapiens
LTGPIQVIHLAKACCDVKGGKNELSFKQGEQIEIIRITDNPEGKWLGRTARGSCECKFLYGFEVFSLRGNIQCTYSSRTRHRHRVRSTLQSGQREENVKWQV

SEQ ID NO: 880507 - protein, 783 aa, Homo sapiens [sequence omitted]

SEQ ID NO: 880508 - protein, 829 aa, Homo sapiens; identical to SEQ ID NO: 880503

SEQ ID NO: 880509 - protein, 838 aa, Homo sapiens
MAKYNTGGNPTEDVSVNSRPFRVTGPNSSSGIQARKNLFNNQGNASPPAGPSNVPKFGSPKPPVAVKPSSEEKPDKEPKPPFLKPTGAGQRFGTPASLTTRDPEAKVGFLKPVGPKPINLPKEDSKPTFPWPPGNKPSLHSVNQDHDLKPLGPKSGPTPPTSENEQKQAFPKLTGVKGKFMSASQDLEPKPLFPKPAFGQKPPLSTENSHEDESPMKNVSSSKGSPAPLGVRSKSGPLKPAREDSENKDHAGEISSLPFPGVVLKPAASRGGPGLSKNGEEKKEDRKIDAAKNTFQSKINQEELASGTPPARFPKAPSKLTVGGPWGQSQEKEKGDKNSATPKQKPLPPLFTLGPPPPKPNRPPNVDLTKFHKTSSGNSTSKGQTSYSTTSLPPPPPSHPASQPPLPASHPSQPPVPSLPPRNIKPPFDLKSPVNEDNQDGVTHSDGAGNLDEEQDSEGETYEDIEASKEREKKREKEEKKRLELEKKEQKEKEKKEQEIKKKFKLTGPIQVIHLAKACCDVKGGKNELSFKQGEQIEIIRITDNPEGKWLGRTARGSYGYIKTTAVEIDYDSLKLKKDSLGAPSRPIEDDQEVYDDVAEQDDISSHSQSGSGGIFPPPPDDDIYDGIEEEDADDGSTLQVQEKSNTWSWGILKMLKGKDDRKKSIREKPKVSDSDNNEGSSVRVNQPNPVFPAPPKQLDMGDEVYDDVDTSDFPVSSAEMSQGTNFGKAKTEEKDLKKLKKQEKEEKDFRKKFKYDGEIRVLYSTKVTTSITSKKWGTRDLQVKPGESLEVIQTTDDTKVLCRNEEGKYGYVLRSYLADNDGEIYDDIADGCIYDND

SEQ ID NO: 880510 - protein, 463 aa, Homo sapiens
MAKYNTGGNPTEDVSVNSRPFRVTGPNSSSGIQARKNLFNNQGNASPPAGPSNVPKFGSPKPPVAVKPSSEEKPDKEPKPPFLKPTGAGQRFGTPASLTTRDPEAKVGFLKPVGPKPINLPKEDSKPTFPWPPGNKPSLHSVNQDHDLKPLGPKSGPTPPTSENEQKQAFPKLTGVKGKFMSASQDLEPKPLFPKPAFGQKPPLSTENSHEDESPMKNVSSSKGSPAPLGVRSKSGPLKPAREDSENKDHAGEISSLPFPGVVLKPAASRGGPGLSKNGEEKKEDRKIDAAKNTFQSKINQEELASGTPPARFPKAPSKLTVGGPWGQSQEKEKGDKNSATPKQKPLPPLFTLGPPPPKPNRPPNVDLTKFHKTSSGNSTSKGQTSYSTKPLATTQPAKTSTSKAKTQPTSLPKQPAPTTIGGLNKKPMSLASGLVPAAPPKRPAVASARPSILPIKRRGYRA

SEQ ID NO: 880511 - protein, 257 aa, Homo sapiens
GQCLSHSGFTMHSWERLAVLVLLGAAACAAPPRGRILGGREAEAHARPYMASVQLNGAHLCGGVLVAEQWVLSAAHCLEDAADGKVQVLLGAHSLSQPEPSKRLYDVLRAVPHPDSQPDTIDHDLLLLQLSEKATLGPAVRPLPWQRVDRDVAPGTLCDVAGWGIVNHAGRRPDSLQHVLLPVLDRATCNRRTHHDGAITERLMCAESNRRDSCKVTPGARWCAGACSRAWSPRARAFAATEEARDLHPRGSYAAWI

SEQ ID NO: 880512 - protein, 412 aa, Homo sapiens
ADPQRLHRDCAPVPLALPRCCSSRPAALRMERRARSSSRESRGRGGRTPHKENKRAKAERSGGGRGRQEAGPEPSGSGRAGTPGEPRAPAATVVDVDEVRGSGEEGTEVVALLESERPEEGTKSSGLGACEWLLVLISLLFIIMTFPFSIWFCVKVVQEYERVIIFRLGHLLPGRAKGPGLFFFLPCLDTYHKVDLRLQTLEIPFHEIVTKDMFIMEIDAICYYRMENASLLLSSLAHVSKAVQFLVQTTMKRLLAHRSLTEILLERKSIAQDAKVALDSVTCIWGIKVERIEIKDVRLPAGLQHSLAVEAEAQRQAKVRMIAAEAEKAASESLRMAAEILSGTPAAVQLRYLHTLQSLSTEKPSTVVLPLPFDLLNCLSSPSNRTQGSLPFPSPSKPVEPLNPKKKDSPML

SEQ ID NO: 880513 - protein, 188 aa, Homo sapiens
ADPQRLHRDCAPVPLALPRCCSSRPAALRMERRARSSSRESRGRGGRTPHKENKRAKAERSGGGRGRQEAGPEPSGSGRAGTPGEPRAPAATVVDVDEVRGSGEEGTEVVALLESERPEEGTKSSGLGACEWLLVLISLLFIIMTFPFSIWFCVKVVQEYERVIIFRLGHLLPGRAKGPGWPRTPDFK

SEQ ID NO: 880514 - protein, 344 aa, Homo sapiens
ADPQRLHRDCAPVPLALPRCCSSRPAALRMERRARSSSRESRGRGGRTPHKENKRAKAERSGGGRGRQEAGPEPSGSGRAGTPGEPRAPAATVVDVDEVRGSGEEGTEVVALLESERPEEGTKSSGLGACEWLLVLISLLFIIMTFPFSIWFCVKVVQEYERVIIFRLGHLLPGRAKGPGLFFFLPCLDTYHKVDLRLQTLEIPFHEVALDSVTCIWGIKVERIEIKDVRLPAGLQHSLAVEAEAQRQAKVRMIAAEAEKAASESLRMAAEILSGTPAAVQLRYLHTLQSLSTEKPSTVVLPLPFDLLNCLSSPSNRTQGSLPFPSPSKPVEPLNPKKKDSPML

SEQ ID NO: 880515 - protein, 169 aa, Homo sapiens
SLSSHPQRASVLLCPSTPGAQPPPELPDPPAARPPTRPHPAPPLPSRDCSLPGAQAGSWCAAFRGQRPCRRGGKGSGEDTLALPDAVINFKGVSLGVNENRSDAWLKASRPPPEPRALWSRPGRGGPRATFQPSPHFTIFQAPQLGMGITVSVGGTHILKGGGLTAEGN

SEQ ID NO: 880516 - protein, 436 aa, Homo sapiens
MDQPFTVNSLKKLAAMPDHTDVSLSPEERVRALSKLGCNITISEDITPRRYFRSGVEMERMASVYLEEGNLENAFVLYNKFITLFVEKLPNHRDYQQCAVPEKQDIMKKLKEIAFPRTDELKNDLLKKYNVEYQEYLQSKNKYKAEILKKLEHQRLIEAERKRIAQMRQQQLESEQFLFFEDQLKKQELARGQMRSQQTSGLSEQIDGSALSCFSTHQNNSLLNVFADQPNKSDATNYASHSPPVNRALTPAATLSAVQNLVVEGLRCVVLPEDLCHKFLQLAESNTVRGIETCGILCGKLTHNEFTITHVIVPKQSAGPDYCDMENVEELFNVQDQHDLLTLGWIHTHPTQTAFLSSVDLHTHCSYQLMLPEAIAIVCSPKHKDTGIFRLTNAGMLEVSACKKKGFHPHTKEPRLFSICKHVLVKDIKIIVLDLR

SEQ ID NO: 880517 - protein, 105 aa, Homo sapiens
MALLIHQWSFEFFSRVRRDLHHSFHALIFLCDSLCCQQYAKVRWCSFGAKHAVPEKDQSDLNCLESTLTLILLALVLSLLSLTINTKIILMPDFSEKADGKTEGK

SEQ ID NO: 880518 - protein, 390 aa, Homo sapiens
MDQPFTVNSLKKLAAMPDHTDVSLSPEERVRALSKLGCNITISEDITPRRYFRSGVEMERMASVYLEEGNLENAFVLYNKFITLFVEKLPNHRDYQQCAVPEKQDIMKKLKEIAFPRTDELKNDLLKKYNVEYQEYLQSKNKYKAEILKKLEHQRLIEAERKRIAQMRQQQLESEQFLFFEDQLKKQELARGQMRSQQTSGLSEQIDGSALSCFSTHQNNSLLNVFADQPNKSDATNYASHSPPVNRALTPAATLSAVQNLVVEGLRCVVLPEDLCHKFLQLAESNTVRGIETCGILCGKLTHPTQTAFLSSVDLHTHCSYQLMLPEAIAIVCSPKHKDTGIFRLTNAGMLEVSACKKKGFHPHTKEPRLFSICKHVLVKDIKIIVLDLR

SEQ ID NO: 880519 - protein, 112 aa, Homo sapiens
MENVEELFNVQDQHDLLTLGWIHTHPTQTAFLSSVDLHTHCSYQLMLPEAIAIVCSPKHKDTGIFRLTNAGMLEVSACKKKGFHPHTKEPRLFSICKHVLVKDIKIIVLDLR

SEQ ID NO: 880520 - protein, 461 aa, Homo sapiens
MDQPFTVNSLKKLAAMPDHTDVSLSPEERVRALSKLGCNITISEDITPRRYFRSGVEMERMASVYLEEGNLENAFVLYNKFITLFVEKLPNHRDYQQCAVPEKQDIMKKLKEIAFPRTDELKNDLLKKYNVEYQEYLQSKNKYKAEILKKLEHQRLIEAERKRIAQMRQQQLESEQFLFFEDQLKKQELARGQMRSQQTSGLSEQIDGSALSCFSTHQNNSLLNVFADQPNKSDATNYASHSPPVNRALTPAATLSAVQNLVVEGLRCVVLPEDLCHKFLQLAESNTVRGIETCGILCGKLTHNEFTITHVIVPKQSAGPDYCDMENVEELFNVQDQHDLLTLGWIHTHPTQTAFLSSVDLHTHCSYQLMLPEAIAIVCSPKHKDTGIFRLTNAGMLEVSACKKKGFHPHTKEPRLFSIQKFLSGIISGTALEMEPLKIGYGPNGFPLLGISRSSSPSEQL

SEQ ID NO: 880521 - protein, 314 aa, Homo sapiens
TRGSTHASVEYQEYLQSKNKYKAEILKKLEHQRLIEAERKRIAQMRQQQLESEQFLFFEDQLKKQELARGQMRSQQTSGLSEQIDGSALSCFSTHQNNSLLNVFADQPNKSDATNYASHSPPVNRALTPAATLSAVQNLVVEGLRCVVLPEDLCHKFLQLAESNTVRGIETCGILCGKLTHNEFTITHVIVPKQSAGPDYCDMENVEELFNVQDQHDLLTLGWIHTHPTQTAFLSSVDLHTHCSYQLMLPEAIAIVCSPKHKDTGIFRLTNAGMLEVSACKKKGFHPHTKEPRLFSICKHVLVKDIKIIVLDLR

SEQ ID NO: 880522 - protein, 497 aa, Homo sapiens
AQPTCTQVNKQPLLLTQSLFRWSSIRTRVTPRSSRRVWAAYTEGKKKPSFLGKCRKPASGRSLRSPQGGALAAQRARFPAGEPRNGGAGGGDSEDPRLGFPTWIRSAWGFDPHPGAAPRRSWAARAFGLRHRQRHLEAGASGRLCLTCLLEGNTGKPGLAVTLVTNMSQDSVTFADVAVNFTKEEWTLLDPAQRNLYRDVMLENSRNLAFIDWATPCKTKDATPQPDILPKRTFPEANRVCLTSISSQHSTLREDWRCPKTEEPHRQGVNNVKPPAVAPEKDESPVSICEDHEMRNHSKPTCRLVPSQGDSIRQCILTRDSSIFKYNPVLNDSQKTHENNEDDGVLGWNIQWVPCGRKTELKSSTWTGSQNTVHHIRDEIDTGANRHQRNPFGKAFREDGSLRAHNTHGREKMYDFTQCENTSRNNSIHAMQMQLYTAETNKKDCQTGATSANAPNSGSHKSHCTGEKTHKCPECGRAFFYQSFLMRHMKIHTGEKP

SEQ ID NO: 880523 - protein, 199 aa, Homo sapiens
AQPTCTQVNKQPLLLTQSLFRWSSIRTRVTPRSSRRVWAAYTEGKKKPSFLGKCRKPASGRSLRSPQGGALAAQRARFPAGEPRNGGAGGGDSEDPRLGFPTWIRSAWGFDPHPGAAPRRSWAARAFGLRHRQRHLEAGASGRLCLTCLLEGNTGKPGLAVTLVTNMSQDSVTFADVAVNFTKEEWTLLDPAQRNLTEM

SEQ ID NO: 880524 - protein, 543 aa, Homo sapiens
AQPTCTQVNKQPLLLTQSLFRWSSIRTRVTPRSSRRVWAAYTEGKKKPSFLGKCRKPASGRSLRSPQGGALAAQRARFPAGEPRNGGAGGGDSEDPRLGFPTWIRSAWGFDPHPGAAPRRSWAARAFGLRHRQRHLEAGASGRLCLTCLLEGNTGKPGLAVTLVTNMSQGLALLPRLDCSGRIIAYCNLHLPGSGNPPSSASRVAETTGTRPHSRDSVTFADVAVNFTKEEWTLLDPAQRNLYRDVMLENSRNLAFIDWATPCKTKDATPQPDILPKRTFPEANRVCLTSISSQHSTLREDWRCPKTEEPHRQGVNNVKPPAVAPEKDESPVSICEDHEMRNHSKPTCRLVPSQGDSIRQCILTRDSSIFKYNPVLNDSQKTHENNEDDGVLGWNIQWVPCGRKTELKSSTWTGSQNTVHHIRDEIDTGANRHQRNPFGKAFREDGSLRAHNTHGREKMYDFTQCENTSRNNSIHAMQMQLYTAETNKKDCQTGATSANAPNSGSHKSHCTGEKTHKCPECGRAFFYQSFLMRHMKIHTGEKP

SEQ ID NO: 880525 - protein, 297 aa, Homo sapiens
MLENSRNLAFIDWATPCKTKDATPQPDILPKRTFPEANRVCLTSISSQHSTLREDWRCPKTEEPHRQGVNNVKPPAVAPEKDESPVSICEDHEMRNHSKPTCRLVPSQGDSIRQCILTRDSSIFKYNPVLNDSQKTHENNEDDGVLGWNIQWVPCGRKTELKSSTWTGSQNTVHHIRDEIDTGANRHQRNPFGKAFREDGSLRAHNTHGREKMYDFTQCENTSRNNSIHAMQMQLYTAETNKKDCQTGATSANAPNSGSHKSHCTGEKTHKCPECGRAFFYQSFLMRHMKIHTGEKP

SEQ ID NO: 880526 - protein, 110 aa, Homo sapiens
PPRSKETQSPPLHRGLDITTENPTNRKTRTQQVIHAAYIAIQTSKIIDEQEAKATPISRGITWMPKESALAISDGESNRCQMSAPGFLPYRRGILDRLDRPHSVTQAGVQ

SEQ ID NO: 880527 - protein, 118 aa, Homo sapiens
ARQLHRLANIIGLLQSRPSQAKVFEGSPQRKEDPFIIWIHPWPSVMVKATDVRCQPLASCLTVEGYSTDWTDHSCWGKPGVMSWGIQVLCLKDRLADLCIRPCSEKLDPQLKTLKETS

SEQ ID NO: 880528 - protein, 79 aa, Homo sapiens
KLKEPAKTAEGEAEGCRACLVSLSNPSPQSPGSAPSAAGGSFRLAHAQCSRTRRQRPVQSGTSPRGPLPIPTGTSNIGH

SEQ ID NO: 880529 - protein, 76 aa, Homo sapiens
LYLGTTDRIMELTIFSLKVLPSPLHPGAGGLRGKGGSSSFSQASEEVNPANNCRNGLGSGSFLSPAPRQLQPCEKP

SEQ ID NO: 880530 - protein, 76 aa, Homo sapiens; identical to SEQ ID NO: 880529

SEQ ID NO: 880531 - protein, 330 aa, Homo sapiens
MAQLLEDSLFCEEFIQQCPAAVEVLNLVAQECSAGERLAVVEVQCERLRMLYRDCARPPPPPLQADRRQPKEITWSPSRVFPPVRACMFSSHLTSVTFLADPSAGGGLPRGTFIYATSPLPVQAPSFYWEIEIVSYGDTDDDTGPIVSFGFTTEAEKRDGAWTNPVGTCLFHNNGRAVHYNGSSLLQWKSVRLDVTLSPGDVAGIGWERTEGTPPPPGQPAKGRVYFTYCGQRLSPYLEDVSGGMWPVVHIQKKNTKTRANFGSRPFAYAEGQAHRNAADLCTDLAEEISANFEALPFAMASDSDNDAGTSIASDPGTHGPPCRIAAVAT

SEQ ID NO: 880532 - protein, 322 aa, Homo sapiens
DAAPKESAPTWELRELFSQIQHVPSTGERLAVVEVQCERLRMLYRDCARPPPPPLQADRRQPKEITWSPSRVFPPVRACMFSSHLTSVTFLADPSAGGGLPRGTFIYATSPLPVQAPSFYWEIEIVSYGDTDDDTGPIVSFGFTTEAEKRDGAWTNPVGTCLFHNNGRAVHYNGSSLLQWKSVRLDVTLSPGDVAGIGWERTEGTPPPPGQPAKGRVYFTYCGQRLSPYLEDVSGGMWPVVHIQKKNTKTRANFGSRPFAYAEGQAHRNAADLCTDLAEEISANFEALPFAMASDSDNDAGTSIASDPGTHGPPCRIAAVAT

SEQ ID NO: 880533 - protein, 84 aa, Homo sapiens
RSRGPSGLWKEPLEEREDATGPRRGSAPVSRMWLVSSETWLAQVEMCLSKCYHYCWDSKKSLQMPLMTSETIGSNPVNSLVKKA

SEQ ID NO: 880534 - protein, 84 aa, Homo sapiens; identical to SEQ ID NO: 880533

SEQ ID NO: 880535 - protein, 111 aa, Homo sapiens
MAGLLSLLWPFFQRFNLAETPEGNFPERPMLTKPWRGMSLNDRLPGTEKHAQNPRGYPVAFTSSSSGVTSGFVCITMNLSLEASSGLMPSLKHKSCTPQTPAEPGDLNIRQ

SEQ ID NO: 880536 - protein, 108 aa, Homo sapiens
SCHVHSAYTSDTLPPSLTFLENREHFLMNLVPSSPGVHGLTPTSTPPTDLEAPPPPTLASVAHRCLFPLNPNLSHLLAFRVWSLPTEEPGNHRTSHVFRRYFSSFSGW

SEQ ID NO: 880537 - protein, 76 aa, Homo sapiens
AALGHRTAALHRRLDALQAAAARLDHRRVKIQAVFLDNAVPDCQRCLRGKQQARGEDLGQRKKPSVLFAGLFFVSS

SEQ ID NO: 880538 - protein, 196 aa, Homo sapiens
MVVFINAKIKSLIKLFKKKTVSNLDEESRWTVHYTAPWHQQENVFLPTTRPPCVEDLHRQAKLNLKSVLRECDKLRHDGYRSSQYYSQGPTFAANASPFCDDYQDEDEETDQKCSLSSSEEERFISIRRPKTPASSDFSDLNTQTNWTKSLPLPTPEEKMRQQAQTVQADVVPINITASGTGQDDADGHSVYTPDH

SEQ ID NO: 880539 - protein, 208 aa, Homo sapiens
AALGHRTAALHRRLDALQAAAARLDHRRVKIPVSNLDEESRWTVHYTAPWHQQENVFLPTTRPPCVEDLHRQAKLNLKSVLRECDKLRHDGYRSSQYYSQGPTFAANASPFCDDYQDEDEETDQKCSLSSSEEERFISIRRPKTPASSDFSDLNTQTNWTKSLPLPTPEEKMRQQAQTVQADVVPINITASGTGQDDADGHSVYTPDH

SEQ ID NO: 880540 - protein, 114 aa, Homo sapiens
MVVFINAKIKSLIKLFKKKTVSNLDEESRWTVHYTAPWHQQENVFLPTTRPPCVEDLHRQAKLNLKSVLRECDKLRHDGYRSSQYYSQGPTFAANASPFCDDYQDEDEETDQKV

SEQ ID NO: 880541 - protein, 193 aa, Homo sapiens
QQTDVDIVTVLIYNVVSVSNLDEESRWTVHYTAPWHQQENVFLPTTRPPCVEDLHRQAKLNLKSVLRECDKLRHDGYRSSQYYSQGPTFAANASPFCDDYQDEDEETDQKCSLSSSEEERFISIRRPKTPASSDFSDLNTQTNWTKSLPLPTPEEKMRQQAQTVQADVVPINITASGTGQDDADGHSVYTPDH

SEQ ID NO: 880542 - protein, 316 aa, Homo sapiens
VNQLKTSMQSVLQEWKIYDQLYDEVNMMTIRFWYCMEHSKPVVLSLETLRCQVENLQSLQDEAESSEGSWEKLQEVIGKLKGLCPSVAEIIEEKCQNTHKRWTQVNQAIADQLQKAQSLLQLWKAYSNAHGEAAARLKQQEAKFQQLANISMSGNNLAEILPPALQDIKELQHDVQKTKEAFLQNSSVLDRLPQPAESSTHMLLPGPLHSLQRAAYLEKMLLVKANEFEFVLSQFKDFGVRLESLKGLIMHEEENLDRLHQQEKENPDSFLNHVLALTAQSPDIEHLNEVSLKLPLSDVAVKTLQNMNRQWIRATA

SEQ ID NO: 880543 - protein, 269 aa, Homo sapiens
MARNQVGNLQSLQDEAESSEGSWEKLQEVIGKLKGLCPSVAEIIEEKCQNTHKRWTQVNQAIADQLQKAQSLLQLWKAYSNAHGEAAARLKQQEAKFQQLANISMSGNNLAEILPPALQDIKELQHDVQKTKEAFLQNSSVLDRLPQPAESSTHMLLPGPLHSLQRAAYLEKMLLVKANEFEFVLSQFKDFGVRLESLKGLIMHEEENLDRLHQQEKENPDSFLNHVLALTAQSPDIEHLNEVSLKLPLSDVAVKTLQNMNRQWIRATA

SEQ ID NO: 880544 - protein, 230 aa, Homo sapiens
AAAAAGGQLLGDGGSPGRTEQPPPSPQSSSGFLYRRLKTQEKREMQKEILSVLGLPHRPRPLHGLQQPQPPALRQQEEQQQQQQLPRGEPPPGRLKSAPLFMLDLYNALSADNDEDGASEGERQQSWPHEAASSSQRRQPPPGAAHPLNRKSLLAPGSGSGGASPLTSAQDSAFLNDADMVMSFVNLVEYDKEFSPRQRHHKEFKFNLSQIPEGEVVTAAEFRIYKDCVM

SEQ ID NO: 880545 - protein, 108 aa, Homo sapiens
APVPAGVRRDRTWERGAPGSPRHRWWQALRFAESGRLDWKRRREGESGEEEEEEQEQEHGQGQSAKSSTQNLQVLDPDTDQIFWNSLSNKRLLQGQNTLPARDPSEFL

SEQ ID NO: 880546 - protein, 133 aa, Homo sapiens
NLLLVGFGITCLINNLHLQFVTFVLHTIVRGFFHSACGSLYAAVFPSNHFGTLTGLQSLISAVFALLQQPLFMAMVGPLKGEPFWVNLGLLLFSLLGFLLPSYLFYYRARLQQEYPANGMGPLKVLSGSEVTA

SEQ ID NO: 880547 - protein, 162 aa, Homo sapiens [sequence omitted]

SEQ ID NO: 880548 - protein, 112 aa, Homo sapiens
MLVVVSLTHSFISATVLSTTCTRGRGVNKIPFCLGGCPLPMGLAISRKAPQSSTLFWLCVKDVCEQAQSFAARMRGQSIPLHTHPGADRLVPPSLHACPSTGSFAAPAPPAP

SEQ ID NO: 880549 - protein, 139 aa, Homo sapiens
PHGHMRTQPYDVIYSPGSHQPRNPHMQTRVPMVNGTGLPHAAHRPRCTATQKPQSHVRCHRHRPLPEPGSRYLGRRRGCRGVAKPGCLAPWPSPTASLPQRAGWFLGRERWCHCLPGHCAIGPFRPRGCRCPVGGGGER

SEQ ID NO: 880550 - protein, 374 aa, Homo sapiens
MSSINADFAFNLYRRFTVETPDKNIFFSPVSISAALVMLSFGACCSTQTEIVETLGFNLTDTPMVEIQHGFQHLICSLNFPKKELELQIGNALFIGKHLKPLAKFLNDVKTLYETEVFSTDFSNISAAKQEINSHVEMQTKGKVVGLIQDLKPNTIMVLVNYIHFKAQWANPFDPSKTEDSSSFLIDKTTTVQVPMMHQMEQYYHLVDMELNCTVLQMDYSKNALALFVLPKEGQMESVEAAMSSKTLKKWNRLLQKGWVDLFVPKFSISATYDLGATLLKMGIQHAYSENADFSGLTEDNGLKLSNAAHKAVLHIGEKGTEAAAVPEVELSDQPENTFLHPIIQIDRSFMLLILERSTRSILFLGKVVNPTEA

SEQ ID NO: 880551 - protein, 330 aa, Homo sapiens
MSSINADFAFNLYRRFTVETPDKNIFFSPVSISAALVMLSFGACCSTQTEIVETLGFNLTDTPMVEIQHGFQHLICSLNFPKKELELQIGNALFIGKHLKPLAKFLNDVKTLYETEVFSTDFSNISAAKQEINSHVEMQTKGKVVGLIQDLKPNTIMVLVNYIHFKAQWANPFDPSKTEDSSSFLIDKTTTVQVPMMHQMEQYYHLVDMELNCTVLQMDYSKNALALFVLPKEGQMESVEAAMSSKTLKKWNRLLQKGWVDLFVPKFSISATYDLGATLLKMGIQHAYSENADFSGLTEDNGLKLSNTFPKTVPVSSETRRICSPHTGCP

SEQ ID NO: 880552 - protein, 384 aa, Homo sapiens
MSSINADFAFNLYRRFTVETPDKNIFFSPVSISAALVMLSFGACCSTQTEIVETLGFNLTDTPMVEIQHGFQHLICSLNFPKKELELQIGNALFIGKHLKPLAKFLNDVKTLYETEVFSTDFSNISAAKQEINSHVEMQTKGKVVGLIQDLKPNTIMVLVNYIHFKAQWANPFDPSKTEDSSSFLIDKTTTVQVPMMHQMEQYYHLVDMELNCTVLQMDYSKNALALFVLPKEGQMESVEAAMSSKTLKKWNRLLQKGWVDLFVPKFSISATYDLGATLLKMGIQHAYSENADFSGLTEDNGLKLSNRPAGFVLPTQAAHKAVLHIGEKGTEAAAVPEVELSDQPENTFLHPIIQIDRSFMLLILERSTRSILFLGKVVNPTEA

SEQ ID NO: 880553 - protein, 415 aa, Homo sapiens
MSPFLYLVLLVLGLHATIHCASPEGKVTACHSSQPNATLYKMSSINADFAFNLYRRFTVETPDKNIFFSPVSISAALVMLSFGACCSTQTEIVETLGFNLTDTPMVEIQHGFQHLICSLNFPKKELELQIGNALFIGKHLKPLAKFLNDVKTLYETEVFSTDFSNISAAKQEINSHVEMQTKGKVVGLIQDLKPNTIMVLVNYIHFKAQWANPFDPSKTEDSSSFLIDKTTTVQVPMMHQMEQYYHLVDMELNCTVLQMDYSKNALALFVLPKEGQMESVEAAMSSKTLKKWNRLLQKGWVDLFVPKFSISATYDLGATLLKMGIQHAYSENADFSGLTEDNGLKLSNAAHKAVLHIGEKGTEAAAVPEVELSDQPENTFLHPIIQIDRSFMLLILERSTRSILFLGKVVNPTEA

SEQ ID NO: 880554 - protein, 415 aa, Homo sapiens; identical to SEQ ID NO: 880553

SEQ ID NO: 880555 - protein, 364 aa, Homo sapiens
RLAGPLAVSRLLNDLCRLELDSSVTGVRRAAPARGKLETVLCSPHNLWVLEMEYYYCPSLLKLLRYLWDQLKQCFSRQPTEPKDTDTLVHEAGSQYGTWTEQCQSGESLATESPDSSATSTRKQPPSSRLSSLSSQTEPTSAGDQYDCSRDQRSTSVDHSSTDLESTDGMEGPPPPDACPEKRVDDFSFIDQTSVLDSSALKTRVQLSKRSRRRAPISHSLRRSRFSESESRSPLEDETDNTWMFKDSTEEKSPRKEESDEEETASKAERTPVSHPQRMPAFPGMDPAVLKAQLHKRPEVDSPGETPSWAPQPKSPKSPFQPGVLGSRVLPSSMDKDERSDEPSPQWLKELKSKKRQSLYENQV

SEQ ID NO: 880556 - protein, 364 aa, Homo sapiens; identical to SEQ ID NO: 880555

SEQ ID NO: 880557 - protein, 67 aa, Homo sapiens
RGKLETVLCSPHNLWVLEMEYYYCPSLLKLLRYLWVSGGGQCRLQDGVTSFPSPPASCQLCFLAVSG

SEQ ID NO: 880558 - protein, 107 aa, Homo sapiens
MCGVQNTGCWAVRFRFHVFVGVGRLLLFFSPRGGSFSNAPIILWVYVLQGIVVKTSRSRAFSRPKPRFSCKFGVCRGKSQNCFLFPGVSQGLGNRWQKRQNTYGAGN

SEQ ID NO: 880559 - protein, 85 aa, Homo sapiens
MEFCCVAQAGVQWRDLSSLQPPPSRFKLFSCLSLPSSQDYRRPPLRLASFCIFTRDEVLLIGQAGLELKLSTASAYQSAGITGVS

SEQ ID NO: 880560 - protein, 88 aa, Homo sapiens
SDRLDGQSMERPCQPVMAAAKDRYEVSQYVFQIHGGSTGMLGCKNKTRCILGSQEPGGRNSKPANAEGRLYVAKFCQQLKSSASRAQC

SEQ ID NO: 880561 - protein, 54 aa, Homo sapiens
MFFLWIFSVFCIFCFLFFFETGLTLSPRLQCSGMITAHCSLDLLGSSHPPTSAS

SEQ ID NO: 880562 - protein, 32 aa, Homo sapiens
EYENIQHPADKSHIIYHVIKSTRQAKEEESKT

SEQ ID NO: 880563 - protein, 90 aa, Homo sapiens
KHTGPGILSMANAGPNTNGSQFFICTAKTEWLDGKHVLFGKVKEGTNIVEAWSALGPGMARPARRSPLLTVDNSNKFDLCFILTTRPFLP

SEQ ID NO: 880564 - protein, 79 aa, Homo sapiens
MECVSASVFGLTLRFGMKRDRGATSVSEGLSDEMSPDSSYLYFLHYTVGTFLAQKACFTARWFLGAWALKAVDRASISS

SEQ ID NO: 880565 - protein, 104 aa, Homo sapiens
STKNTKIRRLRLGYCLSPGGRGCCEPRCASALNPGQQSETLSQKNQRPLWYEPWVYVSEFLSSLTTNLIKNYFWPGAVAHACNPSTLGGRGGRITRSGDRDHPG

SEQ ID NO: 880566 - protein, 80 aa, Homo sapiens
GDRLGRMKRAGVETMCPRWVSWGRRSSTLSDEPDGVLKLKTSAPAPLRSLGPRREFNFFCLDFIPIHPSLFFICLCTGLL

SEQ ID NO: 880567 - protein, 119 aa, Homo sapiens
  misc_feature (27)..(27): Xaa can be any naturally occurring amino acid
  misc_feature (29)..(29): Xaa can be any naturally occurring amino acid
PSEPGAGRTVVCHAQPLVRDQARVGEXGXGRAGLGLGLPEGVLARISFVHTLTLRPALGNAATKSILMTSTYLSGQLLPLSFLFLSLSFFLSFFLSFFLSFFLSFFLSFSFFLFLLSFF

SEQ ID NO: 880568 - protein, 137 aa, Homo sapiens
MRSTRRGFLRSSDFFWTLVLFLALFPWSRCPRRRVFHLGPLSTSHRSCAPVAARLPGTGQPPAPAAPAQASASPTSYFLGLAAAAASALGPPKWAAAPGNQNRYRFSSCASHQRHCLLPPSCQRPSSILFLTVPFLF

SEQ ID NO: 880569 - protein, 115 aa, Homo sapiens
MVTRGVAASESGPCSGGSPHCPTPSRPGSPQLRVLMCTVGAGSPVPVQMEGRGFMKQQRPTRHLGSRVGAVVGRGGAGRESEPPLHLLRTGKRVQLVGPLHAAVIKRPESSPSRA

SEQ ID NO: 880570 - protein, 275 aa, Homo sapiens
MLEGIRAHLLRSWEHPLPNNTLGMGRKERKGDARGVVDVPAKPRLLWRSFRPSLQEKAGPGCSTPRSCRLSRQVSVPSKPCATATPNTQTLGRDQTVTSPPSGLNMQIRAPGSSWDLSAEPRDSQFLSRRAGPRCRSLPGRGASGPDALQPPARGKRAGRPRHPRPRASSPSPRVQRSRPAASPYAGPAGPPRRAPHSELKSPWSSAAPKLSPRAGESSARAQGWARARGQWVQGPRLCHQPESRAQGRLGAGGIGAARGGFLAAPPLGPGGEGS

SEQ ID NO: 880571 - protein, 729 aa, Homo sapiens
MLEGIRAHLLRSWEHPLPNNTLGMGRKERKGDARGVVDVPAKPRLLWRSFRPSLQEKAGPGCSTPRSCRLSRQVSVPSKPCATATPNTQTLGRDQTVTSPPSGLNMQIRAPGSSWDLSAEPRDSQFLSRRAGPRCRSLPGRGASGPDALQPPARGKRAGRPRHPRPRASSPSPRVQRSRPAASPYAGPAGPPRRAPHSELKSPWSSAAPKLSPRAGNMGCIKSKGKDSLSDDGVDLKTQPVRNTERTIYVRDPTSNKQQRPVPESQLLPGQRFQTKDPEEQGDIVVALYPYDGIHPDDLSFKKGEKMKVLEEHGEWWKAKSLLTKKEGFIPSNYVAKLNTLETEEWFFKDITRKDAERQLLAPGNSAGAFLIRESETLKGSFSLSVRDFDPVHGDVIKHYKIRSLDNGGYYISPRITFPCISDMIKHYQKQADGLCRRLEKACISPKPQKPWDKDAWEIPRESIKLVKRLGAGQFGEVWMGYYNNSTKVAVKTLKPGTMSVQAFLEEANLMKTLQHDKLVRLYAVVTREEPIYIITEYMAKGSLLDFLKSDEGGKVLLPKLIDFSAQIAEGMAYIERKNYIHRDLRAANVLVSESLMCKIADFGLARVIEDNEYTAREGAKFPIKWTAPEAINFGCFTIKSDVWSFGILLYEIVTYGKIPYPGRTNADVMTALSQGYRMPRVENCPDELYDIMKMCWKEKAEERPTFDYLQSVLDDFYTATEGQYQQQP

SEQ ID NO: 880572 - protein, 400 aa, Homo sapiens
NRSQKSQPPVLKQTEEWFFKDITRKDAERQLLAPGNSAGAFLIRESETLKGSFSLSVRDFDPVHGDVIKHYKIRSLDNGGYYISPRITFPCISDMIKHYQKQADGLCRRLEKACISPKPQKPWDKDAWEIPRESIKLVKRLGAGQFGEVWMGYYNNSTKVAVKTLKPGTMSVQAFLEEANLMKTLQHDKLVRLYAVVTREEPIYIITEYMAKGSLLDFLKSDEGGKVLLPKLIDFSAQIAEGMAYIERKNYIHRDLRAANVLVSESLMCKIADFGLARVIEDNEYTAREGAKFPIKWTAPEAINFGCFTIKSDVWSFGILLYEIVTYGKIPYPGRTNADVMTALSQGYRMPRVENCPDELYDIMKMCWKEKAEERPTFDYLQSVLDDFYTATEGQYQQQP

SEQ ID NO: 880573 - protein, 231 aa, Homo sapiens
MSVQAFLEEANLMKTLQHDKLVRLYAVVTREEPIYIITEYMAKGSLLDFLKSDEGGKVLLPKLIDFSAQIAEGMAYIERKNYIHRDLRAANVLVSESLMCKIADFGLARVIEDNEYTAREGAKFPIKWTAPEAINFGCFTIKSDVWSFGILLYEIVTYGKIPYPGRTNADVMTALSQGYRMPRVENCPDELYDIMKMCWKEKAEERPTFDYLQSVLDDFYTATEGQYQQQP

SEQ ID NO: 880574 - protein, 198 aa, Homo sapiens
MLEGIRAHLLRSWEHPLPNNTLGMGRKERKGDARGVVDVPAKPRLLWRSFRPSLQEKAGPGCSTPRSCRLSRQVSVPSKPCATATPNTQTLGRDQTVTSPPSGLNMQIRAPGSSWDLSAEPRDSQFLSRRAGPRCRSLPGRGASGPDALQPPARGKRAGRPRHPRPRASSPSPRVQRSRPAALEHRETRPFGRGGCLI

SEQ ID NO: 880575 - protein, 312 aa, Homo sapiens
MLEGIRAHLLRSWEHPLPNNTLGMGRKERKGDARGVVDVPAKPRLLWRSFRPSLQEKAGPGCSTPRSCRLSRQVSVPSKPCATATPNTQTLGRDQTVTSPPSGLNMQIRAPGSSWDLSAEPRDSQFLSRRAGPRCRSLPGRGASGPDALQPPARGKRAGRPRHPRPRASSPSPRVQRSRPAASPYAGPAGPPRRAPHSELKSPWSSAAPKLSPRAGNMGCIKSKGKDSLSDDGVDLKTQPVRNTERTIYVRDPTSNKQQRPVPESQLLPGQRFQTKDPEEQGDIVVALYPYDGIHPDDLSFKKGEKMKVLEE

SEQ ID NO: 880576 - protein, 729 aa, Homo sapiens; identical to SEQ ID NO: 880571

SEQ ID NO: 880577 - protein, 708 aa, Homo sapiens
MLEGIRAHLLRSWEHPLPNNTLGMGRKERKGDARGVVDVPAKPRLLWRSFRPSLQEKAGPGCSTPRSCRLSRQVSVPSKPCATATPNTQTLGRDQTVTSPPSGLNMQIRAPGSSWDLSAEPRDSQFLSRRAGPRCRSLPGRGASGPDALQPPARGKRAGRPRHPRPRASSPSPRVQRSRPAASPYAGPAGPPRRAPHSELKSPWSSAAPKLSPRAGNMGCIKSKGKDSLSDDGVDLKTQPVPESQLLPGQRFQTKDPEEQGDIVVALYPYDGIHPDDLSFKKGEKMKVLEEHGEWWKAKSLLTKKEGFIPSNYVAKLNTLETEEWFFKDITRKDAERQLLAPGNSAGAFLIRESETLKGSFSLSVRDFDPVHGDVIKHYKIRSLDNGGYYISPRITFPCISDMIKHYQKQADGLCRRLEKACISPKPQKPWDKDAWEIPRESIKLVKRLGAGQFGEVWMGYYNNSTKVAVKTLKPGTMSVQAFLEEANLMKTLQHDKLVRLYAVVTREEPIYIITEYMAKGSLLDFLKSDEGGKVLLPKLIDFSAQIAEGMAYIERKNYIHRDLRAANVLVSESLMCKIADFGLARVIEDNEYTAREGAKFPIKWTAPEAINFGCFTIKSDVWSFGILLYEIVTYGKIPYPGRTNADVMTALSQGYRMPRVENCPDELYDIMKMCWKEKAEERPTFDYLQSVLDDFYTATEGQYQQQP

SEQ ID NO: 880578 - protein, 185 aa, Homo sapiens
PRVRDPRVRGKVLLPKLIDFSAQIAEGMAYIERKNYIHRDLRAANVLVSESLMCKIADFGLARVIEDNEYTAREGAKFPIKWTAPEAINFGCFTIKSDVWSFGILLYEIVTYGKIPYPGRTNADVMTALSQGYRMPRVENCPDELYDIMKMCWKEKAEERPTFDYLQSVLDDFYTATEGQYQQQP

SEQ ID NO: 880579 - protein, 421 aa, Homo sapiens
MLEGIRAHLLRSWEHPLPNNTLGMGRKERKGDARGVVDVPAKPRLLWRSFRPSLQEKAGPGCSTPRSCRLSRQVSVPSKPCATATPNTQTLGRDQTVTSPPSGLNMQIRAPGSSWDLSAEPRDSQFLSRRAGPRCRSLPGRGASGPDALQPPARGKRAGRPRHPRPRASSPSPRVQRSRPAASPYAGPAGPPRRAPHSELKSPWSSAAPKLSPRAGNMGCIKSKGKDSLSDDGVDLKTQPVRNTERTIYVRDPTSNKQQRPVPESQLLPGQRFQTKDPEEQGDIVVALYPYDGIHPDDLSFKKGEKMKVLEEHGEWWKAKSLLTKKEGFIPSNYVAKLNTLETEEWFFKDITRKDAERQLLAPGNSAGAFLIRESETLKGRKLFKASFKTLFRKLFLETILELLKGKKGHIVCSGSKSFMV

SEQ ID NO: 880580 - protein, 102 aa, Homo sapiens
MITKKEKPFFSIGYSRAWVAWQPSCSQLEDKQHTEATLDLIRSGRRSIKSSLARFQIRKESVCSQPQQRKQLSWLRIKFFIREEISALTPNSNIRFRDFIIF

SEQ ID NO: 880581 - protein, 442 aa, Homo sapiens
LTCPTAAPCLCLHPGEPRAGRGRGGGTSGELKPRLSPRWRPEAKMMSLLGGLQRYFRVILLLLLALTLLLLAGFLHSDLELDTPLFGGQAEGPPVTNIMFLKTHKTASSTVLNILYRFAETHNLSVALPAGSRVHLGYPWLFLARYVEGVGSQQRFNIMCNHLRFNLPQVQKVMPNDTFYFSILRNPVFQLESSFIYYKTYAPAFRGAPSLDAFLASPRTFYNDSRHLRNVYAKNNMWFDFGFDPNAQCEEGYVRARIAEVERRFRLVLIAEHLDESLVLLRRRLRWALDDVVAFRLNSRSARSVARLSPETRERARSWCALDWRLYEHFNRTLWAQLRAELGPRRLRGEVERLRARRRELASLCLQDGGALKNHTQIRDPRLRPYQSGKADILGYNLRPGLDNQTLGVCQRLVMPELQYMARLYALQFPEKPLKNIPFLGA

SEQ ID NO: 880582 - protein, 192 aa, Homo sapiens
VQEECRTAKGDIEISLYTVEKKKKPSYTTQRNDYEPSCGRSLRRTQRKRQHTYQTRSNIEHNSQASCQNSGVQEDSDSSSEEDETVGTSDASVEDPVVEWQSESSSSDSSSEYSDWTADAGINLQPPKRQTRQTTRKICSSSDEENLKSLEERQKKPKQTRKKKGGLVSIAGEPNEEWFAPQWILDTIPRRS

SEQ ID NO: 880583 - protein, 203 aa, Homo sapiens
PTTTKFAAASTIEQDYWQVPRKGVKAKEVFQRFLESQMVIEESILQSDKALTDREKAVAVDRAKKEAAEKEQELLKQKLQEQQQQMEAQVKSRKENIAQLKEKLQMEREHLLREQIMMLEHTQKVQNDWLHEGFKKKYEEMNAEISQFKRMIDTTKNDDTPWIARTLDNLADELTAILSAPAKLIGHGVKGVSSLFKKHKLPF

SEQ ID NO: 880584 - protein, 260 aa, Homo sapiens
DENQEFQKKFMETTMNKKGDFLLQNEESSVQYCQAKLNELSKGLMESISAGSFSVPGGHKLYMETKERIEQDYWQVPRKGVKAKEVFQRFLESQMVIEESILQSDKALTDREKAVAVDRAKKEAAEKEQELLKQKLQEQQQQMEAQVKSRKENIAQLKEKLQMEREHLLREQIMMLEHTQKVQNDWLHEGFKKKYEEMNAEISQFKRMIDTTKNDDTPWIARTLDNLADELTAILSAPAKLIGHGVKGVSSLFKKHKLPF

SEQ ID NO: 880585 - protein, 65 aa, Homo sapiens
PCLENAVITLAQRENSAAVQRAADYYSQQMAQRVKLPTDTLQELLDMHAACEREAIAIFMEHSFK

SEQ ID NO: 880586 - protein, 217 aa, Homo sapiens
EDCAFECPWQRHASAFWKPALQLRVERCLLEVVVELQIRAISCPGVFLPGKQDVYLGVYLMNQYLETNSFPSAFPIMIQESMRFEKVFESAVDPGAVVDLLEMWDELAYYEENTRDFLFPEPKLTPSHPRRCREVLMKTALGFPGIAPKIEFSTRTAIRECVFLHRNRFLGWGNKGKMLVQQEHRSLKKKLNRNGTQTSGEGLLSWMLLQEFEGRKT

SEQ ID NO: 880587 - protein, 102 aa, Homo sapiens
MGPRPLEKGCFPGCFFRNSKEERHESRRPLSTSHEPIFPLNTIKMKLKENNLNRLPKGMQARAPSQYSTRHFFQDQPAQLNLGNNFKISGGSKPPFVVRHVS

SEQ ID NO: 880588 - protein, 100 aa, Homo sapiens
AGKAHMTPGMSHRQWQTAQRVGNAQCLSVPTEKEHSSFQTTSLLTEVPELEEHQDPGKAPAQLLRSLPSASPSAPVALVWTSGTGCLRGNGYGRLSGQSR

SEQ ID NO: 880589 - protein, 112 aa, Homo sapiens
PPGEAAGAAADGIAAYSNYNNGHRKFLAAAHNPADEPGPGAPAPQELGAADKHGDLREVSLTSSAQGEAREDPLLDKPTAQPIVQDHQEHPGLGSNCCVPLFCWAWLPRRRR

SEQ ID NO: 880590 - protein, 112 aa, Homo sapiens
MRRRPDRLEGGAGMWGLGGPCARSPRGMTGMHVPWLQSEPLSPESGVAAAGKQEPGFIISRRGRGAGSSSNSVITHGKRKSKGSSKRIPPSKNASLGEGPYLTPSFWPPPLP

SEQ ID NO: 880591 - protein, 124 aa, Homo sapiens
VKYYEQDLALAKDLHDKLSQAKAYCNLGLAFKALLNFSKAEECQKYLLSLAQSLNNSQAKFRALGNLGDIFICKKDINGAIKFYEQQLGLAHQVKDRRLEASAYAALGTAYRMIQKYDKALGYH

SEQ ID NO: 880592 - protein, 90 aa, Homo sapiens
QVSAGSEGVSHASIWRTNIPVRGFSKCKIPDVGMRSVPHYLHSRTQADKAAPSGAIDGLMEETKKDHSESHSASELFCLEVTNIISITFH

SEQ ID NO: 880593 - protein, 77 aa, Homo sapiens
GRATSRQKSAQIICVLPDDFLQTQHFHVTSSQIKKQNLPGASWCPLNHYPSSQDLGTEVTLSFHLDSCLFVGRSPSS

SEQ ID NO: 880594 - protein, 101 aa, Homo sapiens
MVNSGHPGLIQDMLLPPEKAPQAASRVLVVSESSLSLRSDLGLAGLGSITGFCSPTAHQAGDSHTAYYFVCHQSIARTQHFKYADLVSHSLKTNRATEILN

SEQ ID NO: 880595 - protein, 110 aa, Homo sapiens
GLSFSSYKTTSSTSMIICQWINPFTRAEPSCSNHLLKAIPLNTATLEIKFQHKFWREYSNHRSSFLCIFMHACTHVCRDTERTREAENAYIHLYIKSIYVHIYEVVEIEP

SEQ ID NO: 880596 - protein, 126 aa, Homo sapiens
AEQVVSVWFDGGAKAFQIQNSFLFCSQQPQSRLKVSGKIQIISWEEVREWINLLSFLVENFPRYWDSEQMCHYWWGGEVKESLARLFSAATRDCGGACTHSQLLLETSARLSLGACGPCLAHCSGE

SEQ ID NO: 880597 - protein, 131 aa, Homo sapiens
RSSIHLSIYSSIIQSLTHPASTNWEPPMDEEPYQMLRGMEFRGSASSSPRLAMIWKVVATHHATGGHSSGWQSSCAPGLSSTKASLSVHGHFEDSRALSFHLLFIGSMPLSLPYIGLPLSFCFLCISSSPF

SEQ ID NO: 880598 - protein, 124 aa, Homo sapiens
MFLRLLTLWEILTYGKCQNFSKRYSGPCVIFKPLFFLLFCIHSIVQSHGLPYLCSNMQLFSPSPCLGTGETWLPSAQGTFLPHLLCLESLCSPSGPPFTQPPLGCLPACLVGQPRTSLLPSDPF

SEQ ID NO: 880599 - protein, 77 aa, Homo sapiens
LLKLMWEKAIREGPDSLVLTCMVARNYEELSALLLLPWAAMTKSCIPYMDASSVLLKGLCSVVLRQLSVGCSLGKKL

SEQ ID NO: 880600 - protein, 124 aa, Homo sapiens
MGFHRAPVPPSGALVPLLPVEDALGVPFPTVPERACPCVSLCVQERVSVHEPVYLRARMPVCMRACVSLKKHMCLCACEPVCTSVCARVCEPVSERARARVCELVSLRVCVPMCELVCPREREP

SEQ ID NO: 880601 - protein, 111 aa, Homo sapiens
MLEHCGVLLPPNHSSVLHSQDFKYRLDTDGSQIYISTYFYNQKTNGTKTGTLIYCRWACKLEMFSGKAVRQFLSKLKMHTPSSPTSRNVSKNTPAFLKNDCIQNYMLQPCL

SEQ ID NO: 880602 - protein, 72 aa, Homo sapiens
CLSSFDPLRPSWPAGLAGTMPHLTDSETEGRYVQQKGEENSHLPAVPAWKALRCWAQNVTGPSPSFSGCSFC

SEQ ID NO: 880603 - protein, 92 aa, Homo sapiens
NTKWRMTPVQRGGPEALVALGWGTAVASAEVSAVAFWGRGRGLWTGAWGLMACGARGGKAEDKEWMPVTKLGRLVKDMKIKSLEEIYLFSLP

SEQ ID NO: 880604 - protein, 39 aa, Homo sapiens
ATYLSILAVLSADLQARPTVLMYVTRGWFLITNAARCSG

SEQ ID NO: 880605 - protein, 153 aa, Homo sapiens
GGAARWLWPRRAVGPARRPLSSGSPPLEKLFARGGPLRTFLERQAGSEAHLKVRRPELLAVIKLLNEKEQELRETEHLLHDENEGLRKLAENEITLCQKEITQLKHQIILLLVPSEETDENDLILEVTAGVGGGLRHASASIGGSEAYRHMKF

SEQ ID NO: 880606 - protein, 46 aa, Homo sapiens
MTTPIILTDLWGGINVSIVNVIISIIISEAPRFPSYLPKAQACLHL

SEQ ID NO: 880607 - protein, 130 aa, Homo sapiens
GTTVAFTVVLLASFKLMTWDPAVFTADTGRKAVATGLIVTCLGVGSAEETALVTTADWRGTLAGEERVAADAGDDRRDVTEAITDTVCSEGFFPESRSTSGNTLVTVLLISPEDVLVVFMRTLGIGGVDP

SEQ ID NO: 880608 - protein, 42 aa, Homo sapiens
REGGKSQKLMLFMRGNAISGAPIIRGTSQLPKPPIMMGITMK

SEQ ID NO: 880609 - protein, 165 aa, Homo sapiens
MELFLCPHIISAIVVITNRVNSCKTSNGEVVTCVIKEEMPPTRCLRIWLERGNKVYDIVTPIQCLCELTLCVENNVNGQKFCALEDISLVQSFEHRLTHLVSSPVDSLSLENVCKENDQKKKEAKEKGTWVQLKRQPAPPREAHFVRTNGKEPELLEPIPYEFMA

SEQ ID NO: 880610 - protein, 147 aa, Homo sapiens
MFFRPFRKHGVVPLATYMRIYKKGDIVDIKGMGTVQKGMPHKCYHGKTGRVYNVTQHAVGIVVNTQVKGKILAKRINVFIEHIKHSKSRDSFLKRMKENDQKKKEAKEKGTWVQLKRQPAPPREAHFVRTNGKEPELLEPIPYEFMA

SEQ ID NO: 880611 - protein, 113 aa, Homo sapiens
MDMKGLWKVQSHLLMRGMTEPSLQSDLWTCSQFLEKCGPCSSVTENTEFQRASLGQGLCKRVVRGTSNPGNLVAGRGLGPLPHAPWDLHCDCPTPSAQLLPHQLPCIALSWDP

SEQ ID NO: 880612 - protein, 69 aa, Homo sapiens
TQTLGVKRLLGRPRTKRTGSTQRPKGEKLRVCFVAQLCQISLLPRPYPTLKSPSQNSLEDIRVVAWWFL

SEQ ID NO: 880613 - protein, 111 aa, Homo sapiens
WGAGACTLGLATSLFSSPSGFILKHLEHKSCRSTQCILYRPGLGSPALLPSLSPLFSLSLPLSLLHTLLFCQTIQMQAADSKTILPAPLSTPFPVIAMLMRVCLRGSPLVP

SEQ ID NO: 880614 - protein, 125 aa, Homo sapiens
QPPASSTIPALAHQLSHVTFVSGELQMHQTHPALGPLCQLFLLPDRFSLSSLHVLSDTQVSIPMSPSQSGRFSDHPFSNSFPGTNTSSWPFTVDLFAHLCILCLPLLKCKLFESGDLAMSIFPLL

SEQ ID NO: 880615 - protein, 111 aa, Homo sapiens
MLRLFETYLEGCPQLILQLYILLEHGQANFSQYAAIMVSCCAISWSTVDYQVALRKSLPDKKLLNGLCPKITYLFYKLFTLLSWMLSVVLLLFLNVKIALFLLLFLWLSRY

SEQ ID NO: 880616 - protein, 133 aa, Homo sapiens
MCLCSQSGAVFYVHATRCCAALGVCEPQPRAATRKILLIMKAQNHMDRLESRQSSTVFSRGCVCVCMRVCACVSVCVCVCLGLKGSGSLGTLGAPGRPVTFSSGPEWWLPRFCFIIICQALCTFYAVSLSVCA

SEQ ID NO: 880617 - protein, 82 aa, Homo sapiens
ETSGMCLTYLSCFTSHYSKSNLCSSHTDVSAVPLTDYITTYLSAFAQSVTCLTVLYLLQDATKYLSHSKKFFGPIRNNYTDP

SEQ ID NO: 880618 - protein, 347 aa, Homo sapiens
AHIQDGVPRSWERVTGGGEAAWVGPQIAGSGGISPGKPLARLQGLPPARAMAAENSKQFWKRSAKLPGSIQPVYGAQHPPLDPRLTKNFIKERSKVNTVPLKNKKASSFHEFARNTSDAWDIGDDEEEDFSSPSFQTLNSKVALATAAQVLENHSKLRVKPERSQSTTSDVPANYKVIKSSSDAQLSRNSSDTCLRNPLHKQQSLPLRPIIPLVARISDQNASGAPPMTVREKTRLEKFRQLLSSQNTDLDELRKCSWPGVPREVRPITWRLLSGYLPANTERRKLTLQRKREEYFGFIEQYYDSRNEEHHQDTYRQIHIDIPRTNPLIAVVHSNQLYRRSLKEFYY

SEQ ID NO: 880619 - protein, 136 aa, Homo sapiens
SLGDRVRLCLKQTNKKTNKNSIPCRSTGLSHLFVHLYFYSNNTCHPSTPQPTSRAPSMPHSTCPGVADLLPLLSPPRSGSSVRPDILLVLFTQVPRTVLSTKQMLPNYEYQCMLRRTNEQTNGECLLCATRHCYAL

SEQ ID NO: 880620 - protein, 165 aa, Homo sapiens
NHQSSLARHHILHTGEKPYKCEECDKVFSQKSTLERHKRIHTGEKPYKCKVCDTAFTCNSQLARHRRIHTGEKTYKCNECRKTFSRRSSLLCHRRLHSGEKPYKCNQCGNTFRHRASLVYHRRLHTLEKSYKCTVCNKVFMRNSVLAVHTRIHTAKKPYKCNECG

SEQ ID NO: 880621 - protein, 101 aa, Homo sapiens
AVMDWVWTDTTLSLSSWICVEDIYAHIFILKCWRESEKRYPQPRGQKKKKVVKYGMGGMIIVLLICIVWFPLLFMSLIKSVAGVINQPLDVSVTITLGGYQ

SEQ ID NO: 880622 - protein, 123 aa, Homo sapiens
HQFDVISPSHIWIFAHVTQGQDPWIISLSSFLKQENLPKHCSTAVSYAWMFAYTRLQLLSPQVDINSPINAKKVNTTTSSDSYIGLWRNYLILCCSAATSSSSTSAGSVRCSPPETLASTPDS

SEQ ID NO: 880623 - protein, 79 aa, Homo sapiens
RPFKPTQNPTRTRRLPLGYTRYVDIEPTLSCLTSGQVVVLLALLKPSFFLLPIKTGELLGFPVYASRKKKSIAIKKLKN

SEQ ID NO: 880624 - protein, 364 aa, Homo sapiens
  misc_feature (348)..(348): Xaa can be any naturally occurring amino acid
MAVGCPEPLQPHPPPWLAHCPIAGCPHRPLADLTGASPGQGCQGAGHHQRPHPGPCRPLLSLREGVTVIGPPWMGRPGGQPHSWTDAATSGHTVSGRCHIWAYSVWTLPHGATVMQVISDLSAPQSHSVSGQPGHWTLLSWVTATWSLAMPVCPTDLIYVRTAWMLPRKVTAVASLAMSGCPIVTEHLDTATCSHHHVTFKNNSWPGPVLPTYPCIPSLDPGHAGLTGDRAQAAGAPTKLCPTSRTDCPGQRCSPFRASVSLSVKQSDTSKPVSIVYIADMEVLQQEVLNKHKATEGWEKQTTQTNTPHHTKQTKQKQSPGAFFAGPRTTEGYTRDHVVSTCVSLHPXFLQRGENAEAPEREEV

SEQ ID NO: 880625 - protein, 141 aa, Homo sapiens
HRTVVPGPSPRQPQQAALPQKQLVAPDLTMTRCALLLLMVLMLGRVLVVPVTPIPTFQLRPQNSPQTTPRPAASESPSAAPTWPWAAQSHCSPTRHPGSRIVLSLDVPIGLLQILLEQARARAAREQATTNARILARVGHC

SEQ ID NO: 880626 - protein, 105 aa, Homo sapiens
MAPGGCTSFGHCVFISFKRQERGQLACHCCSHSVGLNEVIRHIQCQDAQEGSSCSGAAMRPLKFRCFISEEEGQQRRLCLQLDSKPGPQERGGGKQTTPLAGHPS

SEQ ID NO: 880627 - protein, 185 aa, Homo sapiens
RRTLAVITKLDLMDAGTDAMDVLMGRVIPVKLGIIGVVNRSQLDINNKKSVTDSIRDEYAFLQKKYPSLANRNGTKYLARTLNRLLMHHIRDCLPELKTRINVLAAQYQSLLNSYGEPVDDKSATLLQLITKFATEYCNTIEGTATHHIETSELCGGARIVIFCMRLWANLESVDHLVALTLLTF

SEQ ID NO: 880628 - protein, 154 aa, Homo sapiens
LWLSASQVNNNGIISFLKEVSQFTPVAFPIAKDRCVVAAFWADVDNRRAGDVYYREATDPAMLRRATEDVRHYFPELLDFNATWVFVATWYRVTFFGGSSSSPVNTFQTVLITDGKLSFTIFNYESIVWTTGTHASSGGNATGLGGIAAQVGEC

SEQ ID NO: 880629 - protein, 174 aa, Homo sapiens
MMLPYPSALGDQYWEEILLPKNGENVETMKKLTQNHKAKGLPSNDTDCPQKKEGKAQIVVPVTFRDVTVIFTEAEWKRLSPEQRNLYKEVMLENYRNLLSLDGVSLLLPRLECNRAISAHHNLCLPGSSNSPATASRVVGITAEPKPEIYTCSSCLLAFSCQQFLSQHVLQIFL

SEQ ID NO: 880630 - protein, 133 aa, Homo sapiens
MMLPYPSALGDQYWEEILLPKNGENVETMKKLTQNHKAKGLPSNDTDCPQKKEGKAQIVVPVTFRDVTVIFTEAEWKRLSPEQRNLYKEVMLENYRNLLSLAEPKPEIYTCSSCLLAFSCQQFLSQHVLQIFL

SEQ ID NO: 880631 - protein, 118 aa, Homo sapiens
MMLPYPSALGDQYWEEILLPKNGENVETMKKLTQNHKAKGLPSNDTDCPQKKEGKAQIVVPVTFRDVTVIFTEAEWKRLSPEQRNLYKEVMLENYRNLLSLGQEIETILANIVKSHLY

SEQ ID NO: 880632 - protein, 118 aa, Homo sapiens; identical to SEQ ID NO: 880631

SEQ ID NO: 880633 - protein, 113 aa, Homo sapiens
MMLPYPSALGDQYWEEILLPKNGENVETMKKLTQNHKAKGLPSNDTDCPQKKEGKAQIVVPVTFRDVTVIFTEAEWKRLSPEQRNLYKEVMLENYRNLLSLDGGQEQQDAAAY

SEQ ID NO: 880634 - protein, 86 aa, Homo sapiens
DSLNASPSSSSESYYQQIELTGKSHNPGQSEQTPKSIPGQHRSKSVASAEIISNFSMAGIQLIWDEPISNGVSADTDLGRHQVDRI

SEQ ID NO: 880635 - protein, 101 aa, Homo sapiens
ALRLQPSCQRRLPRPPPPDSAPGTCQPRAACADFPETRRGRHGDFLGSGWFVRCSPSPTPDAADRSSSAPQPRSPAAPQRRRGQCSRVASPSREQPLFDVL

SEQ ID NO: 880636 - protein, 185 aa, Homo sapiens
ALRLQPSCQRRLPRPPPPDSAPGTCQPRAACADFPETRRGRHGDFLGSGWFVRCSPSPTPDAADRSSSAPQPRSPAAPQRRRGQCSRVASPSREVSGSLDPGGFRRGGCGAVVGGERRRGGPGTFAGTAGVCDTQTGSVSQKIREKVIIGLLGCVDRESRYWLQHRQGSAEALRMAPVCCITTNS

SEQ ID NO: 880637 - protein, 138 aa, Homo sapiens
MNLKDILADLIPKEQARIKTFRQQHGKKVVGQITVDMMYGGMRGMKGLVYETSVLDPDEGIRFRGFSIPECQKLLPKAKGGEEPLPEGLYWLLVTGCIPTEEQVSWLSKEWAKRAALPSHVVTMLDNFPTNLHPMSQL

SEQ ID NO: 880638 - protein, 123 aa, Homo sapiens
  misc_feature (109)..(109): Xaa can be any naturally occurring amino acid
GLCGCLSSVVWSGFGVAVVWVSCVLVWLGWSFVWARGAYDAGPLDRAPALGCLDAGSPPFFWGGTRAWLAEVFLGPAVAVSSLVGGAPRDGFKNFSGEAPKSFFWVFFXMWGMESSCVTQARV

SEQ ID NO: 880639 - protein, 279 aa, Homo sapiens
FWASLLLRAGDKAGRAGAGMPPYHRRVGMVQELLRMVRQGRREEAGTLLQHLRQDLGMESTSLDDVLYRYASFRNLVDPITHDLIISLARYIHCPKPEGDALGAMEKLCRQLTYHLSPHSQWRRHRGLVKRKPQACLKAVLAGSPPDNTVDLSGIPLTSRDLERVTSYLQRCGEQVDSVELGFTGLTDDMVLQLLPALSTLPRLTTLALNGNGDPAVLRDLTDILKDPSKFPNVTWIDLGNNVDIFSLPQPFLLSLRKRSPKQGHLPTILELGEGPGSG

SEQ ID NO: 880640 - protein, 110 aa, Homo sapiens
MTEWPSPGKTSVVTGIKLWNIRVKARVCCELELRECLGIPPGISKGTMATASLAHVRHLLCQAFSVVEKGGRRMQLFQCCLAVPKSRDWAPHLTSNFRFTLGHSCLPLQS

SEQ ID NO: 880641 - protein, 69 aa, Homo sapiens
MRCLRLRIALQVKCRVQSQGEPRFHAAAARSAVAFAETKLPPPPSETRTRFSGPVSEDGLRHRRSASPA

SEQ ID NO: 880642 - protein, 181 aa, Homo sapiens
WYTTQAPSTTFYAFLVRSRLRPRVLALCKLFGASVCFTRFSASFELDHVPGPLCLAWRTLVDVTSAQKPRSLNKPWAAQGWALAQDLGLQSIGTGTPELPLKPQVGRAILPLHSRYENHVCGPAQQPSTQCEMNNGAHPSEDNDFYINYKDIDLASQPVYCNLQSLGQAPMDEEEYVIPGH

SEQ ID NO: 880643 - protein, 34 aa, Homo sapiens
AEHPFTKREAEPWQRKGVCSGPHTETWDPGSEST

SEQ ID NO: 880644 - protein, 174 aa, Homo sapiens
MSRRRKEAFSSQGSLQAVFLQMKTFYRYSDDWNLLSLVDMGGPRLVSQPLGGEANHPLRPELKTTVAHWCNPVSSKRPNSWQLGRTWTPNRRREGDITRGVVLRPAWCAYPSGRRCSSKKKGGRITGQQPYKHSNKKAGPKRLNLLDQIFSFSFCLLSTPSTCISGREEQRGGD

SEQ ID NO: 880645 - protein, 350 aa, Homo sapiens
VAGTRAGASGSCSLLGACAVGMEASWRQVAGGRGRSRGRATAAPSGNGVHLRGAGGGREKGSVGAVPSGTSPGGVATTAAAGSRHSPAGSQALQTTAASELMSQKKFEEIKKANQAAARKLVEEQFSSSSEEGDEDFEGKQGKILANTFITYTTQTDGDTRELERTKQYVNEAFQAGAMTCLICIASVKRNQAVWSCSGCFCIFHMPCIQKWAKDSQFLVSSVTDDDFGKKDCPWPCPKCRFEYKRSETPSRYYCYCGKVEDPPLDPWLVPHSCGQVCEREFKPPCGHKCLLLCHPGPCPPCPKMVTTTCYCKKAKPIPRRCSAKEWSCQLPCGQKLLCGQHKCENPCHA

SEQ ID NO: 880646 - protein, 190 aa, Homo sapiens
ADPGDGPLPPLRTASSPCLKSFICIASVKRNQAVWSCSGCFCIFHMPCIQKWAKDSQFLVSSVTDDDFGKKDCPWPCPKCRFEYKRSETPSRYYCYCGKVEDPPLDPWLVPHSCGQVCEREFKPPCGHKCLLLCHPGPCPPCPKMVTTTCYCKKAKPIPRRCSAKEWSCQLPCGQKLLCGQHKCENPCHA

SEQ ID NO: 880647 - protein, 84 aa, Homo sapiens [sequence omitted]

SEQ ID NO: 880648 - protein, 84 aa, Homo sapiens [sequence omitted]

SEQ ID NO: 880649 - protein, 84 aa, Homo sapiens [sequence omitted]

SEQ ID NO: 880650 - protein, 956 aa, Homo sapiens
MSSGLWSQEKVTSPYWEERIFYLLLQECSVTDKQTQKLLKVPKGSIGQYIQDRSVGHSRIPSAKGKKNQIGLKILEQPHAVLFVDEKDVVEINEKFTELLLAITNCEERFSLFKNRNRLSKGLQIDVGCPVKVQLRSGEEKFPGVVRFRGPLLAERTVSGIFFGVELLEEGRGQGFTDGVYQGKQLFQCDEDCGVFVALDKLELIEDDDTALESDYAGPGDTMQVELPPLEINSRVSLKVGETIESGTVIFCDVLPGKESLGYFVGVDMDNPIGNWDGRFDGVQLCSFACVESTILLHINDIIPALSESVTQERRPPKLAFMSRGVGDKGSSSHNKPKATGSTSDPGNRNRSELFYTLNGSSVDSQPQSKSKNTWYIDEVAEDPAKSLTEISTDFDRSSPPLQPPPVNSLTTENRFHSLPFSLTKMPNTNGSIGHSPLSLSAQSVMEELNTAPVQESPPLAMPPGNSHGLEVGSLAEVKENPPFYGVIRWIGQPPGLNEVLAGLELEDECAGCTDGTFRGTRYFTCALKKALFVKLKSCRPDSRFASLQPVSNQIERCNSLAFGGYLSEVVEENTPPKMEKEGLEIMIGKKKGIQGHYNSCYLDSTLFCLFAFSSVLDTVLLRPKEKNDVEYYSETQELLRTEIVNPLRIYGYVCATKIMKLRKILEKVEAASGFTSEEKDPEEFLNILFHHILRVEPLLKIRSAGQKVQDCYFYQIFMEKNEKVGVPTIQQLLEWSFINSNLKFAEAPSCLIIQMPRFGKDFKLFKKIFPSLELNITDLLEDTPRQCRICGGLAMYECRECYDDPDISAGKIKQFCKTCNTQVHLHPKRLNHKYNPVSLPKDLPDWDWRHGCIPCQNMELFAVLCIETSHYVAFVKYGKDDSAWLFFDSMADRDGGQNGFNIPQVTPCPEVGEYLKMSLEDLHSLDSRRIQGCARRLLCDAYMCMYQSPTMSLYK

SEQ ID NO: 880651 - protein, 956 aa, Homo sapiens; identical to SEQ ID NO: 880650

SEQ ID NO: 880652 - protein, 937 aa, Homo sapiens
MSSGLWSQEKVTSPYWEERIFYLLLQECSVTDKQTQKLLKVPKGSIGQYIQDRSVGHSRIPSAKGKKNQIGLKILEQPHAVLFVDEKDVVEINEKFTELLLAITNCEERFSLFKNRNRLSKGLQIDVGCPVKVQLRSGEEKFPGVVRFRGPLLAERTVSGIFFGVELLEEGRGQGFTDGVYQGKQLFQCDEDCGVFVALDKLELIEDDDTALESDYAGPGDTMQVELPPLEINSRVSLKVGETIESGTVIFCDVLPGKESLGYFVGVDMDNPIGNWDGRFDGVQLCSFACVESTILLHINDIIPESVTQERRPPKLAFMSRGVGDKGSSSHNKPKATGSTSDPGNRNRSELFYTLNGSSVDSQPQSKSKNTWYIDEVAEDPAKSLTEISTDFDRSSPPLQPPPVNSLTTENRFHSLPFSLTKMPNTNGSIGHSPLSLSAQSVMEELNTAPVQESPPLAMPPGNSHGLEVGSLAEVKENPPFYGVIRWIGQPPGLNEVLAGLELEDECAGCTDGTFRGTRYFTCALKKALFVKLKSCRPDSRFASLQPVSNQIERCNSLAFGGYLSEVVEENTPPKMEKEGLEIMIGKKKGIQGHYNSCYLDSTLFCLFAFSSVLDTVLLRPKEKNDVEYYSETQELLRTEIVNPLRIYGYVCATKIMKLRKILEKVEAASGFTSEEKDPEEFLNILFHHILRVEPLLKIRSAGQKVQDCYFYQIFMEKNEKVGVPTIQQLLEWSFINSNLKFAEAPSCLIIQMPRFGKDFKLFKKIFPSLELNITDLLEDTPRQCRICGGLAMYECRECYDDPDISAGKIKQFCKTCNTQVHLHPKRLNHKYNPVSLPKDLPDWDWRHGCIPCQNMELFAVLCIETSHYVAFVKYGKDDSAWLFFDSMADRDGGQNGFNIPQVTPCPEVGEYLKMSLEDLHSLDSRRIPRLCTKTAL

SEQ ID NO: 880653 - protein, 937 aa, Homo sapiens; identical to SEQ ID NO: 880652

SEQ ID NO: 880654 - protein, 698 aa, Homo sapiens [sequence omitted]

SEQ ID NO: 880655 - protein, 515 aa, Homo sapiens
MPNTNGSIGHSPLSLSAQSVMEELNTAPVQESPPLAMPPGNSHGLEVGSLAEVKENPPFYGVIRWIGQPPGLNEVLAGLELEDECAGCTDGTFRGTRYFTCALKKALFVKLKSCRPDSRFASLQPVSNQIERCNSLAFGGYLSEVVEENTPPKMEKEGLEIMIGKKKGIQGHYNSCYLDSTLFCLFAFSSVLDTVLLRPKEKNDVEYYSETQELLRTEIVNPLRIYGYVCATKIMKLRKILEKVEAASGFTSEEKDPEEFLNILFHHILRVEPLLKIRSAGQKVQDCYFYQIFMEKNEKVGVPTIQQLLEWSFINSNLKFAEAPSCLIIQMPRFGKDFKLFKKIFPSLELIYQIYLKTLPDSAGYVEGLQCMSVENATTIRTFSAGKIKQFCKTCNTQVHLHPKRLNHKYNPVSLPKDLPDWDWRHGCIPCQNMELFAVLCIETSHYVAFVKYGKDDSAWLFFDSMADRDGGQNGFNIPQVTPCPEVGEYLKMSLEDLHSLDSRRIPRLCTKTAL

SEQ ID NO: 880656 - protein, 956 aa, Homo sapiens; identical to SEQ ID NO: 880650

SEQ ID NO: 880657 - protein, 956 aa, Homo sapiens; identical to SEQ ID NO: 880650

SEQ ID NO: 880658 - protein, 131 aa, Homo sapiens
MRLFLHDGQGGRSQQSVCILLCSGIIAPFILTLLWWLCSWLQPLSLPLSHLSPYITQSPSLPSHPLQGIPQDLPLVDGKVVATHSIDSQVPADVCWRDLMEQSGSGHSPQQLGSHVEGGSENGDVAAHQAG

SEQ ID NO: 880659 - protein, 728 aa, Homo sapiens
MATPGSEPQPFVPALSVATLHPLHHPHHHHHHHQHHGGTGAPGGAGGGGGGSGGFNLPLNRGLERALEEAANSGGLNLSARKLKEFPRTAAPGHDLSDTVQADLSKNRLVEVPMELCHFVSLEILNLYHNCIRVIPEAIVNLQMLTYLNLSRNQLSALPACLCGLPLKVLIASNNKLGSLPEEIGQLKQLMELDVSCNEITALPQQIGQLKSLRELNVRRNYLKVLPQELVDLPLVKFDFSCNKVLVIPICFREMKQLQVLLLENNPLQSPPAQICTKGKVHIFKYLSIQACQIKTADSLYLHTMERPHLHQHVEDGKKDSDSGVGSDNGDKRLSATEPSDEDTVSLNVPMSNIMEEEQIIKEDSCHRLSPVKGEFHQEFQPEPSLLGDSTNSGEERDQFTDRADGLHSEFMNYKARAEDCEELLRIEEDVHWQTEGIISSSKDQDMDIAMIEQLREAVDLLQDPNGLSTDITERSVLNLYPMGSAEALELQDSALNGQIQLETSPVCEVQSDLTLQSNGSQYSPNEIRENSPAVSPTTNSTAPFGLKPRSVFLRPQRNLESIDPQFTIRRKMEQMREEKELVEQLRESIEMRLKVSLHEDLGAALMDGVVLCHLVNHIRPRSVASIHVPSPAVPKLSMAKCRRNVENFLEACRKLGVPEADLCSPCDILQLDFRHIRKTVDTLLALGEKAPPPTSALRSRDLIGFCLVHILFIVLVYITYHWNALSA

SEQ ID NO: 880660 - protein, 68 aa, Homo sapiens
RLSTAVPKLSMAKCRRNVENFLEACRKLGVPEEKLCLPHHILEEKGLVKVGITIQALLDITVTKALFT

SEQ ID NO: 880661 - protein, 203 aa, Homo sapiens
HEGNDKVEQVTSAVCEVQSDLTLQMNGGKYSPLEMMENSCAISPTTESTRPFGLKSRSVFLRPQRNLESIDPQFTIRRKMEQMREEKELVEQLRESIEMRLKVSLHEDLGAALMDGVVLCHLVNHIRPRSVASIHVPSPAVPKLSMAKCRRNVENFLEACRKLGVPEEKLCLPHHILEEKGLVKVGITIQALLDITVTKALFT

SEQ ID NO: 880662 - protein, 696 aa, Homo sapiens
MATPGSEPQPFVPALSVATLHPLHHPHHHHHHHQHHGGTGAPGGAGGGGGGSGGFNLPLNRGLERALEEAANSGGLNLSARKLKEFPRTAAPGHDLSDTVQADLSKNRLVEVPMELCHFVSLEILNLYHNCIRVIPEAIVNLQMLTYLNLSRNQLSALPACLCGLPLKVLIASNNKLGSLPEEIGQLKQLMELDVSCNEITALPQQIGQLKSLRELNVRRNYLKVLPQELVDLPLVKFDFSCNKVLVIPICFREMKQLQVLLLENNPLQSPPAQICTKGKVHIFKYLSIQACQIKTADSLYLHTMERPHLHQHVEDGKKDSDSGVGSDNGDKRLSATEPSDEDTVSLNVPMSNIMEEEQIIKEDSCHRLSPVKGEFHQEFQPEPSLLGDSTNSGEERDQFTDRADGLHSEFMNYKARAEDCEELLRIEEDVHWQTEGIISSSKDQDMDIAMIEQLREAVDLLQDPNGLSTDITERSVLNLYPMGSAEALELQDSALNGQIQLETSPVCEVQSDLTLQSNGSQYSPNEIRENSPAVSPTTNSTAPFGLKPRSVFLRPQRNLESIDPQFTIRRKMEQMREEKELVEQLRESIEMRLKVSLHEDLGAALMDGVVLCHLVNHIRPRSVASIHVPSPAVPKLSMAKCRRNVENFLEACRKLGVPEEKLCLPHHILEEKGLVKVGITIQALLDITVTKALFT

SEQ ID NO: 880663 - protein, 696 aa, Homo sapiens; identical to SEQ ID NO: 880662

SEQ ID NO: 880664 - protein, 92 aa, Homo sapiens
AVLSFPGTGNLQDRAATAASPPAPHSTRLPTPSSPPSSAFRWSTAALSPSCRFPLAGNAVTPPQERRGGVGGPGRRWRRREANPNLSSRPFR

SEQ ID NO: 880665 - protein, 696 aa, Homo sapiens; identical to SEQ ID NO: 880662

SEQ ID NO: 880666 - protein, 277 aa, Homo sapiens
SLLVPCLYCRRLRFLLAPRHRCRRLRSLLTLWHRCRPLRPWASPCHCGQPGRASSGQRSRPLWSLLAQCQRYQPPRPLLTLRPRRRPASFLPGQCCCPRRAFLAPCQYGQPRRSLLGQPSRPRRSLLRPRQPQRLVEAPEQPGPLTPSLLGPGRPRQQKQPLMGPEQPCPPKRPLMGPEQPCQPLRPLMGPNKPCKPQPLLPIPDRPSLLGQPGPPCRPLLGLLCQPRRSLLDLVPARQPRLSLLALGHPCRPLRSRWTRSCAPGMARQAPSVSPGA

SEQ ID NO: 880667 - protein, 256 aa, Homo sapiens
PLLGQRSWPQRSLLGLKQPCQPRRSLLGPGQPCRPQRLLPSPDQLCQPQRSRPAQPCRPHWALPGPRQCCRRLRSLLTPCHHCRRLRSLLAPRSLLVPCLYCRRLRFLLAPRHRCRRLRSLLTLWHRCRPLRPWASPCHCGQPGRASSGQRSRPLWSLLAQCQRYQPPRPLLTLRPRRRPASFLPGQCCCPRRAFLAPCQYGQPRRSLLGQPSRPRRSLLRPRQPQRLVEAPEQPGPLTPSLLGPGRPRQQKQPLM

SEQ ID NO: 880668 - protein, 277 aa, Homo sapiens; identical to SEQ ID NO: 880666

SEQ ID NO: 880669 - protein, 115 aa, Homo sapiens
VCAVPLVFRLGPSWGAPSWRSQASGRGHLPTPWKGPGSDLDPRRENSYVEHVVFWPFLGRHLQRPLGPAGSEATNLPRPLFSLFLKFFCCGPAPALAPARHLLIGKPRTELDWPS

SEQ ID NO: 880670 - protein, 135 aa, Homo sapiens
MFLSFPTTKTYFPHFDLSHGSAQVKGHGKKVADALTNAVANVDDMPNALSALSDLHAHKLRVDPVNFKLLSHCLLVTLGRPPPRRVHPCGARLPGTSSWASVSTVLDLPNYRLSWEPSVSRASCPLGLPPAPPPL

SEQ ID NO: 880671 - protein, 135 aa, Homo sapiens; identical to SEQ ID NO: 880670

SEQ ID NO: 880672 - protein, 135 aa, Homo sapiens; identical to SEQ ID NO: 880670

SEQ ID NO: 880673 - protein, 64 aa, Homo sapiens
MFLSFPTTKTYFPHFDLSHGSAQVKGHGKKVADALTNAVANVDDMPRFKGHGKKVADALTNAVA

SEQ ID NO: 880674 - protein, 140 aa, Homo sapiens
MFLSFPTTKTYFPHFDLSHGSAQVKGHGKKVADALTNAVANVDDMPNALSALSDLHAHKLRVDPVNFKLLSHCLLVTLGRPPPRRVHPCGARLPGTSSWASVSTVLDLPNYRLSWEPSVSLSSCRLASNGPLPLDRPSWF

SEQ ID NO: 880675 - protein, 135 aa, Homo sapiens; identical to SEQ ID NO: 880670

SEQ ID NO: 880676 - protein, 104 aa, Homo sapiens
MMVVSVTMYHHEGGASMNFRWVTEDKSLRVVGLLPKGWDYGLEPQCPTHLTFLMPISSSEKQASHVIVPNEIAIFVGQKQLNIDSFIRYQPNNGTYLVGLLGGL

SEQ ID NO: 880677 - protein, 198 aa, Homo sapiens
MECVGTRINDISLGEPDLLATGVEREQSERFNVYLMPSPNLDVHGECALQITYEYICLWDVQNPRVKLISWPLSALRRYGRDTTWFTFEAGRMCETGEGLFIFQTRDGEAIYQKVHSAALAIAEQHERLLQSVKNSMLQMKMSERAASLSTMVPLPRSAYWQHITRQHSTGQLYRLQDVSSPLKLHRTETFPAYRSEH

SEQ ID NO: 880678 - protein, 305 aa, Homo sapiens
  misc_feature (21)..(21): Xaa can be any naturally occurring amino acid
EIMNIENANFIEKKENLNEYXIYQRCWLVFKKASSKGPKRLEKFSDERAAYFRCYHKVTELNNVKNVARLPKSTKKHAIGIYFNDDTSKTFACESDLEADEWCKVLQMECVGTRINDISLGEPDLLATGVEREQSERFNVYLMPSPNLDVHGECALQITYEYICLWDVQNPRVKLISWPLSALRRYGRDTTWFTFEAGRMCETGEGLFIFQTRDGEAIYQKVHSAALAIAEQHERLLQSVKNSMLQMKMSERAASLSTMVPLPRSAYWQHITRQHSTGQLYRLQDVSSPLKLHRTETFPAYRSEH

SEQ ID NO: 880679 - protein, 106 aa, Homo sapiens [sequence omitted]

SEQ ID NO: 880680 - protein, 306 aa, Homo sapiens [sequence omitted]

SEQ ID NO: 880681 - protein, 306 aa, Homo sapiens [sequence omitted]

SEQ ID NO: 880682 - protein, 308 aa, Homo sapiens
MIYQRCWLVFKKASSKGPKRLEKFSDERAAYFRCYHKVTELNNVKNVARLPKSTKKHAIGIYFNDDTSKTFACESDLEADEWCKVLQMECVGTRINDISLGEPDLLATGVEREQSERFNVYLMPSPNLDVHGECALQITYEYICLWDVQNPRVKLISWPLSALRRYGRDTTWFTFEAGRMCETGEGLFIFQTRDGEAIYQKVHSAALAIAEQHERLLQSVKNSMLQMHDELNGPPSAEPHWVALTSKSLLGQDITQDRHRPGHSLPGLAQGFQTLLKASFRAKKEFSTRDKYWTLEKADERLATTHVT

SEQ ID NO: 880683 - protein, 198 aa, Homo sapiens; identical to SEQ ID NO: 880677

SEQ ID NO: 880684 - protein, 118 aa, Homo sapiens
GRRQGWIPQPPPLLLLAGRPRSQLTPALQPRLPAPRSALPESGCKPAAHCQGWGDRESDVRLLKPRPAPPKQLHLSNFLPPTACLDPALHPPQSHFGCALLGKGGVTGCLGWLPILMT

SEQ ID NO: 880685 - protein, 1174 aa, Homo sapiens
MGNQLAGIAPSQILSVESYFSDIHDFEYDKSLGSTRFFKVARAKHREGLVVVKVFAIQDPTLPLTSYKQELEELKIRLNSAQNCLPFQKASEKASEKAAMLFRQYVRDNLYDRISTRPFLNNIEKRWIAFQILTAVDQAHKSGVRHGDIKTENVMVTSWNWVLLTDFASFKPTYLPEDNPADFNYFFDTSRRRTCYIAPERFVDGGMFATELEYMRDPSTPLVDLNSNQRTRGELKRAMDIFSAGCVIAELFTEGVPLFDLSQLLAYRNGHFFPEQVLNKIEDHSIRELVTQMIHREPDKRLEAEDYLKQQRGNAFPEIFYTFLQPYMAQFAKETFLSADERILVIRKDLGNIIHNLCGHDLPEKAEGEPKENGLVILVSVITSCLQTLKYCDSKLAALELILHLAPRLSVEILLDRITPYLLHFSNDSVPRVRAEALRTLTKVLALVKEVPRNDINIYPEYILPGIAHLAQDDATIVRLAYAENIALLAETALRFLELVQLKNLNMENDPNNEEIDEVTHPNGNYDTELQALHEMVQQKVVTLLSDPENIVKQTLMENGITRLCVFFGRQKANDVLLSHMITFLNDKNDWHLRGAFFDSIVGVAAYVGWQSSSILKPLLQQGLSDAEEFVIVKALYALTCMCQLGLLQKPHVYEFASDIAPFLCHPNLWIRYGAVGFITVVARQISTADVYCKLMPYLDPYITQPIIQIERKLVLLSVLKEPVSRSIFDYALRSKDITSLFRHLHMRQKKRNGSLPDCPPPEDPAIAQLLKKLLSQGMTEEEEDKLLALKDFMMKSNKAKANIVDQSHLHDSSQKGVIDLAALGITGRQVDLVKTKQEPDDKRARKHVKQDSNVNEEWKSMFGSLDPPNMPQALPKGSDQEVIQTGKPPRSESSAGICVPLSTSSQVPEVTTVQNKKPVIPVLSSTILPSTYQIRITTCKTELQQLIQQKREQCNAERIAKQMMENAEWESKPPPPGWRPKGLLVAHLHEHKSAVNRIRVSDEHSLFATCSNDGTVKIWNSQKMEGKTTTTRSILTYSRIGGRVKTLTFCQGSHYLAIASDNGAVQLLGIEASKLPKSPKIHPLQSRILDQKEDGCVVDMHHFNSGAQSVLAYATVNGSLVGWDLRSSSNAWTLKHDLKSGLITSFAVDIHQCWLCIGLESDASQCTLCISPG

SEQ ID NO: 880686 - protein, 717 aa, Homo sapiens
MCQLGLLQKPHVYEFASDIAPFLCHPNLWIRYGAVGFITVVARQISTADVYCKLMPYLDPYITQPIIQIERKLVLLSVLKEPVSRSIFDYALRSKDITSLFRHLHMRQKKRNGSLPDCPPPEDPAIAQLLKKLLSQGMTEEEEDKLLALKDFMMKSNKAKANIVDQSHLHDSSQKGVIDLAALGITGRQVDLVKTKQEPDDKRARKHVKQDSNVNEEWKSMFGSLDPPNMPQALPKGSDQEVIQTGKPPRSESSAGICVPLSTSSQVPEVTTVQNKKPVIPVLSSTILPSTYQIRITTCKTELQQLIQQKREQCNAERIAKQMMENAEWESKPPPPGWRPKGLLVAHLHEHKSAVNRIRVSDEHSLFATCSNDGTVKIWNSQKMEGKTTTTRSILTYSRIGGRVKTLTFCQGSHYLAIASDNGAVQLLGIEASKLPKSPKIHPLQSRILDQKEDGCVVDMHHFNSGAQSVLAYATVNGSLVGWDLRSSSNAWTLKHDLKSGLITSFAVDIHQCWLCIGTSSGTMACWDMRFQLPISSHCHPSRARIRRLSMHPLYQSWVIAAVQGNNEVSMWDMETGDRRFTLWASSAPPLSELQPSPHSVHGIYCSPADGNPILLTAGSDMKIRFWDLAYPERSYVVAGSTSSPSVSYYRKIIEGTEVVQEIQNKQKVGPSDDTPRRGPESLPVGHHDIITDVATFQTTQGFIVTASRDGIVKVWK

SEQ ID NO: 880687 - protein, 1304 aa, Homo sapiens
MGNQLAGIAPSQILSVESYFSDIHDFEYDKSLGSTRFFKVARAKHREGLVVVKVFAIQDPTLPLTSYKQELEELKIRLNSAQNCLPFQKASEKASEKAAMLFRQYVRDNLYDRISTRPFLNNIEKRWIAFQILTAVDQAHKSGVRHGDIKTENVMVTSWNWVLLTDFASFKPTYLPEDNPADFNYFFDTSRRRTCYIAPERFVDGGMFATELEYMRDPSTPLVDLNSNQRTRGELKRAMDIFSAGCVIAELFTEGVPLFDLSQLLAYRNGHFFPEQVLNKIEDHSIRELVTQMIHREPDKRLEAEDYLKQQRGNAFPEIFYTFLQPYMAQFAKETFLSADERILVIRKDLGNIIHNLCGHDLPEKAEGEPKENGLVILVSVITSCLQTLKYCDSKLAALELILHLAPRLSVEILLDRITPYLLHFSNDSVPRVRAEALRTLTKVLALVKEVPRNDINIYPEYILPGIAHLAQDDATIVRLAYAENIALLAETALRFLELVQLKNLNMENDPNNEEIDEVTHPNGNYDTELQALHEMVQQKVVTLLSDPENIVKQTLMENGITRLCVFFGRQKANDVLLSHMITFLNDKNDWHLRGAFFDSIVGVAAYVGWQSSSILKPLLQQGLSDAEEFVIVKALYALTCMCQLGLLQKPHVYEFASDIAPFLCHPNLWIRYGAVGFITVVARQISTADVYCKLMPYLDPYITQPIIQIERKLVLLSVLKEPVSRSIFDYALRSKDITSLFRHLHMRQKKRNGSLPDCPPPEDPAIAQLLKKLLSQGMTEEEEDKLLALKDFMMKSNKAKANIVDQSHLHDSSQKGVIDLAALGITGRQVDLVKTKQEPDDKRARKHVKQDSNVNEEWKSMFGSLDPPNMPQALPKGSDQEVIQTGKPPRSESSAGICVPLSTSSQVPEVTTVQNKKPVIPVLSSTILPSTYQIRITTCKTELQQLIQQKREQCNAERIAKQMMENAEWESKPPPPGWRPKGLLVAHLHEHKSAVNRIRVSDEHSLFATCSNDGTVKIWNSQKMEGKTTTTRSILTYSRIGGRVKTLTFCQGSHYLAIASDNGAVQLLGIEASKLPKSPKIHPLQSRILDQKEDGCVVDMHHFNSGAQSVLAYATVNGSLVGWDLRSSSNAWTLKHDLKSGLITSFAVDIHQCWLCIGTSSGTMACWDMRFQLPISSHCHPSRARIRRLSMHPLYQSWVIAAVQGNNEVSMWDMETGDRRFTLWASSAPPLSELQPSPHSVHGIYCSPADGNPILLTAGSDMKIRFWDLAYPERSYVVAGSTSSPSVSYYRKIIEGTEVVQVL

SEQ ID NO: 880688 - protein, 1358 aa, Homo sapiens
MGNQLAGIAPSQILSVESYFSDIHDFEYDKSLGSTRFFKVARAKHREGLVVVKVFAIQDPTLPLTSYKQELEELKIRLNSAQNCLPFQKASEKASEKAAMLFRQYVRDNLYDRISTRPFLNNIEKRWIAFQILTAVDQAHKSGVRHGDIKTENVMVTSWNWVLLTDFASFKPTYLPEDNPADFNYFFDTSRRRTCYIAPERFVDGGMFATELEYMRDPSTPLVDLNSNQRTRGELKRAMDIFSAGCVIAELFTEGVPLFDLSQLLAYRNGHFFPEQVLNKIEDHSIRELVTQMIHREPDKRLEAEDYLKQQRGNAFPEIFYTFLQPYMAQFAKETFLSADERILVIRKDLGNIIHNLCGHDLPEKAEGEPKENGLVILVSVITSCLQTLKYCDSKLAALELILHLAPRLSVEILLDRITPYLLHFSNDSVPRVRAEALRTLTKVLALVKEVPRNDINIYPEYILPGIAHLAQDDATIVRLAYAENIALLAETALRFLELVQLKNLNMENDPNNEEIDEVTHPNGNYDTELQALHEMVQQKVVTLLSDPENIVKQTLMENGITRLCVFFGRQKANDVLLSHMITFLNDKNDWHLRGAFFDSIVGVAAYVGWQSSSILKPLLQQGLSDAEEFVIVKALYALTCMCQLGLLQKPHVYEFASDIAPFLCHPNLWIRYGAVGFITVVARQISTADVYCKLMPYLDPYITQPIIQIERKLVLLSVLKEPVSRSIFDYALRSKDITSLFRHLHMRQKKRNGSLPDCPPPEDPAIAQLLKKLLSQGMTEEEEDKLLALKDFMMKSNKAKANIVDQSHLHDSSQKGVIDLAALGITGRQVDLVKTKQEPDDKRARKHVKQDSNVNEEWKSMFGSLDPPNMPQALPKGSDQEVIQTGKPPRSESSAGICVPLSTSSQVPEVTTVQNKKPVIPVLSSTILPSTYQIRITTCKTELQQLIQQKREQCNAERIAKQMMENAEWESKPPPPGWRPKGLLVAHLHEHKSAVNRIRVSDEHSLFATCSNDGTVKIWNSQKMEGKTTTTRSILTYSRIGGRVKTLTFCQGSHYLAIASDNGAVQLLGIEASKLPKSPKIHPLQSRILDQKEDGCVVDMHHFNSGAQSVLAYATVNGSLVGWDLRSSSNAWTLKHDLKSGLITSFAVDIHQCWLCIGTSSGTMACWDMRFQLPISSHCHPSRARIRRLSMHPLYQSWVIAAVQGNNEVSMWDMETGDRRFTLWASSAPPLSELQPSPHSVHGIYCSPADGNPILLTAGSDMKIRFWDLAYPERSYVVAGSTSSPSVSYYRKIIEGTEVVQEIQNKQKVGPSDDTPRRGPESLPVGHHDIITDVATFQTTQGFIVTASRDGIVKVWK

SEQ ID NO: 880689 - protein, 1358 aa, Homo sapiens; identical to SEQ ID NO: 880688

SEQ ID NO: 880690 - protein, 181 aa, Homo sapiens
QRGNAFPEIFYTFLQPYMAQFAKETFLSADERILVIRKDLGNIIHNLCGHDLPEKAEGEPKENGLVILVSVITSCLQTLKYCDSKLAALELILHLAPRLSVEILLDRITPYLLHFSNDSVPRVRAEALRTLTKVLALVKEVPRNDINIYPEYILPGIAHLAQDDATIVRLAYAGKSLLSKY

SEQ ID NO: 880691 - protein, 110 aa, Homo sapiens
ASECCAQQSDIKSSTLYNNTRYQNLTFVFMAKEAVLYPTVVQRAKDECQPGWRLTGFQEPESPLGLLACFWLQNHHLHLEISTGTFWRQTNPALILGTMPVEMHSSTIQK

SEQ ID NO: 880692 - protein, 122 aa, Homo sapiens
PCCNDSLNIHRYNNLTFVFMAKEAVLYPTVVQRAKDECQPGWRLTGFQEPESPLGLLACFWLQNHHLHLEISTGTFWRQTNPALILGTMPVEMHSSTIQNDYLKIPPKKDKTFLQPRGHLLI

SEQ ID NO: 880693 - protein, 125 aa, Homo sapiens
MSKQRLCKIECGPRSLRQTVVGVLEMEGIMNPYTALPTPQQLLAIEQSVYSSDPFRQGLTPPQMPGDHMHPYGAEPLFHDLDSDDTSLSNLGDCFLATSEAGPLQSRVGNPIDHLYSMQNSYFTS

SEQ ID NO: 880694 - protein, 71 aa, Homo sapiens
TLRIPWSLHPPHQSSRRLYYPFCQWDSKKLSDLVWLPHLVREQRVSLTCLTPGTVLSDEGCFGKSEASKAQ

SEQ ID NO: 880695 - protein, 90 aa, Homo sapiens
QVTPPIFLSPTLPQYPQVTPPLFLSPTLPQYPQVTPPLFMSPMLPHYPQGTQIAHLGNADMIQPGLIPGQPNLDFVISQAWSQSTFSTST

SEQ ID NO: 880696 - protein, 82 aa, Homo sapiens
GCARGMVQERQWSSLHLQSLQLLSGEELGEGIWEEGGQVFGVCGRVQMRDDDDGLDKGGGCRDGKRGVNSGAGQSCRSLYRV

SEQ ID NO: 880697 - protein, 49 aa, Homo sapiens
GLGKLSLDKSVDPVDHLILIWANILVIIWHLPHPYSLQGAIVVLGSLNT

SEQ ID NO: 880698 - protein, 143 aa, Homo sapiens
LCVANGSGLMVPQGGQGTINMAELHLGTNLNICSRDEAHYHVTDSPHWGQLLQATQPATAFSQQDLLVGAVFYGHNGSLSSRNTLAFSMDVGPVHTDATLQVTIALEGPVAPLKLAQHKEIYIFQGEAAEIRRDQLEVRSWRW

SEQ ID NO: 880699 - protein, 81 aa, Homo sapiens
GYCEDFYVHKLENLEEIDKFRKIYSTPRLNQEEMETLNRPITSSKIEMVIKKKLPTKKVQAQTDSRLNSIRHSKKNWYQSY

SEQ ID NO: 880700 - protein, 51 aa, Homo sapiens
MIRGRCKIWKKEFSPCTYPTVRGEFPPGRTEAVRGLQSISTFNGGPGEAPI

SEQ ID NO: 880701 - protein, 228 aa, Homo sapiens
STHPCLFSHSHTYTHTCTLNTPMPILSHTCTHDTHTHAYSHTHLYTHAHTRHTPMLILTHTPLYTHMHILNTHTHAYSLTHLYTHMHMTHTPMPILTHSHTYTHTCTYSTHSHAYSLTHTLTHLYTHAHTQHTCSSSHTFTHMHTFGYTHTRYLHTHMHTLNTHIPMHIHTYTWTHSDTHTYIPSHTHVHTRYTHAYAYLCTHTHIHTHPVPSHTCTQYTHTRAHPHT

SEQ ID NO: 880702 - protein, 81 aa, Homo sapiens
YCNRLHRLEYLNNRNTFLTVLEAVKSKIKMWADLVSGEGWLPGLQMAVSSLHPHMVKREKHHLCCVSFEKATNLIHKAPSS

SEQ ID NO: 880703 - protein, 114 aa, Homo sapiens
VTLRIFAECMAGSKTTKSASWSFLLLSAGGNPKSAQAPGIPWKMCVFIVHGKAPTAVLNRMLTHICRDTLTAQRKWISFVFDEGLGRVGVDLENKGKLSRSSPYLDYGEDHDLT

SEQ ID NO: 880704 - protein, 120 aa, Homo sapiens
WLSVVGHLSPVAIRGRPHLPSLTTVRIFLGIRPDSSTCPEPLAPPLQRLLASVVHIHREQVGHGSGSGAPAFGPWGRHCLLTHGCCLIGIIQQLPNWSPCLQLDWGTNPSLTYKPWFKAP

SEQ ID NO: 880705 - protein, 270 aa, Homo sapiens
MKQPQNKRRDRREQQTQSTQARSKREKTDSRKKREERGKKRKQRRRKQGAQEKEKKEKKKRDSKQKRKEEREGRKKREQKEEEDKDTKEEAEQQDKRKEQRSEARERKANRDRTKENRKRKRRQRETKRRKKNKEQKRKNMKTELDLKNESRTRKTGGAERSEREEKRTREKHDERQDGKKKETRQNREPEKKKTKKKGGKRRQRRKKKKRGRDRETRERKREEKRKKKKTEERAREQEEKEEHKEKREKKENKREERKKKGGKDRKEQK

SEQ ID NO: 880706 - protein, 120 aa, Homo sapiens
ATTGPAAWSSPPPASANQCGEISTVRWLIFPAWQPQSREKSLDTRATSGTLELGLQYLIQTGSVLCGGYGGEGLRVRYILARLNSKHSLSLSMYVQIITWPICLSLAKINLSFKKCQLGH

SEQ ID NO: 880707 - protein, 76 aa, Homo sapiens
ATAPYACSHLVLDSPRGRASAISQVCAMDRRATPLPEATLTPLSRWLPALLLPWPGTALQAAHLYHGSPHLTQPSR

SEQ ID NO: 880708 - protein, 80 aa, Homo sapiens
KASGQILMGRGGRHVWAWGFPTQKWEPGQLSSRLPFLRPQMNGVCIFVEDINTPPPALPTRHTPTLRTVPDKPKFRLSGC

SEQ ID NO: 880709 - protein, 74 aa, Homo sapiens
VSGNTWSVIKPPPRIIAMDNQPLVSQGQNLSLKAAKGSFRERAFQLKGSRTNMAKKESPMAEGNVVRTSKNMFL

SEQ ID NO: 880710 - protein, 137 aa, Homo sapiens
IVIPKYHPVNGHNCEVGKTLSKQEMAGASSSQRGQSGSGNFSGGCASGSGGNDNFDHGRNISSCSDFDGSHSGGGYGSSEYGCYGFGNDGINFGSCVICNDFGNYNSQSSHFGPMKGGHFGGISCAPVTVEANTLLL

SEQ ID NO: 880711 - protein, 37 aa, Homo sapiens
SQPSYPAGSSPTARVSLCPLASRLLPQNAGFLMEIFL

SEQ ID NO: 880712 - protein, 33 aa, Homo sapiens
MFNFLTFAKNLFTNPLINGGHSLAGIRGSGEEW

SEQ ID NO: 880713 - protein, 39 aa, Homo sapiens
FVLNRGFSVGFCFSSPFPFRDGCSMWPGILTGDGPVFIS

SEQ ID NO: 880714 - protein, 124 aa, Homo sapiens
KRHPFPTSLKINITILDIGESGHSQPGLGSTGSVWCGSSGQVPTVPHGDPLGRRVHLPVSLTKSAHQASLPPLDVGGNILDQPQSSGGMEGLTEADAGPGIVQDPKTSIPTCLRGELHGWINSF

SEQ ID NO: 880715 - protein, 79 aa, Homo sapiens
RGLITHHWEPGQGQFVSTWPAGHYVTSGRGVVCGASLPPSAGKVSRGTLEGGWKEKVRRCVESNTAWQTYNFTNDLCST

SEQ ID NO: 880716 - protein, 217 aa, Homo sapiens
MAHLRSPSGFGDPGEEGPEGVRGGVRGGGGGGRGFPKIFQTFRKDMSEMSIDRNIHRNLSPGIPVSVQTEESWLQDLSDKVQSRKKASKEKAEPECLASKLREKWVINPEESKLNILYELEFKEDFITLFEPSLRTLPSIGPPSILAYKEESSNLGINFKDEEEETSPKCEFCGSDLRAFFSNVDVSSEPKGHASCCIAFQNLIDYIYEEQIKTKPP

SEQ ID NO: 880717 - protein, 339 aa, Homo sapiens
SGRADRGRGQRAGCNPASRQPWPTCARLAASETRGKKDQKESEEELEEEEEEEEVAEEAPQAAEAAPQVAEEEEEVVEEELVGEEQELEAPETFSEEYLWKVTDIGDYDDDFPDVRPRLASIVSPSLTSTFVPSQSATSTETPSASPPSSTSSHKSFPKIFQTFRKDMSEMSIDRNIHRNLSPGIPVSVQTEESWLQDLSDKVQSRKKASKEKAEPECLASKLREKWVINPEESKLNILYELEFKEDFITLFEPSLRTLPSIGPPSILAYKEESSNLGINFKDEEEETSPKCEFCGSDLRAFFSNVDVSSEPKGHASCCIAFQNLIDYIYEEQIKTKPP

SEQ ID NO: 880718 - protein, 71 aa, Homo sapiens
GALLALLREGEGEEDAVPGKRLLRRAGISAKRPLPPLPFPLTSSVPTSPGEETKDVGGQQHAGGLPLTPRS

SEQ ID NO: 880719 - protein, 75 aa, Homo sapiens
MPIRMHLLLKDTPTSTMTVYRCHGNVWRLPYKVSKGRGGDLSSSSSLYFPDKLALTLLCELAPNSFSHEIKETSL

SEQ ID NO: 880720 - protein, 109 aa, Homo sapiens
MQGTRRLLKPRDQETSCMSQGLLAQAPPLEFPVQSHQPGDHVFIKGWKEGRLEPAWEGSYLMLLTIETAVRTAEKGWTHHTRVKKASTPSESWIVVPEPSPTKLKLRRT

SEQ ID NO: 880721 - protein, 104 aa, Homo sapiens
MQNTQIENPINTKCKFGFQKPKESARKTSAKKMFSSRIPAVGSGKGSAAEITGKDVEEGMFAHRPKDHATENSLIAKGKHVPRVIWGHQLICMIKLSIPNCGTT

SEQ ID NO: 880722 - protein, 128 aa, Homo sapiens
NIFPVTLFSELLIPCWLSVFYTTPPGPMSALNPGDGRTKSLYTLSQQGARATEEESPLNSQNPKASMVLEIRSPRMKVPSVALVPPGGSKGNSVSCASPASRGDLHSPAPCPLFHPQSHSLASSSLCL

SEQ ID NO: 880723 - protein, 1073 aa, Homo sapiens
MTDQENNNNISSNPFAALFGSLADAKQFAAIQKEQLKQQSDELPASPDDSDNSVSESLDEFDYSVAEISRSFRSQQEICEQLNINHMIQRIFLITLDNSDPSLKSGNGIPSRCVYLEEMAVELEDQDWLDMSNVEQALFARLLLQDPGNHLINMTSSTTLNLSADRDAGERHIFCYLYSCFQRAKEEITKVPENLLPFAVQCRNLTVSNTRTVLLTPEIYVDQNIHEQLVDLMLEAIQGAREYMNKIYFEDVTEFLEEVIEALILDEEVRTFPEVMIPVFDILLGRIKDLELCQILLYAYLDILLYFTRQKDMAKVFVEYIQPKDPTNGQMYQKTLLGVILSISCLLKTPGVVENHGYFLNPSRSSPQEIKVQEANIHQFMAQFHEKIYQMLKNLLQLSPETKHCILSWLGNCLHANAGRTKIWANQMPEIFFQMYASDAFFLNLGAALLKLCQPFCKPRSSRLLTFNPTYCALKELNDEERKIKNVHMRGLDKETCLIPAVQEPKFPQNYNLVTENLALTEYTLYLGFHRLHDQMVKINQNLHRLQVAWRDAQQSSSPAADNLREQFERLMTIYLSTKTAMTEPQMLQNCLNLQVSMAVLLVQLAIGNEGSQPIELTFPLPDGYSSLAYVPEFFADNLGDFLIFLRRFADDILETSADSLEHVLHFITIFTGSIERMKNPHLRAKLAEVLEAVMPHLDQTPNPLVSSVFHRKRVFCNFQYAPQLAEALIKVFVDIEFTGDPHQFEQKFNYRRPMYPILRYMWGTDTYRESIKDLADYASKNLEAMNPPLFLRFLNLLMNDAIFLLDEAIQYLSKIKIQQIEKDRGEWDSLTPEARREKEAGLQMFGQLARFHNIMSNETIGTLAFLTSEIKSLFVHPFLAERIISMLNYFLQHLVGPKMGALKVKDFSEFDFKPQQLVSDICTIYLNLGDEENFCATVPKDGRSYSPTLFAQTVRVLKKINKPGNMIMAFSNLAERIKSLADLQQQEEETYADACDEFLDPIMSTLMCDPVVLPSSRVTVDRSTIARHLLSDQTDPFNRSPLTMDQIRPNTELKEKIQRWLAERKQQKEQLE

SEQ ID NO: 880724 - protein, 1066 aa, Homo sapiens
MTDQENNNNISSNPFAALFGSLADAKQFAAIQKEQLKQQSDELPASPDDSDNSVSESLDEFDYSVAEISRSFRSQQEICEQLNINHMIQRIFLITLDNSDPSLKSGNGIPSRCVYLEEMAVELEDQDWLDMSNVEQALFARLLLQDPGNHLINMTSSTTLNLSADRDAGERHIFCYLYSCFQRAKEEITKVPENLLPFAVQCRNLTVSNTRTVLLTPEIYVDQNIHEQLVDLMLEAIQGAHFEDVTEFLEEVIEALILDEEVRTFPEVMIPVFDILLGRIKDLELCQILLYAYLDILLYFTRQKDMAKVFVEYIQPKDPTNGQMYQKTLLGVILSISCLLKTPGVVENHGYFLNPSRSSPQEIKVQEANIHQFMAQFHEKIYQMLKNLLQLSPETKHCILSWLGNCLHANAGRTKIWANQMPEIFFQMYASDAFFLNLGAALLKLCQPFCKPRSSRLLTFNPTYCALKELNDEERKIKNVHMRGLDKETCLIPAVQEPKFPQNYNLVTENLALTEYTLYLGFHRLHDQMVKINQNLHRLQVAWRDAQQSSSPAADNLREQFERLMTIYLSTKTAMTEPQMLQNCLNLQVSMAVLLVQLAIGNEGSQPIELTFPLPDGYSSLAYVPEFFADNLGDFLIFLRRFADDILETSADSLEHVLHFITIFTGSIERMKNPHLRAKLAEVLEAVMPHLDQTPNPLVSSVFHRKRVFCNFQYAPQLAEALIKVFVDIEFTGDPHQFEQKFNYRRPMYPILRYMWGTDTYRESIKDLADYASKNLEAMNPPLFLRFLNLLMNDAIFLLDEAIQYLSKIKIQQIEKDRGEWDSLTPEARREKEAGLQMFGQLARFHNIMSNETIGTLAFLTSEIKSLFVHPFLAERIISMLNYFLQHLVGPKMGALKVKDFSEFDFKPQQLVSDICTIYLNLGDEENFCATVPKDGRSYSPTLFAQTVRVLKKINKPGNMIMAFSNLAERIKSLADLQQQEEETYADACDEFLDPIMSTLMCDPVVLPSSRVTVDRSTIARHLLSDQTDPFNRSPLTMDQIRPNTELKEKIQRWLAERKQQKEQLE

SEQ ID NO: 880725 - protein, 97 aa, Homo sapiens
VQRTPSAHFSREKKDYADACDEFLDPIMSTLMCDPVVLPSSRVTVDRSTIARHLLSDQTDPFNRSPLTMDQIRPNTELKEKIQRWLAERKQQKEQLE

SEQ ID NO: 880726 - protein, 1066 aa, Homo sapiens; identical to SEQ ID NO: 880724

SEQ ID NO: 880727 - protein, 1066 aa, Homo sapiens; identical to SEQ ID NO: 880724

SEQ ID NO: 880728 - protein, 75 aa, Homo sapiens
NGQMYQKTLLGVILSISCLLKTPGVVENHGYFLNPSRSSPQEIKVQEANIHQVELFTRVSQPPDLKRVFSESRYR

SEQ ID NO: 880729 - protein, 262 aa, Homo sapiens
MTDQENNNNISSNPFAALFGSLADAKQFAAIQKEQLKQQSDELPASPDDSDNSVSESLDEFDYSVAEISRSFRSQQEICEQLNINHMIQRIFLITLDNSDPSLKSGNGIPSRCVYLEEMAVELEDQDWLDMSNVEQALFARLLLQDPGNHLINMTSSTTLNLSADRDAGERHIFCYLYSCFQRAKEEITKVPENLLPFAVQCRNLTVSNTRTVLLTPEIYVDQNIHEQLVDLMLEAIQGAHFEDVTEFLEEVIEALILDEES

SEQ ID NO: 880730 - protein, 1100 aa, Homo sapiens
MTDQENNNNISSNPFAALFGSLADAKQFAAIQKEQLKQQSEKSCSVTEAGVQCNLCLPGLSNSPASASRVAGTTDELPASPDDSDNSVSESLDEFDYSVAEISRSFRSQQEICEQLNINHMIQRIFLITLDNSDPSLKSGNGIPSRCVYLEEMAVELEDQDWLDMSNVEQALFARLLLQDPGNHLINMTSSTTLNLSADRDAGERHIFCYLYSCFQRAKEEITKVPENLLPFAVQCRNLTVSNTRTVLLTPEIYVDQNIHEQLVDLMLEAIQGAHFEDVTEFLEEVIEALILDEEVRTFPEVMIPVFDILLGRIKDLELCQILLYAYLDILLYFTRQKDMAKVFVEYIQPKDPTNGQMYQKTLLGVILSISCLLKTPGVVENHGYFLNPSRSSPQEIKVQEANIHQFMAQFHEKIYQMLKNLLQLSPETKHCILSWLGNCLHANAGRTKIWANQMPEIFFQMYASDAFFLNLGAALLKLCQPFCKPRSSRLLTFNPTYCALKELNDEERKIKNVHMRGLDKETCLIPAVQEPKFPQNYNLVTENLALTEYTLYLGFHRLHDQMVKINQNLHRLQVAWRDAQQSSSPAADNLREQFERLMTIYLSTKTAMTEPQMLQNCLNLQVSMAVLLVQLAIGNEGSQPIELTFPLPDGYSSLAYVPEFFADNLGDFLIFLRRFADDILETSADSLEHVLHFITIFTGSIERMKNPHLRAKLAEVLEAVMPHLDQTPNPLVSSVFHRKRVFCNFQYAPQLAEALIKVFVDIEFTGDPHQFEQKFNYRRPMYPILRYMWGTDTYRESIKDLADYASKNLEAMNPPLFLRFLNLLMNDAIFLLDEAIQYLSKIKIQQIEKDRGEWDSLTPEARREKEAGLQMFGQLARFHNIMSNETIGTLAFLTSEIKSLFVHPFLAERIISMLNYFLQHLVGPKMGALKVKDFSEFDFKPQQLVSDICTIYLNLGDEENFCATVPKDGRSYSPTLFAQTVRVLKKINKPGNMIMAFSNLAERIKSLADLQQQEEETYADACDEFLDPIMSTLMCDPVVLPSSRVTVDRSTIARHLLSDQTDPFNRSPLTMDQIRPNTELKEKIQRWLAERKQQKEQLE

SEQ ID NO: 880731 - protein, 242 aa, Homo sapiens
MTDQENNNNISSNPFAALFGSLADAKQFAAIQKEQLKQQSDELPASPDDSDNSVSESLDEFDYSVAEISRSFRSQQEICEQLNINHMIQRIFLITLDNSDPSLKSGNGIPSRCVYLEEMAVELEDQDWLDMSNVEQALFARLLLQDPGNHLINMTSSTTLNLSADRDAGERHIFCYLYSCFQRAKEEITKVPENLLPFAVQCRNLTVSNTRTVLLTPEIYVDQNIHEQNLVHSHFKYPLSPV

SEQ ID NO: 880732 - protein, 257 aa, Homo sapiens
MTDQENNNNISSNPFAALFGSLADAKQFAAIQKEQLKQQSDELPASPDDSDNSVSESLDEFDYSVAEISRSFRSQQEICEQLNINHMIQRIFLITLDNSDPSLKSGNGIPSRCVYLEEMAVELEDQDWLDMSNVEQALFARLLLQDPGNHLINMTSSTTLNLSADRDAGERHIFCYLYSCFQRAKEEITKVPENLLPFAVQCRNLTVSNTRTVLLTPEIYVDQNIHEQLVDLMLEAIQGAREYMNKICKLLHFDFQI

SEQ ID NO: 880733 - protein, 116 aa, Homo sapiens
REWRDWERVLPGFDPLPPTAHAAAAGTPGLGLGAGKERPGVGRAPMDSRNPRPGVAGRPEGDLAPGGRRALLEGGELAGRGRGRAHRIQTQKPLPPGIPARNGLRRRRPPLSLPRS

SEQ ID NO: 880734 - protein, 200 aa, Homo sapiens
FPAQGPAARHSRLRAFVIIHRSHFHFSAAQELHSTIKMRWDCLARPLLRVQTQVGRGPCAAPSGLRLRGRALAPCWTHGALQAAQRALPAMRVRKSRDRPISSEMATVPGEKAGGREEAGVQAPVQSHLVLCGPFLFLGCWQGALPQLRGTQDPDGCRQEGQLGRGGGGPGPRPEPGQPPGVVGPWTLPTADPVGPTPLQ

SEQ ID NO: 880735 - protein, 116 aa, Homo sapiens
MRVTPEVTTTAPPSPIQLKPPSLWLPTPSLPSSHSLHGLLIAWPLLSLSPASLASCWLPRKSCQDLPETPVYWVGKERGSTDLFMKLHSDTQNRPSTQRPSMAGRPGKGARKRAKS

SEQ ID NO: 880736 - protein, 82 aa, Homo sapiens
LKAQASIIQGDFQSPGWGGLHRTLEEGRSGSAHEVAEEQDMAHSFACPSTWPTSAGLPRALKACTFTILMDRSGYRLRGQRY

SEQ ID NO: 880737 - protein, 94 aa, Homo sapiens
TLALLATVGRAVECEVPCLLAARGDESGPHGSPDSSLGASLLTESRSVTQARVQWTVSAHCKLRLPGSCHSPASVSRVAGSTGRMSILRFSVTT

SEQ ID NO: 880738 - protein, 280 aa, Homo sapiens
LVLVGILGHRHTPSHPPPALWSLPRAREQLGLILLTPQGRTGQGGSRRPPMLGTQWTLARCLLPSHPDPGLAGSLRGDSSEDGRRGQLLPQSPAPCSPVWSPGTPVGGPHPAGDGPATAPGPPEGPELAFPQDLSPAWPQKGAGTHPANAGPGPLSRRSSQLRTPLEAGRKWGWKMTRWRLRRDQAPGEGTQAKLLGEALSTAGRGHAGPPEGWAGEGGVSPGLTPLLGTGQGKELDLDLREKFIRFDQILGISLDHIPFLPQTGPGRPWGCGVGKQRPH

SEQ ID NO: 880739 - protein, 131 aa, Homo sapiens
MCSTGGETQTHQQAPRVSTVGQMLAGQGRRSGAHSNLCFFMRKGPIKRGAKQGFEGRGVGALFPPRRSFNGGPPFPEKPKKKREKGPKSRPHTQHAPRSNNVLKTDRRDPFKTVFGAPLGSPQGDTQGGEK

SEQ ID NO: 880740 - protein, 224 aa, Homo sapiens
FFLNLFSFRWASPPPPVSTSSRGVTIALVCWVGSFGFASKALRDSVCRFYIGLCSLTWRSSHSDMATSSLHFASCDTQQAPRQRGASTVSSSSSTKVDLKSGLEECAVALNLFLSNKFTDALELLRPWAKESMYHALGYSTIVVLQAVLTFEQQDIQNGISAMKDALQTCQKYRKKYTVVESFSSLLSRGSLEQLSEEEMHAEICYAECLLQKAALTFVQVMNI

SEQ ID NO: 880741 - protein, 70 aa, Homo sapiens
LGLSGARPDKETAPSRALGRGPGHRADRCAHTHSAGTPLASKVHWNTGTEGLPPGSSHLRTFTDHCREPR

SEQ ID NO: 880742 - protein, 168 aa, Homo sapiens
HRHHVSSQASAVISASGMKTSEQWNLFLFLAPVSEPTDFGFTVVSTYPHIKRMGFPSLSYPLFPLSLACSAGTFPKAWDPGEPKSSLEGEFTGFRVRLVEGTSWWYAWGLHGEEDKGDFQELQRQPTLRASSACAPRGARGNCGPTSPVSLVDFASSDEAGAGLFRGM

SEQ ID NO: 880743 - protein, 162 aa, Homo sapiens
MAAGPAALSRLIARPGGLPVSSGHPHPKHWLAVRWESCRPCHLIPPRGFGSFSTKFSSGILFHPAPQNSDLTSEITVERIEKRCLELFGRDYCFSVIPNTNGDICGHYPRHIVFLEYESSEKEKDTFESTVQVSKLQDLIHRSKMARCRGRFVCPVILFKGK

SEQ ID NO: 880744 - protein, 129 aa, Homo sapiens
MCHFLCACRRQRKSQIQLFRCNVFCDSGPWTLGPVPTLHFKAPPAPYYGLGLVPGMMKPTRICHCGLNPASLPRPYRAPYPTCHEGSVLPSAMTQPCWLPCVPLECPVSQGSCSGFVSDSWVQSAASAC

SEQ ID NO: 880745 - protein, 151 aa, Homo sapiens
MAVAPGWPKSPVQLRLPDSRRHHQPGSARLGSGTPEPLACGPAALPLYAQAPPSPRCAFRRPPRASRCRRRPDHARDSPGARGLHPLPGLWTLQAATLSLRLQAFPRLLSSRASNTWGPLRTGCAPRRQGPGPAVLGSPPVLRLAAEKLFW

SEQ ID NO: 880746 - protein, 152 aa, Homo sapiens
MVSVTTAPHPGSPSDQRQRSPTTPAREAQSQQNPERAHHMCLPVTACDRAPARANELEGPKELGCSAGVTGQPHGVLPSLDQTRGGEAQTRRGADLGWGDCWGKLGPLARDRACVQAQRCPRLKWAPRGHYQSPNSWPWGKPCPANLALGTM

SEQ ID NO: 880747 - protein, 104 aa, Homo sapiens
MEHSVSGTGGFLVSLTSRMKLRTLGKLLEGRGMPAIFIIALPSPNTIREPALIISLQLYPAAPERQRPARRGHDDGGGFFKTKRGICRETEREIRLLQTLTVST

SEQ ID NO: 880748 - protein, 126 aa, Homo sapiens
MNIDWCRTYLLQTKPLRIQEVEATHSLLAAKLRKSGAHELDTPAAIKEILPRNTSKMGSDPAHGPPLNQVHLHQTGYSPYEILFGRPLPIIGQIKGDLCELGELSLRRQMQALGKAMQEVHGWVWE

SEQ ID NO: 880749 - protein, 209 aa, Homo sapiens
VRSGTRQEAARREDRGGVRVAPSPGPHPRWTVGETECLSLGPHRTMKVLLLTGLGALFFAYYWDDNFDPGEHLGLREGETGPAVLSSAQSDHPGYGQPASRERELLLTGANAGVGEELAYHYARLGSHLVLTAHTEALLQKVVGNCRKLGAPKVFYIAADMASPEAPESVVQFALDKLGGLDYLVLNHIGGAPAGTRAPSPQATRWLMQ

SEQ ID NO: 880750 - protein, 292 aa, Homo sapiens
KPSPGAYHADPGLGTLSLLTGPCVATAPPPTEIQSIAAPFLQKDCSPETLACGSKNALTPATPRTAREPWLWGSSLVPGRVLSVLSEVRAQPLPLLPQSRGSFSPAQIWECGEGQAPCAGLPAGKEWLSRQCEVLQSPVGLPGDGQRALGLGPAHPLVAPPQTHSHLGLWRRKEREIPALNSPSLCFFEEPEMNLKAKTEWRRSGERAGASTGPALGTGLCHSLLLLSSFCHLALPPVVLPCTLPSGASLSSESFPFPNPNCRSTGPSPQVWYILGSSGGSGVGQDGATDSY

SEQ ID NO: 880751 - protein, 238 aa, Homo sapiens
SVHRLLPTSARPASDPFSGDGRSWSPGPGRQVGSWEGDEADEETEVPKSQVADTNTPVATFFHLFFRVSAIVTYVSCDWFSKSFVGCFVMVLLLLSLDFWSVKNVTGRLLVGLRWWNQIDEDGKSHWIFEARKVSPNSIAATEAEARIFWLGLIICPMIWIVFFFSTLFSLKLKWLALVVAGISLQAANLYGYILCKMGGNSDIGKVTASFLSQTVFQTACPGDFQKPGLEGLEIHQH

SEQ ID NO: 880752 - protein, 294 aa, Homo sapiens
MSRSRHLGKIRKRLEDVKSQWVRPARADFSDNESARLATDALLDGGSEAYWRVLSQEGEVDFLSSVEAQYIQAQAREPPCPPDTLGGAEAGPKGLDSSSLQSGTYFPVASEGSEPALLHSWASAEKPYLKEKSSATVYFQTVKHNNIRDLVRRCITRTSQNISIRSVEGEIYCAKSGRKFAGQIREKFIISDWRFVLSGSYSFTWLCGHVHRNILSKFTGQAVELFDEEFRHLYASSKPVMGLKSPRLVAPVPPGAAPANGRLSSSSGSASDRTSSNPFSGRSAGSHPGTRTDG

SEQ ID NO: 880753 - protein, 434 aa, Homo sapiens
MSRSRHLGKIRKRLEDVKSQWVRPARADFSDNESARLATDALLDGGSEAYWRVLSQEGEVDFLSSVEAQYIQAQAREPPCPPDTLGGAEAGPKGLDSSSLQSGTYFPVASEGSEPALLHSWASAEKPYLKEKSSATVYFQTVKHNNIRDLVRRCITRTSQVLVILMDVFTDVEIFCDILEAANKRGVFVCVLLDQGGVKLFQEMCDKVQISDSHLKNISIRSVEGEIYCAKSGRKFAGQIREKFIISDWRFVLSGSYSFTWLCGHVHRNILSKFTGQAVELFDEEFRHLYASSKPVMGLKSPRLVAPVPPGAAPANGRLSSSSGSASDRTSSNPFSGRSAGSHPGTRSVSASSGPCSPAAPHPPPPPRFQPHQGPWGAPSPQAHLSPRPHDGPPAAVYSNLGAYRPTRLQLEQLGLVPRLTPTWRPFLQASPHF

SEQ ID NO: 880754 - protein, 269 aa, Homo sapiens
MSRSRHLGKIRKRLEDVKSQWVRPARADFSDNESARLATDALLDGGSEAYWRVLSQEGEVDFLSSVEAQYIQAQAREPPCPPDTLGGAEAGPKGLDSSSLQSGTYFPVASEGSEPALLHSWASAEKPYLKEKSSATVYFQTVKHNNIRDLVRRCITRTSQVLVILMDVFTDVEIFCDILEAANKRGVFVCVLLDQGGVKLFQEMCDKVQISDSHLKNISIRSVEGEIYCAKSGRKFAGQIREKFIISDWRFVLSGSYRWQLPDHCLRDL

SEQ ID NO: 880755 - protein, 66 aa, Homo sapiens
MIELHNGEYSQGKHGFTMAMNAFGDMTNEEFRQMMGCFRNQKFRKGKGPGQDRGKKVYQDSGAPGE

SEQ ID NO: 880756 - protein, 334 aa, Homo sapiens
MNLSLVLAAFCLGIASAVPKFDQNLDTKWYQWKATHRRLYGANEEGWRRAVWEKNMKMIELHNGEYSQGKHGFTMAMNAFGDMTNEEFRQMMGCFRNQKFRKGKVFREPLFLDLPKSVDWRKKGYVTPVKNQKQCGSCWAFSATGALEGQMFRKTGKLVSLSEQNLVDCSRPQGNQGCNGGFMARAFQYVKENGGLDSEESYPYVAVDEICKYRPENSVANDTGFTVVAPGKEKALMKAVATVGPISVAMDAGHSSFQFYKSGIYFEPDCSSKNLDHGVLVVGYGFEGANSNNSKYWLVKNSWGPEWGSNGYVKIAKDKNNHCGIATAASYPNV

SEQ ID NO: 880757 - protein, 334 aa, Homo sapiens; identical to SEQ ID NO: 880756

SEQ ID NO: 880758 - protein, 128 aa, Homo sapiens
MDEICKYRPENSVANDTGFTVVAPGKEKALMKAVATVGPISVAMDAGHSSFQFYKSGIYFEPDCSSKNLDHGVLVVGYGFEGANSNNSKYWLVKNSWGPEWGSNGYVKIAKDKNNHCGIATAASYPNV

SEQ ID NO: 880759 - protein, 67 aa, Homo sapiens
GIKMAAWDRSQPLRPLPEEPRPVCYTQLIGSSITERRGNMRMTSDTNMAFWTGSIVCLASTQGMLMV

SEQ ID NO: 880760 - protein, 67 aa, Homo sapiens; identical to SEQ ID NO: 880759

SEQ ID NO: 880761 - protein, 67 aa, Homo sapiens; identical to SEQ ID NO: 880759

SEQ ID NO: 880762 - protein, 67 aa, Homo sapiens; identical to SEQ ID NO: 880759

SEQ ID NO: 880763 - protein, 67 aa, Homo sapiens; identical to SEQ ID NO: 880759

SEQ ID NO: 880764 - protein, 67 aa, Homo sapiens; identical to SEQ ID NO: 880759

SEQ ID NO: 880765 - protein, 121 aa, Homo sapiens
RTQGTQGGWLFSRNVSFWAGLRCLQSLVPPLALHSSSAGGRYKFQLLSALLCFSKAFQQQHEVGSLPPPVILIIFSLEVQELQAAGDRLLGTCVELCTGDWDCNPGDHCVSNGCGHECVAG

SEQ ID NO: 880766 - protein, 74 aa, Homo sapiens
PPTTTKFAAASTQHEVGSLPPPVILIIFSLEVQELQAAGDRLLGTCVELCTGDWDCNPGDHCVSNGCGHECVAG

SEQ ID NO: 880767 - protein, 261 aa, Homo sapiens [sequence omitted]

SEQ ID NO: 880768 - protein, 247 aa, Homo sapiens
LRLGTRPGVVFRRPGNAAAGSGLRFAQLEAAQQQRMSGTLEKVLCLRNNTIFKQAFSLLRFRTSGEKPIYSVGGILLSISRPYKTKPTHGIGKYKHLIKAEEPKKKKGKVEVRAINLGTDYEYGVLNIHLTAYDMTLAESYAQYVHNLCNSLSIKVEESYAMPTKTIEVLQLQDQGSKMLLDSVLTTHERVVQISGLSATFAEIFLEIIQSSLPEGVRLSVKEHTEEDFKGRFKARPELEELLAKLK

SEQ ID NO: 880769 - protein, 194 aa, Homo sapiens
MGLSSCRKTSSGLPLILHYGGILLSISRPYKTKPTHGIGKYKHLIKAEEPKKKKGKVEVRAINLGTDYEYGVLNIHLTAYDMTLAESYAQYVHNLCNSLSIKVEESYAMPTKTIEVLQLQDQGSKMLLDSVLTTHERVVQISGLSATFAEIFLEIIQSSLPEGVRLSVKEHTEEDFKGRFKARPELEELLAKLK

SEQ ID NO: 880770 - protein, 113 aa, Homo sapiens
MTLAESYAQYVHNLCNSLSIKVEESYAMPTKTIEVLQLQDQGSKMLLDSVLTTHERVVQISGLSATFAEIFLEIIQSSLPEGVRLSVKEHTEEDFKGRFKARPELEELLAKLK

SEQ ID NO: 880771 - protein, 261 aa, Homo sapiens [sequence omitted]

SEQ ID NO: 880772 - protein, 261 aa, Homo sapiens [sequence omitted]

SEQ ID NO: 880773 - protein, 247 aa, Homo sapiens; identical to SEQ ID NO: 880768

SEQ ID NO: 880774 - protein, 303 aa, Homo sapiens
MMWKLSESRWDIAAAPGQGRSVSVFRRPGNAAAGSGLRFAQLEAAQQQRMSGTLEKVLCLRNNTIFKQAFSLLRFRTSGEKPIYSVERDVSCLWPRLEYSGMIIAPCSLELLGSSNPPASASGVAGITGGILLSISRPYKTKPTHGIGKYKHLIKAEEPKKKKGKVEVRAINLGTDYEYGVLNIHLTAYDMTLAESYAQYVHNLCNSLSIKVEESYAMPTKTIEVLQLQDQGSKMLLDSVLTTHERVVQISGLSATFAEIFLEIIQSSLPEGVRLSVKEHTEEDFKGRFKARPELEELLAKLK

SEQ ID NO: 880775 - protein, 113 aa, Homo sapiens; identical to SEQ ID NO: 880770

SEQ ID NO: 880776 - protein, 128 aa, Homo sapiens
SRPFLQCFQTPWERGCRVRSSVCTARGRAAAKDERNLGKVLCLRNNTIFKQAFSLLRFRTSGEKPIYSVGGILLSISRPYKTKPTHGIGKYKHLIKAEELCNANQNHRSVAVAGPRQQNAPGLSAYHP

SEQ ID NO: 880777 - protein, 186 aa, Homo sapiens
MMWKLSESRWDIAAAPGQGRSVSVFRRPGNAAAGSGLRFAQLEAAQQQRMSGTLEKVLCLRNNTIFKQAFSLLRFRTSGEKPIYSVGGILLSISRPYKTKPTHGIGKYKHLIKAEEPKKKKGKVEVRAINLGTDYEYGVLNIHLTAYDMTLAESYAQYVHNLCNSLSIKVEERYEGCFCMGCSWCG

SEQ ID NO: 880778 - protein, 125 aa, Homo sapiens
LSGSGSCRELEPAEFETMLLFCPGCGNGLIVEEGQRCHRFACNTCPYVHNITRKVTNRKYPKLKEVDDVLGGAAAWENVDSTAESCPKCEHPRAYFMQLQTRSADEPMTTFYKCCNAQCGHRWRD

SEQ ID NO: 880779 - protein, 722 aa, Homo sapiens
TAPFPVQSWANQGFRFTMDADKEKDLQKFLKNVDEISNLIQEMNSDDPVVQQKAVLETEKRLLLMEEDQEEDECRTTLNKTMISPPQTAMKSAEEINSEAFLASVEKDAKERAKRRRENKVLADALKEKGNEAFAEGNYETAILRYSEGLEKLKDMKVLYTNRAQAYMKLEDYEKALVDCEWALKCDEKCTKAYFHMGKANLALKNYSVSRECYKKILEINPKLQTQVKGYLNQVDLQEKADLQEKEAHELLDSGKNTAVTTKNLLETLSKPDQIPLFYAGGIEILTEMINECTEQTLFRMHNGFSIISDNEVIRRCFSTAGNDAVEEMVCVSVLKLWQAVCSRNEENQRVLVIHHDRARLLAALLSSKVLAIRQQSFALLLHLAQTESGRSLIINHLDLTRLLEALVSFLDFSDKEANTAMGLFTDLALEERFQVWFQANLPGVLPALTGVLKTDPKVSSSSALCQCIAIMGNLSAEPTTRRHMAACEEFGDGCLSLLARCEEDVDLFREVIYTLLGLMMNLCLQAPFVSEVWAVEVSRRCLSLLNSQDGGILTRAAGVLSRTLSSSLKIVEEALRAGVVKKMMKFLKTGGETASRYAIKILAICTNSYHEAREEVIRLDKKLSVMMKLLSSEDEVLVGNAALCLGNCMEVPNVASSLLKTDLLQVLLKLAGSDTQKTAVQVNAGIALGKLCTAEPRFAAQLRKLHGLEILNSTMKYISDS

SEQ ID NO: 880780 - protein, 263 aa, Homo sapiens
TAPFPVQSWANQGFRFTMDADKEKDLQKFLKNVDEISNLIQEMNSDDPVVQQKAVLETEKRLLLMEEDQEEDECRTTLNKTMISPPQTAMKSAEEINSEAFLASVEKDAKERAKRRRENKVLADALKEKGNEAFAEGNYETAILRYSEGLEKLKDMKVLYTNRAQAYMKLEDYEKALVDCEWALKCDEKCTKAYFHMGKANLALKNYSVSRECYKKILEINPKLQTQVKGYLNQVDLQEKADLQEKEAHELLDSGKNTADPRL

SEQ ID NO: 880781 - protein, 705 aa, Homo sapiens
MDADKEKDLQKFLKNVDEISNLIQEMNSDDPVVQQKAVLETEKRLLLMEEDQEEDECRTTLNKTMISPPQTAMKSAEEINSEAFLASVEKDAKERAKRRRENKVLADALKEKGNEAFAEGNYETAILRYSEGLEKLKDMKVLYTNRAQAYMKLEDYEKALVDCEWALKCDEKCTKAYFHMGKANLALKNYSVSRECYKKILEINPKLQTQVKGYLNQVDLQEKADLQEKEAHELLDSGKNTAVTTKNLLETLSKPDQIPLFYAGGIEILTEMINECTEQTLFRMHNGFSIISDNEVIRRCFSTAGNDAVEEMVCVSVLKLWQAVCSRNEENQRVLVIHHDRARLLAALLSSKVLAIRQQSFALLLHLAQTESGRSLIINHLDLTRLLEALVSFLDFSDKEANTAMGLFTDLALEERFQVWFQANLPGVLPALTGVLKTDPKVSSSSALCQCIAIMGNLSAEPTTRRHMAACEEFGDGCLSLLARCEEDVDLFREVIYTLLGLMMNLCLQAPFVSEVWAVEVSRRCLSLLNSQDGGILTRAAGVLSRTLSSSLKIVEEALRAGVVKKMMKFLKTGGETASRYAIKILAICTNSYHEAREEVIRLDKKLSVMMKLLSSEDEVLVGNAALCLGNCMEVPNVASSLLKTDLLQVLLKLAGSDTQKTAVQVNAGIALGKLCTAEPRFAAQLRKLHGLEILNSTMKYISDS

SEQ ID NO: 880782 - protein, 705 aa, Homo sapiens; identical to SEQ ID NO: 880781

SEQ ID NO: 880783 - protein, 705 aa, Homo sapiens; identical to SEQ ID NO: 880781

SEQ ID NO: 880784 - protein, 394 aa, Homo sapiens
MVCVSVLKLWQAVCSRNEENQRVLVIHHDRARLLAALLSSKVLAIRQQSFALLLHLAQTESGRSLIINHLDLTRLLEALVSFLDFSDKEANTAMGLFTDLALEERFQVWFQANLPGVLPALTGVLKTDPKVSSSSALCQCIAIMGNLSAEPTTRRHMAACEEFGDGCLSLLARCEEDVDLFREVIYTLLGLMMNLCLQAPFVSEVWAVEVSRRCLSLLNSQDGGILTRAAGVLSRTLSSSLKIVEEALRAGVVKKMMKFLKTGGETASRYAIKILAICTNSYHEAREEVIRLDKKLSVMMKLLSSEDEVLVGNAALCLGNCMEVPNVASSLLKTDLLQVLLKLAGSDTQKTAVQVNAGIALGKLCTAEPRFAAQLRKLHGLEILNSTMKYISDS

SEQ ID NO: 880785 - protein, 555 aa, Homo sapiens
MKLEDYEKALVDCEWALKCDEKCTKAYFHMGKANLALKNYSVSRECYKKILEINPKLQTQVKGYLNQVDLQEKADLQEKEAHELLDSGKNTAVTTKNLLETLSKPDQIPLFYAGGIEILTEMINECTEQTLFRMHNGFSIISDNEVIRRCFSTAGNDAVEEMVCVSVLKLWQAVCSRNEENQRVLVIHHDRARLLAALLSSKVLAIRQQSFALLLHLAQTESGRSLIINHLDLTRLLEALVSFLDFSDKEANTAMGLFTDLALEERFQVWFQANLPGVLPALTGVLKTDPKVSSSSALCQCIAIMGNLSAEPTTRRHMAACEEFGDGCLSLLARCEEDVDLFREVIYTLLGLMMNLCLQAPFVSEVWAVEVSRRCLSLLNSQDGGILTRAAGVLSRTLSSSLKIVEEALRAGVVKKMMKFLKTGGETASRYAIKILAICTNSYHEAREEVIRLDKKLSVMMKLLSSEDEVLVGNAALCLGNCMEVPNVASSLLKTDLLQVLLKLAGSDTQKTAVQVNAGIALGKLCTAEPRFAAQLRKLHGLEILNSTMKYISDS

SEQ ID NO: 880786 - protein, 284 aa, Homo sapiens [sequence omitted]

SEQ ID NO: 880787 - protein, 705 aa, Homo sapiens; identical to SEQ ID NO: 880781

SEQ ID NO: 880788 - protein, 705 aa, Homo sapiens; identical to SEQ ID NO: 880781

SEQ ID NO: 880789 - protein, 711 aa, Homo sapiens
MDADKEKDLQKFLKNVDEISNLIQEMNSDDPVVQQKAVLETEKRLLLMEEDQEEDECRTTLNKTMISPPQTAMKSAEEINSEAFLASVEKDAKERAKRRRENKVLADALKEKGNEAFAEGNYETAILRYSEGLEKLKDMKVLYTNRAQAYMKLEDYEKALVDCEWALKSFSFMQCDEKCTKAYFHMGKANLALKNYSVSRECYKKILEINPKLQTQVKGYLNQVDLQEKADLQEKEAHELLDSGKNTAVTTKNLLETLSKPDQIPLFYAGGIEILTEMINECTEQTLFRMHNGFSIISDNEVIRRCFSTAGNDAVEEMVCVSVLKLWQAVCSRNEENQRVLVIHHDRARLLAALLSSKVLAIRQQSFALLLHLAQTESGRSLIINHLDLTRLLEALVSFLDFSDKEANTAMGLFTDLALEERFQVWFQANLPGVLPALTGVLKTDPKVSSSSALCQCIAIMGNLSAEPTTRRHMAACEEFGDGCLSLLARCEEDVDLFREVIYTLLGLMMNLCLQAPFVSEVWAVEVSRRCLSLLNSQDGGILTRAAGVLSRTLSSSLKIVEEALRAGVVKKMMKFLKTGGETASRYAIKILAICTNSYHEAREEVIRLDKKLSVMMKLLSSEDEVLVGNAALCLGNCMEVPNVASSLLKTDLLQVLLKLAGSDTQKTAVQVNAGIALGKLCTAEPRFAAQLRKLHGLEILNSTMKYISDS

SEQ ID NO: 880790 - protein, 671 aa, Homo sapiens
MDADKEKDLQKFLKNVDEISNLIQEMNSDDPVVQQKAVLETEKRLLLMEEDQEEDECRTTLNKTMISPPQTAMKSAEEINSEAFLASVEKDAKERAKRRRENKVLADALKEKGNEAFAEGNYETAILRYSEGLEKLKDMKVLYTNRAQAYMKLEDYEKALVDCEWALKCDEKCTKAYFHMGKANLALKNYSVSRECYKKILEINPKLQTQVKGYLNQVDLQEKADLQEKEAHELLDSGKNTAVTTKNLLETLSKPDQIPLFYAGGIEILTEMINECTEQTLFRMHNGFSIISDNEVIRRCFSTAGNDAVEEMVCVSVLKLWQAVCSRNEENQRVLVIHHDRARLLAALLSSKVLAIRQQSFALLLHLAQTESGRSLIINHLDLTRLLEALVSFLDFSDKEANTAMGLFTDLALEERFQVWFQANLPGVLPALTGVLKTDPKVSSSSALCQCIAIMGNLSAEPTTRRHMAACEEFGDGCLSLLARCEEDVDLFREVIYTLLGLMMNLCLQAPFVSEVWAVEVSRRCLSLLNSQDGGILTRAAGVLSRTLSSSLKIVEEALRAGVVKKMMKFLKTGGETASRYAIKILAICTNSYHEAREEVIRLDKKLSVMMKLLSSEDEVLVGNAALCLGNCMEVPNVASSLLKTDLLQVLLKLAGSDTQKTAHPLPPLLI

SEQ ID NO: 880791 - protein, 422 aa, Homo sapiens
MHNGFSIISDNEVIRRCFSTAGNDAVEEMVCVSVLKLWQAVCSRNEENQRVLVIHHDRARLLAALLSSKVLAIRQQSFALLLHLAQTESGRSLIINHLDLTRLLEALVSFLDFSDKEANTAMGLFTDLALEERFQVWFQANLPGVLPALTGVLKTDPKVSSSSALCQCIAIMGNLSAEPTTRRHMAACEEFGDGCLSLLARCEEDVDLFREVIYTLLGLMMNLCLQAPFVSEVWAVEVSRRCLSLLNSQDGGILTRAAGVLSRTLSSSLKIVEEALRAGVVKKMMKFLKTGGETASRYAIKILAICTNSYHEAREEVIRLDKKLSVMMKLLSSEDEVLVGNAALCLGNCMEVPNVASSLLKTDLLQVLLKLAGSDTQKTAVQVNAGIALGKLCTAEPRFAAQLRKLHGLEILNSTMKYISDS

SEQ ID NO: 880792 - protein, 258 aa, Homo sapiens
MKTPNAQEAEGQQTRAAAGRATGSANMTKKKVSQKKQRGRPSSQPRRNIVGCRISHGWKEGDEPITQWKGTVLDQVPINPSLYLVKYDGIDCVYGLELHRDERVLSLKILSDRVASSHISDANLANTIIGKAVEHMFEGEHGSKDEWRGMVLAQAPIMKAWFYITYEKDPVLYMYQLLDDYKEGDLRIMPESSESPPTEREPGGVVDGLIGKHVEYTKEDGSKRIGMVIHQVEAKPSVYFIKFDDDFHIYVYDLVKKS

SEQ ID NO: 880793 - protein, 151 aa, Homo sapiens
MKTPNAQEAEGQQTRAAAGRATGSANMTKKKVSQKKQRGRPSSQPRRNIVGCRISHGWKEGDEPITQWKGTVLDQVPINPSLYLVKYDGIDCVYGLELHRDERVLSLKILSDRVASSHISDANLANTIIGKAVEHMFEGEHGSKDEWRGMG

SEQ ID NO: 880794 - protein, 258 aa, Homo sapiens; identical to SEQ ID NO: 880792

SEQ ID NO: 880795 - protein, 258 aa, Homo sapiens; identical to SEQ ID NO: 880792

SEQ ID NO: 880796 - protein, 165 aa, Homo sapiens
PAVDARQGMKTPNAQEAEGQQTRAAAGRATGSANMTKKKVSQKKQRGRPSSQPRRNIVGCRISHGWKEGDEPITQWKGTVLDQLLDDYKEGDLRIMPESSESPPTEREPGGVVDGLIGKHVEYTKEDGSKRIGMVIHQVEAKPSVYFIKFDDDFHIYVYDLVKKS

SEQ ID NO: 880797 - protein, 93 aa, Homo sapiens
PAVDARQGMKTPNAQEAEGQQTRAAAGRATGSANMTKKKVSQKKQRGRPSSQPRRNIVGCRISHGWKEGDEPITQWKGTVLDQLPETTGGSDK

SEQ ID NO: 880798 - protein, 33 aa, Homo sapiens
MTKKKVSQKKQRGRPSSQPRRNIVGCRISHGWK

SEQ ID NO: 880799 - protein, 428 aa, Homo sapiens
MDVVDSLLVNGSNITPPCELGLENETLFCLDQPRPSKEWQPAVQILLYSLIFLLSVLGNTLVITVLIRNKRMRTVTNIFLLSLAVSDLMLCLFCMPFNLIPNLLKDFIFGSAVCKTTTYFMGTSVSVSTFNLVAISLERYGAICKPLQSRVWQTKSHALKVIAATWCLSFTIMTPYPIYSNLVPFTKNNNQTANMCRFLLPNDVMQQSWHTFLLLILFLIPGIVMMVAYGLISLELYQGIKFEASQKKSAKERKPSTTSSGKYEDSDGCYLQKTRPPRKLELRQLSTGSSSRANRIRSNSSAANLMAKKRVIRMLIVIVVLFFLCWMPIFSANAWRAYDTASAERRLSGTPISFILLLSYTSSCVNPIIYCFMNKRFRLGFMATFPCCPNPGPPGARGEVGEEEEGGTTGASLSRFSYSHMSASVPPQ

SEQ ID NO: 880800 - protein, 175 aa, Homo sapiens
APPQTSVSGADGGSAACSWKFRLGCLLGAMESDFYLRYYVGHKGKFGHEFLEFEFRPDGKLRYANNSNYKNDVMIRKEAYVHKSVMEELKRIIDDSEITKEDDALWPPPDRVGRQELEIVIGDEHISFTTSKIGSLIDVNQSKDPEGLRVFYYLVQDLKCLVFSLIGLHFKIKPI

SEQ ID NO: 880801 - protein, 175 aa, Homo sapiens; identical to SEQ ID NO: 880800

SEQ ID NO: 880802 - protein, 161 aa, Homo sapiens
APPQTSVSGADGGSAACSWKFRLGCLLGAMESDFYLRYYVGHKGKFGHEFLEFEFRPDGKLRYANNSNYKNDVMIRKEAYVHKSVMEELKRIIDDSEITKEDDALWPPPDRVGRQELEIVIGDEHISFTTSKGSRRLTSILLSCPGPEVFGLQSYWITLQD

SEQ ID NO: 880803 - protein, 161 aa, Homo sapiens; identical to SEQ ID NO: 880802

SEQ ID NO: 880804 - protein, 161 aa, Homo sapiens; identical to SEQ ID NO: 880802

SEQ ID NO: 880805 - protein, 129 aa, Homo sapiens
APPQTSVSGADGGSAACSWKFRLGCLLGAMESDFYLRYYVGHKGKFGHEFLEFEFRPDGKLRYANNSNYKNDVMIRKEAYVHKSVMEELKRIIDDSEITKEDDALWPPPDRVGRQVCFIDYPVVQKSYK

SEQ ID NO: 880806 - protein, 136 aa, Homo sapiens
RRRKRQCRAQTAAVRLALGSSGSVVFWEPWRVTFICVTTWGTRASSATSSLECSGIISAHCNLCLLGSSDSPASASRIAGITGVLHHAQLIFVFVVEMAFHHVGQASLKLLTSGDPPALPSQSAVVTGVSRRILLV

SEQ ID NO: 880807 - protein, 138 aa, Homo sapiens
APPQTSVSGADGGSAACSWKFRLGCLLGAMESDFYLRYYVGHKGKFGHEFLEFEFRPDGKLRYANNSNYKNDVMIRKEELEIVIGDEHISFTTSKIGSLIDVNQSKDPEGLRVFYYLVQDLKCLVFSLIGLHFKIKPI

SEQ ID NO: 880808 - protein, 143 aa, Homo sapiens
APPQTSVSGADGGSAACSWKFRLGCLLGAMESDFYLRYYVGHKGKFGHEFLEFEFRPDGKLRYANNSNYKNDVMIRKEAYVHKSVMEELKRIIDDSEITKEDDALWPPPDRVGRQELEIVIGDEHISFTTSKIGSLIDVNQSK

SEQ ID NO: 880809 - protein, 143 aa, Homo sapiens; identical to SEQ ID NO: 880808

SEQ ID NO: 880810 - protein, 172 aa, Homo sapiens
APPQTSVSGADGGSAACSWKFRLGCLLGAMESDFYLRYYVGHKGKFGHEFLEFEFRPDGKLRYANNSNYKNDVMIRKEAYVHKSVMEELKRIIDDSEITKEDDALWPPPDRVGRQELEIVIGDEHISFTTSKGSRRLTSILLSCPGPEVFGLQSYWITLRLNIGVDMGGGWE

SEQ ID NO: 880811 - protein, 396 aa, Homo sapiens
MEFLKTCVLRRNACTAVCFWRSKVVQKPSVRRISTTSPRSTVMPAWVIDKYGKNEVLRFTQNMMMPIIHYPNEVIVKVHAASVNPIDVNMRSGYGATALNMKRDPLHVKIKGEEFPLTLGRDVSGVVMECGLDVKYFKPGDEVWAAVPPWKQGTLSEFVVVSGNEVSHKPKSLTHTQAASLPYVALTAWSAINKVGGLNDKNCTGKRVLILGASGGVGTFAIQVMKAWDAHVTAVCSQDASELVRKLGADDVIDYKSGSVEEQLKSLKPFDFILDNVGGSTETWAPDFLKKWSGATYVTLVTPFLLNMDRLGIADGMLQTGVTVGSKALKHFWKGVHYRWAFFMASGPCLDDIAELVDAGKIRPVIEQTFPFSKVPEAFLKVERGHARGKTVINVV

SEQ ID NO: 880812 - protein, 396 aa, Homo sapiens; identical to SEQ ID NO: 880811

SEQ ID NO: 880813 - protein, 172 aa, Homo sapiens [sequence omitted]

SEQ ID NO: 880814 - protein, 330 aa, Homo sapiens
RVTAPGGGGEMRLLALAAAALLARAPAPEVCAALNVTVSPGPVVDYLEGENATLLCHVSQKRRKDSLLAVRWFFAHSSDSQEALMVKMTKLRVVQYYGNFSRSAKRRRLRLLEEQRGALYRLSVLTLQPSDQGHYVCRVQEISRHRNKWTAWSNGSSATEMRVISLKASEESSFEKTKETWAFFEDLYVYAVLVCCVGILSILLFMLVIVWQSVFNKRKSRVRHYLVKCPQNSSGETVTSVTSLAPLQPKKGKRQKEKPDIPPPVPAKAPIAPTFHKPKLLKPQRKVTLPKIAEENLTYAELELIKPHRAAKGAPTSTVYAQILFEENKL

SEQ ID NO: 880815 - protein, 330 aa, Homo sapiens; identical to SEQ ID NO: 880814

SEQ ID NO: 880816 - protein, 345 aa, Homo sapiens
SGLGPGERGYDAACVARSRERGPGCRLRSSVMCARVRRRQVSLVSTRGAPWSQLQRGGVRTKMRTSSLVAGPPRKDRRKDSLLAVRWFFAHSSDSQEALMVKMTKLRVVQYYGNFSRSAKRRRLRLLEEQRGALYRLSVLTLQPSDQGHYVCRVQEISRHRNKWTAWSNGSSATEMRVISLKASEESSFEKTKETWAFFEDLYVYAVLVCCVGILSILLFMLVIVWQSVFNKRKSRVRHYLVKCPQNSSGETVTSVTSLAPLQPKKGKRQKEKPDIPPPVPAKAPIAPTFHKPKLLKPQRKVTLPKIAEENLTYAELELIKPHRAAKGAPTSTVYAQILFEENKL

SEQ ID NO: 880817 - protein, 233 aa, Homo sapiens
RVTAPGGGGEMRLLALAAAALLARAPAPEVCAALNVTVSPGPVVDYLEGENATLLCHVSQKRRKDSLLAVRWFFAHSSDSQEALMVKMTKLRVVQYYGNFSRSAKRRRLRLLEEQRGALYRLSVLTLQPSDQGHYVCRVQEISRHRNKWTAWSNGSSATEMRVISLKASEESSFEKTKETWAFFEDLYVYAVLVCCVGILSILLFMLVIVWQSVFNKRKSRVRHYLVKCPQNR

SEQ ID NO: 880818 - protein, 797 aa, Homo sapiens
MGNYKSRPTQTCTDEWKKKVSESYVITIERLEDDLQIKEKELTELRNIFGSDEAFSKVNLNYRTENGLSLLHLCCICGGKKSHIRTLMLKGLRPSRLTRNGFTALHLAVYKDNAELITSLLHSGADIQQVGYGGLTALHIATIAGHLEAADVLLQHGANVNIQDAVFFTPLHIAAYYGHEQVTRLLLKFGADVNVSGEVGDRPLHLASAKGFLNIAKLLMEEGSKADVNAQDNEDHVPLHFCSRFGHHDIVKYLLQSDLEVQPHVVNIYGDTPLHLACYNGKFEVAKEIIQISGTESLTKENIFSETAFHSACTYGKSIDLVKFLLDQNVININHQGRDGHTGLHSACYHGHIRLVQFLLDNGADMNLVACDPSRSSGEKDEQTCLMWAYEKGHDAIVTLLKHYKRPQDELPCNEYSQPGGDGSYVSVPSPLGKIKSMTKEKADILLLRAGLPSHFHLQLSEIEFHEIIGSGSFGKVYKGRCRNKIVAIKRYRANTYCSKSDVDMFCREVSILCQLNHPCVIQFVGACLNDPSQFAIVTQYISGGSLFSLLHEQKRILDLQSKLIIAVDVAKGMEYLHNLTQPIIHRDLNSHNILLYEDGHAVVADFGESRFLQSLDEDNMTKQPGNLRWMAPEVFTQCTRYTIKADVFSYALCLWEILTGEIPFAHLKPAAAAADMAYHHIRPPIGYSIPKPISSLLIRGWNACPEGRPEFSEVVMKLEECLCNIELMSPASSNSSGSLSPSSSSDCLVNRGGPGRSHVAALRSRFELEYALNARSYAALSQSAGQYSSQVCLWRR

SEQ ID NO: 880819 - protein, 298 aa, Homo sapiens
PSPCGLHFLIPWLTQDNAELITSLLHSGADIQQVGYGGLTALHIATIAGHLEAADVLLQHGANVNIQDAVFFTPLHIAAYYGHEQVTRLLLKFGADVNVSGEVGDRPLHLASAKGFLNIAKLLMEEGSKADVNAQDNEDHVPLHFCSRFGHHDIVKYLLQSDLEVQPHVVNIYGDTPLHLACYNGKFEVAKEIIQISGTESLTKENIFSETAFHSACTYGKSIDLVKFLLDQNVININHQGRDGHTGLHSACYHGHIRLVQFLLDNGADMNLVACDQRFCENVELAGFNAVLSSGFRQ

SEQ ID NO: 880820 - protein, 263 aa, Homo sapiens
MRAVRRGLREGGAMAAARDPPEVSLREATQRKLRRFSELRGKLVARGEFWDIVAITAADEKQELAYNQQLSEKLKRKELPLGVQYHVFVDPAGAKIGNGGSTLCALQCLEKLYGDKWNSFTILLIHSDEWKKKVSESYVITIERLEDDLQIKEKELTELRNIFGSDEAFSKVNLNYRTENGLSLLHLCCICGGKKSHIRTLMLKGLRPSRLTRNGFTALHLAVYKDNAELITSLLHSGADIQQVGYGGLTALHIATIAGHLEL

SEQ ID NO: 880821 - protein, 911 aa, Homo sapiens
MRAVRRGLREGGAMAAARDPPEVSLREATQRKLRRFSELRGKLVARGEFWDIVAITAADEKQELAYNQQLSEKLKRKELPLGVQYHVFVDPAGAKIGNGGSTLCALQCLEKLYGDKWNSFTILLIHSDEWKKKVSESYVITIERLEDDLQIKEKELTELRNIFGSDEAFSKVNLNYRTENGLSLLHLCCICGGKKSHIRTLMLKGLRPSRLTRNGFTALHLAVYKDNAELITSLLHSGADIQQVGYGGLTALHIATIAGHLEAADVLLQHGANVNIQDAVFFTPLHIAAYYGHEQVTRLLLKFGADVNVSGEVGDRPLHLASAKGFLNIAKLLMEEGSKADVNAQDNEDHVPLHFCSRFGHHDIVKYLLQSDLEVQPHVVNIYGDTPLHLACYNGKFEVAKEIIQISGTESLTKENIFSETAFHSACTYGKSIDLVKFLLDQNVININHQGRDGHTGLHSACYHGHIRLVQFLLDNGADMNLVACDPSRSSGEKDEQTCLMWAYEKGHDAIVTLLKHYKRPQDELPCNEYSQPGGDGSYVSVPSPLGKIKSMTKEKADILLLRAGLPSHFHLQLSEIEFHEIIGSGSFGKVYKGRCRNKIVAIKRYRANTYCSKSDVDMFCREVSILCQLNHPCVIQFVGACLNDPSQFAIVTQYISGGSLFSLLHEQKRILDLQSKLIIAVDVAKGMEYLHNLTQPIIHRDLNSHNILLYEDGHAVVADFGESRFLQSLDEDNMTKQPGNLRWMAPEVFTQCTRYTIKADVFSYALCLWEILTGEIPFAHLKPAAAAADMAYHHIRPPIGYSIPKPISSLLIRGWNACPEGRPEFSEVVMKLEECLCNIELMSPASSNSSGSLSPSSSSDCLVNRGGPGRSHVAALRSRFELEYALNARSYAALSQSAGQYSSQVCLWRR

SEQ ID NO: 880822 - protein, 911 aa, Homo sapiens; identical to SEQ ID NO: 880821

SEQ ID NO: 880823 - protein, 911 aa, Homo sapiens; identical to SEQ ID NO: 880821

SEQ ID NO: 880824 - protein, 911 aa, Homo sapiens; identical to SEQ ID NO: 880821

SEQ ID NO: 880825 - protein, 707 aa, Homo sapiens
MRAVRRGLREGGAMAAARDPPEVSLREATQRKLRRFSELRGKLVARGEFWDIVAITAADEKQELAYNQQLSEKLKRKELPLGVQYHVFVDPAGAKIGNGGSTLCALQCLEKLYGDKWNSFTILLIHSDEWKKKVSESYVITIERLEDDLQIKEKELTELRNIFGSDEAFSKVNLNYRTENGLSLLHLCCICGGKKSHIRTLMLKGLRPSRLTRNGFTALHLAVYKDNAELITSLLHSGADIQQVGYGGLTALHIATIAGHLEAADVLLQHGANVNIQDAVFFTPLHIAAYYGHEQVTRLLLKFGADVNVSGEVGDRPLHLASAKGFLNIAKLLMEEGSKADVNAQDNEDHVPLHFCSRFGHHDIVKYLLQSDLEVQPHVVNIYGDTPLHLACYNGKFEVAKEIIQISGTESLTKENIFSETAFHSACTYGKSIDLVKFLLDQNVININHQGRDGHTGLHSACYHGHIRLVQFLLDNGADMNLVACDPSRSSGEKDEQTCLMWAYEKGHDAIVTLLKHYKRPQDELPCNEYSQPGGDGSYVSVPSPLGKIKSMTKEKADILLLRAGLPSHFHLQLSEIEFHEIIGSGSFGKVYKGRCRNKIVAIKRYRANTYCSKSDVDMFCREVSILCQLNHPCVIQFVGACLNDPSQFAIVTQYISGGSLFSLLHEQKRILDLQSKLIIAVDVAKGMEYLHNLTQPIIHRDLNRAS

SEQ ID NO: 880826 - protein, 856 aa, Homo sapiens
MRAVRRGLREGGAMAAARDPPEVSLREATQRKLRRFSELRGKLVARGEFWDIVAITAADEKQELAYNQQLSEKLKRKELPLGVQYHVFVDPAGAKIGNGGSTLCALQCLEKLYGDKWNSFTILLIHSDEWKKKVSESYVITIERLEDDLQIKEKELTELRNIFGSDEAFSKVNLNYRTENGLSLLHLCCICGGKKSHIRTLMLKGLRPSRLTRNGFTALHLAVYKDNAELITSLLHSGADIQQVGYGGLTALHIATIAGHLEAADVLLQHGANVNIQDAVFFTPLHIAAYYGHEQVTRLLLKFGADVNVSGEVGDRPLHLASAKGFLNIAKLLMEEGSKADVNAQDNEDHVPLHFCSRFGHHDIVKYLLQSDLEVQPHVVNIYGDTPLHLACYNGKFEVAKEIIQISGTESLTKENIFSETAFHSACTYGKSIDLVKFLLDQNVININHQGRDGHTGLHSACYHGHIRLVQFLLDNGADMNLVACDPSRSSGEKDEQTCLMWAYEKGHDAIVTLLKHYKRPQDELPCNEYSQPGGDGSYVSVPSPLGKIKSMTKEKADILLLRAGLPSHFHLQLSEIEFHEIIGSGSFGKVYKGRCRNKIVAIKRYRANTYCSKSDVDMFCREVSILCQLNHPCVIQFVGACLNDPSQFAIVTQYISGGSLFSLLHEQKRILDLQSKLIIAVDVAKGMEYLHNLTQPIIHRDLNSHNILLYEDGHAVVADFGESRFLQSLDEDNMTKQPGNLRWMAPEVFTQCTRYTIKADVFSYALCLWEILTGEIPFAHLKPAAAAADMAYHHIRPPIGYSIPKPISSLLIRGWNACPEAKSRPSHYPVSSVYTETLKKKNEDRFGMWIEYLRR

SEQ ID NO: 880827 - protein, 508 aa, Homo sapiens
MRAVRRGLREGGAMAAARDPPEVSLREATQRKLRRFSELRGKLVARGEFWDIVAITAADEKQELAYNQQLSEKLKRKELPLGVQYHVFVDPAGAKIGNGGSTLCALQCLEKLYGDKWNSFTILLIHSDEWKKKVSESYVITIERLEDDLQIKEKELTELRNIFGSDEAFSKVNLNYRTENGLSLLHLCCICGGKKSHIRTLMLKGLRPSRLTRNGFTALHLAVYKDNAELITSLLHSGADIQQVGYGGLTALHIATIAGHLEAADVLLQHGANVNIQDAVFFTPLHIAAYYGHEQVTRLLLKFGADVNVSGEVGDRPLHLASAKGFLNIAKLLMEEGSKADVNAQDNEDHVPLHFCSRFGHHDIVKYLLQSDLEVQPHVVNIYGDTPLHLACYNGKFEVAKEIIQISGTESLTKENIFSETAFHSACTYGKSIDLVKFLLDQNVININHQGRDGHTGLHSACYHGHIRLVQFLLDNGADMNLVACDQRFCENVELAGFNAVLSSGFRQ

SEQ ID NO: 880828 - protein, 717 aa, Homo sapiens
MRAVRRGLREGGAMAAARDPPEVSLREATQRKLRRFSELRGKLVARGEFWDIVAITAADEKQELAYNQQLSEKLKRKELPLGVQYHVFVDPAGAKIGNGGSTLCALQCLEKLYGDKWNSFTILLIHSDEWKKKVSESYVITIERLEDDLQIKEKELTELRNIFGSDEAFSKVNLNYRTENGLSLLHLCCICGGKKSHIRTLMLKGLRPSRLTRNGFTALHLAVYKDNAELITSLLHSGADIQQVGYGGLTALHIATIAGHLEAADVLLQHGANVNIQDAVFFTPLHIAAYYGHEQVTRLLLKFGADVNVSGEVGDRPLHLASAKGFLNIAKLLMEEGSKADVNAQDNEDHVPLHFCSRFGHHDIVKYLLQSDLEVQPHVVNIYGDTPLHLACYNGKFEVAKEIIQISGTESLTKENIFSETAFHSACTYGKSIDLVKFLLDQNVININHQGRDGHTGLHSACYHGHIRLVQFLLDNGADMNLVACDPSRSSGEKDEQTCLMWAYEKGHDAIVTLLKHYKRPQDELPCNEYSQPGGDGSYVSVPSPLGKIKSMTKEKADILLLRAGLPSHFHLQLSEIEFHEIIGSGSFGKVYKGRCRNKIVAIKRYRANTYCSKSDVDMFCREVSILCQLNHPCVIQFVGACLNDPSQFAIVTQYISGGSLFSLLHEQKRILDLQSKLIIAVDVAKGMEYLHNLTQPIIHRDLNRCCTGWLSCYHPD

SEQ ID NO: 880829 - protein, 704 aa, Homo sapiens
MRAVRRGLREGGAMAAARDPPEVSLREATQRKLRRFSELRGKLVARGEFWDIVAITAADEKQELAYNQQLSEKLKRKELPLGVQYHVFVDPAGAKIGNGGSTLCALQCLEKLYGDKWNSFTILLIHSDEWKKKVSESYVITIERLEDDLQIKEKELTELRNIFGSDEAFSKVNLNYRTENGLSLLHLCCICGGKKSHIRTLMLKGLRPSRLTRNGFTALHLAVYKDNAELITSLLHSGADIQQVGYGGLTALHIATIAGHLEAADVLLQHGANVNIQDAVFFTPLHIAAYYGHEQVTRLLLKFGADVNVSGEVGDRPLHLASAKGFLNIAKLLMEEGSKADVNAQDNEDHVPLHFCSRFGHHDIVKYLLQSDLEVQPHVVNIYGDTPLHLACYNGKFEVAKEIIQISGTESLTKENIFSETAFHSACTYGKSIDLVKFLLDQNVININHQGRDGHTGLHSACYHGHIRLVQFLLDNGADMNLVACDPSRSSGEKDEQTCLMWAYEKGHDAIVTLLKHYKRPQDELPCNEYSQPGGDGSYVSVPSPLGKIKSMTKEKADILLLRAGLPSHFHLQLSEIEFHEIIGSGSFGKVYKGRCRNKIVAIKRYRANTYCSKSDVDMFCREVSILCQLNHPCVIQFVGACLNDPSQFAIVTQYISGGSLFSLLHEQKRYGSFVLIYPWTFRRNYSCNTSEGFPLDEPSPFEI

SEQ ID NO: 880830 - protein, 513 aa, Homo sapiens
MQRTFAWLLDRVQHLGAPVTLRASYLEIYNEQVRDLLSLGSPRPLPVRWNKTRGFYVEQLRVVEFGSLEALMELLQTGLSRRRNSAHTLNQASSRSHALLTLYISRQTAQQMPSVDPGEPPVGGKLCFVDLAGSEKVAATGSRGELMLEANSINRSLLALGHCISLLLDPQRKQSHIPFRDSKLTKLLADSLGGRGVTLMVACVSPSAQCLPETLSTLRYASRAQRVTTRPQAPKSPVAKQPQRLETEMLQLQEENRRLQFQLDQMDCKASGLSGARVAWAQRNLYGMLQEFMLENERLRKEKSQLQNSRDLAQNEQRILAQQVHALERRLLSACYHHQQGPGLTPPCPCLMAPAPPCHALPPLYSCPCCHICPLCRVPLAHWACLPGEHHLPQVLDPEASGGRPPSARPPPWAPPCSPGSAKCPRERSHSDWTQTRVLAEMLTEEEVVPSAPPLPVRPPKTSPGLRGGAGVPNLAQRLEALRDQIGSSLRRGRSQPPCSEGARSPGQVLPPH

SEQ ID NO: 880831 - protein, 402 aa, Homo sapiens [sequence omitted]

SEQ ID NO: 880832 - protein, 402 aa, Homo sapiens [sequence omitted]

SEQ ID NO: 880833 - protein, 293 aa, Homo sapiens [sequence omitted]

SEQ ID NO: 880834 - protein, 318 aa, Homo sapiens
MRGIERQPMRKRSASFQGAWIKGQKRRWGLLSVRSGDGWTQKDPLPSPSSLPSQVRDLLSLGSPRPLPVRWNKTRGFYVEQLRVVEFGSLEALMELLQTGLSRRRNSAHTLNQASSRSHALLTLYISRQTAQQMPSVDPGEPPVGGKLCFVDLAGSEKVAATGSRGELMLEANSINRSLLALGHCISLLLDPQRKQSHIPFRDSKLTKLLADSLGGRGVTLMVACVSPSAQCLPETLSTLRYASRAQRVTTRPQAPKSPVAKQPQRLETEMLQLQEENRRLQFQLDQMDCKGKKRASCRIAETWPRMSSASWPSRSMH

SEQ ID NO: 880835 - protein, 385 aa, Homo sapiens
MPSVDPGEPPVGGKLCFVDLAGSEKVAATGSRGELMLEANSINRSLLALGHCISLLLDPQRKQSHIPFRDSKLTKLLADSLGGRGVTLMVACVSPSAQCLPETLSTLRYASRAQRVTTRPQAPKSPVAKQPQRLETEMLQLQEENRRLQFQLDQMDCKASGLSGARVAWAQRNLYGMLQEFMLENERLRKEKSQLQNSRDLAQNEQRILAQQVHALERRLLSACYHHQQGPGLTPPCPCLMAPAPPCHALPPLYSCPCCHICPLCRVPLAHWACLPGEHHLPQVLDPEASGGRPPSARPPPWAPPCSPGSAKCPRERSHSDWTQTRVLAEMLTEEEVVPSAPPLPVRPPKTSPGLRGEEGREGGAPNVLCDLGVEPTLSRPQSYL

SEQ ID NO: 880836 - protein, 324 aa, Homo sapiens
  misc_feature (311)..(311): Xaa can be any naturally occurring amino acid
MPSVDPGEPPVGGKLCFVDLAGSEKVAATGSRGELMLEANSINRSLLALGHCISLLLDPQRKQSHIPFRDSKLTKLLADSLGGRGVTLMVACVSPSAQCLPETLSTLRYASRAQRVTTRPQAPKSPVAKQPQRLETEMLQLQEENRRLQFQLDQMDCKASGLSGARVAWAQRNLYGMLQEFMLENERLRKEKSQLQNSRDLAQNEQRILAQQVHALERRLLSACYHHQQGPGLTPPCPCLMAPAPPCHVSLTAQPGGVTSRDVMEPLTHLFAGTATPLLLPLLPHLPTVSSAPGPLGLPARGAPPAPDKSXGCSLGILQGAGKE

SEQ ID NO: 880837 - protein, 115 aa, Homo sapiens
VDTLRTLAAAGPCTREASPLCLLPSPAGSWPDPTVSLLDGPSSPLPCTATPLLLPLLPHLPTVSSAPGPLGLPARGAPPAPGRKGHGGSEGRLGELETLIQESSIQSPRDSRAAG

SEQ ID NO: 880838 - protein, 535 aa, Homo sapiens
MRGIERQPMRKRSASFQGAWIKGQKRRWGLLSVRSGDGWTQKDPLPSPSSLPSQVRDLLSLGSPRPLPVRWNKTRGFYVEQLRVVEFGSLEALMELLQTGLSRRRNSAHTLNQASSRSHALLTLYISRQTAQQMPSVDPGEPPVGGKLCFVDLAGSEKVAATGSRGELMLEANSINRSLLALGHCISLLLDPQRKQSHIPFRDSKLTKLLADSLGGRGVTLMVACVSPSAQCLPETLSTLRYASRAQRVTTRPQAPKSPVAKQPQRLETEMLQLQEENRRLQFQLDQMDCKASGLSGARVAWAQRNLYGMLQEFMLENERLRKEKSQLQNSRDLAQNEQRILAQQVHALERRLLSACYHHQQGPGLTPPCPCLMAPAPPCHALPPLYSCPCCHICPLCRVPLAHWACLPGEHHLPQVLDPEASGGRPPSARPPPWAPPCSPGSAKCPRERSHSDWTQTRVLAEMLTEEEVVPSAPPLPVRPPKTSPGLRGGAGVPNLAQRLEALRDQIGSSLRRGRSQPPCSEGARSPGQVLPPH

SEQ ID NO: 880839 - protein, 385 aa, Homo sapiens; identical to SEQ ID NO: 880835

SEQ ID NO: 880840 - protein, 318 aa, Homo sapiens; identical to SEQ ID NO: 880834

SEQ ID NO: 880841 - protein, 169 aa, Homo sapiens
MSRSQPSKELSPHPEPGLQPKPCPAHPLHQPSNCHCISLLLDPQRKQSHIPFRDSKLTKLLADSLGGRGVTLMVACVSPSAQCLPETLSTLRYASRAQRVTTRPQAPKSPVAKQPQRLETEMLQLQEENRRLQFQLDQMDCKGKKRASCRIAETWPRMSSASWPSRSMH

SEQ ID NO: 880842 - protein, 103 aa, Homo sapiens
VDTLRTLAAAGPCTREASPLCLLPSPAGSWPDPTVSLLDGPSSPLPCTATPLLLPLLPHLPTVSSAPGPLGLPARGAPPAPASLLGSEESEIDQTWFLLSGGF

SEQ ID NO: 880843 - protein, 137 aa, Homo sapiens
QRAGAAREATMRGAGAILRPAARGARDLNPRRDISSWLAQWFPRTPARSVVALKTPIKVELVAGKTYRWCVCGRSKKQPFCDGSHFFQRTGLSPLKFKAQETRMVALCTCKATQRPPYCDGTHRSERVQKAEVGSPL

SEQ ID NO: 880844 - protein, 137 aa, Homo sapiens; identical to SEQ ID NO: 880843

SEQ ID NO: 880845 - protein, 122 aa, Homo sapiens
QRAGAAREATMRGAGAILRPAARGARVSTPALHQPPSRTPAGPLPAPTPAPARPSIPELPARPAGVWLASAHRLFPSASPCQDLRSQHLLLRPFSYPLIPPSPLQPCHLLLPRWPPVSFPFH

SEQ ID NO: 880846 - protein, 170 aa, Homo sapiens
PECLHGFEISLSKAHGPMVSWGTVLLGGIRSASCRGNLPHTQASGKLGRVAGRTVLPGLELTLSPSSSLAQAQWFPRTPARSVVALKTPIKVELVAGKTYRWCVCGRSKKQPFCDGSHFFQRTGLSPLKFKAQETRMVALCTCKATQRPPYCDGTHRSERVQKAEVGSPL

SEQ ID NO: 880847 - protein, 137 aa, Homo sapiens; identical to SEQ ID NO: 880843

SEQ ID NO: 880848 - protein, 116 aa, Homo sapiens
MYGDMIPVEIKEAGGTTTSNNPEEATLQNLLAQESCCKFPSSQELEDASCCSLKKDSNPMVICQLKGGTQMLCIDNSRTRELKALHLVPQYQDQNNYLQSGTKLINKKNYVIYVSW

SEQ ID NO: 880849 - protein, 560 aa, Homo sapiens
SGFLSLTLPPSPTANGRLRLGPAHAPSRSLHAAAAPAAPGARPRHPAPPPCAMEEGPLPGGLPSPEDAMVTELLSPEGPFASENIGLKAPVKYEEDEFHVFKEAYLGPADPKEPVLHAFNPALGADCKGQVKAKLAGGDSDGGELLGEYPGIPELSALEDVALLQAPQPPACNVHFLSSLLPAHRSPAVLPLGAWVLEGASHPGVRMIPVEIKEAGGTTTSNNPEEATLQNLLAQESCCKFPSSQELEDASCCSLKKDSNPMVICQLKGGTQMLCIDNSRTRELKALHLVPQYQDQNNYLQSDVPKPMTALVGRFLPASTKLNLITQQLEGALPSVVNGSAFPSGSTLPGPPKITLAGYCDCFASGDFCNNCNCNNCCNNLHHDIERFKAIKACLGRNPEAFQPKIGKGQLGNVKPQHNKGCNCRRSGCLKNYCECYEAQIMCSSICKCIGCKNYEESPERKTLMSMPNYMQTGGLEGSHYLPPTKFSGLPRFSHDRRPSSCISWEVVEATCACLLAQGEEAEKEHCSKCLAEQMILEEFGRCLSQILHTEFKSKGLKME

SEQ ID NO: 880850 - protein, 563 aa, Homo sapiens
SGFLSLTLPPSPTANGRLRLGPAHAPSRSLHAAAAPAAPGARPRHPAPPPCAMEEGPLPGGLPSPEDAMVTELLSPEGPFASENIGLKAPVKYEEDEFHVFKEAYLGPADPKEPVLHAFNPALGADCKGQVKAKLAGGDSDGGELLGEYPGIPELSALEDVALLQAPQPPACNVHFLSSLLPAHRSPAVLPLGAWVLEGASHPGVRMIPVEIKEAGGTTTSNNPEEATLQNLLAQESCCKFPSSQELEDASCCSLKKDSNPMVICQLKGGTQMLCIDNSRTRELKALHLVPQYQDQNNYLQSDVPKPMTALVGRFLPASTKLNLITQQLEGALPSVVNGSAFPSGSTLPGPPKITLAGYCDCFASGDFCNNCNCNNCCNNLHHDIERFKAIKACLGRNPEAFQPKIGKGQLGNVKPQHNKGCNCRRSGCLKNYCECYEAQIMCSSICKCIGCKNYEESPERKTLMSMPNYMQTGGLEGSHYLPPTKFSGLPRFSHDRRPSSCISWEVVEATCACLLAQGEEAEKEHCSKCLAEQMILEEFGRNKFSGWAVVIPLKISRELLNT

SEQ ID NO: 880851 - protein, 207 aa, Homo sapiens
RVPVPHPSPFSNRQRPPAPEARPTPHPARSTLRQPRRPQVRGPRHPAPPPCAMEEGPLPGGLPSPEDAMVTELLSPEGPFASENIGLKAPVKYEEDEFHVFKEAYLGPADPKEPVLHAFNPALGADCKGQVKAKLAGGDSDGGELLGEYPGIPELSALEDVALLQAPQPPACNVHFLSSLLPAHRSPRGVAPGAPGSWKEPPTRASA

SEQ ID NO: 880852 - protein, 560 aa, Homo sapiens; identical to SEQ ID NO: 880849

SEQ ID NO: 880853 - protein, 207 aa, Homo sapiens; identical to SEQ ID NO: 880851

SEQ ID NO: 880854 - protein, 223 aa, Homo sapiens [sequence omitted]

SEQ ID NO: 880855 - protein, 174 aa, Homo sapiens [sequence omitted]

SEQ ID NO: 880856 - protein, 496 aa, Homo sapiens
MWQIVFFTLSCDLVLAAAYNNFRKSMDSIGKKQYQVQHGSCSYTFLLPEMDNCRSSSSPYVSNAVQRDAPLEYDDSVQRLQVLENIMENNTQWLMKLENYIQDNMKKEMVEIQQNAVQNQTAVMIEIGTNLLNQTAEQTRKLTDVEAQVLNQTTRLELQLLEHSLSTNKLEKQILDQTSEINKLQDKNSFLEKKVLAMEDKHIIQLQSIKEEKDQLQVLVSKQNSIIEELEKKIVTATVNNSVLQKQQHDLMETVNNLLTMMSTSNSAKDPTVAKEEQISFRDCAEVFKSGHTTNGIYTLTFPNSTEEIKAYCDMEAGGGGWTIIQRREDGSVDFQRTWKEYKVGFGNPSGEYWLGNEFVSQLTNQQRYVLKIHLKDWEGNEAYSLYEHFYLSSEELNYRIHLKGLTGTAGKISSISQPGNDFSTKDGDNDKCICKCSQMLTGGWWFDACGPSNLNGMYYPQRQNTNKFNGIKWYYWKGSGYSLKATTMMIRPADF

SEQ ID NO: 880857 - protein, 496 aa, Homo sapiens; identical to SEQ ID NO: 880856

SEQ ID NO: 880858 - protein, 444 aa, Homo sapiens
MWQIVFFTLSCDLVLAAAYNNFRKSMDSIGKKQYQVQHGSCSYTFLLPEMDNCRSSSSPYVSNAVQRDAPLEYDDSVQRLQVLENIMENNTQWLMKVLNQTTRLELQLLEHSLSTNKLEKQILDQTSEINKLQDKNSFLEKKVLAMEDKHIIQLQSIKEEKDQLQVLVSKQNSIIEELEKKIVTATVNNSVLQKQQHDLMETVNNLLTMMSTSNSAKDPTVAKEEQISFRDCAEVFKSGHTTNGIYTLTFPNSTEEIKAYCDMEAGGGGWTIIQRREDGSVDFQRTWKEYKVGFGNPSGEYWLGNEFVSQLTNQQRYVLKIHLKDWEGNEAYSLYEHFYLSSEELNYRIHLKGLTGTAGKISSISQPGNDFSTKDGDNDKCICKCSQMLTGGWWFDACGPSNLNGMYYPQRQNTNKFNGIKWYYWKGSGYSLKATTMMIRPADF

SEQ ID NO: 880859 - protein, 392 aa, Homo sapiens
MKKEMVEIQQNAVQNQTAVMIEIGTNLLNQTAEQTRKLTDVEAQVLNQTTRLELQLLEHSLSTNKLEKQILDQTSEINKLQDKNSFLEKKVLAMEDKHIIQLQSIKEEKDQLQVLVSKQNSIIEELEKKIVTATVNNSVLQKQQHDLMETVNNLLTMMSTSNSAKDPTVAKEEQISFRDCAEVFKSGHTTNGIYTLTFPNSTEEIKAYCDMEAGGGGWTIIQRREDGSVDFQRTWKEYKVGFGNPSGEYWLGNEFVSQLTNQQRYVLKIHLKDWEGNEAYSLYEHFYLSSEELNYRIHLKGLTGTAGKISSISQPGNDFSTKDGDNDKCICKCSQMLTGGWWFDACGPSNLNGMYYPQRQNTNKFNGIKWYYWKGSGYSLKATTMMIRPADF

SEQ ID NO: 880860 - protein, 153 aa, Homo sapiens
MWQIVFFTLSCDLVLAAAYNNFRKSMDSIGKKQYQVQHGSCSYTFLLPEMDNCRSSSSPYVSNAVQRDAPLEYDDSVQRLQVLENIMENNTQWLMKLENYIQDNMKKEMVEIQQNAVQNQTAVMIEIGTNLLNQTAEQTRKLTDVEAQVSNAT

SEQ ID NO: 880861 - protein, 123 aa, Homo sapiens
MWQIVFFTLSCDLVLAAAYNNFRKSMDSIGKKQYQVQHGSCSYTFLLPEMDNCRSSSSPYVSNAVQRDAPLEYDDSVQRLQVLENIMENNTQWLMKGKKSICLCEHAIKISLAAAQVLTTKKK

SEQ ID NO: 880862 - protein, 130 aa, Homo sapiens
MWQIVFFTLSCDLVLAAAYNNFRKSMDSIGKKQYQVQHGSCSYTFLLPEMDNCRSSSSPYVSNAVQRDAPLEYDDSVQRLQVLENIMENNTQWLMKQRESKLLNATVFKTGGRRIRRKLESRIKTSDTFS

SEQ ID NO: 880863 - protein, 336 aa, Homo sapiens
MLQRGLWPWRTRLLPTPGTWRPARPWPLPPPPQVLRVKLCGNVKYYQSHHYSTVVPPDEITVIYRHGLPLVTLTLPSRKERCQFVVKPMLSTVGSFLQDLQNEDKGIKTAAIFTADGNMISASTLMDILLMNDFKLVINKIAYDVQCPKREKPSNEHTAEMEHMKSLVHRLFTILHLEESQKKREHHLLEKIDHLKEQLQPLEQVKAGIEAHSEAKTSGLLWAGLALLSIQGGALAWLTWWVYSWDIMEPVTYFITFANSMVFFAYFIVTRQDYTYSAVKSRQFLQFFHKKSKQQHFDVQQYNKLKEDLAKAKESLKQARHSLCLQMQVEELNEKN

SEQ ID NO: 880864 - protein, 201 aa, Homo sapiens
VTRQDYTYSAVKSRQKKPSNEHTAEMEHMKSLVHRLFTILHLEESQKKREHHLLEKIDHLKEQLQPLEQVKAGIEAHSEAKTSGLLWAGLALLSIQGGALAWLTWWVYSWDIMEPVTYFITFANSMVFFAYFIVTRQDYTYSAVKSRQFLQFFHKKSKQQHFDVQQYNKLKEDLAKAKESLKQARHSLCLQMQVEELNEKN

SEQ ID NO: 880865 - protein, 105 aa, Homo sapiens
NISLIHLPSFALVLLSQVSFLQRHYVHSKHVVFFSLSFFFKDYTYSAVKSRQFLQFFHKKSKQQHFDVQQYNKLKEDLAKAKESLKQARHSLCLQMQVEELNEKN

SEQ ID NO: 880866 - protein, 129 aa, Homo sapiens
PKLEPRRAERAGGAGAPTARSHQALTRSPAEGGCAADACGSRAPGAGGCSRGASGRGARGCCRPLAPGAQRARGRCRLRPSLCLPLSAVSLCYRGWTVLTRSRLTATSLPDSPASACRVPGIAGARRHA

SEQ ID NO: 880867 - protein, 137 aa, Homo sapiens
  misc_feature (135)..(135): Xaa can be any naturally occurring amino acid
ADMLQPLEQVKAGIEAHSEAKTSGLLWAGLALLSIQGGALAWLTWWVYSWDIMEPVTYFITFANSMVFFAYFIVTRQDYTYSAVKSRQFLQFFHKKSKQQHFDVQQYNKLKEDLAKHKESLKQAVCFTVYRAIGXSR

SEQ ID NO: 880868 - protein, 336 aa, Homo sapiens; identical to SEQ ID NO: 880863

SEQ ID NO: 880869 - protein, 355 aa, Homo sapiens
  misc_feature (22)..(22): Xaa can be any naturally occurring amino acid
GEAQRMLHRGLWPWCTRLLPTXWDHGWPSGRPCVCGLLDLLNTQGFSACRTHAVGRIVIHTYQFIDAILVPSCATVSQITVIYRHGLPLVTLTLPSRKERCQFVVKPMLSTVGSFLQDLQNEDKGIKTAAIFTADGNMISASTLMDILLMNDFKLVINKIAYDVQCPKREKPSNEHTAEMEHMKSLVHRLFTILHLEESQKKREHHLLEKIDHLKEQLQPLEQVKAGIEAHSEAKTSGLLWAGLALLSIQGGALAWLTWWVYSWDIMEPVTYFITFANSMVFFAYFIVTRQDYTYSAVKSRQFLQFFHKKSKQQHFDVQQYNKLKEDLAKAKESLKQARHSLCLQMQVEELNEKN

SEQ ID NO: 880870 - protein, 272 aa, Homo sapiens
MLQRGLWPWRTRLLPTPGTWRPARPWPLPPPPQVLRVKLCGNVKYYQSHHYSTVVPPDEITVIYRHGLPLVTLTLPSRKERCQFVVKPMLSTVGSFLQDLQNEDKGIKTAAIFTADGNMISASTLMDILLMNDFKLVINKIAYDVQCPKREKPSNEHTAEMEHMKSLVHRLFTILHLEESQKKREHHLLEKIDHLKEQLQPLEQVKAGIEAHSEAKTSGLLWAGLALLSIQGGALAWLTWIILTQLLRVGNFFSSSTRNQSNSTLMCSNTTS

SEQ ID NO: 880871 - protein, 104 aa, Homo sapiens [sequence omitted]

SEQ ID NO: 880872 - protein, 175 aa, Homo sapiens
MLPPMALPSVSWMLLSCLILLCQVQGEETQKELPSPRISCPKGSKAYGSPCYALFLSPKSWMDADLACQKRPSGKLVSVLSGAEGSFVSSLVRSISNSYSYIWIGLHDPTQGSEPDGDGWEWSSTDVMNYFAWEKNPSTILNPGHCGSLSRSTGFLKWKDYNCDAKLPYVCKFKD

SEQ ID NO: 880873 - protein, 129 aa, Homo sapiens
MLPPMALPSVSWMLLSCLILLCQVQGEETQKELPSPRISCPKGSKAYGSPCYALFLSPKSWMDADGSEPDGDGWEWSSTDVMNYFAWEKNPSTILNPGHCGSLSRSTGFLKWKDYNCDAKLPYVCKFKD

SEQ ID NO: 880874 - protein, 100 aa, Homo sapiens
MKLLAATVLLLTICSLEGALVRRQAKEPCVESLVSQYFQTVTDYGKDLMEKVKSPELQAEAKSYFEKSKEQLTPLIKKAGTELVNFLSYFVELGTQPATQ

SEQ ID NO: 880875 - protein, 100 aa, Homo sapiens; identical to SEQ ID NO: 880874

SEQ ID NO: 880876 - protein, 114 aa, Homo sapiens
PLAKGDFSKPLFGYARFPSSHVFNAASECNSPPKAEWVRGPPKVDGSIAGYQFRHRETLARAALPTVTNMKAARSNLCLLPSPICKPLKELWFGRQAKEPMCGEPLVSSVLPRP

SEQ ID NO: 880877 - protein, 94 aa, Homo sapiens
  misc_feature (4)..(4): Xaa can be any naturally occurring amino acid
KKIXHQGQETLARGRPPHCYQHESCSQQPVPTPLTHLQALEGALVRKTGKGAHVWRAPGFLSTSQTVTDYGKDLMEKVKSPELFRPRPSLTVLL

SEQ ID NO: 880878 - protein, 100 aa, Homo sapiens; identical to SEQ ID NO: 880874

SEQ ID NO: 880879 - protein, 92 aa, Homo sapiens
AQTPRTETLARGRPPHCYQHESCSQQPVPTPLTHLQALEGALVRKTGKGAHVWRAPGFLSTSQTVTDYGKDLMEKVKSPELFRPRPSLTVLL

SEQ ID NO: 880880 - protein, 92 aa, Homo sapiens; identical to SEQ ID NO: 880879

SEQ ID NO: 880881 - protein, 92 aa, Homo sapiens; identical to SEQ ID NO: 880879

SEQ ID NO: 880882 - protein, 92 aa, Homo sapiens; identical to SEQ ID NO: 880879

SEQ ID NO: 880883 - protein, 94 aa, Homo sapiens; identical to SEQ ID NO: 880877
  misc_feature (4)..(4): Xaa can be any naturally occurring amino acid

SEQ ID NO: 880884 - protein, 100 aa, Homo sapiens; identical to SEQ ID NO: 880874

SEQ ID NO: 880885 - protein, 100 aa, Homo sapiens; identical to SEQ ID NO: 880874

SEQ ID NO: 880886 - protein, 100 aa, Homo sapiens; identical to SEQ ID NO: 880874

SEQ ID NO: 880887 - protein, 100 aa, Homo sapiens; identical to SEQ ID NO: 880874

SEQ ID NO: 880888 - protein, 100 aa, Homo sapiens; identical to SEQ ID NO: 880874

SEQ ID NO: 880889 - protein, 100 aa, Homo sapiens; identical to SEQ ID NO: 880874

SEQ ID NO: 880890 - protein, 100 aa, Homo sapiens; identical to SEQ ID NO: 880874

SEQ ID NO: 880891 - protein, 100 aa, Homo sapiens; identical to SEQ ID NO: 880874

SEQ ID NO: 880892 - protein, 100 aa, Homo sapiens; identical to SEQ ID NO: 880874

SEQ ID NO: 880893 - protein, 100 aa, Homo sapiens; identical to SEQ ID NO: 880874

SEQ ID NO: 880894 - protein, 72 aa, Homo sapiens
NSAIMAGEAQTPRTETLARAALPTVTNMKAARSNLCLLPSPICKPLKELWFGRQAKEPMCGEPLVSSVLPRP

SEQ ID NO: 880895 - protein, 143 aa, Homo sapiens
MKAARSNLCLLPSPICKPLKVGVIWRGGQKGECAGGYSYLSACALISRSGNQRAQKEDHSLSKAQKAHPKIWLDTFLGRGQRAGVGTGRGMAGGQDSLLWTQLKRGVCVCVCVCVCGQELWFGRQAKEPMCGEPLVSSVLPRP

SEQ ID NO: 880896 - protein, 149 aa, Homo sapiens
MKAARSNLCLLPSPICKPLKVGVIWRGGQKGECAGGYSYLSACALISRSGNQRAQKEDHSLSKAQKAHPKIWLDTFLGRGQRAGVGTGRGMAGGQDSLLWTQLKRGAHVWRAPGFLSTSQTVTDYGKDLMEKVKSPELFRPRPSLTVLL

SEQ ID NO: 880897 - protein, 143 aa, Homo sapiens; identical to SEQ ID NO: 880895

SEQ ID NO: 880898 - protein, 40 aa, Homo sapiens
MTNPSEGTVSRTGTEIKRRFLWLHGSVEKPGSHQVPCKAW

SEQ ID NO: 880899 - protein, 347 aa, Homo sapiens
MGARGAPSRRRQAGRRLRYLPTGSFPFLLLLLLLCIQLGGGQKKKENLLAEKVEQLMEWSSRRSIFRMNGDKFRKFIKAPPRNYSMIVMFTALQPQRQCSVCRQANEEYQILANSWRYSSAFCNKLFFSMVDYDEGTDVFQQLNMNSAPTFMHFPPKGRPKRADTFDLQRIGFAAEQLAKWIADRTDVHIRVFRPPNYSGTIALALLVSLVGGLLYLRRNNLEFIYNKTGWAMVSLCIVFAMTSGQMWNHIRGPPYAHKNPHNGQVSYIHGSSQAQFVAESHIILVLNAAITMGMVLLNEAATSKGDVGKRRIICLVGLGLVVFFFSFLLSIFRSKYHGYPYSFLIK

SEQ ID NO: 880900 - protein, 347 aa, Homo sapiens; identical to SEQ ID NO: 880899

SEQ ID NO: 880901 - protein, 347 aa, Homo sapiens; identical to SEQ ID NO: 880899

SEQ ID NO: 880902 - protein, 348 aa, Homo sapiens
MGARGAPSRRRQAGRRLRYLPTGSFPFLLLLLLLCIQLGGGQKKKENLLAEKVEQLMEWSSRRSIFRMNGDKFRKFIKAPPRNYSMIVMFTALQPQRQCSVCRQANEEYQILANSWRYSSAFCNKLFFSMVDYDEGTDVFQQLNMNSAPTFMHFPPKGRPKRADTFDLQRIGFAAEQLAKWIADRTDVHIRVFRPPNYSGTIALALLVSLVGGLLYLRRNNLEFIYNKTGWAMVSLCIVFAMTSGQMWNHIRGPPYAHKNPHNGQVSYIHGSSQAQFVAESHIILVLNAAITMGMVLLNEAATSKGDVGKRRIICLVGLGLVVFFFSFLLSIFRSKYHGYPYSDLDFE

SEQ ID NO: 880903 - protein, 348 aa, Homo sapiens; identical to SEQ ID NO: 880902

SEQ ID NO: 880904 - protein, 348 aa, Homo sapiens; identical to SEQ ID NO: 880902

SEQ ID NO: 880905 - protein, 348 aa, Homo sapiens; identical to SEQ ID NO: 880902

SEQ ID NO: 880906 - protein, 347 aa, Homo sapiens; identical to SEQ ID NO: 880899

SEQ ID NO: 880907 - protein, 348 aa, Homo sapiens; identical to SEQ ID NO: 880902

SEQ ID NO: 880908 - protein, 359 aa, Homo sapiens
MGARGAPSRRRQAGRRLRYLPTGSFPFLLLLLLLCIQLGGGQKKKENLLAEKVEQLMEWSSRRSIFRMNGDKFRKFIKAPPRNYSMIVMFTALQPQRQCSVCRQANEEYQILANSWRYSSAFCNKLFFSMVDYDEGTDVFQQLNMNSAPTFMHFPPKGRPKRADTFDLQRIGFAAEQLAKWIADRTDVHIRVFRPPNYSGTIALALLVSLVGGLLYLRRNNLEFIYNKTGWAMVSLCIVFAMTSGQMWNHIRGPPYAHKNPHNGQVSYIHGSSQAQFVAESHIILVLNAAITMGMVLLNEAATSKGDVGKRRIICLVGLGLVVFFFSFLLSIFRSKYHGYPYREKSSDKNVYQKTDTWS

SEQ ID NO: 880909 - protein, 276 aa, Homo sapiens
MGARGAPSRRRQAGRRLRYLPTGSFPFLLLLLLLCIQLGGGQKKKENLLAEKVEQLMEWSSRRSIFRMNGDKFRKFIKAPPRNYSMIVMFTALQPQRQCSVCRQANEEYQILANSWRYSSAFCNKLFFSMVDYDEGTDVFQQLNMNSAPTFMHFPPKGRPKRADTFDLQRIGFAAEQLAKWIADRTDVHIRVFRPPNYSGTIALALLVSLVGGLLYLRRNNLEFIYNKTGWAMVSLCIVFAMTSGQMWNHIRGPPYAHKNPHNGQVMPLSPWGWFF

SEQ ID NO: 880910 - protein, 269 aa, Homo sapiens
MGARGAPSRRRQAGRRLRYLPTGSFPFLLLLLLLCIQLGGGQKKKENLLAEKVEQLMEWSSRRSIFRMNGDKFRKFIKAPPRNYSMIVMFTALQPQRQCSVCRQANEEYQILANSWRYSSAFCNKLFFSMVDYDEGTDVFQQLNMNSAPTFMHFPPKGRPKRADTFDLQRIGFAAEQLAKWIADRTDVHIRVFRPPNYSGTIALALLVSLVGGLLYLRRNNLEFIYNKTGWAMVSLCIVFAMTSGQMWNHIRGPPYAHKNPHNGQVLFN

SEQ ID NO: 880911 - protein, 291 aa, Homo sapiens
MEWSSRRSIFRMNGDKFRKFIKAPPRNYSMIVMFTALQPQRQCSVCRQANEEYQILANSWRYSSAFCNKLFFSMVDYDEGTDVFQQLNMNSAPTFMHFPPKGRPKRADTFDLQRIGFAAEQLAKWIADRTDVHIRVFRPPNYSGTIALALLVSLVGGLLYLRRNNLEFIYNKTGWAMVSLCIVFAMTSGQMWNHIRGPPYAHKNPHNGQVSYIHGSSQAQFVAESHIILVLNAAITMGMVLLNEAATSKGDVGKRRIICLVGLGLVVFFFSFLLSIFRSKYHGYPYSFLIK

SEQ ID NO: 880912 - protein, 269 aa, Homo sapiens; identical to SEQ ID NO: 880910

SEQ ID NO: 880913 - protein, 308 aa, Homo sapiens
MGARGAPSRRRQAGRRLRYLPTGSFPFLLLLLLLCIQLGGGQKKKENLLAEKVEQLMEWSSRRSIFRMNGDKFRKFIKAPPRNYSMIVMFTALQPQRQCSVCRQANEEYQILANSWRYSSAFCNKLFFSMVDYDEGTDVFQQLNMNSAPTFMHFPPKGRPKRADTFDLQRIGFAAEQLAKWIADRTDVHIRVFRPPNYSGTIALALLVSLVGGLLYLRRNNLEFIYNKTGWAMVSLCIVFAMTSGQMWNHIRGPPYAHKNPHNGQVFNHSGTLCSEPEKLIDFIHIYVYGFLDNYCRCRYHHGDGSSK

SEQ ID NO: 880914 - protein, 284 aa, Homo sapiens
MGARGAPSRRRQAGRRLRYLPTGSFPFLLLLLLLCIQLGGGQKKKENLLAEKVEQLMEWSSRRSIFRMNGDKFRKFIKAPPRNYSMIVMFTALQPQRQCSVCRQANEEYQILANSWRYSSAFCNKLFFSMVDYDEGTDVFQQLNMNSAPTFMHFPPKGRPKRADTFDLQRIGFAAEQLAKWIADRTDVHIRVFRPPNYSGTIALALLVSLVGGLLYLRRNNLEFIYNKTGWAMVSLCIVFAMTSGQMWNHIRGPPYAHKNPHNGQVGLLLWPRLEFSGVITAYF

SEQ ID NO: 880915 - protein, 230 aa, Homo sapiens
MGARGAPSRRRQAGRRLRYLPTGSFPFLLLLLLLCIQLGGGQKKKENLLAEKVEQLMEWSSRRSIFRMNGDKFRKFIKAPPRNYSMIVMFTALQPQRQCSVCRQANEEYQILANSWRYSSAFCNKLFFSMVDYDEGTDVFQQLNMNSAPTFMHFPPKGRPKRADTFDLQRIGFAAEQLAKWIADRTDVHIRVFRPPNYSGTIALALLVSLVGGLLYLRRNNLEFIYNSPP

SEQ ID NO: 880916 - protein, 203 aa, Homo sapiens
MNSAPTFMHFPPKGRPKRADTFDLQRIGFAAEQLAKWIADRTDVHIRVFRPPNYSGTIALALLVSLVGGLLYLRRNNLEFIYNKTGWAMVSLCIVFAMTSGQMWNHIRGPPYAHKNPHNGQVSYIHGSSQAQFVAESHIILVLNAAITMGMVLLNEAATSKGDVGKRRIICLVGLGLVVFFFSFLLSIFRSKYHGYPYSFLIK

SEQ ID NO: 880917 - protein, 348 aa, Homo sapiens; identical to SEQ ID NO: 880902

SEQ ID NO: 880918 - protein, 347 aa, Homo sapiens; identical to SEQ ID NO: 880899

SEQ ID NO: 880919 - protein, 347 aa, Homo sapiens; identical to SEQ ID NO: 880899

SEQ ID NO: 880920 - protein, 330 aa, Homo sapiens
MGARGAPSRRRQAGRRLRYLPTGSFPFLLLLLLLCIQLGGGQKKKENLLAEKVEQLMEWSSRRSIFRMNGDKFRKFIKAPPRNYSMIVMFTALQPQRQCSVCRQANEEYQILANSWRYSSAFCNKLFFSMVDYDEGTDVFQQLNMNSAPTFMHFPPKGRPKRADTFDLQRIGFAAEQLAKWIADRTDVHIRVFRPPNYSGTIALALLVSLVGGLLYLRRNNLEFIYNKTGWAMVSLCIVFAMTSGQMWNHIRGPPYAHKNPHNGQVSYIHGSSQAQFVAESHIILVLNAAITMGMVLLNEAATSKGDVGKRRIFYFQYFVPSTTAILIAF

SEQ ID NO: 880921 - protein, 314 aa, Homo sapiens
MGARGAPSRRRQAGRRLRYLPTGSFPFLLLLLLLCIQLGGGQKKKENLLAEKVEQLMEWSSRRSIFRMNGDKFRKFIKAPPRNYSMIVMFTALQPQRQCSVCRQANEEYQILANSWRYSSAFCNKLFFSMVDYDEGTDVFQQLNMNSAPTFMHFPPKGRPKRADTFDLQRIGFAAEQLAKWIADRTDVHIRVFRPPNYSGTIALALLVSLVGGLLYLRRNNLEFIYNKTGWAMVSLCIVFAMTSGQMWNHIRGPPYAHKNPHNGQVSYIHGSSQAQFVAESHIILVLNAAITMGMVLLNEAATSKGDVGKRRTF

SEQ ID NO: 880922 - protein, 347 aa, Homo sapiens; identical to SEQ ID NO: 880899

SEQ ID NO: 880923 - protein, 343 aa, Homo sapiens
MGARGAPSRRRQAGRRLRYLPTGSFPFLLLLLLLCIQLGGGQKKKENLLAEKVEQLMEWSSRRSIFRMNGDKFRKFIKAPPRNYSMIVMFTALQPQRQCSVCRQANEEYQILANSWRYSSAFCNKLFFSMVDYDEGTDVFQQLNMNSAPTFMHFPPKGRPKRADTFDLQRIGFAAEQLAKWIADRTDVHIRVFRPPNYSGTIALALLVSLVGGLLYLRRNNLEFIYNKTGWAMVSLCIVFAMTSGQMWNHIRGPPYAHKNPHNGQVSYIHGSSQAQFVAESHIILVLNAAITMGMVLLNEAATSKGDVGKRRIICLVGLGLVVFFFSFLLSIFRSKYHGYPYR

SEQ ID NO: 880924 - protein, 314 aa, Homo sapiens; identical to SEQ ID NO: 880921

SEQ ID NO: 880925 - protein, 308 aa, Homo sapiens; identical to SEQ ID NO: 880913

SEQ ID NO: 880926 - protein, 318 aa, Homo sapiens
QGQHPSRLPIDKKNQTSNLLAEKVEQLMEWSSRRSIFRMNGDKFRKFIKAPPRNYSMIVMFTALQPQRQCSVCRQANEEYQILANSWRYSSAFCNKLFFSMVDYDEGTDVFQQLNMNSAPTFMHFPPKGRPKRADTFDLQRIGFAAEQLAKWIADRTDVHIRVFRPPNYSGTIALALLVSLVGGLLYLRRNNLEFIYNKTGWAMVSLCIVFAMTSGQMWNHIRGPPYAHKNPHNGQVSYIHGSSQAQFVAESHIILVLNAAITMGMVLLNEAATSKGDVGKRRIICLVGLGLVVFFFSFLLSIFRSKYHGYPYSFLIK

SEQ ID NO: 880927 - protein, 269 aa, Homo sapiens; identical to SEQ ID NO: 880910

SEQ ID NO: 880928 - protein, 241 aa, Homo sapiens
MGARGAPSRRRQAGRRLRYLPTGSFPFLLLLLLLCIQLGGGQKKKENLLAEKVEQLMEWSSRRSIFRMNGDKFRKFIKAPPRNYSMIVMFTALQPQRQCSVCRQANEEYQILANSWRYSSAFCNKLFFSMVDYDEGTDVFQQLNMNSAPTFMHFPPKGRPKRADTFDLQRIGFAAEQLAKWIADRTDVHIRVFRPPNYSGTIALALLVSLVGGLLYLRRNNLEFIYNTLGAPWARRLYDSI

SEQ ID NO: 880929 - protein, 251 aa, Homo sapiens
WPIILIRQANEEYQILANSWRYSSAFCNKLFFSMVDYDEGTDVFQQLNMNSAPTFMHFPPKGRPKRADTFDLQRIGFAAEQLAKWIADRTDVHIRVFRPPNYSGTIALALLVSLVGGLLYLRRNNLEFIYNKTGWAMVSLCIVFAMTSGQMWNHIRGPPYAHKNPHNGQVSYIHGSSQAQFVAESHIILVLNAAITMGMVLLNEAATSKGDVGKRRIICLVGLGLVVFFFSFLLSIFRSKYHGYPYSFLIK

SEQ ID NO: 880930 - protein, 118 aa, Homo sapiens
TLHPVFQCIVFAMTSGQMWNHIRGPPYAHKNPHNGQVSYIHGSSQAQFVAESHIILVLNAAITMGMVLLNEAATSKGDVGKRRIICLVGLGLVVFFFSFLLSIFRSKYHGYPYSFLIK

SEQ ID NO: 880931 - protein, 918 aa, Homo sapiens
RIRGFGPVSVTPGAESILLLLPRRCRGRSTGSFLSVSGVQSQAVGVEKRRQRSWARRGREPQGCSDFWRADPEASDREVPARRGGFIRGFGPRMPAPIRLRELIRTIRTARTQAEEREMIQKECAAIRSSFREEDNTYRCRNVAKLLYMHMLGYPAHFGQLECLKLIASQKFTDKRIGYLGAMLLLDERQDVHLLMTNCIKNDLNHSTQFVQGLALCTLGCMGSSEMCRDLAGEVEKLLKTSNSYLRKKAALCAVHVIRKVPELMEMFLPATKNLLNEKNHGVLHTSVVLLTEMCERSPDMLAHFRKNEKLVPQLVRILKNLIMSGYSPEHDVSGISDPFLQVRILRLLRILGRNDDDSSEAMNDILAQVATNTETSKNVGNAILYETVLTIMDIKSESGLRVLAINILGRFLLNNDKNIRYVALTSLLKTVQTDHNAVQRHRSTIVDCLKDLDVSIKRRAMELSFALVNGNNIRGMMKELLYFLDSCEPEFKADCASGIFLAAEKYAPSKRWHIDTIMRVLTTAGSYVRDDAVPNLIQLITNSVEMHAYTVQRLYKAILGDYSQQPLVQVAAWCIGEYGDLLVSGQCEEEEPIQVTEDEVLDILESVLISNMSTSVTRGYALTAIMKLSTRFTCTVNRIKKVVSIYGSSIDVELQQRAVEYNALFKKYDHMRSALLERMPVMEKVTTNGPTEIVQTNGETEPAPLETKPPPSGPQPTSQANDLLDLLGGNDITPVIPTAPTSKPSSAGGELLDLLGDINLTGAPAAAPAPASVPQISQPPFLLDGLSSQPLFNDIAAGIPSITAYSKNGLKIEFTFERSNTNPSVTVITIQASNSTELDMTDFVFQAAVPKTFQLQLLSPSSSIVPAFNTGTITQVIKVLNPQKQQLRMRIKLTYNHKGSAMQDLAEVNNFPPQSWQ

SEQ ID NO: 880932 - protein, 114 aa, Homo sapiens
IASPVSSLASVLASPVSSLASVTVITIQASNSTELDMTDFVFQAAVPKTFQLQLLSPSSSIVPAFNTGTITQVIKVLNPQKQQLRMRIKLTYNHKGSAMQDLAEVNNFPPQSWQ

SEQ ID NO: 880933 - protein, 918 aa, Homo sapiens; identical to SEQ ID NO: 880931

SEQ ID NO: 880934 - protein, 748 aa, Homo sapiens
RIRGFGPVSVTPGAESILLLLPRRCRGRSTGSFLSVSGVQSQAVGVEKRRQRSWARRGREPQGCSDFWRADPEASDREVPARRGGFIRGFGPRMPAPIRLRELIRTIRTARTQAEEREMIQKECAAIRSSFREEDNTYRCRNVAKLLYMHMLGYPAHFGQLECLKLIASQKFTDKRIGYLGAMLLLDERQDVHLLMTNCIKNDLNHSTQFVQGLALCTLGCMGSSEMCRDLAGEVEKLLKTSNSYLRKKAALCAVHVIRKVPELMEMFLPATKNLLNEKNHGVLHTSVVLLTEMCERSPDMLAHFRKNEKLVPQLVRILKNLIMSGYSPEHDVSGISDPFLQVRILRLLRILGRNDDDSSEAMNDILAQVATNTETSKNVGNAILYETVLTIMDIKSESGLRVLAINILGRFLLNNDKNIRYVALTSLLKTVQTDHNAVQRHRSTIVDCLKDLDVSIKRRAMELSFALVNGNNIRGMMKELLYFLDSCEPEFKADCASGIFLAAEKYAPSKRWHIDTIMRVLTTAGSYVRDDAVPNLIQLITNSVEMHAYTVQRLYKAILGDYSQQPLVQVAAWCIGEYGDLLVSGQCEEEEPIQVTEDEVLDILESVLISNMSTSVTRGYALTAIMKLSTRFTCTVNRIKKVVSIYGSSIDVELQQRAVEYNALFKKYDHMRSALLERMPVMEKVTTNGPTEIVQTNGETEPAPLETKPPPSGPQPTSQANDLLDLLGGNDITPVIPTAPTRIISPA

SEQ ID NO: 880935 - protein, 894 aa, Homo sapiens
RIRGFGPVSVTPGAESILLLLPRRCRGRSTGSFLSVSGVQSQAVGVEKRRQRSWARRGREPQGCSDFWRADPEASDREVPARRGGFIRGFGPRMPAPIRLRELIRTIRTARTQAEEREMIQKECAAIRSSFREEDNTYRCRNVAKLLYMHMLGYPAHFGQLECLKLIASQKFTDKRIGYLGAMLLLDERQDVHLLMTNCIKNDLNHSTQFVQGLALCTLGCMGSSEMCRDLAGEVEKLLKTSNSYLRKKAALCAVHVIRKVPELMEMFLPATKNLLNEKNHGVLHTSVVLLTEMCERSPDMLAHFRKNEKLVPQLVRILKNLIMSGYSPEHDVSGISDPFLQVRILRLLRILGRNDDDSSEAMNDILAQVATNTETSKNVGNAILYETVLTIMDIKSESGLRVLAINILGRFLLNNDKNIRYVALTSLLKTVQTDHNAVQRHRSTIVDCLKDLDVSIKRRAMELSFALVNGNNIRGMMKELLYFLDSCEPEFKADCASGIFLAAEKYAPSKRWHIDTIMRVLTTAGSYVRDDAVPNLIQLITNSVEMHAYTVQRLYKAILGDYSQQPLVQVAAWCIGEYGDLLVSGQCEEEEPIQVTEDEVLDILESVLISNMSTSVTRGYALTAIMKLSTRFTCTVNRIKKVVSIYGSSIDVELQQRAVEYNALFKKYDHMRSALLERMPVMEKVTTNGPTEIVQTNGETEPAPLETKPPPSGPQPTSQANDLLDLLGGNDITPVIPTAPTSKPSSAGGELLDLLGDINLTGAPAAAPAPASVPQISQPPFLLDGLSSQPLFNDIAAGIPSITAYSKNGLKIEFTFERSNTNPSVTVITIQASNSTELDMTDFVFQAAVPKTFQLQLLSPSSSIVPAFNTGTITQVIKVLNPQKVSSTFVANI

SEQ ID NO: 880936 - protein, 918 aa, Homo sapiens; identical to SEQ ID NO: 880931

SEQ ID NO: 880937 - protein, 230 aa, Homo sapiens
RIRGFGPVSVTPGAESILLLLPRRCRGRSTGSFLSVSGVQSQAVGVEKRRQRSWARRGREPQGCSDFWRADPEASDREVPARRGGFIRGFGPRMPAPIRLRELIRTIRTARTQAEEREMIQKECAAIRSSFREEDNTYRCRNVAKLLYMHMLGYPAHFGQLECLKLIASQKFTDKRIVPAFNTGTITQVIKVLNPQKQQLRMRIKLTYNHKGSAMQDLAEVNNFPPQSWQ

SEQ ID NO: 880938 - protein, 918 aa, Homo sapiens; identical to SEQ ID NO: 880931

SEQ ID NO: 880939 - protein, 117 aa, Homo sapiens
GLSTSVRLFYVWPKTVLLLPVWPREAKRLDTRGLCICMYTHTYTHTQRHTLVLFLQRTLTNTGDPGSQQWCLPSHCCHWVWVSEAPTRHNSEGSSSGPWHMLGALQNQQKRTLTKGQ

SEQ ID NO: 880940 - protein, 1585 aa, Homo sapiens
MENTGWMGKGHRMTPACPLLLSVILSLRLATAFDPAPSACSALASGVLYGAFSLQDLFPTIASGCSWTLENPDPTKYSLYLRFNRQEQVCAHFAPRLLPLDHYLVNFTCLRPSPEEAVAQAESEVGRPEEEEAEAAAGLELCSGSGPFTFLHFDKNFVQLCLSAEPSEAPRLLAPAALAFRFVEVLLINNNNSSQFTCGVLCRWSEECGRAAGRACGFAQPGCSCPGEAGAGSTTTTSPGPPAAHTLSNALVPGGPAPPAEADLHSGSSNDLFTTEMRYGEEPEEEPKVKTQWPRSADEPGLYMAQTGDPAAEEWSPWSVCSLTCGQGLQVRTRSCVSSPYGTLCSGPLRETRPCNNSATCPVHGVWEEWGSWSLCSRSCGRGSRSRMRTCVPPQHGGKACEGPELQTKLCSMAACPVEGQWLEWGPWGPCSTSCANGTQQRSRKCSVAGPAWATCTGALTDTRECSNLECPATDSKWGPWNAWSLCSKTCDTGWQRRFRMCQATGTQGYPCEGTGEEVKPCSEKRCPAFHEMCRDEYVMLMTWKKAAAGEIIYNKCPPNASGSASRRCLLSAQGVAYWGLPSFARCISHEYRYLYLSLREHLAKGQRMLAGEGMSQVVRSLQELLARRTYYSGDLLFSVDILRNVTDTFKRATYVPSADDVQRFFQVVSFMVDAENKEKWDDAQQVSPGSVHLLRVVEDFIHLVGDALKAFQSSLIVTDNLVISIQREPVSAVSSDITFPMRGRRGMKDWVRHSEDRLFLPKEVLSLSSPGKPATSGAAGSPGRGRGPGTVPPGPGHSHQRLLPADPDESSYFVIGAVLYRTLGLILPPPRPPLAVTSRVMTVTVRPPTQPPAEPLITVELSYIINGTTDPHCASWDYSRADASSGDWDTENCQTLETQAAHTRCQCQHLSTFAVLAQPPKDLTLELAGSPSVPLVIGCAVSCMALLTLLAIYAAFWRFIKSERSIILLNFCLSILASNILILVGQSRVLSKGVCTMTAAFLHFFFLSSFCWVLTEAWQSYLAVIGRMRTRLVRKRFLCLGWGLPALVVAVSVGFTRTKGYGTSSYCWLSLEGGLLYAFVGPAAVIVLVNMLIGIIVFNKLMARDGISDKSKKQRAGSERCPWASLLLPCSACGAVPSPLLSSASARNAMASLWSSCVVLPLLALTWMSAVLAMTDRRSVLFQALFAVFNSAQGFVITAVHCFLRREVQDVVKCQMGVCRADESEDSPDSCKNGQLQILSDFEKDVDLACQTVLFKEVNTCNPSTITGTLSRLSLDEDEEPKSCLVGPEGSLSFSPLPGNILVPMAASPGLGEPPPPQEANPVYMCGEGGLRQLDLTWLRPTEPGSEGDYMVLPRRTLSLQPGGGGGGGEDAPRARPEGTPRRAAKTVAHTEGYPSFLSVDHSGLGLGPAYGSLQNPYGMTFQPPPPTPSARQVPEPGERSRTMPRTVPGSTMKMGSLERKKLRYSDLDFEKVMHTRKRHSELYHELNQKFHTFDRYRSQSTAKREKRWSVSSGGAAERSVCTDKPSPGERPSLSQHRRHQSWSTFKSMTLGSLPPKPRERLTLHRAAAWEPTEPPDGDFQTEV

SEQ ID NO: 880941 - protein, 896 aa, Homo sapiens
HSLLSPQRFFQVVSFMVDAENKEKWDDAQQVSPGSVHLLRVVEDFIHLVGDALKAFQSSLIVTDNLVISIQREPVSAVSSDITFPMRGRRGMKDWVRHSEDRLFLPKEVLSLSSPGKPATSGAAGSPGRGRGPGTVPPGPGHSHQRLLPADPDESSYFVIGAVLYRTLGLILPPPRPPLAVTSRVMTVTVRPPTQPPAEPLITVELSYIINGTTDPHCASWDYSRADASSGDWDTENCQTLETQAAHTRCQCQHLSTFAVLAQPPKDLTLELAGSPSVPLVIGCAVSCMALLTLLAIYAAFWRFIKSERSIILLNFCLSILASNILILVGQSRVLSKGVCTMTAAFLHFFFLSSFCWVLTEAWQSYLAVIGRMRTRLVRKRFLCLGWGLPALVVAVSVGFTRTKGYGTSSYCWLSLEGGLLYAFVGPAAVIVLVNMLIGIIVFNKLMARDGISDKSKKQRAGASLWSSCVVLPLLALTWMSAVLAMTDRRSVLFQALFAVFNSAQGFVITAVHCFLRREVQDVVKCQMGVCRADESEDSPDSCKNGQLQILSDFEKDVDLACQTVLFKEVNTCNPSTITGTLSRLSLDEDEEPKSCLVGPEGSLSFSPLPGNILVPMAASPGLGEPPPPQEANPVYMCGEGGLRQLDLTWLRPTEPGSEGDYMVLPRRTLSLQPGGGGGGGEDAPRARPEGTPRRAAKTVAHTEGYPSFLSVDHSGLGLGPAYGSLQNPYGMTFQPPPPTPSARQVPEPGERSRTMPRTVPGSTMKMGSLERKKLRYSDLDFEKVMHTRKRHSELYHELNQKFHTFDRYRSQSTAKREKRWSVSSGGAAERSVCTDKPSPGERPSLSQHRRHQSWSTFKSMTLGSLPPKPRERLTLHRAAAWEPTEPPDGDFQTEV

SEQ ID NO: 880942 - protein, 1478 aa, Homo sapiens
MENTGWMGKGHRMTPACPLLLSVILSLRLATAFDPAPSACSALASGVLYGAFSLQDLFPTIASGCSWTLENPDPTKYSLYLRFNRQEQVCAHFAPRLLPLDHYLVNFTCLRPSPEEAVAQAESEVGRPEEEEAEAAAGLELCSGSGPFTFLHFDKNFVQLCLSAEPSEAPRLLAPAALAFRFVEVLLINNNNSSQFTCGVLCRWSEECGRAAGRACGFAQPGCSCPGEAGAGSTTTTSPGPPAAHTLSNALVPGGPAPPAEADLHSGSSNDLFTTEMRYGEEPEEEPKVKTQWPRSADEPGLYMAQTVHGVWEEWGSWSLCSRSCGRGSRSRMRTCVPPQHGGKACEGPELQTKLCSMAACPVEGQWLEWGPWGPCSTSCANGTQQRSRKCSVAGPAWATCTGALTDTRECSNLECPATDSKWGPWNAWSLCSKTCDTGWQRRFRMCQATGTQGYPCEGTGEEVKPCSEKRCPAFHEMCRDEYVMLMTWKKAAAGEIIYNKCPPNASGSASRRCLLSAQGVAYWGLPSFARCISHEYRYLYLSLREHLAKGQRMLAGEGMSQVVRSLQELLARRTYYSGDLLFSVDILRNVTDTFKRATYVPSADDVQRFFQVVSFMVDAENKEKWDDAQQVSPGSVHLLRVVEDFIHLVGDALKAFQSSLIVTDNLVISIQREPVSAVSSDITFPMRGRRGMKDWVRHSEDRLFLPKEVLSLSSPGKPATSGAAGSPGRGRGPGTVPPGPGHSHQRLLPADPDESSYFVIGAVLYRTLGLILPPPRPPLAVTSRVMTVTVRPPTQPPAEPLITVELSYIINGTTDPHCASWDYSRADASSGDWDTENCQTLETQAAHTRCQCQHLSTFAVLAQPPKDLTLELAGSPSVPLVIGCAVSCMALLTLLAIYAAFWRFIKSERSIILLNFCLSILASNILILVGQSRVLSKGVCTMTAAFLHFFFLSSFCWVLTEAWQSYLAVIGRMRTRLVRKRFLCLGWGLPALVVAVSVGFTRTKGYGTSSYCWLSLEGGLLYAFVGPAAVIVLVNMLIGIIVFNKLMARDGISDKSKKQRAGASLWSSCVVLPLLALTWMSAVLAMTDRRSVLFQALFAVFNSAQGFVITAVHCFLRREVQDVVKCQMGVCRADESEDSPDSCKNGQLQILSDFEKDVDLACQTVLFKEVNTCNPSTITGTLSRLSLDEDEEPKSCLVGPEGSLSFSPLPGNILVPMAASPGLGEPPPPQEANPVYMCGEGGLRQLDLTWLRPTEPGSEGDYMVLPRRTLSLQPGGGGGGGEDAPRARPEGTPRRAAKTVAHTEGYPSFLSVDHSGLGLGPAYGSLQNPYGMTFQPPPPTPSARQVPEPGERSRTMPRTVPGSTMKMGSLERKKLRYSDLDFEKVMHTRKRHSELYHELNQKFHTFDRYRSQSTAKDKPSPGERPSLSQHRRHQSWSTFKSMTLGSLPPKPRERLTLHRAAAWEPTEPPDGDFQTEV

SEQ ID NO: 880943 - protein, 1497 aa, Homo sapiens
MENTGWMGKGHRMTPACPLLLSVILSLRLATAFDPAPSACSALASGVLYGAFSLQDLFPTIASGCSWTLENPDPTKYSLYLRFNRQEQVCAHFAPRLLPLDHYLVNFTCLRPSPEEAVAQAESEVGRPEEEEAEAAAGLELCSGSGPFTFLHFDKNFVQLCLSAEPSEAPRLLAPAALAFRFVEVLLINNNNSSQFTCGVLCRWSEECGRAAGRACGFAQPGCSCPGEAGAGSTTTTSPGPPAAHTLSNALVPGGPAPPAEADLHSGSSNDLFTTEMRYGEEPEEEPKVKTQWPRSADEPGLYMAQTVHGVWEEWGSWSLCSRSCGRGSRSRMRTCVPPQHGGKACEGPELQTKLCSMAACPVEGQWLEWGPWGPCSTSCANGTQQRSRKCSVAGPAWATCTGALTDTRECSNLECPATDSKWGPWNAWSLCSKTCDTGWQRRFRMCQATGTQGYPCEGTGEEVKPCSEKRCPAFHEMCRDEYVMLMTWKKAAAGEIIYNKCPPNASGSASRRCLLSAQGVAYWGLPSFARCISHEYRYLYLSLREHLAKGQRMLAGEGMSQVVRSLQELLARRTYYSGDLLFSVDILRNVTDTFKRATYVPSADDVQRFFQVVSFMVDAENKEKWDDAQQVSPGSVHLLRVVEDFIHLVGDALKAFQSSLIVTDNLVISIQREPVSAVSSDITFPMRGRRGMKDWVRHSEDRLFLPKEVLSLSSPGKPATSGAAGSPGRGRGPGTVPPGPGHSHQRLLPADPDESSYFVIGAVLYRTLGLILPPPRPPLAVTSRVMTVTVRPPTQPPAEPLITVELSYIINGTTDPHCASWDYSRADASSGDWDTENCQTLETQAAHTRCQCQHLSTFAVLAQPPKDLTLELAGSPSVPLVIGCAVSCMALLTLLAIYAAFWRFIKSERSIILLNFCLSILASNILILVGQSRVLSKGVCTMTAAFLHFFFLSSFCWVLTEAWQSYLAVIGRMRTRLVRKRFLCLGWGLPALVVAVSVGFTRTKGYGTSSYCWLSLEGGLLYAFVGPAAVIVLVNMLIGIIVFNKLMARDGISDKSKKQRAGASLWSSCVVLPLLALTWMSAVLAMTDRRSVLFQALFAVFNSAQGFVITAVHCFLRREVQDVVKCQMGVCRADESEDSPDSCKNGQLQILSDFEKDVDLACQTVLFKEVNTCNPSTITGTLSRLSLDEDEEPKSCLVGPEGSLSFSPLPGNILVPMAASPGLGEPPPPQEANPVYMCGEGGLRQLDLTWLRPTEPGSEGDYMVLPRRTLSLQPGGGGGGGEDAPRARPEGTPRRAAKTVAHTEGYPSFLSVDHSGLGLGPAYGSLQNPYGMTFQPPPPTPSARQVPEPGERSRTMPRTVPGSTMKMGSLERKKLRYSDLDFEKVMHTRKRHSELYHELNQKFHTFDRYRSQSTAKREKRWSVSSGGAAERSVCTDKPSPGERPSLSQHRRHQSWSTFKSMTLGSLPPKPRERLTLHRAAAWEPTEPPDGDFQTEV

SEQ ID NO: 880944 - protein, 1422 aa, Homo sapiens
MENTGWMGKGHRMTPACPLLLSVILSLRLATAFDPAPSACSALASGVLYGAFSLQDLFPTIASGCSWTLENPDPTKYSLYLRFNRQEQVCAHFAPRLLPLDHYLVNFTCLRPSPEEAVAQAESEVGRPEEEEAEAAAGLELCSGSGPFTFLHFDKNFVQLCLSAEPSEAPRLLAPAALAFRFVEVLLINNNNSSQFTCGVLCRWSEECGRAAGRACGFAQPGCSCPGEAGAGSTTTTSPGPPAAHTLSNALVPGGPAPPAEADLHSGSSNDLFTTEMRYGEEPEEEPKVKTQWPRSADEPGLYMAQTVHGVWEEWGSWSLCSRSCGRGSRSRMRTCVPPQHGGKACEGPELQTKLCSMAACPVEGQWLEWGPWGPCSTSCANGTQQRSRKCSVAGPAWATCTGALTDTRECSNLECPATDSKWGPWNAWSLCSKTCDTGWQRRFRMCQATGTQGYPCEGTGEEVKPCSEKRCPAFHEMCRDEYVMLMTWKKAAAGEIIYNKCPPNASGSASRRCLLSAQGVAYWGLPSFARCISHEYRYLYLSLREHLAKGQRMLAGEGMSQVVRSLQELLARRTYYSGDLLFSVDILRNVTDTFKRATYVPSADDVQRFFQVVSFMVDAENKEKWDDAQQVSPGSVHLLRVVEDFIHLVGDALKAFQSSLIVTDNLVISIQREPVSAVSSDITFPMRGRRGMKDWVRHSEDRLFLPKEVLSLSSPGKPATSGAAGSPGRGRGPGTVPPGPGHSHQRLLPADPDESSYFVIGAVLYRTLGLILPPPRPPLAVTSRVMTVTVRPPTQPPAEPLITVELSYIINGTTDPHCASWDYSRADASSGDWDTENCQTLETQAAHTRCQCQHLSTFAVLAQPPKDLTLELAGSPSVPLVIGCAVSCMALLTLLAIYAAFWRFIKSERSIILLNFCLSILASNILILVGQSRVLSKGVCTMTAAFLHFFFLSSFCWVLTEAWQSYLAVIGRMRTRLVRKRFLCLGWGLPALVVAVSVGFTRTKGYGTSSYCWLSLEGGLLYAFVGPAAVIVLVNMLIGIIVFNKLMARDGISDKSKKQRAGASLWSSCVVLPLLALTWMSAVLAMTDRRSVLFQALFAVFNSAQGFVITAVHCFLRREVQDVVKCQMGVCRADESEDSPDSCKNGQLQILSDFEKDVDLACQTVLFKEVNTCNPSTITGTLSRLSLDEDEEPKSCLVGPEGSLSFSPLPGNILVPMAASPGLGEPPPPQEANPVYMCGEGGLRQLDLTWLRPTEPGSEGDYMVLPRRTLSLQPGGGGGGGEDAPRARPEGTPRRAAKTVAHTEGYPSFLSVDHSGLGLGPAYGSLQNPYGMTFQPPPPTPSARQVPEPGERSRTMPRTVPGSTMKMGSLERKKLRYSDLDFEKVMHTRKRHSELYHELNQKFHTFDRYRSQSTAKRTTGW

SEQ ID NO: 880945 - protein, 170 aa, Homo sapiens
MHEFGDIEFLAGPMAQSVTLLYHFQILTRIFPFLSPGELMHREVGRQSPLTAVGLWGQSRDLHQDTGSWALPLFLALSQCGDFGAVVFLTPLICERLPTTQPSLQDPVSFPVQAQKLGTSPAWAMASGGSFSSGLTPSLPLLPPVLFKEVNTCNPSTITGTLSRLSLDED

SEQ ID NO: 880946 - protein, 1497 aa, Homo sapiens; identical to SEQ ID NO: 880943

SEQ ID NO: 880947 - protein, 486 aa, Homo sapiens
SPGFPCVSPPSPMSVPPPRSERCPWASLLLPCSACGAVPSPLLSSASARNAMASLWSSCVVLPLLALTWMSAVLAMTDRRSVLFQALFAVFNSAQGFVITAVHCFLRREVQDVVKCQMGVCRADESEDSPDSCKNGQLQILSDFEKDVDLACQTVLFKEVNTCNPSTITGTLSRLSLDEDEEPKSCLVGPEGSLSFSPLPGNILVPMAASPGLGEPPPPQEANPVYMCGEGGLRQLDLTWLRPTEPGSEGDYMVLPRRTLSLQPGGGGGGGEDAPRARPEGTPRRAAKTVAHTEGYPSFLSVDHSGLGLGPAYGSLQNPYGMTFQPPPPTPSARQVPEPGERSRTMPRTVPGSTMKMGSLERKKLRYSDLDFEKVMHTRKRHSELYHELNQKFHTFDRYRSQSTAKREKRWSVSSGGAAERSVCTDKPSPGERPSLSQHRRHQSWSTFKSMTLGSLPPKPRERLTLHRAAAWEPTEPPDGDFQTEV

SEQ ID NO: 880948 - protein, 1497 aa, Homo sapiens; identical to SEQ ID NO: 880943

SEQ ID NO: 880949 - protein, 1255 aa, Homo sapiens
MENTGWMGKGHRMTPACPLLLSVILSLRLATAFDPAPSACSALASGVLYGAFSLQDLFPTIASGCSWTLENPDPTKYSLYLRFNRQEQVCAHFAPRLLPLDHYLVNFTCLRPSPEEAVAQAESEVGRPEEEEAEAAAGLELCSGSGPFTFLHFDKNFVQLCLSAEPSEAPRLLAPAALAFRFVEVLLINNNNSSQFTCGVLCRWSEECGRAAGRACGFAQPGCSCPGEAGAGSTTTTSPGPPAAHTLSNALVPGGPAPPAEADLHSGSSNDLFTTEMRYGEEPEEEPKVKTQWPRSADEPGLYMAQTVHGVWEEWGSWSLCSRSCGRGSRSRMRTCVPPQHGGKACEGPELQTKLCSMAACPVEGQWLEWGPWGPCSTSCANGTQQRSRKCSVAGPAWATCTGALTDTRECSNLECPATDSKWGPWNAWSLCSKTCDTGWQRRFRMCQATGTQGYPCEGTGEEVKPCSEKRCPAFHEMCRDEYVMLMTWKKAAAGEIIYNKCPPNASGSASRRCLLSAQGVAYWGLPSFARCISHEYRYLYLSLREHLAKGQRMLAGEGMSQVVRSLQELLARRTYYSGDLLFSVDILRNVTDTFKRATYVPSADDVQRFFQVVSFMVDAENKEKWDDAQQVSPGSVHLLRVVEDFIHLVGDALKAFQSSLIVTDNLVISIQREPVSAVSSDITFPMRGRRGMKDWVRHSEDRLFLPKEVLSLSSPGKPATSGAAGSPGRGRGPGTVPPGPGHSHQRLLPADPDESSYFVIGAVLYRTLGLILPPPRPPLAVTSRVMTVTVRPPTQPPAEPLITVELSYIINGTTDPHCASWDYSRADASSGDWDTENCQTLETQAAHTRCQCQHLSTFAVLAQPPKDLTLELAGSPSVPLVIGCAVSCMALLTLLAIYAAFWRFIKSERSIILLNFCLSILASNILILVGQSRVLSKGVCTMTAAFLHFFFLSSFCWVLTEAWQSYLAVIGRMRTRLVRKRFLCLGWGLPALVVAVSVGFTRTKGYGTSSYCWLSLEGGLLYAFVGPAAVIVLVNMLIGIIVFNKLMARDGISDKSKKQRAGASLWSSCVVLPLLALTWMSAVLAMTDRRSVLFQALFAVFNSAQGFVITAVHCFLRREVQDVVKCQMGVCRADESEDSPDSCKNGQLQILSDFEKDVDLACQTVLFKEVNTCNPSTITGTLSRLSLDEDEEPKSCLVGPEGSLSFSPLPGNILVPMAASPGLGEPPPPQEANPVYMCGEGGLRQLAPELAARP

SEQ ID NO: 880950 - protein, 731 aa, Homo sapiens
  misc_feature (13)..(13): Xaa can be any naturally occurring amino acid
CCVRRGAASTGKXAPPSLPEWNMATCAEILRSEFPEIDGQVFDYVTGVLHSGSADFESVDDLVEAVGELLQEVSGDSKDDAGIRAVCQRMYNTLRLAEPQSQGNSQVLLDAPIQLSKITENYDCGTKLPGLLKREQSSTVNAKKLEKAEARLKAKQEKRSEKDTLKTSNPLVLEEASASQAGSRKESRLESSGKNKSYDVRIENFDVSFGDRVLLAGADVNLAWGRRYGLVGRNGLGKTTLLKMLATRSLRVPAHISLLHVEQEVAGDDTPALQSVLESDSVREDLLRRERELTAQIAAGRAEGSEAAELAEIYAKLEEIEADKAPARASVILAGLGFTPKMQQQPTREFSGGWRMRLALARALFARPDLLLLDEPTNMLDVRAILWLENYLQTWPSTILVVSHDRNFLNAIATDIIHLHSQRLDGYRGDFETFIKSKQERLLNQQREYEAQQQYRQHIQVFIDRFRYNANRASQVQSKLKMLEKLPELKPVDKESEVVMKFPDGFEKFSPPILQLDEVDFYYDPKHVIFSRLSVSADLESRICVVGENGAGKSTMLKLLLGDLAPVRGIRHAHRNLKIGYFSQHHVEQLDLNVSAVELLARKFPGRPEEEYRHQLGRYGISGELAMRPLASLSGGQKSRVAFAQMTMPCPNFYILDEPTNHLDMETIEALGRALNNFRGGVILVSHDERFIRLVCRELWVCEGGGVTRVEGGFDQYRALLQEQFRREGFL

SEQ ID NO: 880951 - protein, 709 aa, Homo sapiens
MATCAEILRSEFPEIDGQVFDYVTGVLHSGSADFESVDDLVEAVGELLQEVSGDSKDDAGIRAVCQRMYNTLRLAEPQSQGNSQVLLDAPIQLSKITENYDCGTKLPGLLKREQSSTVNAKKLEKAEARLKAKQEKRSEKDTLKTSNPLVLEEASASQAGSRKESRLESSGKNKSYDVRIENFDVSFGDRVLLAGADVNLAWGRRYGLVGRNGLGKTTLLKMLATRSLRVPAHISLLHVEQEVAGDDTPALQSVLESDSVREDLLRRERELTAQIAAGRAEGSEAAELAEIYAKLEEIEADKAPARASVILAGLGFTPKMQQQPTREFSGGWRMRLALARALFARPDLLLLDEPTNMLDVRAILWLENYLQTWPSTILVVSHDRNFLNAIATDIIHLHSQRLDGYRGDFETFIKSKQERLLNQQREYEAQQQYRQHIQVFIDRFRYNANRASQVQSKLKMLEKLPELKPVDKESEVVMKFPDGFEKFSPPILQLDEVDFYYDPKHVIFSRLSVSADLESRICVVGENGAGKSTMLKLLLGDLAPVRGIRHAHRNLKIGYFSQHHVEQLDLNVSAVELLARKFPGRPEEEYRHQLGRYGISGELAMRPLASLSGGQKSRVAFAQMTMPCPNFYILDEPTNHLDMETIEALGRALNNFRGGVILVSHDERFIRLVCRELWVCEGGGVTRVEGGFDQYRALLQEQFRREGFL

SEQ ID NO: 880952 - protein, 707 aa, Homo sapiens
MATCAEILRSEFPEIDGQVFDYVTGVLHSGSADFESVDDLVEAVGELLQEVSGDSKDDAGIRAVCQRMYNTLRLAEPQSQGNSQVLLDAPIQLSKITENYDCGTKLPGLLKREQSSTVNAKKLEKAEARLKAKQEKRSEKDTLKTSNPLVLEEASASQAGSRKESRLESSGKNKSYDVRIENFDVSFGDRVLLAGADVNLAWGRRYGLVGRNGLGKTTLLKMLATRSLRVPAHISLLHVEQEVAGDDTPALQSVLESDSVREDLLRRERELTAQIAAGRAEGSEAAELAEIYAKLEEIEADKAPARASVILAGLGFTPKMQQQPTREFSGGWRMRLALARALFARESPGPEPTNMLDVRAILWLENYLQTWPSTILVVSHDRNFLNAIATDIIHLHSQRLDGYRGDFETFIKSKQERLLNQQREYEAQQQYRQHIQVFIDRFRYNANRASQVQSKLKMLEKLPELKPVDKESEVVMKFPDGFEKFSPPILQLDEVDFYYDPKHVIFSRLSVSADLESRICVVGENGAGKSTMLKLLLGDLAPVRGIRHAHRNLKIGYFSQHHVEQLDLNVSAVELLARKFPGRPEEEYRHQLGRYGISGELAMRPLASLSGGQKSRVAFAQMTMPCPNFYILDEPTNHLDMETIEALGRALNNFRGGVILVSHDERFIRLVCRELWVCEGGGVTRVEGGFDQYRALLQEQFRREGFL

SEQ ID NO: 880953 - protein, 642 aa, Homo sapiens
MYNTLRLAEPQSQGNSQVLLDAPIQLSKITENYDCGTKLPGLLKREQSSTVNAKKLEKAEARLKAKQEKRSEKDTLKTSNPLVLEEASASQAGSRKESRLESSGKNKSYDVRIENFDVSFGDRVLLAGADVNLAWGRRYGLVGRNGLGKTTLLKMLATRSLRVPAHISLLHVEQEVAGDDTPALQSVLESDSVREDLLRRERELTAQIAAGRAEGSEAAELAEIYAKLEEIEADKAPARASVILAGLGFTPKMQQQPTREFSGGWRMRLALARALFARPDLLLLDEPTNMLDVRAILWLENYLQTWPSTILVVSHDRNFLNAIATDIIHLHSQRLDGYRGDFETFIKSKQERLLNQQREYEAQQQYRQHIQVFIDRFRYNANRASQVQSKLKMLEKLPELKPVDKESEVVMKFPDGFEKFSPPILQLDEVDFYYDPKHVIFSRLSVSADLESRICVVGENGAGKSTMLKLLLGDLAPVRGIRHAHRNLKIGYFSQHHVEQLDLNVSAVELLARKFPGRPEEEYRHQLGRYGISGELAMRPLASLSGGQKSRVAFAQMTMPCPNFYILDEPTNHLDMETIEALGRALNNFRGGVILVSHDERFIRLVCRELWVCEGGGVTRVEGGFDQYRALLQEQFRREGFL

SEQ ID NO: 880954 - protein, 628 aa, Homo sapiens
MATCAEILRSEFPEIDGQVFDYVTGVLHSGSADFESVDDLVEAVGELLQEVSGDSKDDAGIRAVCQRMYNTLRLAEPQSQGNSQVLLDAPIQLSKITENYDCGTKLPGLLKREQSSTVNAKKLEKAEARLKAKQEKRSEKDTLKTSNPLVLEEASASQAGSRKESRLESSGKNKSYDVRIENFDVSFGDRVLLAGADVNLAWGRRYGLVGRNGLGKTTLLKMLATRSLRVPAHISLLHVEQEVAGDDTPALQSVLESDSVREDLLRRERELTAQIAAGRAEGSEAAELAEIYAKLEEIEADKAPARASVILAGLGFTPKMQQQPTREFSGGWRMRLALARALFARPDLLLLDEPTNMLDVRAILWLENYLQTWPSTILVVSHDRNFLNAIATDIIHLHSQRLDGYRGDFETFIKSKQERLLNQQREYEAQQQYRQHIQVFIDRFRYNANRASQVQSKLKMLEKLPELKPVDKESEVVMKFPDGFEKFSPPILQLDEVDFYYDPKHVIFSRLSVSADLESRICVVGENGAGKSTMLKLLLGDLAPVRGIRHAHRNLKIGYFSQHHVEQLDLNVSAVELLARKFPGRPEEEYRHQLGRYGISGELAMRPLASLSGGQKSRVAFAQMTMPW

SEQ ID NO: 880955 - protein, 488 aa, Homo sapiens
MLATRSLRVPAHISLLHVEQEVAGDDTPALQSVLESDSVREDLLRRERELTAQIAAGRAEGSEAAELAEIYAKLEEIEADKAPARASVILAGLGFTPKMQQQPTREFSGGWRMRLALARALFARPDLLLLDEPTNMLDVRAILWLENYLQTWPSTILVVSHDRNFLNAIATDIIHLHSQRLDGYRGDFETFIKSKQERLLNQQREYEAQQQYRQHIQVFIDRFRYNANRASQVQSKLKMLEKLPELKPVDKESEVVMKFPDGFEKFSPPILQLDEVDFYYDPKHVIFSRLSVSADLESRICVVGENGAGKSTMLKLLLGDLAPVRGIRHAHRNLKIGYFSQHHVEQLDLNVSAVELLARKFPGRPEEEYRHQLGRYGISGELAMRPLASLSGGQKSRVAFAQMTMPCPNFYILDEPTNHLDMETIEALGRALNNFRGGVILVSHDERFIRLVCRELWVCEGGGVTRVEGGFDQYRALLQEQFRREGFL

SEQ ID NO: 880956 - protein, 500 aa, Homo sapiens
MATCAEILRSEFPEIDGQVFDYVTGVLHSGSADFESVDDLVEAVGELLQEVSGDSKDDAGIRAVCQRMYNTLRLAEPQSQGNSQVLLDAPIQLSKITENYDCGTKLPGLLKREQSSTVNAKKLEKAEARLKAKQEKRSEKDTLKTSNPLVLEEASASQAGSRKESRLESSGKNKSYDVRIENFDVSFGDRVLLAGADVNLAWGRRYGLVGRNGLGKTTLLKMLATRSLRVPAHISLLHVEQEVAGDDTPALQSVLESDSVREDLLRRERELTAQIAAGRAEGSEAAELAEIYAKLEEIEADKAPARASVILAGLGFTPKMQQQPTREFSGGWRMRLALARALFARPDLLLLDEPTNMLDVRAILWLENYLQTWPSTILVVSHDRNFLNAIATDIIHLHSQRLDGYRGDFETFIKSKQERLLNQQREYEAQQQYRQHIQVFIDRFRYNANRASQVQSKLKMLEKLPELKPVDKESEVVMKFPDGFEKFSPPILQLDEVDCG

SEQ ID NO: 880957 - protein, 108 aa, Homo sapiens
MATCAEILRSEFPEIDGQVFDYVTGVLHSGSADFESVDDLVEAVGELLQEVSGDSKDDAGIRAVCQRMYNTLRLAEPQSQGNSQVLLDAPIQLSKITENYGESEGRLN

SEQ ID NO: 880958 - protein, 709 aa, Homo sapiens; identical to SEQ ID NO: 880951

SEQ ID NO: 880959 - protein, 746 aa, Homo sapiens
MATCAEILRSEFPEIDGQVFDYVTGVLHSGSADFESVDDLVEAVGELLQEVSGDSKDDAGIRAVCQRMYNTLRLAEPQSQGNSQVLLDAPIQLSKITENYDCGTKLPGLLKREQSSTVNAKKLEKAEARLKAKQEKRSEKDTLKTSNPLVLEEASASQAGSRKESRLESSGKNKSYDVRIENFDVSFGDRVLLAGADVNLAWGRRYGLVGRNGLGKTTLLKMLATRSLRVPAHISLLHVEQEVAGDDTPALQSVLESDSVREDLLRRERELTAQIAAGRAEGSEAAELAEIYAKLEEIEADKAPARASVILAGLGFTPKMQQQPTREFSGGWRMRLALARALFARPDLLLLDGEFEMGHPDFRMGRGGSIQVPSSPALQSQVLCSPASPEPTNMLDVRAILWLENYLQTWPSTILVVSHDRNFLNAIATDIIHLHSQRLDGYRGDFETFIKSKQERLLNQQREYEAQQQYRQHIQVFIDRFRYNANRASQVQSKLKMLEKLPELKPVDKESEVVMKFPDGFEKFSPPILQLDEVDFYYDPKHVIFSRLSVSADLESRICVVGENGAGKSTMLKLLLGDLAPVRGIRHAHRNLKIGYFSQHHVEQLDLNVSAVELLARKFPGRPEEEYRHQLGRYGISGELAMRPLASLSGGQKSRVAFAQMTMPCPNFYILDEPTNHLDMETIEALGRALNNFRGGVILVSHDERFIRLVCRELWVCEGGGVTRVEGGFDQYRALLQEQFRREGFL

SEQ ID NO: 880960 - protein, 709 aa, Homo sapiens; identical to SEQ ID NO: 880951

SEQ ID NO: 880961 - protein, 599 aa, Homo sapiens
MCLDPETVNAKKLEKAEARLKAKQEKRSEKDTLKTSNPLVLEEASASQAGSRKESRLESSGKNKSYDVRIENFDVSFGDRVLLAGADVNLAWGRRYGLVGRNGLGKTTLLKMLATRSLRVPAHISLLHVEQEVAGDDTPALQSVLESDSVREDLLRRERELTAQIAAGRAEGSEAAELAEIYAKLEEIEADKAPARASVILAGLGFTPKMQQQPTREFSGGWRMRLALARALFARPDLLLLDEPTNMLDVRAILWLENYLQTWPSTILVVSHDRNFLNAIATDIIHLHSQRLDGYRGDFETFIKSKQERLLNQQREYEAQQQYRQHIQVFIDRFRYNANRASQVQSKLKMLEKLPELKPVDKESEVVMKFPDGFEKFSPPILQLDEVDFYYDPKHVIFSRLSVSADLESRICVVGENGAGKSTMLKLLLGDLAPVRGIRHAHRNLKIGYFSQHHVEQLDLNVSAVELLARKFPGRPEEEYRHQLGRYGISGELAMRPLASLSGGQKSRVAFAQMTMPCPNFYILDEPTNHLDMETIEALGRALNNFRGGVILVSHDERFIRLVCRELWVCEGGGVTRVEGGFDQYRALLQEQFRREGFL

SEQ ID NO: 880962 - protein, 709 aa, Homo sapiens; identical to SEQ ID NO: 880951

SEQ ID NO: 880963 - protein, 488 aa, Homo sapiens; identical to SEQ ID NO: 880955

SEQ ID NO: 880964 - protein, 232 aa, Homo sapiens [sequence omitted]

SEQ ID NO: 880965 - protein, 507 aa, Homo sapiens
FRDIVDPGATGLQSVLESDSVREDLLRRERELTAQIAAGRAEGSEAAELAEIYAKLEEIEADKAPARASVILAGLGFTPKMQQQPTREFSGGWRMRLALARALFASVSLLGQCMKPYGRLVLALGRWHELLTKNLRPCILFHRPDLLLLDEPTNMLDVRAILWLENYLQTWPSTILVVSHDRNFLNAIATDIIHLHSQRLDGYRGDFETFIKSKQERLLNQQREYEAQQQYRQHIQVFIDRFRYNANRASQVQSKLKMLEKLPELKPVDKESEVVMKFPDGFEKFSPPILQLDEVDFYYDPKHVIFSRLSVSADLESRICVVGENGAGKSTMLKLLLGDLAPVRGIRHAHRNLKIGYFSQHHVEQLDLNVSAVELLARKFPGRPEEEYRHQLGRYGISGELAMRPLASLSGGQKSRVAFAQMTMPCPNFYILDEPTNHLDMETIEALGRALNNFRGGVILVSHDERFIRLVCRELWVCEGGGVTRVEGGFDQYRALLQEQFRREGFL

SEQ ID NO: 880966 - protein, 175 aa, Homo sapiens
MATCAEILRSEFPEIDGQVFDYVTGVLHSGSADFESVDDLVEAVGELLQEVSGDSKDDAGIRAVCQRMYNTLRLAEPQSQGNSQVLLDAPIQLSKITENYDCGTKLPGLLKREQSSTVNAKKLEKAEARLKAKQEKRSEKDTLKTSNPLVLEEASASQAGSRKESRLESSGKNKS

SEQ ID NO: 880967 - protein, 120 aa, Homo sapiens
MATCAEILRSEFPEIDGQVFDYVTGVLHSGSADFESVDDLVEAVGELLQEVSGDSKDDAGIRAVCQRMYNTLRLYVPGSEGLMGAKGRRTVRRQEVGEEDLMAIELFPQLLTLRFLSLPT

SEQ ID NO: 880968 - protein, 539 aa, Homo sapiens
MERPAPLAVLPFSDPAHALSLLRGLSQLRAERKFLDVTLEAAGGRDFPAHRAVLAAASPYFRAMFAGQLRESRAERVRLHGVPPDMLQLLLDFSYTGRVAVSGDNAEPLLRAADLLQFPAVKEACGAFLQQQLDLANCLDMQDFAEAFSCSGLASAAQRFILRHVGELGAEQLERLPLARLLRYLRDDGLCVPKEEAAYQLALRWVRADPPRRAAHWPQLLEAVRLPFVRRFYLLAHVEAEPLVARCPPCLRLLREARDFQAARYDRHDRGPCPRMRPRPSTGLAEILVLVGGCDQDCDELVTVDCYNPQTGQWRYLAEFPDHLGGGYSIVALGNDIYVTGGSDGSRLYDCVWRYNSSVNEWAEVAPMLKAREYHSSSVLDGLLYVVAADSTERYDHTTDSWEALQPMTYPMDNCSTTACRGRLYAIGSLAGKETMVMQCYDPDTDLWSLVDCGQLPPWSFAPKTATLNGLMYFVRDDSAEVDVYNPTRNEWDKIPSMNQVNFQAGQHWKHRLVLILQPKCHRDECLGSTAMMDGSHLN

SEQ ID NO: 880969 - protein, 597 aa, Homo sapiens
MERPAPLAVLPFSDPAHALSLLRGLSQLRAERKFLDVTLEAAGGRDFPAHRAVLAAASPYFRAMFAGQLRESRAERVRLHGVPPDMLQLLLDFSYTGRVAVSGDNAEPLLRAADLLQFPAVKEACGAFLQQQLDLANCLDMQDFAEAFSCSGLASAAQRFILRHVGELGAEQLERLPLARLLRYLRDDGLCVPKEEAAYQLALRWVRADPPRRAAHWPQLLEAVRLPFVRRFYLLAHVEAEPLVARCPPCLRLLREARDFQAARYDRHDRGPCPRMRPRPSTGLAEILVLVGGCDQDCDELVTVDCYNPQTGQWRYLAEFPDHLGGGYSIVALGNDIYVTGGSDGSRLYDCVWRYNSSVNEWAEVAPMLKAREYHSSSVLDGLLYVVAADSTERYDHTTDSWEALQPMTYPMDNCSTTACRGRLYAIGSLAGKETMVMQCYDPDTDLWSLVDCGQLPPWSFAPKTATLNGLMYFVRDDSAEVDVYNPTRNEWDKIPSMNQVHVGGSLAVLGGKLYVSGGYDNTFELSDVVEAYDPETRAWSVVGRLPEPTFWHGSVSIFRQFMPQTFSGGRGFELDSGSDDMDPGRPRPPRDPDELH

SEQ ID NO: 880970 - protein, 279 aa, Homo sapiens
LLTSSVAPQENCPKAQGSGLLRCGSDGSRLYDCVWRYNSSVNEWAEVAPMLKAREYHSSSVLDGLLYVVAADSTERYDHTTDSWEALQPMTYPMDNCSTTACRGRLYAIGSLAGKETMVMQCYDPDTDLWSLVDCGQLPPWSFAPKTATLNGLMYFVRDDSAEVDVYNPTRNEWDKIPSMNQVHVGGSLAVLGGKLYVSGGYDNTFELSDVVEAYDPETRAWSVVGRLPEPTFWHGSVSIFRQFMPQTFSGGRGFELDSGSDDMDPGRPRPPRDPDELH

SEQ ID NO: 880971 - protein, 133 aa, Homo sapiens
MLKAREYHSSSVLDGLLYVVAADSTERYDHTTDSWEALQPMTYPMDNCSTTACRGRLYAIGSLAGKETMVMQCYDPDTDLWSLVDCGQLPPWSFAPKTATLNGLMYFVRDDSAEVDVYNPTRNEWDKIPSMNQ

SEQ ID NO: 880972 - protein, 597 aa, Homo sapiens; identical to SEQ ID NO: 880969

SEQ ID NO: 880973 - protein, 103 aa, Homo sapiens
MAWLVALICPRTPDRAAWPLPRAPQEPSPYTVDVIAVGLGSLVLERPGWYDHSSWRLFSLGSWSSSSTCCAGKAEDGGPALSRPAGAWLGVLWAAWNMQLGFL

SEQ ID NO: 880974 - protein, 597 aa, Homo sapiens; identical to SEQ ID NO: 880969

SEQ ID NO: 880975 - protein, 79 aa, Homo sapiens
LHDIKCKVKQQDDDLEAAAGYPEDLPKTIHESGYSKQLIFNVDLKAFYWKKKAPFRSFLARDQKSIPGFRASEDRQPLL

SEQ ID NO: 880976 - protein, 94 aa, Homo sapiens
SVTQGRTLLQPCMCALPPRSEQLSSCCPLHRDDSAEVDVYNPTRNEWDKIPSMNQVNFQAGQHWKHRLVLILQPKCHRDECLGSTAMMGGSHLN

SEQ ID NO: 880977 - protein, 134 aa, Homo sapiens
MSWHLRDPAFCFPRSKLHIVIANLGKMEGIIQPRGSEPSSATVSHASLSFPICNMGRTALLSPEGHCRDSERERRKRCSARPAHGEAWRCSGHPHHHREGPAASGEARSPRQGVGKGLASLLLSGRAKATPLGY

SEQ ID NO: 880978 - protein, 597 aa, Homo sapiens; identical to SEQ ID NO: 880969

SEQ ID NO: 880979 - protein, 516 aa, Homo sapiens
VSLYVLTAVISRNQEGPGEMGKAVLIPKDDQEKMKELFKINQFNLMASDLIALNRSLPDVRLEGCKTKVYPDELPNTSVVIVFHNEAWSTLLRTVYSVINRSPHYLLSEVILVDDASERDFLKLTLENYVKNLEVPVKIIRMEERSGLIRARLRGAAASKGQVITFLDAHCECTLGWLEPLLARIKEDRKTVVCPIIDVISDDTFEYMAGSDMTYGGFNWKLNFRWYPVPQREMDRRKGDRTLPVRTPTMAGGLFSIDRNYFEEIGTYDAGMDIWGGENLEMSFRIWQCGGSLEIVTCSHVGHVFRKATPYTFPGGTGHVINKNNRRLAEVWMDEFKDFFYIISPGVVKVDYGDVSVRKTLRENLKCKPFSWYLENIYPDSQIPRRYYSLGEIRNVETNQCLDNMGRKENEKVGIFNCHGMGGNQVFSYTADKEIRTDDLCLDVSRLNGPVIMLKCHHMRGNQLWEYDAERLTLRHVNSNQCLDEPSEEDKMVPTMQDCSGSRSQQWLLRNMTLGT

SEQ ID NO: 880980 - protein, 516 aa, Homo sapiens; identical to SEQ ID NO: 880979

SEQ ID NO: 880981 - protein, 531 aa, Homo sapiens
VSLYVLTAVISRNQEGPGEMGKAVLIPKDDQEKMKELFKINQFNLMASDLIALNRSLPDVRLEGCKTKVYPDELPNTSVVIVFHNEAWSTLLRTVYSVINRSPHYLLSEVILVDDASERDFLKLTLENYVKNLEVPVKIIRMEERSGLIRARLRGAAASKGQVITFLDAHCECTLGWLEPLLARIKEDRKTVVCPIIDVISDDTFEYMAGSDMTYGGFNWKLNFRWYPVPQREMDRRKGDRTLPVRTPTMAGGLFSIDRNYFEEIGTYDAGMDIWGGENLEMSFRIWQCGGSLEIVTCSHVGHVFRKATPYTFPGGTGHVINKNNRRLAEVWMDEFKDFFYIISPGVVKVDYGDVSVRKTLRENLKCKPFSWYLENIYPDSQIPRRYYSLGEIRNVETNQCLDNMGRKENEKVGIFNCHGMGGNQVFSYTADKEIRTDDLCLDVSRLNGPVIMLKCHHMRGNQLWEYDAETHTLLHIITQSCLSVNKVADGSQHPTVETCNDSTLQKWLLRNYTRMEIFRNIFGNSTDYIL

SEQ ID NO: 880982 - protein, 293 aa, Homo sapiens
VSLYVLTAVISRNQEGPGEMGKAVLIPKDDQEKMKELFKINQFNLMASDLIALNRSLPDVRLEGCKTKVYPDELPNTSVVIVFHNEAWSTLLRTVYSVINRSPHYLLSEVILVDDASERDFLKLTLENYVKNLEVPVKIIRMEERSGLIRARLRGAAASKGQVITFLDAHCECTLGWLEPLLARIKEDRKTVVCPIIDVISDDTFEYMAGSDMTYGGFNWKLNFRWYPVPQREMDRRKGDRTLPVRTPTMAGGLFSIDRNYFEEIGTYDAGMDIWGGENLEMSFRVIAFYFIF

SEQ ID NO: 880983 - protein, 104 aa, Homo sapiens
LAGDDSLNFPPLQVFSYTADKEIRTDDLCLDVSRLNGPVIMLKCHHMRGNQLWEYDAERLTLRHVNSNQCLDEPSEEDKMVPTMQDCSGSRSQQWLLRNMTLGT

SEQ ID NO: 880984 - protein, 516 aa, Homo sapiens; identical to SEQ ID NO: 880979

SEQ ID NO: 880985 - protein, 97 aa, Homo sapiens
AEVPSAGAKWGLRRNVSFNLETDSYLPSPLYPLTRSSRPLLEVDEGLQPTQPGRTGDRNAAEPSWPERGDCLFSDVRNISGNQGDLAASSPWMQGLK

SEQ ID NO: 880986 - protein, 137 aa, Homo sapiens
MPERPTMEHTPRRCFGLASPDPPPQATSSHWDARSEEAALTLLWPSQALPQPLSHLGGMGLFPGVPHYHLPVSETPAQKARAPACFLQHPRGICEGPSGRRCEVRTPCPKGVHAFPSHSSQQHRRPIPQTPKCLQMN

SEQ ID NO: 880987 - protein, 130 aa, Homo sapiens
ANASPVLCMAPKKEKGGTVNTSSKIWEPSLIAAQFNQNDWQASIAFVVGNQIEDDLLIQALTVAVQVPQRKLFSMVSWQDILQQINEINTLVGSASSKKAKKPVGGNAPLYYEVSESVYRRYFCVFRKKN

SEQ ID NO: 880988 - protein, 319 aa, Homo sapiens
RRSPGWEERSADSQGTYSFLLHSIAGAGAESEMSSSGTPDLPVLLTDLKIQYTKIFINNEWHDSVSGKKFPVFNPATEEELCQVEEGDKEDVDKAVKAARQAFQIGSPWRTMDASERGRLLYKLADLIERDRLLLATMESMNGGKLYSNAYLNDLAGCIKTLRYCAGWADKIQGRTIPIDGNFFTYTRHEPIGVCGQIIPWNFPLVMLIWKIGPALSCGNTVVVKPAEQTPLTALHVASLIKEAGFPPGVVNIVPGYGPTAGAAISSPWFCSTVPSPDSPLALSRVPGKHWRARLWNSCYARRAVFSRGSPRVFPVALY

SEQ ID NO: 880989 - protein, 533 aa, Homo sapiens
RRSPGWEERSADSQGTYSFLLHSIAGAGAESEMSSSGTPDLPVLLTDLKIQYTKIFINNEWHDSVSGKKFPVFNPATEEELCQVEEGDKEDVDKAVKAARQAFQIGSPWRTMDASERGRLLYKLADLIERDRLLLATMESMNGGKLYSNAYLNDLAGCIKTLRYCAGWADKIQGRTIPIDGNFFTYTRHEPIGVCGQIIPWNFPLVMLIWKIGPALSCGNTVVVKPAEQTPLTALHVASLIKEAGFPPGVVNIVPGYGPTAGAAISSHMDIDKVAFTGSTEVGKLIKEAAGKSNLKRVTLELGGKSPCIVLADADLDNAVEFAHHGVFYHQGQCCIAASRIFVEESIYDEFVRRSVERAKKYILGNPLTPGVTQGPQIDKEQYDKILDLIESGKKEGAKLECGGGPWGNKGYFVQPTVFSNVTDEMRIAKEEIFGPVQQIMKFKSLDDVIKRANNTFYGLSAGVFTKDIDKAITISSALQAGTVWVNCYGVVSAQCPFGGFKMSGNGRELGEYGFHEYTEVKTVTVKISQKNS

SEQ ID NO: 880990 - protein, 533 aa, Homo sapiens; identical to SEQ ID NO: 880989

SEQ ID NO: 880991 - protein, 533 aa, Homo sapiens; identical to SEQ ID NO: 880989

SEQ ID NO: 880992 - protein, 503 aa, Homo sapiens
MISVSGSSTKKDNAHGGDRDVLIAMCHGWQLLRSYLAPVSNMAVHCELVWPCDRPDADKEDVDKAVKAARQAFQIGSPWRTMDASERGRLLYKLADLIERDRLLLATMESMNGGKLYSNAYLNDLAGCIKTLRYCAGWADKIQGRTIPIDGNFFTYTRHEPIGVCGQIIPWNFPLVMLIWKIGPALSCGNTVVVKPAEQTPLTALHVASLIKEAGFPPGVVNIVPGYGPTAGAAISSHMDIDKVAFTGSTEVGKLIKEAAGKSNLKRVTLELGGKSPCIVLADADLDNAVEFAHHGVFYHQGQCCIAASRIFVEESIYDEFVRRSVERAKKYILGNPLTPGVTQGPQIDKEQYDKILDLIESGKKEGAKLECGGGPWGNKGYFVQPTVFSNVTDEMRIAKEEIFGPVQQIMKFKSLDDVIKRANNTFYGLSAGVFTKDIDKAITISSALQAGTVWVNCYGVVSAQCPFGGFKMSGNGRELGEYGFHEYTEVKTVTVKISQKNS

SEQ ID NO: 880993 - protein, 533 aa, Homo sapiens; identical to SEQ ID NO: 880989

SEQ ID NO: 880994 - protein, 327 aa, Homo sapiens [sequence omitted]

SEQ ID NO: 880995 - protein, 533 aa, Homo sapiens; identical to SEQ ID NO: 880989

SEQ ID NO: 880996 - protein, 533 aa, Homo sapiens; identical to SEQ ID NO: 880989

SEQ ID NO: 880997 - protein, 518 aa, Homo sapiens
RRSPGWEERSADSQGTYSFLLHSIAGAGAESEMSSSGTPDLPVLLTDLKIQYTKIFINNEWHDSVSGKKFPVFNPATEEELCQVEEGDKEDVDKAVKAARQAFQIGSPWRTMDASERGRLLYKLADLIERDRLLLATMESMNGGKLYSNAYLNDLAGCIKTLRYCAGWADKIQGRTIPIDGNFFTYTRHEPIGVCGQIIPWNFPLVMLIWKIGPALSCGNTVVVKPAEQTPLTALHVASLIKEPTAGAAISSHMDIDKVAFTGSTEVGKLIKEAAGKSNLKRVTLELGGKSPCIVLADADLDNAVEFAHHGVFYHQGQCCIAASRIFVEESIYDEFVRRSVERAKKYILGNPLTPGVTQGPQIDKEQYDKILDLIESGKKEGAKLECGGGPWGNKGYFVQPTVFSNVTDEMRIAKEEIFGPVQQIMKFKSLDDVIKRANNTFYGLSAGVFTKDIDKAITISSALQAGTVWVNCYGVVSAQCPFGGFKMSGNGRELGEYGFHEYTEVKTVTVKISQKNS

SEQ ID NO: 880998 - protein, 549 aa, Homo sapiens
RRSPGWEERSADSQGTYSFLLHSIAGAGAESEMSSSGTPDLPVLLTDLKIQYTKIFINNEWHDSVSGKKFPVFNPATEEELCQVEEGDKEDVDKAVKAARQAFQIGSPWRTMDASERGRLLYKLADLIERDRLLLATMESMNGGKLYSNAYLNDLAGCIKTLRYCAGWADKIQGRTIPIDGNFFTYTRHEPIGVCGQIIPWNFPLVMLIWKIGPALSCGNTVVVKPAEQTPLTALHVASLIKEAGFPPGVVNIVPGYGPTAGAAISSHMDIDKVAFTGSTEVGKLIKEAAGKSNLKRVTLELGGKSPCIVLADADLDNAVEFAHHGVFYHQGQCCIAASRIFVEESIYDEFVRRSVERAKKYILGNPLTPGVTQGPQYVFLVNLRALSDSWGQIDKEQYDKILDLIESGKKEGAKLECGGGPWGNKGYFVQPTVFSNVTDEMRIAKEEIFGPVQQIMKFKSLDDVIKRANNTFYGLSAGVFTKDIDKAITISSALQAGTVWVNCYGVVSAQCPFGGFKMSGNGRELGEYGFHEYTEVKTVTVKISQKNS

SEQ ID NO: 880999 - protein, 514 aa, Homo sapiens
RRSPGWEERSADSQGTYSFLLHSIAGAGAESEMSSSGTPDLPVLLTDLKIQYTKIFINNEWHDSVSGKKFPVFNPATEEELCQVEEGDKEDVDKAVKAARQAFQIGSPWRTMDASERGRLLYKLADLIERDRLLLATMESMNGGKLYSNAYLNDLAGCIKTLRYCAGWADKIQGRTIPIDGNFFTYTRHEPIGVCGQIIPWNFPLVMLIWKIGPALSCGNTVVVKPAEQTPLTALHVASLIKEAGFPPGVVNIVPGYGPTAGAAISSHMDIDKVAFTGSTEGKLIKEAVGVLADADLDNAVEFAHHGVFYHQGQCCIAASRIFVEESIYDEFVRRSVERAKKYILGNPLTPGVTQGPQIDKEQYDKILDLIESGKKEGAKLECGGGPWGNKGYFVQPTVFSNVTDEMRIAKEEIFGPVQQIMKFKSLDDVIKRANNTFYGLSAGVFTKDIDKAITISSALQAGTVWVNCYGVVSAQCPFGGFKMSGNGRELGEYGFHEYTEVKTVTVKISQKNS

SEQ ID NO: 881000 - protein, 515 aa, Homo sapiens
RRSPGWEERSADSQGTYSFLLHSIAGAGAESEMSSSGTPDLPVLLTDLKIQYTKIFINNEWHDSVSGKKFPVFNPATEEELCQVEEGDKEDVDKAVKAARQAFQIGSPWRTMDASERGRLLYKLADLIERDRLLLATMESMNGGKLYSNAYLNDLAGCIKTLRYCAGWADKIQGRTIPIDGNFFTYTRHEPIGVCGQIIPWNFPLVMLIWKIGPALSCGNTVVVKPAEQTPLTALHVASLIKEAGFPPGVVNIVPGYGPTAGAAISSHMDIDKVAFTGSTEVGKLIKEAAGKSNLKRVTLELGGKSPCIVLADADLDNAVEFAHHGVFYHQGQCCIAASRIFVEESIYDEFVRRSVERAKKYILGNPLTPGVTQGPQEGAKLECGGGPWGNKGYFVQPTVFSNVTDEMRIAKEEIFGPVQQIMKFKSLDDVIKRANNTFYGLSAGVFTKDIDKAITISSALQAGTVWVNCYGVVSAQCPFGGFKMSGNGRELGEYGFHEYTEVKTVTVKISQKNS

SEQ ID NO: 881001 - protein, 533 aa, Homo sapiens; identical to SEQ ID NO: 880989

SEQ ID NO: 881002 - protein, 508 aa, Homo sapiens
RRSPGWEERSADSQGTYSFLLHSIAGAGAESEMSSSGTPDLPVLLTDLKIQYTKIFINNEWHDSVSGKKFPVFNPATEEELCQVEEGDKEDVDKAVKAARQAFQIGSPWRTMDASERGRLLYKLADLIERDRLLLATMESMNGGKLYSNAYLNDLAGCIKTLRYCAGWADKIQGRTIPIDGNFFTYTRHEPIGVCGQIIPWNFPLVMLIWKIGPALSCGNTVVVKPAEQTPLTALHVASLIKEAGFPPGVVNIVPGYGPTAGAAISSHMDIDKVAFTGSTEVGKLIKEAAGKSNLKRVTLELGGKSPCIVLADADLDNAVEFAHHGVFYHQGQCCIAASRIFVEESIYDEFVRRSVERAKKYILGNPLTPGVTQGPQIDKEQYDKILDLIESGKKEGAKLECGGGPWGNKGYFVQPTVFSNVTDEMRIAKEEIFGPVQQIMKFKSLDDVIKRANNTFYGLSAGVFTKDIDKAITISSALQAGTVWGEYGFHEYTEVKTVTVKISQKNS

SEQ ID NO: 881003 - protein, 454 aa, Homo sapiens
RRSPGWEERSADSQGTYSFLLHSIAGAGAESEMSSSGTPDLPVLLTDLKIQYTKIFINNEWHDSVSGKKFPVFNPATEEELCQVEEGDKEDVDKAVKAARQAFQIGSPWRTMDASERGRLLYKLADLIERDRLLLATMESMNGGKLYSNAYLNDLAGCIKTLRYCAGWADKIQGRTIPIDGNFFTYTRHEPIGVCGQIIPWNFPLVMLIWKIGPALSCGNTVVVKPAEQTPLTALHVASLIKEAGFPPGVVNIVPGYGPTAGAAISSHMDIDKVAFTGSTEVGKLIKEAAGKSNLKRVTLELGGKSPCIVLADADLDNAVEFAHHGVFYHQGQCCIAASRIFVEESIYDEFVRRSVERAKKYILGNPLTPGVTQGPQIDKEQYDKILDLIESGKKEGAKLECGGGPWGNKGYFVQPTVFSNVTDEMRIAKEEIFGPVQQIMKFKSLDDVILIKP

SEQ ID NO: 881004 - protein, 145 aa, Homo sapiens
PGCRIRHEGAKLECGGGPWGNKGYFVQPTVFSNVTDEMRIAKEEIFGPVQQIMKFKSLDDVIKRANNTFYGLSAGVFTKDIDKAITISSALQAGTVWVNCYGVVSAQCPFGGFKMSGNGRELGEYGFHEYTEVKTVTVKISQKNS

SEQ ID NO: 881005 - protein, 295 aa, Homo sapiens
MLLVLLVLSWLPHGGALSLAEASRASFPGPSELHSEDSRFRELRKRYEDLLTRLRANQSWEDSNTDLVPAPAVRILTPEVRLGIRRPPCTCVSLGPPFPRGFPEASRLHRALFRLSPTASRSWDVTRPLRRQLSLARPQAPALQPATVAAAVAVGPTAGRIFVRTAPAGVALAAASRQGAPQSACAQIRGPLSARARALLPSAHGPRVAGRPGLGRLGAVATGGASDHVHRRVPEPVPGGKTCTRKIKTSLHRLKSPNTVPQAPPWPACPPQLTIPMVPHSKKDPTPGCRLSQTL

SEQ ID NO: 881006 - protein, 295 aa, Homo sapiens; identical to SEQ ID NO: 881005

SEQ ID NO: 881007 - protein, 331 aa, Homo sapiens
  misc_feature (13)..(13): Xaa can be any naturally occurring amino acid
DWPRAKIGTSLVXNGPEATRCTAMPGQELRTVNGSQMLLVLLVLSWLPHGGALSLAEASRASFPGPSELHSEDSRFRELRKRYEDLLTRLRANQSWEDSNTDLVPAPAVRILTPEVRLGIRRPPCTCVSLGPPFPRGFPEASRLHRALFRLSPTASRSWDVTRPLRRQLSLARPQAPALQPATVAAAVAVGPTAGRIFVRTAPAGVALAAASRQGAPQSACAQIRGPLSARARALLPSAHGPRVAGRPGLGRLGAVATGGASDHVHRRVPEPVPGGKTCTRKIKTSLHRLKSPNTVPQAPPWPACPPQLTIPMVPHSKKDPTPGCRLSQTL

SEQ ID NO: 881008 - protein, 295 aa, Homo sapiens; identical to SEQ ID NO: 881005

SEQ ID NO: 881009 - protein, 241 aa, Homo sapiens
MLLVLLVLSWLPHGGALSLAEASRASFPGPSELHSEDSRFRELRKRYEDLLTRLRANQSWEDSNTDLVPAPAVRILTPEVRLGIRRPPCTCVSLGPPFPRGFPEASRLHRALFRLSPTASRSWDVTRPLRRQLSLARPQAPALQLLAESSSARPQLELHLRPQAARGRRRARARKTGDHCPLGPGRCCRLHTVRASLEDLGWADWVLSPREVQVTMCIGACPSQFRAAKHARARSRRACTA

SEQ ID NO: 881010 - protein, 241 aa, Homo sapiens
MLLVLLVLSWLPHGGALSLAEASRASFPGPSELHSEDSRFRELRKRYEDLLTRLRANQSWEDSNTDLVPAPAVRILTPEVRLGIRRPPCTSATVAAAVAVGPTAGRIFVRTAPAGVALAAASRQGAPQSACAQIRGPLSARARALLPSAHGPRVAGRPGLGRLGAVATGGASDHVHRRVPEPVPGGKTCTRKIKTSLHRLKSPNTVPQAPPWPACPPQLTIPMVPHSKKDPTPGCRLSQTL

SEQ ID NO: 881011 - protein, 273 aa, Homo sapiens
MLLVLLVLSWLPHGGALSLAEASRASFPGPSELHSEDSRFRELRKRYEDLLTRLRANQSWEDSNTDLVPAPAVRILTPEVRLGIRRPPCTCVSLGPPFPRGFPEASRLHRALFRLSPTASRSWDVTRPLRRQLSLARPQAPALQPATVAAAVAVGPTAGRIFVRTAPAGVALAAASRQGAPQSACAQIRGPLSARARALLPSAHGPRVAGRPGLGRLGAVATRKIKTSLHRLKSPNTVPQAPPWPACPPQLTIPMVPHSKKDPTPGCRLSQTL

SEQ ID NO: 881012 - protein, 223 aa, Homo sapiens
MLLVLLVLSWLPHGGALSLAEASRASFPGPSELHSEDSRFRELRKRYEDLLTRLRANQSWEDSNTDLVPAPAVRILTPEVRLGIRRPPCTCVSLGPPFPRGFPEASRLHRALFRLSPTASRSWDVTRPLRRQLSLARPQAPALQPATVAAAVAVGPTAGRIFVRTAPAGVALAAASRQGAPQSACAQIRGPLSARARALLPSAHGPRVAGRPGLGRLGAVATA

SEQ ID NO: 881013 - protein, 254 aa, Homo sapiens
MLLVLLVLSWLPHGGALSLAEASRASFPGPSELHSEDSRFRELRKRYEDLLTRLRANQSWEDSNTDLVPAPAVRILTPEVRLGIRRPPCTCVSLGPPFPRGFPEASRLHRALFRLSPTASRSWDVTRPLRRQLSLARPQAPALQPATVAAAVAVGPTAGRIFVRTAPAGVALAAASRQGAPQSACAQIRGPLSARARALLPSAHGPRVAGRPGLGRLGAVATPPWPACPPQLTIPMVPHSKKDPTPGCRLSQTL

SEQ ID NO: 881014 - protein, 122 aa, Homo sapiens
MLLVLLVLSWLPHGGALSLAEASRASFPGPSELHSEDSRFRELRKRYEDLLTRLRANQSWEDSNTDLVPAPAVRILTPEVRLGIRRPPCTWEVQVTMCIGACPSQFRAAKHARARSRRACTA

SEQ ID NO: 881015 - protein, 103 aa, Homo sapiens
MLLVLLVLSWLPHGGALSLAEASRASFPGPSELHSEDSRFRELRKRYEDLLTRLRANQSWEDSNTDLVPAPAVRILTPEGKGNLRDPLPPPKQPPYLIRDSSS

SEQ ID NO: 881016 - protein, 261 aa, Homo sapiens
MTCWLRGVTATFGRPAEWPGYLSHLCGRSAAMDLGPMRKSYRGDREAFEETHLTSLDPVKQFAAWFEEAVQCPDIGEANAMCLATCTRDGKPSARMLLLKGFGKDGFRFFTNFESRKGKELDSNPFASLVFYWEPLNRQVRVEGPVKKLPEEEAECYFHSRPKSSQIGAVVSHQSSVIPDREYLRKKNEELEQLYQDQEVPKPKSWGGYVLYPQVMEFWQGQTNRLHDRIVFRRGLPTGDSPLGPMTHRGEEDWLYERLAP

SEQ ID NO: 881017 - protein, 166 aa, Homo sapiens
MLLLKGFGKDGFRFFTNFESRKGKELDSNPFASLVFYWEPLNRQVRVEGPVKKLPEEEAECYFHSRPKSSQIGAVVSHQSSVIPDREYLRKKNEELEQLYQDQEVPKPKSWGGYVLYPQVMEFWQGQTNRLHDRIVFRRGLPTGDSPLGPMTHRGEEDWLYERLAP

SEQ ID NO: 881018 - protein, 261 aa, Homo sapiens; identical to SEQ ID NO: 881016

SEQ ID NO: 881019 - protein, 117 aa, Homo sapiens
GRVGRPTRPGTHRITGKLQGSRFHLNIGRDFKQSHLPEKEWAVTRNFYSQSVRNFVEGLHVLVPIGQEDFNQLYYLCFFMETVCMYTYIFQKEKLNDYRDYVFQTTHVSAFLTPHLC

SEQ ID NO: 881020 - protein, 261 aa, Homo sapiens; identical to SEQ ID NO: 881016

SEQ ID NO: 881021 - protein, 261 aa, Homo sapiens; identical to SEQ ID NO: 881016

SEQ ID NO: 881022 - protein, 261 aa, Homo sapiens; identical to SEQ ID NO: 881016

SEQ ID NO: 881023 - protein, 120 aa, Homo sapiens
MPAKHAFLKTHKSVGERNHPVSLWSPTGLNLAPPLPAGTWARDLACLCVCDNRPTFEGLNELLRWVHLLWACALQLSCLFPACRRPPLPVLMAGCGFSFTSRTLIPLLPLSSTGSHLTVR

SEQ ID NO: 881024 - protein, 195 aa, Homo sapiens
MTCWLRGVTATFGRPAEWPGYLSHLCGRSAAMDLGPMRKSYRGDREHLGELIVTVACGPRAAKTEVFGLGPLGFFLNGRGLGSSGSLNTRGTPNAMCLATCTRDGKPSARMLLLKGFGKDGFRFFTNFESRKGKELDSNPFASLVFYWEPLNRQVSEFSQDSLGWAGLAGPEFMATSSEGPQTGQTSQLGTLPLK

SEQ ID NO: 881025 - protein, 261 aa, Homo sapiens; identical to SEQ ID NO: 881016

SEQ ID NO: 881026 - protein, 426 aa, Homo sapiens
RRPAKEGRGWCLWGAAPGLGGLLAGCWAGAKGCSVSFSGALGSAMALQGISVMELSGLAPGPFCAMVLADFGARVVRVDRPGSRYDVSRLGRGKRSLVLDLKQPRGAAVLRRLCKRSDVLLEPFRRGVMEKLQLGPEILQRENPRLIYARLSGFGQSGSFCRLAGHDINYLALSGVLSKIGRSGENPYAPLNLLADFAGGGLMCALGIIMALFDRTRTDKGQVIDANMVEGTAYLSSFLWKTQKSSLWEAPRGQNMLDGGAPFYTTYRTADGEFMAVGAIEPQFYELLIKGLGLKSDELPNQMSMDDWPEMKKKFADVFAEKTKAEWCQIFDGTDACVTPVLTFEEVVHHDHNKERGSFITSEEQDVSPRPAPLLLNTPAIPSFKRDPFIGEHTEEILEEFGFSREEIYQLNSDKIIESNKVKASL

SEQ ID NO: 881027 - protein, 426 aa, Homo sapiens; identical to SEQ ID NO: 881026

SEQ ID NO: 881028 - protein, 426 aa, Homo sapiens; identical to SEQ ID NO: 881026

SEQ ID NO: 881029 - protein, 298 aa, Homo sapiens
MEKLQLGPEILQRENPRLIYARLSGFGQSGSFCRLAGHDINYLALSGVLSKIGRSGENPYAPLNLLADFAGGGLMCALGIIMALFDRTRTDKGQVIDANMVEGTAYLSSFLWKTQKSSLWEAPRGQNMLDGGAPFYTTYRTADGEFMAVGAIEPQFYELLIKGLGLKSDELPNQMSMDDWPEMKKKFADVFAEKTKAEWCQIFDGTDACVTPVLTFEEVVHHDHNKERGSFITSEEQDVSPRPAPLLLNTPAIPSFKRDPFIGEHTEEILEEFGFSREEIYQLNSDKIIESNKVKASL

SEQ ID NO: 881030 - protein, 426 aa, Homo sapiens
RRPAKEGRGWCLWGAAPGLGGLLAGCWAGAKGCSVSFSGALGSAMALQGISVMELSGLAPGPFCAMVLADFGARVVRVDRPGSRYDVSRLGRGKRSLVLDLKQPRGAAVLRRLCKRSDVLLEPFRRGVMEKLQLGPEILQRENPRLIYARLSGFGQSGSFCRLAGHDINYLALSGVLSKIGRSGENPYAPLNLLADFAGGGLMCALGIIMALFDRTRTDKGQVIDANMVEGTAYLSSFLWKTQKSSLWEAPRGQNMLDGGAPFYTTYRTADGEFMAVGAIEPQFYELLIKGLGLKSDELPNQMSMDDWPEMKKKFADVFAEKTKAEWCQIFDGTDACVTPVLTFEEVVHHDHNKERGSFITSEEQDVSPRPAPLLLNTPAIPSFKRDPFIGEHTEEILEEFGFSREEIYQLNSDKIIESNKIYSVE

SEQ ID NO: 881031 - protein, 332 aa, Homo sapiens
RRPAKEGRGWCLWGAAPGLGGLLAGCWAGAKGCSVSFSGALGSAMALQGISVMELSGLAPGPFCAMVLADFGARVVRVDRPGSRYDVSRLGRGKRSLVLDLKQPRGAAVLRRLCKRSDVLLEPFRRGVMEKLQLGPEILQRENPRLIYARLSGFGQSGSFCRLAGHDINYLALSGVLSKIGRSGENPYAPLNLLADFAGGGLMCALGIIMALFDRTRTDKGQVIDANMVEGTAYLSSFLWKTQKSSLWEAPRGQNMLDGGAPFYTTYRTADGEFMAVGAIEPQFYELLIKGLGELILLKIQQEAVSCQARQTLVSVKQWPSLQPKSWGFVWQ

SEQ ID NO: 881032 - protein, 426 aa, Homo sapiens; identical to SEQ ID NO: 881026

SEQ ID NO: 881033 - protein, 242 aa, Homo sapiens
RRPAKEGRGWCLWGAAPGLGGLLAGCWAGAKGCSVSFSGALGSAMALQGISVMELSGLAPGPFCAMVLADFGARVVRVDRPGSRYDVSRLGRGKRSLVLDLKQPRGAAVLRRLCKRSDVLLEPFRRGVMEKLQLGPEILQRENPRLIYARLSGFGQSGSFCRLAGHDINYLALSGGRNSIFKFFSVENSEIESVGSTSRTEHVGWWSTFLYDLQDSRWGIHGCWSNRTPVLRAADQRTWTKV

SEQ ID NO: 881034 - protein, 152 aa, Homo sapiens
MVPDMQRTQFYELLIKGLGLKSDELPNQMSMDDWPEMKKKFADVFAEKTKAEWCQIFDGTDACVTPVLTFEEVVHHDHNKERGSFITSEEQDVSPRPAPLLLNTPAIPSFKRDPFIGEHTEEILEEFGFSREEIYQLNSDKIIESNKVKASL

SEQ ID NO: 881035 - protein, 438 aa, Homo sapiens
RRPAKEGRGWCLWGAAPGLGGLLAGCWAGAKGCSVSFSGALGSAMALQGISVMELSGLAPGPFCAMVLADFGARVVRVDRPGSRYDVSRLGRGKRSLVLDLKQPRGAAVLRRLCKRSDVLLEPFRRGVMEKLQLGPEILQRENPRLIYARLSGFGQSGSFCRLAGHDINYLALSGVLSKIGRSGENPYAPLNLLADFAGGGLMCALGIIMALFDRTRTDKGQVIDANMVEGTAYLSSFLWKTQKSSLWEAPRGQNMLDGGAPFYTTYRTADGEFMAVGAIEPQFYELLIKGLGLKSDELPNQMSMDDWPEMKKKFADVFAEKTKAEWCQIFDGTDACVTPVLTFEEVVHHDHNKERGSFITSEEQDVSPRPAPLLLNTPAIPSFKRDPFIGEHTEEILEEFGFSREEIYQLNSDKIIESNKAGSKFWILYPTHSNIQK

SEQ ID NO: 881036 - protein, 328 aa, Homo sapiens
MVSIPEYYEGKNVLLTGATGFLGKVLLEKLLRSCPKVNSVYVLVRQKAGQTPQERVEEVLSGKLFDRLRDENPDFREKIIAINSELTQPKLALSEEDKEVIIDSTNIIFHCAATVRFNENLRDAVQLNVIATRQLILLAQQMKNLEVFMHVSTAYAYCNRKHIDEVVYPPPVDPKKLIDSLEWMDDGLVNDITPKLIGDRPNTYIYTKALAEYVVQQEGAKLNVAIVRPSIVGASWKEPFPGWIDNFNGPSGLFIAAGKGILRTIRASNNALADLVPVDVVVNMSLAAAWYSGVNRPRNIMVYNCTTGSTNPFHWGEVGMILPVFLNV

SEQ ID NO: 881037 - protein, 515 aa, Homo sapiens
MVSIPEYYEGKNVLLTGATGFLGKVLLEKLLRSCPKVNSVYVLVRQKAGQTPQERVEEVLSGKLFDRLRDENPDFREKIIAINSELTQPKLALSEEDKEVIIDSTNIIFHCAATVRFNENLRDAVQLNVIATRQLILLAQQMKNLEVFMHVSTAYAYCNRKHIDEVVYPPPVDPKKLIDSLEWMDDGLVNDITPKLIGDRPNTYIYTKALAEYVVQQEGAKLNVAIVRPSIVGASWKEPFPGWIDNFNGPSGLFIAAGKGILRTIRASNNALADLVPVDVVVNMSLAAAWYSGVNRPRNIMVYNCTTGSTNPFHWGEVEYHVISTFKRNPLEQAFRRPNVNLTSNHLLYHYWIAVSHKAPAFLYDIYLRMTGRSPRMMKTITRLHKAMVFLEYFTSNSWVWNTENVNMLMNQLNPEDKKTFNIDVRQLHWAEYIENYCLGTKKYVLNEEMSGLPAARKHLNKLRNIRYGFNTILVILIWRIFIARSQMARNIWYFVVSLCYKFLSYFRASSTMRY

SEQ ID NO: 881038 - protein, 515 aa, Homo sapiens; identical to SEQ ID NO: 881037

SEQ ID NO: 881039 - protein, 80 aa, Homo sapiens
MFPLVKSALNRLQVRSIQQTMARQSHQKRTPDFHDKYGNAVLASGATFCIVTWTYVATQVGIEWNLSPVGRVTPKEWRNQ

SEQ ID NO: 881040 - protein, 80 aa, Homo sapiens; identical to SEQ ID NO: 881039

SEQ ID NO: 881041 - protein, 85 aa, Homo sapiens
RRLQRNFSSGKSALNRLQVRSIQQTMARQSHQKRTPDFHDKYGNAVLASGATFCIVTWTYVATQVGIEWNLSPVGRVTPKEWRNQ

SEQ ID NO: 881042 - protein, 80 aa, Homo sapiens; identical to SEQ ID NO: 881039

SEQ ID NO: 881043 - protein, 80 aa, Homo sapiens; identical to SEQ ID NO: 881039

SEQ ID NO: 881044 - protein, 80 aa, Homo sapiens; identical to SEQ ID NO: 881039

SEQ ID NO: 881045 - protein, 116 aa, Homo sapiens
MLKKKKKKKTSCRIRHESELAPKQQLYCRSSSFTFTMFPLVKSALNRLQVRSIQQTMARQSHQKRTPDFHDKYGNAVLASGATFCIVTWTYVATQVGIEWNLSPVGRVTPKEWRNQ

SEQ ID NO: 881046 - protein, 159 aa, Homo sapiens
MKTNRKRNTITGGTHPTGGKRHHKGELYNPPRTNQIKATAGHKRGQHSRAYRRPTQVAQQRKSEEPSTGATTRHQSYDKTHARRRNRTAEHQQTNAGQRRQQQENNERQTTPKQTDPQAQTGRRTRQPHRHQSDQSTRRQEKEEKDANTRQRHTHKTDW

SEQ ID NO: 881047 - protein, 80 aa, Homo sapiens; identical to SEQ ID NO: 881039

SEQ ID NO: 881048 - protein, 80 aa, Homo sapiens; identical to SEQ ID NO: 881039

SEQ ID NO: 881049 - protein, 80 aa, Homo sapiens; identical to SEQ ID NO: 881039

SEQ ID NO: 881050 - protein, 156 aa, Homo sapiens
MASRVLSAYVSRLPAAFAPLPRVRMLAVARPLSTALCSAGTQTRLGTLQPALVLAQVPGRVTQLCRQYSDMPPLTLEGIQDRVLYVLKLYDKIDPEKLSVNSHFMKDLGLDSLDQVEIIMAMEDEFGFEIPDIDAEKLMCPQEIVDYIADKKDVYE

SEQ ID NO: 881051 - protein, 180 aa, Homo sapiens
CAPPERNPGPECGGLCILAWVGVAMASRVLSAYVSRLPAAFAPLPRVRMLAVARPLSTALCSAGTQTRLGTLQPALVLAQVPGRVTQLCRQYSDMPPLTLEGIQDRVLYVLKLYDKIDPEKLSVNSHFMKDLGLDSLDQVEIIMAMEDEFGFEIPDIDAEKLMCPQEIVDYIADKKDVYE

SEQ ID NO: 881052 - protein, 180 aa, Homo sapiens; identical to SEQ ID NO: 881051

SEQ ID NO: 881053 - protein, 156 aa, Homo sapiens; identical to SEQ ID NO: 881050

SEQ ID NO: 881054 - protein, 156 aa, Homo sapiens; identical to SEQ ID NO: 881050

SEQ ID NO: 881055 - protein, 180 aa, Homo sapiens; identical to SEQ ID NO: 881051

SEQ ID NO: 881056 - protein, 82 aa, Homo sapiens
RAAGKEPWSGVRRAVHPGLGWRSHGVSCPFSLCQPPARGLCAAAPGPDAGRGPASQHRSLLRGDPDEARDFAAGLSARAGSW

SEQ ID NO: 881057 - protein, 103 aa, Homo sapiens [sequence omitted]

SEQ ID NO: 881058 - protein, 180 aa, Homo sapiens; identical to SEQ ID NO: 881051

SEQ ID NO: 881059 - protein, 156 aa, Homo sapiens; identical to SEQ ID NO: 881050

SEQ ID NO: 881060 - protein, 156 aa, Homo sapiens; identical to SEQ ID NO: 881050

SEQ ID NO: 881061 - protein, 180 aa, Homo sapiens; identical to SEQ ID NO: 881051

SEQ ID NO: 881062 - protein, 115 aa, Homo sapiens [sequence omitted]

SEQ ID NO: 881063 - protein, 115 aa, Homo sapiens [sequence omitted]

SEQ ID NO: 881064 - protein, 67 aa, Homo sapiens
AGQAHARSWSRRGGAGGRGCALSYSSPRERGEPVAAAASVAAVGGRYGFSMGRVGSGLLPHVHVSLF

SEQ ID NO: 881065 - protein, 112 aa, Homo sapiens
MDSPWDELALAFSRTSMFPFFDIAHYLVSVMAVKRQPGAAALAWKNPISSWFTAMLHCFGGGILSCRRRRRRSLNLDNALLSLFKDTFNSPIFNHKEYIVLICLALSIGDPL

SEQ ID NO: 881066 - protein, 291 aa, Homo sapiens
MDSPWDELALAFSRTSMFPFFDIAHYLVSVMAVKRQPGAAALAWKNPISSWFTAMLHCFGGGILSCLLLAEPPLKFLANHTNILLASSIWYITFFCPHDLVSQGYSYLPVQLLASGMKEVTRTWKIVGGVTHANSYYKNGWIVMIAIGWARGAGGTIITNFERLVKGDWKPEGDEWLKMSYPAKVTLLGSVIFTFQHTQHLAISKHNLMFLYTIFIVATKITMMTTQTSTMTFAPFEDTLSWMLFGWQQPFSSCEKKSEAKSPSNGVGSLASKPVDVASDNVKKKHTKKNE

SEQ ID NO: 881067 - protein, 338 aa, Homo sapiens
MDSPWDELALAFSRTSMFPFFDIAHYLVSVMAVKRQPGAAALAWKNPISSWFTAMLHCFGGGILSCLLLAEPPLKFLANHTNILLASSIWTRAWSRVPPATKVSAQKSDIPKIPKYKSDTSCLSSIWKPAIQFILERYITFFCPHDLVSQGYSYLPVQLLASGMKEVTRTWKIVGGVTHANSYYKNGWIVMIAIGWARGAGGTIITNFERLVKGDWKPEGDEWLKMSYPAKVTLLGSVIFTFQHTQHLAISKHNLMFLYTIFIVATKITMMTTQTSTMTFAPFEDTLSWMLFGWQQPFSSCEKKSEAKSPSNGVGSLASKPVDVASDNVKKKHTKKNE

SEQ ID NO: 881068 - protein, 237 aa, Homo sapiens
MLHCFGGGILSCLLLAEPPLKFLANHTNILLASSIWYITFFCPHDLVSQGYSYLPVQLLASGMKEVTRTWKIVGGVTHANSYYKNGWIVMIAIGWARGAGGTIITNFERLVKGDWKPEGDEWLKMSYPAKVTLLGSVIFTFQHTQHLAISKHNLMFLYTIFIVATKITMMTTQTSTMTFAPFEDTLSWMLFGWQQPFSSCEKKSEAKSPSNGVGSLASKPVDVASDNVKKKHTKKNE

SEQ ID NO: 881069 - protein, 127 aa, Homo sapiens
DSCSLRCASGWRSHLASPAKVTLLGSVIFTFQHTQHLAISKHNLMFLYTIFIVATKITMMTTQTSTMTFAPFEDTLSWMLFGWQQPFSSCEKKSEAKSPSNGVGSLASKPVDVASDNVKKKHTKKNE

SEQ ID NO: 881070 - protein, 222 aa, Homo sapiens
MDSPWDELALAFSRTSMFPFFDIAHYLVSVMAVKRQPGAAALAWKNPISSWFTAMLHCFGGGILSCLLLAEPPLKFLANHTNILLASSIWYITFFCPHDLVSQGYSYLPVQLLASGMKEVTRTWKIVGGVTHANSYYKNGWIVMIAIGWARGAGGTIITNFERLVKGDWKPEGDEWLKMSYPAKVTLLGSVIFTFQHTQHLAISKHNLMFLYTIFIVATKSL

SEQ ID NO: 881071 - protein, 67 aa, Homo sapiens; identical to SEQ ID NO: 881064

SEQ ID NO: 881072 - protein, 130 aa, Homo sapiens
EQLDTREFCNKRQRNLTGHSPAKVTLLGSVIFTFQHTQHLAISKHNLMFLYTIFIVATKITMMTTQTSTMTFAPFEDTLSWMLFGWQQPFSSCEKKSEAKSPSNGVGSLASKPVDVASDNVKKKHTKKNE

SEQ ID NO: 881073 - protein, 291 aa, Homo sapiens; identical to SEQ ID NO: 881066

SEQ ID NO: 881074 - protein, 180 aa, Homo sapiens
MDSPWDELALAFSRTSMFPFFDIAHYLVSVMAVKRQPGAAALAWKNPISSWFTAMLHCFGGGILSCLLLAEPPLKFLANHTNILLASSIWYITFFCPHDLVSQGYSYLPVQLLASGMKEVTRTWKIVGGVTHANSYYKNGWIVMIAIGWARGAGGTIITNFERLVKGDWKPEGDEWLKMS

SEQ ID NO: 881075 - protein, 260 aa, Homo sapiens
SDTLLYSRKLTEHCKPTIMEKIIEKYVICRYSGILFSHKKNEVMPLANHTNILLASSIWYITFFCPHDLVSQGYSYLPVQLLASGMKEVTRTWKIVGGVTHANSYYKNGWIVMIAIGWARGAGGTIITNFERLVKGDWKPEGDEWLKMSYPAKVTLLGSVIFTFQHTQHLAISKHNLMFLYTIFIVATKITMMTTQTSTMTFAPFEDTLSWMLFGWQQPFSSCEKKSEAKSPSNGVGSLASKPVDVASDNVKKKHTKKNE

SEQ ID NO: 881076 - protein, 291 aa, Homo sapiens; identical to SEQ ID NO: 881066

SEQ ID NO: 881077 - protein, 222 aa, Homo sapiens; identical to SEQ ID NO: 881070

SEQ ID NO: 881078 - protein, 533 aa, Homo sapiens
GAAQRHPWERPPGGVGAGEGGAMGQGDESERIVINVGGTRHQTYRSTLRTLPGTRLAWLAEPDAHSHFDYDPRADEFFFDRHPGVFAHILNYYRTGKLHCPADVCGPLYEEELAFWGIDETDVEPCCWMTYRQHRDAEEALDSFGGAPLDNSADDADADGPGDSGDGEDELEMTKRLALSDSPDGRPGGFWRRWQPRIWALFEDPYSSRYARYVAFASLFFILVSITTFCLETHERFNPIVNKTEIENVRNGTQVRYYREAETEAFLTYIEGVCVVWFTFEFLMRVIFCPNKVEFIKNSLNIIDFVAILPFYLEVGLSGLSSKAAKDVLGFLRVVRFVRILRIFKLTRHFVGLRVLGHTLRASTNEFLLLIIFLALGVLIFATMIYYAERIGAQPNDPSASEHTHFKNIPIGFWWAVVTMTTLGYGDMYPQTWSGMLVGALCALAGVLTIAMPVPVIVNNFGMYYSLAMAKQKLPKKKKKHIPRPPQLGSPNYCKSVVNSPHHSTQSDTCPLAQEEILEINRAGRKPLRGMSI

SEQ ID NO: 881079 - protein, 607 aa, Homo sapiens
GAAQRHPWERPPGGVGAGEGGAMGQGDESERIVINVGGTRHQTYRSTLRTLPGTRLAWLAEPDAHSHFDYDPRADEFFFDRHPGVFAHILNYYRTGKLHCPADVCGPLYEEELAFWGIDETDVEPCCWMTYRQHRDAEEALDSFGGAPLDNSADDADADGPGDSGDGEDELEMTKRLALSDSPDGRPGGFWRRWQPRIWALFEDPYSSRYARYVAFASLFFILVSITTFCLETHERFNPIVNKTEIENVRNGTQVRYYREAETEAFLTYIEGVCVVWFTFEFLMRVIFCPNKVEFIKNSLNIIDFVAILPFYLEVGLSGLSSKAAKDVLGFLRVVRFVRILRIFKLTRHFVGLRVLGHTLRASTNEFLLLIIFLALGVLIFATMIYYAERIGAQPNDPSASEHTHFKNIPIGFWWAVVTMTTLGYGDMYPQTWSGMLVGALCALAGVLTIAMPVPVIVNNFGMYYSLAMAKQKLPKKKKKHIPRPPQLGSPNYCKSVVNSPHHSTQSDTCPLAQEEILEINRADSKLNGEVAKAALANEDCPHIDQALTPDEGLPFTRSGTRERYGPCFLLSTGEYACPPGGGMRKDLCKESPVIAKYMPTEAVRVT

SEQ ID NO: 881080 - protein, 168 aa, Homo sapiens
MGQGDESERIVINVGGTRHQTYRSTLRTLPGTRLAWLAEPDAHSHFDYDPRADEFFFDRHPGVFAHILNYYRTGKLHCPADVCGPLYEEELAFWGIDETDVEPCCWMTYRQHRDAEEALDSFGGAPLDNSADDADADGPGDSGDGEDELEMTKRLALSDSPDGRPGGF

SEQ ID NO: 881081 - protein, 107 aa, Homo sapiens
LPCFYSSFRAQFKCHLSLIFIFPHLSDRCFFYELPEKPLLILTLQPLYLINKLTKQANIEYLLGTQVLGSAMWKRIMRHDYQFQLCKRTQCIREFKHSLRSSFLNCV

SEQ ID NO: 881082 - protein, 504 aa, Homo sapiens
MMTTSLIWGIAIAACCCLWLILGIRRRQTGEPPLENGLIPYLGCALQFGANPLEFLRANQRKHGHVFTCKLMGKYVHFITNPLSYHKVLCHGKYFDWKKFHFATSAKAFGHRSIDPMDGNTTENINDTFIKTLQGHALNSLTESMMENLQRIMRPPVSSNSKTAAWVTEGMYSFCYRVMFEAGYLTIFGRDLTRRDTQKAHILNNLDNFKQFDKVFPALVAGLPIHMFRTAHNAREKLAESLRHENLQKRESISELISLRMFLNDTLSTFDDLEKAKTHLVVLWASQANTIPATFWSLFQMIRNPEAMKAATEEVKRTLENAGQKVSLEGNPICLSQAELNDLPVLDSIIKESLRLSSASLNIRTAKEDFTLHLEDGSYNIRKDDIIALYPQLMHLDPEIYPDPLTFKYDRYLDENGKTKTTFYCNGLKLKYYYMPFGSGATICPGRLFAIHEIKQFLILMLSYFELELIEGQAKCPPLDQSRAGLGILPPLNDIEFKYKFKHL

SEQ ID NO: 881083 - protein, 260 aa, Homo sapiens
MFRTAHNAREKLAESLRHENLQKRESISELISLRMFLNDTLSTFDDLEKAKTHLVVLWASQANTIPATFWSLFQMIRNPEAMKAATEEVKRTLENAGQKVSLEGNPICLSQAELNDLPVLDSIIKESLRLSSASLNIRTAKEDFTLHLEDGSYNIRKDDIIALYPQLMHLDPEIYPDPLTFKYDRYLDEYMPFGSGATICPGRLFAIHEIKQFLILMLSYFELELIEGQAKCPPLDQSRAGLGILPPLNDIEFKYKFKHL

SEQ ID NO: 881084 - protein, 334 aa, Homo sapiens
MRPPVSSNSKTAAWVTEGMYSFCYRVMFEAGYLTIFGRDLTRRDTQKAHILNNLDNFKQFDKVFPALVAGLPIHMFRTAHNAREKLAESLRHENLQKRESISELISLRMFLNDTLSTFDDLEKAKTHLVVLWASQANTIPATFWSLFQMIRNPEAMKAATEEVKRTLENAGQKVSLEGNPICLSQAELNDLPVLDSIIKESLRLSSASLNIRTAKEDFTLHLEDGSYNIRKDDIIALYPQLMHLDPEIYPDPLTFKYDRYLDEYMPFGSGATICPGRLFAIHEIKQFLILMLSYFELELIEGQAKCPPLDQSRAGLGILPPLNDIEFKYKFKHL

SEQ ID NO: 881085 - protein, 261 aa, Homo sapiens
MVVVAAAPNPADGTPKVLLLSGQPASAAGAPAGQALPLMVPAQRGASPEAASGGLPQARKRQRLTHLSPEEKALRRKLKNRVAAQTARDRKKARMSELEQQVVDLEEENQKLLLENQLLREKTHGLVVENQELRQRLGMDALVAEEEAEAKGNEVRPVAGSAESAALRLRAPLQQVQAQLSPLQNISPWILAVLTLQIQSLISCWAFWTTWTQSCSSNALPQSLPAWRSSQRSTQKDPVPYQPPFLCQWGRHQPSWKPLMN

SEQ ID NO: 881086 - protein, 261 aa, Homo sapiens; identical to SEQ ID NO: 881085

SEQ ID NO: 881087 - protein, 117 aa, Homo sapiens
MVVVAAAPNPADGTPKVLLLSGQPASAAGAPAGQALPLMVPAQRGASPEAASGGLPQARKRQRLTHLSPEEKALRRKLKNRVAAQTARDRKKARMSELEQQVVDLEEENPFASQLLR

SEQ ID NO: 881088 - protein, 111 aa, Homo sapiens
MYPRFVLVYHMVASPCNTRNSRILLECQERAVCPLRVLSQERSRGGAGDTQRERIRSEEGENSSDGSERERHLSICFHSGERGEIPNNDVGHKETWPHLWEEEIFPKEGTR

SEQ ID NO: 881089 - protein, 275 aa, Homo sapiens
MQHTENHMQDEPSVNGRGAAAPNPADGTPKVLLLSGQPASAAGAPAGQALPLMVPAQRGASPEAASGGLPQARKRQRLTHLSPEEKALRRKLKNRVAAQTARDRKKARMSELEQQVVDLEEENQKLLLENQLLREKTHGLVVENQELRQRLGMDALVAEEEAEAKGNEVRPVAGSAESAALRLRAPLQQVQAQLSPLQNISPWILAVLTLQIQSLISCWAFWTTWTQSCSSNALPQSLPAWRSSQRSTQKDPVPYQPPFLCQWGRHQPSWKPLMN

SEQ ID NO: 881090 - protein, 206 aa, Homo sapiens
MVVVARQRLTHLSPEEKALRRKLKNRVAAQTARDRKKARMSELEQQVVDLEEENQKLLLENQLLREKTHGLVVENQELRQRLGMDALVAEEEAEAKGNEVRPVAGSAESAALRLRAPLQQVQAQLSPLQNISPWILAVLTLQIQSLISCWAFWTTWTQSCSSNALPQSLPAWRSSQRSTQKDPVPYQPPFLCQWGRHQPSWKPLMN

SEQ ID NO: 881091 - protein, 197 aa, Homo sapiens [sequence omitted]

SEQ ID NO: 881092 - protein, 197 aa, Homo sapiens [sequence omitted]

SEQ ID NO: 881093 - protein, 197 aa, Homo sapiens [sequence omitted]

SEQ ID NO: 881094 - protein, 243 aa, Homo sapiens
MVVVAAAPNPADGTPKVLLLSGQPASAAGAPAGQALPLMVPAQRGASPEAASGGLPQARKRQRLTHLSPEEKALRRKLKNRVAAQTARDRKKARMSELEQQVVDLEEENQKLLLENQLLREDALVAEEEAEAKGNEVRPVAGSAESAALRLRAPLQQVQAQLSPLQNISPWILAVLTLQIQSLISCWAFWTTWTQSCSSNALPQSLPAWRSSQRSTQKDPVPYQPPFLCQWGRHQPSWKPLMN

SEQ ID NO: 881095 - protein, 261 aa, Homo sapiens; identical to SEQ ID NO: 881085

SEQ ID NO: 881096 - protein, 167 aa, Homo sapiens
MVVVAAAPNPADGTPKVLLLSGQPASAAGAPAGQALPLMVPAQRGASPEAASGGLPQARKRQRLTHLSPEEKALRRKLKNRVAAQTARDRKKARMSELEQQVVDLEEENQKLLLENQLLREKTHGLVVENQELRQRLGMDALVAEEEAEAKVNHLLYLVPHVSTGSK

SEQ ID NO: 881097 - protein, 197 aa, Homo sapiens [sequence omitted]

SEQ ID NO: 881098 - protein, 197 aa, Homo sapiens [sequence omitted]

SEQ ID NO: 881099 - protein, 252 aa, Homo sapiens
MVVVAAAPNPADGTPKVLLLSGQPASAAGAPAGQALPLMVPAQRGASPEAASGGLPQARKRQRLTHLSPEEKALRRKLKNRVAAQTARDRKKARMSELEQQVVDLEEENQKLLLENQLLREKTHGLVVENQELRQRLGMDALVAEEEAEAKGNEVRPVAGSAESAAVQAQLSPLQNISPWILAVLTLQIQSLISCWAFWTTWTQSCSSNALPQSLPAWRSSQRSTQKDPVPYQPPFLCQWGRHQPSWKPLMN

SEQ ID NO: 881100 - protein, 200 aa, Homo sapiens
MVVVAAAPNPADGTPKVLLLSGQPASAAGAPAGQALPLMVPAQRGASPEAASGGLPQARKRQRLTHLSPEEKALRRKLKNRVAAQTARDRKKARMSELEQQVVDLEEENQKLLLENQLLREKTHGLVVENQELRQRLGMDALVAEEEAEAKGNEVRPVAGSAESAALRLRAPLQQVQAQLSPLQNISPWILAVLTLQIQR

SEQ ID NO: 881101 - protein, 167 aa, Homo sapiens; identical to SEQ ID NO: 881096

SEQ ID NO: 881102 - protein, 261 aa, Homo sapiens; identical to SEQ ID NO: 881085

SEQ ID NO: 881103 - protein, 261 aa, Homo sapiens; identical to SEQ ID NO: 881085

SEQ ID NO: 881104 - protein, 261 aa, Homo sapiens; identical to SEQ ID NO: 881085

SEQ ID NO: 881105 - protein, 261 aa, Homo sapiens; identical to SEQ ID NO: 881085

SEQ ID NO: 881106 - protein, 261 aa, Homo sapiens; identical to SEQ ID NO: 881085

SEQ ID NO: 881107 - protein, 261 aa, Homo sapiens; identical to SEQ ID NO: 881085

SEQ ID NO: 881108 - protein, 293 aa, Homo sapiens
  misc_feature (249)..(249): Xaa can be any naturally occurring amino acid
  misc_feature (259)..(259): Xaa can be any naturally occurring amino acid
MVVVAAAPNPADGTPKVLLLSGQPASAAGAPAGQALPLMVPAQRGASPEAASGGLPQARKRQRLTHLSPEEKALRRKLKNRVAAQTARDRKKARMSELEQQVVDLEEENQKLLLENQLLREKTHGLVVENQELRQRLGMDALVAEEEAEAKGNEVRPVAGSAESAALRLRAPLQQVQAQLSPLQNISPWILAVLTLQIQSLISCWAFWTTWTQSCSSNALPQSLPAWRSSQRSTQKGGGGKNAPPKGVXAYQPSLSLSXGEPGPISQAGKGAPKFQLNLIRYRNQSQIIKPKA

SEQ ID NO: 881109 - protein, 167 aa, Homo sapiens; identical to SEQ ID NO: 881096

SEQ ID NO: 881110 - protein, 418 aa, Homo sapiens [sequence omitted]

SEQ ID NO: 881111 - protein, 175 aa, Homo sapiens
MAIYLKQVTATVLINGTNFPFGIPQVYHGQIHQPLPHSAQLISTNALGLLELYRTFETTQVGASQYLFPIEEAQGQFLFIVGEGDKTINSKAHAEQAIGQLKRHGKNNWTLLSYPGAGHLIEPPYSPLCCASTTHDLRLHWGGEVIPHAAAQEHAWKEIQRFLRKHLIPDVTSQL

SEQ ID NO: 881112 - protein, 400 aa, Homo sapiens
MIQLTATPVSALVDEPVHIQATGLIPFQMVSFQASLEDEVDLNHASSLGGDYMGVHPMGLFWSLKPEKLLTRLLKRDVMNRPFQVQVKLYDLELIVNNKVASAPKASLTLERWYVAPGVTRIKVREGRLRGALFLPPGEGLFPGVIDLFGGLGGLLEFRASLLASRGFASLALAYHNYEDLPRKPEVTDLEYFEEAANFLLRHPKVFGSGVGVVSVCQGVQIGLSMAIYLKQVTATVLINGTNFPFGIPQVYHGQIHQPLPHSAQLISTNALGLLELYRTFETTQVGASQYLFPIEEAQGQFLFIVGEGDKTINSKAHAEQAIGQLKRHGKNNWTLLSYPGAGHLIEPPYSPLCCASTTHDLRLHWGGEVIPHAAAQEHAWKEIQRFLRKHLIPDVTSQL

SEQ ID NO: 881113 - protein, 175 aa, Homo sapiens; identical to SEQ ID NO: 881111

SEQ ID NO: 881114 - protein, 85 aa, Homo sapiens [sequence omitted]

SEQ ID NO: 881115 - protein, 118 aa, Homo sapiens
DYRVPDTVLGIEDTFKLNVSDVISRDGIHWLALYFGTIVIVPNGSQMSKTLRNNSESLAGKPHLNAAHTFMIHYKGFKVMRCLCPKKKKSTPACPASLTTSHFFPPGTIYCQEENQTP

SEQ ID NO: 881116 - protein, 127 aa, Homo sapiens
  misc_feature (1)..(1): Xaa can be any naturally occurring amino acid
  misc_feature (15)..(15): Xaa can be any naturally occurring amino acid
XSELVSGFNIEYAAXLRPILHSQKYTNIIIIEPRRKLSRKLQLNLSQLRDPQHDLDRVKKPEWVILIGVCTHLGCVPIANAGDFGGYYCPCHGSHYDASGRIRLGPAPLNLEVPTYEFTSDDMVIVG

SEQ ID NO: 881117 - protein, 239 aa, Homo sapiens
CRISFPAARCRHASRASSRLRRGWKVVPVTGLAVGAAVAMLSVAARSGPFAPVLSATSRGVAGALRPLVQATVPATPEQPVLDLKRPFLSRESLSGQAVRRPLVASVGLNVPASVCYSHTDIKVPDFSEYRRLEVLDSTKSSRESSEARKGFSYLVTGVTTVGVAYAAKNAVTQFVSSMSASADVLALAKIEIKLSDIPEGKNMAFKWRGKPLFVRHRTQKEIEQEAAVEFITVEGPTA

SEQ ID NO: 881118 - protein, 220 aa, Homo sapiens
CRISFPAARCRHASRASSRLRRGWKVVPVTGLAVGAAVAMLSVAARSGPFAPVLSATPEQPVLDLKRPFLSRESLSGQAVRRPLVASVGLNVPASVCYSHTDIKVPDFSEYRRLEVLDSTKSSRESSEARKGFSYLVTGVTTVGVAYAAKNAVTQFVSSMSASADVLALAKIEIKLSDIPEGKNMAFKWRGKPLFVRHRTQKEIEQEAAVEFITVEGPTA

SEQ ID NO: 881119 - protein, 173 aa, Homo sapiens
MLSPNTSITAFSSFQNSLFLVPFFDDYKTLASTLEDNCYRCLYVNGAVSSNWHAEEELIHGVYVLGDKLSPNTDIKVPDFSEYRRLEVLDSTKSSRESSEARKGFSYLVTGVTTVGVAYAAKNAVTQFVSSMSASADVLGSVGGGFIPNTNTFEDLKSFKIVVFILQFTVLGD

SEQ ID NO: 881120 - protein, 239 aa, Homo sapiens; identical to SEQ ID NO: 881117

SEQ ID NO: 881121 - protein, 239 aa, Homo sapiens; identical to SEQ ID NO: 881117

SEQ ID NO: 881122 - protein, 239 aa, Homo sapiens; identical to SEQ ID NO: 881117

SEQ ID NO: 881123 - protein, 220 aa, Homo sapiens; identical to SEQ ID NO: 881118

SEQ ID NO: 881124 - protein, 185 aa, Homo sapiens
AKEVARLGNRPRAVRARSCSATPEQPVLDLKRPFLSRESLSGQAVRRPLVASVGLNVPASVCYSHTDIKVPDFSEYRRLEVLDSTKSSRESSEARKGFSYLVTGVTTVGVAYAAKNAVTQFVSSMSASADVLALAKIEIKLSDIPEGKNMAFKWRGKPLFVRHRTQKEIEQEAAVEFITVEGPTA

SEQ ID NO: 881125 - protein, 183 aa, Homo sapiens
TRLGRRLGVDRPRVAPSVATPEQPVLDLKRPFLSRESLSGQAVRRPLVASVGLNVPASVCYSHTDIKVPDFSEYRRLEVLDSTKSSRESSEARKGFSYLVTGVTTVGVAYAAKNAVTQFVSSMSASADVLALAKIEIKLSDIPEGKNMAFKWRGKPLFVRHRTQKEIEQEAAVEFITVEGPTA

SEQ ID NO: 881126 - protein, 130 aa, Homo sapiens
MCWPWRKSKSSYPIFQKARTWLSNGEANPCLCVIEPRRKLSRKLQLNLSQLRDPQHDLDRVKKPEWVILIGVCTHLGCVPIANAGDFGGYYCPCHGSHYDASGRIRLGPAPLNLEVPTYEFTSDDMVIVG

SEQ ID NO: 881127 - protein, 239 aa, Homo sapiens; identical to SEQ ID NO: 881117

SEQ ID NO: 881128 - protein, 130 aa, Homo sapiens; identical to SEQ ID NO: 881126

SEQ ID NO: 881129 - protein, 196 aa, Homo sapiens
CRISFPAARCRHASRASSRLRRGWKVVPVTGLAVGAAVAMLSVAARSGPFAPVLSATSRGVAGALRPLVQATVPATPEQPVLDLKRPFLSRESLSGQAVRRPLVASVGLNVPASVCYSHTDIKVPDFSEYRRLEVLDSTKSSRESSEARKGFSYLVTGVTTVGVAYAAKNAVTQFVSSMSASADVLVERQTPVCAS

SEQ ID NO: 881130 - protein, 127 aa, Homo sapiens; identical to SEQ ID NO: 881116
  misc_feature (1)..(1): Xaa can be any naturally occurring amino acid
  misc_feature (15)..(15): Xaa can be any naturally occurring amino acid

SEQ ID NO: 881131 - protein, 187 aa, Homo sapiens
CRISFPAARCRHASRASSRLRRGWKVVPVTGLAVGAAVAMLSVAARSGPFAPVLSATSRGVAGALRPLVQATVPATPEQPVLDLKRPFLSRESLSGQAVRRPLVASVGLNVPASVCYSHTDIKVPDFSEYRRLEVLDSTKSSRESSEARKGFSYLVTGVTTVGVAYAAKNAVTQFVSSMSASADVLG

SEQ ID NO: 881132 - protein, 193 aa, Homo sapiens
CRISFPAARCRHASRASSRLRRGWKVVPVTGLAVGAAVAMLSVAARSGPFAPVLSATSRGVAGALRPLVQATVPATPEQPVLDLKRPFLSRESLSGQAVRRPLVASVGLNVPASVCYSHTDIKVPDFSEYRRLEVLDSTKSSRESSEARKGFSYLVTGVTTVGVAYAAKNAVTQFVSSMSASADVLGSVGENQ

SEQ ID NO: 881133 - protein, 1068 aa, Homo sapiens
YLEGRCLNCSSGSKRGRWAARTFSNKTLVLDETTTSTGSAGMWLVLRRGVLRDGEGYTFTLTVLGRSGEEEGCASIPLSPNRPPLGGSCRLFPLGAVHALTTKVHFECTGWHDAEDAGAPLVYALLLQRCRQGHCEEFCVYKGSLSGYGAVLPPGFRPHFEVGLAVVVQDQLGAAVVALNRSLAITLPEPNGSAMGLTVWLHGLTASVLPGLLRQADPQHVIEYSLALVTVLNEPPPRRAHVLTLFCPRRNSSVLRVNAHITQHLARNCTPGVVGILLASCRSPALLTACCAACLPQYERALDVAAEPKHERQRRAQIRKNITETLVSLRVHTVDDIQQIAAALAQCMGPSRELVCRSCLKQTLHKLEAMMRILQAETTAGTVTPTAIGDSILNITGDLIHLASSDVRAPQRSELGAESPSRMVASQAYNLTSALMRILTRSRVLNEEPLTLAGEEIVAQGKRSDPRSLLCYGGAPGPGCHFSIPKAFSRAPANLSDVVQLIFLVDSNPFPFGYISNYTVSTKVASMAFQTQAGAQIPIERLASERAITVKVPNNSDWAARGHRSSANSVVVQPQASVGAVVTLDSSNPAAVLHLQLNYTLLDGRYLSEEPEPYLAVYLHSEPRPNEHNCSASRRIRPESLQGADHRPYTFFISPGTRDPVGSYRLNLSSHFRLSALEVSVGLYTSLCQYFSEEDVVWRTEGLLPLEETSPRQAVCLTRHLTAFGASLFVPPSHVRFVFPEPTADVNYIVMLTCAVCLVTYMVMAAILHKLDQLDASRGRAIPFCGQRGRFKYEILVKTGWGRGSGTTAHVGIMLYGVDSRSGHRHLDGDRAFHRNSLDIFRIATPHSLGSVWKIRVWHDKGLSPAWFLQHVIIRDLQTAHSTFFLVNDWLSVETEANGGLVEKEVLAASHAALLRFRRLLVAELQCGFFDKHIWLSIWDRPPRSCFTRIQRATCCVLLICLFLGANAVWYGAVGDSAYSTGHVSRLSPLSVDTVAVGLVSSVVVYPVYLAILFLFWMSRSKVGWGWGPGSTGNGAWASAPCPEPPLSSAAARGKGVHQRLLGKGQHT

SEQ ID NO: 881134 - protein, 1068 aa, Homo sapiens; identical to SEQ ID NO: 881133

SEQ ID NO: 881135 - protein, 1052 aa, Homo sapiens
YLEGRCLNCSSGSKRGRWAARTFSNKTLVLDETTTSTGSAGMWLVLRRGVLRDGEGYTFTLTVLGRSGEEEGCASIPLSPNRPPLGGSCRLFPLGAVHALTTKVHFECTGWHDAEDAGAPLVYALLLQRCRQGHCEEFCVYKGSLSGYGAVLPPGFRPHFEVGLAVVVQDQLGAAVVALNRSLAITLPEPNGSAMGLTVWLHGLTASVLPGLLRQADPQHVIEYSLALVTVLNEPPPRRAHVLTLFCPRRNSSVLRVNAHITQHLARNCTPGVVGILLASCRSPALLTACCAACLPQYERALDVAAEPKHERQRRAQIRKNITETLVSLRVHTVDDIQQIAAALAQCMGPSRELVCRSCLKQTLHKLEAMMRILQAETTAGTVTPTAIGDSILNITGDLIHLASSDVRAPQRSELGAESPSRMVASQAYNLTSALMRILTRSRVLNEEPLTLAGEEIVAQGKRSDPRSLLCYGGAPGPGCHFSIPKAFSRAPANLSDVVQLIFLVDSNPFPFGYISNYTVSTKVASMAFQTQAGAQIPIERLASERAITVKVPNNSDWAARGHRSSANSVVVQPQASVGAVVTLDSSNPAAVLHLQLNYTLLDGRYLSEEPEPYLAVYLHSEPRPNEHNCSASRRIRPESLQGADHRPYTFFISPGTRDPVGSYRLNLSSHFRLSALEVSVGLYTSLCQYFSEEDVVWRTEGLLPLEETSPRQAVCLTRHLTAFGASLFVPPSHVRFVFPEPTADVNYIVMLTCAVCLVTYMVMAAILHKLDQLDASRGRAIPFCGQRGRFKYEILVKTGWGRGSGTTAHVGIMLYGVDSRSGHRHLDGDRAFHRNSLDIFRIATPHSLGSVWKIRVWHDKGLSPAWFLQHVIIRDLQTAHSTFFLVNDWLSVETEANGGLVEKEVLAASHAALLRFRRLLVAELQCGFFDKHIWLSIWDRPPRSCFTRIQRATCCVLLICLFLGANAVWYGAVGDSAYSTGHVSRLSPLSVDTVAVGLVSSVVVYPVYLAILFLFWMSRSKLHQSAVKCSVAHVARGCHHGRCRCPIYPAF

SEQ ID NO: 881136 - protein, 1062 aa, Homo sapiens
YLEGRCLNCSSGSKRGRWAARTFSNKTLVLDETTTSTGSAGMWLVLRRGVLRDGEGYTFTLTVLGRSGEEEGCASIPLSPNRPPLGGSCRLFPLGAVHALTTKVHFECTGWHDAEDAGAPLVYALLLQRCRQGHCEEFCVYKGSLSGYGAVLPPGFRPHFEVGLAVVVQDQLGAAVVALNRSLAITLPEPNGSAMGLTVWLHGLTASVLPGLLRQADPQHVIEYSLALVTVLNEPPPRRAHVLTLFCPRRNSSVLRVNAHITQHLARNCTPGVVGILLASCRSPALLTACCAACLPQYERALDVAAEPKHERQRRAQIRKNITETLVSLRVHTVDDIQQIAAALAQCMGPSRELVCRSCLKQTLHKLEAMMRILQAETTAGTVTPTAIGDSILNITGDLIHLASSDVRAPQRSELGAESPSRMVASQAYNLTSALMRILTRSRVLNEEPLTLAGEEIVAQGKRSDPRSLLCYGGAPGPGCHFSIPKAFSRAPANLSDVVQLIFLVDSNPFPFGYISNYTVSTKVASMAFQTQAGAQIPIERLASERAITVKVPNNSDWAARGHRSSANSVVVQPQASVGAVVTLDSSNPAAVLHLQLNYTLLDGRYLSEEPEPYLAVYLHSEPRPNEHNCSASRRIRPESLQGADHRPYTFFISPGTRDPVGSYRLNLSSHFRLSALEVSVGLYTSLCQYFSEEDVVWRTEGLLPLEETSPRQAVCLTRHLTAFGASLFVPPSHEPTADVNYIVMLTCAVCLVTYMVMAAILHKLDQLDASRGRAIPFCGQRGRFKYEILVKTGWGRGSGTTAHVGIMLYGVDSRSGHRHLDGDRAFHRNSLDIFRIATPHSLGSVWKIRVWHDKGLSPAWFLQHVIIRDLQTAHSTFFLVNDWLSVETEANGGLVEKEVLAASHAALLRFRRLLVAELQCGFFDKHIWLSIWDRPPRSCFTRIQRATCCVLLICLFLGANAVWYGAVGDSAYSTGHVSRLSPLSVDTVAVGLVSSVVVYPVYLAILFLFWMSRSKVGWGWGPGSTGNGAWASAPCPEPPLSSAAARGKGVHQRLLGKGQHT

SEQ ID NO: 881137 - protein, 66 aa, Homo sapiens
RVLAGPGHRPERGECSLAGDLTSAACVLGTKTCTPAWSFAEGLSRAPEINPSDPEAAPRRSAPSSH

SEQ ID NO: 881138 - protein, 1027 aa, Homo sapiens
YLEGRCLNCSSGSKRGRWAARTFSNKTLVLDETTTSTGSAGMWLVLRRGVLRDGEGYTFTLTVLGRSGEEEGCASIPLSPNRPPLGGSCRLFPLGAVHALTTKVHFECTGWHDAEDAGAPLVYALLLQRCRQGHCEEFCVYKGSLSGYGAVLPPGFRPHFEVGLAVVVQDQLGAAVVALNRSLAITLPEPNGSAMGLTVWLHGLTASVLPGLLRQADPQHVIEYSLALVTVLNEPPPRRAHVLTLFCPRRNSSVLRVNAHITQHLARNCTPGVVGILLASCRSPALLTACCAACLPQYERALDVAAEPKHERQRRAQIRKNITETLVSLRVHTVDDIQQIAAALAQCMGPSRELVCRSCLKQTLHKLEAMMRILQAETTAGTVTPTAIGDSILNITGDLIHLASSDVRAPQRSELGAESPSRMVASQAYNLTSALMRILTRSRVLNEEPLTLAGEEIVAQGKRSDPRSLLCYGGAPGPGCHFSIPKAFSRAPANLSDVVQLIFLVDSNPFPFGYISNYTVFHRSSANSVVVQPQASVGAVVTLDSSNPAAVLHLQLNYTLLDGRYLSEEPEPYLAVYLHSEPRPNEHNCSASRRIRPESLQGADHRPYTFFISPGTRDPVGSYRLNLSSHFRLSALEVSVGLYTSLCQYFSEEDVVWRTEGLLPLEETSPRQAVCLTRHLTAFGASLFVPPSHVRFVFPEPTADVNYIVMLTCAVCLVTYMVMAAILHKLDQLDASRGRAIPFCGQRGRFKYEILVKTGWGRGSGTTAHVGIMLYGVDSRSGHRHLDGDRAFHRNSLDIFRIATPHSLGSVWKIRVWHDKGLSPAWFLQHVIIRDLQTAHSTFFLVNDWLSVETEANGGLVEKEVLAASHAALLRFRRLLVAELQCGFFDKHIWLSIWDRPPRSCFTRIQRATCCVLLICLFLGANAVWYGAVGDSAYSTGHVSRLSPLSVDTVAVGLVSSVVVYPVYLAILFLFWMSRSKVGWGWGPGSTGNGAWASAPCPEPPLSSAAARGKGVHQRLLGKGQHT

SEQ ID NO: 881139 - protein, 1160 aa, Homo sapiens
YLEGRCLNCSSGSKRGRWAARTFSNKTLVLDETTTSTGSAGMWLVLRRGVLRDGEGYTFTLTVLGRSGEEEGCASIPLSPNRPPLGGSCRLFPLGAVHALTTKVHFECTGWHDAEDAGAPLVYALLLQRCRQGHCEEFCVYKGSLSGYGAVLPPGFRPHFEVGLAVVVQDQLGAAVVALNRSLAITLPEPNGSAMGLTVWLHGLTASVLPGLLRQADPQHVIEYSLALVTVLNEPPPRRAHVLTLFCPRRNSSVLRVNAHITQHLARNCTPGVVGILLASCRSPALLTACCAACLPQYERALDVAAEPKHERQRRAQIRKNITETLVSLRVHTVDDIQQIAAALAQCMGPSRELVCRSCLKQTLHKLEAMMRILQAETTAGTVTPTAIGDSILNITGDLIHLASSDVRAPQRSELGAESPSRMVASQAYNLTSALMRILTRSRVLNEEPLTLAGEEIVAQGKRSDPRSLLCYGGAPGPGCHFSIPKAFSRAPANLSDVVQLIFLVDSNPFPFGYISNYTVSTKVASMAFQTQAGAQIPIERLASERAITVKVPNNSDWAARGHRSSANSVVVQPQASVGAVVTLDSSNPAAVLHLQLNYTLLDGRYLSEEPEPYLAVYLHSEPRPNEHNCSASRRIRPESLQGADHRPYTFFISPGTRDPVGSYRLNLSSHFRLSALEVSVGLYTSLCQYFSEEDVVWRTEGLLPLEETSPRQAVCLTRHLTAFGASLFVPPSHVRFVFPEPTADVNYIVMLTCAVCLVTYMVMAAILHKLDQLDASRGRAIPFCGQRGRFKYEILVKTGWGRGSGTTAHVGIMLYGVDSRSGHRHLDGDRAFHRNSLDIFRIATPHSLGSVWKIRVWHDKGLSPAWFLQHVIIRDLQTAHSTFFLVNDWLSVETEANGGLVEKEVLAASHAALLRFRRLLVAELQCGFFDKHIWLSIWDRPPRSCFTRIQRATCCVLLICLFLGANAVWYGAVGDSAYSTGHVSRLSPLSVDTVAVGLVSSVVVYPVYLAILFLFWMSRSKVAGSPSPTPAGQQVLDIDSCLDSSVLDSSFLTFSGLHAEVINTLADHRHRGTDFGGSPWLLIITVFLRSYKFAISLCTLTFGLSILWLTIVTRGTDFGGSPWLLIITVFLRSYKFAISLCITNLRVSFLKTIFPSRSV

SEQ ID NO: 881140 - protein, 397 aa, Homo sapiens
RLGARPGVNRPRVTSLCQYFSEEDVVWRTEGLLPLEETSPRQAVCLTRHLTAFGASLFVPPSHVRFVFPEPTADVNYIVMLTCAVCLVTYMVMAAILHKLDQLDASRGRAIPFCGQRGRFKYEILVKTGWGRGSGTTAHVGIMLYGVDSRSGHRHLDGDRAFHRNSLDIFRIATPHSLGSVWKIRVWHDKGLSPAWFLQHVIIRDLQTAHSTFFLVNDWLSVETEANGGLVEKEVLAASHAALLRFRRLLVAELQCGFFDKHIWLSIWDRPPRSCFTRIQRATCCVLLICLFLGANAVWYGAVGDSAYSTGHVSRLSPLSVDTVAVGLVSSVVVYPVYLAILFLFWMSRSKVGWGWGPGSTGNGAWASAPCPEPPLSSAAARGKGVHQRLLGKGQHT

SEQ ID NO: 881141 - protein, 254 aa, Homo sapiens
MNSRQAWRLLLSQGRGDRWVSRPRGHFSPALRREFFTTTTKEGYDRRPVDITPLEQRKLTFDTHALVQDLETHGFDKTQAETIVSALTALSNVSLDTIYKEMVTQAQQEITVQQLMAHLDAIRKDMVILEKSEFANLRAENEKMKIELDQVKQQLMHETSRIRADNKLDINLERSRVTDMFTDQEKQLMETTTEFTKKDTQTKSIISETSNKIDAEIASLKTLMESNKLETIRYLAASVFTCLAIALGFYRFWK

SEQ ID NO: 881142 - protein, 254 aa, Homo sapiens; identical to SEQ ID NO: 881141

SEQ ID NO: 881143 - protein, 254 aa, Homo sapiens; identical to SEQ ID NO: 881141

SEQ ID NO: 881144 - protein, 254 aa, Homo sapiens; identical to SEQ ID NO: 881141

SEQ ID NO: 881145 - protein, 153 aa, Homo sapiens
MVTQAQQEITVQQLMAHLDAIRKDMVILEKSEFANLRAENEKMKIELDQVKQQLMHETSRIRADNKLDINLERSRVTDMFTDQEKQLMETTTEFTKKDTQTKSIISETSNKIDAEIASLKTLMESNKLETIRYLAASVFTCLAIALGFYRFWK

SEQ ID NO: 881146 - protein, 280 aa, Homo sapiens
MNSRQAWRLLLSQGRGDRWVSRPRGHFSPALRREFFTTTTKEGYDRRPVDITPLEQRKLTFDTHALVQDLETHGFDKTQAETIVSALTALSNVSLDTIYKEMVTQAQQEITVQQLMAHLDAIRKDMVILEKSEFANLRAENEKMKIELDQVKQQLMHETSRIRADNKLDINLERSRVTDMFTDQEKQLMETTTEFTKKDTQTKSIISETSNKIDAEIASLKTLMESNKLETIRYLAGKTVRERNCCHLIFLLVLPIKVTEQAQEKKEELDNKAPLLLGPL

SEQ ID NO: 881147 - protein, 153 aa, Homo sapiens; identical to SEQ ID NO: 881145

SEQ ID NO: 881148 - protein, 111 aa, Homo sapiens
MKIELDQVKQQLMHETSRIRADNKLDINLERSRVTDMFTDQEKQLMETTTEFTKKDTQTKSIISETSNKIDAEIASLKTLMESNKLETIRYLAASVFTCLAIALGFYRFWK

SEQ ID NO: 881149 - protein, 156 aa, Homo sapiens
MHWFRTWKLMEITVQQLMAHLDAIRKDMVILEKSEFANLRAENEKMKIELDQVKQQLMHETSRIRADNKLDINLERSRVTDMFTDQEKQLMETTTEFTKKDTQTKSIISETSNKIDAEIASLKTLMESNKLETIRYLAASVFTCLAIALGFYRFWK

SEQ ID NO: 881150 - protein, 156 aa, Homo sapiens; identical to SEQ ID NO: 881149

SEQ ID NO: 881151 - protein, 153 aa, Homo sapiens; identical to SEQ ID NO: 881145

SEQ ID NO: 881152 - protein, 245 aa, Homo sapiens
MLANCGSVCEETQFRGTTVAPALGEFFTTTTKEGYDRRPVDITPLEQRKLTFDTHALVQDLETHGFDKTQAETIVSALTALSNVSLDTIYKEMVTQAQQEITVQQLMAHLDAIRKDMVILEKSEFANLRAENEKMKIELDQVKQQLMHETSRIRADNKLDINLERSRVTDMFTDQEKQLMETTTEFTKKDTQTKSIISETSNKIDAEIASLKTLMESNKLETIRYLAASVFTCLAIALGFYRFWK

SEQ ID NO: 881153 - protein, 208 aa, Homo sapiens [sequence omitted]

SEQ ID NO: 881154 - protein, 262 aa, Homo sapiens
MNSRQAWRLLLSQGRGDRWVSRPRGHFSPALRREFFTTTTKEGYDRRPVDITPLEQRKLTFDTHALVQDLETHGFDKTQAETIVSALTALSNVSLDTIYKEMVTQAQQVIFILFSEEITVQQLMAHLDAIRKDMVILEKSEFANLRAENEKMKIELDQVKQQLMHETSRIRADNKLDINLERSRVTDMFTDQEKQLMETTTEFTKKDTQTKSIISETSNKIDAEIASLKTLMESNKLETIRYLAASVFTCLAIALGFYRFWK

SEQ ID NO: 881155 - protein, 139 aa, Homo sapiens
MAHLDAIRKDMVILEKSEFANLRAENEKMKIELDQVKQQLMHETSRIRADNKLDINLERSRVTDMFTDQEKQLMETTTEFTKKDTQTKSIISETSNKIDAEIASLKTLMESNKLETIRYLAASVFTCLAIALGFYRFWK

SEQ ID NO: 881156 - protein, 156 aa, Homo sapiens; identical to SEQ ID NO: 881149

SEQ ID NO: 881157 - protein, 86 aa, Homo sapiens
SPLKGFRGSDKVGGGNWGTGNPIFHRKRTRLITHLFTAIASKYRNSTIREKAGNASPGSRVRNFPGVDYFLINSAARVRLKNIDGI

SEQ ID NO: 881158 - protein, 200 aa, Homo sapiens
MNSRQAWRLLLSQGRGDRWVSRPRGHFSPALRREFFTTTTKEGYDRRPVDITPLEQRKLTFDTHALVQDLETHGFDKTQAETIVSALTALSNVSLDTIYKEMVTQAQQEITVQQLMAHLDAIRKDMVILEKSEFANLRAENEKMKIELDQVKQQLMHETSRIRADNKLDINLERSRVTDMFTDQEKQLMETTTEFTKKVK

SEQ ID NO: 881159 - protein, 156 aa, Homo sapiens; identical to SEQ ID NO: 881149

SEQ ID NO: 881160 - protein, 156 aa, Homo sapiens; identical to SEQ ID NO: 881149

SEQ ID NO: 881161 - protein, 237 aa, Homo sapiens
MNSRQAWRLLLSQGRGDRWVSRPRGHFSPALRREFFTTTTKEGYDRRPVDITPLEQRKLTFDTHALVQDLETHGFDKTQAETIVSALTALSNVSLDTIYKEMVTQAQQEITVQQLMAHLDAIRKDMVILEKSEFANLRAENEKMKIELDQVKQQLMHETSRIRADNKLDINLERSRVTDMFTDQKATYGNTTDFQKDLNQSIFETRINGLNGLKLWALHWDIVLRRFGGTGLTGIRP

SEQ ID NO: 881162 - protein, 117 aa, Homo sapiens
MVTQAQQEITVQQLMAHLDAIRKDMVILEKSEFANLRAENEKMKIELDQVKQQLMHETSRIRADNKLDINLERSRVTDMFTDQKSNLWKHYGFPNRVLKPKFISRPDNGRNGLNRWF

SEQ ID NO: 881163 - protein, 78 aa, Homo sapiens
GVAPARANGKRRCHALLPDSRLVLGDAAACCPDLPSSPQGARTEESTAFLFLKRTFEGLGFAPGFFLSRCFRFLVTRG

SEQ ID NO: 881164 - protein, 366 aa, Homo sapiens
EATGSSNRGSGAAARVPGLLNLGSYSRVAAEDELQLPRLPELFETGRQLLDEVEVATEPAGSRIVQEKVFKGLDLLEKAAEMLSQLDLFSRNEDLEEIASTDLKYLLVPAFQGALTMKQVNPSKRLDHLQRAREHFINYLTQCHCYHVAEFELPKTMNNSAENHTANSSMAYPSLVAMASQRQAKIQRYKQKKELEHRLSAMKSAVESGQADDERVREYYLLHLQRWIDISLEEIESIDQEIKILRERDSSREASTSNSSRQERPPVKPFILTRNMAQAKVFGAGYPSLPTMTVSDWYEQHRKYGALPDQGIAKAAPEEFRKAAQQQEEQEEKEEEDDEQTLHRAREWDDWKDTHPRGYGNRQNMG

SEQ ID NO: 881165 - protein, 285 aa, Homo sapiens [sequence omitted]

SEQ ID NO: 881166 - protein, 149 aa, Homo sapiens
GRVGRPTRPWIDISLEEIESIDQEIKILRERDSSREASTSNSSRQERPPVKPFILTRNMAQAKVFGAGYPSLPTMTVSDWYEQHRKYGALPDQGIAKAAPEEFRKAAQQQEEQEEKEEEDDEQTLHRAREWDDWKDTHPRGYGNRQNMG

SEQ ID NO: 881167 - protein, 285 aa, Homo sapiens [sequence omitted]

SEQ ID NO: 881168 - protein, 347 aa, Homo sapiens
DAWVDPRVLAAEDELQLPRLPELFETGRQLLDEVEVATEPAGSRIVQEKVFKGLDLLEKAAEMLSQLDLFSRNEDLEEIASTDLKYLLVPAFQGALTMKQVNPSKRLDHLQRAREHFINYLTQCHCYHVAEFELPKTMNNSAENHTANSSMAYPSLVAMASQRQAKIQRYKQKKELEHRLSAMKSAVESGQADDERVREYYLLHLQRWIDISLEEIESIDQEIKILRERDSSREASTSNSSRQERPPVKPFILTRNMAQAKVFGAGYPSLPTMTVSDWYEQHRKYGALPDQGIAKAAPEEFRKAAQQQEEQEEKEEEDDEQTLHRAREWDDWKDTHPRGYGNRQNMG

SEQ ID NO: 881169 - protein, 253 aa, Homo sapiens
MLSQLDLFSRNEDLEEIASTDLKYLLVPAFQGALTMKQVNPSKRLDHLQRAREHFINYLTQCHCYHVAEFELPKTMNNSAENHTANSSMAYPSLVAMASQRQAKIQRYKQKKELEHRLSAMKSAVESGQADDERVREYYLLHLQRWIDISLEEIESIDQEIKILRERDSSREASTSNSSRQERPPVKPFILTRNMAQAKVFGAGYPSLPTMTVSDWYEQHRKYGALPDQGIAKAAPGHQNEGKSEKELHPRGD

SEQ ID NO: 881170 - protein, 120 aa, Homo sapiens
MLSQLDLFSRNEDLEEIASTDLKYLLVPAFQGALTMKQVNPSKRLDHLQRAREHFINYLTQCHCYHVAEFELPKTMNNSAENHTANSSMAYPSLVAMASQRQAKIQRHQLLTHLARRGLQ

SEQ ID NO: 881171 - protein, 285 aa, Homo sapiens [sequence omitted]

SEQ ID NO: 881172 - protein, 366 aa, Homo sapiens; identical to SEQ ID NO: 881164

SEQ ID NO: 881173 - protein, 285 aa, Homo sapiens [sequence omitted]

SEQ ID NO: 881174 - protein, 218 aa, Homo sapiens
MLSQLDLFSRNEDLEEIASTDLKYLLVPAFQGALTMKQVNPSKRLDHLQRAREHFINYLTQCHCYHVAEFELPKTMNNSAENHTANSSMAYPSLVAMASQRQAKIQRYKQKKELEHRLSAMKSAVESGQADDERVREYYLLHLQRWIDISLEEIESIDQEIKILRERDSSREASTSNSSRQERPPVKPFILTRNMAQAKGIQKSSSATGRTRRKGGRG

SEQ ID NO: 881175 - protein, 178 aa, Homo sapiens [sequence omitted]

SEQ ID NO: 881176 - protein, 36 aa, Homo sapiens
MGSMERYDSICNVWESMASMPVGVLHPAVAVKDQRL

SEQ ID NO: 881177 - protein, 458 aa, Homo sapiens
GLRAGAARRPARPFRRCRRRRACRSAEGTGLRSLLLPPRLQLPAGPFSRCRWDPVSSPRPSTMPPKKGGDGIKPPPIIGRFGTSLKIGIVGLPNVGKSTFFNVLTNSQASAENFPFCTIDPNESRVPVPDERFDFLCQYHKPASKIPAFLNVVDIAGLVKGAHNGQGLGNAFLSHISACDGIFHLTRAFEDDDITHVEGSVDPIRDIEIIHEELQLKDEEMIGPIIDKLEKVAVRGGDKKLKPEYDIMCKVKSWVIDQKKPVRFYHDWNDKEIEVLNKHLFLTSKPMVYLVNLSEKDYIRKKNKWLIKIKEWVDKYDPGALVIPFSGALELKLQELSAEERQKYLEANMTQSALPKIIKAGFAALQLEYFFTAGPDEVRAWTIRKGTKAPQAAGKIHTDFEKGFIMAEVMKYEDFKEEGSENAVKAAGKYRQQGRNYIVEDGDIIFFKFNTPQQPKKK

SEQ ID NO: 881178 - protein, 458 aa, Homo sapiens; identical to SEQ ID NO: 881177

SEQ ID NO: 881179 - protein, 424 aa, Homo sapiens
VCAQVPLGARPARSAAVAAVVRAARRRGRACVLSSFLPASSCRQDLSLAAAGTPCHRPGRARKSTFFNVLTNSQASAENFPFCTIDPNESRVPVPDERFDFLCQYHKPASKIPAFLNVVDIAGLVKGAHNGQGLGNAFLSHISACDGIFHLTRAFEDDDITHVEGSVDPIRDIEIIHEELQLKDEEMIGPIIDKLEKVAVRGGDKKLKPEYDIMCKVKSWVIDQKKPVRFYHDWNDKEIEVLNKHLFLTSKPMVYLVNLSEKDYIRKKNKWLIKIKEWVDKYDPGALVIPFSGALELKLQELSAEERQKYLEANMTQSALPKIIKAGFAALQLEYFFTAGPDEVRAWTIRKGTKAPQAAGKIHTDFEKGFIMAEVMKYEDFKEEGSENAVKAAGKYRQQGRNYIVEDGDIIFFKFNTPQQPKKK

SEQ ID NO: 881180 - protein, 396 aa, Homo sapiens
MPPKKGGDGIKPPPIIGRFGTSLKIGIVGLPNVGKSTFFNVLTNSQASAENFPFCTIDPNESRVPVPDERFDFLCQYHKPASKIPAFLNVVDIAGLVKGAHNGQGLGNAFLSHISACDGIFHLTRAFEDDDITHVEGSVDPIRDIEIIHEELQLKDEEMIGPIIDKLEKVAVRGGDKKLKPEYDIMCKVKSWVIDQKKPVRFYHDWNDKEIEVLNKHLFLTSKPMVYLVNLSEKDYIRKKNKWLIKIKEWVDKYDPGALVIPFSGALELKLQELSAEERQKYLEANMTQSALPKIIKAGFAALQLEYFFTAGPDEVRAWTIRKGTKAPQAAGKIHTDFEKGFIMAEVMKYEDFKEEGSENAVKAAGKYRQQGRNYIVEDGDIIFFKFNTPQQPKKK

SEQ ID NO: 881181 - protein, 382 aa, Homo sapiens
GLRAGAARRPARPFRRCRRRRACRSAEGTGLRSLLLPPRLQLPAGPFSRCRWDPVSSPRPSTMPPKKGGDGIKPPPIIGRFGTSLKIGIVGLPNVGKSTFFNVLTNSQASAENFPFCTIDPNESRVPVPDERFDFLCQYHKPASKIPAFLNVVDIAGLVKGAHNGQGLGNAFLSHISACDGIFHLTRAFEDDDITHVEGSVDPIRDIEIIHEELQLKDEEMIGPIIDKLEKVAVRGGDKKLKPEYDIMCKVKSWVIDQKKPVRFYHDWNDKEIEVLNKHLFLTSKPMVYLVNLSEKDYIRKKNKWLIKIKEWVDKYDPGALVIPFSGALELKLQELSAEERQKYLEANMTQSALPKIIKAGFAALQLEYFFRSACMDHQERD

SEQ ID NO: 881182 - protein, 438 aa, Homo sapiens
GLRAGAARRPARPFRRCRRRRACRSAEGTGLRSLLLPPRLQLPAGPFSRCRWDPVSSPRPSTMPPKKGGDGIKPPPIIGRFGTSLKIGIVGLPNVGKSTFFNVLTNSQASAENFPFCTIDPNESRVPVPDERFDFLCQYHKPASKIPAFLNVVDIAGLVKGAHNGQGLGNAFLSHISACDGIFHLTRAFEDDDITHVEGSVDPIRDIEIIHEELQLKDEEMIGPIIDKLEKVAVRGGDKKLKPEYDIMCKVKSWVIDQKKPVRFYHDWNDKEIEVLNKHLFLTSKPMVYLVNLSEKDYIRKKNKWLIKIKEWVDKYDPGALVIPFSGALELNALPKIIKAGFAALQLEYFFTAGPDEVRAWTIRKGTKAPQAAGKIHTDFEKGFIMAEVMKYEDFKEEGSENAVKAAGKYRQQGRNYIVEDGDIIFFKFNTPQQPKKK

SEQ ID NO: 881183 - protein, 458 aa, Homo sapiens; identical to SEQ ID NO: 881177

SEQ ID NO: 881184 - protein, 238 aa, Homo sapiens
MIGPIIDKLEKVAVRGGDKKLKPEYDIMCKVKSWVIDQKKPVRFYHDWNDKEIEVLNKHLFLTSKPMVYLVNLSEKDYIRKKNKWLIKIKEWVDKYDPGALVIPFSGALELKLQELSAEERQKYLEANMTQSALPKIIKAGFAALQLEYFFTAGPDEVRAWTIRKGTKAPQAAGKIHTDFEKGFIMAEVMKYEDFKEEGSENAVKAAGKYRQQGRNYIVEDGDIIFFKFNTPQQPKKK

SEQ ID NO: 881185 - protein, 452 aa, Homo sapiens
VCAQVPLGARPARSAAVAAVVRAARRRGRACVLSSFLPASSCRQDLSLAAAGTPCHRPGRARKSTFFNVLTNSQASAENFPFCTIDPNESRVPVPDERFDFLCQYHKPASKIPAFLNVVDIAGLVKGAHNGQGLGNAFLSHISACDGIFHLTRWSCNGTISAHHNLHLLGSSDSSASASCSAFEDDDITHVEGSVDPIRDIEIIHEELQLKDEEMIGPIIDKLEKVAVRGGDKKLKPEYDIMCKVKSWVIDQKKPVRFYHDWNDKEIEVLNKHLFLTSKPMVYLVNLSEKDYIRKKNKWLIKIKEWVDKYDPGALVIPFSGALELKLQELSAEERQKYLEANMTQSALPKIIKAGFAALQLEYFFTAGPDEVRAWTIRKGTKAPQAAGKIHTDFEKGFIMAEVMKYEDFKEEGSENAVKAAGKYRQQGRNYIVEDGDIIFFKFNTPQQPKKK

SEQ ID NO: 881186 - protein, 511 aa, Homo sapiens
  misc_feature (505)..(505): Xaa can be any naturally occurring amino acid
GLRAGAARRPARPFRRCRRRRACRSAEGTGLRSLLLPPRLQLPAGPFSRCRWDPVSSPRPSTMPPKKGGDGIKPPPIIGRFGTSLKIGIVGLPNVGKSTFFNVLTNSQASAENFPFCTIDPNESRVPVPDERFDFLCQYHKPASKIPAFLNVVDIAGLVKGAHNGQGLGNAFLSHISACDGIFHLTRAFEDDDITHVEGSVDPIRDIEIIHEELQLKDEEMIGPIIDKLEKVAVRGGDKKLKPEYDIMCKVKSWVIDQKKPVRFYHDWNDKEIEVLNKHLFLTSKPMVYLVNLSEKDYIRKKNKWLIKIKEWVDKYDPGALVIPFSGALELKLQELSAEERQKYLEANMTQSALPKIIKAGFAALQLEYFFTAGPDEVRAWTIRKGTKAPQAAGKIHTDFEKGFIMAEVMKYEDFKEEGSENAVKAAGKYRQQGRNYIVEDGDIIFFKFNTPQQPKKKNKNIKKNFWARLPSKIFSTPRVAPAPGMEHAKRLPQDTGPQRVGSPXKPGPRF

SEQ ID NO: 881187 - protein, 533 aa, Homo sapiens
GLRAGAARRPARPFRRCRRRRACRSAEGTGLRSLLLPPRLQLPAGPFSRCRWDPVSSPRPSTMPPKKGGDGIKPPPIIGRFGTSLKIGIVGLPNVGKSTFFNVLTNSQASAENFPFCTIDPNESRVPVPDERFDFLCQYHKPASKIPAFLNVVDIAGLVKGAHNGQGLGNAFLSHISACDGIFHLTRAFEDDDITHVEGSVDPIRDIEIIHEELQLKDEEMIGPIIDKLEKVAVRGGDKKLKPEYDIMCKVKSWVIDQKKPVRFYHDWNDKEIEVLNKHLFLTSKPMVYLVNLSEKDYIRKKNKWLIKIKEWVDKYDPGALVIPFSGALELKLQELSAEERQKYLEANMTQSALPKIIKAGFAALQLEYFFTAGPDEVRAWTIRKGTKAPQAAGKIHTDFEKGFIMAEVMKYEDFKEEGSENAVKAAGKYRQQGRNYIVEDGDIIFFKFNTPQQPSNPSGVAWLGGVLPLFATIKYPQKFEARITITTDESTRTNYMELRGLTSEDTAVYFCARVDLSPHYEGYYFDPWGQVT

SEQ ID NO: 881188 - protein, 110 aa, Homo sapiens
MTQSALPKIIKAGFAALQLEYFFTAGPDEVRAWTIRKGTKAPQAAGKIHTDFEKGFIMAEVMKYEDFKEEGSENAVKAAGKYRQQGRNYIVEDGDIIFFKFNTPQQPKKK

SEQ ID NO: 881189 - protein, 340 aa, Homo sapiens
GLRAGAARRPARPFRRCRRRRACRSAEGTGLRSLLLPPRLQLPAGPFSRCRWDPVSSPRPSTMPPKKGGDGIKPPPIIGRFGTSLKIGIVGLPNVGKSTFFNVLTNSQASAENFPFCTIDPNESRVPVPDERFDFLCQYHKPASKIPAFLNVVDIAGLVKGAHNGQGLGNAFLSHISACDGIFHLTRAFEDDDITHVEGSVDPIRDIEIIHEELQLKDEEMIGPIIDKLEKVAVRGGDKKLKPEYDIMCKVKSWVIDQKKPVRFYHDWNDKEIEVLNKHLFLTSKPMVYLVNLSEKDYIRKKNKWLLESTDNKAEIILLKMEILSSSNLTHLNNRRRNKI

SEQ ID NO: 881190 - protein, 119 aa, Homo sapiens
LAGTTLLILHRYNALPKIIKAGFAALQLEYFFTAGPDEVRAWTIRKGTKAPQAAGKIHTDFEKGFIMAEVMKYEDFKEEGSENAVKAAGKYRQQGRNYIVEDGDIIFFKFNTPQQPKKK

SEQ ID NO: 881191 - protein, 98 aa, Homo sapiens
ACWNDSLNPPPLQRPDEVRAWTIRKGTKAPQAAGKIHTDFEKGFIMAEVMKYEDFKEEGSENAVKAAGKYRQQGRNYIVEDGDIIFFKFNTPQQPKKK

SEQ ID NO: 881192 - protein, 144 aa, Homo sapiens
SPRPSTMPPKKGGDGIKPPPIIGRFGTSLKIGIVGLPNVGKSTFFNVLTNSQASAENFPFCTIDPNESRVPVPDERFDFLCQYHKPASKIPAFLNVVDIAGLVKGAHNGQGLGNAFLSHISACDGIFHLTRCWKVQTTRQKLYC

SEQ ID NO: 881193 - protein, 213 aa, Homo sapiens
GLRAGAARRPARPFRRCRRRRACRSAEGTGLRSLLLPPRLQLPAGPFSRCRWDPVSSPRPSTMPPKKGGDGIKPPPIIGRFGTSLKIGIVGLPNVGKSTFFNVLTNSQASAENFPFCTIDPNESRVPVPDERFDFLCQYHKPASKIPAFLNVVDIAGLVKGAHNGQGLGNAFLSHISACDGIFHLTRWSCNGTISAHHNLHLLGSSDSSASAS

SEQ ID NO: 881194 - protein, 458 aa, Homo sapiens; identical to SEQ ID NO: 881177

SEQ ID NO: 881195 - protein, 458 aa, Homo sapiens; identical to SEQ ID NO: 881177

SEQ ID NO: 881196 - protein, 458 aa, Homo sapiens; identical to SEQ ID NO: 881177

SEQ ID NO: 881197 - protein, 238 aa, Homo sapiens; identical to SEQ ID NO: 881184

SEQ ID NO: 881198 - protein, 304 aa, Homo sapiens
GLRAGAARRPARPFRRCRRRRACRSAEGTGLRSLLLPPRLQLPAGPFSRCRWDPVSSPRPSTMPPKKGGDGIKPPPIIGRFGTSLKIGIVGLPNVGKSTFFNVLTNSQASAENFPFCTIDPNESRVPVPDERFDFLCQYHKPASKIPAFLNVVDIAGLVKGAHNGQGLGNAFLSHISACDGIFHLTRAFEDDDITHVEGSVDPIRDIEIIHEELQLKDEEMIGPIIDKLEKVAVRGGDKKLKPEYDIMCKVKSWVIDQKKPVRFYHDWNDKEIEVLNKHLFLTSKPMVYLVNLSEKDYIRKKNK

SEQ ID NO: 881199 - protein, 448 aa, Homo sapiens
GLRAGAARRPARPFRRCRRRRACRSAEGTGLRSLLLPPRLQLPAGPFSRCRWDPVSSPRPSTMPPKKGGDGIKPPPIIGRFGTSLKIGIVGLPNVGKSTFFNVLTNSQASAENFPFCTIDPNESRVPVPDERFDFLCQYHKPASKIPAFLNVVDIAGLVKGAHNGQGLGNAFLSHISACDGIFHLTRAFEDDDITHVEGSVDPIRDIEIIHEELQLKDEEMIGPIIDKLEKVAVRGGDKKLKPEYDIMCKVKSWVIDQKKPVRFYHDWNDKEIEVLNKHLFLTSKPMVYLVNLSEKDYIRKKNKWLIKIKEWVDKYDPGALVIPFSGALELKLQELSAEERQKYLEANMTQSALPKIIKAGFAALQLEYFFTAGPDEVRAWTIRKGTKAPQAAGKIHTDFEKGFIMAEVMKYEDFKEEGSENAVKLLKMEILSSSNLTHLNNRRRNKI

SEQ ID NO: 881200 - protein, 278 aa, Homo sapiens
MQVIYQRAFEDDDITHVEGSVDPIRDIEIIHEELQLKDEEMIGPIIDKLEKVAVRGGDKKLKPEYDIMCKVKSWVIDQKKPVRFYHDWNDKEIEVLNKHLFLTSKPMVYLVNLSEKDYIRKKNKWLIKIKEWVDKYDPGALVIPFSGALELKLQELSAEERQKYLEANMTQSALPKIIKAGFAALQLEYFFTAGPDEVRAWTIRKGTKAPQAAGKIHTDFEKGFIMAEVMKYEDFKEEGSENAVKAAGKYRQQGRNYIVEDGDIIFFKFNTPQQPKKK

SEQ ID NO: 881201 - protein, 340 aa, Homo sapiens; identical to SEQ ID NO: 881189

SEQ ID NO: 881202 - protein, 172 aa, Homo sapiens
MVYLVNLSEKDYIRKKNKWLIKIKEWVDKYDPGALVIPFSGALELKLQELSAEERQKYLEANMTQSALPKIIKAGFAALQLEYFFTAGPDEVRAWTIRKGTKAPQAAGKIHTDFEKGFIMAEVMKYEDFKEEGSENAVKAAGKYRQQGRNYIVEDGDIIFFKFNTPQQPKKK

SEQ ID NO: 881203 - protein, 170 aa, Homo sapiens
YFFTPSLIITIFTTSSVLIKIKEWVDKYDPGALVIPFSGALELKLQELSAEERQKYLEANMTQSALPKIIKAGFAALQLEYFFTAGPDEVRAWTIRKGTKAPQAAGKIHTDFEKGFIMAEVMKYEDFKEEGSENAVKAAGKYRQQGRNYIVEDGDIIFFKFNTPQQPKKK

SEQ ID NO: 881204 - protein, 360 aa, Homo sapiens
GLRAGAARRPARPFRRCRRRRACRSAEGTGLRSLLLPPRLQLPAGPFSRCRWDPVSSPRPSTMPPKKGGDGIKPPPIIGRFGTSLKIGIVGLPNVGKSTFFNVLTNSQASAENFPFCTIDPNESRVPVPDERFDFLCQYHKPASKIPAFLNVVDIAGLVKGAHNGQGLGNAFLSHISACDGIFHLTRAFEDDDITHVEGSVDPIRDIEIIHEELQLKDEEMIGPIIDKLEKVAVRGGDKKLKPEYDIMCKVKSWVIDQKKPVRFYHDWNDKEIEVLNKHLFLTSKPMVYLVNLSEKDYIRKKNKWLIKIKEWVDKYDPGALVIPFSGALELKLQELSAEERQKYLEANMTQSALPKIIAG

SEQ ID NO: 881205 - protein, 107 aa, Homo sapiens
LAGTTLLILHRYKLIKIKEWVDKYDPGALVIPFSGALELKLQELSAEERQKYLEANMTQSALPKIIKAGFAALQLEYFFTAGPDEVRAWTIRERFTQILKRDSLWLK

SEQ ID NO: 881206 - protein, 106 aa, Homo sapiens
MSEDNVACSFLNLQIMHVLQYSRCLHSIKHLTKPALVCLGMSVLTDCGVLNAIRHLVVADYRILRRVYDTVTGSVGQLQLYLKSESFMGIRRIVYQGFVSKKLINL

SEQ ID NO: 881207 - protein, 418 aa, Homo sapiens
MIHSLFLINSSGDIFLEKHWKSVVSRSVCDYFFEAQERATEAENVPPVIPTPHHYLLSVYRHKIFFVAVIQTEVPPLFVIEFLHRVVDTFQDYFGVCSEPVIKDNVVVVYEVLEEMLDNGFPLATESNILKELIKPPTILRTVVNTITGSTNVGDQLPTGQLSVVPWRRTGVKYTNNEAYFDVIEEIDAIIDKSGSTITAEIQGVIDACVKLTGMPDLTLSFMNPRLLDDVSFHPCVRFKRWESERILSFIPPDGNFRLLSYHVSAQNLVAIPVYVKHNISFRDSSSLGRFEITVGPKQTMGKTIEGVTVTSQMPKGVLNMSLTPSQGTHTFDPVTKMLSWDVGKINPQKLPSLKGTMSLQAGASKPDENPTINLQFKIQQLAISGLKVNRLDMYGEKYKPFKGIKYMTKAGKFQVRT

SEQ ID NO: 881208 - protein, 268 aa, Homo sapiens
MIHSLFLINSSGDIFLEKHWKSVVSRSVCDYFFEAQERATEAENVPPVIPTPHHYLLSVYRHKIFFVAVIQTEVPPLFVIEFLHRVVDTFQDYFGVCSEPVIKDNVVVVYEVLEEMLDNGFPLATESNILKELIKPPTILRTVVNTITGSTNVGDQLPTGQLSVVPWRRTGVKYTNNEAYFDVIEEIDAIIDKSGSTITAEIQGVIDACVKLTGMPDLTLSFMNPRLLDDVSFHPCVRFKRWESERILSFIPPDGNFRLLSYHVSAQK

SEQ ID NO: 881209 - protein, 78 aa, Homo sapiens
  misc_feature (1)..(1): Xaa can be any naturally occurring amino acid
XTLRLGTRLGVASLKGTMSLQAGASKPDENPTINLQFKIQQLAISGLKVNRLDMYGEKYKPFKGIKYMTKAGKFQVRT

SEQ ID NO: 881210 - protein, 162 aa, Homo sapiens
  misc_feature (1)..(1): Xaa can be any naturally occurring amino acid
  misc_feature (11)..(11): Xaa can be any naturally occurring amino acid
XLSSVEPAAVXLSVPDLVASRSTLTPPDHYSLGRFEITVGPKQTMGKTIEGVTVTSQMPKGVLNMSLTPSQGTHTFDPVTKMLSWDVGKINPQKLPSLKGTMSLQAGASKPDENPTINLQFKIQQLAISGLKVNRLDMYGEKYKPFKGIKYMTKAGKFQVRT

SEQ ID NO: 881211 - protein, 418 aa, Homo sapiens; identical to SEQ ID NO: 881207

SEQ ID NO: 881212 - protein, 418 aa, Homo sapiens; identical to SEQ ID NO: 881207

SEQ ID NO: 881213 - protein, 230 aa, Homo sapiens [sequence omitted]

SEQ ID NO: 881214 - protein, 222 aa, Homo sapiens
MIHSLFLINSSGDIFLEKHWKSVVSRSVCDYFFEAQERATEAENVPPVIPTPHHYLLSVYRHKIFFVAVIQTEVPPLFVIEFLHRVVDTFQDYFGVCSEPVIKDNVVVVYEVLEEMLDNGFPLATESNILKELIKPPTILRTVVNTITGSTITAEIQGVIDACVKLTGMPDLTLSFMNPRLLDDVSFHPCVRFKRWESERILSFIPPDGNFRLLSYHVSAQK

SEQ ID NO: 881215 - protein, 118 aa, Homo sapiens [sequence omitted]

SEQ ID NO: 881216 - protein, 418 aa, Homo sapiens; identical to SEQ ID NO: 881207

SEQ ID NO: 881217 - protein, 230 aa, Homo sapiens [sequence omitted]

SEQ ID NO: 881218 - protein, 384 aa, Homo sapiens
IKTGRAPKGADAYYRSTRHQRPVPGSPLRLFGASSSNRIQIFGSEGRRTLRKLRRLSSPGAMDSDASLVSSRPSSPEPDDLFLPARSKGSSGSAFTGGTVSSSTPSDCPPELSAELRGAMGSAGAHPGDKLGGSGFKSSSSSTSSSTSSAAASSTKKDKKQMTEPELQQLRLKINSRERKRMHDLNIAMDGLREVMPYAHGPSVRKLSKIATLLLARNYILMLTNSLEEMKRLVSEIYGGHHAGFHPSACGGLAHSAPLPAATAHPAAAAHAAHHPAVHHPILPPAAAAAAAAAAAAAVSSASLPGSGLPSVGSIRPPHGLLKSPSAAAAAPLGGGGGGSGASGGFQHWGGMPCPCSMCQVPPPHHHVSAMGAGSLPRLTSDAK

SEQ ID NO: 881219 - protein, 47 aa, Homo sapiens
MYCVEEHYVLNFSQNRAEAVPTRQNRSSYKEMPRDSKAKPECSLEPR

SEQ ID NO: 881220 - protein, 47 aa, Homo sapiens; identical to SEQ ID NO: 881219

SEQ ID NO: 881221 - protein, 47 aa, Homo sapiens; identical to SEQ ID NO: 881219

SEQ ID NO: 881222 - protein, 93 aa, Homo sapiens
PPSPQPTEEDPEHRVRVRVTKLRLGGPNQDLTVLEIKRENPQLKQPPPQDIEDLDHYEMKAEPISGKKLEDEGIEKENLAILEKLGRLKDKSI

SEQ ID NO: 881223 - protein, 80 aa, Homo sapiens
MEMLARTIKYLEPNPASQAKLTMLNTVWKIQGQVKNPGYPQSEGLLSECLIRHQKELGNESNFSDALLDAGESMKHLAEV

SEQ ID NO: 881224 - protein, 191 aa, Homo sapiens
RPNESAGRCRWDHGGQSGRMASGFKKPSAASTGQKRKVAPKPELTEDQKQEVREAFDLFDVDGSGTIDAKELKVAMRALGFEPRKEEMKKMISEVDREGTGKISFNDFLAVMTQKMSEKDTKEEILKAFRLFDDDETGKISFKNLKRVANELGENLTDEELQEMIDEADRDGDGEVNEEEFLRIMKKTSLY

SEQ ID NO: 881225 - protein, 272 aa, Homo sapiens
MSKAGAGRGPLQEAQSQKMRYKTSLVMRKRLRLYRNTLKESSSSSGHHGPQLTAASSPSVFPGLHEEPPQASPSRPLNGLLRLGLPGDMYARPEPFPPGPAARSDALAAAAALHGYGGMNLTVNLAAPHGPGAFFRYMRQPIKQELICKWLAADGTATPSLCSKTFSTMHELVTHVTVEHVGGPEQANHICFWEECPRQGKPFKAKYKLVNHIRVHTGEKPFPCPFPGCGKVFARSENLKIHKRTHTGEKPFRCEFEGCERRFANSSDRKKH

SEQ ID NO: 881226 - protein, 186 aa, Homo sapiens
MYARPEPFPPGPAARSDALAAAAALHGYGGMNLTVNLAAPHGPGAFFRYMRQPIKQELICKWLAADGTATPSLCSKTFSTMHELVTHVTVEHVGGPEQANHICFWEECPRQGKPFKAKYKLVNHIRVHTGEKPFPCPFPGCGKVFARSENLKIHKRTHTGQYSALSVACGPSGEAGPRVWISSSPN

SEQ ID NO: 881227 - protein, 111 aa, Homo sapiens [sequence omitted]

SEQ ID NO: 881228 - protein, 398 aa, Homo sapiens
MLRLYVLVMGVSAFTLQPAAHTGAARSCRFRGRHYKREFRLEGEPVALRCPQVPYWLWASVSPRINLTWHKNDSARTVPGEEETRMWAQDGALWLLPALQEDSGTYVCTTRNASYCDKMSIELRVFENTDAFLPFISYPQILTLSTSGVLVCPDLSEFTRDKTDVKIQWYKDSLLLDKDNEKFLSVRGTTHLLVHDVALEDAGYYRCVLTFAHEGQQYNITRSIELRIKKKKEETIPVIISPLKTISASLGSRLTIPCKVFLGTGTPLTTMLWWTANDTHIESAYPGGRVTEGPRQEYSENNENYIEVPLIFDPVTREDLHMDFKCVVHNTLSFQTLRTTVKEASSTFSWGIVLAPLSLAFLVLGGIWMHRRCKHRTGKADGLTVLWPHHQDFQSYPK

SEQ ID NO: 881229 - protein, 296 aa, Homo sapiens
MLRLYVLVMGVSAFTLQPAAHTGAARSCRFRGRHYKREFRLEGEPVALRCPQVPYWLWASVSPRINLTWHKNDSARTVPGEEETRMWAQDGALWLLPALQEDSGTYVCTTRNASYCDKMSIELRVFENTDAFLPFISYPQILTLSTSGVLVCPDLSEFTRDKTDVKIQWYKDSLLLDKDNEKFLSVRGTTHLLVHDVALEDAGYYRCVLTFAHEGQQYNITRSIELRIKKKKEETIPVIISPLKTISASLGSRLTIPCKVFLGTGTPLTTMLWWTANDTHIESAYPGGRVTEGPRQ

SEQ ID NO: 881230 - protein, 398 aa, Homo sapiens; identical to SEQ ID NO: 881228

SEQ ID NO: 881231 - protein, 73 aa, Homo sapiens
GLTVACGLTVACGLTVACGLTVAVWVDRWLHLHGWCLCRVPGRLSIARIVNQCPTCGLPSKVVSGQLDCLRGG

SEQ ID NO: 881232 - protein, 417 aa, Homo sapiens
AGGESLAWQPSPGEQQQGHVLLGLSPPLPVSSGSCQEQCCAWAARSCRFRGRHYKREFRLEGEPVALRCPQVPYWLWASVSPRINLTWHKNDSARTVPGEEETRMWAQDGALWLLPALQEDSGTYVCTTRNASYCDKMSIELRVFENTDAFLPFISYPQILTLSTSGVLVCPDLSEFTRDKTDVKIQWYKDSLLLDKDNEKFLSVRGTTHLLVHDVALEDAGYYRCVLTFAHEGQQYNITRSIELRIKKKKEETIPVIISPLKTISASLGSRLTIPCKVFLGTGTPLTTMLWWTANDTHIESAYPGGRVTEGPRQEYSENNENYIEVPLIFDPVTREDLHMDFKCVVHNTLSFQTLRTTVKEASSTFSWGIVLAPLSLAFLVLGGIWMHRRCKHRTGKADGLTVLWPHHQDFQSYPK

SEQ ID NO: 881233 - protein, 188 aa, Homo sapiens
MALTFALLVALLVLSCKSSCSVGCDLPQTHSLGSRRTLMLLAQMRRISLFSCLKDRHDFGFPQEEFGNQFQKAETIPVLHEMIQQIFNLFSTKDSSAAWDETLLDKFYTELYQQLNDLEACVIQGVGVTETPLMKEDSILAVRKYFQRITLYLKEKKYSPCAWEVVRAEIMRSFSLSTNLQESLRSKE

SEQ ID NO: 881234 - protein, 153 aa, Homo sapiens [sequence omitted]

SEQ ID NO: 881235 - protein, 137 aa, Homo sapiens
MGLTSQLLPPLFFLLACAGNFVHGHKCDITLQEIIKTLNSLTEQKNTTEKETFCRAATVLRQFYSHHEKDTRCLGATAQQFHRHKQLIRFLKRLDRNLWGLAGLNSCPVKEANQSTLENFLERLKTIMREKYSKCSS

SEQ ID NO: 881236 - protein, 135 aa, Homo sapiens
  misc_feature (119)..(119): Xaa can be any naturally occurring amino acid
  misc_feature (132)..(132): Xaa can be any naturally occurring amino acid
MTSIKQLSSEELEQFQKTGTIVVEGHELHDEDIRLMYTFDQATGGTAQFEAHSDAQALVLLDVTPDQSMVDEGMAREVINRIQKLRKKCNLVPTDEITVYYKAKSEGGRNEFLYNENTXRESPNITDPVDPXLYA

SEQ ID NO: 881237 - protein, 1262 aa, Homo sapiens
MLQQVPENINFPAEEEKILEFWTEFNCFQECLKQSKHKPKFTFYDGPPFATGLPHYGHILAGTIKDIVTRYAHQSGFHVDRRFGWDCHGLPVEYEIDKTLGIRGPEDVAKMGITEYNNQCRAIVMRYSAEWKSTVSRLGRWIDFDNDYKTLYPQFMESVWWVFKQLYDKGLVYRGVKVMPFSTACNTPLSNFESHQNYKDVQDPSVFVTFPLEEDETVSLVAWTTTPWTLPSNLAVCVNPEMQYVKIKDVARGRLLILMEARLSALYKLESDYEILERFPGAYLKGKKYRPLFDYFLKCKENGAFTVLVDNYVKEEEGTGVVHQAPYFGAEDYRVCMDFNIIRKDSLPVCPVDASGCFTTEVTDFAGQYVKDADKSIIRTLKEQGRLLVATTFTHSYPFCWRSDTPLIYKAVPSWFVRVENMVDQLLRNNDLCYWVPELVREKRFGNWLKDARDWTISRNRYWGTPIPLWVSDDFEEVVCIGSVAELEELSGAKISDLHRESVDHLTIPSRCGKGSLHRISEVFDCWFESGSMPYAQVHYPFENKREFEDAFPADFIAEGIDQTRGWFYTLLVLATALFGQPPFKNVIVNGLVLASDGQKMSKRKKNYPDPVSIIQKYGADALRLYLINSPVVRAENLRFKEEGVRDVLKDVLLPWYNAYRFLIQNVLRLQKEEEIEFLYNENTVRESPNITDRWILSFMQSLIGFFETEMAAYRLYTVVPRLVKFVDILTNWYVRMNRRRLKGENGMEDCVMALETLFSVLLSLCRLMAPYTPFLTELMYQNLKVLIDPVSVQDKDTLSIHYLMLPRVREELIDKKTESAVSQMQSVIELGRVIRDRKTIPIKYPLKEIVVIHQDPEALKDIKSLEKYIIEELNVRKVTLSTDKNKYGIRLRAEPDHMVLGKRLKGAFKAVMTSIKQLSSEELEQFQKTGTIVVEGHELHDEDIRLMYTFDQATGGTAQFEAHSDAQALVLLDVTPDQSMVDEGMAREVINRIQKLRKKCNLVPTDEITVYYKAKSEGTYLNSVIESHTEFIFTTIKAPLKPYPVSPSDKVLIQEKTQLKGSELEITLTRGSSLPGPACAYVNLNICANGSEQGGVLLLENPKGDNRLDLLKLKSVVTSIFGVKNTELAVFHDETEIQNQTDLLSLSGKTLCVTAGSAPSLINSSSTLLCQYINLQLLNAKPQECLMGTVGTLLLENPLGQNGLTHQGLLYEAAKVFGLRSRKLKLFLNETQTQEITEDIPVKTLNMKTVYVSVLPTTADF

SEQ ID NO: 881238 - protein, 1152 aa, Homo sapiens
MGITEYNNQCRAIVMRYSAEWKSTVSRLGRWIDFDNDYKTLYPQFMESVWWVFKQLYDKGLVYRGVKVMPFSTACNTPLSNFESHQNYKDVQDPSVFVTFPLEEDETVSLVAWTTTPWTLPSNLAVCVNPEMQYVKIKDVARGRLLILMEARLSALYKLESDYEILERFPGAYLKGKKYRPLFDYFLKCKENGAFTVLVDNYVKEEEGTGVVHQAPYFGAEDYRVCMDFNIIRKDSLPVCPVDASGCFTTEVTDFAGQYVKDADKSIIRTLKEQGRLLVATTFTHSYPFCWRSDTPLIYKAVPSWFVRVENMVDQLLRNNDLCYWVPELVREKRFGNWLKDARDWTISRNRYWGTPIPLWVSDDFEEVVCIGSVAELEELSGAKISDLHRESVDHLTIPSRCGKGSLHRISEVFDCWFESGSMPYAQVHYPFENKREFEDAFPADFIAEGIDQTRGWFYTLLVLATALFGQPPFKNVIVNGLVLASDGQKMSKRKKNYPDPVSIIQKYGADALRLYLINSPVVRAENLRFKEEGVRDVLKDVLLPWYNAYRFLIQNVLRLQKEEEIEFLYNENTVRESPNITDRWILSFMQSLIGFFETEMAAYRLYTVVPRLVKFVDILTNWYVRMNRRRLKGENGMEDCVMALETLFSVLLSLCRLMAPYTPFLTELMYQNLKVLIDPVSVQDKDTLSIHYLMLPRVREELIDKKTESAVSQMQSVIELGRVIRDRKTIPIKYPLKEIVVIHQDPEALKDIKSLEKYIIEELNVRKVTLSTDKNKYGIRLRAEPDHMVLGKRLKGAFKAVMTSIKQLSSEELEQFQKTGTIVVEGHELHDEDIRLMYTFDQATGGTAQFEAHSDAQALVLLDVTPDQSMVDEGMAREVINRIQKLRKKCNLVPTDEITVYYKAKSEGTYLNSVIESHTEFIFTTIKAPLKPYPVSPSDKVLIQEKTQLKGSELEITLTRGSSLPGPACAYVNLNICANGSEQGGVLLLENPKGDNRLDLLKLKSVVTSIFGVKNTELAVFHDETEIQNQTDLLSLSGKTLCVTAGSAPSLINSSSTLLCQYINLQLLNAKPQECLMGTVGTLLLENPLGQNGLTHQGLLYEAAKVFGLRSRKLKLFLNETQTQEITEDIPVKTLNMKTVYVSVLPTTADF

SEQ ID NO: 881239 - protein, 563 aa, Homo sapiens
MQSLIGFFETEMAAYRLYTVVPRLVKFVDILTNWYVRMNRRRLKGENGMEDCVMALETLFSVLLSLCRLMAPYTPFLTELMYQNLKVLIDPVSVQDKDTLSIHYLMLPRVREELIDKKTESAVSQMQSVIELGRVIRDRKTIPIKYPLKEIVVIHQDPEALKDIKSLEKYIIEELNVRKVTLSTDKNKYGIRLRAEPDHMVLGKRLKGAFKAVMTSIKQLSSEELEQFQKTGTIVVEGHELHDEDIRLMYTFDQATGGTAQFEAHSDAQALVLLDVTPDQSMVDEGMAREVINRIQKLRKKCNLVPTDEITVYYKAKSEGTYLNSVIESHTEFIFTTIKAPLKPYPVSPSDKVLIQEKTQLKGSELEITLTRGSSLPGPACAYVNLNICANGSEQGGVLLLENPKGDNRLDLLKLKSVVTSIFGVKNTELAVFHDETEIQNQTDLLSLSGKTLCVTAGSAPSLINSSSTLLCQYINLQLLNAKPQECLMGTVGTLLLENPLGQNGLTHQGLLYEAAKVFGLRSRKLKLFLNETQTQEITEDIPVKTLNMKTVYVSVLPTTADF

SEQ ID NO: 881240 - protein, 483 aa, Homo sapiens [sequence omitted]

SEQ ID NO: 881241 - protein, 1262 aa, Homo sapiens; identical to SEQ ID NO: 881237

SEQ ID NO: 881242 - protein, 1262 aa, Homo sapiens; identical to SEQ ID NO: 881237

SEQ ID NO: 881243 - protein, 315 aa, Homo sapiens
MYTFDQATGGTAQFEAHSDAQALVLLDVTPDQSMVDEGMAREVINRIQKLRKKCNLVPTDEITVYYKAKSEGTYLNSVIESHTEFIFTTIKAPLKPYPVSPSDKVLIQEKTQLKGSELEITLTRGSSLPGPACAYVNLNICANGSEQGGVLLLENPKGDNRLDLLKLKSVVTSIFGVKNTELAVFHDETEIQNQTDLLSLSGKTLCVTAGSAPSLINSSSTLLCQYINLQLLNAKPQECLMGTVGTLLLENPLGQNGLTHQGLLYEAAKVFGLRSRKLKLFLNETQTQEITEDIPVKTLNMKTVYVSVLPTTADF

SEQ ID NO: 881244 - protein, 174 aa, Homo sapiens
MYTFDQATGGTAQFEAHSDAQALVLLDVTPDQSMVDEGMAREVINRIQKLRKKCNLVPTDEITVYYKAKSEGTYLNSVIESHTEFIFTTIKAPLKPYPVSPSDKVLIQEKTQLKGSELEITLTRGSSLPGPACAYVNLNICANGSEQGEMQWIIPEIYHFWKPRWSIAPGKSKR

SEQ ID NO: 881245 - protein, 1201 aa, Homo sapiens
MLQQVPENINFPAEEEKILEFWTEFNCFQECLKQSKHKPKFTFYDGPPFATGLPHYGHILAGTIKDIVTRYAHQSGFHVDRRFGWDCHGLPVEYEIDKTLGIRGPEDVAKMGITEYNNQCRAIVMRYSAEWKSTVSRLGRWIDFDNDYKTLYPQFMESVWWVFKQLYDKGLVYRGVKVMPFSTACNTPLSNFESHQNYKDVQDPSVFVTFPLEEDETVSLVAWTTTPWTLPSNLAVCVNPEMQYVKIKDVARGRLLILMEARLSALYKLESDYEILERFPGAYLKGKKYRPLFDYFLKCKENGAFTVLVDNYVKEEEGTGVVHQAPYFGAEDYRVCMDFNIIRKDSLPVCPVDASGCFTTEVTDFAGQYVKDADKSIIRTLKEQGRLLVATTFTHSYPFCWRSDTPLIYKAVPSWFVRVENMVDQLLRNNDLCYWVPELVREKRFGNWLKDARDWTISRNRYWGTPIPLWVSDDFEEVVCIGSVAELEELSGAKISDLHRESVDHLTIPSRCGKGSLHRISEVFDCWFESGSMPYAQVHYPFENKREFEDAFPADFIAEGIDQTRGWFYTLLVLATALFGQPPFKNVIVNGLVLASDGQKMSKRKKNYPDPVSIIQKYGADALRLYLINSPVVRAENLRFKEEGVRDVLKDVLLPWYNAYRFLIQNVLRLQKEEEIEFLYNENTVRESPNITDRWILSFMQSLIGFFETEMAAYRLYTVVPRLVKFVDILTNWYVRMNRRRLKGENGMEDCVMALETLFSVLLSLCRLMAPYTPFLTELMYQNLKVLIDPVSVQDKDTLSIHYLMLPRVREELIDKKTESAVSQMQSVIELGRVIRDRKTIPIKYPLKEIVVIHQDPEALKDIKSLEKYIIEELNVRKVTLSTDKNKYGIRLRAEPDHMVLGKRLKGAFKAVMTSIKQLSSEELEQFQKTGTIVVEGHELHDEDIRLMYTFDQATGGTAQFEAHSDAQALVLLDVTPDQSMVDEGMAREVINRIQKLRKKCNLVPTDEITVYYKAKSEGTYLNSVIESHTEFIFTTIKAPLKPYPVSPSDKVLIQEKTQLKGSELEITLTRGSSLPGPACAYVNLNICANGSEQGGVLLLENPKGDNRLDLLKLKSVVTSIFGVKNTELAVFHDETEIQNQTDLLSLSGKTLCVTAGSAPSLINSSSTLLCQYINPTRFPGMPKSPKWFQLVDRGPPFSLH

SEQ ID NO: 881246 - protein, 139 aa, Homo sapiens
MLQQVPENINFPAEEEKILEFWTEFNCFQECLKQSKHKPKFTFYDGPPFATGLPHYGHILAGTIKDIVTRYAHQSGFHVDRRFGWDCHGLPVEYEIDKTLGIRGPEDVAKMGITEYNNQCRAIVMRYSAEWKKLQKTSP

SEQ ID NO: 881247 - protein, 735 aa, Homo sapiens
MLQQVPENINFPAEEEKILEFWTEFNCFQECLKQSKHKPKFTFYDGPPFATGLPHYGHILAGTIKDIVTRYAHQSGFHVDRRFGWDCHGLPVEYEIDKTLGIRGPEDVAKMGITEYNNQCRAIVMRYSAEWKSTVSRLGRWIDFDNDYKTLYPQFMESVWWVFKQLYDKGLVYRGVKVMPFSTACNTPLSNFESHQNYKDVQDPSVFVTFPLEEDETVSLVAWTTTPWTLPSNLAVCVNPEMQYVKIKDVARGRLLILMEARLSALYKLESDYEILERFPGAYLKGKKYRPLFDYFLKCKENGAFTVLVDNYVKEEEGTGVVHQAPYFGAEDYRVCMDFNIIRKDSLPVCPVDASGCFTTEVTDFAGQYVKDADKSIIRTLKEQGRLLVATTFTHSYPFCWRSDTPLIYKAVPSWFVRVENMVDQLLRNNDLCYWVPELVREKRFGNWLKDARDWTISRNRYWGTPIPLWVSDDFEEVVCIGSVAELEELSGAKISDLHRESVDHLTIPSRCGKGSLHRISEVFDCWFESGSMPYAQVHYPFENKREFEDAFPADFIAEGIDQTRGWFYTLLVLATALFGQPPFKNVIVNGLVLASDGQKMSKRKKNYPDPVSIIQKYGADALRLYLINSPVVRAENLRFKEEGVRDVLKDVLLPWYNAYRFLIQNVLRLQKEEEIEFLYNENTVRESPNITDRWILSFMQSLIGFFETEMAGESLLVCPPRNKDYSLCNCPFDI

SEQ ID NO: 881248 - protein, 702 aa, Homo sapiens [sequence omitted]

SEQ ID NO: 881249 - protein, 702 aa, Homo sapiens [sequence omitted]

SEQ ID NO: 881250 - protein, 147 aa, Homo sapiens
MLQQVPENINFPAEEEKILEFWTEFNCFQECLKQSKHKPKFTFYDGPPFATGLPHYGHILAGTIKDIVTRYAHQSGFHVDRRFGWDCHGLPVEYEIDKTLGIRGPEDVAKMGITEYNNQCRAIVMRYSAEWKVCWVFFSRMNSKCSY

SEQ ID NO: 881251 - protein, 419 aa, Homo sapiens
MYPLKEIVVIHQDPEALKDIKSLEKYIIEELNVRKVTLSTDKNKYGIRLRAEPDHMVLGKRLKGAFKAVMTSIKQLSSEELEQFQKTGTIVVEGHELHDEDIRLMYTFDQATGGTAQFEAHSDAQALVLLDVTPDQSMVDEGMAREVINRIQKLRKKCNLVPTDEITVYYKAKSEGTYLNSVIESHTEFIFTTIKAPLKPYPVSPSDKVLIQEKTQLKGSELEITLTRGSSLPGPACAYVNLNICANGSEQGGVLLLENPKGDNRLDLLKLKSVVTSIFGVKNTELAVFHDETEIQNQTDLLSLSGKTLCVTAGSAPSLINSSSTLLCQYINLQLLNAKPQECLMGTVGTLLLENPLGQNGLTHQGLLYEAAKVFGLRSRKLKLFLNETQTQEITEDIPVKTLNMKTVYVSVLPTTADF

SEQ ID NO: 881252 - protein, 1262 aa, Homo sapiens; identical to SEQ ID NO: 881237

SEQ ID NO: 881253 - protein, 823 aa, Homo sapiens
MLQQVPENINFPAEEEKILEFWTEFNCFQECLKQSKHKPKFTFYDGPPFATGLPHYGHILAGTIKDIVTRYAHQSGFHVDRRFGWDCHGLPVEYEIDKTLGIRGPEDVAKMGITEYNNQCRAIVMRYSAEWKSTVSRLGRWIDFDNDYKTLYPQFMESVWWVFKQLYDKGLVYRGVKVMPFSTACNTPLSNFESHQNYKDVQDPSVFVTFPLEEDETVSLVAWTTTPWTLPSNLAVCVNPEMQYVKIKDVARGRLLILMEARLSALYKLESDYEILERFPGAYLKGKKYRPLFDYFLKCKENGAFTVLVDNYVKEEEGTGVVHQAPYFGAAPYTPFLTELMYQNLKVLIDPVSVQDKDTLSIHYLMLPRVREELIDKKTESAVSQMQSVIELGRVIRDRKTIPIKYPLKEIVVIHQDPEALKDIKSLEKYIIEELNVRKVTLSTDKNKYGIRLRAEPDHMVLGKRLKGAFKAVMTSIKQLSSEELEQFQKTGTIVVEGHELHDEDIRLMYTFDQATGGTAQFEAHSDAQALVLLDVTPDQSMVDEGMAREVINRIQKLRKKCNLVPTDEITVYYKAKSEGTYLNSVIESHTEFIFTTIKAPLKPYPVSPSDKVLIQEKTQLKGSELEITLTRGSSLPGPACAYVNLNICANGSEQGGVLLLENPKGDNRLDLLKLKSVVTSIFGVKNTELAVFHDETEIQNQTDLLSLSGKTLCVTAGSAPSLINSSSTLLCQYINLQLLNAKPQECLMGTVGTLLLENPLGQNGLTHQGLLYEAAKVFGLRSRKLKLFLNETQTQEITEDIPVKTLNMKTVYVSVLPTTADF

SEQ ID NO: 881254 - protein, 526 aa, Homo sapiens
MNRRRLKGENGMEDCVMALETLFSVLLSLCRLMAPYTPFLTELMYQNLKVLIDPVSVQDKDTLSIHYLMLPRVREELIDKKTESAVSQMQSVIELGRVIRDRKTIPIKYPLKEIVVIHQDPEALKDIKSLEKYIIEELNVRKVTLSTDKNKYGIRLRAEPDHMVLGKRLKGAFKAVMTSIKQLSSEELEQFQKTGTIVVEGHELHDEDIRLMYTFDQATGGTAQFEAHSDAQALVLLDVTPDQSMVDEGMAREVINRIQKLRKKCNLVPTDEITVYYKAKSEGTYLNSVIESHTEFIFTTIKAPLKPYPVSPSDKVLIQEKTQLKGSELEITLTRGSSLPGPACAYVNLNICANGSEQGGVLLLENPKGDNRLDLLKLKSVVTSIFGVKNTELAVFHDETEIQNQTDLLSLSGKTLCVTAGSAPSLINSSSTLLCQYINLQLLNAKPQECLMGTVGTLLLENPLGQNGLTHQGLLYEAAKVFGLRSRKLKLFLNETQTQEITEDIPVKTLNMKTVYVSVLPTTADF

SEQ ID NO: 881255 - protein, 1241 aa, Homo sapiens
MLQQVPENINFPAEEEKILEFWTEFNCFQECLKQSKHKPKFTFYDGPPFATGLPHYGHILAGTIKDIVTRYAHQSGFHVDRRFGWDCHGLPVEYEIDKTLGIRGPEDVAKMGITEYNNQCRAIVMRYSAEWKSTVSRLGRWIDFDNDYKTLYPQFMESVWWVFKQLYDKGLVYRGVKVMPFSTACNTPLSNFESHQNYKDVQDPSVFVTFPLEEDETVSLVAWTTTPWTLPSNLAVCVNPEMQYVKIKDVARGRLLILMEARLSALYKLESDYEILERFPGAYLKGKKYRPLFDYFLKCKENGAFTVLVDNYVKEEEGTGVVHQAPYFGAEDYRVCMDFNIIRKDSLPVCPVDASGCFTTEVTDFAGQYVKDADKSIIRTLKEQGRLLVATTFTHSYPFCWRSDTPLIYKAVPSWFVRVENMVDQLLRNNDLCYWVPELVREKRFGNWLKDARDWTISRNRYWGTPIPLWVSDDFEEVVCIGSVAELEELSGAKISDLHRESVDHLTIPSRCGKGSLHRISEVFDCWFESGSMPYAQVHYPFENKREFEDAFPADFIAEGIDQTRGWFYTLLVLATALFGQPPFKNVIVNGLVLASDGQKMSKRKKNYPDPVSIIQKYGADALRLYLINSPVVRAENLRFKEEGVRDVLKDVLLPWYNAYRFLIQNVLRLQKEEEIEFLYNENTVRESPNITDRWILSFMQSLIGFFETEMAAYRLYTVVPRLVKFVDILTNWYVRMNRRRLKGENGMEDCVMALETLFSVLLSLCRLMAPYTPFLTELMYQNLKVLIDPVSVQDKDTLSIHYLMLPRVREELIDKKTESAVSQMQSVIELGRVIRDRKTIPIKYPLKEIVVIHQDPEALKDIKSLEKYIIEELNVRKVTLSTDKNKYGIRLRAEPDHMVLGKRLKGAFKAVMTSIKQLSSEELEQFQKTGTIVVEGHELHDEDIRLMYTFDQATGGTAQFEAHSDAQALVLLDVTPDQSMVDEGMAREVINRIQKLRKKCNLVPTDEITVYYKAKSEGTYLNSVIESHTEFIFTTIKAPLKPYPVSPSDKVLIQEKTQLKGSELEITLTRGSSLPGPACAYVNLNICANGSEQGGVLLLENPKGDNRLDLLKLKSVVTSIFGVKNTELAVFHDETAAPSLINSSSTLLCQYINLQLLNAKPQECLMGTVGTLLLENPLGQNGLTHQGLLYEAAKVFGLRSRKLKLFLNETQTQEITEDIPVKTLNMKTVYVSVLPTTADF

SEQ ID NO: 881256 - protein, 313 aa, Homo sapiens
ARCITSVRPVAAWTPDELLLGLLARGAVQAREAPQAPYTPFLTELMYQNLKVLIDPVSVQDKDTLSIHYLMLPRVREELIDKKTESAVSQMQSVIELGRVIRDRKTIPIKLKGSELEITLTRGSSLPGPACAYVNLNICANGSEQGGVLLLENPKGDNRLDLLKLKSVVTSIFGVKNTELAVFHDETEIQNQTDLLSLSGKTLCVTAGSAPSLINSSSTLLCQYINLQLLNAKPQECLMGTVGTLLLENPLGQNGLTHQGLLYEAAKVFGLRSRKLKLFLNETQTQEITEDIPVKTLNMKTVYVSVLPTTADF

SEQ ID NO: 881257 - protein, 139 aa, Homo sapiens; identical to SEQ ID NO: 881246

SEQ ID NO: 881258 - protein, 720 aa, Homo sapiens
MLQQVPENINFPAEEEKILEFWTEFNCFQECLKQSKHKPKFTFYDGPPFATGLPHYGHILAGTIKDIVTRYAHQSGFHVDRRFGWDCHGLPVEYEIDKTLGIRGPEDVAKMGITEYNNQCRAIVMRYSAEWKSTVSRLGRWIDFDNDYKTLYPQFMESVWWVFKQLYDKGLVYRGVKVMPFSTACNTPLSNFESHQNYKDVQDPSVFVTFPLEEDETVSLVAWTTTPWTLPSNLAVCVNPEMQYVKIKDVARGRLLILMEARLSALYKLESDYEILERFPGAYLKGKKYRPLFDYFLKCKENGAFTVLVDNYVKEEEGTGVVHQAPYFGAEDYRVCMDFNIIRKDSLPVCPVDASGCFTTEVTDFAGQYVKDADKSIIRTLKEQGRLLVATTFTHSYPFCWRSDTPLIYKAVPSWFVRVENMVDQLLRNNDLCYWVPELVREKRFGNWLKDARDWTISRNRYWGTPIPLWVSDDFEEVVCIGSVAELEELSGAKISDLHRESVDHLTIPSRCGKGSLHRISEVFDCWFESGSMPYAQVHYPFENKREFEDAFPADFIAEGIDQTRGWFYTLLVLATALFGQPPFKNVIVNGLVLASDGQKMSKRKKNYPDPVSIIQKYGADALRLYLINSPVVRAENLRFKEEGVRDVLKDVLLPWYNAYRFLIQNVLRLQKEEEIEFLYNENTVRESPNITDRWILSFMQSLIGFFETEMADFLVLPSS

SEQ ID NO: 881259 - protein, 752 aa, Homo sapiens
MLQQVPENINFPAEEEKILEFWTEFNCFQECLKQSKHKPKFTFYDGPPFATGLPHYGHILAGTIKDIVTRYAHQSGFHVDRRFGWDCHGLPVEYEIDKTLGIRGPEDVAKMGITEYNNQCRAIVMRYSAEWKSTVSRLGRWIDFDNDYKTLYPQFMESVWWVFKQLYDKGLVYRGVKVMPFSTACNTPLSNFESHQNYKDVQDPSVFVTFPLEEDETVSLVAWTTTPWTLPSNLAVCVNPEMQYVKIKDVARGRLLILMEARLSALYKLESDYEILERFPGAYLKGKKYRPLFDYFLKCKENGAFTVLVDNYVKEEEGTGVVHQAPYFGAEDYRVCMDFNIIRKDSLPVCPVDASGCFTTEVTDFAGQYVKDADKSIIRTLKEQGRLLVATTFTHSYPFCWRSDTPLIYKAVPSWFVRVENMVDQLLRNNDLCYWVPELVREKRFGNWLKDARDWTISRNRYWGTPIPLWVSDDFEEVVCIGSVAELEELSGAKISDLHRESVDHLTIPSRCGKGSLHRISEVFDCWFESGSMPYAQVHYPFENKREFEDAFPADFIAEGIDQTRGWFYTLLVLATALFGQPPFKNVIVNGLVLASDGQKMSKRKKNYPDPVSIIQKYGADALRLYLINSPVVRAENLRFKEEGVRDVLKDVLLPWYNAYRFLIQNVLRLQKEEEIEFLYNENTVRESPNITDRWILSFMQSLIGFFETEMAAYRLYTVVLAKSELEIGSQPKSKGAAMMLAVATVDFSQEH

SEQ ID NO: 881260 - protein, 720 aa, Homo sapiens
MLQQVPENINFPAEEEKILEFWTEFNCFQECLKQSKHKPKFTFYDGPPFATGLPHYGHILAGTIKDIVTRYAHQSGFHVDRRFGWDCHGLPVEYEIDKTLGIRGPEDVAKMGITEYNNQCRAIVMRYSAEWKSTVSRLGRWIDFDNDYKTLYPQFMESVWWVFKQLYDKGLVYRGVKVMPFSTACNTPLSNFESHQNYKDVQDPSVFVTFPLEEDETVSLVAWTTTPWTLPSNLAVCVNPEMQYVKIKDVARGRLLILMEARLSALYKLESDYEILERFPGAYLKGKKYRPLFDYFLKCKENGAFTVLVDNYVKEEEGTGVVHQAPYFGAEDYRVCMDFNIIRKDSLPVCPVDASGCFTTEVTDFAGQYVKDADKSIIRTLKEQGRLLVATTFTHSYPFCWRSDTPLIYKAVPSWFVRVENMVDQLLRNNDLCYWVPELVREKRFGNWLKDARDWTISRNRYWGTPIPLWVSDDFEEVVCIGSVAELEELSGAKISDLHRESVDHLTIPSRCGKGSLHRISEVFDCWFESGSMPYAQVHYPFENKREFEDAFPADFIAEGIDQTRGWFYTLLVLATALFGQPPFKNVIVNGLVLASDGQKMSKRKKNYPDPVSIIQKYGADALSIDTLINSPVAEQHAKPPPFTRTQRAVRATLLYAHCSCLPLATNCPTRLPLPPEPLPEASRTGRARHLALFSTLSTPGSPDSPIPPRRVAPVLPAAP

SEQ ID NO: 881261 - protein, 771 aa, Homo sapiens
AHSLLPARSLFLCSPEARECSRRPKLGPQEAMAESRGRLYLWMCLAAALASFLMGFMVGWFIKPLKETTTSVRYHQSIRWKLVSEMKAENIKSFLRSFTKLPHLAGTEQNFLLAKKIQTQWKKFGLDSAKLVHYDVLLSYPNETNANYISIVDEHETEIFKTSYLEPPPDGYENVTNIVPPYNAFSAQGMPEGDLVYVNYARTEDFFKLEREMGINCTGKIVIARYGKIFRGNKVKNAMLAGAIGIILYSDPADYFAPEVQPYPKGWNLPGTAAQRGNVLNLNGAGDPLTPGYPAKEYTFRLDVEEGVGIPRIPVHPIGYNDAEILLRYLGGIAPPDKSWKGALNVSYSIGPGFTGSDSFRKVRMHVYNINKITRIYNVVGTIRGSVEPDRYVILGGHRDSWVFGAIDPTSGVAVLQEIARSFGKLMSKGWRPRRTIIFASWDAEEFGLLGSTEWAEENVKILQERSIAYINSDSSIEGNYTLRVDCTPLLYQLVYKLTKEIPSPDDGFESKSLYESWLEKDPSPENKNLPRINKLGSGSDFEAYFQRLGIASGRARYTKNKKTDKYSSYPVYHTIYETFELVEKFYDPTFKKQLSVAQLRGALVYELVDSKIIPFNIQDYAEALKNYAASIYNLSKKHDQQLTDHGVSFDSLFSAVKNFSEAASDFHKRLIQVDLNNPIAVRMMNDQLMLLERAFIDPLGLPGKLFYRHIIFAPSSHNKYAGESFPGIYDAIFDIENKANSRLAWKEVKKHISIAAFTIQAAAGTLKEVL

SEQ ID NO: 881262 - protein, 348 aa, Homo sapiens
AHSLLPARSLFLCSPEARECSRRPKLGPQEAMAESRGRLYLWMCLAAALASFLMGFMVGWFIKPLKETTTSVRYHQSIRWKLVSEMKAENIKSFLRSFTKLPHLAGTEQNFLLAKKIQTQWKKFGLDSAKLVHYDVLLSYPNETNANYISIVDEHETEIFKTSYLEPPPDGYENVTNIVPPYNAFSAQGMPEGDLVYVNYARTEDFFKLEREMGINCTGKIVIARYGKIFRGNKVKNAMLAGAIGIILYSDPADYFAPEVQPYPKGWNLPGTAAQRGNVLNLNGAGDPLTPGYPAKEYTFRLDVEEGVGIPRIPVHPIGYNDAEILLRYSFLVGYEIKIFCTSCLFSH

SEQ ID NO: 881263 - protein, 771 aa, Homo sapiens; identical to SEQ ID NO: 881261

SEQ ID NO: 881264 - protein, 686 aa, Homo sapiens
MKAENIKSFLRSFTKLPHLAGTEQNFLLAKKIQTQWKKFGLDSAKLVHYDVLLSYPNETNANYISIVDEHETEIFKTSYLEPPPDGYENVTNIVPPYNAFSAQGMPEGDLVYVNYARTEDFFKLEREMGINCTGKIVIARYGKIFRGNKVKNAMLAGAIGIILYSDPADYFAPEVQPYPKGWNLPGTAAQRGNVLNLNGAGDPLTPGYPAKEYTFRLDVEEGVGIPRIPVHPIGYNDAEILLRYLGGIAPPDKSWKGALNVSYSIGPGFTGSDSFRKVRMHVYNINKITRIYNVVGTIRGSVEPDRYVILGGHRDSWVFGAIDPTSGVAVLQEIARSFGKLMSKGWRPRRTIIFASWDAEEFGLLGSTEWAEENVKILQERSIAYINSDSSIEGNYTLRVDCTPLLYQLVYKLTKEIPSPDDGFESKSLYESWLEKDPSPENKNLPRINKLGSGSDFEAYFQRLGIASGRARYTKNKKTDKYSSYPVYHTIYETFELVEKFYDPTFKKQLSVAQLRGALVYELVDSKIIPFNIQDYAEALKNYAASIYNLSKKHDQQLTDHGVSFDSLFSAVKNFSEAASDFHKRLIQVDLNNPIAVRMMNDQLMLLERAFIDPLGLPGKLFYRHIIFAPSSHNKYAGESFPGIYDAIFDIENKANSRLAWKEVKKHISIAAFTIQAAAGTLKEVL

SEQ ID NO: 881265 - protein, 502 aa, Homo sapiens
  misc_feature (434)..(434): Xaa can be any naturally occurring amino acid
AHSLLPARSLFLCSPEARECSRRPKLGPQEAMAESRGRLYLWMCLAAALASFLMGFMVGWFIKPLKETTTSVRYHQSIRWKLVSEMKAENIKSFLRSFTKLPHLAGTEQNFLLAKKIQTQWKKFGLDSAKLVHYDVLLSYPNETNANYISIVDEHETEIFKTSYLEPPPDGYENVTNIVPPYNAFSAQGMPEGDLVYVNYARTEDFFKLEREMGINCTGKIVIARYGKIFRGNKVKNAMLAGAIGIILYSDPADYFAPEVQPYPKGWNLPGTAAQRGNVLNLNGAGDPLTPGYPAKEYTFRLDVEEGVGIPRIPVHPIGYNDAEILLRYLGGIAPPDKSWKGALNVSYSIGPGFTGSDSFRKVRMHVYNINKITRIYNVVGTIRGSVEPDRYVILGGHRDSWVFGAIDPTSGVAVLQEIARSFGKLMSKADEYXSGLEDFLWALGAHMWLGSPEGGVDRAVLFGAGPFVPGQIFSQGVSATPQSSSRRHSRRSRLPVFPFLC

SEQ ID NO: 881266 - protein, 491 aa, Homo sapiens
RRFPPAGAVAVIERGVRGGSQRCRTMADQLYLENIDEFVTDQNKIVTYKWLSYTLGVHVNQAKQMLYDYVERKRKENSGAQLHVTYLVSGSLIQNGHSCHKVAVVREDKLEAVKSKLAVTASIHVYSIQKAMLKDSGPLFNTDYDILKSNLQNCSKFSAIQCAAAVPRAPAESSSSSKKFEQSHLHMSSETQANNELTTNGHGPPASKQVSQQPKGIMGMFASKAAAKTQETNKETKTEAKEVTNASAAGNKAPGKGNMMSNFFGKAAMNKFKVNLDSEQAVKEEKIVEQPTVSVTEPKLATPAGLKKSSKKAEPVKVLQKEKKRGKRVALSDDETKETENMRKKRRRIKLPESDSSEDEVFPDSPGAYEAESPSPPPPPSPPLEPVPKTEPEPPSVKSSSGENKRKRKRVLKSKTYLDGEGCIVTEKVYESESCTDSEEELNMKTSSVHRPPAMTVKKEPREERKGPKKGTAALGKANRQVSITGFFQRK

SEQ ID NO: 881267 - protein, 150 aa, Homo sapiens
MRKKRRRIKLPESDSSEDEVFPDSPGAYEAESPSPPPPPSPPLEPVPKTEPEPPSVKSSSGENKRKRKRVLKSKTYLDGEGCIVTEKVYESESCTDSEEELNMKTSSVHRPPAMTVKKEPREERKGPKKGTAALGKANRQVSITGFFQRK

SEQ ID NO: 881268 - protein, 491 aa, Homo sapiens; identical to SEQ ID NO: 881266

SEQ ID NO: 881269 - protein, 110 aa, Homo sapiens
MRAKWRKKRMRRLKRKRRKMRQSPSKPLACCTVEATGAETWNARRWGCWYKLWDCMLLSRACLNGSRTSSPSDRRSPLRPTLLINKMPMLVLCPGPVTFWTISVFICGRV

SEQ ID NO: 881270 - protein, 327 aa, Homo sapiens
AHAHTVHTSVRRLPVPRLTQVLPRARNTPAGSCVCCRGSGARKKMAVPPTYADLGKSARDVFTKGYGFGLIKLDLKTKSENGLEFTSSGSANTETTKVTGSLETKYRWTEYGLTFTEKWNTDNTLGTEITVEDQLARGLKLTFDSSFSPNTGKKNAKIKTGYKREHINLGCDMDFDIAGPSIRGALVLGYEGWLAGYQMNFETAKSRVTQSNFAVGYKTDEFQLHTNVNDGTEFGGSIYQKVNKKLETAVNLAWTAGNSNTRFGIAAKYQIDPDACFSAKVNNSSLIGLGYTQTLKPGIKLTLSALLDGKNVNAGGHKLGLGLEFQA

SEQ ID NO: 881271 - protein, 317 aa, Homo sapiens
AARSAPLPGSAPCLRVAAPAVAASEPAATSSEQKMAVPPTYADLGKSARDVFTKGYGFGLIKLDLKTKSENGLEFTSSGSANTETTKVTGSLETKYRWTEYGLTFTEKWNTDNTLGTEITVEDQLARGLKLTFDSSFSPNTGKKNAKIKTGYKREHINLGCDMDFDIAGPSIRGALVLGYEGWLAGYQMNFETAKSRVTQSNFAVGYKTDEFQLHTNVNDGTEFGGSIYQKVNKKLETAVNLAWTAGNSNTRFGIAAKYQIDPDACFSAKVNNSSLIGLGYTQTLKPGIKLTLSALLDGKNVNAGGHKLGLGLEFQA

SEQ ID NO: 881272 - protein, 317 aa, Homo sapiens; identical to SEQ ID NO: 881271

SEQ ID NO: 881273 - protein, 317 aa, Homo sapiens; identical to SEQ ID NO: 881271

SEQ ID NO: 881274 - protein, 317 aa, Homo sapiens; identical to SEQ ID NO: 881271

SEQ ID NO: 881275 - protein, 317 aa, Homo sapiens; identical to SEQ ID NO: 881271

SEQ ID NO: 881276 - protein, 364 aa, Homo sapiens
MNRAPLKRSRILHMALTGASDPSAEAEANGEKPFLLRALQIALVVSLYWVTSISMVFLNKYLLDSPSLRLDTPIFVTFYQCLVTTLLCKGLSALAACCPGAVDFPSLRLDLRVARSVLPLSVVFIGMITFNNLCLKYVGVAFYNVGRSLTTVFNVLLSYLLLKQTTSFYALLTCGIIIGGFWLGVDQEGAEGTLSWLGTVFGVLASLCVSLNAIYTTKVLPAVDGSIWRLTFYNNVNACILFLPLLLLLGELQALRDFAQLGSAHFWGMMTLGGLFGFAIGYVTGLQIKFTSPLTHNVSGTAKACAQTVLAVLYYEETKSFLWWTSNMMVLGGSSAYTWVRGWEMKKTPEEPSPKDSEKSAMGV

SEQ ID NO: 881277 - protein, 364 aa, Homo sapiens; identical to SEQ ID NO: 881276

SEQ ID NO: 881278 - protein, 507 aa, Homo sapiens
HFWKCKPVARRARDTAKSRDVPAAVTEAGSRAGGGTRDRSSLGKRRGPPPTTVRITASPPAPPGPMPRTGRRGWQGARARGGKQEVDPAGAAQGAALQMQHGVAGRAPSAPEEVSARSPSRPGDTGRDAGADAAGPGRGNSIFWKGAPLKRSRILHMALTGASDPSAEAEANGEKPFLLRALQIALVVSLYWVTSISMVFLNKYLLDSPSLRLDTPIFVTFYQCLVTTLLCKGLSALAACCPGAVDFPSLRLDLRVARSVLPLSVVFIGMITFNNLCLKYVGVAFYNVGRSLTTVFNVLLSYLLLKQTTSFYALLTCGIIIGGFWLGVDQEGAEGTLSWLGTVFGVLASLCVSLNAIYTTKVLPAVDGSIWRLTFYNNVNACILFLPLLLLLGELQALRDFAQLGSAHFWGMMTLGGLFGFAIGYVTGLQIKFTSPLTHNVSGTAKACAQTVLAVLYYEETKSFLWWTSNMMVLGGSSAYTWVRGWEMKKTPEEPSPKDSEKSAMGV

SEQ ID NO: 881279 - protein, 435 aa, Homo sapiens
HFWKCKPVARRARDTAKSRDVPAAVTEAGSRAGGGTRDRSSLGKRRGPPPTTVRITASPPAPPGPMPRTGRRGWQGARARGGKQEVDPAGAAQGAALQMQHGVAGRAPSAPEEVSARSPSRPGDTGRDAGADAAGPGRGNSIFWKGAPLKRSRILHMALTGASDPSAEAEANGEKPFLLRALQIALVVSLYWVTSISMVFLNKYLLDSPSLRLDTPIFVTFYQCLVTTLLCKGLSALAACCPGAVDFPSLRLDLRVARSVLPLSVVFIGMITFNNLCLKYVGVAFYNVGRSLTTVFNVLLSYLLLKQTTSFYALLTCGIIIGGFWLGVDQEGAEGTLSWLGTVFGVLASLCVSLNAIYTTKVLPAVDGSIWRLTFYNNVNACILFLPLLLLLGELQALRDFAQLGSAHFWGMMTLGGLFGFAIGYVTGLQIKFTS

SEQ ID NO: 881280 - protein, 246 aa, Homo sapiens
MNRAPLKRSRILHMALTGASDPSAEAEANGEKPFLLRALQIALVVSLYWVTSISMVFLNKYLLDSPSLRLDTPIFVTFYQCLVTTLLCKGLSALAACCPGAVDFPSLRLDLRVARSVLPLSVVFIGMITFNNLCLKYVGVAFYNVGRSLTTVFNVLLSYLLLKQTTSFYALLTCGIIIGGFWLGVDQEGAEGTLSWLGTVFGVLASLCVSLNAIYTTKVLPAVDGSIWRLTFYNNVNACILFLPLL

SEQ ID NO: 881281 - protein, 364 aa, Homo sapiens; identical to SEQ ID NO: 881276

SEQ ID NO: 881282 - protein, 339 aa, Homo sapiens
HFWKCKPVARRARDTAKSRDVPAAVTEAGSRAGGGTRDRSSLGKRRGPPPTTVRITASPPAPPGPMPRTGRRGWQGARARGGKQEVDPAGAAQGAALQMQHGVAGRAPSAPEEVSARSPSRPGDTGRDAGADAAGPGRGNSIFWKGAPLKRSRILHMALTGASDPSAEAEANGEKPFLLRALQIALVVSLYWVTSISMVFLNKYLLDSPSLRLDTPIFVTFYQCLVTTLLCKGLSALAACCPGAVDFPSLRLDLRVARSVLPLSVVFIGMITFNNLCLKYVGVAFYNVGRSLTTVFNVLLSYLLLKQTTSFYALLTCGIIIGEWQLGPRGIEWSWGLKQ

SEQ ID NO: 881283 - protein, 78 aa, Homo sapiens
LAPDGTGRWQSACREMRPQDSTGVAELQEPGLPLTDDAPPGATEEPAAAEAAGAPDRGRCWLCLSSPCCSRTEPATLL

SEQ ID NO: 881284 - protein, 78 aa, Homo sapiens; identical to SEQ ID NO: 881283

SEQ ID NO: 881285 - protein, 615 aa, Homo sapiens
MESMFEDDISILTQEALGPSEVWLDSPGDPSLGGDMCSASHFALITAYGDIKERLGGLERENATLRRRLKVYEIKYPLISDFGEEHGFSLYEIKDGSLLEVEKVSLQQRLNQFQHELQKNKEQEEQLGEMIQAYEKLCVEKSDLETELREMRALVETHLRQICGLEQQLRQQQGLQDAAFSNLSPPPAPAPPCTDLDLHYLALRGGSGLSHAGWPGSTPSVSDLERRRLEEALEAAQGEARGAQLREEQLQAECERLQGELKQLQETRAQDLASNQSERDMAWVKRVGDDQVNLALAYTELTEELGRLRELSSLQGRILRTLLQEQARSGGQRHSPLSQRHSPAPQCPSPSPPARAAPPCPPCQSPVPQRRSPVPPCPSPQQRRSPASPSCPSPVPQRRSPVPPSCQSPSPQRRSPVPPSCPAPQPRPPPPPPPGERTLAERAYAKPPSHHVKAGFQGRRSYSELAEGAAYAGASPPWLQAEAATLPKPRAYGSELYGPGRPLSPRRAFEGIRLRFEKQPSEEDEWAVPTSPPSPEVGTIRCASFCAGFPIPESPAATAYAHAEHAQSWPSINLLMETVGSDIRSCPLCQLGFPVGYPDDALIKHIDSHLENSKI

SEQ ID NO: 881286 - protein, 118 aa, Homo sapiens
GPQEGPGPTEALTPSPAAFHCAHPGAGPREECGGRRHLWRPRVGRGPALTMESMFEDDISILTQEALGPSEVWLDSPGDPSLGGDMCSASHFALITAYGDIKERLGGLERGGRGPCAL

SEQ ID NO: 881287 - protein, 149 aa, Homo sapiens
PPHAPPQSVWPVISALGSVLNQGWIQEGVQCLGLGWGEGVRGLQELLHPSPNVHLSQTGLCLGSTHRLPLGSQSLLCALTPVPPSCGQPRAHGMGPHWGREASCFLWFPAGQSCPPFPVLPTLGNREGRRGEEREDPGGLGRSSLKRLL

SEQ ID NO: 881288 - protein, 66 aa, Homo sapiens
  misc_feature (7)..(7): Xaa can be any naturally occurring amino acid
AARDYVXLEDDRRAPHNESTLLHCAPLPGLSSGWGAVAATDSACPALIQLFQAPPPCTPPLYRAGE

SEQ ID NO: 881289 - protein, 725 aa, Homo sapiens
RAHAQGGAPPLPRGEGVYGEAAAAAAEAEAEAVAMAPFPEEVDVFTAPHWRMKQLVGLYCDKLSKTNFSNNNDFRALLQSLYATFKEFKMHEQIENEYIIGLLQQRSQTIYNVHSDNKLSEMLSLFEKGLKNVKNEYEQLNYAKQLKERLEAFTRDFLPHMKEEEEVFQPMLMEYFTYEELKDIKKKVIAQHCSQKDTAELLRGLSLWNHAEERQKFFKYSVDEKSDKEAEVSEHSTGITHLPPEVMLSIFSYLNPQELCRCSQVSMKWSQLTKTGSLWKHLYPVHWARGDWYSGPATELDTEPDDEWVKNRKDESRAFHEWDEDADIDESEESAEESIAISIAQMEKRLLHGLIHNVLPYVGTSVKTLVLAYSSAVSSKMVRQILELCPNLEHLDLTQTDISDSAFDSWSWLGCCQSLRHLDLSGCEKITDVALEKISRALGILTSHQSGFLKTSTSKITSTAWKNKDITMQSTKQYACLHDLTNKGIGEEIDNEHPWTKPVSSENFTSPYVWMLDAEDLADIEDTVEWRHRNVESLCVMETASNFSCSTSGCFSKDIVGLRTSVCWQQHCASPAFAYCGHSFCCTGTALRTMSSLPESSAMCRKAARTRLPRGKDLIYFGSEKSDQETGRVLLFLSLSGCYQITDHGLRVLTLGGGLPYLEHLNLSGCLTITGAGLQDLVSACPSLNDEYFYYCDNINGPHADTASGCQNLQCGFRACCRSGE

SEQ ID NO: 881290 - protein, 45 aa, Homo sapiens
DRQNLHLTVGLGLVAARVFGILICLVVRKSQMWPNTVRWPNTAAL

SEQ ID NO: 881291 - protein, 653 aa, Homo sapiens
RAHAQGGAPPLPRGEGVYGEAAAAAAEAEAEAVAMAPFPEEVDVFTAPHWRMKQLVGLYCDKNEYEQLNYAKQLKERLEAFTRDFLPHMKEEEEVFQPMLMEYFTYEELKDIKKKVIAQHCSQKDTAELLRGLSLWNHAEERQKFFKYSVDEKSDKEAEVSEHSTGITHLPPEVMLSIFSYLNPQELCRCSQVSMKWSQLTKTGSLWKHLYPVHWARGDWYSGPATELDTEPDDEWVKNRKDESRAFHEWDEDADIDESEESAEESIAISIAQMEKRLLHGLIHNVLPYVGTSVKTLVLAYSSAVSSKMVRQILELCPNLEHLDLTQTDISDSAFDSWSWLGCCQSLRHLDLSGCEKITDVALEKISRALGILTSHQSGFLKTSTSKITSTAWKNKDITMQSTKQYACLHDLTNKGIGEEIDNEHPWTKPVSSENFTSPYVWMLDAEDLADIEDTVEWRHRNVESLCVMETASNFSCSTSGCFSKDIVGLRTSVCWQQHCASPAFAYCGHSFCCTGTALRTMSSLPESSAMCRKAARTRLPRGKDLIYFGSEKSDQETGRVLLFLSLSGCYQITDHGLRVLTLGGGLPYLEHLNLSGCLTITGAGLQDLVSACPSLNDEYFYYCDNINGPHADTASGCQNLQCGFRACCRSGE

SEQ ID NO: 881292 - protein, 531 aa, Homo sapiens
GDGSDIKRSRPPYRSISRRGPSRYPSRYPSRYRSESYTISILVSKAIITSSRWVVIKAVCSRTSPPVCICFVRIPISITAKRTIIPVFYPVHWARGDWYSGPATELDTEPDDEWVKNRKDESRAFHEWDEDADIDESEESAEESIAISIAQMEKRLLHGLIHNVLPYVGTSVKTLVLAYSSAVSSKMVRQILELCPNLEHLDLTQTDISDSAFDSWSWLGCCQSLRHLDLSGCEKITDVALEKISRALGILTSHQSGFLKTSTSKITSTAWKNKDITMQSTKQYACLHDLTNKGIGEEIDNEHPWTKPVSSENFTSPYVWMLDAEDLADIEDTVEWRHRNVESLCVMETASNFSCSTSGCFSKDIVGLRTSVCWQQHCASPAFAYCGHSFCCTGTALRTMSSLPESSAMCRKAARTRLPRGKDLIYFGSEKSDQETGRVLLFLSLSGCYQITDHGLRVLTLGGGLPYLEHLNLSGCLTITGAGLQDLVSACPSLNDEYFYYCDNINGPHADTASGCQNLQCGFRACCRSGE

SEQ ID NO: 881293 - protein, 633 aa, Homo sapiens
RAHAQGGAPPLPRGEGVYGEAAAAAAEAEAEAVAMAPFPEEVDVFTAPHWRMKQLVGLYCDKLSKTNFSNNNDFRALLQSLYATFKEFKMHEQIENEYIIGLLQQRSQTIYNVHSDNKLSEMLSLFEKGLKNVKNEYEQLNYAKQLKERLEAFTRDFLPHMKEEEEVFQPMLMEYFTYEELKDIKKKVIAQHCSQKDTAELLRGLSLWNHAEERQKFFKYSVDEKSDKEAEVSEHSTGITHLPPEVMLSIFSYLNPQELCRCSQVSMKWSQLTKTGSLWKHLYPVHWARGDWYSGPATELDTEPDDEWVKNRKDESRAFHEWDEDADIDESEESAEESIAISIAQMEKRLLHGLIHNVLPYVGTSVKTLVLAYSSAVSSKMVRQILELCPNLEHLDLTQTDISDSAFDSWSWLGCCQSLRHLDLSGCEKITDVALEKISRALGILTSHQSGFLKTSTSKITSTAWKNKDITMQSTKQYACLHDLTNKGIGEEIDNEHPWTKPVSSENFTSPYVWMLDAEDLADIEDTVEWRHRNVESLCVMETASNFSCSTSGCFSKDIVGLRTSVCWQQHCASPAFAYCGHSFCCTGTALRTMSSLPESSAMCRKAARTRLPRGKDLIYFGIIRSQTMVSGF

SEQ ID NO: 881294 - protein, 291 aa, Homo sapiens
RAHAQGGAPPLPRGEGVYGEAAAAAAEAEAEAVAMAPFPEEVDVFTAPHWRMKQLVGLYCDKLSKTNFSNNNDFRALLQSLYATFKEFKMHEQIENEYIIGLLQQRSQTIYNVHSDNKLSEMLSLFEKGLKNVKNEYEQLNYAKQLKERLEAFTRDFLPHMKEEEEVFQPMLMEYFTYEELKDIKKKVIAQHCSQKDTAELLRGLSLWNHAEERQKFFKYSVDEKSDKEAEVSEHSTGITHLPPEVMLSIFSYLNPQELCRCSQVSMKWSQLTKTGSLWKHLYPVHWARGR

SEQ ID NO: 881295 - protein, 355 aa, Homo sapiens
RAHAQGGAPPLPRGEGVYGEAAAAAAEAEAEAVAMAPFPEEVDVFTAPHWRMKQLVGLYCDKLSKTNFSNNNDFRALLQSLYATFKEFKMHEQIENEYIIGLLQQRSQTIYNVHSDNKLSEMLSLFEKGLKNVKNEYEQLNYAKQLKERLEAFTRDFLPHMKEEEEVFQPMLMEYFTYEELKDIKKKVIAQHCSQKDTAELLRGLSLWNHAEERQKFFKYSVDEKSDKESSAMCRKAARTRLPRGKDLIYFGSEKSDQETGRVLLFLSLSGCYQITDHGLRVLTLGGGLPYLEHLNLSGCLTITGAGLQDLVSACPSLNDEYFYYCDNINGPHADTASGCQNLQCGFRACCRSGE

SEQ ID NO: 881296 - protein, 281 aa, Homo sapiens
RAHAQGGAPPLPRGEGVYGEAAAAAAEAEAEAVAMAPFPEEVDVFTAPHWRMKQLVGLYCDKLSKTNFSNNNDFRALLQSLYATFKEFKMHEQIENEYIIGLLQQRSQTIYNVHSDNKLSEMLSLFEKGLKNVKNEYEQLNYAKQLKERLEAFTRDFLPHMKEEEEVFQPMLMEYFTYEELKDIKKKVIAQHCSQKDTAELLRGLSLWNHAEERQKFFKYSVDEKSDKESSAMCRKAARTRLPRGKDLIYFGSEKSDQETGRVLLFLSLSGCYQITDHGLR

SEQ ID NO: 881297 - protein, 725 aa, Homo sapiens; identical to SEQ ID NO: 881289

SEQ ID NO: 881298 - protein, 760 aa, Homo sapiens
RAHAQGGAPPLPRGEGVYGEAAAAAAEAEAEAVAMAPFPEEVDVFTAPHWRMKQLVGLYCDKLSKTNFSNNNDFRALLQSLYATFKEFKMHEQIENEYIIGLLQQRSQTIYNVHSDNKLSEMLSLFEKGLKNVKPTTVDWKPYQITENNRITIISCIICKIYILDSYSKNEYEQLNYAKQLKERLEAFTRDFLPHMKEEEEVFQPMLMEYFTYEELKDIKKKVIAQHCSQKDTAELLRGLSLWNHAEERQKFFKYSVDEKSDKEAEVSEHSTGITHLPPEVMLSIFSYLNPQELCRCSQVSMKWSQLTKTGSLWKHLYPVHWARGDWYSGPATELDTEPDDEWVKNRKDESRAFHEWDEDADIDESEESAEESIAISIAQMEKRLLHGLIHNVLPYVGTSVKTLVLAYSSAVSSKMVRQILELCPNLEHLDLTQTDISDSAFDSWSWLGCCQSLRHLDLSGCEKITDVALEKISRALGILTSHQSGFLKTSTSKITSTAWKNKDITMQSTKQYACLHDLTNKGIGEEIDNEHPWTKPVSSENFTSPYVWMLDAEDLADIEDTVEWRHRNVESLCVMETASNFSCSTSGCFSKDIVGLRTSVCWQQHCASPAFAYCGHSFCCTGTALRTMSSLPESSAMCRKAARTRLPRGKDLIYFGSEKSDQETGRVLLFLSLSGCYQITDHGLRVLTLGGGLPYLEHLNLSGCLTITGAGLQDLVSACPSLNDEYFYYCDNINGPHADTASGCQNLQCGFRACCRSGE

SEQ ID NO: 881299 - protein, 708 aa, Homo sapiens
RAHAQGGAPPLPRGEGVYGEAAAAAAEAEAEAVAMAPFPEEVDVFTAPHWRMKQLVGLYCDKSLYATFKEFKMHEQIENEYIIGLLQQRSQTIYNVHSDNKLSEMLSLFEKGLKNVKNEYEQLNYAKQLKERLEAFTRDFLPHMKEEEEVFQPMLMEYFTYEELKDIKKKVIAQHCSQKDTAELLRGLSLWNHAEERQKFFKYSVDEKSDKEAEVSEHSTGITHLPPEVMLSIFSYLNPQELCRCSQVSMKWSQLTKTGSLWKHLYPVHWARGDWYSGPATELDTEPDDEWVKNRKDESRAFHEWDEDADIDESEESAEESIAISIAQMEKRLLHGLIHNVLPYVGTSVKTLVLAYSSAVSSKMVRQILELCPNLEHLDLTQTDISDSAFDSWSWLGCCQSLRHLDLSGCEKITDVALEKISRALGILTSHQSGFLKTSTSKITSTAWKNKDITMQSTKQYACLHDLTNKGIGEEIDNEHPWTKPVSSENFTSPYVWMLDAEDLADIEDTVEWRHRNVESLCVMETASNFSCSTSGCFSKDIVGLRTSVCWQQHCASPAFAYCGHSFCCTGTALRTMSSLPESSAMCRKAARTRLPRGKDLIYFGSEKSDQETGRVLLFLSLSGCYQITDHGLRVLTLGGGLPYLEHLNLSGCLTITGAGLQDLVSACPSLNDEYFYYCDNINGPHADTASGCQNLQCGFRACCRSGE

SEQ ID NO: 881300 - protein, 641 aa, Homo sapiens
RAHAQGGAPPLPRGEGVYGEAAAAAAEAEAEAVAMAPFPEEVDVFTAPHWRMKQLVGLYCDKLSKTNFSNNNDFRALLQSLYATFKEFKMHEQIENEYIIGLLQQRSQTIYNVHSDNKLSEMLSLFEKGLKNVKNEYEQLNYAKQLKERLEAFTRDFLPHMKEEEEVFQPMLMEYFTYEELKDIKKKVIAQHCSQKDTAELLRGLSLWNHAEERQKFFKYSVDEKSDKEAEVSEHSTGITHLPPEVMLSIFSYLNPQELCRCSQVSMKWSQLTKTGSLWKHLYPVHWARGDWYSGPATELDTEPDDEWVKNRKDESRAFHEWDEDADIDESEESAEESIAISIAQMEKRLLHGLIHNVLPYVGTSVKTLVLAYSSAVSSKMVRQILELCPNLEHLDLTQTDISDSAFDSWSWLGCCQSLRHLDLSGCEKITDVALEKISRALGILTSHQSGFLKTSTSKITSTAWKNKDITMQSTKQYACLHDLTNKGIGEEIDNEHPWTKPVSSENFTSPYVWMLDAEDLADIEDTVEWRHRNVESLCVMETASNFSCSTSGCFSKDIVGLRTSVCWQQHCASPAFAYCGHSFCCTGTALRTMSSLPESSAMCRKAARTRLPRGKDLIYFGIGKWKKNFDSKKNLGPRDP

SEQ ID NO: 881301 - protein, 620 aa, Homo sapiens
RAHAQGGAPPLPRGEGVYGEAAAAAAEAEAEAVAMAPFPEEVDVFTAPHWRMKQLVGLYCDKLSKTNFSNNNDFRALLQSLYATFKEFKMHEQIENEYIIGLLQQRSQTIYNVHSDNKLSEMLSLFEKGLKNVKNEYEQLNYAKQLKERLEAFTRDFLPHMKEEEEVFQPMLMEYFTYEELKDIKKKVIAQHCSQKDTAELLRGLSLWNHAEERQKFFKYSVDEKSDKEAEVSEHSTGITHLPPEVMLSIFSYLNPQELCRCSQVSMKWSQLTKTGSLWKHLYPVHWARGDWYSGPATELDTEPDDEWVKNRKDESRAFHEWDEDADIDESEESAEESIAISIAQMEKRLLHGLIHNVLPYVGTSVKTLVLAYSSAVSSKMVRQILELCPNLEHLDLTQTDISDSAFDSWSWLGCCQSLRHLDLSGCEKITDVALEKISRALGILTSHQSGFLKTSTSKITSTAWKNKDITMQSTKQYACLHDLTNKGIGEEIDNEHPWTKPVSSENFTSPYVWMLDAEDLADIEDTVEWRHRNVESLCVMETASNFSCSTSGCFSKDIVGLRTSVCWQQHCASPAFAYCGHSFCCTGTALRTMSSLPESSAMCRKFWEVDTSRIPDRTG

SEQ ID NO: 881302 - protein, 136 aa, Homo sapiens
RAHAQGGAPPLPRGEGVYGEAAAAAAEAEAEAVAMAPFPEEVDVFTAPHWRMKQLVGLYCDKLSKTNFSNNNDFRALLQSLYATFKEFKMHEQIENEYIIGLLQQRSQTIYNVHSDNKLSEMLSLFEKGLKNVKKG

SEQ ID NO: 881303 - protein, 653 aa, Homo sapiens
MEVAMVSAESSGCNSHMPYGYAAQARARERERLAHSRAAAAAAVAAATAAVEGSGGSGGGSHHHHQSRGACTSHDPQSSRGSRRRRRQRSEKKKAHYRQSSFPHCSDLMPSGSEEKILRELSEEEEDEEEEEEEEEEGRFYYSEDDHGDECSYTDLLPQDEGGGGYSSVRYSDCCERVVINVSGLRFETQMKTLAQFPETLLGDPEKRTQYFDPLRNEYFFDRNRPSFDAILYYYQSGGRLKRPVNVPFDIFTEEVKFYQLGEEALLKFREDEGFVREEEDRALPENEFKKQIWLLFEYPESSSPARGIAIVSVLVILISIVIFCLETLPEFRDDRDLVMALSAGGHGGLLNDTSAPHLENSGHTIFNDPFFIVETVCIVWFSFEFVVRCFACPSQALFFKNIMNIIDIVSILPYFITLGTDLAQQQGGGNGQQQQAMSFAILRIIRLVRVFRIFKLSRHSKGLQILGHTLRASMRELGLLIFFLFIGVILFSSAVYFAEADEPTTHFQSIPDAFWWAVVTMTTVGYGDMKPITVGGKIVGSLCAIAGVLTIALPVPVIVSNFNYFYHRETENEEQTQLTQNAVSCPYLPSNLLKKFRSSTSSSLGDKSEYLEMEEGVKESLCAKEEKCQGKGDDSETDKNNCSNAKAVETDV

SEQ ID NO: 881304 - protein, 205 aa, Homo sapiens
MLQQDSNDDTEDVSLFDAEEETTNRPRKAKIRHPVASFFHLFFRVSAIIVYLLCELLSSSFITCMVTIILLLSCDFWAVKNVTGRLMVGLRWWNHIDEDGKSHWVFESRKESSQENKTVSEAESRIFWLGLIACPVLWVIFAFSALFSFRVKWLAVVIMGVVLQGANLYGYIRCKVRSRKHLTSMATSYFGKQFLRQNTGDDQTS

SEQ ID NO: 881305 - protein, 205 aa, Homo sapiens; identical to SEQ ID NO: 881304

SEQ ID NO: 881306 - protein, 119 aa, Homo sapiens
MVGLRWWNHIDEDGKSHWVFESRKESSQENKTVSEAESRIFWLGLIACPVLWVIFAFSALFSFRVKWLAVVIMGVVLQGANLYGYIRCKVRSRKHLTSMATSYFGKQFLRQNTGDDQTS

SEQ ID NO: 881307 - protein, 205 aa, Homo sapiens; identical to SEQ ID NO: 881304

SEQ ID NO: 881308 - protein, 205 aa, Homo sapiens; identical to SEQ ID NO: 881304

SEQ ID NO: 881309 - protein, 138 aa, Homo sapiens
PRHRAFWGRSSTKSKMAASRRLMKELEEIRKCGMKNFRNIQVDEANLLTWQGLIVPDNPPYDKGAFRIEINFPAEYPFKPPKITFKTKIYHPNIDEKGQVCLPVISAENWKPATKTDQVIQSLIALVNDPQPEHPLRA

SEQ ID NO: 881310 - protein, 105 aa, Homo sapiens
MKNFRNIQVDEANLLTWQGLIVPDNPPYDKGAFRIEINFPAEYPFKPPKITFKTKIYHPNIDEKGQVCLPVISAENWKPATKTDQVIQSLIALVNDPQPEHPLRA

SEQ ID NO: 881311 - protein, 138 aa, Homo sapiens; identical to SEQ ID NO: 881309

SEQ ID NO: 881312 - protein, 138 aa, Homo sapiens; identical to SEQ ID NO: 881309

SEQ ID NO: 881313 - protein, 138 aa, Homo sapiens; identical to SEQ ID NO: 881309

SEQ ID NO: 881314 - protein, 105 aa, Homo sapiens; identical to SEQ ID NO: 881310

SEQ ID NO: 881315 - protein, 105 aa, Homo sapiens; identical to SEQ ID NO: 881310

SEQ ID NO: 881316 - protein, 100 aa, Homo sapiens
CRLLLLNSRPLDQGLIVPDNPPYDKGAFRIEINFPAEYPFKPPKITFKTKIYHPNIDEKGQVCLPVISAENWKPATKTDQVIQSLIALVNDPQPEHPLRA

SEQ ID NO: 881317 - protein, 138 aa, Homo sapiens; identical to SEQ ID NO: 881309

SEQ ID NO: 881318 - protein, 109 aa, Homo sapiens
  misc_feature (4)..(4): Xaa can be any naturally occurring amino acid
FGTXVGAASSEADEELEEIRKCGMKNFRNIQVDEANLLTWQGLIVPDNPPYDKGAFRIEINFPAEYPFKPPKITFKTKIYHPNIDEKGQVCLPVISAENWKPATKTDQA

SEQ ID NO: 881319 - protein, 136 aa, Homo sapiens
PRHRAFWGRSSTKSKMAASRRLMKELEEIRKCGMKNFRNIQVDEANLLTWQGLIVPDNPPYDKGAFRIEINFPAEYPFKPPKITFKTKIYHPNIDEKGQVCLPVISAENWKPATKTDQETSAFPIMASLRSSLEVL

SEQ ID NO: 881320 - protein, 138 aa, Homo sapiens; identical to SEQ ID NO: 881309

SEQ ID NO: 881321 - protein, 138 aa, Homo sapiens; identical to SEQ ID NO: 881309

SEQ ID NO: 881322 - protein, 138 aa, Homo sapiens; identical to SEQ ID NO: 881309

SEQ ID NO: 881323 - protein, 138 aa, Homo sapiens; identical to SEQ ID NO: 881309

SEQ ID NO: 881324 - protein, 105 aa, Homo sapiens; identical to SEQ ID NO: 881310

SEQ ID NO: 881325 - protein, 106 aa, Homo sapiens
PRHRAFWGRSSTKSKMAASRRLMKDNPPYDKGAFRIEINFPAEYPFKPPKITFKTKIYHPNIDEKGQVCLPVISAENWKPATKTDQVIQSLIALVNDPQPEHPLRA

SEQ ID NO: 881326 - protein, 136 aa, Homo sapiens; identical to SEQ ID NO: 881319

SEQ ID NO: 881327 - protein, 105 aa, Homo sapiens; identical to SEQ ID NO: 881310

SEQ ID NO: 881328 - protein, 138 aa, Homo sapiens; identical to SEQ ID NO: 881309

SEQ ID NO: 881329 - protein, 196 aa, Homo sapiens
RRQYPGVIGSEAGVARLLRRQPAAPWLTSAPASARGVAAGPGDGGRKRERRRAGKTPRGTARPPHPKQRSKQKARRRTRSSSSSSSSSSSSSSSSSSSSSSSSSDGRKKRGKYKDKRRKKKKKRKKLKKKGKEKAEAQQVEALPGPSLDQWHRSAGEEEDGPVLTDEQKSRIQAMKPMTKEEWDARQKHHPQGGGP

SEQ ID NO: 881330 - protein, 249 aa, Homo sapiens
MPRCTYQLEQNPGFLPDGPGVHARAHCQDLSGPYGHEFATSESLGGRVGKTRAPQSGARSRMERAGPAGEEGGAREGRLLPRAPGAWVLRACAERAALEVGAASADTGVRGCGARGPAPLLASAGGGRARDGTWGVRTKGSGAALPSRPASRAAPRPEASSPPLPLEKARGGLSGPQGGRARGAMAHVGSRKRSRSRSRSRGRGSEKRKKKSRKDTSRNCSASTSQAEKQAEGPEENKIQLLLLFFQFF

SEQ ID NO: 881331 - protein, 260 aa, Homo sapiens
MPRCTYQLEQNPGFLPDGPGVHARAHCQDLSGPYGHEFATSESLGGRVGKTRAPQSGARSRMERAGPAGEEGGAREGRLLPRAPGAWVLRACAERAALEVGAASADTGVRGCGARGPAPLLASAGGGRARDGTWGVRTKGSGAALPSRPASRAAPRPEASSPPLPLEKARGGLSGPQGGRARGAMAHVGSRKRSRSRSRSRGRGSEKRKKKSRKDTSRNCSASTSQGRKASTAPGAEAEKQAEGPEENKIQLLLLFFQFF

SEQ ID NO: 881332 - protein, 216 aa, Homo sapiens
RLGRRRVLNLAEGFLSRRRGAGCPARRAVEPAAPWLTSAPASARGVAAGPGDGGRKRERRRAGKTPRGTARPPHPKVARPARPLGRRQRSKQKARRRTRSSSSSSSSSSSSSSSSSSSSSSSSSDGRKKRGKYKDKRRKKKKKRKKLKKKGKEKAEAQQVEALPGPSLDQWHRSAGEEEDGPVLTDEQKSRIQAMKPMTKEEWDARQKHHPQGGGP

SEQ ID NO: 881333 - protein, 196 aa, Homo sapiens; identical to SEQ ID NO: 881329

SEQ ID NO: 881334 - protein, 403 aa, Homo sapiens
MPRCTYQLEQNPGFLPDGPGVHARAHCQDLSGPYGHEFATSESLGGRVGKTRAPQSGARSRMERAGPAGEEGGAREGRLLPRAPGAWVLRACAERAALEVGAASADTGVRGCGARGPAPLLASAGGGRARDGTWGVRTKGSGAALPSRPASRAAPRPEASSPPLPLEKARGGLSGPQGGRGGNGAAPGAPLRRRGREGRGAGGVGERGKAPQTPLAADGGQFPGVWSRPAAPWLTSAPASARGVAAGPGDGGRKRERRRAGKTPRGTARPPHPKQRSKQKARRRTRSSSSSSSSSSSSSSSSSSSSSSSSSDGRKKRGKYKDKRRKKKKKRKKLKKKGKEKAEAQQVEALPGPSLDQWHRSAGEEEDGPVLTDEQKSRIQAMKPMTKEEWDARQKHHPQGGGP

SEQ ID NO: 881335 - protein, 219 aa, Homo sapiens
MGLGSMPALTAKIFLAPTDTSLRPLSHWVGASERPGRLSLELAVPAAPWLTSAPASARGVAAGPGDGGRKRERRRAGKTPRGTARPPHPKQRSKQKARRRTRSSSSSSSSSSSSSSSSSSSSSSSSSDGRKKRGKYKDKRRKKKKKRKKLKKKGKEKAEAQQVEALPGPSLDQWHRSAGEEEDGPVLTDEQKSRIQAMKPMTKEEWDARQKHHPQGGGP

SEQ ID NO: 881336 - protein, 447 aa, Homo sapiens
MPRCTYQLEQNPGFLPDGPGVHARAHCQDLSGPYGHEFATSESLGGRVGKTRAPQSGARSRMERAGPAGEEGGAREGRLLPRAPGAWVLRACAERAALEVGAASADTGVRGCGARGPAPLLASAGGGRARDGTWGVRTKGSGAALPSRPASRAAPRPEASSPPLPLEKARGGLSGPQGGRGGNGAAPGAPLRRRGREGRGAGGYESAGKRPRRHSRRTAASSQGFGAGCAGVGPPGTGRALNRHRCGDWSRRRKPGSPALGPAAPWLTSAPASARGVAAGPGDGGRKRERRRAGKTPRGTARPPHPKVARPARPLGRRQRSKQKARRRTRSSSSSSSSSSSSSSSSSSSSSSSSSDGRKKRGKYKDKRRKKKKKRKKLKKKGKEKAEAQQVEALPGPSLDQWHRSAGEEEDGPVLTDEQKSRIQAMKPMTKEEWDARQKHHPQGGGP

SEQ ID NO: 881337 - protein, 216 aa, Homo sapiens; identical to SEQ ID NO: 881332

SEQ ID NO: 881338 - protein, 230 aa, Homo sapiens
MGLGSMPALTAKIFLAPTDTSLRPLSHWVGASERPGRLSLELAVPAAPWLTSAPASARGVAAGPGDGGRKRERRRAGKTPRGTARPPHPKVARPARPLGRRQRSKQKARRRTRSSSSSSSSSSSSSSSSSSSSSSSSSDGRKKRGKYKDKRRKKKKKRKKLKKKGKEKAEAQQVEALPGPSLDQWHRSAGEEEDGPVLTDEQKSRIQAMKPMTKEEWDARQKHHPQGGGP

SEQ ID NO: 881339 - protein, 274 aa, Homo sapiens [sequence omitted]

SEQ ID NO: 881340 - protein, 216 aa, Homo sapiens; identical to SEQ ID NO: 881332

SEQ ID NO: 881341 - protein, 216 aa, Homo sapiens; identical to SEQ ID NO: 881332

SEQ ID NO: 881342 - protein, 216 aa, Homo sapiens; identical to SEQ ID NO: 881332

SEQ ID NO: 881343 - protein, 127 aa, Homo sapiens
ELGTLAYGKAKHPSGVEETRKMNHVTEIEKATYGVVPWPCHMQLHMARRKKKKKRKKLKKKGKEKAEAQQVEALPGPSLDQWHRSAGEEEDGPVLTDEQKSRIQAMKPMTKEEWDARQKHHPQGGGP

SEQ ID NO: 881344 - protein, 276 aa, Homo sapiens
MPRCTYQLEQNPGFLPDGPGVHARAHCQDLSGPYGHEFATSESLGGRVGKTRAPQSGARSRMERAGPAGEEGGAREGRLLPRAPGAWVLRACAERAALEVGAASADTGVRGCGARGPAPLLASAGGGRARDGTWGVRTKGSGAALPSRPASRAAPRPEASSPPLPLEKARGGLSGPQGGRARGAMAHVGSRKRSRSRSRSRGRGSEKRKKKSRKDTSRNCSASTSQGRKASTAPGAEVLLAPLLPPRPPPLPPVMAGRSGGSTRTRGGRRRRRGRS

SEQ ID NO: 881345 - protein, 438 aa, Homo sapiens
MPRCTYQLEQNPGFLPDGPGVHARAHCQDLSGPYGHEFATSESLGGRVGKTRAPQSGARSRMERAGPAGEEGGAREGRLLPRAPGAWVLRACAERAALEVGAASADTGVRGCGARGPAPLLASAGGGRARDGTWGVRTKGSGAALPSRPASRAAPRPEASSPPLPLEKARGGLSGPQGGRGGNGAAPGAPLRRRGREGRGAGGYESAGKRPRRHSRRTAASSQGFGAGCAGVGPPGTGRALNRHRCGDWSRRRKPGSPALGPAAPWLTSAPASARGVAAGPGDGGRKRERRRAGKTPRGTARPPHPKVARPARPLGRRVRTTGIGERRRSYYPGKSGEQWSGTLSHASVQPGLRCEGQAPQEPGRGSSGKLHLCSGKPLRKRSPCSRSVPAPGQSRGRRFTSSPPGFPASPSPCITEKQAEGPEENKIQLLLLFFQFF

SEQ ID NO: 881346 - protein, 260 aa, Homo sapiens; identical to SEQ ID NO: 881331

SEQ ID NO: 881347 - protein, 260 aa, Homo sapiens; identical to SEQ ID NO: 881331

SEQ ID NO: 881348 - protein, 249 aa, Homo sapiens; identical to SEQ ID NO: 881330

SEQ ID NO: 881349 - protein, 249 aa, Homo sapiens; identical to SEQ ID NO: 881330

SEQ ID NO: 881350 - protein, 308 aa, Homo sapiens
MPRCTYQLEQNPGFLPDGPGVHARAHCQDLSGPYGHEFATSESLGGRVGKTRAPQSGARSRMERAGPAGEEGGAREGRLLPRAPGAWVLRACAERAALEVGAASADTGVRGCGARGPAPLLASAGGGRARDGTWGVRTKGSGAALPSRPASRAAPRPEASSPPLPLEKARGGLSGPQGGRGGNGAAPGAPLRRRGREGRGAGGPRRHGSRRLPQALEESQPVPGTGVGKEKEEEQERHLEELLGLHIPSREASRRPGGEQDPAPPPLLPVLLAPLLPPRPPPLPPVMAGRSGGSTRTRGGRRRRRGRS

SEQ ID NO: 881351 - protein, 249 aa, Homo sapiens; identical to SEQ ID NO: 881330

SEQ ID NO: 881352 - protein, 189 aa, Homo sapiens
MSAVVIGRGRRAVEPAAPWLTSAPASARGVAAGPGDGGRKRERRRAGKTPRGTARPPHPKQRSKQKARRRTRSSSSSSSSSSSSSSSSSSSSSSSSSDGRKKRGKYKDKRRKKKKKRKKLKKKGKEKAEAQQVEALPGPSLDQWHRSAGEEEDGPVLTDEQKSRIQAMKPMTKEEWDARQKHHPQGGGP

SEQ ID NO: 881353 - protein, 216 aa, Homo sapiens; identical to SEQ ID NO: 881332

SEQ ID NO: 881354 - protein, 308 aa, Homo sapiens; identical to SEQ ID NO: 881350

SEQ ID NO: 881355 - protein, 372 aa, Homo sapiens
MGLGSMPALTAKIFLAPTDTSLRPLSHWVGASERPGASVWSSQSYGEGRTSRGGGRRARGSPSSQGTGGVGAAGVRREGSLGSGRSFGRHRREGLRSSRAGAPACLCGRWARPGRNLGRQNERQRRRASQPASLPRSAPAGSLLAAASSREGAGRAVRPAGRSRWERSSPGGPLEAARPRRARGWRPAAPWLTSAPASARGVAAGPGDGGRKRERRRAGKTPRGTARPPHPKVARPARPLGRRQRSKQKARRRTRSSSSSSSSSSSSSSSSSSSSSSSSSDGRKKRGKYKDKRRKKKKKRKKLKKKGKEKAEAQQVEALPGPSLDQWHRSAGEEEDGPVLTDEQKSRIQAMKPMTKEEWDARQKHHPQGGGP

SEQ ID NO: 881356 - protein, 190 aa, Homo sapiens
ARYEAWVVPARSAVEPAAPWLTSAPASARGVAAGPGDGGRKRERRRAGKTPRGTARPPHPKQRSKQKARRRTRSSSSSSSSSSSSSSSSSSSSSSSSSDGRKKRGKYKDKRRKKKKKRKKLKKKGKEKAEAQQVEALPGPSLDQWHRSAGEEEDGPVLTDEQKSRIQAMKPMTKEEWDARQKHHPQGGGP

SEQ ID NO: 881357 - protein, 213 aa, Homo sapiens
MSTTQWERSSPGGPLEAARPRRARGWRPAAPWLTSAPASARGVAAGPGDGGRKRERRRAGKTPRGTARPPHPKVARPARPLGRRQRSKQKARRRTRSSSSSSSSSSSSSSSSSSSSSSSSSDGRKKRGKYKDKRRKKKKKRKKLKKKGKEKAEAQQVEALPGPSLDQWHRSAGEEEDGPVLTDEQKSRIQAMKPMTKEEWDARQKHHPQGGGP

SEQ ID NO: 881358 - protein, 260 aa, Homo sapiens
MPRCTYQLEQNPGFLPDGPGVHARAHCQDLSGPYGHEFATSESLGGRVGKTRAPQSGARSRMERAGPAGEEGGAREGRLLPRAPGAWVLRACAERAALEVGAASADTGVRGCGARGPAPLLASAGGGRARDGTWGVRTKGSGAALPSRPASRAAPRPEASSPPLPLEKARGGLSGPQGGRGGNGAAPGAPLRRRGREGRGAGGPRRHGSRRLPQALEESQPVPGTGVGKEKEEEQERHLEELLGLHIPRSQGQHGPWGGG

SEQ ID NO: 881359 - protein, 485 aa, Homo sapiens
MPRCTYQLEQNPGFLPDGPGVHARAHCQDLSGPYGHEFATSESLGGRVGKTRAPQSGARSRMERAGPAGEEGGAREGRLLPRAPGAWVLRACAERAALEVGAASADTGVRGCGARGPAPLLASAGGGRARDGTWGVRTKGSGAALPSRPASRAAPRPEASSPPLPLEKARGGLSGPQGGRGGNGAAPGAPLRRRGREGRGAGGYESAGKRPRRHSRRTAASSQGFGAGCAGVGPPGTGRALNRHRCGDWSRRRKPGSPALGVGEGRSFSRDGDGYWASPGPGPARATLGARPRPALGASAQARLLRRQPAAPWLTSAPASARGVAAGPGDGGRKRERRRAGKTPRGTARPPHPKVARPARPLGRRVRTTGIGERRRSYYPGKSGEQWSGTLSHASVQPGLRCEGQAPQEPGRGSSGKLHLCSGKPLRKRSPCSRSVPAPGQSRGRRFTSSPPGFPASPSPCITEKQAEGPEENKIQLLLLFFQFF

SEQ ID NO: 881360 - protein, 150 aa, Homo sapiens
MAHVGSRKRSRSRSRSRGRGSQRSKQKARRRTRSSSSSSSSSSSSSSSSSSSSSSSSSDGRKKRGKYKDKRRKKKKKRKKLKKKGKEKAEAQQVEALPGPSLDQWHRSAGEEEDGPVLTDEQKSRIQAMKPMTKEEWDARQKHHPQGGGP

SEQ ID NO: 881361 - protein, 197 aa, Homo sapiens
MGAGGLSPVDWSLAQPSLFSGAGGGGWGHRPAWHPHLKEQHFSAIKGPLDRPPGNFSQKKGGAQKTPRGAPSMQYNAFWCKRGPQESALKQNRTRVLTTRSDNVTSVIVSKTAQHPVLRETGQYATNIASQEQETNTQWRHTTELVGDTYLDDYDTSLKRQSRVERLPEHSRKRSDCSKDASTGSTDDSTSSHRRKG

SEQ ID NO: 881362 - protein, 216 aa, Homo sapiens; identical to SEQ ID NO: 881332

SEQ ID NO: 881363 - protein, 308 aa, Homo sapiens; identical to SEQ ID NO: 881350

SEQ ID NO: 881364 - protein, 249 aa, Homo sapiens; identical to SEQ ID NO: 881330

SEQ ID NO: 881365 - protein, 372 aa, Homo sapiens; identical to SEQ ID NO: 881355

SEQ ID NO: 881366 - protein, 267 aa, Homo sapiens
MPRCTYQLEQNPGFLPDGPGVHARAHCQDLSGPYGHEFATSESLGGRVGKTRAPQSGARSRMERAGPAGEEGGAREGRLLPRAPGAWVLRACAERAALEVGAASADTGVRGCGARGPAPLLASAGGGRARDGTWGVRTKGSGAALPSRPASRAAPRPEASSPPLPLEKARGGLSGPQGGRARGAMAHVGSRKRSRSRSRSRGRGSEKRKKKSIIRKVVDPETGRTRLIKGDGEVLEEIVTKERHREINKQATRGDCLAFQMRAGLLP

SEQ ID NO: 881367 - protein, 68 aa, Homo sapiens
SVPTLSLWGRAGFLVPEKGQMWAKIRSLGVSSCRGWKGLEEALERAVVGRAEAGKAEPSSTAFIRESG

SEQ ID NO: 881368 - protein, 119 aa, Homo sapiens
MCCTLAWGPTGCGLDAFPLGGSFLPRSPPLWRGPRRPPVGPPLQTALSLLGCLQPGPAHACPPEKYVAFQKEVGDHGQALWTLTSAPPPVPQGPRPGGPRPAFLGLQVAQWCRGIQTFC

SEQ ID NO: 881369 - protein, 133 aa, Homo sapiens
MCARVCLCVCTRVHVTTGAFRVWYKMVLKWQRFFVFVCFVSLEKEKERKIMQNRKHSDWTTGSYSDQSLPLLASYTIVIFMSKEAKTCNTIFSRQKKELSIKCINIFDLNIWMALGASRASILRMECLEKRDF

SEQ ID NO: 881370 - protein, 224 aa, Homo sapiens
MGRARAPARVEARTAAPPPGVEGVGACWVGVVVRVCVCARLCVCVRVCACVCLCVCASCVCVCVRVCVRVCVYVCTRVCVCTCVSLHACLCMCARVCLCVCTRVHVTTGAFRVWYKMVLKWQRFFVFVCFVSLEKEKERKIMQNRKHSDWTTGSYSDQSLPLLASYTIVIFMSKEAKTCNTIFSRQKKELSIKCINIFDLNIWMALGASRASILRMECLEKRDF

SEQ ID NO: 881371 - protein, 119 aa, Homo sapiens; identical to SEQ ID NO: 881368

SEQ ID NO: 881372 - protein, 133 aa, Homo sapiens; identical to SEQ ID NO: 881369

SEQ ID NO: 881373 - protein, 83 aa, Homo sapiens
LLQFGLTGSRAQPTETPLCTPHKSNEKMGRKRVLRLLLLGRRVGGQGHSRARLVEAQVRAHTAVWGTLQPLRRRPRAPSLGLS

SEQ ID NO: 881374 - protein, 187 aa, Homo sapiens
MGIQSRGVHSRGQATSTMGQCVTKCKNPSSTLGSKNGDREPSNKSHSRRGAGHREEQVPPCGKPGGDILVNGTKKAEAATEACQLPTSSGDAGRESKSNAEESSLQRLEELFRRYKDEREDAILEEGMERFCNDLCVDPTEFRVLLLAWKFQAATMCKFTRLVTNTLCHQVSSGGKGTALGSGAQLG

SEQ ID NO: 881375 - protein, 321 aa, Homo sapiens
MGIQSRGVHSRGQATSTMGQCVTKCKNPSSTLGSKNGDREPSNKSHSRRGAGHREEQVPPCGKPGGDILVNGTKKAEAATEACQLPTSSGDAGRESKSNAEESSLQRLEELFRRYKDEREDAILEEGMERFCNDLCVDPTEFRVLLLAWKFQAATMCKFTRKEFFDGCKAISADSIDGICARFPSLLTEAKQEDKFKDLYRFTFQFGLDSEEGQRSLHREIAIALWKLVFTQNNPPVLDQWLNFLTENPSGIKGISRDTWNMFLNFTQVIGPDLSNYSEDEAWPSLFDTFVEWEMERRKREGEGRGALSSGPEGLCPEEQT

SEQ ID NO: 881376 - protein, 1657 aa, Homo sapiens
MGVGWDSFSSPWRRRRTAWACGETSSSEAEKAQGAAVARTTRTCCCSSRVCTGLGPSGARSLGPGAHLRLALAQPAVMEAATTLHPGPRPALPLGGPGPLGEFLPPPECPVFEPSWEEFADPFAFIHKIRPIAEQTGICKVRPPPDWQPPFACDVDKLHFTPRIQRLNELEAQTRVKLNFLDQIAKYWELQGSTLKIPHVERKILDLFQLNKLVAEEGGFAVVCKDRKWTKIATKMGFAPGKAVGSHIRGHYERILNPYNLFLSGDSLRCLQKPNLTTDTKDKEYKPHDIPQRQSVQPSETCPPARRAKRMRAERQSLAVLPRLECSGAILAHCNLRLLDSSNSSASASQAMNIKIEPEETTEARTHNLRRRMGCPTPKCENEKEMKSSIKQEPIERKDYIVENEKEKPKSRSKKATNAVDLYVCLLCGSGNDEDRLLLCDGCDDSYHTFCLIPPLHDVPKGDWRCPKCLAQECSKPQEAFGFEQAARDYTLRTFGEMADAFKSDYFNMPVHMVPTELVEKEFWRLVSTIEEDVTVEYGADIASKEFGSGFPVRDGKIKLSPEEEEYLDSGWNLNNMPVMEQSVLAHITADICGMKLPWLYVGMCFSSFCWHIEDHWSYSINYLHWGEPKTWYGVPGYAAEQLENVMKKLAPELFVSQPDLLHQLVTIMNPNTLMTHEVPVYRTNQCAGEFVITFPRAYHSGFNQGFNFAEAVNFCTVDWLPLGRQCVEHYRLLHRYCVFSHDEMICKMASKADVLDVVVASTVQKDMAIMIEDEKALRETVRKLGVIDSERMDFELLPDDERQCVKCKTTCFMSAISCSCKPGLLVCLHHVKELCSCPPYKYKLRYRYTLDDLYPMMNALKLRAESYNEWALNVNEALEAKINKKKSLVSFKALIEESEMKKFPDNDLLRHLRLVTQDAEKCASVAQQLLNGKRQTRYRSGGGKSQNQLTVNELRQFVTQLYALPCVLSQTPLLKDLLNRVEDFQQHSQKLLSEETPSAAELQDLLDVSFEFDVELPQLAEMRIRLEQARWLEEVQQACLDPSSLTLDDMRRLIDLGVGLAPYSAVEKAMARLQELLTVSEHWDDKAKSLLKARPRHSLNSLATAVKEIEEIPAYLPNGAALKDSVQRARDWLQDVEGLQAGGRVPVLDTLIELVTRGRSIPVHLNSLPRLETLVAEVQAWKECAVNTFLTENSPYSLLEVLCPRCDIGLLGLKRKQRKLKEPLPNGKKKSTKLESLSDLERALTESKETASAMATLGEARLREMEALQSLRLANEGKLLSPLQDVDIKICLCQKAPAAPMIQCELCRDAFHTSCVAVPSISQGLRIWLCPHCRRSEKPPLEKILPLLASLQRIRVRLPEGDALRYMIERTVNWQHRAQQLLSSGNLKFVQDRVGSGLLYSRWQASAGQVSDTNKVSQPPGTTSFSLPDDWDNRTSYLHSPFSTGRSCIPLHGVSPEVNELLMEAQLLQVSLPEIQELYQTLLAKPSPAQQTDRSSPVRPSSEKNDCCRGKRDGINSLERKLKRRLEREGLSSERWERVKKMRTPKKKKIKLSHPKDMNNFKLERERSYELVRSAETHSLPSDTSYSEQEDSEDEDAICPAVSCLQPEGDEVDWVQCDGSCNQWFHQVCVGVSPEMAEKEDYICVRCTVKDAPSRK

SEQ ID NO: 881377 - protein, 1657 aa, Homo sapiens; identical to SEQ ID NO: 881376

SEQ ID NO: 881378 - protein, 1583 aa, Homo sapiens
MGVGWDSFSSPWRRRRTAWACGETSSSEAEKAQGAAVARTTRTCCCSSRVCTGLGPSGARSLGPGAHLRLALAQPAVMEAATTLHPGPRPALPLGGPGPLGEFLPPPECPVFEPSWEEFADPFAFIHKIRPIAEQTGICKVRPPPDWQPPFACDVDKLHFTPRIQRLNELEAQTRVKLNFLDQIAKYWELQGSTLKIPHVERKILDLFQLNKLVAEEGGFAVVCKDRKWTKIATKMGFAPGKAVGSHIRGHYERILNPYNLFLSGDSLRCLQKPNLTTDTKDKEYKPHDIPQRQSVQPSETCPPARRAKRMRAEAMNIKIEPEETTEARTHNLRRRMGCPTPKCENEKEMKSSIKQEPIERKDYIVENEKEKPKSRSKKATNAVDLYVCLLCGSGNDEDRLLLCDGCDDSYHTFCLIPPLHDVPKGDWRCPKCLAQECSKPQEAFGFEQAARDYTLRTFGEMADAFKSDYFNMPVHMVPTELVEKEFWRLVSTIEEDVTVEYGADIASKEFGSGFPVRDGKIKLSPEEEEYLDSGWNLNNMPVMEQSVLAHITADICGMKLPWLYVGMCFSSFCWHIEDHWSYSINYLHWGEPKTWYGVPGYAAEQLENVMKKLAPELFVSQPDLLHQLVTIMNPNTLMTHEVPVYRTNQCAGEFVITFPRAYHSGFNQGFNFAEAVNFCTVDWLPLGRQCVEHYRLLHRYCVFSHDEMICKMASKADVLDVVVASTVQKDMAIMIEDEKALRETVRKLGVIDSERMDFELLPDDERQCVKCKTTCFMSAISCSCKPGLLVCLHHVKELCSCPPYKYKLRYRYTLDDLYPMMNALKLRAESYNEWALNVNEALEAKINKKKSLVSFKALIEESEMKKFPDNDLLRHLRLVTQDAEKCASVAQQLLNGKRQTRYRSGGGKSQNQLTVNELRQFVTQLYALPCVLSQTPLLKDLLNRVEDFQQHSQKLLSEETPSAAELQDLLDVSFEFDVELPQLAEMRIRLEQARWLEEVQQACLDPSSLTLDDMRRLIDLGVGLAPYSAVEKAMARLQELLTVSEHWDDKAKSLLKARPRHSLNSLATAVKEIEEIPAYLPNGAALKDSVQRARDWLQDVEGLQAGGRVPVLDTLIELVTRGRSIPVHLNSLPRLETLVAEVQAWKECAVNTFLTENSPYSLLEVLCPRCDIGLLGLKRKQRKLKEPLPNGKKKSTKLESLSDLERALTESKETASAMATLGEARLREMEALQSLRLANEGKLLSPLQDVDIKICLCQKAPAAPMIQCELCRDAFHTSCVAVPSISQGLRIWLCPHCRRSEKPPLEKILPLLASLQRIRVRLPEGDALRYMIERTVNWQHRAQQLLSSGNLKFVQDRVGSGLLYSRWQASAGQVSDTNKVSQPPGTTSFSLPDDWDNRTSYLHSPFSTGRSCIPLHGVSPEVNELLMEAQLLQVSLPEIQELYQTLLAKPSPAQQTDRSSPVRPSSEKNDCCRGKRDGINSLERKLKRRLEREGLSSERWERVKKMRTPKKKKIKLSHPKDMNNFKLDETHSLPSDTSYSEQEDSEDEDAICPAVSCLQPEGDEVSEVWAIEDVLSLNSETL

SEQ ID NO: 881379 - protein, 1621 aa, Homo sapiens
MGVGWDSFSSPWRRRRTAWACGETSSSEAEKAQGAAVARTTRTCCCSSRVCTGLGPSGARSLGPGAHLRLALAQPAVMEAATTLHPGPRPALPLGGPGPLGEFLPPPECPVFEPSWEEFADPFAFIHKIRPIAEQTGICKVRPPPDWQPPFACDVDKLHFTPRIQRLNELEAQTRVKLNFLDQIAKYWELQGSTLKIPHVERKILDLFQLNKLVAEEGGFAVVCKDRKWTKIATKMGFAPGKAVGSHIRGHYERILNPYNLFLSGDSLRCLQKPNLTTDTKDKEYKPHDIPQRQSVQPSETCPPARRAKRMRAEAMNIKIEPEETTEARTHNLRRRMGCPTPKCENEKEMKSSIKQEPIERKDYIVENEKEKPKSRSKKATNAVDLYVCLLCGSGNDEDRLLLCDGCDDSYHTFCLIPPLHDVPKGDWRCPKCLAQECSKPQEAFGFEQAARDYTLRTFGEMADAFKSDYFNMPVHMVPTELVEKEFWRLVSTIEEDVTVEYGADIASKEFGSGFPVRDGKIKLSPEEEEYLDSGWNLNNMPVMEQSVLAHITADICGMKLPWLYVGMCFSSFCWHIEDHWSYSINYLHWGEPKTWYGVPGYAAEQLENVMKKLAPELFVSQPDLLHQLVTIMNPNTLMTHEVPVYRTNQCAGEFVITFPRAYHSGFNQGFNFAEAVNFCTVDWLPLGRQCVEHYRLLHRYCVFSHDEMICKMASKADVLDVVVASTVQKDMAIMIEDEKALRETVRKLGVIDSERMDFELLPDDERQCVKCKTTCFMSAISCSCKPGLLVCLHHVKELCSCPPYKYKLRYRYTLDDLYPMMNALKLRAESYNEWALNVNEALEAKINKKKSLVSFKALIEESEMKKFPDNDLLRHLRLVTQDAEKCASVAQQLLNGKRQTRYRSGGGKSQNQLTVNELRQFVTQLYALPCVLSQTPLLKDLLNRVEDFQQHSQKLLSEETPSAAELQDLLDVSFEFDVELPQLAEMRIRLEQARWLEEVQQACLDPSSLTLDDMRRLIDLGVGLAPYSAVEKAMARLQELLTVSEHWDDKAKSLLKARPRHSLNSLATAVKEIEEIPAYLPNGAALKDSVQRARDWLQDVEGLQAGGRVPVLDTLIELVTRGRSIPVHLNSLPRLETLVAEVQAWKECAVNTFLTENSPYSLLEVLCPRCDIGLLGLKRKQRKLKEPLPNGKKKSTKLESLSDLERALTESKETASAMATLGEARLREMEALQSLRLANEGKLLSPLQDVDIKICLCQKAPAAPMIQCELCRDAFHTSCVAVPSISQGLRIWLCPHCRRSEKPPLEKILPLLASLQRIRVRLPEGDALRYMIERTVNWQHRAQQLLSSGNLKFVQDRVGSGLLYSRWQASAGQVSDTNKVSQPPGTTSFSLPDDWDNRTSYLHSPFSTGRSCIPLHGVSPEVNELLMEAQLLQVSLPEIQELYQTLLAKPSPAQQTDRSSPVRPSSEKNDCCRGKRDGINSLERKLKRRLEREGLSSERWERVKKMRTPKKKKIKLSHPKDMNNFKLERERSYELVRSAETHSLPSDTSYSEQEDSEDEDAICPAVSCLQPEGDEVDWVQCDGSCNQWFHQVCVGVSPEMAEKEDYICVRCTVKDAPSRK

SEQ ID NO: 881380 - protein, 1582 aa, Homo sapiens
MGVGWDSFSSPWRRRRTAWACGETSSSEAEKAQGAAVARTTRTCCCSSRVCTGLGPSGARSLGPGAHLRLALAQPAVMEAATTLHPGPRPALPLGGPGPLGEFLPPPECPVFEPSWEEFADPFAFIHKIRPIAEQTGICKVRPPPDWQPPFACDVDKLHFTPRIQRLNELEAQTRVKLNFLDQIAKYWELQGSTLKIPHVERKILDLFQLNKLVAEEGGFAVVCKDRKWTKIATKMGFAPGKAVGSHIRGHYERILNPYNLFLSGDSLRCLQKPNLTTDTKDKEYKPHDIPQRQSVQPSETCPPARRAKRMRAEAMNIKIEPEETTEARTHNLRRRMGCPTPKCENEKEMKSSIKQEPIERKDYIVENEKEKPKSRSKKATNAVDLYVCLLCGSGNDEDRLLLCDGCDDSYHTFCLIPPLHDVPKGDWRCPKCLAQECSKPQEAFGFEQAARDYTLRTFGEMADAFKSDYFNMPVHMVPTELVEKEFWRLVSTIEEDVTVEYGADIASKEFGSGFPVRDGKIKLSPEEEEYLDSGWNLNNMPVMEQSVLAHITADICGMKLPWLYVGMCFSSFCWHIEDHWSYSINYLHWGEPKTWYGVPGYAAEQLENVMKKLAPELFVSQPDLLHQLVTIMNPNTLMTHEVPVYRTNQCAGEFVITFPRAYHSGFNQGFNFAEAVNFCTVDWLPLGRQCVEHYRLLHRYCVFSHDEMICKMASKADVLDVVVASTVQKDMAIMIEDEKALRETVRKLGVIDSERMDFELLPDDERQCVKCKTTCFMSAISCSCKPGLLVCLHHVKELCSCPPYKYKLRYRYTLDDLYPMMNALKLRAESYNEWALNVNEALEAKINKKKSLVSFKALIEESEMKKFPDNDLLRHLRLVTQDAEKCASVAQQLLNGKRQTRYRSGGGKSQNQLTVNELRQFVTQLYALPCVLSQTPLLKDLLNRVEDFQQHSQKLLSEETPSAAELQDLLDVSFEFDVELPQLAEMRIRLEQARWLEEVQQACLDPSSLTLDDMRRLIDLGVGLAPYSAVEKAMARLQELLTVSEHWDDKAKSLLKARPRHSLNSLATAVKEIEEIPAYLPNGAALKDSVQRARDWLQDVEGLQAGGRVPVLDTLIELVTRGRSIPVHLNSLPRLETLVAEVQAWKECAVNTFLTENSPYSLLEVLCPRCDIGLLGLKRKQRKLKEPLPNGKKKSTKLESLSDLERALTESKETASAMATLGEARLREMEALQSLRLANEGKLLSPLQDVDIKICLCQKAPAAPMIQCELCRDAFHTSCVAVPSISQGLRIWLCPHCRRSEKPPLEKILPLLASLQRIRVRLPEGDALRYMIERTVNWQHRAQQLLSSGNLKFVQDRVGSGLLYSRWQASAGQVSDTNKVSQPPGTTSFSLPDDWDNRTSYLHSPFSTGRSCIPLHGVSPEVNELLMEAQLLQVSLPEIQELYQTLLAKPSPAQQTDRSSPVRPSSEKNDCCRGKRDGINSLERKLKRRLEREGLSSERWERVKKMRTPKKKKIKLSHPKDMNNFKLERERSYELVRSAETHSLPSDTSYSEQEDSEDEDAICPAVSCLQPEGDELSPSRR

SEQ ID NO: 881381 - protein, 757 aa, Homo sapiens
MKKFPDNDLLRHLRLVTQDAEKCASVAQQLLNGKRQTRYRSGGGKSQNQLTVNELRQFVTQLYALPCVLSQTPLLKDLLNRVEDFQQHSQKLLSEETPSAAELQDLLDVSFEFDVELPQLAEMRIRLEQARWLEEVQQACLDPSSLTLDDMRRLIDLGVGLAPYSAVEKAMARLQELLTVSEHWDDKAKSLLKARPRHSLNSLATAVKEIEEIPAYLPNGAALKDSVQRARDWLQDVEGLQAGGRVPVLDTLIELVTRGRSIPVHLNSLPRLETLVAEVQAWKECAVNTFLTENSPYSLLEVLCPRCDIGLLGLKRKQRKLKEPLPNGKKKSTKLESLSDLERALTESKETASAMATLGEARLREMEALQSLRLANEGKLLSPLQDVDIKICLCQKAPAAPMIQCELCRDAFHTSCVAVPSISQGLRIWLCPHCRRSEKPPLEKILPLLASLQRIRVRLPEGDALRYMIERTVNWQHRAQQLLSSGNLKFVQDRVGSGLLYSRWQASAGQVSDTNKVSQPPGTTSFSLPDDWDNRTSYLHSPFSTGRSCIPLHGVSPEVNELLMEAQLLQVSLPEIQELYQTLLAKPSPAQQTDRSSPVRPSSEKNDCCRGKRDGINSLERKLKRRLEREGLSSERWERVKKMRTPKKKKIKLSHPKDMNNFKLERERSYELVRSAETHSLPSDTSYSEQEDSEDEDAICPAVSCLQPEGDEVDWVQCDGSCNQWFHQVCVGVSPEMAEKEDYICVRCTVKDAPSRK

SEQ ID NO: 881382 - protein, 757 aa, Homo sapiens; identical to SEQ ID NO: 881381

SEQ ID NO: 881383 - protein, 1583 aa, Homo sapiens; identical to SEQ ID NO: 881378

SEQ ID NO: 881384 - protein, 115 aa, Homo sapiens [sequence omitted]

SEQ ID NO: 881385 - protein, 108 aa, Homo sapiens
  misc_feature (2)..(3): Xaa can be any naturally occurring amino acid
  misc_feature (6)..(6): Xaa can be any naturally occurring amino acid
  misc_feature (10)..(10): Xaa can be any naturally occurring amino acid
SXXSCXHSVXCPWGGSRERSYELVRSAETHSLPSDTSYSEQEDSEDEDAICPAVSCLQPEGDEVDWVQCDGSCNQWFHQVCVGVSPEMAEKEDYICVRCTVKDAPSRK

SEQ ID NO: 881386 - protein, 883 aa, Homo sapiens
MGVGWDSFSSPWRRRRTAWACGETSSSEAEKAQGAAVARTTRTCCCSSRVCTGLGPSGARSLGPGAHLRLALAQPAVMEAATTLHPGPRPALPLGGPGPLGEFLPPPECPVFEPSWEEFADPFAFIHKIRPIAEQTGICKVRPPPDWQPPFACDVDKLHFTPRIQRLNELEAQTRVKLNFLDQIAKYWELQGSTLKIPHVERKILDLFQLNKLVAEEGGFAVVCKDRKWTKIATKMGFAPGKAVGSHIRGHYERILNPYNLFLSGDSLRCLQKPNLTTDTKDKEYKPHDIPQRQSVQPSETCPPARRAKRMRAEAMNIKIEPEETTEARTHNLRRRMGCPTPKCENEKEMKSSIKQEPIERKDYIVENEKEKPKSRSKKATNAVDLYVCLLCGSGNDEDRLLLCDGCDDSYHTFCLIPPLHDVPKGDWRCPKCLAQECSKPQEAFGFEQAARDYTLRTFGEMADAFKSDYFNMPVHMVPTELVEKEFWRLVSTIEEDVTVEYGADIASKEFGSGFPVRDGKIKLSPEEEEYLDSGWNLNNMPVMEQSVLAHITADICGMKLPWLYVGMCFSSFCWHIEDHWSYSINYLHWGEPKTWYGVPGYAAEQLENVMKKLAPELFVSQPDLLHQLVTIMNPNTLMTHEVPVYRTNQCAGEFVITFPRAYHSGFNQGFNFAEAVNFCTVDWLPLGRQCVEHYRLLHRYCVFSHDEMICKMASKADVLDVVVASTVQKDMAIMIEDEKALRETVRKLGVIDSERMDFELLPDDERQCVKCKTTCFMSAISCSCKPGLLVCLHHVKELCSCPPYKYKLRYRYTLDDLYPMMNALKLRAESYNEWALNVNEALEAKINKKKSTFHIYKAQGKATLADDDIDQVNIVHGADKLL

SEQ ID NO: 881387 - protein, 483 aa, Homo sapiens
MGVGWDSFSSPWRRRRTAWACGETSSSEAEKAQGAAVARTTRTCCCSSRVCTGLGPSGARSLGPGAHLRLALAQPAVMEAATTLHPGPRPALPLGGPGPLGEFLPPPECPVFEPSWEEFADPFAFIHKIRPIAEQTGICKVRPPPDWQPPFACDVDKLHFTPRIQRLNELEAQTRVKLNFLDQIAKYWELQGSTLKIPHVERKILDLFQLNKLVAEEGGFAVVCKDRKWTKIATKMGFAPGKAVGSHIRGHYERILNPYNLFLSGDSLRCLQKPNLTTDTKDKEYKPHDIPQRQSVQPSETCPPARRAKRMRAEAMNIKIEPEETTEARTHNLRRRMGCPTPKCENEKEMKSSIKQEPIERKDYIVENEKEKPKSRSKKATNAVDLYVCLLCGSGNDEDRLLLCDGCDDSYHTFCLIPPLHDVPKGDWRCPKCLAQECSKPQEAFGFEQAARDYTLRTFGEMADAFKSDYFNMPVHVCTYILL

SEQ ID NO: 881388 - protein, 1621 aa, Homo sapiens; identical to SEQ ID NO: 881379

SEQ ID NO: 881389 - protein, 1029 aa, Homo sapiens
QDVDVKYFARCAEQLENVMKKLAPELFVSQPDLLHQLVTIMNPNTLMTHEVPVYRTNQCAGEFVITFPRAYHSGFNQGFNFAEAVNFCTVDWLPLGRQCVEHYRLLHRYCVFSHDEMICKMASKADVLDVVVASTVQKDMAIMIEDEKALRETVRKLGVIDSERMDFELLPDDERQCVKCKTTCFMSAISCSCKPGLLVCLHHVKELCSCPPYKYKLRYRYTLDDLYPMMNALKLRAESYNEWALNVNEALEAKINKKKSLVSFKALIEESEMKKFPDNDLLRHLRLVTQDAEKCASVAQQLLNGKRQTRYRSGGGKSQNQLTVNELRQFVTQLYALPCVLSQTPLLKDLLNRVEDFQQHSQKLLSEETPSAAELQDLLDVSFEFDVELPQLAEMRIRLEQARWLEEVQQACLDPSSLTLDDMRRLIDLGVGLAPYSAVEKAMARLQELLTVSEHWDDKAKSLLKARPRHSLNSLATAVKEIEEIPAYLPNGAALKDSVQRARDWLQDVEGLQAGGRVPVLDTLIELVTRGRSIPVHLNSLPRLETLVAEVQAWKECAVNTFLTENSPYSLLEVLCPRCDIGLLGLKRKQRKLKEPLPNGKKKSTKLESLSDLERALTESKETASAMATLGEARLREMEALQSLRLANEGKLLSPLQDVDIKICLCQKAPAAPMIQCELCRDAFHTSCVAVPSISQGLRIWLCPHCRRSEKPPLEKILPLLASLQRIRVRLPEGDALRYMIERTVNWQHRAQQLLSSGNLKFVQDRVGSGLLYSRWQASAGQVSDTNKVSQPPGTTSFSLPDDWDNRTSYLHSPFSTGRSCIPLHGVSPEVNELLMEAQLLQVSLPEIQELYQTLLAKPSPAQQTDRSSPVRPSSEKNDCCRGKRDGINSLERKLKRRLEREGLSSERWERVKKMRTPKKKKIKLSHPKDMNNFKLERERSYELVRSAETHSLPSDTSYSEQEDSEDEDAICPAVSCLQPEGDEVDWVQCDGSCNQWFHQVCVGVSPEMAEKEDYICVRCTVKDAPSRK

SEQ ID NO: 881390 - protein, 1621 aa, Homo sapiens; identical to SEQ ID NO: 881379

SEQ ID NO: 881391 - protein, 800 aa, Homo sapiens
LLPHDLLPQSYNEWALNVNEALEAKINKKKSLVSFKALIEESEMKKFPDNDLLRHLRLVTQDAEKCASVAQQLLNGKRQTRYRSGGGKSQNQLTVNELRQFVTQLYALPCVLSQTPLLKDLLNRVEDFQQHSQKLLSEETPSAAELQDLLDVSFEFDVELPQLAEMRIRLEQARWLEEVQQACLDPSSLTLDDMRRLIDLGVGLAPYSAVEKAMARLQELLTVSEHWDDKAKSLLKARPRHSLNSLATAVKEIEEIPAYLPNGAALKDSVQRARDWLQDVEGLQAGGRVPVLDTLIELVTRGRSIPVHLNSLPRLETLVAEVQAWKECAVNTFLTENSPYSLLEVLCPRCDIGLLGLKRKQRKLKEPLPNGKKKSTKLESLSDLERALTESKETASAMATLGEARLREMEALQSLRLANEGKLLSPLQDVDIKICLCQKAPAAPMIQCELCRDAFHTSCVAVPSISQGLRIWLCPHCRRSEKPPLEKILPLLASLQRIRVRLPEGDALRYMIERTVNWQHRAQQLLSSGNLKFVQDRVGSGLLYSRWQASAGQVSDTNKVSQPPGTTSFSLPDDWDNRTSYLHSPFSTGRSCIPLHGVSPEVNELLMEAQLLQVSLPEIQELYQTLLAKPSPAQQTDRSSPVRPSSEKNDCCRGKRDGINSLERKLKRRLEREGLSSERWERVKKMRTPKKKKIKLSHPKDMNNFKLERERSYELVRSAETHSLPSDTSYSEQEDSEDEDAICPAVSCLQPEGDEVDWVQCDGSCNQWFHQVCVGVSPEMAEKEDYICVRCTVKDAPSRK

SEQ ID NO: 881392 - protein, 1538 aa, Homo sapiens
MGVGWDSFSSPWRRRRTAWACGETSSSEAEKAQGAAVARTTRTCCCSSRVCTGLGPSGARSLGPGAHLRLALAQPAVMEAATTLHPGPRPALPLGGPGPLGEFLPPPECPVFEPSWEEFADPFAFIHKIRPIAEQTGICKVRPPPDWQPPFACDVDKLHFTPRIQRLNELEAQTRVKLNFLDQIAKYWELQGSTLKIPHVERKILDLFQLNKLVAEEGGFAVVCKDRKWTKIATKMGFAPGKAVGSHIRGHYERILNPYNLFLSGDSLRCLQKPNLTTDTKDKEYKPHDIPQRQSVQPSETCPPARRAKRMRAEAMNIKIEPEETTEARTHNLRRRMGCPTPKCENEKEMKSSIKQEPIERKDYIVENEKEKPKSRSKKATNAVDLYVCLLCGSGNDEDRLLLCDGCDDSYHTFCLIPPLHDVPKGDWRCPKCLAQECSKPQEAFGFEQAARDYTLRTFGEMADAFKSDYFNMPVHMVPTELVEKEFWRLVSTIEEDVTVEYGADIASKEFGSGFPVRDGKIKLSPEEEEYLDSGWNLNNMPVMEQSVLAHITADICGMKLPWLYVGMCFSSFCWHIEDHWSYSINYLHWGEPKTWYGVPGYAAEQLENVMKKLAPELFVSQPDLLHQLVTIMNPNTLMTHEVPVYRTNQCAGEFVITFPRAYHSGFNQGFNFAEAVNFCTVDWLPLGRQCVEHYRLLHRYCVFSHDEMICKMASKADVLDVVVASTVQKDMAIMIEDEKALRETVRKLGVIDSERMDFELLPDDERQCVKCKTTCFMSAISCSCKPGLLVCLHHVKELCSCPPYKYKLRYRYTLDDLYPMMNALKLRAESYNEWALNVNEALEAKINKKKSLVSFKALIEESEMKKFPDNDLLRHLRLVTQDAEKCASVAQQLLNGKRQTRYRSGGGKSQNQLTVNELRQFVTQLYALPCVLSQTPLLKDLLNRVEDFQQHSQKLLSEETPSAAELQDLLDVSFEFDVELPQLAEMRIRLEQARWLEEVQQACLDPSSLTLDDMRRLIDLGVGLAPYSAVEKAMARLQELLTVSEHWDDKAKSLLKARPRHSLNSLATAVKEIEEIPAYLPNGAALKDSVQRARDWLQDVEGLQAGGRVPVLDTLIELVTRGRSIPVHLNSLPRLETLVAEVQAWKECAVNTFLTENSPYSLLEVLCPRCDIGLLGLKRKQRKLKEPLPNGKKKSTKLESLSDLERALTESKETASAMATLGEARLREMEALQSLRLANEGKLLSPLQDVDIKICLCQKAPAAPMIQCELCRDAFHTSCVAVPSISQGLRIWLCPHCRRSEKPPLEKILPLLASLQRIRVRLPEGDALRYMIERTVNWQHRAQQLLSSGNLKFVQDRVGSGLLYSRWQASAGQVSDTNKVSQPPGTTSFSLPDDWDNRTSYLHSPFSTGRSCIPLHGVSPEVNELLMEAQLLQVSLPEIQELYQTLLAKPSPAQQTDRSSPVRPSSEKNDCCRGKRDGINSLERKLKRRLEREGLSSERWERVKKMRTPKKKKIKLSHPKDMNNFKLEGDPEIDHSS

SEQ ID NO: 881393 - protein, 194 aa, Homo sapiens [sequence omitted]

SEQ ID NO: 881394 - protein, 1047 aa, Homo sapiens
MGVGWDSFSSPWRRRRTAWACGETSSSEAEKAQGAAVARTTRTCCCSSRVCTGLGPSGARSLGPGAHLRLALAQPAVMEAATTLHPGPRPALPLGGPGPLGEFLPPPECPVFEPSWEEFADPFAFIHKIRPIAEQTGICKVRPPPDWQPPFACDVDKLHFTPRIQRLNELEAQTRVKLNFLDQIAKYWELQGSTLKIPHVERKILDLFQLNKLVAEEGGFAVVCKDRKWTKIATKMGFAPGKAVGSHIRGHYERILNPYNLFLSGDSLRCLQKPNLTTDTKDKEYKPHDIPQRQSVQPSETCPPARRAKRMRAEAMNIKIEPEETTEARTHNLRRRMGCPTPKCENEKEMKSSIKQEPIERKDYIVENEKEKPKSRSKKATNAVDLYVCLLCGSGNDEDRLLLCDGCDDSYHTFCLIPPLHDVPKGDWRCPKCLAQECSKPQEAFGFEQAARDYTLRTFGEMADAFKSDYFNMPVHMVPTELVEKEFWRLVSTIEEDVTVEYGADIASKEFGSGFPVRDGKIKLSPEEEEYLDSGWNLNNMPVMEQSVLAHITADICGMKLPWLYVGMCFSSFCWHIEDHWSYSINYLHWGEPKTWYGVPGYAAEQLENVMKKLAPELFVSQPDLLHQLVTIMNPNTLMTHEVPVYRTNQCAGEFVITFPRAYHSGFNQGFNFAEAVNFCTVDWLPLGRQCVEHYRLLHRYCVFSHDEMICKMASKADVLDVVVASTVQKDMAIMIEDEKALRETVRKLGVIDSERMDFELLPDDERQCVKCKTTCFMSAISCSCKPGLLVCLHHVKELCSCPPYKYKLRYRYTLDDLYPMMNALKLRAESYNEWALNVNEALEAKINKKKSLVSFKALIEESEMKKFPDNDLLRHLRLVTQDAEKCASVAQQLLNGKRQTRYRSGGGKSQNQLTVNELRQFVTQLYALPCVLSQTPLLKDLLNRVEDFQQHSQKLLSEETPSAAELQDLLDVSFEFDVELPQLAEMRIRLEQARWLEEVQQACLDPSSLTLDDMRRLIDLGVGLAPYSAVEKAMAQGEGWSSVSEH

SEQ ID NO: 881395 - protein, 107 aa, Homo sapiens
RRRRGGWAGGGGGTRRALGVPVARRRRMWRAEGKWLPKTSRKSVSQSVFCGTSTYCVLNTVPPIEDDHGNSNSSHVKIFLPKKLLECLPKCSSLPKERHRWNTNERS

SEQ ID NO: 881396 - protein, 84 aa, Homo sapiens
AAAAGWLGRRRRRYEARARGPGREEEEDVARGGEMAAENKPEDDHGNSNSSHVKIFLPKKLLECLPKCSSLPKERHRWNTNERS

SEQ ID NO: 881397 - protein, 107 aa, Homo sapiens; identical to SEQ ID NO: 881395

SEQ ID NO: 881398 - protein, 181 aa, Homo sapiens
AAAAGWLGRRRRRYEARARGPGREEEEDVARGGEMAAENKPEDDHGNSNSSHVKIFLPKKLLECLPKCSSLPKERHRWNTNELTYRPSKQYNERSGSLLAAAYQDQLDQPVIPHPFRVGDAVWVRRHQTKNLEPRWKGPYTVLLTTPTALKVDGISAWIHAAHVKAATTPPAGATWKVQRS

SEQ ID NO: 881399 - protein, 462 aa, Homo sapiens
MSIAGVAAQEIRVPLKTGFLHNGRAMGNMRKTYWSSRSEFKNNFLNIDPITMAYSLNSSAQERLIPLGHASKSAPMNGHCFAENGPSQKSSLPPLLIPPSENLGPHEEDQVVCGFKKLTVNGVCASTPPLTPIKNSPSLFPCAPLCERGSRPLPPLPISEALSLDDTDCEVEFLTSSDTDFLLEDSTLSDFKYDVPGRRSFRGCGQINYAYFDTPAVSAADLSYVSDQNGGVPDPNPPPPQTHRRLRRSHSGPAGSFNKPAIRISNCCIHRASPNSDEDKPEVPPRVPIPPRPVKPDYRRWSAEVTSSTYSDEDRPPKVPPREPLSPSNSRTPSPKSLPSYLNGVMPPTQSFAPDPKYVSSKALQRQNSEGSASKVPCILPIIENGKKVSSTHYYLLPERPPYLDKYEKFFREAEETNGGAQIQPLPADCGISSATEKPDSKTKMDLGGHVKRKHLSYVVSP

SEQ ID NO: 881400 - protein, 444 aa, Homo sapiens
MSIAGVAAQEIRVPLKTGFLHNGRAMGNMRKTYWSSRSEFKNNFLNIDPITMAYSLNSSAQERLIPLGHASKSAPMNGHCFAENGPSQKSSLPPLLIPPSENLGPHEEDQVVCGFKKLTVNGVCASTPPLTPITLPPLPISEALSLDDTDCEVEFLTSSDTDFLLEDSTLSDFKYDVPGRRSFRGCGQINYAYFDTPAVSAADLSYVSDQNGGVPDPNPPPPQTHRRLRRSHSGPAGSFNKPAIRISNCCIHRASPNSDEDKPEVPPRVPIPPRPVKPDYRRWSAEVTSSTYSDEDRPPKVPPREPLSPSNSRTPSPKSLPSYLNGVMPPTQSFAPDPKYVSSKALQRQNSEGSASKVPCILPIIENGKKVSSTHYYLLPERPPYLDKYEKFFREAEETNGGAQIQPLPADCGISSATEKPDSKTKMDLGGHVKRKHLSYVVSP

SEQ ID NO: 881401 - protein, 412 aa, Homo sapiens
MSIAGVAAQEIRVPLKTGFLHNGRAMGNMRKTYWSSRSEFKNNFLNIDPITMAYSLNSSAQERLIPLGHASKSAPMNGHCFAENGPSQKSSLPPLLIPPSENLGPHEEDQVVCGFKKLTVNGVCASTPPLTPIKNSPSLFPCAPLCERGSRPLPPLPISEALSLDDTDCEVEFLTSSDTDFLLEDSTLSDFKYDVPGRRSFRGCGQINYAYFDTPAVSAADLSYVSDQNGGVPDPNPPPPQTHRRLRRSHSGPAGSFNKPAIRISNCCIHRASPNSDEDKPEVPPRVPIPPRPVKPDYRRWSAEVTSSTYSDEDRPPKVPPREPLSPSNSRTPSPKSLPSYLNGVMPPTQSFAPDPKYVSSKALQRQNSEGSASKVPCILPIIENGKKVSSTHYYLLPERPPYLDKYEKFFC

SEQ ID NO: 881402 - protein, 462 aa, Homo sapiens; identical to SEQ ID NO: 881399

SEQ ID NO: 881403 - protein, 444 aa, Homo sapiens
MSIAGVAAQEIRVPLKTGFLHNGRAMGNMRKTYWSSRSEFKNNFLNIDPITMAYSLNSSAQERLIPLGHASKSAPMNGHCFAENGPSQKSSLPPLLIPPSENLGPHEEDQVVCGFKKLTVNGVCASTPPLTPIKNSPSLFPCAPLCERGSRPLPPLPISEALSLDDTDCEVEFLTSSDTDFLLEDSTLSDFKYDVPGRRSFRGCGQINYAYFDTPAVSAADLSYVSDQNGGVPDPNPPPPQTHRRLRRSHSGPAGSFNKPAIRISNCCIHRASPNSDEDKPEVPPRVPIPPRPVKPDYRRWSAEVTSSTYSDEDRPPKVPPREPLSPSNSRTPSPKSLPSYLNGVMPPTQSFAPDPKYVSSKALQRQNSEGSASKVPCILPIIENGKKVSSTHYYLLPERPPYLDKYEKFFREAEETNGGAQIQPLPADCGISSATEKPDSNSP

SEQ ID NO: 881404 - protein, 422 aa, Homo sapiens
MSIAGVAAQEIRVPLKTGFLHNGRAMGNMRKTYWSSRSEFKNNFLNIDPITMAYSLNSSAQERLIPLGHASKSAPMNGHCFAENGPSQKSSLPPLLIPPSENLGPHEEDQVVCGFKKLTVNGVCASTPPLTPIKNSPSLFPCAPLCERGSRPLPPLPISEALSLDDTDCEVEFLTSSDTDFLLEDSTLSDFKYDVPGRRSFRGCGQINYAYFDTPAVSAADLSYVSDQNGGVPDPNPPPPQTHRRLRRSHSGPAGSFNKPAIRISNCCIHRASPNSDEDKPEVPPRVPIPPRPVKPDYRRWSAEVTSSTYSDEDRPPKVPPREPLSPSNSRTPSPKSLPSYLNGVMPPTQSFAPDPKYVSSKALQRQNSEGSASKVPCILPIIENGKKVSSTHYYLLPERPPYLDKYEKFFFLYMHTLHTYI

SEQ ID NO: 881405 - protein, 1700 aa, Homo sapiens
RRRRGGWAGGGGGTRRALGVPVARRRRMWRAEGKWLPKTSRKSVSQSVFCGTSTYCVLNTVPPIEDDHGNSNSSHVKIFLPKKLLECLPKCSSLPKERHRWNTNEEIAAYLITFEKHEEWLTTSPKTRPQNGSMILYNRKKVKYRKDGYCWKKRKDGKTTREDHMKLKVQGVECLYGCYVHSSIIPTFHRRCYWLLQNPDIVLVHYLNVPAIEDCGKPCGPILCSINTDKKEWAKWTKEELIGQLKPMFHGIKWTCSNGNSSSGFSVEQLVQQILDSHQTKPQPRTHNCLCTGSLGAGGSVHHKCNSAKHRIISPKVEPRTGGYGSHSEVQHNDVSEGKHEHSHSKGSSREKRNGKVAKPVLLHQSSTEVSSTNQVEVPDTTQSSPVSISSGLNSDPDMVDSPVVTGVSGMAVASVMGSLSQSATVFMSEVTNEAVYTMSPTAGPNHHLLSPDASQGLVLAVSSDGHKFAFPTTGSSESLSMLPTNVSEELVLSTTLDGGRKIPETTMNFDPDCFLNNPKQGQTYGGGGLKAEMVSSNIRHSPPGERSFSFTTVLTKEIKTEDTSFEQQMAKEAYSSSAAAVAASSLTLTAGSSLLPSGGGLSPSTTLEQMDFSAIDSNKDYTSSFSQTGHSPHIHQTPSPSFFLQDASKPLPVEQNTHSSLSDSGGTFVMPTVKTEASSQTSSCSGHVETRIESTSSLHLMQFQANFQAMTAEGEVTMETSQAAEGSEVLLKSGELQACSSEHYLQPETNGVIRSAGGVPILPGNVVQGLYPVAQPSLGNASNMELSLDHFDISFSNQFSDLINDFISVEGGSSTIYGHQLVSGDSTALSQSEDGARAPFTQAEMCLPCCSPQQGSLQLSSSEGGASTMAYMHVAEVVSAASAQGTLGMLQQSGRVFMVTDYSPEWSYPEGGVKVLITGPWQEASNNYSCLFDQISVPASLIQPGVLRCYCPAHDTGLVTLQVAFNNQIISNSVVFEYKARALPTLPSSQHDWLSLDDNQFRMSILERLEQMERRMAEMTGSQQHKQASGGGSSGGGSGSGNGGSQAQCASGTGALGSCFESRVVVVCEKMMSRACWAKSKHLIHSKTFRGMTLLHLAAAQGYATLIQTLIKWRTKHADSIDLELEVDPLNVDHFSCTPLMWACALGHLEAAVVLYKWDRRAISIPDSLGRLPLGIARSRGHVKLAECLEHLQRDEQAQLGQNPRIHCPASEEPSTESWMAQWHSEAISSPEIPKGVTVIASTNPELRRPRSEPSNYYSSESHKDYPAPKKHKLNPEYFQTRQEKLLPTALSLEEPNIRKQSPSSKQSVPETLSPSEGVRDFSRELSPPTPETAAFQASGSQPVGKWNSKDLYIGVSTVQVTGNPKGTSVGKEAAPSQVRPREPMSVLMMANREVVNTELGSYRDSAENEECGQPMDDIQVNMMTLAEHIIEATPDRIKQENFVPMESSGLERTDPATISSTMSWLASYLADADCLPSAAQIRSAYNEPLTPSSNTSLSPVGSPVSEIAFEKPNLPSAADWSEFLSASTSEKVENEFAQLTLSDHEQRELYEAARLVQTAFRKYKGRPLREQQEVAAAVIQRCYRKYKQYALYKKMTQAAILIQSKFRSYYEQKKFQQSRRAAVLIQKYYRSYKKCGKRRQARRTAVIVQQKLRSSLLTKKQDQAARKIMRFLRRCRHSPLVDHRLYKRSERIEKGQGT

SEQ ID NO: 881406 - protein, 1700 aa, Homo sapiens; identical to SEQ ID NO: 881405

SEQ ID NO: 881407 - protein, 107 aa, Homo sapiens; identical to SEQ ID NO: 881395

SEQ ID NO: 881408 - protein, 1706 aa, Homo sapiens
  misc_feature (36)..(36): Xaa can be any naturally occurring amino acid
TSADDDMASLVFHSTSMCSDHRFGDLEMMSSQNSEXSEKEKSVSQSVFCGTSTYCVLNTVPPIEDDHGNSNSSHVKIFLPKKLLECLPKCSSLPKERHRWNTNEEIAAYLITFEKHEEWLTTSPKTRPQNGSMILYNRKKVKYRKDGYCWKKRKDGKTTREDHMKLKVQGVECLYGCYVHSSIIPTFHRRCYWLLQNPDIVLVHYLNVPAIEDCGKPCGPILCSINTDKKEWAKWTKEELIGQLKPMFHGIKWTCSNGNSSSGFSVEQLVQQILDSHQTKPQPRTHNCLCTGSLGAGGSVHHKCNSAKHRIISPKVEPRTGGYGSHSEVQHNDVSEGKHEHSHSKGSSREKRNGKVAKPVLLHQSSTEVSSTNQVEVPDTTQSSPVSISSGLNSDPDMVDSPVVTGVSGMAVASVMGSLSQSATVFMSEVTNEAVYTMSPTAGPNHHLLSPDASQGLVLAVSSDGHKFAFPTTGSSESLSMLPTNVSEELVLSTTLDGGRKIPETTMNFDPDCFLNNPKQGQTYGGGGLKAEMVSSNIRHSPPGERSFSFTTVLTKEIKTEDTSFEQQMAKEAYSSSAAAVAASSLTLTAGSSLLPSGGGLSPSTTLEQMDFSAIDSNKDYTSSFSQTGHSPHIHQTPSPSFFLQDASKPLPVEQNTHSSLSDSGGTFVMPTVKTEASSQTSSCSGHVETRIESTSSLHLMQFQANFQAMTAEGEVTMETSQAAEGSEVLLKSGELQACSSEHYLQPETNGVIRSAGGVPILPGNVVQGLYPVAQPSLGNASNMELSLDHFDISFSNQFSDLINDFISVEGGSSTIYGHQLVSGDSTALSQSEDGARAPFTQAEMCLPCCSPQQGSLQLSSSEGGASTMAYMHVAEVVSAASAQGTLGMLQQSGRVFMVTDYSPEWSYPEGGVKVLITGPWQEASNNYSCLFDQISVPASLIQPGVLRCYCPAHDTGLVTLQVAFNNQIISNSVVFEYKARALPTLPSSQHDWLSLDDNQFRMSILERLEQMERRMAEMTGSQQHKQASGGGSSGGGSGSGNGGSQAQCASGTGALGSCFESRVVVVCEKMMSRACWAKSKHLIHSKTFRGMTLLHLAAAQGYATLIQTLIKWRTKHADSIDLELEVDPLNVDHFSCTPLMWACALGHLEAAVVLYKWDRRAISIPDSLGRLPLGIARSRGHVKLAECLEHLQRDEQAQLGQNPRIHCPASEEPSTESWMAQWHSEAISSPEIPKGVTVIASTNPELRRPRSEPSNYYSSESHKDYPAPKKHKLNPEYFQTRQEKLLPTALSLEEPNIRKQSPSSKQSVPETLSPSEGVRDFSRELSPPTPETAAFQASGSQPVGKWNSKDLYIGVSTVQVTGNPKGTSVGKEAAPSQVRPREPMSVLMMANREVVNTELGSYRDSAENEECGQPMDDIQVNMMTLAEHIIEATPDRIKQENFVPMESSGLERTDPATISSTMSWLASYLADADCLPSAAQIRSAYNEPLTPSSNTSLSPVGSPVSEIAFEKPNLPSAADWSEFLSASTSEKVENEFAQLTLSDHEQRELYEAARLVQTAFRKYKGRPLREQQEVAAAVIQRCYRKYKQLTWLALKYALYKKMTQAAILIQSKFRSYYEQKKFQQSRRAAVLIQKYYRSYKKCGKRRQARRTAVIVQQKLRSSLLTKKQDQAARKIMRFLRRCRHRVKELKKAKELEDIQQHPLAM

SEQ ID NO: 881409 - protein, 107 aa, Homo sapiens; identical to SEQ ID NO: 881395

SEQ ID NO: 881410 - protein, 84 aa, Homo sapiens; identical to SEQ ID NO: 881396

SEQ ID NO: 881411 - protein, 1669 aa, Homo sapiens
  misc_feature (36)..(36): Xaa can be any naturally occurring amino acid
TSADDDMASLVFHSTSMCSDHRFGDLEMMSSQNSEXSEKEKSVSQSVFCGTSTYCVLNTVPPIEDDHGNSNSSHVKIFLPKKLLECLPKCSSLPKERHRWNTNEEIAAYLITFEKHEEWLTTSPKTRPQNGSMILYNRKKVKYRKDGYCWKKRKDGKTTREDHMKLKVQGVECLYGCYVHSSIIPTFHRRCYWLLQNPDIVLVHYLNVPAIEDCGKPCGPILCSINTDKKEWAKWTKEELIGQLKPMFHGIKWTCSNGNSSSGFSVEQLVQQILDSHQTKPQPRTHNCLCTGSLGAGGSVHHKCNSAKHRIISPKVEPRTGGYGSHSEVQHNDVSEGKHEHSHSKGSSREKRNGKVAKPVLLHQSSTEVSSTNQVEVPDTTQSSPVSISSGLNSDPDMVDSPVVTGVSGMAVASVMGSLSQSATVFMSEVTNEAVYTMSPTAGPNHHLLSPDASQGLVLAVSSDGHKFAFPTTGSSESLSMLPTNVSEELVLSTTLDGGRKIPETTMNFDPDCFLNNPKQGQTYGGGGLKAEMVSSNIRHSPPGERSFSFTTVLTKEIKTEDTSFEQQMAKEAYSSSAAAVAASSLTLTAGSSLLPSGGGLSPSTTLEQMDFSAIDSNKDYTSSFSQTGHSPHIHQTPSPSFFLQDASKPLPVEQNTHSSLSDSGGTFVMPTVKTEASSQTSSCSGHVETRIESTSSLHLMQFQANFQAMTAEGEVTMETSQAAEGSEVLLKSGELQACSSEHYLQPETNGVIRSAGGVPILPGNVVQGLYPVAQPSLGNASNMELSLDHFDISFSNQFSDLINDFISVEGGSSTIYGHQLVSGDSTALSQSEDGARAPFTQAEMCLPCCSPQQGSLQLSSSEGGASTMAYMHVAEVVSAASAQGTLGMLQQSGRVFMVTDYSPEWSYPEGGVKVLITGPWQEASNNYSCLFDQISVPASLIQPGVLRCYCPAHDTGLVTLQVAFNNQIISNSVVFEYKARALPTLPSSQHDWLSLDDNQFRMSILERLEQMERRMAEMTGSQQHKQASGGGSSGGGSGSGNGGSQAQCASGTGALGSCFESRVVVVCEKMMSRACWAKSKHLIHSKTFRGMTLLHLAAAQGYATLIQTLIKWRTKHADSIDLELEVDPLNVDHFSCTPLMWACALGHLEAAVVLYKWDRRAISIPDSLGRLPLGIARSRGHVKLAECLEHLQRDEQAQLGQNPRIHCPASEEPSTESWMAQWHSEAISSPEIPKGVTVIASTNPELRRPRSEPSNYYSSESHKDYPAPKKHKLNPEYFQTRQEKLLPTALSLEEPNIRKQSPSSKQSVPETLSPSEGVRDFSRELSPPTPETAAFQASGSQPVGKWNSKDLYIGVSTVQVTGNPKGTSVGKEAAPSQVRPREPMSVLMMANREVVNTELGSYRDSAENEECGQPMDDIQVNMMTLAEHIIEATPDRIKQENFVPMESSGLERTDPATISSTMSWLASYLADADCLPSAAQIRSAYNEPLTPSSNTSLSPVGSPVSEIAFEKPNLPSAADWSEFLSASTSEKVENEFAQLTLSDHEQRELYEAARLVQTAFRKYKGRPLREQQEVAAAVIQRCYRKYKQLTWLALKYALYKKMTQAAILIQSKFRSYYEQKKFQQSRRAAVLIQKYYRSYKKCGKRRQARRTAVIVQQKLRWVEKSSWR

SEQ ID NO: 881412 - protein, 224 aa, Homo sapiens
  misc_feature (36)..(36): Xaa can be any naturally occurring amino acid
TSADDDMASLVFHSTSMCSDHRFGDLEMMSSQNSEXSEKEKSVSQSVFCGTSTYCVLNTVPPIEDDHGNSNSSHVKIFLPKKLLECLPKCSSLPKERHRWNTNEEIAAYLITFEKHEEWLTTSPKTRPQNGSMILYNRKKVKYRKDGYCWKKRKDGKTTREDHMKLKVQGVETDSSNHSHIPQPLQHPASSPRGQQGLVHPTTAAMSSPLATAATLFDLMYMKK

SEQ ID NO: 881413 - protein, 107 aa, Homo sapiens; identical to SEQ ID NO: 881395

SEQ ID NO: 881414 - protein, 84 aa, Homo sapiens; identical to SEQ ID NO: 881396

SEQ ID NO: 881415 - protein, 193 aa, Homo sapiens
MSIAGVAAQEIRVPLKTGFLHNGRAMGNMRKTYWSSRSEFKNNFLNIDPITMAYSLNSSAQERLIPLGHASKSAPMNGHCFAENGPSQKSSLPPLLIPPSENLGPHEEDQVVCGFKKLTVNGVCASTPPLTPITLPPLPISEALSLDDTDCEVEFLTSSDTDFLLEDSTLSDFKYDVPGRRSFRGCGQINYAY

SEQ ID NO: 881416 - protein, 462 aa, Homo sapiens; identical to SEQ ID NO: 881399

SEQ ID NO: 881417 - protein, 462 aa, Homo sapiens; identical to SEQ ID NO: 881399

SEQ ID NO: 881418 - protein, 387 aa, Homo sapiens
MNGHCFAENGPSQKSSLPPLLIPPSENLGPHEEDQVVCGFKKLTVNGVCASTPPLTPIKNSPSLFPCAPLCERGSRPLPPLPISEALSLDDTDCEVEFLTSSDTDFLLEDSTLSDFKYDVPGRRSFRGCGQINYAYFDTPAVSAADLSYVSDQNGGVPDPNPPPPQTHRRLRRSHSGPAGSFNKPAIRISNCCIHRASPNSDEDKPEVPPRVPIPPRPVKPDYRRWSAEVTSSTYSDEDRPPKVPPREPLSPSNSRTPSPKSLPSYLNGVMPPTQSFAPDPKYVSSKALQRQNSEGSASKVPCILPIIENGKKVSSTHYYLLPERPPYLDKYEKFFREAEETNGGAQIQPLPADCGISSATEKPDSKTKMDLGGHVKRKHLSYVVSP

SEQ ID NO: 881419 - protein, 387 aa, Homo sapiens; identical to SEQ ID NO: 881418

SEQ ID NO: 881420 - protein, 444 aa, Homo sapiens
MSIAGVAAQEIRVPLKTGFLHNGRAMGNMRKTYWSSRSEFKNNFLNIDPITMAYSLNSSAQERLIPLGHASKSAPMNGHCFAENGPSQKSSLPPLLIPPSENLGPHEEDQVVCGFKKLTVNGVCASTPPLTPIKNSPSLFPCAPLCERGSRPLPPLPISEALSLDDTDCEVEFLTSSDTDFLLEDSTLSDFKYDVPGRRSFRGCGQINYAYFDTPAVSAADLSYVSDLRRSHSGPAGSFNKPAIRISNCCIHRASPNSDEDKPEVPPRVPIPPRPVKPDYRRWSAEVTSSTYSDEDRPPKVPPREPLSPSNSRTPSPKSLPSYLNGVMPPTQSFAPDPKYVSSKALQRQNSEGSASKVPCILPIIENGKKVSSTHYYLLPERPPYLDKYEKFFREAEETNGGAQIQPLPADCGISSATEKPDSKTKMDLGGHVKRKHLSYVVSP

SEQ ID NO: 881421 - protein, 444 aa, Homo sapiens
MSIAGVAAQEIRVPLKTGFLHNGRAMGNMRKTYWSSRSEFKNNFLNIDPITMAYSLNSSAQERLIPLGHASKSAPMNGHCFAENGPSQKSSLPPLLIPPSENLGPHEEDQVVCGFKKLTVNGVCASTPPLTPIKNSPSLFPCAPLCERGSRPLPPLPISEALSLDDTDCEVEFLTSSDTDFLLEDSTLSDFKYDVPGRRSFRGCGQINYAYFDTPAVSAADLSYVSDQNGGVPDPNPPPPQTHRRLRRSHSGPAGSFNKPAIRISNCCIHRASPNSDEDKPEVPPRVPIPPRPVKPDYRRWSAEVTSSTYSDEDRPPKVPPREPLSPSNSRTPSPPDPKYVSSKALQRQNSEGSASKVPCILPIIENGKKVSSTHYYLLPERPPYLDKYEKFFREAEETNGGAQIQPLPADCGISSATEKPDSKTKMDLGGHVKRKHLSYVVSP

SEQ ID NO: 881422 - protein, 462 aa, Homo sapiens; identical to SEQ ID NO: 881399

SEQ ID NO: 881423 - protein, 462 aa, Homo sapiens; identical to SEQ ID NO: 881399

SEQ ID NO: 881424 - protein, 1700 aa, Homo sapiens; identical to SEQ ID NO: 881405

SEQ ID NO: 881425 - protein, 1699 aa, Homo sapiens
  misc_feature (36)..(36): Xaa can be any naturally occurring amino acid
TSADDDMASLVFHSTSMCSDHRFGDLEMMSSQNSEXSEKEKSVSQSVFCGTSTYCVLNTVPPIEDDHGNSNSSHVKIFLPKKLLECLPKCSSLPKERHRWNTNEEIAAYLITFEKHEEWLTTSPKTRPQNGSMILYNRKKVKYRKDGYCWKKRKDGKTTREDHMKLKVQGVECLYGCYVHSSIIPTFHRRCYWLLQNPDIVLVHYLNVPAIEDCGKPCGPILCSINTDKKEWAKWTKEELIGQLKPMFHGIKWTCSNGNSSSGFSVEQLVQQILDSHQTKPQPRTHNCLCTGSLGAGGSVHHKCNSAKHRIISPKVEPRTGGYGSHSEVQHNDVSEGKHEHSHSKGSSREKRNGKVAKPVLLHQSSTEVSSTNQVEVPDTTQSSPVSISSGLNSDPDMVDSPVVTGVSGMAVASVMGSLSQSATVFMSEVTNEAVYTMSPTAGPNHHLLSPDASQGLVLAVSSDGHKFAFPTTGSSESLSMLPTNVSEELVLSTTLDGGRKIPETTMNFDPDCFLNNPKQGQTYGGGGLKAEMVSSNIRHSPPGERSFSFTTVLTKEIKTEDTSFEQQMAKEAYSSSAAAVAASSLTLTAGSSLLPSGGGLSPSTTLEQMDFSAIDSNKDYTSSFSQTGHSPHIHQTPSPSFFLQDASKPLPVEQNTHSSLSDSGGTFVMPTVKTEASSQTSSCSGHVETRIESTSSLHLMQFQANFQAMTAEGEVTMETSQAAEGSEVLLKSGELQACSSEHYLQPETNGVIRSAGGVPILPGNVVQGLYPVAQPSLGNASNMELSLDHFDISFSNQFSDLINDFISVEGGSSTIYGHQLVSGDSTALSQSEDGARAPFTQAEMCLPCCSPQQGSLQLSSSEGGASTMAYMHVAEVVSAASAQGTLGMLQQSGRVFMVTDYSPEWSYPEGGVKVLITGPWQEASNNYSCLFDQISVPASLIQPGVLRCYCPAHDTGLVTLQVAFNNQIISNSVVFEYKARALPTLPSSQHDWLSLDDNQFRMSILERLEQMERRMAEMTGSQQHKQASGGGSSGGGSGSGNGGSQAQCASGTGALGSCFESRVVVVCEKMMSRACWAKSKHLIHSKTFRGMTLLHLAAAQGYATLIQTLIKWRTKHADSIDLELEVDPLNVDHFSCTPLMWACALGHLEAAVVLYKWDRRAISIPDSLGRLPLGIARSRGHVKLAECLEHLQRDEQAQLGQNPRIHCPASEEPSTESWMAQWHSEAISSPEIPKGVTVIASTNPELRRPRSEPSNYYSSESHKDYPAPKKHKLNPEYFQTRQEKLLPTALSLEEPNIRKQSPSSKQSVPETLSPSEGVRDFSRELSPPTPETAAFQASGSQPVGKWNSKDLYIGVSTVQVTGNPKGTSVGKEAAPSQVRPREPMSVLMMANREVVNTELGSYRDSAENEECGQPMDDIQVNMMTLAEHIIEATPDRIKQENFVPMESSGLERTDPATISSTMSWLASYLADADCLPSAAQIRSAYNEPLTPSSNTSLSPVGSPVSEIAFEKPNLPSAADWSEFLSASTSEKVENEFAQLTLSDHEQRELYEAARLVQTAFRKYKGRPLREQQEVAAAVIQRCYRKYKQYALYKKMTQAAILIQSKFRSYYEQKKFQQSRRAAVLIQKYYRSYKKCGKRRQARRTAVIVQQKLRSSLLTKKQDQAARKIMRFLRRCRHRVKELKKAKELEDIQQHPLAM

SEQ ID NO: 881426 - protein, 317 aa, Homo sapiens
MNGHCFAENGPSQKSSLPPLLIPPSENLGPHEEDQVVCGFKKLTVNGVCASTPPLTPIKNSPSLFPCAPLCERGSRPLPPLPISEALSLDDTDCEVEFLTSSDTDFLLEDSTLSDFKYDVPGRRSFRGCGQINYAYFDTPAVSAADLSYVSDQNGGVPDPNPPPPQTHRRLRRSHSGPAGSFNKPAIRISNCCIHRASPNSDEDKPEVPPRVPIPPRPVKPDYRRWSAEVTSSTYSDEDRPPKVPPREPLSPSNSRTPSPKSLPSYLNGVMPPTQSFAPDPKYVSSKALQRQNSEGSASKVPCILPIIENGKKVSSF

SEQ ID NO: 881427 - protein, 107 aa, Homo sapiens; identical to SEQ ID NO: 881395

SEQ ID NO: 881428 - protein, 208 aa, Homo sapiens
QPPSASSVAGDLGRGTRTEVEARAARPGAESAPAAAMPDSWDKDVYPEPPRRTPVQPNPIVYMMKAFDLIVDRPVTLVREFIERQHAKNRYYYYHRQYRRVPDITECKEEDIMCMYEAEMQWKRDYKVDQEIINIMQDRLKACQQREGQNYQQNCIKEVEQFTQVAKAYQDRYQDLGAYSSARKCLAKQRQRMLQERKAAKEAAAATS

SEQ ID NO: 881429 - protein, 208 aa, Homo sapiens; identical to SEQ ID NO: 881428

SEQ ID NO: 881430 - protein, 197 aa, Homo sapiens
QPPSASSVAGDLGRGTRTEVEARAARPGAESAPAAAMPDSWDKDVYPEPPRRTPVQPNPIVYMMKAFDLIVDRPVTLVREFIERQHAKNRYYYYHRQYRRVPDITECKEEDIMCIKVDQEIINIMQDRLKACQQREGQNYQQNCIKEVEQFTQVAKAYQDRYQDLGAYSSARKCLAKQRQRMLQERKAAKEAAAATS

SEQ ID NO: 881431 - protein, 286 aa, Homo sapiens
FMDVYQRSYCHPIETLVDIFQEYPDEIEYIFKPSCVPLMRCGGCCNDEGLECVPTEESNITMQIMRIKPHQGQHIGEMSFLQHNKCECRPKKDRARQENPCGPCSEAESAPAAAMPDSWDKDVYPEPPRRTPVQPNPIVYMMKAFDLIVDRPVTLVREFIERQHAKNRYYYYHRQYRRVPDITECKEEDIMCMYEAEMQWKRDYKVDQEIINIMQDRLKACQQREGQNYQQNCIKEVEQFTQVAKAYQDRYQDLGAYSSARKCLAKQRQRMLQERKAAKEAAAATS

SEQ ID NO: 881432 - protein, 208 aa, Homo sapiens; identical to SEQ ID NO: 881428

SEQ ID NO: 881433 - protein, 259 aa, Homo sapiens
QPPSASSVAGDLGRGTRTEVEARAARPGAESAPAAAMPDSWDKDVYPEPPRRTPVQPNPIVYMMKAFDLIVDRPVTLVREFIERQHAKNRYYYYHRQYRRVPDITECKEEDIMCMYEAEMQWKRDYKVDQEIINIMQDRLKACQQREGRPPGPDSGPGRPCHLGELLHFLDTVLLVVLSFPLLTGFEPILHNVDNFLVDFVVPLPLHFGFIHAHDVLLLALSDVWHAAVLPVVVVIPVLCVLPLYKFSHEVDAAANLVV

SEQ ID NO: 881434 - protein, 204 aa, Homo sapiens
QPPSASSVAGDLGRGTRTEVEARAARPGAESAPAAAMPDSWDKDVYPEPPRRTPVQPNPIVYMMKAFDLIVDRPVTLVREFIERQHAKNRYYYYHRQYRRVPDITECKEEDIMCMYEAEMQWKRDYKVDQEIINIMQDRLKACQQREGQNYQQNCIKEVEQFTQVAKAYQDRCACPTHPQPPTILLRPGGQNHCKSSLPSLVLT

SEQ ID NO: 881435 - protein, 94 aa, Homo sapiens
QPPSASSVAGDLGRGTRTEVEARAARPGAESAPAAAMPDSWDKDVYPEPPRRTPVQPNPIVYMMKAFDLIVDRPVTLVRGTKPQPGAPSPASGD

SEQ ID NO: 881436 - protein, 208 aa, Homo sapiens; identical to SEQ ID NO: 881428

SEQ ID NO: 881437 - protein, 303 aa, Homo sapiens
QPPSASSVAGDLGRGTRTEVEARAARPGAESAPAAAMPDSWDKDVYPEPPRRTPVQPNPIVYMMKAFDLIVDRPVTLVREFIERQHAKNRYYYYHRQYRRVPDITECKEEDIMCMYEAEMQWKRDYKVDQEIINIMQDRLKACQQREDSHQSHTAGAPTAASGGGSGGLFCSFSLLQHPLPLFGQALPGRTVGPQVLIAVLVGLGHLGELLHFLDTVLLVVLSFPLLTGFEPILHNVDNFLVDFVVPLPLHFGFIHAHDVLLLALSDVWHAAVLPVVVVIPVLCVLPLYKFSHEVDAAANLVV

SEQ ID NO: 881438 - protein, 125 aa, Homo sapiens
QPPSASSVAGDLGRGTRTEVEARAARPGAESAPAAAMPDSWDKDVYPEPPRRTPVQPNPIVYMMKAFDLIVDRPVTLVREFIERQHAKNRYYYYHRQYRRVPDITECKPGGQNHCKSSLPSLVLT

SEQ ID NO: 881439 - protein, 701 aa, Homo sapiens
KASAIQRKGRAGRCRPGICFRLFSRLRFQNMLEFQTPELLRMPLQELCLHTKLLAPVNCPIADFLMKAPEPPPALIVRNAVQMLKTIDAMDTWEDLTELGYHLADLPVEPHLGKMVLCAVVLKCLDPILTVACTLAYRDPFVLPTQASQKRAAMLCRKRFTAGAFSDHMALLRAFQAWQKARSDGWERAFCEKNFLSQATMEIIIGMRTQLLGQLRASGFVRARGGGDIRDVNTNSENWAVVKAALVAGMYPNLVHVDRENLVLTGPKEKKVRFHPASVLSQPQYKKIPPANGQAAAIKALPTDWLIYDEMTRAHRIANIRCCSAVTPVTILVFCGPARLASNALQEPSSFRVDGIPNDSSDSEMEDKTTANLAALKLDEWLHFTLEPEAASLLLQLRQKWHSLFLRRMRAPSKPWSQVDEATIRAIIAVLSTEEQSAGLQQPSGIGQRPRPMSSEELPLASSWRSNNSRKSSADTEFSDECTTAERVLMKSPSPALHPPQKYKDRGILHPKRGTEDRSDQSSLKSTDSSSYPSPCASPSPPSSGKGSKSPSPRPNMPVRYFIMKSSNLRNLEISQQKGIWSTTPSNERKLNRAFWESSIVYLVFSVQGSGHFQGFSRMSSEIGREKSQDWGSAGLGGVFKVEWIRKESLPFQFAHHLLNPWNDNKKVQISRDGQELEPQVGEQLLQLWERLPLGEKNTTD

SEQ ID NO: 881440 - protein, 227 aa, Homo sapiens
LSGTDSLLYHRYRVLMKSPSPALHPPQKYKDRGILHPKRGTEDRSDQSSLKSTDSSSYPSPCASPSPPSSGKGSKSPSPRPNMPVRYFIMKSSNLRNLEISQQKGIWSTTPSNERKLNRAFWESSIVYLVFSVQGSGHFQGFSRMSSEIGREKSQDWGSAGLGGVFKVEWIRKESLPFQFAHHLLNPWNDNKKVQISRDGQELEPQVGEQLLQLWERLPLGEKNTTD

SEQ ID NO: 881441 - protein, 443 aa, Homo sapiens
MEIIIGMRTQLLGQLRASGFVRARGGGDIRDVNTNSENWAVVKAALVAGMYPNLVHVDRENLVLTGPKEKKVRFHPASVLSQPQYKKIPPANGQAAAIKALPTDWLIYDEMTRAHRIANIRCCSAVTPVTILVFCGPARLASNALQEPSSFRVDGIPNDSSDSEMEDKTTANLAALKLDEWLHFTLEPEAASLLLQLRQKWHSLFLRRMRAPSKPWSQVDEATIRAIIAVLSTEEQSAGLQQPSGIGQRPRPMSSEELPLASSWRSNNSRKSSADTEFSDECTTAERVLMKSPSPALHPPQKYKDRGILHPKRGTEDRSDQSSLKSTDSSSYPSPCASPSPPSSGKGSKSPSPRPNMPVRYFIMKSSNLRNLEISQQKGIWSTTPSNERKLNRAFWESSIVYLVFSVQGSGHFQGFSRMSSEIGREKSQDWGSAGLGGVFKVE

SEQ ID NO: 881442 - protein, 501 aa, Homo sapiens [sequence omitted]

SEQ ID NO: 881443 - protein, 501 aa, Homo sapiens [sequence omitted]

SEQ ID NO: 881444 - protein, 501 aa, Homo sapiens [sequence omitted]

SEQ ID NO: 881445 - protein, 501 aa, Homo sapiens [sequence omitted]

SEQ ID NO: 881446 - protein, 501 aa, Homo sapiens [sequence omitted]

SEQ ID NO: 881447 - protein, 212 aa, Homo sapiens [sequence omitted]

SEQ ID NO: 881448 - protein, 500 aa, Homo sapiens
MEIIIGMRTQLLGQLRASGFVRARGGGDIRDVNTNSENWAVVKAALVAGMYPNLVHVDRENLVLTGPKEKKVRFHPASVLSQPQYKKIPPANGQAAAIKALPTDWLIYDEMTRAHRIANIRCCSAVTPVTILVFCGPARLASNALQEPSSFRVDGIPNDSSDSEMEDKTTANLAALKLDEWLHFTLEPEAASLLLQLRQKWHSLFLRRMRAPSKPWSQVDEATIRAIIAVLSTEEQSAGLQQPSGIGQRPRPMSSEELPLASSWRSNNSRKSSADTEFSDECTTAERVLMKSPSPALHPPQKYKDRGILHPKRGTEDRSDQSSLKSTDSSSYPSPCASPSPPSSGKGSKSPSPRPNMPVRYFIMKSSNLRNLEISQQKGIWSTTPSNERKLNRAFWESSIVYLVFSVQGSGHFQGFSRMSSEIGREKSQDWGSAGLGGVFKVEWIRKESLPFQFAHHLLNPWNDNKKVQISRDGQELEPQVGEQLLQLWERLPLGDICDH

SEQ ID NO: 881449 - protein, 212 aa, Homo sapiens [sequence omitted]

SEQ ID NO: 881450 - protein, 501 aa, Homo sapiens [sequence omitted]

SEQ ID NO: 881451 - protein, 498 aa, Homo sapiens
MEIIIGMRTQLLGQLRASGFVRARGGGDIRDVNTNSENWAVVKAALVAGMYPNLVHVDRENLVLTGPKEKKVRFHPASVLSQPQYKKIPPANGQAAAIKALPTDWLIYDEMTRAHRIANIRCCSAVTPVTILVFCGPARLASNALQEPSSFRVDGIPNDSSDSEMEDKTTANLAALKLDEWLHFTLEPEAASLLLQLRQKWHSLFLRRMRAPSKPWSQVDEATIRAIIAVLSTEEQSAGLQQPSGIGQRPRPMSSEELPLASSWRSNNSRKSSADTEFSDECTTAERVLMKSPSPALHPPQKYKDRGILHPKRGTEDRSDQSSLKSTDSSSYPSPCASPSPPSSGKGSKSPSPRPNMPVRYFIMKSSNLRNLEISQQKGIWSTTPSNERKLNRAFWESSIVYLVFSVQGSGHFQGFSRMSSEIGREKSQDWGSAGLGGVFKVEWIRKESLPFQFAHHLLNPWNDNKKVQISRDGQVYNGIFFFIYFCFCLFSVIQCFN

SEQ ID NO: 881452 - protein, 110 aa, Homo sapiens
MPEKLQTLRPRSLSGAEVAHCQPQVKCQGGDGAGSTRRRGQAPPEGGARPQGKVEMSLWHPQEVYQICPRASDPLDLSGLHSSGSHCFFLEGGRKCSHQSLPTGHLGGFS

SEQ ID NO: 881453 - protein, 847 aa, Homo sapiens
MAKPLTDQEKRRQISIRGIVGVENVAELKKSFNRHLHFTLVKDRNVATTRDYYFALAHTVRDHLVGRWIRTQQHYYDKCPKRVYYLSLEFYMGRTLQNTMINLGLQNACDEAIYQLGLDIEELEEIEEDAGLGNGGLGRLAACFLDSMATLGLAAYGYGIRYEYGIFNQKIRDGWQVEEADDWLRYGNPWEKSRPEFMLPVHFYGKVEHTNTGTKWIDTQVVLALPYDTPVPGYMNNTVNTMRLWSARAPNDFNLRDFNVGDYIQAVLDRNLAENISRVLYPNDNFFEGKELRLKQEYFVVAATLQDIIRRFKASKFGSTRGAGTVFDAFPDQVAIQLNDTHPALAIPELMRIFVDIEKLPWSKAWELTQKTFAYTNHTVLPEALERWPVDLVEKLLPRHLEIIYEINQKHLDRIVALFPKDVDRLRRMSLIEEEGSKRINMAHLCIVGSHAVNGVAKIHSDIVKTKVFKDFSELEPDKFQNKTNGITPRRWLLLCNPGLAELIAEKIGEDYVKDLSQLTKLHSFLGDDVFLRELAKVKQENKLKFSQFLETEYKVKINPSSMFDVQVKRIHEYKRQLLNCLHVITMYNRIKKDPKKLFVPRTVIIGGKAAPGYHMAKMIIKLITSVADVVNNDPMVGSKLKVIFLENYRVSLAEKVIPATDLSEQISTAGTEASGTGNMKFMLNGALTIGTMDGANVEMAEEAGEENLFIFGMRIDDVAALDKKGYEAKEYYEALPELKLVIDQIDNGFFSPKQPDLFKDIINMLFYHDRFKVFADYEAYVKCQDKVSQLYMNPKAWNTMVLKNIAASGKFSSDRTIKEYAQNIWNVEPSDLKISLSNESNKVNGN

SEQ ID NO: 881454 - protein, 756 aa, Homo sapiens
MGRTLQNTMINLGLQNACDEAIYQLGLDIEELEEIEEDAGLGNGGLGRLAACFLDSMATLGLAAYGYGIRYEYGIFNQKIRDGWQVEEADDWLRYGNPWEKSRPEFMLPVHFYGKVEHTNTGTKWIDTQVVLALPYDTPVPGYMNNTVNTMRLWSARAPNDFNLRDFNVGDYIQAVLDRNLAENISRVLYPNDNFFEGKELRLKQEYFVVAATLQDIIRRFKASKFGSTRGAGTVFDAFPDQVAIQLNDTHPALAIPELMRIFVDIEKLPWSKAWELTQKTFAYTNHTVLPEALERWPVDLVEKLLPRHLEIIYEINQKHLDRIVALFPKDVDRLRRMSLIEEEGSKRINMAHLCIVGSHAVNGVAKIHSDIVKTKVFKDFSELEPDKFQNKTNGITPRRWLLLCNPGLAELIAEKIGEDYVKDLSQLTKLHSFLGDDVFLRELAKVKQENKLKFSQFLETEYKVKINPSSMFDVQVKRIHEYKRQLLNCLHVITMYNRIKKDPKKLFVPRTVIIGGKAAPGYHMAKMIIKLITSVADVVNNDPMVGSKLKVIFLENYRVSLAEKVIPATDLSEQISTAGTEASGTGNMKFMLNGALTIGTMDGANVEMAEEAGEENLFIFGMRIDDVAALDKKGYEAKEYYEALPELKLVIDQIDNGFFSPKQPDLFKDIINMLFYHDRFKVFADYEAYVKCQDKVSQLYMNPKAWNTMVLKNIAASGKFSSDRTIKEYAQNIWNVEPSDLKISLSNESNKVNGN

SEQ ID NO: 881455 - protein, 813 aa, Homo sapiens
MAKPLTDQEKRRQISIRGIVGVENVAELKKSFNRHLHFTLVKDRNVATTRDYYFALAHTVRDHLVGRWIRTQQHYYDKCPKLGLDIEELEEIEEDAGLGNGGLGRLAACFLDSMATLGLAAYGYGIRYEYGIFNQKIRDGWQVEEADDWLRYGNPWEKSRPEFMLPVHFYGKVEHTNTGTKWIDTQVVLALPYDTPVPGYMNNTVNTMRLWSARAPNDFNLRDFNVGDYIQAVLDRNLAENISRVLYPNDNFFEGKELRLKQEYFVVAATLQDIIRRFKASKFGSTRGAGTVFDAFPDQVAIQLNDTHPALAIPELMRIFVDIEKLPWSKAWELTQKTFAYTNHTVLPEALERWPVDLVEKLLPRHLEIIYEINQKHLDRIVALFPKDVDRLRRMSLIEEEGSKRINMAHLCIVGSHAVNGVAKIHSDIVKTKVFKDFSELEPDKFQNKTNGITPRRWLLLCNPGLAELIAEKIGEDYVKDLSQLTKLHSFLGDDVFLRELAKVKQENKLKFSQFLETEYKVKINPSSMFDVQVKRIHEYKRQLLNCLHVITMYNRIKKDPKKLFVPRTVIIGGKAAPGYHMAKMIIKLITSVADVVNNDPMVGSKLKVIFLENYRVSLAEKVIPATDLSEQISTAGTEASGTGNMKFMLNGALTIGTMDGANVEMAEEAGEENLFIFGMRIDDVAALDKKGYEAKEYYEALPELKLVIDQIDNGFFSPKQPDLFKDIINMLFYHDRFKVFADYEAYVKCQDKVSQLYMNPKAWNTMVLKNIAASGKFSSDRTIKEYAQNIWNVEPSDLKISLSNESNKVNGN

SEQ ID NO: 881456 - protein, 519 aa, Homo sapiens
MAKPLTDQEKRRQISIRGIVGVENVAELKKSFNRHLHFTLVKDRNVATTRDYYFALAHTVRDHLVGRWIRTQQHYYDKCPKRVYYLSLEFYMGRTLQNTMINLGLQNACDEAIYQLGLDIEELEEIEEDAGLGNGGLGRLAACFLDSMATLGLAAYGYGIRYEYGIFNQKIRDGWQVEEADDWLRYGNPWEKSRPEFMLPVHFYGKVEHTNTGTKWIDTQVVLALPYDTPVPGYMNNTVNTMRLWSARAPNDFNLRDFNVGDYIQAVLDRNLAENISRVLYPNDNFFEGKELRLKQEYFVVAATLQDIIRRFKASKFGSTRGAGTVFDAFPDQVAIQLNDTHPALAIPELMRIFVDIEKLPWSKAWELTQKTFAYTNHTVLPEALERWPVDLVEKLLPRHLEIIYEINQKHLDRIVALFPKDVDRLRRMSLIEEEGSKRINMAHLCIVGSHAVNGVAKIHSDIVKTKVFKDFSELEPDKFQNKTNGITPRRWLLLCNPGLAELIAESWVMMSSSGNSPR

SEQ ID NO: 881457 - protein, 719 aa, Homo sapiens
QAGLATWIRRKASNTVPVPGVEPNLEALKRADDIVARLRPPQSIPASIFRLLPFKKIVIGIEDPGRCSRAGFGPAQTECMVSNTGTKWIDTQVVLALPYDTPVPGYMNNTVNTMRLWSARAPNDFNLRDFNVGDYIQAVLDRNLAENISRVLYPNDNFFEGKELRLKQEYFVVAATLQDIIRRFKASKFGSTRGAGTVFDAFPDQVAIQLNDTHPALAIPELMRIFVDIEKLPWSKAWELTQKTFAYTNHTVLPEALERWPVDLVEKLLPRHLEIIYEINQKHLDRIVALFPKDVDRLRRMSLIEEEGSKRINMAHLCIVGSHAVNGVAKIHSDIVKTKVFKDFSELEPDKFQNKTNGITPRRWLLLCNPGLAELIAEKIGEDYVKDLSQLTKLHSFLGDDVFLRELAKVKQENKLKFSQFLETEYKVKINPSSMFDVQVKRIHEYKRQLLNCLHVITMYNRIKKDPKKLFVPRTVIIGGKAAPGYHMAKMIIKLITSVADVVNNDPMVGSKLKVIFLENYRVSLAEKVIPATDLSEQISTAGTEASGTGNMKFMLNGALTIGTMDGANVEMAEEAGEENLFIFGMRIDDVAALDKKGYEAKEYYEALPELKLVIDQIDNGFFSPKQPDLFKDIINMLFYHDRFKVFADYEAYVKCQDKVSQLYMNPKAWNTMVLKNIAASGKFSSDRTIKEYAQNIWNVEPSDLKISLSNESNKVNGN

SEQ ID NO: 881458 - protein, 468 aa, Homo sapiens
MAKPLTDQEKRRQISIRGIVGVENVAELKKSFNRHLHFTLVKDRNVATTRDYYFALAHTVRDHLVGRWIRTQQHYYDKCPKRVYYLSLEFYMGRTLQNTMINLGLQNACDEAIYQLGLDIEELEEIEEDAGLGNGGLGRLAACFLDSMATLGLAAYGYGIRYEYGIFNQKIRDGWQVEEADDWLRYGNPWEKSRPEFMLPVHFYGKVEHTNTGTKWIDTQVVLALPYDTPVPGYMNNTVNTMRLWSARAPNDFNLRDFNVGDYIQAVLDRNLAENISRVLYPNDNFFEGKELRLKQEYFVVAATLQDIIRRFKASKFGSTRGAGTVFDAFPDQVAIQLNDTHPALAIPELMRIFVDIEKLPWSKAWELTQKTFAYTNHTVLPEALERWPVDLVEKLLPRHLEIIYEINQKHLDRIVALFPKDVDRLRRMSLIEEEGSKRINMAHLCIVGSHAVNGVAKIHSDIVKTKV

SEQ ID NO: 881459 - protein, 225 aa, Homo sapiens
MAKPLTDQEKRRQISIRGIVGVENVAELKKSFNRHLHFTLVKDRNVATTRDYYFALAHTVRDHLVGRWIRTQQHYYDKCPKRVYYLSLEFYMGRTLQNTMINLGLQNACDEAIYQLGLDIEELEEIEEDAGLGNGGLGRLAACFLDSMATLGLAAYGYGIRYEYGIFNQKIRDGWQVEEADDWLRYGNPWEKSRPEFMLPVHFYGKVEHTNTGTKWIDTQFRVLV

SEQ ID NO: 881460 - protein, 847 aa, Homo sapiens; identical to SEQ ID NO: 881453

SEQ ID NO: 881461 - protein, 847 aa, Homo sapiens; identical to SEQ ID NO: 881453

SEQ ID NO: 881462 - protein, 613 aa, Homo sapiens [sequence omitted]

SEQ ID NO: 881463 - protein, 807 aa, Homo sapiens
MAKPLTDQEKRRQISIRGIVGVENVAELKKSFNRHLHFTLVKDRNVATTRDYYFALAHTVRDHLVGRWIRTQQHYYDKCPKRVYYLSLEFYMGRTLQNTMINLGLQNACDEAIYQLGLDIEELEEIEEDAGLGNGGLGRLAACFLDSMATLGLAAYGYGIRYEYGIFNQKIRDGWQVEEADDWLRYGNPWEKSRPEFMLPVHFYGKVEHTNTGTKWIDTQVVLALPYDTPVPGYMNNTVNTMRLWSARAPNDFNLRDFNVGDYIQAVLDRNLAENISRVLYPNDNFFEGKELRLKQEYFVVAATLQDIIRRFKASKFGSTRGAGTVFDAFPDQVAIQLNDTHPALAIPELMRIFVDIEKLPWSKAWELTQKTFAYTNHTVLPEALERWPVDLVEKLLPRHLEIIYEINQKHLDRIVALFPKDVDRLRRMSLIEEEGSKRINMAHLCIVGSHAVNGVAKIHSDIVKTKVFKDFSELEPDKFQNKTNGITPRRWLLLCNPGLAELIAEKIGEDYVKDLSQLTKLHSFLGDDVFLRELAKVKQENKLKFSQFLETEYKVKINPSSMFDVQVKRIHEYKRQLLNCLHVITMYNRIKKDPKKLFVPRTVIIGGKAAPGYHMAKMIIKLITSVADVVNNDPMVGSKLKVIFLENYRVSLAEKVIPATDLSEQISTAGTEASGTGNMKFMLNGALTIGTMDGANVEMAEEAGEENLFIFGMRIDDVAALDKKGYEAKEYYEALPELKLVIDQIDNGFFSPKQPDLFKDIINMLFYHDRFKVFADYEAYVKCQDKVSQLYMVSKLPRFIKKTSLL

SEQ ID NO: 881464 - protein, 752 aa, Homo sapiens
MAKPLTDQEKRRQISIRGIVGVENVAELKKSFNRHLHFTLVKDRNVATTRDYYFALAHTVRDHLVGRWIRTQQHYYDKCPKRVYYLSLEFYMGRTLQNTMINLGLQNACDEAIYQLGLDIEELEEIEEDAGLGNGGLGRLAACFLDSMATLGLAAYGYGIRYEYGIFNQKIRDGWQVEEADDWLRYGNPWEKSRPEFMLPVHFYGKVEHTNTGTKWIDTQVVLALPYDTPVPGYMNNTVNTMRLWSARAPNDFNLRDFNVGDYIQAVLDRNLAENISRVLYPNDNFFEGKELRLKQEYFVVAATLQDIIRRFKASKFGSTRGAGTVFDAFPDQVAIQLNDTHPALAIPELMRIFVDIEKLPWSKAWELTQKTFAYTNHTVLPEALERWPVDLVEKLLPRHLEIIYEINQKHLDRIVALFPKDVDRLRRMSLIEEEGSKRINMAHLCIVGSHAVNGVAKIHSDIVKTKVFKDFSELEPDKFQNKTNGITPRRWLLLCNPGLAELIAEKIGEDYVKDLSQLTKLHSFLGDDVFLRELAKVKQENKLKFSQFLETEYKVKINPSSMFDVQVKRIHEYKRQLLNCLHVITMYNRIKKDPKKLFVPRTVIIGGKAAPGYHMAKMIIKLITSVADVVNNDPMVGSKLKVIFLENYRVSLAEKVIPATDLSEQISTAGTEASGTGNMKFMLNGALTIGTMDGANVEMAEEAGEENLFIFGMRIDDVAALDKKGYEANTTYYEATSRAPVDAAANLVVVG

SEQ ID NO: 881465 - protein, 437 aa, Homo sapiens
MNFYLNDSHSYCQPVPPPLFNLSKPALGFLNITPNFVQCAGPFAVSAKFSDVVSSISRFKDFSELEPDKFQNKTNGITPRRWLLLCNPGLAELIAEKIGEDYVKDLSQLTKLHSFLGDDVFLRELAKVKQENKLKFSQFLETEYKVKINPSSMFDVQVKRIHEYKRQLLNCLHVITMYNRIKKDPKKLFVPRTVIIGGKAAPGYHMAKMIIKLITSVADVVNNDPMVGSKLKVIFLENYRVSLAEKVIPATDLSEQISTAGTEASGTGNMKFMLNGALTIGTMDGANVEMAEEAGEENLFIFGMRIDDVAALDKKGYEAKEYYEALPELKLVIDQIDNGFFSPKQPDLFKDIINMLFYHDRFKVFADYEAYVKCQDKVSQLYMNPKAWNTMVLKNIAASGKFSSDRTIKEYAQNIWNVEPSDLKISLSNESNKVNGN

SEQ ID NO: 881466 - protein, 354 aa, Homo sapiens
SKKRKTRPPNSSRPQFLETEYKVKINPSSMFDVQVKRIHEYKRQLLNCLHVITMYNREISPVANKPPCRWKQQTQHRSHCPDRQLSSISSTSPSFSGIKKDPKKLFVPRTVIIGGKAAPGYHMAKMIIKLITSVADVVNNDPMVGSKLKVIFLENYRVSLAEKVIPATDLSEQISTAGTEASGTGNMKFMLNGALTIGTMDGANVEMAEEAGEENLFIFGMRIDDVAALDKKGYEAKEYYEALPELKLVIDQIDNGFFSPKQPDLFKDIINMLFYHDRFKVFADYEAYVKCQDKVSQLYMNPKAWNTMVLKNIAASGKFSSDRTIKEYAQNIWNVEPSDLKISLSNESNKVNGN

SEQ ID NO: 881467 - protein, 1212 aa, Homo sapiens
LPNPPPEEISTGTQSTFSTMGTVSRRRICRTNTMARAKILQDIDRELDLVERESAKLRKKQAELDEEEKEIDAKLRYLEMGINRRKEALLKEREKRERAYLQGVAEDRDYMSDSEVSSTRPTRIESQHGIERPRTAPQTEFSQFIPPQTQTESQLVPPTSPYTQYQYSSPALPTQAPTSYTQQSHFEQQTLYHQQVSPYQTQPTFQAVATMSFTPQVQPTPTPQPSYQLPSQMMVIQQKPRQTTLYLEPKITSNYEVIRNQPLMIAPVSTDNTFAVSHLGSKYNSLDLRIGLEERSSMASSPISSISADSFYADIDHHTPRNYVLIDDIGEITKGTAALSTAFSLHEKDLSKTDRLLRTTETRRSQEVTDFLAPLQSSSRLHSYVKAEEDPMEDPYELKLLKHQIKQEFRRGTESLDHLAGLSHYYHADTSYRHFPKSEKYSISRLTLEKQAAKQLPAAILYQKQSKHKKSLIDPKMSKFSPIQESRDLEPDYSSYMTSSTSSIGGISSRARLLQDDITFGLRKNITDQQKFMGSSLGTGLGTLGNTIRSALQDEADKPYSSGSRSRPSSRPSSVYGLDLSIKRDSSSSSLRLKAQEAEALDVSFSHASSSARTKPTSLPISQSRGRIPIVAQNSEEESPLSPVGQPMGMARAAAGPLPPISADTRDQFGSSHSLPEVQQHMREESRTRGYDRDIAFIMDDFQHAMSDSEAYHLRREETDWFDKPRESRLENGHGLDRKLPERLVHSRPLSQHQEQIIQMNGKTMHYIFPHARIKITRDSKDHTVSGNGLGIRIVGGKEIPGHSGEIGAYIAKILPGGSAEQTGKLMEGMQVLEWNGIPLTSKTYEEVQSIISQQSGEAEICVRLDLNMLSDSENSQHLELHEPPKAVDKAKSPGVDPKQLAAELQKVSLQQSPLVLSSVVEKGSHVHSGPTSAGSSSVPSPGQPGSPSVSKKKHGSSKPTDGTKVVSHPITGEIQLQINYDLGNLIIHILQARNLVPRDNNGYSDPFVKVYLLPGRGQVMVVQNASAEYKRRTKHVQKSLNPEWNQTVIYKSISMEQLKKKTLEVTVWDYDRFSSNDFLGEVLIDLSSTSHLDNTPRWYPLKEQTESIDHGKSHSSQSSQQSPKPSVIKSRSHGIFPDPSKDMQVPTIEKSHSSPGSSKSSSEGHLRSHGPSRSQSKTSVTQTHLEDAGAAIAAAEAAVQQLRIQPSKRRK

SEQ ID NO: 881468 - protein, 565 aa, Homo sapiens
MGMARAAAGPLPPISADTRDQFGSSHSLPEVQQHMREESRTRGYDRDIAFIMDDFQHAMSDSEAYHLRREETDWFDKPRESRLENGHGLDRKLPERLVHSRPLSQHQEQIIQMNGKTMHYIFPHARIKITRDSKDHTVSGNGLGIRIVGGKEIPGHSGEIGAYIAKILPGGSAEQTGKLMEGMQVLEWNGIPLTSKTYEEVQSIISQQSGEAEICVRLDLNMLSDSENSQHLELHEPPKAVDKAKSPGVDPKQLAAELQKVSLQQSPLVLSSVVEKGSHVHSGPTSAGSSSVPSPGQPGSPSVSKKKHGSSKPTDGTKVVSHPITGEIQLQINYDLGNLIIHILQARNLVPRDNNGYSDPFVKVYLLPGRGQVMVVQNASAEYKRRTKHVQKSLNPEWNQTVIYKSISMEQLKKKTLEVTVWDYDRFSSNDFLGEVLIDLSSTSHLDNTPRWYPLKEQTESIDHGKSHSSQSSQQSPKPSVIKSRSHGIFPDPSKDMQVPTIEKSHSSPGSSKSSSEGHLRSHGPSRSQSKTSVTQTHLEDAGAAIAAAEAAVQQLRIQPSKRRK

SEQ ID NO: 881469 - protein, 436 aa, Homo sapiens
LRCDFAFCHDCEAFPATWNCNGLGIRIVGGKEIPGHSGEIGAYIAKILPGGSAEQTGKLMEGMQVLEWNGIPLTSKTYEEVQSIISQQSGEAEICVRLDLNMLSDSENSQHLELHEPPKAVDKAKSPGVDPKQLAAELQKVSLQQSPLVLSSVVEKGSHVHSGPTSAGSSSVPSPGQPGSPSVSKKKHGSSKPTDGTKVVSHPITGEIQLQINYDLGNLIIHILQARNLVPRDNNGYSDPFVKVYLLPGRGAEYKRRTKHVQKSLNPEWNQTVIYKSISMEQLKKKTLEVTVWDYDRFSSNDFLGEVLIDLSSTSHLDNTPRWYPLKEQTESIDHGKSHSSQSSQQSPKPSVIKSRSHGIFPDPSKDMQVPTIEKSHSSPGSSKSSSEGHLRSHGPSRSQSKTSVTQTHLEDAGAAIAAAEAAVQQLRIQPSKRRK

SEQ ID NO: 881470 - protein, 357 aa, Homo sapiens
MEVLRPQLIRIDGRNYRKNPVQEQTYQHEEDEEDFYQGSMECADEPCDAYEVEQTPQGFRSTLRAPSLLYKHIVGKRGDTRKKIEMETKTSISIPKPGQDGEIVITGQHRNGVISARTRIDVLLDTFRRKQPFTHFLAFFLNEVEVQEGFLRFQEEVLAKCSMDHGVDSSIFQNPKKLHLTIGMLVLLSEEEIQQTCEMLQQCKEEFINDISGGKPLEVEMAGIEYMNDDPGMVDVLYAKVHMKDGSNRLQELVDRVLERFQASGLIVKEWNSVKLHATVMNTLFRKDPNAEGRYNLYTAEGKYIFKERESFDGRNILKLFENFYFGSLKLNSIHISQRFTVDSFGNYASCGQIDFS

SEQ ID NO: 881471 - protein, 357 aa, Homo sapiens; identical to SEQ ID NO: 881470

SEQ ID NO: 881472 - protein, 357 aa, Homo sapiens; identical to SEQ ID NO: 881470

SEQ ID NO: 881473 - protein, 357 aa, Homo sapiens; identical to SEQ ID NO: 881470

SEQ ID NO: 881474 - protein, 317 aa, Homo sapiens
MEVLRPQLIRIDGRNYRKNPVQEQTYQHEEDEEDFYQGSMECADEPCDAYEVEQTPQGFRSTLRAPSLLYKHIVGKRGDTRKKIEMETKTSISIPKPGQDGEIVITGQHRNGVISARTRIDVLLDTFRRKQPFTHFLAFFLNEVEVQEGFLRFQEEVLAKCSMDHGVDSSIFQNPKKLHLTIGMLVLLSEEEIQQTCEMLQQCKEEFIKLQELVDRVLERFQASGLIVKEWNSVKLHATVMNTLFRKDPNAEGRYNLYTAEGKYIFKERESFDGRNILKLFENFYFGSLKLNSIHISQRFTVDSFGNYASCGQIDFS

SEQ ID NO: 881475 - protein, 357 aa, Homo sapiens; identical to SEQ ID NO: 881470

SEQ ID NO: 881476 - protein, 334 aa, Homo sapiens [sequence omitted]

SEQ ID NO: 881477 - protein, 408 aa, Homo sapiens
RTRSRRGIPGPPPRPTLVYLQPPSPLLLLFDDSGPRLPSRGIIGISFGESVMEVLRPQLIRIDGRNYRKNPVQEQTYQHEEDEEDFYQGSMECADEPCDAYEVEQTPQGFRSTLRAPSLLYKHIVGKRGDTRKKIEMETKTSISIPKPGQDGEIVITGQHRNGVISARTRIDVLLDTFRRKQPFTHFLAFFLNEVEVQEGFLRFQEEVLAKCSMDHGVDSSIFQNPKKLHLTIGMLVLLSEEEIQQTCEMLQQCKEEFINDISGGKPLEVEMAGIEYMNDDPGMVDVLYAKVHMKDGSNRLQELVDRVLERFQASGLIVKEWNSVKLHATVMNTLFRKDPNAEGRYNLYTAEGKYIFKERESFDGRNILKLFENFYFGSLKLNSIHISQRFTVDSFGNYASCGQIDFS

SEQ ID NO: 881478 - protein, 372 aa, Homo sapiens
MEVLRPQLIRIDGRNYRKNPVQEQTYQHEEDEEDFYQGSMECADEPCDAYEVEQTPQGFRSTLRAPSLLYKHIVGKRGDTRKKIEMETKTSISIPKPGQDGEIVITGQHRNGVISARTRIDVLLDTFRRKQPFTHFLAFFLNEVEVQEGFLRFQEEVLAKCSMDHGVDSSIFQNPKKLHLTIGMLVLLSEEEIQQTCEMLQQCKEEFINDISGGKPLEVEMAGIEYMNDDPGMVDVLYAKVHMKDGSNRLQELVDRVLERFQASGLIVKEWNSVKLHATVMNTLFRKDPNAEGRYNLYTAEGKYIFKERESFDGRNILKSFALLPRLEYNDAISAHCNLCLPGSSDSPASASQVAGITGVSDAYSQSLPGKS

SEQ ID NO: 881479 - protein, 292 aa, Homo sapiens
MEVLRPQLIRIDGRNYRKNPVQEQTYQHEEDEEDFYQGSMECADEPCDAYEVEQTPQGFRSTLRAPSLLYKHIVGKRGDTRKKIEMETKTSISIPKPGQDGEIVITGQHRNGVISARTRIDVLLDTFRRKQPFTHFLAFFLNEVEVQEGFLRFQEEVLAKCSMDHGVDSSIFQNPKKLHLTIGMLVLLSEEEIQQTCEMLQQCKEEFINDISGGKPLEVEMAGIEYMNDDPGMVDVLYAKVHMKDGSNRLQELVDRVLERFQASGLIVKEWNSVKLHATVMNTLFRKDPNVV

SEQ ID NO: 881480 - protein, 372 aa, Homo sapiens; identical to SEQ ID NO: 881478

SEQ ID NO: 881481 - protein, 1015 aa, Homo sapiens
MRGSGPRGAGHRRPPSGGGDTPITPASLAGCYSAPRRAPLWTCLLLCAALRTLLASPSNEVNLLDSRTVMGDLGWIAFPKNGWEEIGEVDENYAPIHTYQVCKVMEQNQNNWLLTSWISNEGASRIFIELKFTLRDCNSLPGGLGTCKETFNMYYFESDDQNGRNIKENQYIKIDTIAADESFTELDLGDRVMKLNTEVRDVGPLSKKGFYLAFQDVGACIALVSVRVYYKKCPSVVRHLAVFPDTITGADSSQLLEVSGSCVNHSVTDEPPKMHCSAEGEWLVPIGKCMCKAGYEEKNGTCQVCRPGFFKASPHIQSCGKCPPHSYTHEEASTSCVCEKDYFRRESDPPTMACTRPPSAPRNAISNVNETSVFLEWIPPADTGGRKDVSYYIACKKCNSHAGVCEECGGHVRYLPRQSGLKNTSVMMVDLLAHTNYTFEIEAVNGVSDLSPGARQYVSVNVTTNQAAPSPVTNVKKGKIAKNSISLSWQEPDRPNGIILEYEIKHFEKDQETSYTIIKSKETTITAEGLKPASVYVFQIRARTAAGYGVFSRRFEFETTPVFAASSDQSQIPVIAVSVTVGVILLAVVIGVLLSGRRCGYSKAKQDPEEEKMHFHNGHIKLPGVRTYIDPHTYEDPNQAVHEFAKEIEASCITIERVIGAGEFGEVCSGRLKLPGKRELPVAIKTLKVGYTEKQRRDFLGEASIMGQFDHPNIIHLEGVVTKSKPVMIVTEYMENGSLDTFLKKNDGQFTVIQLVGMLRGISAGMKYLSDMGYVHRDLAARNILINSNLVCKVSDFGLSRVLEDDPEAAYTTRGGKIPIRWTAPEAIAFRKFTSASDVWSYGIVMWEVVSYGERPYWEMTNQDVIKAVEEGYRLPSPMDCPAALYQLMLDCWQKERNSRPKFDEIVNMLDKLIRNPSSLKTLVNASCRVSNLLAEHSPLGSGAYRSVGEWLEAIKMGRYTEIFMENGYSSMDAVAQVTLEDLRRLGVTLVGHQKKIMNSLQEMKVQLVNGMVPL

SEQ ID NO: 881482 - protein, 1037 aa, Homo sapiens
MRGSGPRGAGHRRPPSGGGDTPITPASLAGCYSAPRRAPLWTCLLLCAALRTLLASPSNEVNLLDSRTVMGDLGWIAFPKNGWEEIGEVDENYAPIHTYQVCKVMEQNQNNWLLTSWISNEGASRIFIELKFTLRDCNSLPGGLGTCKETFNMYYFESDDQNGRNIKENQYIKIDTIAADESFTELDLGDRVMKLNTEVRDVGPLSKKGFYLAFQDVGACIALVSVRVYYKKCPSVVRHLAVFPDTITGADSSQLLEVSGSCVNHSVTDEPPKMHCSAEGEWLVPIGKCMCKAGYEEKNGTCQVCRPGFFKASPHIQSCGKCPPHSYTHEEASTSCVCEKDYFRRESDPPTMACTRPPSAPRNAISNVNETSVFLEWIPPADTGGRKDVSYYIACKKCNSHAGVCEECGGHVRYLPRQSGLKNTSVMMVDLLAHTNYTFEIEAVNGVSDLSPGARQYVSVNVTTNQAAPSPVTNVKKGKIAKNSISLSWQEPDRPNGIILEYEIKHFEKDQETSYTIIKSKETTITAEGLKPASVYVFQIRARTAAGYGVFSRRFEFETTPVFAASSDQSQIPVIAVSVTVGVILLAVVIGVLLSGSCCECGCGRASSLCAVAHPSLIWRCGYSKAKQDPEEEKMHFHNGHIKLPGVRTYIDPHTYEDPNQAVHEFAKEIEASCITIERVIGAGEFGEVCSGRLKLPGKRELPVAIKTLKVGYTEKQRRDFLGEASIMGQFDHPNIIHLEGVVTKSKPVMIVTEYMENGSLDTFLKKNDGQFTVIQLVGMLRGISAGMKYLSDMGYVHRDLAARNILINSNLVCKVSDFGLSRVLEDDPEAAYTTRGGKIPIRWTAPEAIAFRKFTSASDVWSYGIVMWEVVSYGERPYWEMTNQDVIKAVEEGYRLPSPMDCPAALYQLMLDCWQKERNSRPKFDEIVNMLDKLIRNPSSLKTLVNASCRVSNLLAEHSPLGSGAYRSVGEWLEAIKMGRYTEIFMENGYSSMDAVAQVTLEDLRRLGVTLVGHQKKIMNSLQEMKVQLVNGMVPL

SEQ ID NO: 881483 - protein, 694 aa, Homo sapiens
LLEGIKDQLLQAEQLPGCREKTRHWAVMRVLLHLPALLASLILLQAAASTTRAQTTRTSAISDTVSQAKVQVNKAFLDSRTRLKTAMSSETPTSRQLSEYLKHAKGRTRTAIRNGQVWEESLKRLRQKASLTNVTDPSLDLTSLSLEVGCGAPAPVVRCDPCSPYRTITGDCNNRRKPALGAANRALARWLPAEYEDGLSLPFGWTPGKTRNGFPLPLAREVSNKIVGYLNEEGVLDQNRSLLFMQWGQIVDHDLDFAPDTELGSSEYSKAQCDEYCIQGDNCFPIMFPPNDPKAGTQGKCMPFFRAGFVCPTPPYKSLAREQINALTSFLDASFVYSSEPSLASRLRNLSSPLGLMAVNQEVSDHGLPYLPYDSKKPSPCEFINTTARVPCFLAGDSRASEHILLATSHTLFLREHNRLARELKRLNPQWDGEKLYQEARKILGAFVQIITFRDYLPILLGDHMQKWIPPYQGYSESVDPRISNVFTFAFRFGHLEVPSSMFRLDENYQPWGPEPELPLHTLFFNTWRMVKDGGIDPLVRGLLAKKSKLMKQNKMMTGELRNKLFQPTHRIHGFDLAAINTQRCRDHGQPGYNSWRAFCDLSQPQTLEELNTVLKSKMLAKKLLGLYGTPDNIDIWIGAIAEPLVERGRVGPLLACLLGKQFQQIRDGDRQVRPQPGREGQGPSPRGVSQGPA

SEQ ID NO: 881484 - protein, 739 aa, Homo sapiens
LLEGIKDQLLQAEQLPGCREKTRHWAVMRVLLHLPALLASLILLQAAASTTRAQTTRTSAISDTVSQAKVQVNKAFLDSRTRLKTAMSSETPTSRQLSEYLKHAKGRTRTAIRNGQVWEESLKRLRQKASLTNVTDPSLDLTSLSLEVGCGAPAPVVRCDPCSPYRTITGDCNNRRKPALGAANRALARWLPAEYEDGLSLPFGWTPGKTRNGFPLPLAREVSNKIVGYLNEEGVLDQNRSLLFMQWGQIVDHDLDFAPDTELGSSEYSKAQCDEYCIQGDNCFPIMFPPNDPKAGTQGKCMPFFRAGFVCPTPPYKSLAREQINALTSFLDASFVYSSEPSLASRLRNLSSPLGLMAVNQEVSDHGLPYLPYDSKKPSPCEFINTTARVPCFLAGDSRASEHILLATSHTLFLREHNRLARELKRLNPQWDGEKLYQEARKILGAFVQIITFRDYLPILLGDHMQKWIPPYQGYSESVDPRISNVFTFAFRFGHLEVPSSMFRLDENYQPWGPEPELPLHTLFFNTWRMVKDGGIDPLVRGLLAKKSKLMKQNKMMTGELRNKLFQPTHRIHGFDLAAINTQRCRDHGQPGYNSWRAFCDLSQPQTLEELNTVLKSKMLAKKLLGLYGTPDNIDIWIGAIAEPLVERGRVGPLLACLLGKQFQQIRDGDRFWWENPGVFTNEQKDSLQKMSFSRLVCDNTRITKVPRDPFWANSYPYDFVDCSAIDKLDLSPWASVKN

SEQ ID NO: 881485 - protein, 366 aa, Homo sapiens
IWGRSQVLVPSPASFKISAVHEILCKLSLEGEHSTLPSAFGSVKAYTKFDAEQDALNIEMAIKTKGVDEITTVNILTNHSNAQRQDIAFTYQRRTKKELVSALKSALSGHLDSGFGPIKDTCSDDASELKSSMKGLGTNKDSLIEIICSRTNQELQEINRVYKEMYKTDLEKDIISDTSGDFCKLMVALAKGRRAEDGSVIDYELIDQDARDLYDAGVKRKGTEVPKWISVMTERSMSHFQKVFDRYKSYSPYDMLESIKKEVKGDLENSFLNLVQCIQNKPLYFADRLYDSIMGMGTQDKVLIRIMVSHNEVDMLKIRSEFKRKYSKSLYYYIQQDTKGAVPVWWRWLKSDTARASRNGAPHASS

SEQ ID NO: 881486 - protein, 748 aa, Homo sapiens
TNCWARSRKRPGFGKDPRVRRPGGRAGLFLSCSAGSPEPWRKASSAPHRRRRLGRTHSASWRAEADDEFRSACQACCVTRPARRAPSQPPFRTGSRALPVSGRPLPAGSSPAAARRSPSRPCGLVSHSAWAPGARQTLAMTSGATRYRLSCSLRGHELDVRGLVCCAYPPGAFVSVSRDRTTRLWAPDSPNRSFTEMHCMSGHSNFVSCVCIIPSSDIYPHGLIATGGNDHNICIFSLDSPMPLYILKGHKNTVCSLSSGKFGTLLSGSWDTTAKVWLNDKCMMTLQGHTAAVWAVKILPEQGLMLTGSADKTVKLWKAGRCERTFSGHEDCVRGLAILSETEFLSCANDASIRRWQITGECLEVYYGHTNYIYSISVFPNCRDFVTTAEDRSLRIWKHGECAQTIRLPAQSIWCCCVLDNGDIVVGASDGIIRVFTESEDRTASAEEIKAFEKELSHATIDSKTGDLGDINAEQLPGREHLNEPGTREGQTRLIRDGEKVEAYQWSVSEGRWIKIGDVVGSSGANQQTSGKVLYEGKEFDYVFSIDVNEGGPSYKLPYNTSDDPWLTAYNFLQKNDLNPMFLDQVAKFIIDNTKGQMLGLGNPSFSDPFTGGGRYVPGSSGSSNTLPTADPFTGAGRYVPGSASMGTTMAGVDPFTGNSAYRSAASKTMNIYFPKKEAVTFDQANPTQILGKLKELNGTAPEEKKLTEDDLILLEKILSLICNSSSEKPTVQQLQILWKAINCPEGK

SEQ ID NO: 881487 - protein, 916 aa, Homo sapiens
TNCWARSRKRPGFGKDPRVRRPGGRAGLFLSCSAGSPEPWRKASSAPHRRRRLGRTHSASWRAEADDEFRSACQACCVTRPARRAPSQPPFRTGSRALPVSGRPLPAGSSPAAARRSPSRPCGLVSHSAWAPGARQTLAMTSGATRYRLSCSLRGHELDVRGLVCCAYPPGAFVSVSRDRTTRLWAPDSPNRSFTEMHCMSGHSNFVSCVCIIPSSDIYPHGLIATGGNDHNICIFSLDSPMPLYILKGHKNTVCSLSSGKFGTLLSGSWDTTAKVWLNDKCMMTLQGHTAAVWAVKILPEQGLMLTGSADKTVKLWKAGRCERTFSGHEDCVRGLAILSETEFLSCANDASIRRWQITGECLEVYYGHTNYIYSISVFPNCRDFVTTAEDRSLRIWKHGECAQTIRLPAQSIWCCCVLDNGDIVVGASDGIIRVFTESEDRTASAEEIKAFEKELSHATIDSKTGDLGDINAEQLPGREHLNEPGTREGQTRLIRDGEKVEAYQWSVSEGRWIKIGDVVGSSGANQQTSGKVLYEGKEFDYVFSIDVNEGGPSYKLPYNTSDDPWLTAYNFLQKNDLNPMFLDQVAKFIIDNTKGQMLGLGNPSFSDPFTGGGRYVPGSSGSSNTLPTADPFTGAGRYVPGSASMGTTMAGVDPFTGNSAYRSAASKTMNIYFPKKEAVTFDQANPTQILGKLKELNGTAPEEKKLTEDDLILLEKILSLICNSSSEKPTVQQLQILWKAINCPEDIVFPALDILRLSIKHPSVNENFCNEKEGAQFSSHLINLLNPKGKPANQLLALRTFCNCFVGQAGQSGSNKNIHIALATLALNYSVCFHKDHNIEGKAQCLSLISTILEVVQDLEATFRLLVALGTLISDDSNAVQLAKSLGVDSQIKKYSSVSEPAKVSECCRFILNLL

SEQ ID NO: 881488 - protein, 630 aa, Homo sapiens
MLTGSADKTVKLWKAGRCERTFSGHEDCVRGLAILSETEFLSCANDASIRRWQITGECLEVYYGHTNYIYSISVFPNCRDFVTTAEDRSLRIWKHGECAQTIRLPAQSIWCCCVLDNGDIVVGASDGIIRVFTESEDRTASAEEIKAFEKELSHATIDSKTGDLGDINAEQLPGREHLNEPGTREGQTRLIRDGEKVEAYQWSVSEGRWIKIGDVVGSSGANQQTSGKVLYEGKEFDYVFSIDVNEGGPSYKLPYNTSDDPWLTAYNFLQKNDLNPMFLDQVAKFIIDNTKGQMLGLGNPSFSDPFTGGGRYVPGSSGSSNTLPTADPFTGAGRYVPGSASMGTTMAGVDPFTGNSAYRSAASKTMNIYFPKKEAVTFDQANPTQILGKLKELNGTAPEEKKLTEDDLILLEKILSLICNSSSEKPTVQQLQILWKAINCPEDIVFPALDILRLSIKHPSVNENFCNEKEGAQFSSHLINLLNPKGKPANQLLALRTFCNCFVGQAGQKLMMSQRESLMSHAIELKSGSNKNIHIALATLALNYSVCFHKDHNIEGKAQCLSLISTILEVVQDLEATFRLLVALGTLISDDSNAVQLAKSLGVDSQIKKYSSVSEPAKVSECCRFILNLL

SEQ ID NO: 881489 - protein, 289 aa, Homo sapiens
TNCWARSRKRPGFGKDPRVRRPGGRAGLFLSCSAGSPEPWRKASSAPHRRRRLGRTHSASWRAEADDEFRSACQACCVTRPARRAPSQPPFRTGSRALPVSGRPLPAGSSPAAARRSPSRPCGLVSHSAWAPGARQTLAMTSGATRYRLSCSLRGHELDVRGLVCCAYPPGAFVSVSRDRTTRLWAPDSPNRSFTEMHCMSGHSNFVSCVCIIPSSDIYPHGLIATGGNDHNICIFSLDSPMPLYILKGHKNTVCSLSSGKFGTLLSGSWDTTAKVWLNDKCMMTLQVQ

SEQ ID NO: 881490 - protein, 934 aa, Homo sapiens
TNCWARSRKRPGFGKDPRVRRPGGRAGLFLSCSAGSPEPWRKASSAPHRRRRLGRTHSASWRAEADDEFRSACQACCVTRPARRAPSQPPFRTGSRALPVSGRPLPAGSSPAAARRSPSRPCGLVSHSAWAPGARQTLAMTSGATRYRLSCSLRGHELDVRGLVCCAYPPGAFVSVSRDRTTRLWAPDSPNRSFTEMHCMSGHSNFVSCVCIIPSSDIYPHGLIATGGNDHNICIFSLDSPMPLYILKGHKNTVCSLSSGKFGTLLSGSWDTTAKVWLNDKCMMTLQGHTAAVWAVKILPEQGLMLTGSADKTVKLWKAGRCERTFSGHEDCVRGLAILSETEFLSCANDASIRRWQITGECLEVYYGHTNYIYSISVFPNCRDFVTTAEDRSLRIWKHGECAQTIRLPAQSIWCCCVLDNGDIVVGASDGIIRVFTESEDRTASAEEIKAFEKELSHATIDSKTGDLGDINAEQLPGREHLNEPGTREGQTRLIRDGEKVEAYQWSVSEGRWIKIGDVVGSSGANQQTSGKVLYEGKEFDYVFSIDVNEGGPSYKLPYNTSDDPWLTAYNFLQKNDLNPMFLDQVAKFIIDNTKGQMLGLGNPSFSDPFTGGGRYVPGSSGSSNTLPTADPFTGAGRYVPGSASMGTTMAGVDPFTGNSAYRSAASKTMNIYFPKKEAVTFDQANPTQILGKLKELNGTAPEEKKLTEDDLILLEKILSLICNSSSEKPTVQQLQILWKAINCPEDIVFPALDILRLSIKHPSVNENFCNEKEGAQFSSHLINLLNPKGKPANQLLALRTFCNCFVGQAGQKLMMSQRESLMSHAIELKSGSNKNIHIALATLALNYSVCFHKDHNIEGKAQCLSLISTILEVVQDLEATFRLLVALGTLISDDSNAVQLAKSLGVDSQIKKYSSVSEPAKVSECCRFILNLL

SEQ ID NO: 881491 - protein, 934 aa, Homo sapiens; identical to SEQ ID NO: 881490

SEQ ID NO: 881492 - protein, 621 aa, Homo sapiens
TNCWARSRKRPGFGKDPRVRRPGGRAGLFLSCSAGSPEPWRKASSAPHRRRRLGRTHSASWRAEADDEFRSACQACCVTRPARRAPSQPPFRTGSRALPVSGRPLPAGSSPAAARRSPSRPCGLVSHSAWAPGARQTLAMTSGATRYRLSCSLRGHELDVRGLVCCAYPPGAFVSVSRDRTTRLWAPDSPNRSFTEMHCMSGHSNFVSCVCIIPSSDIYPHGLIATGGNDHNICIFSLDSPMPLYILKGHKNTVCSLSSGKFGTLLSGSWDTTAKVWLNDKCMMTLQGHTAAVWAVKILPEQGLMLTGSADKTVKLWKAGRCERTFSGHEDCVRGLAILSETEFLSCANDASIRRWQITGECLEVYYGHTNYIYSISVFPNCRDFVTTAEDRSLRIWKHGECAQTIRLPAQSIWCCCVLDNGDIVVGASDGIIRVFTESEDRTASAEEIKAFEKELSHATIDSKTGDLGDINAEQLPGREHLNEPGTREGQTRLIRDGEKVEAYQWSVSEGRWIKIGDVVGSSGANQQTSGKVLYEGKEFDYVFSIDVNEGGPSYKLPYNTSDDPWLTAYNFLQKNDLNPMFLDQVAKFIIDNTKGQMLGLGNPSFSDPFTGKLVFILSLM

SEQ ID NO: 881493 - protein, 459 aa, Homo sapiens [sequence omitted]

SEQ ID NO: 881494 - protein, 459 aa, Homo sapiens [sequence omitted]

SEQ ID NO: 881495 - protein, 459 aa, Homo sapiens [sequence omitted]

SEQ ID NO: 881496 - protein, 459 aa, Homo sapiens [sequence omitted]

SEQ ID NO: 881497 - protein, 262 aa, Homo sapiens
MTILGTTFGMVFSLLQVVSGESGYAQNGDLEDAELDDYSFSCYSQLEVNGSQHSLTCAFEDPDVNTTNLEFEICGALVEVKCLNFRKLQEIYFIETKKFLLIGKSNICVKVGEKSLTCKKIDLTTIVKPEAPFDLSVIYREGANDFVVTFNTSHLQKKYVKVLMHDVAYRQEKDENKWTHVNLSSTKLTLLQRKLQPAAMYEIKVRSIPDHYFKGFWSEWSPSYYFRTPEINNSSGLSLSYGPVSPIIRRLWNIFVRNQEKI

SEQ ID NO: 881498 - protein, 171 aa, Homo sapiens
EILDVIDEGKSNRHVAVTNMNEHSSRSHSIFLINIKQENMETEQKLSGKLYLVDLAGSEKVSKTGAEGAVLDEAKNINKSLSALGNVISALAEGTKSYVPYRDSKMTRILQDSLGGNCRTTMFICCSPSSYNDAETKSTLMFGQRAKTIKNTASVNLELTAEQWKKKYEKE

SEQ ID NO: 881499 - protein, 287 aa, Homo sapiens
  misc_feature (280)..(280): Xaa can be any naturally occurring amino acid
EILDVIDEGKSNRHVAVTNMNEHSSRSHSIFLINIKQENMETEQKLSGKLYLVDLAGSEKVSKTGAEGAVLDEAKNINKSLSALGNVISALAEGTKSYVPYRDSKMTRILQDSLGGNCRTTMFICCSPSSYNDAETKSTLMFGQRAKTIKNTASVNLELTAEQWKKKYEKEKEKTKAQKETIAKLEAELSRWRNGENVPETERLAGEEAALGAELCEETPVNDNSSIVVRIAPEERQKYEEEIRRLYKQLDDKDDEINQQSQLIEKLKQQMLDQEELLVXTRGDNEK

SEQ ID NO: 881500 - protein, 267 aa, Homo sapiens
  misc_feature (260)..(260): Xaa can be any naturally occurring amino acid
MWDSAKTWAALTPTSSAKSEGASLGGDPAPNHSPGPHRESVDALSVGGAVLDEAKNINKSLSALGNVISALAEGTKSYVPYRDSKMTRILQDSLGGNCRTTMFICCSPSSYNDAETKSTLMFGQRAKTIKNTASVNLELTAEQWKKKYEKEKEKTKAQKETIAKLEAELSRWRNGENVPETERLAGEEAALGAELCEETPVNDNSSIVVRIAPEERQKYEEEIRRLYKQLDDKDDEINQQSQLIEKLKQQMLDQEELLVXTRGDNEK

SEQ ID NO: 881501 - protein, 1480 aa, Homo sapiens
NSGRQSRSAPRRSAPARAPARLGLGSGSGGGVPAPGPGTGGDAPTMARAQALVLALTFQLCAPETETPAAGCTFEEASDPAVPCEYSQAQYDDFQWEQVRIHPGTRAPADLPHGSYLMVNTSQHAPGQRAHVIFQSLSENDTHCVQFSYFLYSRDGHSPGTLGVYVRVNGGPLGSAVWNMTGSHGRQWHQAELAVSTFWPNEYQVLFEALISPDRRGYMGLDDILLLSYPCAKAPHFSRLGDVEVNAGQNASFQCMAAGRARGRTLPLATAERGAGAGGGRAAHQPPRFLATFPLAAVSRAEQDLYRCVSQAPRGAGVSNFAELIVKEPPTPIAPPQLLRAGPTYLIIQLNTNSIIGDGPIVRKEIEYRMARGPWAEVHAVSLQTYKLWHLDPDTEYEISVLLTRPGDGGTGRPGPPLISRTKCAEPMRAPKGLAFAEIQARQLTLQWEPLGYNVTRCHTYTVSLCYHYTLGSSHNQTIRECVKTEQGVSRYTIKNLLPYRNVHVRLVLTNPEGRKEGKEVTFQTDEDVPSGIAAESLTFTPLEDMIFLKWEEPQEPNGLITQYEISYQSIESSDPAVNVPGPRRTISKLRNETYHVFSNLHPGTTYLFSVRARTGKGFGQAALTEITTNISAPSFDYADMPSPLGESENTITVLLRPAQGRGAPISVYQVIVEEERARRLRREPGGQDCFPVPLTFEAALARGLVHYFGAELAASSLPEAMPFTVGDNQTYRGFWNPPLEPRKAYLIYFQAASHLKGETRLNCIRIARKAACKESKRPLEVSQRSEEMGLILGICAGGLAVLILLLGAIIVIIRKGKPVNMTKATVNYRQEKTHMMSAVDRSFTDQSTLQEDERLGLSFMDTHGYSTRGDQRSGGVTEASSLLGGSPRRPCGRKGSPYHTGQLHPAVRVADLLQHINQMKTAEGYGFKQEYESFFEGWDATKKKDKVKGSRQEPMPAYDRHRVKLHPMLGDPNADYINANYIDGYHRSNHFIATQGPKPEMVYDFWRMVWQEHCSSIVMITKLVEVGRVKCSRYWPEDSDTYGDIKIMLVKTETLAEYVVRTFALERRGYSARHEVRQFHFTAWPEHGVPYHATGLLAFIRRVKASTPPDAGPIVIHCSAGTGRTGCYIVLDVMLDMAECEGVVDIYNCVKTLCSRRVNMIQTEEQYIFIHDAILEACLCGETTIPVSEFKATYKEMIRIDPQSNSSQLREEFQTLNSVTPPLDVEECSIALLPRNRDKNRSMDVLPPDRCLPFLISTDGDSNNYINAALTDSYTRSAAFIVTLHPLQSTTPDFWRLVYDYGCTSIVMLNQLNQSNSAWPCLQYWPEPGRQQYGLMEVEFMSGTADEDLVARVFRVQNISRLQEGHLLVRHFQFLRWSAYRDTPDSKKAFLHLLAEVDKWQAESGDGRTIVHCLNGGGRSGTFCACATVLEMIRCHNLVDVFFAAKTLRNYKPNMVETMDQYHFCYDVALEYLEGLESR

SEQ ID NO: 881502 - protein, 1486 aa, Homo sapiens
NSGRQSRSAPRRSAPARAPARLGLGSGSGGGVPAPGPGTGGDAPTMARAQALVLALTFQLCAPETETPAAGCTFEEASDPAVPCEYSQAQYDDFQWEQVRIHPGTRAPADLPHGSYLMVNTSQHAPGQRAHVIFQSLSENDTHCVQFSYFLYSRDGHSPGTLGVYVRVNGGPLGSAVWNMTGSHGRQWHQAELAVSTFWPNEYQVLFEALISPDRRGYMGLDDILLLSYPCAKAPHFSRLGDVEVNAGQNASFQCMAAGRARGRTLPLATAERGAGAGGGRAAHQPPRFLATFPLAAVSRAEQDLYRCVSQAPRGAGVSNFAELIVKEPPTPIAPPQLLRAGPTYLIIQLNTNSIIGDGPIVRKEIEYRMARGPWAEVHAVSLQTYKLWHLDPDTEYEISVLLTRPGDGGTGRPGPPLISRTKCAEPMRAPKGLAFAEIQARQLTLQWEPLGYNVTRCHTYTVSLCYHYTLGSSHNQTIRECVKTEQGVSRYTIKNLLPYRNVHVRLVLTNPEGRKEGKEVTFQTDEDVPSGIAAESLTFTPLEDMIFLKWEEPQEPNGLITQYEISYQSIESSDPAVNVPGPRRTISKLRNETYHVFSNLHPGTTYLFSVRARTGKGFGQAALTEITTNISAPSFDYADMPSPLGESENTITVLLRPAQGRGAPISVYQVIVEEERARRLRREPGGQDCFPVPLTFEAALARGLVHYFGAELAASSLPEAMPFTVGDNQTYRGFWNPPLEPRKAYLIYFQAASHLKGETRLNCIRIARKAACKESKRPLEVSQRSEEMGLILGICAGGLAVLILLLGAIIVIIRKGKPVNMTKATVNYRQEKTHMMSAVDRSFTDQSTLQEDERLGLSFMDTHGYSTRGDQRSGGVTEASSLLGGSPRRPCGRKGSPYHTGQLHPAVRVADLLQHINQMKTAEGYGFKQEYESFFEGWDATKKKDKVKGSRQEPMPAYDRHRVKLHPMLGDPNADYINANYIDIRINREGYHRSNHFIATQGPKPEMVYDFWRMVWQEHCSSIVMITKLVEVGRVKCSRYWPEDSDTYGDIKIMLVKTETLAEYVVRTFALERRGYSARHEVRQFHFTAWPEHGVPYHATGLLAFIRRVKASTPPDAGPIVIHCSAGTGRTGCYIVLDVMLDMAECEGVVDIYNCVKTLCSRRVNMIQTEEQYIFIHDAILEACLCGETTIPVSEFKATYKEMIRIDPQSNSSQLREEFQTLNSVTPPLDVEECSIALLPRNRDKNRSMDVLPPDRCLPFLISTDGDSNNYINAALTDSYTRSAAFIVTLHPLQSTTPDFWRLVYDYGCTSIVMLNQLNQSNSAWPCLQYWPEPGRQQYGLMEVEFMSGTADEDLVARVFRVQNISRLQEGHLLVRHFQFLRWSAYRDTPDSKKAFLHLLAEVDKWQAESGDGRTIVHCLNGGGRSGTFCACATVLEMIRCHNLVDVFFAAKTLRNYKPNMVETMDQYHFCYDVALEYLEGLESR

SEQ ID NO: 881503 - protein, 214 aa, Homo sapiens
  misc_feature (9)..(9): Xaa can be any naturally occurring amino acid
MAMDRGPWXVNRTGLIVILHPLQSTTPDFWRLVYDYGCTSIVMLNQLNQSNSAWPCLQYWPEPGRQQYGLMEVEFMSGTADEDLVARVFRVQNISRLQEGHLLVRHFQFLRWSAYRDTPDSKKAFLHLLAEVDKWQAESGDGRTIVHCLNGGGRSGTFCACATVLEMIRCHNLVDVFFAAKTLRNYKPNMVETMDQYHFCYDVALEYLEGLESR

SEQ ID NO: 881504 - protein, 1258 aa, Homo sapiens
NSGRQSRSAPRRSAPARAPARLGLGSGSGGGVPAPGPGTGGDAPTMARAQALVLALTFQLCAPETETPAAGCTFEEASDPAVPCEYSQAQYDDFQWEQVRIHPGTRAPADLPHGSYLMVNTSQHAPGQRAHVIFQSLSENDTHCVQFSYFLYSRDGHSPGTLGVYVRVNGGPLGSAVWNMTGSHGRQWHQAELAVSTFWPNEYQVLFEALISPDRRGYMGLDDILLLSYPCAKAPHFSRLGDVEVNAGQNASFQCMAAGRARGRTLPLATAERGAGAGGGRAAHQPPRFLATFPLAAVSRAEQDLYRCVSQAPRGAGVSNFAELIVKEPPTPIAPPQLLRAGPTYLIIQLNTNSIIGDGPIVRKEIEYRMARGPWAEVHAVSLQTYKLWHLDPDTEYEISVLLTRPGDGGTGRPGPPLISRTKCAEPMRAPKGLAFAEIQARQLTLQWEPLGYNVTRCHTYTVSLCYHYTLGSSHNQTIRECVKTEQGVSRYTIKNLLPYRNVHVRLVLTNPEGRKEGKEVTFQTDEDVPSGIAAESLTFTPLEDMIFLKWEEPQEPNGLITQYEISYQSIESSDPAVNVPGPRRTISKLRNETYHVFSNLHPGTTYLFSVRARTGKGFGQAALTEITTNISAPSFDYADMPSPLGESENTITVLLRPAQGRGAPISVYQVIVEEERARRLRREPGGQDCFPVPLTFEAALARGLVHYFGAELAASSLPEAMPFTVGDNQTYRGFWNPPLEPRKAYLIYFQAASHLKGETRLNCIRIARKAACKESKRPLEVSQRSEEMGLILGICAGGLAVLILLLGAIIVIIRKGRDHYAYSYYPKPVNMTKATVNYRQEKTHMMSAVDRSFTDQSTLQEDERLGLSFMDTHGYSTRGDQRSGGVTEASSLLGGSPRRPCGRKGSPYHTGQLHPAVRVADLLQHINQMKTAEGYGFKQEYESFFEGWDATKKKDKVKGSRQEPMPAYDRHRVKLHPMLGDPNADYINANYIDGYHRSNHFIATQGPKPEMVYDFWRMVWQEHCSSIVMITKLVEVGRVKCSRYWPEDSDTYGDIKIMLVKTETLAEYVVRTFALERRGYSARHEVRQFHFTAWPEHGVPYHATGLLAFIRRVKASTPPDAGPIVIHCSAGTGRTGCYIVLDVMLDMAECEGVVDIYNCVKTLCSRRVNMIQTEEQYIFIHDAILEACLCGETTIPVSEFKATYKEMIRIDPQSNSSQLREEFQTLNSVTPPLDVEECSIALLPRTCKVTCKPGTCK

SEQ ID NO: 881505 - protein, 1482 aa, Homo sapiens
NSGRQSRSAPRRSAPARAPARLGLGSGSGGGVPAPGPGTGGDAPTMARAQALVLALTFQLCAPETETPAAGCTFEEASDPAVPCEYSQAQYDDFQWDRAPADLPHGSYLMVNTSQHAPGQRAHVIFQSLSENDTHCVQFSYFLYSRDGHSPGTLGVYVRVNGGPLGSAVWNMTGSHGRQWHQAELAVSTFWPNEYQVLFEALISPDRRGYMGLDDILLLSYPCAKAPHFSRLGDVEVNAGQNASFQCMAAGRARGRTLPLATAERGAGAGGGRAAHQPPRFLATFPLAAVSRAEQDLYRCVSQAPRGAGVSNFAELIVKEPPTPIAPPQLLRAGPTYLIIQLNTNSIIGDGPIVRKEIEYRMARGPWAEVHAVSLQTYKLWHLDPDTEYEISVLLTRPGDGGTGRPGPPLISRTKCAEPMRAPKGLAFAEIQARQLTLQWEPLGYNVTRCHTYTVSLCYHYTLGSSHNQTIRECVKTEQGVSRYTIKNLLPYRNVHVRLVLTNPEGRKEGKEVTFQTDEDVPSGIAAESLTFTPLEDMIFLKWEEPQEPNGLITQYEISYQSIESSDPAVNVPGPRRTISKLRNETYHVFSNLHPGTTYLFSVRARTGKGFGQAALTEITTNISAPSFDYADMPSPLGESENTITVLLRPAQGRGAPISVYQVIVEEERARRLRREPGGQDCFPVPLTFEAALARGLVHYFGAELAASSLPEAMPFTVGDNQTYRGFWNPPLEPRKAYLIYFQAASHLKGETRLNCIRIARKAACKESKRPLEVSQRSEEMGLILGICAGGLAVLILLLGAIIVIIRKGRDHYAYSYYPKPVNMTKATVNYRQEKTHMMSAVDRSFTDQSTLQEDERLGLSFMDTHGYSTRGDQRSGGVTEASSLLGGSPRRPCGRKGSPYHTGQLHPAVRVADLLQHINQMKTAEGYGFKQEYESFFEGWDATKKKDKVKGSRQEPMPAYDRHRVKLHPMLGDPNADYINANYIDGYHRSNHFIATQGPKPEMVYDFWRMVWQEHCSSIVMITKLVEVGRVKCSRYWPEDSDTYGDIKIMLVKTETLAEYVVRTFALERRGYSARHEVRQFHFTAWPEHGVPYHATGLLAFIRRVKASTPPDAGPIVIHCSAGTGRTGCYIVLDVMLDMAECEGVVDIYNCVKTLCSRRVNMIQTEEQYIFIHDAILEACLCGETTIPVSEFKATYKEMIRIDPQSNSSQLREEFQTLNSVTPPLDVEECSIALLPRNRDKNRSMDVLPPDRCLPFLISTDGDSNNYINAALTDSYTRSAAFIVTLHPLQSTTPDFWRLVYDYGCTSIVMLNQLNQSNSAWPCLQYWPEPGRQQYGLMEVEFMSGTADEDLVARVFRVQNISRLQEGHLLVRHFQFLRWSAYRDTPDSKKAFLHLLAEVDKWQAESGDGRTIVHCLNGGGRSGTFCACATVLEMIRCHNLVDVFFAAKTLRNYKPNMVETMDQYHFCYDVALEYLEGLESR

SEQ ID NO: 881506 - protein, 1430 aa, Homo sapiens
NSGRQSRSAPRRSAPARAPARLGLGSGSGGGVPAPGPGTGGDAPTMARAQALVLALTFQLCAPETETPAAGCTFEEASDPAVPCEYSQAQYDDFQWEQVRIHPGTRAPADLPHGSYLMVNTSQHAPGQRAHVIFQSLSENDTHCVQFSYFLYSRDGHSPGTLGVYVRVNGGPLGSAVWNMTGSHGRQWHQAELAVSTFWPNEYQVLFEALISPDRRGYMGLDDILLLSYPCAKAPHFSRLGDVEVNAGQNASFQCMAAGRARGRTLPLATAERGAGAGGGRAAHQPPRFLATFPLAAVSRAEQDLYRCVSQAPRGAGVSNFAELIVKEPPTPIAPPQLLRAGPTYLIIQLNTNSIIGDGPIVRKEIEYRMARGPWAEVHAVSLQTYKLWHLDPDTEYEISVLLTRPGDGGTGRPGPPLISRTKCAEPMRAPKGLAFAEIQARQLTLQWEPLGYNVTRCHTYTVSLCYHYTLGSSHNQTIRECVKTEQGVSRYTIKNLLPYRNVHVRLVLTNPEGRKEGKEVTFQTDEDVPSGIAAESLTFTPLEDMIFLKWEEPQEPNGLITQYEISYQSIESSDPAVNVPGPRRTISKLRNETYHVFSNLHPGTTYLFSVRARTGKGFGQAALTEITTNISAPSFDYADMPSPLGESENTITVLLRPAQGRGAPISVYQVIVEEERARRLRREPGGQDCFPVPLTFEAALARGLVHYFGAELAASSLPEAMPFTVGDNQTYRGFWNPPLEPRKAYLIYFQAASHLKGETRLNCIRIARKAACKESKRPLEVSQRSEEMGLILGICAGGLAVLILLLGAIIVIIRKGRDHYAYSYYPKPVNMTKATVNYRQEKTHMMSAVDRSFTDQSTLQEDERLGLSFMDTHGYSTRGDQRSGGVTEASSLLGGSPRRPCGRKGSPYHTGQLHPAVRVADLLQHINQMKTAEGYGFKQEYESFFEGWDATKKKDKVKGSRQEPMPAYDRHRVKLHPMLGDPNADYINANYIDGYHRSNHFIATQGPKPEMVYDFWRMVWQEHCSSIVMITKLVEVGRVKCSRYWPEDSDTYGDIKIMLVKTETLAEYVVRTFALERRGYSARHEVRQFHFTAWPEHGVPYHATGLLAFIRRVKASTPPDAGPIVIHCSAGTGRTGCYIVLDVMLDMAECEGVVDIYNCVKTLCSRRVNMIQTEEQYIFIHDAILEACLCGETTIPVSEFKATYKEMIRIDPQSNSSQLREEFQTLNSVTPPLDVEECSIALLPRNRDKNRSMDVLPPDRCLPFLISTDGDSNNYINAALTDSYTRSAAFIVTLHPLQSTTPDFWRLVYDYGCTSIVMLNQLNQSNSAWPCLQYWPEPGRQQYGLMEVEFMSGTADEDLVARVFRVQNISRLQEGHLLVRHFQFLRWSAYRDTPDSKKAFLHLLAEVDKWQAESGDGRTIVHCLPSACG

SEQ ID NO: 881507 - protein, 57 aa, Homo sapiens
DNQTYRGFWNPPLEPRKAYLIYFQAASHLKGVRDRPGSWWAWLGVGGWQTGDTLEQA

SEQ ID NO: 881508 - protein, 1657 aa, Homo sapiens
WLSQQLQQLREWPGGRRVPAAMEAVPRMPMIWLDLKEAGDFHFQPAVKKFVLKNYGENPEAYNEELKKLELLRQNAVRVPRDFEGCSVLRKYLGQLHYLQSRVPMGSGQEAAVPVTWTEIFSGKSVAHEDIKYEQACILYNLGALHSMLGAMDKRVSEEGMKVSCTHFQCAAGAFAYLREHFPQAYSVDMSRQILTLNVNLMLGQAQECLLEKSMLDNRKSFLVARISAQVVDYYKEACRALENPDTASLLGRIQKDWKKLVQMKIYYFAAVAHLHMGKQAEEQQKFGERVAYFQSALDKLNEAIKLAKGQPDTVQDALRFTMDVIGGKYNSAKKDNDFIYHEAVPALDTLQPVKGAPLVKPLPVNPTDPAVTGPDIFAKLVPMAAHEASSLYSEEKAKLLREMMAKIEDKNEVLDQFMDSMQLDPETVDNLDAYSHIPPQLMEKCAALSVRPDTVRNLVQSMQVLSGVFTDVEASLKDIRDLLEEDELLEQKFQEAVGQAGAISITSKAELAEVRREWAKYMEVHEKASFTNSELHRAMNLHVGNLRLLSGPLDQVRAALPTPALSPEDKAVLQNLKRILAKVQEMRDQRVSLEQQLRELIQKDDITASLVTTDHSEMKKLFEEQLKKYDQLKVYLEQNLAAQDRVLCALTEANVQYAAVRRVLSDLDQKWNSTLQTLVASYEAYEDLMKKSQEGRDFYADLESKVAALLERTQSTCQAREAARQQLLDRELKKKPPPRPTAPKPLLPRREESEAVEAGDPPEELRSLPPDMVAGPRLPDTFLGSATPLHFPPSPFPSSTGPGPHYLSGPLPPGTYSGPTQLIQPRAPGPHAMPVAPGPALYPAPAYTPELGLVPRSSPQHGVVSSPYVGVGPAPPVAGLPSAPPPQFSGPELAMAVRPATTTVDSIQAPIPSHTAPRPNPTPAPPPPCFPVPPPQPLPTPYTYPAGAKQPIPAQHHFSSGIPAGFPAPRIGPQPQPHPQPHPSQAFGPQPPQQPLPLQHPHLFPPQAPGLLPPQSPYPYAPQPGVLGQPPPPLHTQLYPGPAQDPLPAHSGALPFPSPGPPQPPHPPLAYGPAPSTRPMGPQAAPLTIRGPSSAGQSTPSPHLVPSPAPSPGPGPVPPRPPAAEPPPCLRRGAAAADLLSSSPESQHGGTQSPGGGQPLLQPTKVDAAEGRRPQALRLIERDPYEHPERLRQLQQELEAFRGQLGDVGALDTVWRELQDAQEHDARGRSIAIARCYSLKNRHQDVMPYDSNRVVLRSGKDDYINASCVEGLSPYCPPLVATQAPLPGTAADFWLMVHEQKVSVIVMLVSEAEMEKQKVARYFPTERGQPMVHGALSLALSSVRSTETHVERVLSLQFRDQSLKRSLVHLHFPTWPELGLPDSPSNLLRFIQEVHAHYLHQRPLHTPIIVHCSSGVGRTGAFALLYAAVQEVEAGNGIPELPQLVRRMRQQRKHMLQEKLHLRFCYEAVVRHVEQVLQRHGVPPPCKPLASASISQKNHLPQDSQDLVLGGDVPISSIQATIAKLSIRPPGGLESPVASLPGPAEPPGLPPASLPESTPIPSSSPPPLSSPLPEAPQPKEEPPVPEAPSSGPPSSSLELLASLTPEAFSLDSSLRGKQRMSKHNFLQAHNGQGLRATRPSDDPLSLLDPLWTLNKT

SEQ ID NO: 881509 - protein, 1657 aa, Homo sapiens; identical to SEQ ID NO: 881508

SEQ ID NO: 881510 - protein, 92 aa, Homo sapiens
MGRSSAQVVDYYKEACRALENPDTASLLGRIQKDWKKLVQMKIYYFAAVAHLHMGKQAEEQQKFGERVAYFQSALDKLNEAIKLAKVKLRKA

SEQ ID NO: 881511 - protein, 1683 aa, Homo sapiens
MGSGQEAAVPVTWTEIFSGKSVAHEDIKYEQACILYNLGALHSMLGAMDKRVSEEGMKVSCTHFQCAAGAFAYLREHFPQAYSVDMSRQILTLNVNLMLGQAQECLLEKSMLDNRKSFLVARISAQVVDYYKEACRALENPDTASLLGRIQKDWKKLVQMKIYYFAAVAHLHMGKQAEEQQKFGERVAYFQSALDKLNEAIKLAKGQPDTVQDALRFTMDVIGGKYNSAKKDNDFIYHEAVPALDTLQPVKGAPLVKPLPVNPTDPAVTGPDIFAKLVPMAAHEASSLYSEEKAKLLREMMAKIEDKNEVLELSVGLGQGGGGRQHFPGLWGPQGCLCWERNEMSIPNRFPNAAFPPGVVGLVCKAGVMSVGGGGAFCSTVSSSALGMFCETRPDLVVGVRGHNLLSAETSDGVVRLALAAPLTWSELDQHPAPTWPVAPHSQFMDSMQLDPETVDNLDAYSHIPPQLMEKCAALSVRPDTVRNLVQSMQVLSGVFTDVEASLKDIRDLLEEDELLEQKFQEAVGQAGAISITSKAELAEVRREWAKYMEVHEKASFTNSELHRAMNLHVGNLRLLSGPLDQVRAALPTPALSPEDKAVLQNLKRILAKVQEMRDQRVSLEQQLRELIQKDDITASLVTTDHSEMKKLFEEQLKKYDQLKVYLEQNLAAQDRVLCALTEANVQYAAVRRVLSDLDQKWNSTLQTLVASYEAYEDLMKKSQEGRDFYADLESKVAALLERTQSTCQAREAARQQLLDRELKKKPPPRPTAPKPLLPRREESEAVEAGDPPEELRSLPPDMVAGPRLPDTFLGSATPLHFPPSPFPSSTGPGPHYLSGPLPPGTYSGPTQLIQPRAPGPHAMPVAPGPALYPAPAYTPELGLVPRSSPQHGVVSSPYVGVGPAPPVAGLPSAPPPQFSGPELAMAVRPATTTVDSIQAPIPSHTAPRPNPTPAPPPPCFPVPPPQPLPTPYTYPAGAKQPIPAQHHFSSGIPAGFPAPRIGPQPQPHPQPHPSQAFGPQPPQQPLPLQHPHLFPPQAPGLLPPQSPYPYAPQPGVLGQPPPPLHTQLYPGPAQDPLPAHSGALPFPSPGPPQPPHPPLAYGPAPSTRPMGPQAAPLTIRGPSSAGQSTPSPHLVPSPAPSPGPGPVPPRPPAAEPPPCLRRGAAAADLLSSSPESQHGGTQSPGGGQPLLQPTKVDAAEGRRPQALRLIERDPYEHPERLRQLQQELEAFRGQLGDVGALDTVWRELQDAQEHDARGRSIAIARCYSLKNRHQDVMPYDSNRVVLRSGKDDYINASCVEGLSPYCPPLVATQAPLPGTAADFWLMVHEQKVSVIVMLVSEAEMEKQKVARYFPTERGQPMVHGALSLALSSVRSTETHVERVLSLQFRDQSLKRSLVHLHFPTWPELGLPDSPSNLLRFIQEVHAHYLHQRPLHTPIIVHCSSGVGRTGAFALLYAAVQEVEAGNGIPELPQLVRRMRQQRKHMLQEKLHLRFCYEAVVRHVEQVLQRHGVPPPCKPLASASISQKNHLPQDSQDLVLGGDVPISSIQATIAKLSIRPPGGLESPVASLPGPAEPPGLPPASLPESTPIPSSSPPPLSSPLPEAPQPKEEPPVPEAPSSGPPSSSLELLASLTPEAFSLDSSLRGKQRMSKHNFLQAHNGQGLRATRPSDDPLSLLDPLWTLNKT

SEQ ID NO: 881512 - protein, 1711 aa, Homo sapiens
SRGSPCSRSWSVLRKYLGQLHYLQSRVPMGSGQEAAVPVTWTEIFSGKSVAHEDIKYEQACILYNLGALHSMLGAMDKRVSEEGMKVSCTHFQCAAGAFAYLREHFPQAYSVDMSRQILTLNVNLMLGQAQECLLEKSMLDNRKSFLVARISAQVVDYYKEACRALENPDTASLLGRIQKDWKKLVQMKIYYFAAVAHLHMGKQAEEQQKFGERVAYFQSALDKLNEAIKLAKGQPDTVQDALRFTMDVIGGKYNSAKKDNDFIYHEAVPALDTLQPVKGAPLVKPLPVNPTDPAVTGPDIFAKLVPMAAHEASSLYSEEKAKLLREMMAKIEDKNEVLELSVGLGQGGGGRQHFPGLWGPQGCLCWERNEMSIPNRFPNAAFPPGVVGLVCKAGVMSVGGGGAFCSTVSSSALGMFCETRPDLVVGVRGHNLLSAETSDGVVRLALAAPLTWSELDQHPAPTWPVAPHSQFMDSMQLDPETVDNLDAYSHIPPQLMEKCAALSVRPDTVRNLVQSMQVLSGVFTDVEASLKDIRDLLEEDELLEQKFQEAVGQAGAISITSKAELAEVRREWAKYMEVHEKASFTNSELHRAMNLHVGNLRLLSGPLDQVRAALPTPALSPEDKAVLQNLKRILAKVQEMRDQRVSLEQQLRELIQKDDITASLVTTDHSEMKKLFEEQLKKYDQLKVYLEQNLAAQDRVLCALTEANVQYAAVRRVLSDLDQKWNSTLQTLVASYEAYEDLMKKSQEGRDFYADLESKVAALLERTQSTCQAREAARQQLLDRELKKKPPPRPTAPKPLLPRREESEAVEAGDPPEELRSLPPDMVAGPRLPDTFLGSATPLHFPPSPFPSSTGPGPHYLSGPLPPGTYSGPTQLIQPRAPGPHAMPVAPGPALYPAPAYTPELGLVPRSSPQHGVVSSPYVGVGPAPPVAGLPSAPPPQFSGPELAMAVRPATTTVDSIQAPIPSHTAPRPNPTPAPPPPCFPVPPPQPLPTPYTYPAGAKQPIPAQHHFSSGIPAGFPAPRIGPQPQPHPQPHPSQAFGPQPPQQPLPLQHPHLFPPQAPGLLPPQSPYPYAPQPGVLGQPPPPLHTQLYPGPAQDPLPAHSGALPFPSPGPPQPPHPPLAYGPAPSTRPMGPQAAPLTIRGPSSAGQSTPSPHLVPSPAPSPGPGPVPPRPPAAEPPPCLRRGAAAADLLSSSPESQHGGTQSPGGGQPLLQPTKVDAAEGRRPQALRLIERDPYEHPERLRQLQQELEAFRGQLGDVGALDTVWRELQDAQEHDARGRSIAIARCYSLKNRHQDVMPYDSNRVVLRSGKDDYINASCVEGLSPYCPPLVATQAPLPGTAADFWLMVHEQKVSVIVMLVSEAEMEKQKVARYFPTERGQPMVHGALSLALSSVRSTETHVERVLSLQFRDQSLKRSLVHLHFPTWPELGLPDSPSNLLRFIQEVHAHYLHQRPLHTPIIVHCSSGVGRTGAFALLYAAVQEVEAGNGIPELPQLVRRMRQQRKHMLQEKLHLRFCYEAVVRHVEQVLQRHGVPPPCKPLASASISQKNHLPQDSQDLVLGGDVPISSIQATIAKLSIRPPGGLESPVASLPGPAEPPGLPPASLPESTPIPSSSPPPLSSPLPEAPQPKEEPPVPEAPSSGPPSSSLELLASLTPEAFSLDSSLRGKQRMSKHNFLQAHNGQGLRATRPSDDPLSLLDPLWTLNKT

SEQ ID NO: 881513 - protein, 1671 aa, Homo sapiens
MGSGQEAAVPVTWTEIFSGKSVAHEDIKYEQACILYNLGALHSMLGAMDKRVSEEGMKVSCTHFQCAAGAFAYLREHFPQAYSVDMSRQILTLNVNLMLGQAQECLLEKSMLDNRKSFLVARISAQVVDYYKEACRALENPDTASLLGRIQKDWKKLVQMKIYYFAAVAHLHMGKQAEEQQKFGERVAYFQSALDKLNEAIKLAKGQPDTVQDALRFTMDVIGGKYNSAKKDNDFIYHEAVPALDTLQPVKGAPLVKPLPVNPTDPAVTGPDIFAKLVPMAAHEASSLYSEEKAKLLREMMAKIEDKNEVLELSVGLGQGGGGRQHFPGLWGPQGCLCWERNEMSIPNRFPNAAFPPGVVGLVCKAGVMSVGGGGAFCSTVSSSALGMFCETRPDLVVGVRGHNLLSAETSDGVVRLALAAPLTWSELDQHPAPTWPVAPHSQFMDSMQLDPETVDNLDAYSHIPPQLMEKCAALSVRPDTVRNLVQSMQVLSGVFTDVEASLKDIRDLLEEDELLEQKFQEAVGQAGAISITSKAELAEVRREWAKYMEVHEKASFTNSELHRAMNLHVGNLRLLSGPLDQEDKAVLQNLKRILAKVQEMRDQRVSLEQQLRELIQKDDITASLVTTDHSEMKKLFEEQLKKYDQLKVYLEQNLAAQDRVLCALTEANVQYAAVRRVLSDLDQKWNSTLQTLVASYEAYEDLMKKSQEGRDFYADLESKVAALLERTQSTCQAREAARQQLLDRELKKKPPPRPTAPKPLLPRREESEAVEAGDPPEELRSLPPDMVAGPRLPDTFLGSATPLHFPPSPFPSSTGPGPHYLSGPLPPGTYSGPTQLIQPRAPGPHAMPVAPGPALYPAPAYTPELGLVPRSSPQHGVVSSPYVGVGPAPPVAGLPSAPPPQFSGPELAMAVRPATTTVDSIQAPIPSHTAPRPNPTPAPPPPCFPVPPPQPLPTPYTYPAGAKQPIPAQHHFSSGIPAGFPAPRIGPQPQPHPQPHPSQAFGPQPPQQPLPLQHPHLFPPQAPGLLPPQSPYPYAPQPGVLGQPPPPLHTQLYPGPAQDPLPAHSGALPFPSPGPPQPPHPPLAYGPAPSTRPMGPQAAPLTIRGPSSAGQSTPSPHLVPSPAPSPGPGPVPPRPPAAEPPPCLRRGAAAADLLSSSPESQHGGTQSPGGGQPLLQPTKVDAAEGRRPQALRLIERDPYEHPERLRQLQQELEAFRGQLGDVGALDTVWRELQDAQEHDARGRSIAIARCYSLKNRHQDVMPYDSNRVVLRSGKDDYINASCVEGLSPYCPPLVATQAPLPGTAADFWLMVHEQKVSVIVMLVSEAEMEKQKVARYFPTERGQPMVHGALSLALSSVRSTETHVERVLSLQFRDQSLKRSLVHLHFPTWPELGLPDSPSNLLRFIQEVHAHYLHQRPLHTPIIVHCSSGVGRTGAFALLYAAVQEVEAGNGIPELPQLVRRMRQQRKHMLQEKLHLRFCYEAVVRHVEQVLQRHGVPPPCKPLASASISQKNHLPQDSQDLVLGGDVPISSIQATIAKLSIRPPGGLESPVASLPGPAEPPGLPPASLPESTPIPSSSPPPLSSPLPEAPQPKEEPPVPEAPSSGPPSSSLELLASLTPEAFSLDSSLRGKQRMSKHNFLQAHNGQGLRATRPSDDPLSLLDPLWTLNKT

SEQ ID NO: 881514 - protein, 1745 aa, Homo sapiens
MGSGQEAAVPVTWTEIFSGKSVAHEDIKYEQACILYNLGALHSMLGAMDKRVSEEGMKVSCTHFQCAAGAFAYLREHFPQAYSVDMSRQILTLNVNLMLGQAQECLLEKSMLDNRKSFLVARISAQVVDYYKEACRALENPDTASLLGRIQKDWKKLVQMKIYYFAAVAHLHMGKQAEEQQKFGERVAYFQSALDKLNEAIKLAKGQPDTVQDALRFTMDVIGGKYNSAKKDNDFIYHEAVPALDTLQPVKGAPLVKPLPVNPTDPAVTGPDIFAKLVPMAAHEASSLYSEEKAKLLREMMAKIEDKNEVLELSVGLGQGGGGRQHFPGLWGPQGCLCWERNEMSIPNRFPNAAFPPGVVGLVCKAGVMSVGGGGAFCSTVSSSALGMFCETRPDLVVGVRGHNLLSAETSDGVVRLALAAPLTWSELDQHPAPTWPVAPHSQFMDSMQLDPETVDNLDAYSHIPPQLMEKCAALSVRPDTVRNLVQSMQVLSGVFTDVEASLKDIRDLLEEDELLEQKFQEAVGQAGAISITSKAELAEVRREWAKYMEVHEKASFTNSELHRAMNLHVGNLRLLSGPLDQVRAALPTPALSPEDKAVLQNLKRILAKVQEMRDQRVSLEQQLRELIQKDDITASLVTTDHSEMKVGWVSRVEGLWLRAPPLGVEALSVRPWPPPLPQKLFEEQLKKYDQLKVYLEQNLAAQDRVLCALTEANVQYAAVRRVLSDLDQKSVPSPLLFSRSHLEPSPMVHLELALLPTRWNSTLQTLVASYEAYEDLMKKSQEGRDFYADLESKVAALLERTQSTCQAREAARQQLLDRELKKKPPPRPTAPKPLLPRREESEAVEAGDPPEELRSLPPDMVAGPRLPDTFLGSATPLHFPPSPFPSSTGPGPHYLSGPLPPGTYSGPTQLIQPRAPGPHAMPVAPGPALYPAPAYTPELGLVPRSSPQHGVVSSPYVGVGPAPPVAGLPSAPPPQFSGPELAMAVRPATTTVDSIQAPIPSHTAPRPNPTPAPPPPCFPVPPPQPLPTPYTYPAGAKQPIPAQHHFSSGIPAGFPAPRIGPQPQPHPQPHPSQAFGPQPPQQPLPLQHPHLFPPQAPGLLPPQSPYPYAPQPGVLGQPPPPLHTQLYPGPAQDPLPAHSGALPFPSPGPPQPPHPPLAYGPAPSTRPMGPQAAPLTIRGPSSAGQSTPSPHLVPSPAPSPGPGPVPPRPPAAEPPPCLRRGAAAADLLSSSPESQHGGTQSPGGGQPLLQPTKVDAAEGRRPQALRLIERDPYEHPERLRQLQQELEAFRGQLGDVGALDTVWRELQDAQEHDARGRSIAIARCYSLKNRHQDVMPYDSNRVVLRSGKDDYINASCVEGLSPYCPPLVATQAPLPGTAADFWLMVHEQKVSVIVMLVSEAEMEKQKVARYFPTERGQPMVHGALSLALSSVRSTETHVERVLSLQFRDQSLKRSLVHLHFPTWPELGLPDSPSNLLRFIQEVHAHYLHQRPLHTPIIVHCSSGVGRTGAFALLYAAVQEVEAGNGIPELPQLVRRMRQQRKHMLQEKLHLRFCYEAVVRHVEQVLQRHGVPPPCKPLASASISQKNHLPQDSQDLVLGGDVPISSIQATIAKLSIRPPGGLESPVASLPGPAEPPGLPPASLPESTPIPSSSPPPLSSPLPEAPQPKEEPPVPEAPSSGPPSSSLELLASLTPEAFSLDSSLRGKQRMSKHNFLQAHNGQGLRATRPSDDPLSLLDPLWTLNKT

SEQ ID NO: 881515 - protein, 869 aa, Homo sapiens
HKRLGLIHTAVPSTPGPHYLSGPLPPGTYSGPTQLIQPRAPGPHAMPVAPGPALYPAPAYTPELGLVPRSSPQHGVVSSPYVGVGPAPPVAGLPSAPPPQFSGPELAMAVRPATTTVDSIQAPIPSHTAPRPNPTPAPPPPCFPVPPPQPLPTPYTYPAGAKQPIPAQHHFSSGIPAGFPAPRIGPQPQPHPQPHPSQAFGPQPPQQPLPLQHPHLFPPQAPGLLPPQSPYPYAPQPGVLGQPPPPLHTQLYPGPAQDPLPAHSGALPFPSPGPPQPPHPPLAYGPAPSTRPMGPQAAPLTIRGPSSAGQSTPSPHLVPSPAPSPGPGPVPPRPPAAEPPPCLRRGAAAADLLSSSPESQHGGTQSPGGGQPLLQPTKVDAAEGRRPQALRLIERDPYEHPERLRQLQQELEAFRGQLGDVGALDTVWRELQDAQEHDARGRSIAIARCYSLKNRHQDVMPYDSNRVVLRSGKDDYINASCVEGLSPYCPPLVATQAPLPGTAADFWLMVHEQKVSVIVMLVSEAEMEKQKVARYFPTERGQPMVHGALSLALSSVRSTETHVERVLSLQFRDQSLKRSLVHLHFPTWPELGLPDSPSNLLRFIQEVHAHYLHQRPLHTPIIVHCSSGVGRTGAFALLYAAVQEVEAGNGIPELPQLVRRMRQQRKHMLQEKLHLRFCYEAVVRHVEQVLQRHGVPPPCKPLASASISQKNHLPQDSQDLVLGGDVPISSIQATIAKLSIRPPGGLESPVASLPGPAEPPGLPPASLPESTPIPSSSPPPLSSPLPEAPQPKEEPPVPEAPSSGPPSSSLELLASLTPEAFSLDSSLRGKQRMSKHNFLQAHNGQGLRATRPSDDPLSLLDPLWTLNKT

SEQ ID NO: 881516 - protein, 1174 aa, Homo sapiens
MGSGQEAAVPVTWTEIFSGKSVAHEDIKYEQACILYNLGALHSMLGAMDKRVSEEGMKVSCTHFQCAAGAFAYLREHFPQAYSVDMSRQILTLNVNLMLGQAQECLLEKSMLDNRKSFLVARISAQVVDYYKEACRALENPDTASLLGRIQKDWKKLVQMKIYYFAAVAHLHMGKQAEEQQKFGERVAYFQSALDKLNEAIKLAKGQPDTVQDALRFTMDVIGGKYNSAKKDNDFIYHEAVPALDTLQPVKGAPLVKPLPVNPTDPAVTGPDIFAKLVPMAAHEASSLYSEEKAKLLREMMAKIEDKNEVLELSVGLGQGGGGRQHFPGLWGPQGCLCWERNEMSIPNRFPNAAFPPGVVGLVCKAGVMSVGGGGAFCSTVSSSALGMFCETRPDLVVGVRGHNLLSAETSDGVVRLALAAPLTWSELDQHPAPTWPVAPHSQFMDSMQLDPETVDNLDAYSHIPPQLMEKCAALSVRPDTVRNLVQSMQVLSGVFTDVEASLKDIRDLLEEDELLEQKFQEAVGQAGAISITSKAELAEVRREWAKYMEVHEKASFTNSELHRAMNLHVGNLRLLSGPLDQVRAALPTPALSPEDKAVLQNLKRILAKVQEMRDQRVSLEQQLRELIQKDDITASLVTTDHSEMKKLFEEQLKKYDQLKVYLEQNLAAQDRVLCALTEANVQYAAVRRVLSDLDQKWNSTLQTLVASYEAYEDLMKKSQEGRDFYADLESKVAALLERTQSTCQAREAARQQLLDRELKKKPPPRPTAPKPLLPRREESEAVEAGDPPEELRSLPPDMVAGPRLPDTFLGSATPLHFPPSPFPSSTGPGPHYLSGPLPPGTYSGPTQLIQPRAPGPHAMPVAPGPALYPAPAYTPELGLVPRSSPQHGVVSSPYVGVGPAPPVAGLPSAPPPQFSGPELAMAVRPATTTVDSIQAPIPSHTAPRPNPTPAPPPPCFPVPPPQPLPTPYTYPAGAKQPIPAQHHFSSGIPAGFPAPRIGPQPQPHPQPHPSQAFGPQPPQQPLPLQHPHLFPPQAPGLLPPQSPYPYAPQPGVLGQPPPPLHTQLYPGPAQDPLPAHSGALPFPSPGPPQPPHPPLAYGPAPSTRPMGPQAAPLTIRGPSSAGQSTPSPHLVPSPAPSPGPGPVPPRPPAAEPPPCCSPPRWMQLRVVGRRPCG

SEQ ID NO: 881517 - protein, 147 aa, Homo sapiens
MGKQAEEQQKFGERVSYSEEGTGDQWQPSVRCRCAPAPYTPGGGLLCLTLAITLLEAWCLKCCPICAALVPRGLRRWGRLPTEQVAGAGCGATLLLLAGVVPGCLLSCLSSDGQAGPGGRQEEKGSKQRRTEQAFLPPSTGCILPER

SEQ ID NO: 881518 - protein, 88 aa, Homo sapiens
MAAHEASSLYSEEKAKLLREMMAKIEDKNEVLDQFMDSMQLDPETVDNLDAYSHIPPQLMEKCAALSVRPDTVRNLVQSMQVHREKLE

SEQ ID NO: 881519 - protein, 49 aa, Homo sapiens
PNAPVQLHLRFCYEAVVRHVEQVLQRHGVPPPCKPLASPGLQPPSQSTG

SEQ ID NO: 881520 - protein, 1636 aa, Homo sapiens
WGCTPARGGMKVSCTHFQCAAGAFAYLREHFPQAYSVDMSRQILTLNVNLMLGQAQECLLEKSMLDNRKSFLVARISAQVVDYYKEACRALENPDTASLLGRIQKDWKKLVQMKIYYFAAVAHLHMGKQAEEQQKFGERVAYFQSALDKLNEAIKLAKGQPDTVQDALRFTMDVIGGKYNSAKKDNDFIYHEAVPALDTLQPVKGAPLVKPLPVNPTDPAVTGPDIFAKLVPMAAHEASSLYSEEKAKLLREMMAKIEDKNEVLELSVGLGQGGGGRQHFPGLWGPQGCLCWERNEMSIPNRFPNAAFPPGVVGLVCKAGVMSVGGGGAFCSTVSSSALGMFCETRPDLVVGVRGHNLLSAETSDGVVRLALAAPLTWSELDQHPAPTWPVAPHSQFMDSMQLDPETVDNLDAYSHIPPQLMEKCAALSVRPDTVRNLVQSMQVLSGVFTDVEASLKDIRDLLEEDELLEQKFQEAVGQAGAISITSKAELAEVRREWAKYMEVHEKASFTNSELHRAMNLHVGNLRLLSGPLDQVRAALPTPALSPEDKAVLQNLKRILAKVQEMRDQRVSLEQQLRELIQKDDITASLVTTDHSEMKKLFEEQLKKYDQLKVYLEQNLAAQDRVLCALTEANVQYAAVRRVLSDLDQKWNSTLQTLVASYEAYEDLMKKSQEGRDFYADLESKVAALLERTQSTCQAREAARQQLLDRELKKKPPPRPTAPKPLLPRREESEAVEAGDPPEELRSLPPDMVAGPRLPDTFLGSATPLHFPPSPFPSSTGPGPHYLSGPLPPGTYSGPTQLIQPRAPGPHAMPVAPGPALYPAPAYTPELGLVPRSSPQHGVVSSPYVGVGPAPPVAGLPSAPPPQFSGPELAMAVRPATTTVDSIQAPIPSHTAPRPNPTPAPPPPCFPVPPPQPLPTPYTYPAGAKQPIPAQHHFSSGIPAGFPAPRIGPQPQPHPQPHPSQAFGPQPPQQPLPLQHPHLFPPQAPGLLPPQSPYPYAPQPGVLGQPPPPLHTQLYPGPAQDPLPAHSGALPFPSPGPPQPPHPPLAYGPAPSTRPMGPQAAPLTIRGPSSAGQSTPSPHLVPSPAPSPGPGPVPPRPPAAEPPPCLRRGAAAADLLSSSPESQHGGTQSPGGGQPLLQPTKVDAAEGRRPQALRLIERDPYEHPERLRQLQQELEAFRGQLGDVGALDTVWRELQDAQEHDARGRSIAIARCYSLKNRHQDVMPYDSNRVVLRSGKDDYINASCVEGLSPYCPPLVATQAPLPGTAADFWLMVHEQKVSVIVMLVSEAEMEKQKVARYFPTERGQPMVHGALSLALSSVRSTETHVERVLSLQFRDQSLKRSLVHLHFPTWPELGLPDSPSNLLRFIQEVHAHYLHQRPLHTPIIVHCSSGVGRTGAFALLYAAVQEVEAGNGIPELPQLVRRMRQQRKHMLQEKLHLRFCYEAVVRHVEQVLQRHGVPPPCKPLASASISQKNHLPQDSQDLVLGGDVPISSIQATIAKLSIRPPGGLESPVASLPGPAEPPGLPPASLPESTPIPSSSPPPLSSPLPEAPQPKEEPPVPEAPSSGPPSSSLELLASLTPEAFSLDSSLRGKQRMSKHNFLQAHNGQGLRATRPSDDPLSLLDPLWTLNKT

SEQ ID NO: 881521 - protein, 1683 aa, Homo sapiens
WLSQQLQQLREWPGGRRVPAAMEAVPRMPMIWLDLKEAGDFHFQPAVKKFVLKNYGENPEAYNEELKKLELLRQNAVRVPRDFEGCSVLRKYLGQLHYLQSRVPMGSGQEAAVPVTWTEIFSGKSVAHEDIKYEQACILYNLGALHSMLGAMDKRVSEEGMKVSCTHFQCAAGAFAYLREHFPQAYSVDMSRQILTLNVNLMLGQAQECLLEKSMLDNRKSFLVARISAQVVDYYKEACRALENPDTASLLGRIQKDWKKLVQMKIYYFAAVAHLHMGKQAEEQQKFGERVAYFQSALDKLNEAIKLAKGQPDTVQDALRFTMDVIGGKYNSAKKDNDFIYHEAVPALDTLQPVKGAPLVKPLPVNPTDPAVTGPDIFAKLVPMAAHEASSLYSEEKAKLLREMMAKIEDKNEVLDQFMDSMQLDPETVDNLDAYSHIPPQLMEKCAALSVRPDTVRNLVQSMQVLSGVFTDVEASLKDIRDLLEEDELLEQKFQEAVGQAGAISITSKAELAEVRREWAKYMEVHEKASFTNSELHRAMNLHVGNLRLLSGPLDQVRAALPTPALSPEDKAVLQNLKRILAKVQEMRDQRVSLEQQLRELIQKDDITASLVTTDHSEMKKLFEEQLKKYDQLKVYLEQNLAAQDRVLCALTEANVQYAAVRRVLSDLDQKWNSTLQTLVASYEAYEDLMKKSQEGRDFYADLESKVAALLERTQSTCQAREAARQQLLDRELKKKPPPRPTAPKPLLPRREESEAVEAGDPPEELRSLPPDMVAGPRLPDTFLGSATPLHFPPSPFPSSTGPGPHYLSGPLPPGTYSGPTQLIQPRAPGPHAMPVAPGPALYPAPAYTPELGLVPRSSPQHGVVSSPYVGVGPAPPVAGLPSAPPPQFSGPELAMAVRPATTTVDSIQAPIPSHTAPRPNPTPAPPPPCFPVPPPQPLPTPYTYPAGAKQPIPAQHHFSSGIPAGFPAPRIGPQPQPHPQPHPSQAFGPQPPQQPLPLQHPHLFPPQAPGLLPPQSPYPYAPQPGVLGQPPPPLHTQLYPGPAQDPLPAHSGALPFPSPGPPQPPHPPLAYGPAPSTRPMGPQAAPLTIRGPSSAGQSTPSPHLVPSPAPSPGPGPVPPRPPAAEPPPCLRRGAAAADLLSSSPESQHGGTQSPGGGQPLLQPTKVDAAEGRRPQALRLIERDPYEHPERLRQLQQELEAFRGQLGDVGALDTVWRELQDAQEHDARGRSIAIARCYSLKNRHQDVMPYDSNRVVLRSGKDDYINASCVEGLSPYCPPLVATQAPLPGTAADFWLMVHEQKVSVIVMLVSEAEMEKQKVARYFPTERGQPMVHGALSLALSSVRSTETHVERVLSLQFRDQSLKRSLVHLHFPTWPELGLPDSPSNLLRFIQEVHAHYLHQRPLHTPIIVHCSSGVGRTGAFALLYAAVQEVEAGNGIPELPQLVRRMRQQRKHMLQEKLHLRFCYEAVVRHVEQVLQRHGVPPPCKPLASASISQKVRKVPWKLLGEPQPWDSLSSLTLSSQNHLPQDSQDLVLGGDVPISSIQATIAKLSIRPPGGLESPVASLPGPAEPPGLPPASLPESTPIPSSSPPPLSSPLPEAPQPKEEPPVPEAPSSGPPSSSLELLASLTPEAFSLDSSLRGKQRMSKHNFLQAHNGQGLRATRPSDDPLSLLDPLWTLNKT

SEQ ID NO: 881522 - protein, 856 aa, Homo sapiens
MLGAMDKRVSEEGMKVSCTHFQCAAGAFAYLREHFPQAYSVDMSRQILTLNVNLMLGQAQECLLEKSMLDNRKSFLVARISAQVVDYYKEACRALENPDTASLLGRIQKDWKKLVQMKIYYFAAVAHPGFPVPPPQPLPTPYTYPAGAKQPIPAQHHFSSGIPAGFPAPRIGPQPQPHPQPHPSQAFGPQPPQQPLPLQHPHLFPPQAPGLLPPQSPYPYAPQPGVLGQPPPPLHTQLYPGPAQDPLPAHSGALPFPSPGPPQPPHPPLAYGPAPSTRPMGPQAAPLTIRGPSSAGQSTPSPHLVPSPAPSPGPGPVPPRPPAAEPPPCLRRGAAAADLLSSSPESQHGGTQSPGGGQPLLQPTKVDAAEGRRPQALRLIERDPYEHPERLRQLQQELEAFRGQLGDVGALDTVWRELQDAQEHDARGRSIAIARCYSLKNRHQDVMPYDSNRVVLRSGKDDYINASCVEGLSPYCPPLVATQAPLPGTAADFWLMVHEQKVSVIVMLVSEAEMEKQKVARYFPTERGQPMVHGALSLALSSVRSTETHVERVLSLQFRDQSLKRSLVHLHFPTWPELGLPDSPSNLLRFIQEVHAHYLHQRPLHTPIIVHCSSGVGRTGAFALLYAAVQEVEAGNGIPELPQLVRRMRQQRKHMLQEKLHLRFCYEAVVRHVEQVLQRHGVPPPCKPLASASISQKNHLPQDSQDLVLGGDVPISSIQATIAKLSIRPPGGLESPVASLPGPAEPPGLPPASLPESTPIPSSSPPPLSSPLPEAPQPKEEPPVPEAPSSGPPSSSLELLASLTPEAFSLDSSLRGKQRMSKHNFLQAHNGQGLRATRPSDDPLSLLDPLWTLNKT

SEQ ID NO: 881523 - protein, 823 aa, Homo sapiens
DAWVDPRVRPAPVCRQGLGLVPRSSPQHGVVSSPYVGVGPAPPVAGLPSAPPPQFSGPELAMAVRPATTTVDSIQAPIPSHTAPRPNPTPAPPPPCFPVPPPQPLPTPYTYPAGAKQPIPAQHHFSSGIPAGFPAPRIGPQPQPHPQPHPSQAFGPQPPQQPLPLQHPHLFPPQAPGLLPPQSPYPYAPQPGVLGQPPPPLHTQLYPGPAQDPLPAHSGALPFPSPGPPQPPHPPLAYGPAPSTRPMGPQAAPLTIRGPSSAGQSTPSPHLVPSPAPSPGPGPVPPRPPAAEPPPCLRRGAAAADLLSSSPESQHGGTQSPGGGQPLLQPTKVDAAEGRRPQALRLIERDPYEHPERLRQLQQELEAFRGQLGDVGALDTVWRELQDAQEHDARGRSIAIARCYSLKNRHQDVMPYDSNRVVLRSGKDDYINASCVEGLSPYCPPLVATQAPLPGTAADFWLMVHEQKVSVIVMLVSEAEMEKQKVARYFPTERGQPMVHGALSLALSSVRSTETHVERVLSLQFRDQSLKRSLVHLHFPTWPELGLPDSPSNLLRFIQEVHAHYLHQRPLHTPIIVHCSSGVGRTGAFALLYAAVQEVEAGNGIPELPQLVRRMRQQRKHMLQEKLHLRFCYEAVVRHVEQVLQRHGVPPPCKPLASASISQKNHLPQDSQDLVLGGDVPISSIQATIAKLSIRPPGGLESPVASLPGPAEPPGLPPASLPESTPIPSSSPPPLSSPLPEAPQPKEEPPVPEAPSSGPPSSSLELLASLTPEAFSLDSSLRGKQRMSKHNFLQAHNGQGLRATRPSDDPLSLLDPLWTLNKT

SEQ ID NO: 881524 - protein, 70 aa, Homo sapiens
CLGLSVPQQKVARYFPTERGQPMVHGALSLALSSVRSTETHVERVLSLQFRDQSLKRSLVHLHFPTWPEL

SEQ ID NO: 881525 - protein, 114 aa, Homo sapiens
ICFPLHYPIRISKRVCVMMITGSWMISSINSCAHTVYALCIPYCKSRAINHFFCDVPAMLTLACTDTWVYESTVFLSSTIFLVLPFTGIACSYGRVLLAVYRMHSAEGRKKAYS

SEQ ID NO: 881526 - protein, 1624 aa, Homo sapiens
RGPGGGGLTAGPGGGAARDRGAAGARSQRSQLSPSPARARAAMPLAFCGSENHSAAYRVDQGVLNNGCFVDALNVVPHVFLLFITFPILFIGWGSQSSKVHIHHSTWLHFPGHNLRWILTFMLLFVLVCEIAEGILSDGVTESHHLHLYMPAGMAFMAAVTSVVYYHNIETSNFPKLLIALLVYWTLAFITKTIKFVKFLDHAIGFSQLRFCLTGLLVILYGMLLLVEVNVIRVRRYIFFKTPREVKPPEDLQDLGVRFLQPFVNLLSKGTYWWMNAFIKTAHKKPIDLRAIGKLPIAMRALTNYQRLCEAFDAQVRKDIQGTQGARAIWQALSHAFGRRLVLSSTFRILADLLGFAGPLCIFGIVDHLGKENDVFQPKTQFLGVYFVSSQEFLANAYVLAVLLFLALLLQRTFLQASYYVAIETGINLRGAIQTKIYNKIMHLSTSNLSMGEMTAGQICNLVAIDTNQLMWFFFLCPNLWAMPVQIIVGVILLYYILGVSALIGAAVIILLAPVQYFVATKLSQAQRSTLEYSNERLKQTNEMLRGIKLLKLYAWENIFRTRVETTRRKEMTSLRAFAIYTSISIFMNTAIPIAAVLITFVGHVSFFKEADFSPSVAFASLSLFHILVTPLFLLSSVVRSTVKALVSVQKLSEFLSSAEIREEQCAPHEPTPQGPASKYQAVPLRVVNRKRPAREDCRGLTGPLQSLVPSADGDADNCCVQIMGGYFTWTPDGIPTLSNITIRIPRGQLTMIVGQVGCGKSSLLLAALGEMQKVSGAVFWSSLPDSEIGEDPSPERETATDLDIRKRGPVAYASQKPWLLNATVEENIIFESPFNKQRYKMVIEACSLQPDIDILPHGDQTQIGERGINLSGGQRQRISVARALYQHANVVFLDDPFSALDIHLSDHLMQAGILELLRDDKRTVVLVTHKLQYLPHADWIIAMKDGTIQREGTLKDFQRSECQLFEHWKTLMNRQDQELEKETVTERKATEPPQGLSRAMSSRDGLLQDEEEEEEEAAESEEDDNLSSMLHQRAEIPWRACAKYLSSAGILLLSLLVFSQLLKHMVLVAIDYWLAKWTDSALTLTPAARNCSLSQECTLDQTVYAMVFTVLCSLGIVLCLVTSVTVEWTGLKVAKRLHRSLLNRIILAPMRFFETTPLGSILNRFSSDCNTIDQHIPSTLECLSRSTLLCVSALAVISYVTPVFLVALLPLAIVCYFIQKYFRVASRDLQQLDDTTQLPLLSHFAETVEGLTTIRAFRYEARFQQKLLEYTDSNNIASLFLTAANRWLEVRMEYIGACVVLIAAVTSISNSLHRELSAGLVGLGLTYALMVSNYLNWMVRNLADMELQLGAVKRIHGLLKTEAESYEGLLGAPSLIPKNWPDQGKIQIQNLSVRYDSSLKPVLKHVNALISPGQKIGICGRTGSGKSSFSLAFFRMVDTFEGHIIIDGIDIAKLPLHTLRSRLSIILQDPVLFSGTIRFNLDPERKCSDSTLWEALEIAQLKLVVKALPGGLDAIITEGGENFSQGQRQLFCLARAFVRKTSIFIMDEATASIDMATENILQKVVMTAFADRTVVTIAHRVHTILSADLVIVLKRGAILEFDKPEKLLSRKDSVFASFVRADK

SEQ ID NO: 881527 - protein, 1037 aa, Homo sapiens
MNTAIPIAAVLITFVGHVSFFKEADFSPSVAFASLSLFHILVTPLFLLSSVVRSTVKALVSVQKLSEFLSSAEIREEQCAPHEPTPQGPASKYQAVPLRVVNRKRPAREDCRGLTGPLQSLVPSADGDADNCCVQIMGGYFTWTPDGIPTLSNITIRIPRGQLTMIVGQVGCGKSSLLLAALGEMQKVSGAVFWSSLPDSEIGEDPSPERETATDLDIRKRGPVAYASQKPWLLNATVEENIIFESPFNKQRYKMVIEACSLQPDIDILPHGDQTQIGERGINLSGGQRQRISVARALYQHANVVFLDDPFSALDIHLSDHLMQAGILELLRDDKRTVVLVTHKLQYLPHADWIIAMKDGTIQREGTLKDFQRSECQLFEHWKTLMNRQDQELEKETVTERKATEPPQGLSRAMSSRDGLLQDEEEEEEEAAESEEDDNLSSMLHQRAEIPWRACAKYLSSAGILLLSLLVFSQLLKHMVLVAIDYWLAKWTDSALTLTPAARNCSLSQECTLDQTVYAMVFTVLCSLGIVLCLVTSVTVEWTGLKVAKRLHRSLLNRIILAPMRFFETTPLGSILNRFSSDCNTIDQHIPSTLECLSRSTLLCVSALAVISYVTPVFLVALLPLAIVCYFIQKYFRVASRDLQQLDDTTQLPLLSHFAETVEGLTTIRAFRYEARFQQKLLEYTDSNNIASLFLTAANRWLEVRMEYIGACVVLIAAVTSISNSLHRELSAGLVGLGLTYALMVSNYLNWMVRNLADMELQLGAVKRIHGLLKTEAESYEGLLGAPSLIPKNWPDQGKIQIQNLSVRYDSSLKPVLKHVNALISPGQKIGICGRTGSGKSSFSLAFFRMVDTFEGHIIIDGIDIAKLPLHTLRSRLSIILQDPVLFSGTIRFNLDPERKCSDSTLWEALEIAQLKLVVKALPGGLDAIITEGGENFSQGQRQLFCLARAFVRKTSIFIMDEATASIDMATENILQKVVMTAFADRTVVTIAHRVHTILSADLVIVLKRGAILEFDKPEKLLSRKDSVFASFVRADK

SEQ ID NO: 881528 - protein, 783 aa, Homo sapiens
MVIEACSLQPDIDILPHGDQTQIGERGINLSGGQRQRISVARALYQHANVVFLDDPFSALDIHLSDHLMQAGILELLRDDKRTVVLVTHKLQYLPHADWIIAMKDGTIQREGTLKDFQRSECQLFEHWKTLMNRQDQELEKETVTERKATEPPQGLSRAMSSRDGLLQDEEEEEEEAAESEEDDNLSSMLHQRAEIPWRACAKYLSSAGILLLSLLVFSQLLKHMVLVAIDYWLAKWTDSALTLTPAARNCSLSQECTLDQTVYAMVFTVLCSLGIVLCLVTSVTVEWTGLKVAKRLHRSLLNRIILAPMRFFETTPLGSILNRFSSDCNTIDQHIPSTLECLSRSTLLCVSALAVISYVTPVFLVALLPLAIVCYFIQKYFRVASRDLQQLDDTTQLPLLSHFAETVEGLTTIRAFRYEARFQQKLLEYTDSNNIASLFLTAANRWLEVRMEYIGACVVLIAAVTSISNSLHRELSAGLVGLGLTYALMVSNYLNWMVRNLADMELQLGAVKRIHGLLKTEAESYEGLLGAPSLIPKNWPDQGKIQIQNLSVRYDSSLKPVLKHVNALISPGQKIGICGRTGSGKSSFSLAFFRMVDTFEGHIIIDGIDIAKLPLHTLRSRLSIILQDPVLFSGTIRFNLDPERKCSDSTLWEALEIAQLKLVVKALPGGLDAIITEGGENFSQGQRQLFCLARAFVRKTSIFIMDEATASIDMATENILQKVVMTAFADRTVVTIAHRVHTILSADLVIVLKRGAILEFDKPEKLLSRKDSVFASFVRADK

SEQ ID NO: 881529 - protein, 402 aa, Homo sapiens
MLLARADLQQLDDTTQLPLLSHFAETVEGLTTIRAFRYEARFQQKLLEYTDSNNIASLFLTAANRWLEVRMEYIGACVVLIAAVTSISNSLHRELSAGLVGLGLTYALMVSNYLNWMVRNLADMELQLGAVKRIHGLLKTEAESYEGLLGAPSLIPKNWPDQGKIQIQNLSVRYDSSLKPVLKHVNALISPGQKIGICGRTGSGKSSFSLAFFRMVDTFEGHIIIDGIDIAKLPLHTLRSRLSIILQDPVLFSGTIRFNLDPERKCSDSTLWEALEIAQLKLVVKALPGGLDAIITEGGENFSQGQRQLFCLARAFVRKTSIFIMDEATASIDMATENILQKVVMTAFADRTVVTIAHRVHTILSADLVIVLKRGAILEFDKPEKLLSRKDSVFASFVRADK

SEQ ID NO: 881530 - protein, 1208 aa, Homo sapiens
MNTAIPIAAVLITFVGHVSFFKEADFSPSVAFASLSLFHILVTPLFLLSSVVRSTVKALVSVQKLSEFLSSAEIREEQCAPHEPTPQGPASKYQAVPLRVVNRKRPAREDCRGLTGPLQSLVPSADGDADNCCVQIMGGYFTWTPDGIPTLSNITIRIPRGQLTMIVGQVGCGKSSLLLAALGEMQKVSGAVFWSSLPDSEIGEDPSPERETATDLDIRKRGPVAYASQKPWLLNATVEENIIFESPFNKQRYKMVIEACSLQPDIDILPHGDQTQIGERGINLSGGQRQRISVARALYQHANVVFLDDPFSALDIHLSDHLMQAGILELLRDDKRTVVLVTHKLQYLPHADWIIAMKDGTIQREGTLKDFQRSECQLFEHWKTLMNRQDQELEKETVTERKATEPPQGLSRAMSSRDGLLQDEEEEEEEAAESEEDDNLSSMLHQRAEIPWRACAKYLSSAGILLLSLLVFSQLLKHMVLVAIDYWLAKWTDSALTLTPAARNCSLSQECTLDQTVYAMVFTVLCSLGIVLCLVTSVTVEWTGLKVAKRLHRSLLNRIILAPMRFFETTPLGSILNRFSSDCNTIDQHIPSTLECLSRSTLLCVSALAVISYVTPVFLVALLPLAIVCYFIQKYFRVASRDLQQLDDTTQLPLLSHFAETVEGLTTIRAFRYEARFQQKLLEYTDSNNIASLFLTAANRWLEVRMEYIGACVVLIAAVTSISNSLHRELSAGLVGLGLTYALMVSGSGLGQRRGQTPALPEHLRHWRHETLPGLTPISFASDARGTVRAGRLTSRPQGPGPRQVEVGEPHELTLPVPPGRAALSRQWMAAKGIWGPGPSPALRRAILVAEDRTKLTMECAPLACSPQVSNYLNWMVRNLADMELQLGAVKRIHGLLKTEAESYEGLLGEAQGEGWGRVQGGVCLGWGPQGSLGMGWHFRILAVAHAWWLSPARPPAPSLIPKNWPDQGKIQIQNLSVRYDSSLKPVLKHVNALISPGQKIGICGRTGSGKSSFSLAFFRMVDTFEGHIIIDGIDIAKLPLHTLRSRLSIILQDPVLFSGTIRFNLDPERKCSDSTLWEALEIAQLKLVVKALPGGLDAIITEGGENFSQGQRQLFCLARAFVRKTSIFIMDEATASIDMATENILQKVVMTAFADRTVVTIAHRVHTILSADLVIVLKRGAILEFDKPEKLLSRKDSVFASFVRADK

SEQ ID NO: 881531 - protein, 1011 aa, Homo sapiens
MNTAIPIAAVLITFVGHVSFFKEADFSPSVAFASLSLFHILVTPLFLLSSVVRSTVKALVSVQKLSEFLSSAEIREEQCAPHEPTPQGPASKYQAVPLRVVNRKRPAREDCRGLTGPLQSLVPSADGDADNCCVQIMGGYFTWTPDGIPTLSNITIRIPRGQLTMIVGQVGCGKSSLLLAALGEMQKVSGAVFWSSLPDSEIGEDPSPERETATDLDIRKRGPVAYASQKPWLLNATVEENIIFESPFNKQRYKMVIEACSLQPDIDILPHGDQTQIGERGINLSGGQRQRISVARALYQHANVVFLDDPFSALDIHLSDHLMQAGILELLRDDKRTVVLVTHKLQYLPHADWIIAMKDGTIQREGTLKDFQRSECQLFEHWKTLMNRQDQELEKETVTERKATEPPQGLSRAMSSRDGLLQDEEEEEEEAAESEEDDNLSSMLHQRAEIPWRACAKYLSSAGILLLSLLVFSQLLKHMVLVAIDYWLAKWTDSALTLTPAARNCSLSQECTLDQTVYAMVFTVLCSLGIVLCLVTSVTVEWTGLKVAKRLHRSLLNRIILAPMRFFETTPLGSILNRFSSDCNTIDQHIPSTLECLSRSTLLCVSALAVISYVTPVFLVALLPLAIVCYFIQKYFRVASRDLQQLDDTTQLPLLSHFAETVEGLTTIRAFRYEARFQQKLLEYTDSNNIASLFLTAANRWLEVRMEYIGACVVLIAAVTSISNSLHRELSAGLVGLGLTYALMVSNYLNWMVRNLADMELQLGAVKRIHGLLKTEAESYEGLLVSTIADPKELARPREDPDPEPERALRQLPEAGAEARQCPHLPWTEDRDAAAAPAVGSPPSLLPSSAWWTRSKDPVLFSGTIRFNLDPERKCSDSTLWEALEIAQLKLVVKALPGGLDAIITEGGENFSQGQRQLFCLARAFVRKTSIFIMDEATASIDMATENILQKVVMTAFADRTVVTIAHRVHTILSADLVIVLKRGAILEFDKPEKLLSRKDSVFASFVRADK

SEQ ID NO: 881532 - protein, 966 aa, Homo sapiens
MNTAIPIAAVLITFVGHVSFFKEADFSPSVAFASLSLFHILVTPLFLLSSVVRSTVKALVSVQKLSEFLSSAEIREEQCAPHEPTPQGPASKYQAVPLRVVNRKRPAREDCRGLTGPLQSLVPSADGDADNCCVQIMGGYFTWTPDGIPTLSNITIRIPRGQLTMIVGQVGCGKSSLLLAALGEMQKVSGAVFWSSLPDSEIGEDPSPERETATDLDIRKRGPVAYASQKPWLLNATVEENIIFESPFNKQRYKMVIEACSLQPDIDILPHGDQTQIGERGINLSGGQRQRISVARALYQHANVVFLDDPFSALDIHLSDHLMQAGILELLRDDKRTVVLVTHKLQYLPHADWIIAMKDGTIQREGTLKDFQRSECQLFEHWKTLMNRQDQELEKETVTERKATEPPQGLSRAMSSRDGLLQDEEEEEEEAAESEEDDNLSSMLHQRAEIPWRACAKYLSSAGILLLSLLVFSQLLKHMVLVAIDYWLAKWTDSALTLTPAARNCSLSQECTLDQTVYAMVFTVLCSLGIVLCLVTSVTVEWTGLKVAKRLHRSLLNRIILAPMRFFETTPLGSILNRFSSDCNTIDQHIPSTLECLSRSTLLCVSALAVISYVTPVFLVALLPLAIVCYFIQKYFRVASRDLQQLDDTTQLPLLSHFAETVEGLTTIRAFRYEARFQQKLLEYTDSNNIASLFLTAANRWLEVRMEYIGACVVLIAAVTSISNSLHRELSAGLVGLGLTYALMVSNYLNWMVRNLADMELQLGAVKRIHGLLKTEAESYEGLLGAPSLIPKNWPDQGKIQIQNLSVRYDSSLKPVLKHVNALISPGQKIGICGRTGSGKSSFSLAFFRMVDTFEDAIITEGGENFSQGQRQLFCLARAFVRKTSIFIMDEATASIDMATENILQKVVMTAFADRTVVTIAHRVHTILSADLVIVLKRGAILEFDKPEKLLSRKDSVFASFVRADK

SEQ ID NO: 881533 - protein, 1075 aa, Homo sapiens
MNTAIPIAAVLITFVGHVSFFKEADFSPSVAFASLSLFHILVTPLFLLSSVVRSTVKALVSVQKLSEFLSSAEIREEQCAPHEPTPQGPASKYQAVPLRVVNRKRPAREDCRGLTGPLQSLVPSADGDADNCCVQIMGGYFTWTPDGIPTLSNITIRIPRGQLTMIVGQVGCGKSSLLLAALGEMQKVSGAVFWSSLPDSEIGEDPSPERETATDLDIRKRGPVAYASQKPWLLNATVEENIIFESPFNKQRYKMVIEACSLQPDIDILPHGDQTQIGERGINLSGGQRQRISVARALYQHANVVFLDDPFSALDIHLSDHLMQAGILELLRDDKRTVVLVTHKLQYLPHADWIIAMKDGTIQREGTLKDFQRSECQLFEHWKTLMNRQDQELEKETVTERKATEPPQGLSRAMSSRDGLLQDEEEEEEEAAESEEDDNLSSMLHQRAEIPWRACAKYLSSAGILLLSLLVFSQLLKHMVLVAIDYWLAKWTDSALTLTPAARNCSLSQECTLDQTVYAMVFTVLCSLGIVLCLVTSVTVEWTGLKVAKRLHRSLLNRIILAPMRFFETTPLGSILNRFSSDCNTIDQHIPSTLECLSRSTLLCVSALAVISYVTPVFLVALLPLAIVCYFIQKYFRVASRDLQQLDDTTQLPLLSHFAETVEGLTTIRAFRYEARFQQKLLEYTDSNNIASLFLTAANRWLEVRMEYIGACVVLIAAVTSISNSLHRELSAGLVGLGLTYALMVSNYLNWMVRNLADMELQLGAVKRIHGLLKTEAESYEGLLGAPSLIPKNWPDQGKIQIQNLSVRYDSSLKPVLKHVNALISPGQKIGICGRTGSGKSSFSLAFFRMVDTFEVSCKAGTPRVPTATRCGLSPGTWSDMTGGPAVTAFPCTLTGTHAGGTSSLMALTSPNCRCTPCAHASPSSCRTPSSSAAPSDAIITEGGENFSQGQRQLFCLARAFVRKTSIFIMDEATASIDMATENILQKVVMTAFADRTVVTIAPQEGHPQLWPPPRVVFPPSCPAPSCPAQHRVHTILSADLVIVLKRGAILEFDKPEKLLSRKDSVFASFVRADK

SEQ ID NO: 881534 - protein, 600 aa, Homo sapiens
RGPGGGGLTAGPGGGAARDRGAAGARSQRSQLSPSPARARAAMPLAFCGSENHSAAYRVDQGVLNNGCFVDALNVVPHVFLLFITFPILFIGWGSQSSKVHIHHSTWLHFPGHNLRWILTFMLLFVLVCEIAEGILSDGVTESHHLHLYMPAGMAFMAAVTSVVYYHNIETSNFPKLLIALLVYWTLAFITKTIKFVKFLDHAIGFSQLRFCLTGLLVILYGMLLLVEVNVIRVRRYIFFKTPREVKPPEDLQDLGVRFLQPFVNLLSKGTYWWMNAFIKTAHKKPIDLRAIGKLPIAMRALTNYQRLCEAFDAQVRKDIQGTQGARAIWQALSHAFGRRLVLSSTFRILADLLGFAGPLCIFGIVDHLGKENDVFQPKTQFLGVYFVSSQEFLANAYVLAVLLFLALLLQRTFLQASYYVAIETGINLRGAIQTKIYNKIMHLSTSNLSMGEMTAGQICNLVAIDTNQLMWFFFLCPNLWAMPVQIIVGVILLYYILGVSALIGAAVIILLAPVQYFVATKLSQAQRSTLEYSNERLKQTNEMLRGIKLLKLYAWENIFRTRVETTRRKEMTSLRAFAIYTSISIFMNTAIPIAAVLIC

SEQ ID NO: 881535 - protein, 176 aa, Homo sapiens
CGRTGSGKSSFSLAFFRMVDTFEGHIIIDGIDIAKLPLHTLRSRLSIILQAQGEGWGRVQGGVCLGWGPQGSLGMGWHFRILAVAHAWWLSPARPPAPSLIPKNWPDQGKIQIQNLSVRYDSSLKPVLKHVNALISPGQKIGICGRQLFFFLYWYPRRMPCNCSLVMIVVMNPFMS

SEQ ID NO: 881536 - protein, 904 aa, Homo sapiens
MKIMGGYFTWTPDGIPTLSNITIRIPRGQLTMIVGQVGCGKSSLLLAALGEMQKVSGAVFWSSLPDSEIGEDPSPERETATDLDIRKRGPVAYASQKPWLLNATVEENIIFESPFNKQRYKMVIEACSLQPDIDILPHGDQTQIGERGINLSGGQRQRISVARALYQHANVVFLDDPFSALDIHLSDHLMQAGILELLRDDKRTVVLVTHKLQYLPHADWIIAMKDGTIQREGTLKDFQRSECQLFEHWKTLMNRQDQELEKETVTERKATEPPQGLSRAMSSRDGLLQDEEEEEEEAAESEEDDNLSSMLHQRAEIPWRACAKYLSSAGILLLSLLVFSQLLKHMVLVAIDYWLAKWTDSALTLTPAARNCSLSQECTLDQTVYAMVFTVLCSLGIVLCLVTSVTVEWTGLKVAKRLHRSLLNRIILAPMRFFETTPLGSILNRFSSDCNTIDQHIPSTLECLSRSTLLCVSALAVISYVTPVFLVALLPLAIVCYFIQKYFRVASRDLQQLDDTTQLPLLSHFAETVEGLTTIRAFRYEARFQQKLLEYTDSNNIASLFLTAANRWLEVRMEYIGACVVLIAAVTSISNSLHRELSAGLVGLGLTYALMVSNYLNWMVRNLADMELQLGAVKRIHGLLKTEAESYEGLLGAPSLIPKNWPDQGKIQIQNLSVRYDSSLKPVLKHVNALISPGQKIGICGRTGSGKSSFSLAFFRMVDTFEGHIIIDGIDIAKLPLHTLRSRLSIILQDPVLFSGTIRFNLDPERKCSDSTLWEALEIAQLKLVVKALPGGLDAIITEGGENFSQGQRQLFCLARAFVRKTSIFIMDEATASIDMATENILQKVVMTAFADRTVVTIAHRVHTILSADLVIVLKRGAILEFDKPEKLLSRKDSVFASFVRADK

SEQ ID NO: 881537 - protein, 1084 aa, Homo sapiens
MNTAIPIAAVLITFVGHVSFFKEADFSPSVAFASLSLFHILVTPLFLLSSVVRSTVKALVSVQKLSEFLSSAEIREEQCAPHEPTPQGPASKYQAVPLRVVNRKRPAREDCRGLTGPLQSLVPSADGDADNCCVQIMGGYFTWTPDGIPTLSNITIRIPRGQLTMIVGQVGCGKSSLLLAALGEMQKVSGAVFWSSLPDSEIGEDPSPERETATDLDIRKRGPVAYASQKPWLLNATVEENIIFESPFNKQRYKMVIEACSLQPDIDILPHGDQTQIGERGINLSGGQRQRISVARALYQHANVVFLDDPFSALDIHLSDHLMQAGILELLRDDKRTVVLVTHKLQYLPHADWIIAMKDGTIQREGTLKDFQRSECQLFEHWKTLMNRQDQELEKETVTERKATEPPQGLSRAMSSRDGLLQDEEEEEEEAAESEEDDNLSSMLHQRAEIPWRACAKYLSSAGILLLSLLVFSQLLKHMVLVAIDYWLAKWTDSALTLTPAARNCSLSQECTLDQTVYAMVFTVLCSLGIVLCLVTSVTVEWTGLKVAKRLHRSLLNRIILAPMRFFETTPLGSILNRFSSDCNTIDQHIPSTLECLSRSTLLCVSALAVISYVTPVFLVALLPLAIVCYFIQKYFRVASRDLQQLDDTTQLPLLSHFAETVEGLTTIRAFRYEARFQQKLLEYTDSNNIASLFLTAANRWLEVRMEYIGACVVLIAAVTSISNSLHRELSAGLVGLGLTYALMVSNYLNWMVRNLADMELQLGAVKRIHGLLKTEAESYEGLLGEAQGEGWGRVQGGVCLGWGPQGSLGMGWHFRILAVAHAWWLSPARPPAPSLIPKNWPDQGKIQIQNLSVRYDSSLKPVLKHVNALISPGQKIGICGRTGSGKSSFSLAFFRMVDTFEGHIIIDGIDIAKLPLHTLRSRLSIILQDPVLFSGTIRFNLDPERKCSDSTLWEALEIAQLKLVVKALPGGLDAIITEGGENFSQGQRQLFCLARAFVRKTSIFIMDEATASIDMATENILQKVVMTAFADRTVVTIAHRVHTILSADLVIVLKRGAILEFDKPEKLLSRKDSVFASFVRADK

SEQ ID NO: 881538 - protein, 188 aa, Homo sapiens
MVDTFEGHIIIDGIDIAKLPLHTLRSRLSIILQDPVLFSGTIRFNLDPERKCSDSTLWEALEIAQLKLVVKALPGGLDAIITEGGENFSQGQRQLFCLARAFVRKTSIFIMDEATASIDMATENILQKVVMTAFADRTVVTIAHRVHTILSADLVIVLKRGAILEFDKPEKLLSRKDSVFASFVRADK

SEQ ID NO: 881539 - protein, 1011 aa, Homo sapiens
MNTAIPIAAVLITFVGHVSFFKEADFSPSVAFASLSLFHILVTPLFLLSSVVRSTVKALVSVQKLSEFLSSAEIREEQCAPHEPTPQGPASKYQAVPLRVVNRKRPAREDCRGLTGPLQSLVPSADGDADNCCVQIMGGYFTWTPDGIPTLSNITIRIPRGQLTMIVGQVGCGKSSLLLAALGEMQKVSGAVFWSSLPDSEIGEDPSPERETATDLDIRKRGPVAYASQKPWLLNATVEENIIFESPFNKQRYKMVIEACSLQPDIDILPHGDQTQIGERGINLSGGQRQRISVARALYQHANVVFLDDPFSALDIHLSDHLMQAGILELLRDDKRTVVLVTHKLQYLPHADWIIAMKDGTIQREGTLKDFQRSECQLFEHWKTLMNRQDQELEKETVTERKATEPPQGLSRAMSSRDGLLQDEEEEEEEAAESEEDDNLSSMLHQRAEIPWRACAKYLSSAGILLLSLLVFSQLLKHMVLVAIDYWLAKWTDSALTLTPAARNCSLSQECTLDQTVYAMVFTVLCSLGIVLCLVTSVTVEWTGLKVAKRLHRSLLNRIILAPMRFFETTPLGSILNRFSSDCNTIDQHIPSTLECLSRSTLLCVSALAVISYVTPVFLVALLPLAIVCYFIQKYFRVASRDLQQLDDTTQLPLLSHFAETVEGLTTIRAFRYEARFQQKLLEYTDSNNIASLFLTAANRWLEVRMEYIGACVVLIAAVTSISNSLHRELSAGLVGLGLTYALMVSNYLNWMVRNLADMELQLGAVKRIHGLLKTEAESYEGLLGAPSLIPKNWPDQGKIQIQNLSVRYDSSLKPVLKHVNALISPGQKIGICGRTGSGKSSFSLAFFRMVDTFEVSCKAGTPRVTHSHQMRPQPWHVVRHDRRPSSHRLPLHPHWDPCRDAIITEGGENFSQGQRQLFCLARAFVRKTSIFIMDEATASIDMATENILQKVVMTAFADRTVVTIAHRVHTILSADLVIVLKRGAILEFDKPEKLLSRKDSVFASFVRADK

SEQ ID NO: 881540 - protein, 234 aa, Homo sapiens
MAPKQDPKPKFQEGERVLCFHGPLLYEAKCVKVAIKDKQVKYFIHYSGWNKNWDEWVPESRVLKYVDTNLQKQRELQKANQEQYAEGKMRGAAPGKKTSGLQQKNVEVKTKKNKQKTPGNGDGGSTSETPQPPRKKRARVDPTVENEETFMNRVEVKVKIPEELKPWLVDDWDLITRQKQLFYLPAKKNVDSILEDYANYKKSRGNTDNKEYGVIEVVQGSDAKSWQTSEAPCP

SEQ ID NO: 881541 - protein, 108 aa, Homo sapiens
MAPKQDPKPKFQEGERVLCFHGPLLYEAKCVKVAIKDKQVKYFIHYSGWNKNWDEWVPESRVLKYVDTNLQKQRELQKANQEQYAEGKMRGAAPGKKTSGLQQKNVEV

SEQ ID NO: 881542 - protein, 155 aa, Homo sapiens
MAPKQDPKPKFQEGERVLCFHGPLLYEAKCVKVAIKDKQVKYFIHYSGWNKNWDEWVPESRVLKYVDTNLQKQRELQKANQEQYAEGKMRGAAPGKKTSGLQQKNVEVKTKKNKQKTPGNGDGGSTSETPQPPRKKRARVDPTVENEASEQVELS

SEQ ID NO: 881543 - protein, 221 aa, Homo sapiens
MAPKQDPKPKFQEGERVLCFHGPLLYEAKCVKVAIKDKQVKYFIHYSGWNKNWDEWVPESRVLKYVDTNLQKQRELQKANQEQYAEGKMRGAAPGKKTSGLQQKNVEVKTKKNKQKTPGNGDGGSTSETPQPPRKKRARVDPTVENEETFMNRVEVKVKIPEELKPWLVDDWDLITRQKQLFYLPAKKNVDSILEDYANYKKSRGNTDNKEYAVNERCGQG

SEQ ID NO: 881544 - protein, 221 aa, Homo sapiens; identical to SEQ ID NO: 881543

SEQ ID NO: 881545 - protein, 221 aa, Homo sapiens; identical to SEQ ID NO: 881543

SEQ ID NO: 881546 - protein, 221 aa, Homo sapiens; identical to SEQ ID NO: 881543

SEQ ID NO: 881547 - protein, 221 aa, Homo sapiens; identical to SEQ ID NO: 881543

SEQ ID NO: 881548 - protein, 133 aa, Homo sapiens
MRGAAPGKKTSGLQQKNVEVKTKKNKQKTPGNGDGGSTSETPQPPRKKRARVDPTVENEETFMNRVEVKVKIPEELKPWLVDDWDLITRQKQLFYLPAKKNVDSILEDYANYKKSRGNTDNKEYAVNERCGQG

SEQ ID NO: 881549 - protein, 260 aa, Homo sapiens
MAPKQDPKPKFQEGERVLCFHGPLLYEAKCVKVAIKDKQVKYFIHYSGWNKKSAVRPRRSEKSLKTHEDIVALFPVPEGAPSVHHPLLTSSWDEWVPESRVLKYVDTNLQKQRELQKANQEQYAEGKMRGAAPGKKTSGLQQKNVEVKTKKNKQKTPGNGDGGSTSETPQPPRKKRARVDPTVENEETFMNRVEVKVKIPEELKPWLVDDWDLITRQKQLFYLPAKKNVDSILEDYANYKKSRGNTDNKEYAVNERCGQG

SEQ ID NO: 881550 - protein, 206 aa, Homo sapiens
MAPKQDPKPKFQEGERVLCFHGPLLYEAKCVKVAIKDKQVKYFIHYSGWNKNWDEWVPESRVLKYVDTNLQKQRELQKANQEQYAEGKMRGAAPGKKTSGLQQKNVEVKTKKNKQKTPGNGDGGSTSETPQPPRKKRARVDPTVENEETFMNRVEVKVKIPEELKPWLVDDWDLITRQKQDYANYKKSRGNTDNKEYAVNERCGQG

SEQ ID NO: 881551 - protein, 221 aa, Homo sapiens; identical to SEQ ID NO: 881543

SEQ ID NO: 881552 - protein, 221 aa, Homo sapiens; identical to SEQ ID NO: 881543

SEQ ID NO: 881553 - protein, 164 aa, Homo sapiens
MAPKQDPKPKFQEGERVLCFHGPLLYEAKCVKVAIKDKQVKYFIHYSGWNKNWDEWVPESRVLKYVDTNLQKQRELQKANQEQYAEGKMRGAAPGKKTSGLQQKNVEVKTKKNKQKTPGNGDGGIPSESCVRGTLTHLCLDLRKHIFVLSLSLVQTMCFEDVSV

SEQ ID NO: 881554 - protein, 234 aa, Homo sapiens; identical to SEQ ID NO: 881540

SEQ ID NO: 881555 - protein, 220 aa, Homo sapiens
MAPKQDPKPKFQEGERVLCFHGPLLYEAKCVKVAIKDKQVKYFIHYSGWNKNWDEWVPESRVLKYVDTNLQKQRELQKANQEQYAEGKMRGAAPGKKTSGLQQKNVEVKTKKNKQKTPGNGDGGSTSETPQPPRKKRARVDPTVENEETFMNRVEVKVKIPEELKPWLVDDWDLITRQKQLFYLPAKKNVDSILEDYANYKKSRGNTDNKEFDRLMQACW

SEQ ID NO: 881556 - protein, 195 aa, Homo sapiens
MAPKQDPKPKFQEGERVLCFHGPLLYEAKCVKVAIKDKQVKYFIHYSGWNKNWDEWVPESRVLKYVDTNLQKQRELQKANQEQYAEGKMRGAAPGKKTSGLQQKNVEVKTKKNKQKTPGNGDGGSTSETPQPPRKKRARVDPTVENEETFMNRVEVKVKIPEELKPWLVDDWDLITRQKQLSYLPARLDIRYQLD

SEQ ID NO: 881557 - protein, 134 aa, Homo sapiens
MAPKQDPKPKFQEGERVLCFHGPLLYEAKCVKVAIKDKQVKYFIHYSGWNKNWDEWVPESRVLKYVDTNLQKQRELQKANQEQYAEGKMRGAAPGKKTSGLQQKNVEVRKRTNRKHLEKEMVEIPVRPLILLWR

SEQ ID NO: 881558 - protein, 134 aa, Homo sapiens
  misc_feature (118)..(119): Xaa can be any naturally occurring amino acid
MAPKQDPKPKFQEGERVLCFHGPLLYEAKCVKVAIKDKQVKYFIHYSGWNKNWDEWVPESRVLKYVDTNLQKQRELQKANQEQYAEGKMRGAAPGKKTSGLQQKNVEVRKRTNRKHLXXHTRPRPRTPLHPPPN

SEQ ID NO: 881559 - protein, 107 aa, Homo sapiens
MRGAAPGKKTSGLQQKNVEVKTKKNKQKTPGNGDGGSTSETPQPPRKKRARVDPTVENEETFMNRVEVKVKIPEELKPWLVDDWDLITRQKQLSYLPARLDIRYQLD

SEQ ID NO: 881560 - protein, 134 aa, Homo sapiens
MAPKQDPKPKFQEGERVLCFHGPLLYEAKCVKVAIKDKQVKYFIHYSGWNKNWDEWVPESRVLKYVDTNLQKQRELQKANQEQYGEGQTCGSGLLGLRSSSPRGSEAGAAWYDTARKRPLEMGQSHALPPWIHP

SEQ ID NO: 881561 - protein, 221 aa, Homo sapiens; identical to SEQ ID NO: 881543

SEQ ID NO: 881562 - protein, 134 aa, Homo sapiens; identical to SEQ ID NO: 881557

SEQ ID NO: 881563 - protein, 221 aa, Homo sapiens; identical to SEQ ID NO: 881543

SEQ ID NO: 881564 - protein, 221 aa, Homo sapiens; identical to SEQ ID NO: 881543

SEQ ID NO: 881565 - protein, 221 aa, Homo sapiens; identical to SEQ ID NO: 881543

SEQ ID NO: 881566 - protein, 221 aa, Homo sapiens; identical to SEQ ID NO: 881543

SEQ ID NO: 881567 - protein, 133 aa, Homo sapiens; identical to SEQ ID NO: 881548

SEQ ID NO: 881568 - protein, 133 aa, Homo sapiens; identical to SEQ ID NO: 881548

SEQ ID NO: 881569 - protein, 178 aa, Homo sapiens
MGLFFMKQSWDEWVPESRVLKYVDTNLQKQRELQKANQEQYAEGKMRGAAPGKKTSGLQQKNVEVKTKKNKQKTPGNGDGGSTSETPQPPRKKRARVDPTVENEETFMNRVEVKVKIPEELKPWLVDDWDLITRQKQLFYLPAKKNVDSILEDYANYKKSRGNTDNKEYAVNERCGQG

SEQ ID NO: 881570 - protein, 221 aa, Homo sapiens; identical to SEQ ID NO: 881543

SEQ ID NO: 881571 - protein, 120 aa, Homo sapiens
MAPKQDPKPKFQEGERVLCFHGPLLYEAKCVKVAIKDKQVKYFIHYSGWNKNWDEWVPESRVLKYVDTNLQKQRELQKANQEQYAEGKMRGAAPGKKTSGLQQKNVEVTNWSNVGLYTSG

SEQ ID NO: 881572 - protein, 221 aa, Homo sapiens; identical to SEQ ID NO: 881543

SEQ ID NO: 881573 - protein, 190 aa, Homo sapiens
MAPKQDPKPKFQEGERVLCFHGPLLYEAKCVKVAIKDKQVKYFIHYSGWNKNWDEWVPESRVLKYVDTNLQKQRELQKANQEQYAEGKMRGAAPGKKTSGLQQKNVEVKTKKNKQKTPGNGDGGSTSETPQPPRKKRARVDPTVENEETFMNRVEVKVKIPEELKPWLVDDWDLITRQKQQLFISCEMWF

SEQ ID NO: 881574 - protein, 155 aa, Homo sapiens; identical to SEQ ID NO: 881542

SEQ ID NO: 881575 - protein, 115 aa, Homo sapiens
MAPKQDPKPKFQEGERVLCFHGPLLYEAKCVKVAIKDKQVKYFIHYSGWNKNWDEWVPESRVLKYVDTNLQKQRELQKANQEQYAEGKMRGAAPGKKTSGLQQKNVEVKKKKKKK

SEQ ID NO: 881576 - protein, 106 aa, Homo sapiens
MAPKQDPKPKFQEGERVLCFHGPLLYEAKCVKVAIKDKQVKYFIHYSGWNKNWDEWVPESRVLKYVDTNLQKQRELQKANQEQYAEGKMRGAAPGVFCLFFFVFTS

SEQ ID NO: 881577 - protein, 623 aa, Homo sapiens
MRVALGMLWLLALAWPPQARGFCPSQCSCSLHIMGDGSKARTVVCNDPDMTLPPASIPPDTSRLRLERTAIRRVPGEAFRPLGRLEQLWLPYNALSELNALMLRGLRRLRELRLPGNRLAAFPWAALRDAPKLRLLDLQANRLSAVPAEAARFLENLTFLDLSSNQLMRLPQELIVSWAHLETGIFPPGHHPRRVLGLQDNPWACDCRLYDLVHLLDGWAPNLAFIETELRCASPRSLAGVAFSQLELRKCQGPELHPGVASIRSLLGGTALLRCGATGVPGPEMSWRRANGRPLNGTVHQEVSSDGTSWTLLGLPAVSHLDSGDYICQAKNFLGASETVISLIVTEPPTSTEHSGSPGALWARTGGGGEAAAYNNKLVARHVPQIPKPAVLATGPSVPSTKEELTLEHFQMDALGELSDGRAGPSEARMVRSVKVVGDTYHSVSLVWKAPQAKNTTAFSVLYAVFGQHSMRRVIVQPGKTRVTITGLLPKTKYVACVCVQGLVPRKEQCVIFSTNEVVDAENTQQLINVVVISVAIVIALPLTLLVCCSALQKRCRKCFNKDSTEATVTYVNLERLGYSEDGLEELSRHSVSEADRLLSARSSVDFQAFGVKGGRRINEYFC

SEQ ID NO: 881578 - protein, 110 aa, Homo sapiens [sequence omitted]

SEQ ID NO: 881579 - protein, 71 aa, Homo sapiens
ERRQKEEEAARLALEEATKQAQEQARQKAALEKHFHFYQELHKEASGLQWTQNISRPWVYSYFQFLQIPRP

SEQ ID NO: 881580 - protein, 225 aa, Homo sapiens
MARYEAVVNRHEAPGSRSPGAMDPLSPPLCTLPPGPEPPRFVCYCEGEESGEGDRGGFNLYVTDAAELWSTCFTPDSLAALKARFGLSAAEDITPRFRAACEQQAVALTLQEDRASLTLSGGPSALAFDLSKVPGPEAAPRLRALTLGLAKRVWSLERRLAAAEETAVSPRKSPRPAGPQLFLPDPDPQRGGPGPGVRRRCPGESLINPGFKSKKPAGGVDFDET

SEQ ID NO: 881581 - protein, 225 aa, Homo sapiens; identical to SEQ ID NO: 881580

SEQ ID NO: 881582 - protein, 127 aa, Homo sapiens
MARYEAVVNRHEAPGSRSPGAMDPLSPPLCTLPPGPEPPRFVCYCEGEESGEGDRGGFNLYVTDAAELWSTCFTPDSLAALVGNWAGLGAATPLLAVQIVYGATDIWDSPEGSDTLCPPCSCSPPIG

SEQ ID NO: 881583 - protein, 71 aa, Homo sapiens
TARYEAGFMDPLSPPLCTLPPGPEPPRFVCYCEGEESGEGDRGGFNLYVTDAAELWSTCFTPDSLAALGSL

SEQ ID NO: 881584 - protein, 225 aa, Homo sapiens; identical to SEQ ID NO: 881580

SEQ ID NO: 881585 - protein, 225 aa, Homo sapiens; identical to SEQ ID NO: 881580

SEQ ID NO: 881586 - protein, 127 aa, Homo sapiens; identical to SEQ ID NO: 881582

SEQ ID NO: 881587 - protein, 127 aa, Homo sapiens; identical to SEQ ID NO: 881582

SEQ ID NO: 881588 - protein, 410 aa, Homo sapiens
MVCFRLFPVPGSGLVLVCLVLGAVRSYALELNLTDSENATCLYAKWQMNFTVRYETTNKTYKTVTISDHGTVTYNGSICGDDQNGPKIAVQFGPGFSWIANFTKAASTYSIDSVSFSYNTGDNTTFPDAEDKGILTVDELLAIRIPLNDLFRCNSLSTLEKNDVVQHYWDVLVQAFVQNGTVSTNEFLCDKDKTSTVAPTIHTTVPSPTTTPTPKEKPEAGTYSVNNGNDTCLLATMGLQLNITQDKVASVININPNTTHSTGSCRSHTALLRLNSSTIKYLDFVFAVKNENRFYLKEVNISMYLVNGSVFSIANNNLSYWDAPLGSSYMCNKEQTVSVSGAFQINTFDLRVQPFNVTQGKYSTAQECSLDDDTILIPIIVGAGLSGLIIVIVIAYVIGRRKSYAGYQTL

SEQ ID NO: 881589 - protein, 410 aa, Homo sapiens; identical to SEQ ID NO: 881588

SEQ ID NO: 881590 - protein, 410 aa, Homo sapiens; identical to SEQ ID NO: 881588

SEQ ID NO: 881591 - protein, 410 aa, Homo sapiens
MVCFRLFPVPGSGLVLVCLVLGAVRSYALELNLTDSENATCLYAKWQMNFTVRYETTNKTYKTVTISDHGTVTYNGSICGDDQNGPKIAVQFGPGFSWIANFTKAASTYSIDSVSFSYNTGDNTTFPDAEDKGILTVDELLAIRIPLNDLFRCNSLSTLEKNDVVQHYWDVLVQAFVQNGTVSTNEFLCDKDKTSTVAPTIHTTVPSPTTTPTPKEKPEAGTYSVNNGNDTCLLATMGLQLNITQDKVASVININPNTTHSTGSCRSHTALLRLNSSTIKYLDFVFAVKNENRFYLKEVNISMYLVNGSVFSIANNNLSYWDAPLGSSYMCNKEQTVSVSGAFQINTFDLRVQPFNVTQGKYSTAQDCSADDDNFLVPIAVGAALAGVLILVLLAYFIGLKHHHAGYEQF

SEQ ID NO: 881592 - protein, 410 aa, Homo sapiens; identical to SEQ ID NO: 881588

SEQ ID NO: 881593 - protein, 410 aa, Homo sapiens; identical to SEQ ID NO: 881591

SEQ ID NO: 881594 - protein, 410 aa, Homo sapiens; identical to SEQ ID NO: 881591

SEQ ID NO: 881595 - protein, 410 aa, Homo sapiens; identical to SEQ ID NO: 881588

SEQ ID NO: 881596 - protein, 410 aa, Homo sapiens; identical to SEQ ID NO: 881588

SEQ ID NO: 881597 - protein, 256 aa, Homo sapiens
MRPLSILSRERRCGTLWEFLYSFVQMAQGHKKFLCDKDKTSTVAPTIHTTVPSPTTTPTPKEKPEAGTYSVNNGNDTCLLATMGLQLNITQDKVASVININPNTTHSTGSCRSHTALLRLNSSTIKYLDFVFAVKNENRFYLKEVNISMYLVNGSVFSIANNNLSYWDAPLGSSYMCNKEQTVSVSGAFQINTFDLRVQPFNVTQGKYSTAQECSLDDDTILIPIIVGAGLSGLIIVIVIAYVIGRRKSYAGYQTL

SEQ ID NO: 881598 - protein, 66 aa, Homo sapiens
MADSMRNPALRWVTVTQGKYSQECSLDDDTILIPIIVGAGLSGLIIVIVIAYVIGRRKSYAGYQTL

SEQ ID NO: 881599 - protein, 233 aa, Homo sapiens
  misc_feature (217)..(217): Xaa can be any naturally occurring amino acid
MVCFRLFPVPGSGLVLVCLVLGAVRSYALELNLTDSENATCLYAKWQMNFTVRYETTNKTYKTVTISDHGTVTYNGSICGDDQNGPKIAVQFGPGFSWIANFTKAASTYSIDSVSFSYNTGDNTTFPDAEDKGILTVDELLAIRIPLNDLFRCNSLSTLEKNDVVQHYWDVLVQAFVQNGTVSTNEFLCDKDKTSTVAPTIHTTVPSPTTNNPNSQXGKKPKKAWGNPNSKFK

SEQ ID NO: 881600 - protein, 250 aa, Homo sapiens
MVCFRLFPVPGSGLVLVCLVLGAVRSYALELNLTDSENATCLYAKWQMNFTVRYETTNKTYKTVTISDHGTVTYNGSICGDDQNGPKIAVQFGPGFSWIANFTKAASTYSIDSVSFSYNTGDNTTFPDAEDKGILTVDELLAIRIPLNDLFRCNSLSTLEKNDVVQHYWDVLVQAFVQNGTVSTNEFLCDKDKTSTVAPTIHMWHFYIKKLSRETEGELLAIWKKLLRAPGGQENPKGGVLITPKSPSKA

SEQ ID NO: 881601 - protein, 410 aa, Homo sapiens; identical to SEQ ID NO: 881588

SEQ ID NO: 881602 - protein, 410 aa, Homo sapiens; identical to SEQ ID NO: 881591

SEQ ID NO: 881603 - protein, 410 aa, Homo sapiens; identical to SEQ ID NO: 881591

SEQ ID NO: 881604 - protein, 410 aa, Homo sapiens; identical to SEQ ID NO: 881591

SEQ ID NO: 881605 - protein, 300 aa, Homo sapiens
MVCFRLFPVPGSGLVLVCLVLGAVRSYALELNLTDSENATCLYAKWQMNFTVRYETTNKTYKTVTISDHGTVTYNGSICGDDQNGPKIAVQFGPGFSWIANFTKAASTYSIDSVSFSYNTGDNTTFPDAEDKGILTVDELLAIRIPLNDLFRCNSLSTLEKNDVVQHYWDVLVQAFVQNGTVSTNEFLCDKDKTSTVAPTIHTTVPSPTTTPTPKEKPEAGTYSVNNGNDTCLLATMGLQLNITQDKVASVININPNTTHSTGSCRSHTALLRLNSSTIKYLDFVFAVLKTFMAQDQIPD

SEQ ID NO: 881606 - protein, 406 aa, Homo sapiens
MVCFRLFPVPGSGLVLVCLVLGAVRSYALELNLTDSENATCLYAKWQMNFTVRYETTNKTYKTVTISDHGTVTYNGSICGDDQNGPKIAVQFGPGFSWIANFTKAASTYSIDSVSFSYNTGDNTTFPDAEDKGILTVDELLAIRIPLNDLFRCNSLSTLEKNDVVQHYWDVLVQAFVQNGTVSTNEFLCDKDKTSTVAPTIHTTVPSPTTTPTPKEKPEAGTYSVNNGNDTCLLATMGLQLNITQDKVASVININPNTTHSTGSCRSHTALLRLNSSTIKYLDFVFAVKNENRFYLKEVNISMYLVNGSVFSIANNNLSYWDAPLGSSYMCNKEQTVSVSGAFQINTFDLRVQPFNVTQGKYSTAQDCSADDDNFLVPIAVGAALAGVLILVLLAYFIGLKHHHAG

SEQ ID NO: 881607 - protein, 248 aa, Homo sapiens
MVCFRLFPVPGSGLVLVCLVLGAVRSYALELNLTDSENATCLYAKWQMNFTVRYETTNKTYKTVTISDHGTVTYNGSICGDDQNGPKIAVQFGPGFSWIANFTKAASTYSIDSVSFSYNTGDNTTFPDAEDKGILTVDELLAIRIPLNDLFRCNSLSTLEKNDVVQHYWDVLVQAFVQNGTVSTNEFLCDKDKTSTVAPTIHTTVPSPTTTPTPKEKPEAGTYSVNNGNDTCLLATMGLQLNITQDKV

SEQ ID NO: 881608 - protein, 198 aa, Homo sapiens
MVCFRLFPVPGSGLVLVCLVLGAVRSYALELNLTDSENATCLYAKWQMNFTVRYETTNKTYKTVTISDHGTVTYNGSICGDDQNGPKIAVQFGPGFSWIANFTKAASTYSIDSVSFSYNTGDNTTFPDAEDKGILTVDELLAIRIPLNDLFRCNSLSTLEKNDVVQHYWDVLVQAFVQNGTVSTNGVPCAKTNSQGPQ

SEQ ID NO: 881609 - protein, 337 aa, Homo sapiens
QCALFAHSQTPEFIISEPLANMYSCGNQPTRSEAGRRALPVEAAAGAGADGREPASERASRAEPPAVAMGQNDLMGTAEDFADQFLRVTKQYLPHVARLCLISTFLEDGIRMWFQWSEQRDYIDTTWNCGYLLASSFVFLNLLGQLTGCVLVLSRNFVQYACFGLFGIIALQTIAYSILWDLKFLMRNLALGGGLLLLLAESRSEGKSMFAGVPTMRESSPKQYMQLGGRVLLVLMFMTLLHFDASFFSIVQNIVGTALMILVAIGFKTKLAALTLVVWLFAINVYFNAFWTIPVYKPMHDFLKYDFFQTMSVIGGLLLVVALGPGGVSMDEKKKEW

SEQ ID NO: 881610 - protein, 370 aa, Homo sapiens
QCALFAHSQTPEFIISEPLANMYSCGNQPTRSEAGRRALPVEAAAGAGADGREPASERASRAEPPAVAMGQNDLMGTAEDFADQRLFLTHPAQGRAWQRPGAPRRSHLTLWVSVALQFLRVTKQYLPHVARLCLISTFLEDGIRMWFQWSEQRDYIDTTWNCGYLLASSFVFLNLLGQLTGCVLVLSRNFVQYACFGLFGIIALQTIAYSILWDLKFLMRNLALGGGLLLLLAESRSEGKSMFAGVPTMRESSPKQYMQLGGRVLLVLMFMTLLHFDASFFSIVQNIVGTALMILVAIGFKTKLAALTLVVWLFAINVYFNAFWTIPVYKPMHDFLKYDFFQTMSVIGGLLLVVALGPGGVSMDEKKKEW

SEQ ID NO: 881611 - protein, 337 aa, Homo sapiens; identical to SEQ ID NO: 881609

SEQ ID NO: 881612 - protein, 337 aa, Homo sapiens; identical to SEQ ID NO: 881609

SEQ ID NO: 881613 - protein, 337 aa, Homo sapiens; identical to SEQ ID NO: 881609

SEQ ID NO: 881614 - protein, 389 aa, Homo sapiens
QCALFAHSQTPEFIISEPLANMYSCGNQPTRSEAGRRALPVEAAAGAGADGREPASERASRAEPPAVAMGQNDLMGTAEDFADQFLRVTKQYLPHVARLCLISTFLEDGIRMWFQWSEQRDYIDTTWNCGYLLASSFVFLNLLGQLTGCVLVLSRNFVQYACFGLFGIIALQTIAYSILWDLKFLMRNLALGGGLLLLLAESRSEGKSMFAGVPTMRESSPKQYMQLGGRVLLVLMFMTLLHFDASFFSIVQNIVGTALMILVAIGFKTKLAALTLVVWLFAINVYFNAFWTIPVYKPMHDFLKYDFFQTLRPVAVKDWFGVDSTKLPAFMYPLPFPSLGKGTDVLRTLFAETPENRWLSLLWSHSLASDPSVQASLAAGSLPHAEALE

SEQ ID NO: 881615 - protein, 254 aa, Homo sapiens
QCALFAHSQTPEFIISEPLANMYSCGNQPTRSEAGRRALPVEAAAGAGADGREPASERASRAEPPAVAMGQNDLMGTAEDFADQFLRVTKQYLPHVARLCLISTFLEDGIRMWFQWSEQRDYIDTTWNCGYLLASSFVFLNLLGQLTGCVLVLSRNFVQYACFGLFGIIALQTIAYSILWDLKFLMRNLALGGGLLLLLAESRSEGKSMFAGVPTMRESSPKQYMQLGGRVLLVLMFMTLLHFDASFFSQPSQQ

SEQ ID NO: 881616 - protein, 303 aa, Homo sapiens
QCALFAHSQTPEFIISEPLANMYSCGNQPTRSEAGRRALPVEAAAGAGADGREPASERASRAEPPAVAMGQNDLMGTAEDFADQFLRVTKQYLPHVARLCLISTFLEDGIRMWFQWSEQRDYIDTTWNCGYLLASSFVFLNLLGQLTGCVLVLSRNFVQYACFGLFGIIALQTIAYSILWDLKFLMRNLALGGGLLLLLAESRSEGKSMFAGVPTMRESSPKQYLRPVAVKDWFGVDSTKLPAFMYPLPFPSLGKGTDVLRTLFAETPENRWLSLLWSHSLASDPSVQASLAAGSLPHAEALE

SEQ ID NO: 881617 - protein, 89 aa, Homo sapiens
ARYPVFIDATLRPVAVKDWFGVDSTKLPAFMYPLPFPSLGKGTDVLRTLFAETPENRWLSLLWSHSLASDPSVQASLAAGSLPHAEALE

SEQ ID NO: 881618 - protein, 337 aa, Homo sapiens; identical to SEQ ID NO: 881609

SEQ ID NO: 881619 - protein, 337 aa, Homo sapiens; identical to SEQ ID NO: 881609

SEQ ID NO: 881620 - protein, 337 aa, Homo sapiens; identical to SEQ ID NO: 881609

SEQ ID NO: 881621 - protein, 311 aa, Homo sapiens
QCALFAHSQTPEFIISEPLANMYSCGNQPTRSEAGRRALPVEAAAGAGADGREPASERASRAEPPAVAMGQNDLMGTAEDFADQFLRVTKQYLPHVARLCLISTFLEDGIRMWFQWSEQRDYIDTTWNCGYLLASSFVFLNLLGQLTGCVLVLSRNFVQYACFGLFGIIALQTIAYSILWDLKFLMRNLALGGGLLLLLAESRSEGKSMFAGVPTMRESSPKQYMQLGGRVLLVLMFMTLLHFDASFFSIVQNIVGTALMILVAIGFKTKLAALTLVVWLFAINVYFNAFWTIPVYKPMHDFLKYDFFQTT

SEQ ID NO: 881622 - protein, 355 aa, Homo sapiens
QCALFAHSQTPEFIISEPLANMYSCGNQPTRSEAGRRALPVEAAAGAGADGREPASERASRAEPPAVAMGQNDLMGTAEDFADQFLRVTKQYLPHVARLCLISTFLEDGIRMWFQWSEQRDYIDTTWNCGYLLASSFVFLNLLGQLTGCVLVLSRNFVQYACFGLFGIIALQTIAYSILWDLKFLMRNLALGGGLLLLLAESRSEGKSMFAGVPTMRESSPKQYMQLGGRVLLVLMFMTLLHFDASFFSIVQNIVGTALMILVAIGFKTKLAALTLVVWLFAINVYFNAFWTIPVYKPMPPSCMYCLGELSRMLGTPANMLFPSERDSARSSNSLLHQGQVPHRKLQATRLPGSQ

SEQ ID NO: 881623 - protein, 70 aa, Homo sapiens
LGTRCLSMPPPHQMTLAKSRFLCGQGWLADWWKVGWTKGGHVSSQHQFCTSSASVLVGVPVSPGPGWARA

SEQ ID NO: 881624 - protein, 337 aa, Homo sapiens; identical to SEQ ID NO: 881609

SEQ ID NO: 881625 - protein, 254 aa, Homo sapiens
AWWYSCPVPGSSSKTSSPIKCCRQSSAELLFQWSEQRDYIDTTWNCGYLLASSFVFLNLLGQLTGCVLVLSRNFVQYACFGLFGIIALQTIAYSILWDLKFLMRNLALGGGLLLLLAESRSEGKSMFAGVPTMRESSPKQYMQLGGRVLLVLMFMTLLHFDASFFSIVQNIVGTALMILVAIGFKTKLAALTLVVWLFAINVYFNAFWTIPVYKPMHDFLKYDFFQTMSVIGGLLLVVALGPGGVSMDEKKKEW

SEQ ID NO: 881626 - protein, 337 aa, Homo sapiens; identical to SEQ ID NO: 881609

SEQ ID NO: 881627 - protein, 187 aa, Homo sapiens
NVCNVSGSECPWGVFENFKATEGGVVEVLVDVLGWRLNLALGGGLLLLLAESRSEGKSMFAGVPTMRESSPKQYMQLGGRVLLVLMFMTLLHFDASFFSIVQNIVGTALMILVAIGFKTKLAALTLVVWLFAINVYFNAFWTIPVYKPMHDFLKYDFFQTMSVIGGLLLVVALGPGGVSMDEKKKEW

SEQ ID NO: 881628 - protein, 119 aa, Homo sapiens
AFGKAETQVSLSSFPSDDCLQHFMGLEVFDEIVQNIVGTALMILVAIGFKTKLAALTLVVWLFAINVYFNAFWTIPVYKPMHDFLKYDFFQTMSVIGGLLLVVALGPGGVSMDEKKKEW

SEQ ID NO: 881629 - protein, 337 aa, Homo sapiens; identical to SEQ ID NO: 881609

SEQ ID NO: 881630 - protein, 337 aa, Homo sapiens; identical to SEQ ID NO: 881609

SEQ ID NO: 881631 - protein, 337 aa, Homo sapiens; identical to SEQ ID NO: 881609

SEQ ID NO: 881632 - protein, 303 aa, Homo sapiens; identical to SEQ ID NO: 881616

SEQ ID NO: 881633 - protein, 143 aa, Homo sapiens
MSGRGKTGGKARAKAKSRSSRAGLQFPVGRVHRLLRKGHYAERVGAGAPVYLAAVLEYLTAEILELAGNAARDNKKTRIIPRHLQLAIRNDEELNKLLGGVTIAQGGVLPNIQAVLLPKKTSATVGPKAPSGGKKATQASQEY

SEQ ID NO: 881634 - protein, 143 aa, Homo sapiens; identical to SEQ ID NO: 881633

SEQ ID NO: 881635 - protein, 119 aa, Homo sapiens
MTERKTAKRQGTDRARKPTRGPSERRTDRTKSARTAEPEPRRADGNQHQHTERRSAKEAGRGARTPRPGERRQVTGPQSRPEATRKTKTRGTTDEDKHQAKESGQTQKRRAGRRRERAE

SEQ ID NO: 881636 - protein, 143 aa, Homo sapiens; identical to SEQ ID NO: 881633

SEQ ID NO: 881637 - protein, 246 aa, Homo sapiens
TQRPKGKYASRARLIAEELRALAVKQEDANHPPPPAAGHPQRRGAQQAAGRRDDRPGRRPAQHPGRAAAQEDQRHRGAEGALGRQEGHPGLPGVLRGPAPRPAARPPHATTKALLRATTALMERAEPLQTAGQAGRGSLSPPLPSPAFAARPRVPARPRSRPAPPAASASGPALSAVRPPVGFGPSGCGLGALRGPPWRGRPEPAGGRPAAPHLPASAFVTQPPHPESLRGCGEAAAPSGRLGLPL

SEQ ID NO: 881638 - protein, 131 aa, Homo sapiens
SRICIGRELPSPPLARLRRPASSPRPPPLPSRTACRVGLGPCPVRRPPSGRVRAFRMRLGRSSGTSVARKTRACRGEAGGAAPARLGVRDSAAPSRVAKGLRGGRSTFWKTWPSALTQGRGGQSRPRGRRP

SEQ ID NO: 881639 - protein, 143 aa, Homo sapiens; identical to SEQ ID NO: 881633

SEQ ID NO: 881640 - protein, 143 aa, Homo sapiens; identical to SEQ ID NO: 881633

SEQ ID NO: 881641 - protein, 143 aa, Homo sapiens; identical to SEQ ID NO: 881633

SEQ ID NO: 881642 - protein, 143 aa, Homo sapiens; identical to SEQ ID NO: 881633

SEQ ID NO: 881643 - protein, 143 aa, Homo sapiens; identical to SEQ ID NO: 881633

SEQ ID NO: 881644 - protein, 143 aa, Homo sapiens; identical to SEQ ID NO: 881633

SEQ ID NO: 881645 - protein, 143 aa, Homo sapiens; identical to SEQ ID NO: 881633

SEQ ID NO: 881646 - protein, 143 aa, Homo sapiens; identical to SEQ ID NO: 881633

SEQ ID NO: 881647 - protein, 143 aa, Homo sapiens; identical to SEQ ID NO: 881633

SEQ ID NO: 881648 - protein, 143 aa, Homo sapiens; identical to SEQ ID NO: 881633

SEQ ID NO: 881649 - protein, 143 aa, Homo sapiens; identical to SEQ ID NO: 881633

SEQ ID NO: 881650 - protein, 98 aa, Homo sapiens
QCSCCCGRSEIPTLPPSSFIGLRWGRDEALGNRHIFLPSDCLLGGHLGEGRGLQFGFTAGYVDSKSRFRGSRLAARPVGPPDAAPFPFQQTQLGNPST

SEQ ID NO: 881651 - protein, 137 aa, Homo sapiens
RAARARARARAARRGGGPRSPAKFGGTWRKRLGHAGARGGGGRSPRSCSSLSRRRRGARSPPWPAGSRPRGRSTGLRSITTMLLKMWSSPCRSVTQFTSWRCTRVGTEDIPSKINLKRQLVPGPPQYRNPWMLKSLI

SEQ ID NO: 881652 - protein, 137 aa, Homo sapiens; identical to SEQ ID NO: 881651

SEQ ID NO: 881653 - protein, 350 aa, Homo sapiens
MARWIPTKRQKYGVAIYNYNASQDVELSLQIGDTVHILEMYEGWYRGYTLQNKSKKGIFPETYIHLKEATVEDLGQHETVIPGELPLVQELTSTLREWAVIWRKLYVNNKLTLFRQLQQMTYSLIEWRSQILSGTLPKDELAELKKKVTAKIDHGNRMLGLDLVVRDDNGNILDPDETSTIALFKAHEVASKRIEEKIQEEKSILQNLDLRGQSIFSTIHTYGLYVNFKNFVCNIGEDAELFMALYDPDQSTFISENYLIRWGSNGMPKEIEKLNNLQAVFTDLSSMDLIRPRVSLVCQIVRVGHMELKEGKKHTCGLRRPFGVAVMDITDIIHGKVDDEEKQHFIPFQQ

SEQ ID NO: 881654 - protein, 282 aa, Homo sapiens
MPKRKAAGQGDMRQEPKRRSARLSAMLVPVTPEVKPKRTSSSRKMKTKSDMMEENIDTSAQAVAETKQEAVVEEDYNENAKNGEAKITEAPASEKEIVEVKEENIEDATEKGGEKKEAVAAEVKNEEEDQKEDEEDQNEEKGEAGKEDKDEKGEEDGKEDKNGNEKGEDAKEKEDGKKGEDGKGNGEDGKEKGEDEKEEEDRKETGDGKENEDGKEKGDKKEGKDVKVKEDEKEREDGKEDEGGNEEEAGKEKEDLKEEEEGKEEDEIKEDDGKKEEPQSIV

SEQ ID NO: 881655 - protein, 282 aa, Homo sapiens; identical to SEQ ID NO: 881654

SEQ ID NO: 881656 - protein, 282 aa, Homo sapiens; identical to SEQ ID NO: 881654

SEQ ID NO: 881657 - protein, 272 aa, Homo sapiens
MPKRKPKRRSARLSAMLVPVTPEVKPKRTSSSRKMKTKSDMMEENIDTSAQAVAETKQEAVVEEDYNENAKNGEAKITEAPASEKEIVEVKEENIEDATEKGGEKKEAVAAEVKNEEEDQKEDEEDQNEEKGEAGKEDKDEKGEEDGKEDKNGNEKGEDAKEKEDGKKGEDGKGNGEDGKEKGEDEKEEEDRKETGDGKENEDGKEKGDKKEGKDVKVKEDEKEREDGKEDEGGNEEEAGKEKEDLKEEEEGKEEDEIKEDDGKKEEPQSIV

SEQ ID NO: 881658 - protein, 201 aa, Homo sapiens
MPKRKAAGQGDMRQEPKRRSARLSAMLVPVTPEVKPKRTSSSRKMKTKSDMMEENIDTSAQAVAETKQEAVVEEDYNENAKNGEAKITEAPASEKEIVEVKEENIEDATEKGGEKKEAVAAEVKNEEEDQKEKRRWTQKGERRNNVNLDERLDTETTEKMTHHGRTTRQENRQMDTENCRMAQQQGQIHQEGERLYKSQTH

SEQ ID NO: 881659 - protein, 181 aa, Homo sapiens
MAVLVLSYKSICSLGCDLPQTHSLGNRRALILLGQMGRISPFSCLKDRHDFRIPQEEFDGNQFQKAQAISVLHEMIQQTFNLFSTEDSSAAWEQSLLEKFSTELYQQLNDLEACVIQEVGVEETPLMNEDSILAVRKYFQRITLYLIERKYSPCAWEVVRAEIMRSLSFSTNLQKRLRRKD

SEQ ID NO: 881660 - protein, 1490 aa, Homo sapiens
RTDSSLLLDDYSSKLSPKPKRAKHSLLSGEEKENLPSDYMVPIFSGRQKHVSGITDTEEERIKEAAAYIAQRNLLASEEGITTPKQSTASKQTTASKQSTASKQSTASKQSTASRQSTASRQSVVSKQATSALQQEETSEKKSRKVVIRGKAERLSLRKTLEETETYHAKLNEDHLLHAPEFIIKPRSHTVWEKENVKLHCSIAGWPEPRVTWYKNQVPINVHANPGKYIIESRYGMHTLEINACDFEDTAQYRASAMNVKGELSAYASVVVKRYKGEFDETRFHAGASTMPLSFGVTPYGYASRFEIHFDDKFDVSFGREGETMSLGCRVVITPEIKHFQPEIRWYRNGVPLSPSKWVQTLWSGERATLTFSHLNKEDEGLYTIRVRMGEYYEQYSAYVFVRDADAEIEGAPAAPLDVKCLEANKDYIIISWKQPAVDGGSPILGYFIDKCEVGTDSWSQCNDTPVKFARFPVTGLIEGRSYIFRVRAVNKMGIGFPSRVSEAVAALDPAEKARLKSPLSTLDWTVIVTEEEPSEGIVPGPPTDLSVTEATRSYVVLSWKPPGQRGHEGIMYFVEKCEAGTENWQRVNTELPVKSPRFALFDLAEGKSYCFRVRCSNSAGVGEPSEATEVTVVGDKLDIPKAPGKIIPSRNTDTSVVVSWEESKDAKELVGYYIEANVAGSGKWEPCNNNPVKTHRFTCHGLVTGQSYIFRVRAVNAAGLSEYSQDSEAIEVKAAIAPPSPPCDITCLESFRDSMVLGWKQPDKTGGAEITGYYVNYREVIDGVPGKWREANVKAVREEAYKISNLKENMVYQFQVAAMNMAGLGAPSAVSECFKCEEWTIAVPGPPHSLKCSEVRKDSLVLQWKPPVHSGRTPVTGYFVDLKEKAKEDQWRGLNEAAIKNVYLKVRGLKEGVSYVFRVRAINQAGVGKPSDLAGPVVAETRPGRKEVVVNVDDDGVISLNFECDKMTPKSEFSWSKDYVSTEDSPRLEVESKGNKTKMTFKDLGMDDLGIYSCDVTDTDGIASSYLIDEEELKRLLALSHEHKFPTVPVKSELAVEILEKGQVRFWMQAEKLSGNAKVNYIFNEKEIFEGPKYKMHIDRNTGIIEMFMEKLQDEDEGTYTFQLQDGKATNHSTVVLVGDVFKKLQKEAEFQRQEWIRKQGPHFVEYLSWEVTGECNVLLKCKVANIKKETHIVWYKDEREISVDEKHDFKDGICTLLITEFSKKDAGIYEVILKDDRGKDKSRLKLVDEAFKELMMEVCKKIALSATDLKIQSTAEGIQLYSFVTYYVEDLKVNWSHNGSAIRYSDRVKTGVTGEQIWLQINEPTPNDKGKYVMELFDGKTGHQKTVDLSGQAYDEAYAEFQRLKQAAIAEKNRARVLGGLPDVVTIQEGKALNLTCNVWGDPPPEVSWLKNEKALASDDHCNLKFEAGRTAYFTINGVSTADSGKYGLVVKNKYGSETSDFTVSVFIPEEEARMAALESLKGGKKAK

SEQ ID NO: 881661 - protein, 1368 aa, Homo sapiens
RTDSSLLLDDYSSKLSPKPKRAKHSLLSGEEKENLPSDYMVPIFSGRQKHVSGITDTEEERIKEAAAYIAQRNLLASEEGITTPKQSTASKQTTASKQSTASKQSTASKQSTASRQSTASRQSVVSKQATSALQQEETSEKKSRKVVIRGKAERLSLRKTLEETETYHAKLNEDHLLHAPEFIIKPRSHTVWEKENVKLHCSIAGWPEPRVTWYKNQVPINVHANPGKYIIESRYGMHTLEINACDFEDTAQYRASAMNVKGELSAYASVVVKRYKGEFDETRFHAGASTMPLSFGVTPYGYASRFEIHFDDKFDVSFGREGETMSLGCRVVITPEIKHFQPEIRWYRNGVPLSPSKWVQTLWSGERATLTFSHLNKEDEGLYTIRVRMGEYYEQYSAYVFVRDADAEIEGAPAAPLDVKCLEANKDYIIISWKQPAVDGGSPILGYFIDKCEVGTDSWSQCNDTPVKFARFPVTGLIEGRSYIFRVRAVNKMGIGFPSRVSEAVAALDPAEKARLKSPLSTLDWTVIVTEEEPSEGIVPGPPTDLSVTEATRSYVVLSWKPPGQRGHEGIMYFVEKCEAGTENWQRVNTELPVKSPRFALFDLAEGKSYCFRVRCSNSAGVGEPSEATEVTVVGDKLDIPKAPGKIIPSRNTDTSVVVSWEESKDAKELVGYYIEANVAGSGKWEPCNNNPVKTHRFTCHGLVTGQSYIFRVRAVNAAGLSEYSQDSEAIEVKAAIAPPSPPCDITCLESFRDSMVLGWKQPDKTGGAEITGYYVNYREVIDGVPGKWREANVKAVREEAYKISNLKENMVYQFQVAAMNMAGLGAPSAVSECFKCEEWTIAVPGPPHSLKCSEVRKDSLVLQWKPPVHSGRTPVTGYFVDLKEKAKEDQWRGLNEAAIKNVYLKVRGLKEGVSYVFRVRAINQAGVGKPSDLAGPVVAETRPGRKEVVVNVDDDGVISLNFECDKMTPKSEFSWSKDYVSTEDSPRLEVESKGNKTKMTFKDLGMDDLGIYSCDVTDTDGIASSYLIDEEELKRLLALSHEHKFPTVPVKSELAVEILEKGQVRFWMQAEKLSGNAKVNYIFNEKEIFEGPKYKMHIDRNTGIIEMFMEKLQDEDEGTYTFQLQDGKATNHSTVVLVGDVFKKLQKEAEFQRQEWIRKQGPHFVEYLSWEVTGECNVLLKCKVANIKKETHIVWYKDEREISVDEKHDFKDGICTLLITEFSKKDAGIYEVILKDDRGKDKSRLKLVDEAFKELMMEVCKKIALSATDLKIQSTAEGIQLYSFVTYYVEDLKVNWSHNGSAIRYSDRVKTGVTGEQIWLQINEPTPNDKGKYVMELFDGKTGHQKTVDLSGQGKQIFCRFKFTLDE

SEQ ID NO: 881662 - protein, 258 aa, Homo sapiens
MAEYSYVKSTKLVLKGTKTKSKKKKSKDKKRKREEDEETQLDIVGIWWTVTNFGEISGTIAIEMDKGTYIHALDNGLFTLGAPHKEVDEGPSPPEQFTAVKLSDSRIALKSGYGKYLGINSDGLVVGRSDAIGPREQWEPVFQNGKMALLASNSCFIRCNEAGDIEAKSKTAGEEEMIKIRSCAERETKKKDDIPEEDKGNVKQCEINYVKKFQSFQDHKLKISKEDSKILKKARKDGFLHETLLDRRAKLKADRYCK

SEQ ID NO: 881663 - protein, 205 aa, Homo sapiens
MAEYSYVKSTKLVLKGTKTKSKKKKSKDKKRKREEDEETQLDIVGIWWTVTNFGEISGTIAIEMDKGTYIHALDNGLFTLGAPHKEVDEGPSPPEQFTAVKLSDSRIALKSGYGKYLGINSDGLVVGRSDAIGPREQWEPVFQNGKMALLASNSCFIRCNEAGDIEAKSKTAGEEEMIKSWSRLDPCLKENPEGPFPRKPRKVSG

SEQ ID NO: 881664 - protein, 259 aa, Homo sapiens
KPLALRTLRGVWPHEDARINGSKKKKSKDKKRKREEDEETQLDIVGIWWTVTNFGEISGTIAIEMDKGTYIHALDNGLFTLGAPHKEVDEGPSPPEQFTAVKLSDSRIALKSGYGKYLGINSDGLVVGRSDAIGPREQWEPVFQNGKMALLASNSCFIRCNEAGDIEAKSKTAGEEEMIKIRSCAERETKKKDDIPEEDKGNVKQCEINYVKKFQSFQDHKLKISKEDSKILKKARKDGFLHETLLDRRAKLKADRYCK

SEQ ID NO: 881665 - protein, 190 aa, Homo sapiens
MAEYSYVKSTKLVLKGTKTKSKKKKSKDKKRKREEDEETQLDIVGIWWTVTNFGEISGTIAIEMDKGTYIHALDNGLFTLGAPHKEVDEGPSPPEQFTAVKLSDSRIALKSGYGKYLGINSDGLVVGRSDAIGPREQWEPVFQNGKMALLASNSCFIRCNEAGDIEAKSKTAGEEEMIKALLISVSPSPL

SEQ ID NO: 881666 - protein, 151 aa, Homo sapiens
MAEYSYVKSTKLVLKGTKTKSKKKKSKDKKRKREEDEETQLDIVGIWWTVTNFGEISGTIAIEMDKGTYIHALDNGLFTLGAPHKEVDEGPSPPEQFTAVKLSDSRIALKSGYGKYLGINSDGLVVGRSDAIGPREQWEPVFQNVSAVIVY

SEQ ID NO: 881667 - protein, 190 aa, Homo sapiens; identical to SEQ ID NO: 881665

SEQ ID NO: 881668 - protein, 616 aa, Homo sapiens [sequence omitted]

SEQ ID NO: 881669 - protein, 533 aa, Homo sapiens
MERDTEAQDTAMEQARQHTQDTQRRALLLRAQAGAMRRQQHTLRDPMQRLQNQLRRLQDMERKAKVDVTFGSLTSAALGLEPVVLRDVRTACTLRAQFLQNLLLPQAKRGSLPTPHDDHFGTSYQQWLSSVETLLTNHPPGHVLAALEHLAAEREAEIRSLCSGDGLGDTEISRPQAPDQSDSSQTLPSMVHLIQEGWRTVGVLVSQRSTLLKERQVLTQRLQGLVEEVERRVLGSSERQVLILGLRRCCLWTELKALHDQSQELQDAAGHRQLLLRELQAKQQRILHWRQLVEETQEQVRLLIKGNSASKTRLCRSPGEVLALVQRKVVPTFEAVAPQSRELLRCLEEEVRHLPHILLGTLLRHRPGELKPLPTVLPSIHQLHPASPRGSSFIALSHKLGLPPGKASELLLPAAASLRQDLLLLQDQRSLWCWDLLHMKTSLPPGLPTQELLQIQASQEKQQKENLGQALKRLEKLLKQALERIPELQGIVGDWWEQPGQAALSEELCQGLSLPQWRLRWVQAQGALQKLCS

SEQ ID NO: 881670 - protein, 533 aa, Homo sapiens; identical to SEQ ID NO: 881669

SEQ ID NO: 881671 - protein, 616 aa, Homo sapiens [sequence omitted]

SEQ ID NO: 881672 - protein, 128 aa, Homo sapiens
MASELLLPAAASLRQDLLLLQDQRSLWCWDLLHMKTSLPPGLPTQELLQIQASQEKQQKENLGQALKRLEKLLKQALERIPELQGIVGDWWEQPGQAALSEELCQGLSLPQWRLRWVQAQGALQKLCS

SEQ ID NO: 881673 - protein, 616 aa, Homo sapiens [sequence omitted]

SEQ ID NO: 881674 - protein, 103 aa, Homo sapiens
MERDTEAQDTAMEQARQHTQDTQRRALLLRAQAGAMRRQQHTLRDPMQRLQNQLRRLQDMERKAKVDVTFGSLTSAALGLEPVVLVRVLVMGEGAGSLESGRC

SEQ ID NO: 881675 - protein, 533 aa, Homo sapiens; identical to SEQ ID NO: 881669

SEQ ID NO: 881676 - protein, 515 aa, Homo sapiens
MSWKRNFCGEGIARAEVVCSACRKSSPEANVSSSFSGKTENLRRKAKVDVTFGSLTSAALGLEPVVLRDVRTACTLRAQFLQNLLLPQAKRGSLPTPHDDHFGTSYQQWLSSVETLLTNHPPGHVLAALEHLAAEREAEIRSLCSGDGLGDTEISRPQAPDQSDSSQTLPSMVHLIQEGWRTVGVLVSQRSTLLKERQVLTQRLQGLVEEVERRVLGSSERQVLILGLRRCCLWTELKALHDQSQELQDAAGHRQLLLRELQAKQQRILHWRQLVEETQEQVRLLIKGNSASKTRLCRSPGEVLALVQRKVVPTFEAVAPQSRELLRCLEEEVRHLPHILLGTLLRHRPGELKPLPTVLPSIHQLHPASPRGSSFIALSHKLGLPPGKASELLLPAAASLRQDLLLLQDQRSLWCWDLLHMKTSLPPGLPTQELLQIQASQEKQQKENLGQALKRLEKLLKQALERIPELQGIVGDWWEQPGQAALSEELCQGLSLPQWRLRWVQAQGALQKLCS

SEQ ID NO: 881677 - protein, 452 aa, Homo sapiens
MGVPVAARAPESTLRRLCLGQGADIWAYILQHVHSQRTVKKIRGNLLWYGHQDSPQVRRKLELEAAVTRLRAEIQELDQSLELMERDTEAQDTAMEQARQHTQDTQRRALLLRAQAGAMRRQQHTLRDPMQRLQNQLRRLQDMERKAKVDVTFGSLTSAALGLEPVVLRDVRTACTLRAQFLQNLLLPQAKRGSLPTPHDDHFGTSYQQWLSSVETLLTNHPPGHVLAALEHLAAEREAEIRSLCSGDGLGDTEISRPQAPDQSDSSQTLPSMVHLIQEGWRTVGVLVSQRSTLLKERQVLTQRLQGLVEEVERRVLGSSERQVLILGLRRCCLWTELKALHDQSQELQDAAGHRQLLLRELQAKQQRILHWRQLVEETQEQVRLLIKGNSASKTRLCRSPGEVLALVQRKVVPTFEAVAPQSRELLRCLEEEVRHLPHILLGTLLRHRPGE

SEQ ID NO: 881678 - protein, 2141 aa, Homo sapiens
LECLEFDPEEFYYLLEAAEGHAKEGQGIKTDIPRYIISQLGLNKDPLEEMAHLGNYDSGTAETPETDESVSSSNASLKLRRKPRESDFETIKLISNGAYGAVYFVRHKESRQRFAMKKINKQNLILRNQIQQAFVERDILTFAENPFVVSMYCSFETRRHLCMVMEYVEGGDCATLMKNMGPLPVDMARMYFAETVLALEYLHNYGIVHRDLKPDNLLVTSMGHIKLTDFGLSKVGLMSMTTNLYEGHIEKDAREFLDKQVCGTPEYIAPEVILRQGYGKPVDWWAMGIILYEFLVGCVPFFGDTPEELFGQVISDEINWPEKDEAPPPDAQDLITLLLRQNPLERLGTGGAYEVKQHRFFRSLDWNSLLRQKAEFIPQLESEDDTSYFDTRSEKYHHMETEEEDDTNDEDFNVEIRQFSSCSHRFSKVFSSIDRITQNSAEEKEDSVDKTKSTTLPSTETLSWSSEYSEMQQLSTSNSSDTESNRHKLSSGLLPKLAISTEGEQDEAASCPGDPHEEPGKPALPPEECAQEEPEVTTPASTISSSTLSVGSFSEHLDQINGRSECVDSTDNSSKPSSEPASHMARQRLESTEKKKISGKVTKSLSASALSLMIPGDMFAVSPLGSPMSPHSLSSDPSSSRDSSPSRDSSAASASPHQPIVIHSSGKNYGFTIRAIRVYVGDSDIYTVHHIVWNVEEGSPACQAGLKAGDLITHINGEPVHGLVHTEVIELLLKSGNKVSITTTPFENTSIKTGPARRNSYKSRMVRRSKKSKKKESLERRRSLFKKLAKQPSPLLHTSRSFSCLNRSLSSGESLPGSPTHSLSPRSPTPSYRSTPDFPSGTNSSQSSSPSSSAPNSPAGSGHIRPSTLHGLAPKLGGQRYRSGRRKSAGNIPLSPLARTPSPTPQPTSPQRSPSPLLGHSLGNSKIAQAFPSKMHSPPTIVRHIVRPKSAEPPRSPLLKRVQSEEKLSPSYGSDKKHLCSRKHSLEVTQEEVQREQSQREAPLQSLDENVCDVPPLSRARPVEQGCLKRPVSRKVGRQESVDDLDRDKLKAKVVVKKADGFPEKQESHQKSHGPGSDLENFALFKLEEREKKVYPKAVERSSTFENKASMQEAPPLGSLLKDALHKQASVRASEGAMSDGPVPAEHRQGGGDFRRAPAPGTLQDGLCHSLDRGISGKGEGTEKSSQAKELLRCEKLDSKLANIDYLRKKMSLEDKEDNLCPVLKPKMTAGSHECLPGNPVRPTGGQQEPPPASESRAFVSSTHAAQMSAVSFVPLKALTGRVDSGTEKPGLVAPESPVRKSPSEYKLEGRSVSCLKPIEGTLDIALLSGPQASKTELPSPESAQSPSPSGDVRASVPPVLPSSSGKKNDTTSARELSPSSLKMNKSYLLEPWFLPPSRGLQNSPAVSLPDPEFKRDRKGPHPTARSPGTVMESNPQQREGSSPKHQDHTTDPKLLTCLGQNLHSPDLARPRCPLPPEASPSREKPGLRESSERGPPTARSERSAARADTCREPSMELCFPETAKTSDNSKNLLSVGRTHPDFYTQTQAMEKAWAPGGKTNHKDGPGEARPPPRDNSSLHSAGIPCEKELGKVRRGVEPKPEALLARRSLQPPGIESEKSEKLSSFPSLQKDGAKEPERKEQPLQRHPSSIPPPPLTAKDLSSPAARQHCSSPSHASGREPGAKPSTAEPSSSPQDPPKPVAAHSESSSHKPRPGPDPGPPKTKHPDRSLSSQKPSVGATKGKEPATQSLGGSSREGKGHSKSGPDVFPATPGSQNKASDGIGQGEGGPSVPLHTDRAPLDAKPQPTSGGRPLEVLEKPVHLPRPGHPGPSEPADQKLSAVGEKQTLSPKHPKPSTVKDCPTLCKQTDNRQTDKSPSQPAANTDRRAEGKKCTEALYAPAEGDKLEAGLSFVHSENRLKGAERPAAGVGKGFPEARGKGPGPQKPPTEADKPNGMKRSPSATGQSSFRSTALPEKSLSCSSSFPETRAGVREASAASSDTSSAKAAGGMLELPAPSNRDHRKAQPAGEGRTHMTKSDSLPSFRVSTLPLESHHPDPNTMGGASHRDRALSVTATVGETKGKDPAPAQPPPARKQNVGRDVTKPSPAPNTDRPISLSNEKDFVVRQRRGKESLRSSPHKKAL

SEQ ID NO: 881679 - protein, 1911 aa, Homo sapiens
LECLEFDPEEFYYLLEAAEGHAKEGQGIKTDIPRYIISQLGLNKDPLEEMAHLGNYDSGTAETPETDESVSSSNASLKLRRKPRESDFETIKLISNGAYGAVYFVRHKESRQRFAMKKINKQNLILRNQIQQAFVERDILTFAENPFVVSMYCSFETRRHLCMVMEYVEGGDCATLMKNMGPLPVDMARMYFAETVLALEYLHNYGIVHRDLKPDNLLVTSMGHIKLTDFGLSKVGLMSMTTNLYEGHIEKDAREFLDKQVCGTPEYIAPEVILRQGYGKPVDWWAMGIILYEFLVGCVPFFGDTPEELFGQVISDEINWPEKDEAPPPDAQDLITLLLRQNPLERLGTGGAYEVKQHRFFRSLDWNSLLRQKAEFIPQLESEDDTSYFDTRSEKYHHMETEEEDDTNDEDFNVEIRQFSSCSHRFSKVFSSIDRITQNSAEEKEDSVDKTKSTTLPSTETLSWSSEYSEMQQLSTSNSSDTESNRHKLSSGLLPKLAISTEGEQDEAASCPGDPHEEPGKPALPPEECAQEEPEVTTPASTISSSTLSVGSFSEHLDQINGRSECVDSTDNSSKPSSEPASHMARQRLESTEKKKISGKVTKSLSASALSLMIPGDMFAVSPLGSPMSPHSLSSDPSSSRDSSPSRDSSAASASPHQPIVIHSSGKNYGFTIRAIRVYVGDSDIYTVHHIVWNVEEGSPACQAGLKAGDLITHINGEPVHGLVHTEVIELLLKSGNKVSITTTPFENTSIKTGPARRNSYKSRMVRRSKKSKKKESLERRRSLFKKLAKQPSPLLHTSRSFSCLNRSLSSGESLPGSPTHSLSPRSPTPSYRSTPDFPSGTNSSQSSSPSSSAPNSPAGSGHIRPSTLHGLAPKLGGQRYRSGRRKSAGNIPLSPLARTPSPTPQPTSPQRSPSPLLGHSLGNSKIAQAFPSKMHSPPTIVRHIVRPKSAEPPRSPLLKRVQSEEKLSPSYGSDKKHLCSRKHSLEVTQEEVQREQSQREAPLQSLDENVCDVPPLSRARPVEQGCLKRPVSRKVGRQESVDDLDRDKLKAKVVVKKADGFPEKQESHQKSHGPGSDLENFALFKLEEREKKVYPKAVERSSTFENKASMQEAPPLGSLLKDALHKQASVRASEGAMSDGPVPAEHRQGGGDFRRAPAPGTLQDGLCHSLDRGISGKGEGTEKSSQAKELLRCEKLDSKLANIDYLRKKMSLEDKEDNLCPVLKPKMTAGSHECLPGNPVRPTGGQQEPPPASESRAFVSSTHAAQMSAVSFVPLKALTGRVDSGTEKPGLVAPESPVRKSPSEYKLEGRSVSCLKPIEGTLDIALLSGPQASKTELPSPESAQSPSPSGDVRASVPPVLPSSSGKKNDTTSARELSPSSLKMNKSYLLEPWFLPPSRGLQNSPAVSLPDPEFKRDRKGPHPTARSPGTVMESNPQQREGSSPKHQDHTTDPKLLTCLGQNLHSPDLARPRCPLPPEASPSREKPGLRESSERGPPTARSERSAARADTCREPSMELCFPETAKTSDNSKNLLSVGRTHPDFYTQTQAMEKAWAPGGKTNHKDGPGEARPPPRDNSSLHSAGIPCEKELGKVRRGVEPKPEALLARRSLQPPGIESEKSEKLSSFPSLQKDGAKEPERKEQPLQRHPSSIPPPPLTAKTCPARLPGSIAVPQATLLAESRGPSPALQSPARAPRTLPSLLLRTVKAAATSPGLPPTEADKPNGMKRSPSATGQSSFRSTALPEKSLSCSSSFPETRAGVREASAASSDTSSAKAAGGMLELPAPSNRDHRKAQPAGEGRTHMTKSDSLPSFRVSTLPLESHHPDPNTMGGASHRDRALSVTATVGETKGKDPAPAQPPPARKQNVGRDVTKPSPAPNTDRPISLSNEKDFVVRQRRGKESLRSSPHKKAL

SEQ ID NO: 881680 - protein, 2123 aa, Homo sapiens
LECLEFDPEEFYYLLEAAEGHAKEGQGIKTDIPRYIISQLGLNKDPLEEMAHLGNYDSGTAETPETDESVSSSNASLKLRRKPRESDFETIKLISNGAYGAVYFVRHKESRQRFAMKKINKQNLILRNQIQQAFVERDILTFAENPFVVSMYCSFETRRHLCMVMEYVEGGDCATLMKNMGPLPVDMARMYFAETVLALEYLHNYGIVHRDLKPDNLLVTSMGHIKLTDFGLSKVGLMSMTTNLYEGHIEKDAREFLDKQVCGTPEYIAPEVILRQGYGKPVDWWAMGIILYEFLVGCVPFFGDTPEELFGQVISDEINWPEKDEAPPPDAQDLITLLLRQNPLERLGTGGAYEVKQHRFFRSLDWNSLLRQKAEFIPQLESEDDTSYFDTRSEKYHHMETEEEDDTNDEDFNVEIRQFSSCSHRFSKVFSSIDRITQNSAEEKEDSVDKTKSTTLPSTETLSWSSEYSEMQQLSTSNSSDTESNRHKLSSGLLPKLAISTEGEQDEAASCPGDPHEEPGKPALPPEECAQEEPEVTTPASTISSSTLSVGSFSEHLDQINGRSECVDSTDNSSKPSSEPASHMARQRLESTEKKKISGKVTKSLSASALSLMIPGDMFAVSPLGSPMSPHSLSSDPSSSRDSSPSRDSSAASASPHQPIVIHSSGKNYGFTIRAIRVYVGDSDIYTVHHIVWNVEEGSPACQAGLKAGDLITHINGEPVHGLVHTEVIELLLKSGNKVSITTTPFENTSIKTGPARRNSYKSRMVRRSKKSKKKESLERRRSLFKKLAKQPSPLLHTSRSFSCLNRSLSSGESLPGSPTHSLSPRSPTPSYRSTPDFPSGTNSSQSSSPSSSAPNSPAGSGHIRPSTLHGLAPKLGGQRYRSGRRKSAGNIPLSPLARTPSPTPQPTSPQRSPSPLLGHSLGNSKIAQAFPSKMHSPPTIVRHIVRPKSAEPPRSPLLKRVQSEEKLSPSYGSDKKHLCSRKHSLEVTQEEVQREQSQREAPLQSLDENVCDVPPLSRARPVEQGCLKRPVSRKVGRQESVDDLDRDKLKAKVVVKKADGFPEKQESHQKSHGPGSDLENFALFKLEEREKKVYPKAVERSSTFENKASMQEAPPLGSLLKDALHKQASVRASEGAMSDGPVPAEHRQGGGDFRRAPAPGTLQDGLCHSLDRGISGKGEGTEKSSQAKELLRCEKLDSKLANIDYLRKKMSLEDKEDNLCPVLKPKMTAGSHECLPGNPVRPTGGQQEPPPASESRAFVSSTHAAQMSAVSFVPLKALTGRVDSGTEKPGLVAPESPVRKSPSEYKLEGRSVSCLKPIEGTLDIALLSGPQASKTELPSPESAQSPSPSGDVRASVPPVLPSSSGKKNDTTSARELSPSSLKMNKSYLLEPWFLPPSRGLQNSPAVSLPDPEFKRDRKGPHPTARSPGTVMESNPQQREGSSPKHQDHTTDPKLLTCLGQNLHSPDLARPRCPLPPEASPSREKPGLRESSERGPPTARSERSAARADTCREPSMELCFPETAKTSDNSKNLLSVGRTHPDFYTQTQAMEKAWAPGGKTNHKDGPGEARPPPRDNSSLHSAGIPCEKELGKVRRGVEPKPEALLARRSLQPPGIESEKSEKLSSFPSLQKDGAKEPERKEQPLQRHPSSIPPPPLTAKDLSSPAARQHCSSPSHASGREPGAKPSTAEPSSSPQDPPKPVAAHSESSSHKPRPGPDPGPPKTKHPDRSLSSQKPSVGATKGKEPATQSLGGSSREGKGHSKSGPDVFPATPGSQNKASDGIGQGEGGPSVPLHTDRAPLDAKPQPTSGGRPLEVLEKPVHLPRPGHPGPSEPADQKLSAVGEKQTLSPKHPKPSTVKDCPTLCKQTDNRQTDKSPSQPAANTDRRAEGKKCTEALYAPAEGDKLEAGLSFVHSENRLKGAERPAAGVGKGFPEARGKGPGPQKPPTEADKPNGMKRSPSATGQSSFRSTALPEASAASSDTSSAKAAGGMLELPAPSNRDHRKAQPAGEGRTHMTKSDSLPSFRVSTLPLESHHPDPNTMGGASHRDRALSVTATVGETKGKDPAPAQPPPARKQNVGRDVTKPSPAPNTDRPISLSNEKDFVVRQRRGKESLRSSPHKKAL

SEQ ID NO: 881681 - protein, 187 aa, Homo sapiens
MKRSPSATGQSSFRSTALPEKSLSCSSSFPETRAGVREASAASSDTSSAKAAGGMLELPAPSNRDHRKAQPAGEGRTHMTKSDSLPSFRVSTLPLESHHPDPNTMGGASHRDRALSVTATVGETKGKDPAPAQPPPARKQNVGRDVTKPSPAPNTDRPISLSNEKDFVVRQRRGKESLRSSPHKKAL

SEQ ID NO: 881682 - protein, 1844 aa, Homo sapiens
LECLEFDPEEFYYLLEAAEGHAKEGQGIKTDIPRYIISQLGLNKDPLEEMAHLGNYDSGTAETPETDESVSSSNASLKLRRKPRESDFETIKLISNGAYGAVYFVRHKESRQRFAMKKINKQNLILRNQIQQAFVERDILTFAENPFVVSMYCSFETRRHLCMVMEYVEGGDCATLMKNMGPLPVDMARMYFAETVLALEYLHNYGIVHRDLKPDNLLVTSMGHIKLTDFGLSKVGLMSMTTNLYEGHIEKDAREFLDKQVCGTPEYIAPEVILRQGYGKPVDWWAMGIILYEFLVGCVPFFGDTPEELFGQVISDEINWPEKDEAPPPDAQDLITLLLRQNPLERLGTGGAYEVKQHRFFRSLDWNSLLRQKAEFIPQLESEDDTSYFDTRSEKYHHMETEEEDDTNDEDFNVEIRQFSSCSHRFSKVFSSIDRITQNSAEEKEDSVDKTKSTTLPSTETLSWSSEYSEMQQLSTSNSSDTESNRHKLSSGLLPKLAISTEGEQDEAASCPGDPHEEPGKPALPPEECAQEEPEVTTPASTISSSTLSDMFAVSPLGSPMSPHSLSSDPSSSRDSSPSRDSSAASASPHQPIVIHSSGKNYGFTIRAIRVYVGDSDIYTVHHIVWNVEEGSPACQAGLKAGDLITHINGEPVHGLVHTEVIELLLKSGNKVSITTTPFENTSIKTGPARRNSYKSRMVRRSKKSKKKESLERRRSLFKKLAKQPSPLLHTSRSFSCLNRSLSSGESLPGSPTHSLSPRSPTPSYRSTPDFPSGTNSSQSSSPSSSAPNSPAGSGHIRPSTLHGLAPKLGGQRYRSGRRKSAGNIPLSPLARTPSPTPQPTSPQRSPSPLLGHSLGNSKIAQAFPSKMHSPPTIVRHIVRPKSAEPPRSPLLKRVQSEEKLSPSYGSDKKHLCSRKHSLEVTQEEVQREQSQREAPLQSLDENVCDVPPLSRARPVEQGCLKRPVSRKVGRQESVDDLDRDKLKAKVVVKKADGFPEKQESHQKSHGPGSDLENFALFKLEEREKKVYPKAVERSSTFENKASMQEAPPLGSLLKDALHKQASVRASEGAMSDGPVPAEHRQGGGDFRRAPAPGTLQDGLCHSLDRGISGKGEGTEKSSQAKELLRCEKLDSKLANIDYLRKKMSLEDKEDNLCPVLKPKMTAGSHECLPGNPVRPTGGQQEPPPASESRAFVSSTHAAQMSAVSFVPLKALTGRVDSGTEKPGLVAPESPVRKSPSEYKLEGRSVSCLKPIEGTLDIALLSGPQASKTELPSPESAQSPSPSGDVRASVPPVLPSSSGKKNDTTSARELSPSSLKMNKSYLLEPWFLPPSRGLQNSPAVSLPDPEFKRDRKGPHPTARSPGTVMESNPQQREGSSPKHQDHTTDPKLLTCLGQNLHSPDLARPRCPLPPEASPSREKPGLRESSERGPPTARSERSAARADTCREPSMELCFPETAKTSDNSKNLLSVGRTHPDFYTQTQAMEKAWAPGGKTNHKDGPGEARPPPRDNSSLHSAGIPCEKELGKVRRGVEPKPEALLARRSLQPPGIESEKSEKLSSFPSLQKDGAKEPERKEQPLQRHPSSIPPPPLTAKTCPARLPGSIAVPQATLLAESRGPSPALQSPARAPRTLPSLLLRTVKAAATSPGLPPTEADKPNGMKRSPSATGQSSFRSTALPEKSLSCSSSFPETRAGVREASAASSDTSSAKAAGGMLELPAPSNRDHRKAQPAGEGRTHMTKSDSLPSFRVSTLPLESHHPDPNTMGGASHRDRALSVTATVGETKGKDPAPAQPPPARKQNVGRDVTKPSPAPNTDRPISLSNEKDFVVRQRRGKESLRSSPHKKAL

SEQ ID NO: 881683 - protein, 635 aa, Homo sapiens
LGFPFGAFAGTEKPGLVAPESPVRKSPSEYKLEGRSVSCLKPIEGTLDIALLSGPQASKTELPSPESAQSPSPSGDVRASVPPVLPSSSGKKNDTTSARELSPSSLKMNKSYLLEPWFLPPSRGLQNSPAVSLPDPEFKRDRKGPHPTARSPGTVMESNPQQREGSSPKHQDHTTDPKLLTCLGQNLHSPDLARPRCPLPPEASPSREKPGLRESSERGPPTARSERSAARADTCREPSMELCFPETAKTSDNSKNLLSVGRTHPDFYTQTQAMEKAWAPGGKTNHKDGPGEARPPPRDNSSLHSAGIPCEKELGKVRRGVEPKPEALLARRSLQPPGIESEKSEKLSSFPSLQKDGAKEPERKEQPLQRHPSSIPPPPLTAKTCPARLPGSIAVPQATLLAESRGPSPALQSPARAPRTLPSLLLRTVKAAATSPGLPPTEADKPNGMKRSPSATGQSSFRSTALPEKSLSCSSSFPETRAGVREASAASSDTSSAKAAGGMLELPAPSNRDHRKAQPAGEGRTHMTKSDSLPSFRVSTLPLESHHPDPNTMGGASHRDRALSVTATVGETKGKDPAPAQPPPARKQNVGRDVTKPSPAPNTDRPISLSNEKDFVVRQRRGKESLRSSPHKKAL

SEQ ID NO: 881684 - protein, 1890 aa, Homo sapiens
LECLEFDPEEFYYLLEAAEGHAKEGQGIKTDIPRYIISQLGLNKDPLEEMAHLGNYDSGTAETPETDESVSSSNASLKLRRKPRESDFETIKLISNGAYGAVYFVRHKESRQRFAMKKINKQNLILRNQIQQAFVERDILTFAENPFVVSMYCSFETRRHLCMVMEYVEGGDCATLMKNMGPLPVDMARMYFAETVLALEYLHNYGIVHRDLKPDNLLVTSMGHIKLTDFGLSKVGLMSMTTNLYEGHIEKDAREFLDKQVCGTPEYIAPEVILRQGYGKPVDWWAMGIILYEFLVGCVPFFGDTPEELFGQVISDEINWPEKDEAPPPDAQDLITLLLRQNPLERLGTGGAYEVKQHRFFRSLDWNSLLRQKAEFIPQLESEDDTSYFDTRSEKYHHMETEEEDDTNDEDFNVEIRQFSSCSHRFSKVFSSIDRITQNSAEEKEDSVDKTKSTTLPSTETLSWSSEYSEMQQLSTSNSSDTESNRHKLSSGLLPKLAISTEGEQDEAASCPGDPHEEPGKPALPPEECAQEEPEVTTPASTISSSTLSVGSFSEHLDQINGRSECVDSTDNSSKPSSEPASHMARQRLESTEKKKISGKVTKSLSASALSLMIPGDMFAVSPLGSPMSPHSLSSDPSSSRDSSPSRDSSAASASPHQPIVIHSSGKNYGFTIRAIRVYVGDSDIYTVHHIVWNVEEGSPACQAGLKAGDLITHINGEPVHGLVHTEVIELLLKSGNKVSITTTPFENTSIKTGPARRNSYKSRMVRRSKKSKKKESLERRRSLFKKLAKQPSPLLHTSRSFSCLNRSLSSGESLPGSPTHSLSPRSPTPSYRSTPDFPSGTNSSQSSSPSSSAPNSPAGSGHIRPSTLHGLAPKLGGQRYRSGRRKSAGNIPLSPLARTPSPTPQPTSPQRSPSPLLGHSLGNSKIAQAFPSKMHSPPTIVRHIVRPKSAEPPRSPLLKRVQSEEKLSPSYGSDKKHLCSRKHSLEVTQEEVQREQSQREAPLQSLDENVCDVPPLSRARPVEQGCLKRPVSRKVGRQESVDDLDRDKLKAKVVVKKADGFPEKQESHQKSHGPGSDLENFALFKLEEREKKVYPKAVERSSTFENKASMQEAPPLGSLLKDALHKQASVRASEGAMSDGPVPAEHRQGGGDFRRAPAPGTLQDGLCHSLDRGISGKGEGTEKSSQAKELLRCEKLDSKLANIDYLRKKMSLEDKEDNLCPVLKPKMTAGSHECLPGNPVRPTGGQQEPPPASESRAFVSSTHAAQMSAVSFVPLKALTGRVDSGTEKPGLVAPESPVRKSPSEYKLEGRSVSCLKPIEGTLDIALLSGPQASKTELPSPESAQSPSPSGDVRASVPPVLPSSSGKKNDTTSARELSPSSLKMNKSYLLEPWFLPPSRGLQNSPAVSLPDPEFKRDRKGPHPTARSPGTVMESNPQQREGSSPKHQDHTTDPKLLTCLGQNLHSPDLARPRCPLPPEASPSREKPGLRESSERGPPTARSERSAARADTCREPSMELCFPETAKTSDNSKNLLSVGRTHPDFYTQTQAMEKAWAPGGKTNHKDGPGEARPPPRDNSSLHSAGIPCEKELGKVRRGVEPKPEALLARRSLQPPGIESEKSEKLSSFPSLQKDGAKEPERKEQPLQRHPSSIPPPPLTAKDLSSPAARQHCSSPSHASGREPGAKPSTAEPSSSPQDPPKPVAAHSESSSHKPRPGPDPGPPKTKHPDRSLSSQKPSVGATKGKEPATQSLGGSSREGKGHSKSGPDVFPATPGSQNKASDGIGQGEGGPSVPLHTDRAPLDAKPQPTSGGRPLEVLEKPVHLPRPGHPGPSEPADQKLSAVGEKQTLSPKHPKPSTVKDRPISLSNEKDFVVRQRRGKESLRSSPHKKAL

SEQ ID NO: 881685 - protein, 407 aa, Homo sapiens
ELRPQAGAPGWCRPRPWPAGASLTRAAAGRVLARRSEPHSRSRQSGSRLPQVSGAEADRQAPANREHGAGLGAGWYPLRQSGGGGARRRGRTGGPEDRGQKDWWTGAAAGGEGARRRPAAMATVMAATAAERAVLEEEFRWLLHDEVHAVLKQLQDILKEASLRFTLPGSGTEGPAKQENFILGSCGTDQVKGVLTLQGDALSQADVNLKMPRNNQLLHFAFREDKQWKLQQIQDARNHVSQAIYLLTSRDQSYQFKTGAEVLKLMDAVMLQLTRARNRLTTPATLTLPEIAASGLTRMFAPALPSDLLVNVYINLNKLCLTVYQLHALQPNSTKNFRPAGGAVLHSPGAMFEWGSQRLEVSHVHKVECVIPWLNDALVYFTVSLQLCQQLKDKISVFSSYWSYRPF

SEQ ID NO: 881686 - protein, 271 aa, Homo sapiens
  misc_feature (188)..(189): Xaa can be any naturally occurring amino acid
  misc_feature (196)..(196): Xaa can be any naturally occurring amino acid
  misc_feature (203)..(203): Xaa can be any naturally occurring amino acid
  misc_feature (206)..(206): Xaa can be any naturally occurring amino acid
  misc_feature (217)..(217): Xaa can be any naturally occurring amino acid
  misc_feature (224)..(226): Xaa can be any naturally occurring amino acid
  misc_feature (230)..(230): Xaa can be any naturally occurring amino acid
  misc_feature (234)..(235): Xaa can be any naturally occurring amino acid
  misc_feature (237)..(238): Xaa can be any naturally occurring amino acid
  misc_feature (240)..(240): Xaa can be any naturally occurring amino acid
  misc_feature (248)..(248): Xaa can be any naturally occurring amino acid
  misc_feature (250)..(250): Xaa can be any naturally occurring amino acid
  misc_feature (256)..(256): Xaa can be any naturally occurring amino acid
  misc_feature (260)..(260): Xaa can be any naturally occurring amino acid
  misc_feature (263)..(263): Xaa can be any naturally occurring amino acid
ELRPQAGAPGWCRPRPWPAGASLTRAAAGRVLARRSEPHSRSRQSGSRLPQVSGAEADRQAPANREHGAGLGAGWYPLRQSGGGGARRRGRTGGPEDRGQKDWWTGAAAGGEGARRRPAAMATVMAATAAERAVLEEEFRWLLHDEVHAVLKQLQDILKEASLRFTLPGSGTEGPAKQENFILGSCGXXFSHTILXFFLLFIXYSXIIILILTLIFXLTTIFFXXXSFIXIILXXFXXIXPYTILSNXFXFLPSFXIFTXSIXFLISSIFF

SEQ ID NO: 881687 - protein, 414 aa, Homo sapiens
ELRPQAGAPGWCRPRPWPAGASLTRAAAGRVLARRSEPHSRSRQSGSRLPQVSGAEADRQAPANREHGAGLGAGWYPLRQSGGGGARRRGRTGGPEDRGQKDWWTGAAAGGEGARRRPAAMATVMAATAAERAVLEEEFRWLLHDEVHAVLKQLQDILKEASLRFTLPGSGTEGPAKQENFILGSCGTDQVKGVLTLQGDALSQADVNLKMPRNNQLLHFAFREDKQWKLQQIQDARNHVSQAIYLLTSRDQSYQFKTGAEVLKLMDAVMLQLTRARNRLTTPATLTLPEIAASGLTRMFAPALPSDLLVNVYINLNKLCLTVYQLHALQPNSTKNFRPAGGAVLHSPGAMLDPLTAHSEWGSQRLEVSHVHKVECVIPWLNDALVYFTVSLQLCQQLKDKISVFSSYWSYRPF

SEQ ID NO: 881688 - protein, 197 aa, Homo sapiens
MPRNNQLLHFAFREDKQWKLQQIQDARNHVSQAIYLLTSRDQSYQFKTGAEVLKLMDAVMLQLTRARNRLTTPATLTLPEIAASGLTRMFAPALPSDLLVNVYINLNKLCLTVYQLHALQPNSTKNFRPAGGAVLHSPGAMFEWGSQRLEVSHVHKVECVIPWLNDALVYFTVSLQLCQQLKDKISVFSSYWSYRPF

SEQ ID NO: 881689 - protein, 197 aa, Homo sapiens; identical to SEQ ID NO: 881688

SEQ ID NO: 881690 - protein, 197 aa, Homo sapiens; identical to SEQ ID NO: 881688

SEQ ID NO: 881691 - protein, 313 aa, Homo sapiens
SLPRERTREGRLSRLFLFMPPISPVSLCVCVVCCVRCSRPSCLRLNAGCPSRWWASTLGAGRSRAEASLRFTLPGSGTEGPAKQENFILGSCGTDQVKGVLTLQGDALSQADVNLKMPRNNQLLHFAFREDKQWKLQQIQDARNHVSQAIYLLTSRDQSYQFKTGAEVLKLMDAVMLQLTRARNRLTTPATLTLPEIAASGLTRMFAPALPSDLLVNVYINLNKLCLTVYQLHALQPNSTKNFRPAGGAVLHSPGAMFEWGSQRLEVSHVHKVECVIPWLNDALVYFTVSLQLCQQLKDKISVFSSYWSYRPF

SEQ ID NO: 881692 - protein, 407 aa, Homo sapiens; identical to SEQ ID NO: 881685

SEQ ID NO: 881693 - protein, 518 aa, Homo sapiens
ELRPQAGAPGWCRPRPWPAGASLTRAAAGRVLARRSEPHSRSRQSGSRLPQVSGAEADRQAPANREHGAGLGAGWYPLRQSGGGGARRRGRTGGPEDRGQKDWWTGAAAGGEGARRRPAAMATVMAATAAERAVLEEEFRWLLHDEVHAVLKQLQDILKEASLRFTLPGSGTEGPAKQENFILGSCGTDQVKGVLTLQGDALSQADVNLKMPRNNQLLHFAFREDKQWKLQQIQDARNHVSQAIYLLTSRDQSYQFKTGAEVLKLMDAVMLQLTRARNRLTTPATLTLPEIAASGLTRMFAPALPSDLLVNVYINLNKLCLTVYQLHALQPNSTKNFRPAGGAVLHSPGAMFEWGSQRLEVSHVHKVECVIPWLNDALVYFTVSLQLCQQLKDKGACLQEGGPVPYSYPPQSTSQCQRQAAIYLPIPPPTPPNTFALPGMDTGSARRKEGWFGGVVGRSGRRGQGCPTFPTPPSDHHGNLWTQDRARRRALPPLPFAVPSPWRAWCRGVALSYESRGW

SEQ ID NO: 881694 - protein, 197 aa, Homo sapiens; identical to SEQ ID NO: 881688

SEQ ID NO: 881695 - protein, 383 aa, Homo sapiens
ELRPQAGAPGWCRPRPWPAGASLTRAAAGRVLARRSEPHSRSRQSGSRLPQVSGAEADRQAPANREHGAGLGAGWYPLRQSGGGGARRRGRTGGPEDRGQKDWWTGAAAGGEGARRRPAAMATVMAATAAERAVLEASLRFTLPGSGTEGPAKQENFILGSCGTDQVKGVLTLQGDALSQADVNLKMPRNNQLLHFAFREDKQWKLQQIQDARNHVSQAIYLLTSRDQSYQFKTGAEVLKLMDAVMLQLTRARNRLTTPATLTLPEIAASGLTRMFAPALPSDLLVNVYINLNKLCLTVYQLHALQPNSTKNFRPAGGAVLHSPGAMFEWGSQRLEVSHVHKVECVIPWLNDALVYFTVSLQLCQQLKDKISVFSSYWSYRPF

SEQ ID NO: 881696 - protein, 272 aa, Homo sapiens
GFWKEHWAGPEWALPAPLLPSVPQEASLRFTLPGSGTEGPAKQENFILGSCGTDQVKGVLTLQGDALSQADVNLKMPRNNQLLHFAFREDKQWKLQQIQDARNHVSQAIYLLTSRDQSYQFKTGAEVLKLMDAVMLQLTRARNRLTTPATLTLPEIAASGLTRMFAPALPSDLLVNVYINLNKLCLTVYQLHALQPNSTKNFRPAGGAVLHSPGAMFEWGSQRLEVSHVHKVECVIPWLNDALVYFTVSLQLCQQLKDKISVFSSYWSYRPF

SEQ ID NO: 881697 - protein, 433 aa, Homo sapiens
ELRPQAGAPGWCRPRPWPAGASLTRAAAGRVLARRSEPHSRSRQSGSRLPQVSGAEADRQAPANREHGAGLGAGWYPLRQSGGGGARRRGRTGGPEDRGQKDWWTGAAAGGEGARRRPAAMATVMAATAAERAVLEEEFRWLLHDEVHAVLKQLQDILKEASLRFTLPGSGTEGPAKQENFILGSCGTDQVKGVLTLQGDALSQADVNLKMPRNNQLLHFAFREDKQWKLQQIQDARNHVSQAIYLLTSRDQSYQFKTGAEVLKLMDAVMLQLTRARNRLTTPATLTLPEIAASGLTRMFAPALPSDLLVNVYINLNKLCLTVYQLHALQPNSTKRVGLSAPGGEPRAQSGVRDPLAQRRPGLLHRLPAALPAAQGQDLRVLQLLELQTLLITAPRSLSPGRRPRPLLIPTTEHQPVPTPGCYLSPYPTPYPT

SEQ ID NO: 881698 - protein, 614 aa, Homo sapiens
MGDWMTVTDPGLSSESKTISQYTSETKMSPSSLYSQQVLCSSIPLSKNVHSFFSAFCTEDNIEQSISYLDQELTTFGFPSLYEESKGKETKRELNIVAVLNCMNELLVLQRKNLLAQENVETQNLKLGSDMDHLQSCYSKLKEQLETSRREMIGLQERDRQLQCKNRNLHQLLKNEKDEVQKLQNIIASRATQYNHDMKRKEREYNKLKERLHQLVMNKKDKKIAMDILNYVGRADGKRGSWRTGKTEARNEDEMYKILLNDYEYRQKQILMENAELKKVLQQMKKEMISLLSPQKKKPRERVDDSTGTVISDVEEDAGELSRESMWDLSCETVREQLTNSIRKQWRILKSHVEKLDNQVSKVHLEGFNDEDVISRQDHEQETEKLELEIQQCKEMIKTQQQLLQQQLATAYDDDTTSLLRDCYLLEEKERLKEEWSLFKEQKKNFERERRSFTEAAIRLGLERKAFEEERASWLKQQFLNMTTFDHQNSENVKLFSAFSGSSDWDNLIVHSRQPQKKPHSVSNGSPVCMSKLTKSLPASPSTSDFCQTRSCISEHSSINVLNITAEEIKPNQVGGERTNQKWSVASRPGSQEGCYSGCSLSYTNSHVEKDDLP

SEQ ID NO: 881699 - protein, 614 aa, Homo sapiens; identical to SEQ ID NO: 881698

SEQ ID NO: 881700 - protein, 614 aa, Homo sapiens; identical to SEQ ID NO: 881698

SEQ ID NO: 881701 - protein, 614 aa, Homo sapiens; identical to SEQ ID NO: 881698

SEQ ID NO: 881702 - protein, 654 aa, Homo sapiens
RAGVGAGKGRARAEVEPAPGSAPRCSAGGSARLLGPLQGAGERRPGPLLEEEVGESKTISQYTSETKMSPSSLYSQQVLCSSIPLSKNVHSFFSAFCTEDNIEQSISYLDQELTTFGFPSLYEESKGKETKRELNIVAVLNCMNELLVLQRKNLLAQENVETQNLKLGSDMDHLQSCYSKLKEQLETSRREMIGLQERDRQLQCKNRNLHQLLKNEKDEVQKLQNIIASRATQYNHDMKRKEREYNKLKERLHQLVMNKKDKKIAMDILNYVGRADGKRGSWRTGKTEARNEDEMYKILLNDYEYRQKQILMENAELKKVLQQMKKEMISLLSPQKKKPRERVDDSTGTVISDVEEDAGELSRESMWDLSCETVREQLTNSIRKQWRILKSHVEKLDNQVSKVHLEGFNDEDVISRQDHEQETEKLELEIQQCKEMIKTQQQLLQQQLATAYDDDTTSLLRDCYLLEEKERLKEEWSLFKEQKKNFERERRSFTEAAIRLGLERKAFEEERASWLKQQFLNMTTFDHQNSENVKLFSAFSGSSDWDNLIVHSRQPQKKPHSVSNGSPVCMSKLTKSLPASPSTSDFCQTRSCISEHSSINVLNITAEEIKPNQVGGERTNQKWSVASRPGSQEGCYSGCSLSYTNSHVEKDDLP

SEQ ID NO: 881703 - protein, 538 aa, Homo sapiens
MNELLVLQRKNLLAQENVETQNLKLGSDMDHLQSCYSKLKEQLETSRREMIGLQERDRQLQCKNRNLHQLLKNEKDEVQKLQNIIASRATQYNHDMKRKEREYNKLKERLHQLVMNKKDKKIAMDILNYVGRADGKRGSWRTGKTEARKVQFKLINVIRLPSILHFHTDSFFLRNEDEMYKILLNDYEYRQKQILMENAELKKVLQQMKKEMISLLSPQKKKPRERVDDSTGTVISDVEEDAGELSRESMWDLSCETVREQLTNSIRKQWRILKSHVEKLDNQVSKVHLEGFNDEDVISRQDHEQETEKLELEIQQCKEMIKTQQQLLQQQLATAYDDDTTSLLRDCYLLEEKERLKEEWSLFKEQKKNFERERRSFTEAAIRLGLERKAFEEERASWLKQQFLNMTTFDHQNSENVKLFSAFSGSSDWDNLIVHSRQPQKKPHSVSNGSPVCMSKLTKSLPASPSTSDFCQTRSCISEHSSINVLNITAEEIKPNQVGGERTNQKWSVASRPGSQEGCYSGCSLSYTNSHVEKDDLP

SEQ ID NO: 881704 - protein, 512 aa, Homo sapiens [sequence omitted]

SEQ ID NO: 881705 - protein, 512 aa, Homo sapiens [sequence omitted]

SEQ ID NO: 881706 - protein, 512 aa, Homo sapiens [sequence omitted]

SEQ ID NO: 881707 - protein, 614 aa, Homo sapiens; identical to SEQ ID NO: 881698

SEQ ID NO: 881708 - protein, 587 aa, Homo sapiens
MSPSSLYSQQVLCSSIPLSKNVHSFFSAFCTEDNIEQSISYLDQELTTFGFPSLYEESKGKETKRELNIVAVLNCMNELLVLQRKNLLAQENVETQNLKLGSDMDHLQSCYSKLKEQLETSRREMIGLQERDRQLQCKNRNLHQLLKNEKDEVQKLQNIIASRATQYNHDMKRKEREYNKLKERLHQLVMNKKDKKIAMDILNYVGRADGKRGSWRTGKTEARNEDEMYKILLNDYEYRQKQILMENAELKKVLQQMKKEMISLLSPQKKKPRERVDDSTGTVISDVEEDAGELSRESMWDLSCETVREQLTNSIRKQWRILKSHVEKLDNQVSKVHLEGFNDEDVISRQDHEQETEKLELEIQQCKEMIKTQQQLLQQQLATAYDDDTTSLLRDCYLLEEKERLKEEWSLFKEQKKNFERERRSFTEAAIRLGLERKAFEEERASWLKQQFLNMTTFDHQNSENVKLFSAFSGSSDWDNLIVHSRQPQKKPHSVSNGSPVCMSKLTKSLPASPSTSDFCQTRSCISEHSSINVLNITAEEIKPNQVGGERTNQKWSVASRPGSQEGCYSGCSLSYTNSHVEKDDLP

SEQ ID NO: 881709 - protein, 512 aa, Homo sapiens [sequence omitted]

SEQ ID NO: 881710 - protein, 609 aa, Homo sapiens
MPSDPPFNTRRAYTSEDEAWKSYLENPLTAATKAMMIINGDEDSAAALGLLYDYYKVPRDKRLLSVSKASDSQEDQEKRNCLGTSEAQSNLSGGENRVQVLKTVPVNLSLNQDHLENSKREQYSISFPESSAIIPVSGITVVKAEDFTPVFMAPPVHYPRGDGEEQRVVIFEQTQYDVPSLATHSAYLKDDQRSTPDSTYSESFKDAATEKFRSASVGAEEYMYDQTSSGTFQYTLEATKSLRQKQGEGPMTYLNKGQFYAITLSETGDNKCFRHPISKVRSVVMVVFSEDKNRDEQLKYWKYWHSRQHTAKQRVLDIADYKESFNTIGNIEEIAYNAVSFTWDVNEEAKIFITVNCLSTDFSSQKGVKGLPLMIQIDTYSYNNRSNKPIHRAYCQIKVFCDKGAERKIRDEEQKQNRKKGKGQASQTQCNSSSDGKLAAIPLQKKSDITYFKTMPDLHSQPVLFIPDVHFANLQRTGQVYYNTDDEREGGSVLVKRMFRPMEEEFGPVPSKQMKEEGTKRVLLYVRKETDDVFDALMLKSPTVKGLMEAISEKYGLPVEKIAKLYKKSKKGILVNMDDNIIEHYSNEDTFILNMESMVEGFKVTLMEI

SEQ ID NO: 881711 - protein, 112 aa, Homo sapiens [sequence omitted]

SEQ ID NO: 881712 - protein, 619 aa, Homo sapiens
IGSNMSQESDNNKRLVALVPMPSDPPFNTRRAYTSEDEAWKSYLENPLTAATKAMMIINGDEDSAAALGLLYDYYKVPRDKRLLSVSKASDSQEDQEKRNCLGTSEAQSNLSGGENRVQVLKTVPVNLSLNQDHLENSKREQYSISFPESSAIIPVSGITVVKAEDFTPVFMAPPVHYPRGDGEEQRVVIFEQTQYDVPSLATHSAYLKDDQRSTPDSTYSESFKDAATEKFRSASVGAEEYMYDQTSSGTFQYTLEATKSLRQKQGEGPMTYLNKGQFYAITLSETGDNKCFRHPISKVRSVVMVVFSEDKNRDEQLKYWKYWHSRQHTAKQRVLDIADYKESFNTIGNIEEIAYNAVSFTWDVNEEAKIFITVNCLSTDFSSQKGVKGLPLMIQIDTYSYNNRSNKPIHRAYCQIKVFCDKGAERKIRDEEQKQNRKKGKGQASQTQCNSSSDGKLAAIPLQKKSDITYFKTMPDLHSQPVLFIPDVHFANLQRTGQVYYNTDDEREGGSVLVKRMFRPMEEEFGPVPSKQMKEEGTKRGISPAGACPLRRDAGCLSQEELASPLAQAPMALCQPGDFLFTQEVHSLLLCFKLCPFNTLRKHLSFLGAGSFLCLGRT

SEQ ID NO: 881713 - protein, 629 aa, Homo sapiens
IGSNMSQESDNNKRLVALVPMPSDPPFNTRRAYTSEDEAWKSYLENPLTAATKAMMIINGDEDSAAALGLLYDYYKVPRDKRLLSVSKASDSQEDQEKRNCLGTSEAQSNLSGGENRVQVLKTVPVNLSLNQDHLENSKREQYSISFPESSAIIPVSGITVVKAEDFTPVFMAPPVHYPRGDGEEQRVVIFEQTQYDVPSLATHSAYLKDDQRSTPDSTYSESFKDAATEKFRSASVGAEEYMYDQTSSGTFQYTLEATKSLRQKQGEGPMTYLNKGQFYAITLSETGDNKCFRHPISKVRSVVMVVFSEDKNRDEQLKYWKYWHSRQHTAKQRVLDIADYKESFNTIGNIEEIAYNAVSFTWDVNEEAKIFITVNCLSTDFSSQKGVKGLPLMIQIDTYSYNNRSNKPIHRAYCQIKVFCDKGAERKIRDEEQKQNRKKGKGQASQTQCNSSSDGKLAAIPLQKKSDITYFKTMPDLHSQPVLFIPDVHFANLQRTGQVYYNTDDEREGGSVLVKRMFRPMEEEFGPVPSKQMKEEGTKRVLLYVRKETDDVFDALMLKSPTVKGLMEAISEKYGLPVEKIAKLYKKSKKGILVNMDDNIIEHYSNEDTFILNMESMVEGFKVTLMEI

SEQ ID NO: 881714 - protein, 543 aa, Homo sapiens
IGSNMSQESDNNKRLVALVPMPSDPPFNTRRAYTSEDEAWKSYLENPLTAATKAMMIINGDEDSAAALGLLYDYYKVPRDKRLLSVSKASDSQEDQEKRNCLGTSEAQSNLSGGENRVQVLKTVPVNLSLNQDHLENSKREQYSISFPESSAIIPVSGITVVKAEDFTPVFMAPPVHYPRGDGEEQRVVIFEQTQYDVPSLATHSAYLKDDQRSTPDSTYSESFKDAATEKFRSASVGAEEYMYDQTSSGTFQYTLEATKSLRQKQGEGPMTYLNKGQFYAITLSETGDNKCFRHPISKVRSVVMVVFSEDKNRDEQLKYWKYWHSRQHTAKQRVLDIADYKESFNTIGNIEEIAYNAVSFTWDVNEEAKIFITVNCLSTDFSSQKGVKGLPLMIQIDTYSYNNRSNKPIHRAYCQIKVFCDKGAERKIRDEEQKQNRKKGKGQASQTQCNSSSDGKLAAIPLQKKSDITYFKTMPDLHSQPVLFIPDVHFANLQRTGQVYYNTDDEREGGSVLVKRMFRPMEEEFGPVPSKQMKEEGTKRDI

SEQ ID NO: 881715 - protein, 119 aa, Homo sapiens
IGSNMSQESDKKVDHTRRLLLLLPLWADGNCNKRLVALVPMPSDPPFNTRRAYTSEDEAWKSYLENPLTAATKAMMIINGDEDSAAALGLLYDYYKVPRDKRLLSVSKASDSQEDQEKR

SEQ ID NO: 881716 - protein, 344 aa, Homo sapiens
VLFLFSVLDRVPDGPVFIAMCFLVRVMDAVSFAAAMTASSSILAKAFPNNVATVLGSLETFSGLGLILGPPVGGFLYQSFGYEVPFIVLGCVVLLMVPLNMYILPNYESDPGEHSFWKLIALPKVGLIAFVINSLSSCFGFLDPTLSLFVLEKFNLPAGYVGLVFLGMALSYAISSPLFGLLSDKRPPLRKWLLVFGNLITAGCYMLLGPVPILHIKSQLWLLVLILVVSGLSAGMSIIPTFPEILSCAHENGFEEGLSTLGLVSGLFSAMWSIGAFMGPTLGGFLYEKIGFEWAAAIQGLWALISGLAMGLFYLLEYSRRKRSKSQNILSTEEERTTLLPNET

SEQ ID NO: 881717 - protein, 215 aa, Homo sapiens
VGANTLYSVLASDWRSPAVGASAPDRGTPPLSYETQFSKTTDSDISSPLFGLLSDKRPPLRKWLLVFGNLITAGCYMLLGPVPILHIKSQLWLLVLILVVSGLSAGMSIIPTFPEILSCAHENGFEEGLSTLGLVSGLFSAMWSIGAFMGPTLGGFLYEKIGFEWAAAIQGLWALISGLAMGLFYLLEYSRRKRSKSQNILSTEEERTTLLPNET

SEQ ID NO: 881718 - protein, 344 aa, Homo sapiens; identical to SEQ ID NO: 881716

SEQ ID NO: 881719 - protein, 344 aa, Homo sapiens; identical to SEQ ID NO: 881716

SEQ ID NO: 881720 - protein, 111 aa, Homo sapiens
VQGRGLKPGAGAPESTHRGWRRWVTWRDHAHQEVTMNCVAGSPETSGGFRRVSLATIELLIAVICFREIGKGWGLIVGFGPAFLFSLDGVKFQDWICVTVSNDFLTYTSAF

SEQ ID NO: 881721 - protein, 293 aa, Homo sapiens
VAPWRSSPRTWLEAGSWGAGVHAPGMEALGDLEGPRAPGGDDPAGSAGETPGWLSREQVFVLISAASVNLGSMMCYSILGPFFPKEAEKKGASNTIIGMIFGFNLPAGYVGLVFLGMALSYAISSPLFGLLSDKRPPLRKWLLVFGNLITAGCYMLLGPVPILHIKSQLWLLVLILVVSGLSAGMSIIPTFPEILSCAHENGFEEGLSTLGLVSGLFSAMWSIGAFMGPTLGGFLYEKIGFEWAAAIQGLWALISGLAMGLFYLLEYSRRKRSKSQNILSTEEERTTLLPNET

SEQ ID NO: 881722 - protein, 285 aa, Homo sapiens
VLFLFSVLDRVPDGPVFIAMCFLVRVMDAVSFAAAMTASSSILAKAFPNNVATVLGSLETFSGLGLILGPPVGGFLYQSFGYEVPFIVLGCVVLLMVPLNMYILPNYESDPGEHSFWKLIALPKVGLIAFVINSLSSCFGFLDPTLSLFVLEKFNLPAGYVGLVFLGMALSYAISSPLFGLLSDKRPPLRKWLLVFGNLITAGCYMLLGPVPILHIKSQLWLLVLILVVSGLSAGMSIIPTFPEILSCAHFTLITQAGVQWCDLGSLQPPPPRSKRFFYLSLLSS

SEQ ID NO: 881723 - protein, 79 aa, Homo sapiens
EPGIPDSLQAAIRPALELRKAFRGPRASVLEVSTCFWMILYWAVLTVILKSCPAEAAIFEILSMKGVIKNKQNKTRLSF

SEQ ID NO: 881724 - protein, 329 aa, Homo sapiens
VLFLFSVLDRVPDGPVFIAMCFLVRVMDAVSFAAAMTASSSILAKAFPNNVATVLGSLETFSGLGLILGPPVGGFLYQSFGYEVPFIVLGCVVLLMVPLNMYILPNYESDPGEHSFWKLIALPKVGLIAFVINSLSSCFGFLDPTLSLFVLEKFNLPAGYVGLVFLGMALSYAISSPLFGLLSDKRPPLRKWLLVFGNLITAGCYMLLGPVPILHIKSQLWLLVLILVVSGLSAGMSIIPTFPEILSCAHENGFEEGLSTLGLVSGLFSAMWSIGAFMGPTLGGFLYEKIGFEWAAAIQGLWALISVSNQSFICIFLIFVEKLDLENLH

SEQ ID NO: 881725 - protein, 499 aa, Homo sapiens
MTVATGDPADEAAALPGHPQDTYDPEADHECCERVVINISGLRFETQLKTLAQFPETLLGDPKKRMRYFDPLRNEYFFDRNRPSFDAILYYYQSGGRLRRPVNVPLDIFSEEIRFYELGEEAMEMFREDEGYIKEEERPLPENEFQRQVWLLFEYPESSGPARIIAIVSVMVILISIVSFCLETLPIFRDENEDMHGSGVTFHTYSNSTIGYQQSTSFTDPFFIVETLCIIWFSFEFLVRFFACPSKAGFFTNIMNIIDIVAIIPYFITLGTELAEKPEDAQQGQQAMSLAILRVIRLVRVFRIFKLSRHSKGLQILGQTLKASMRELGLLIFFLFIGVILFSSAVYFAEADERESQFPSIPDAFWWAVVSMTTVGYGDMVPTTIGGKIVGSLCAIAGVLTIALPVPVIVSNFNYFYHRETEGEEQAQYLQVTSCPKIPSSPDLKKSRSASTISKSDYMEIQEGVNNSNEDFREENLKTANCTLANTNYVNITKMLTDV

SEQ ID NO: 881726 - protein, 114 aa, Homo sapiens
IVSPLLYTVAMSDRKCVELVTGSWIGGIVNTLIHTISLRRLSFCRLNAVSHFFCDIPSLLKLSCSDTSMNELLLLTFSGVIAMATFLTVIISYIFIAFASLRIHSASGRQQAFS

SEQ ID NO: 881727 - protein, 218 aa, Homo sapiens
EELKPLEEVLNLAQSKNFHLRPRDLISNINVIVLELKMAGQCSQNEYFDSLLHACIPCQLRCSSNTPPLTCQRYCNASVTNSVKGTNAILWTCLGLSLIISLAVFVLMFLLRKISSEPLKDEFKNTGSGLLGMANIDLEKSRTGDEIILPRGLEYTVEECTCEDCIKSKPKVDSDHCFPLPAMEEGATILVTTKTNDYCKSLPAALSATEIEKSISAR

SEQ ID NO: 881728 - protein, 106 aa, Homo sapiens
QLYALMIACCPWVRCSVLAELIWPRSGVANHMVRNRATDTTRPSRSEMQTRKQKLLGIRRCGEQHSTQRSEERGACWEEGLAMVCSWISGSSPHWSTCVPTTDSLT

SEQ ID NO: 881729 - protein, 255 aa, Homo sapiens
MILNKALMLGALALTTVMSPCGGEDIVADHVASYGVNLYQSYGPSGQYSHEFDGDEEFYVDLERKETVWQLPLFRRFRRFDPQFALTNIAVLKHNLNIVIKRSNSTAATNEVPEVTVFSKSPVTLGQPNTLICLVDNIFPPVVNITWLSNGHSVTEGVSETSFLSKSDHSFFKISYLTFLPSADEIYDCKVEHWGLDEPLLKHWEPEIPTPMSELTETVVCALGLSVGLVGIVVGTVLIIRGLRSVGASRHQGPL

SEQ ID NO: 881730 - protein, 255 aa, Homo sapiens; identical to SEQ ID NO: 881729

SEQ ID NO: 881731 - protein, 255 aa, Homo sapiens; identical to SEQ ID NO: 881729

SEQ ID NO: 881732 - protein, 255 aa, Homo sapiens; identical to SEQ ID NO: 881729

SEQ ID NO: 881733 - protein, 281 aa, Homo sapiens
MAVAKHNLNIMIKRYNSTAATNEVPEVTVFSKSPVTLGQPNTLICLVEVKDIVADHVASYGVNLYQSYGPSGQYSHEFDGDEEFYVDLERKETVWQLPLFRRFRRFDPQFALTNIAVLKHNLNIVIKRSNSTAATNEVPEVTVFSKSPVTLGQPNTLICLVDNIFPPVVNITWLSNGHSVTEGVSETSFLSKSDHSFFKISYLTFLPSADEIYDCKVEHWGLDEPLLKHWEPEIPTPMSELTETVVCALGLSVGLVGIVVGTVLIIRGLRSVGASRHQGPL

SEQ ID NO: 881734 - protein, 214 aa, Homo sapiens
RVIISDLSFRVVHDELVYRNSGPDLTVWQLPLFRRFRRFDPQFALTNIAVLKHNLNIVIKRSNSTAATNEVPEVTVFSKSPVTLGQPNTLICLVDNIFPPVVNITWLSNGHSVTEGVSETSFLSKSDHSFFKISYLTFLPSADEIYDCKVEHWGLDEPLLKHWEPEIPTPMSELTETVVCALGLSVGLVGIVVGTVLIIRGLRSVGASRHQGPL

SEQ ID NO: 881735 - protein, 208 aa, Homo sapiens
MILNKALMLGALALTTVMSPCGGEDIVADHVASYGVNLYQSYGPSGQYSHEFDGDEEFYVDLERKETVWQLPLFRRFRRFDPQFALTNIAVLKHNLNIVIKRSNSTAATNEVPEVTVFSKSPVTLGQPNTLICLVDNIFPPVVNITWLSNGHSVTEGVSETSFLSKSDHSFFKISYLTFLPSADEIYDCKVEHWGLDEPLLKHWGVTY

SEQ ID NO: 881736 - protein, 160 aa, Homo sapiens
MILNKALMLGALALTTVMSPCGGEDIVADHVASYGVNLYQSYGPSGQYSHEFDGDEEFYVDLERKETVWQLPLFRRFRRFDPQFALTNIAVLKHNLNIVIKRSNSTAATNGTQSQKVFLRPASSPRVIIPSSRSVTSPSSLLLMRFMTARWSTGAWMSLF

SEQ ID NO: 881737 - protein, 77 aa, Homo sapiens
VRGLAQVIYDCKVEHWGLDEPLLKHWEPEIPTPMSELTETVVCALGLSVGLVGIVVGTVLIIRGLRSVGASRHQGPL

SEQ ID NO: 881738 - protein, 258 aa, Homo sapiens
MILNKALMLGALALTTVMSPCGGEDIVADHVASYGVNLYQSYGPSGQYSHEFDGDEEFYVDLERKETVWQLPLFRRFRRFDPQFALTNIAVLKHNLNIVIKRSNSTAATNGEEMLVGRLFQDVMQKKLRAELFTLYTSAVFLTIEVPEVTVFSKSPVTLGQPNTLICLVDNIFPPVVNITWLSNGHSVTEGVSETSFLSKSDHSFFKISYLTFLPSADEIYDCKVEHWGLDEPLLKHWGLFDWGPENSDLCSSWGCAW

SEQ ID NO: 881739 - protein, 255 aa, Homo sapiens; identical to SEQ ID NO: 881729

SEQ ID NO: 881740 - protein, 255 aa, Homo sapiens; identical to SEQ ID NO: 881729

SEQ ID NO: 881741 - protein, 255 aa, Homo sapiens; identical to SEQ ID NO: 881729

SEQ ID NO: 881742 - protein, 255 aa, Homo sapiens; identical to SEQ ID NO: 881729

SEQ ID NO: 881743 - protein, 208 aa, Homo sapiens; identical to SEQ ID NO: 881735

SEQ ID NO: 881744 - protein, 129 aa, Homo sapiens
MPNTLICLVDNIFPPVVNITWLSNGHSVTEGVSETSFLSKSDHSFFKISYLTFLPSADEIYDCKVEHWGLDEPLLKHWEPEIPTPMSELTETVVCALGLSVGLVGIVVGTVLIIRGLRSVGASRHQGPL

SEQ ID NO: 881745 - protein, 210 aa, Homo sapiens
MILNKALMLGALALTTVMSPCGGEDIVADHVASYGVNLYQSYGPSGQYSHEFDGDEEFYVDLERKETVWQLPLFRRFRRFDPQFALTNIAVLKHNLNIVIKRSNSTAATNEVPEVTVFSKSPVTLGQPNTLICLVDNIFPPVVNITWLSNGHSVTEGVSETSFLSKSDHSFFKISYLTFLPSADEIYDCKVEHWGLDEPLLKHWGWCPPM

SEQ ID NO: 881746 - protein, 129 aa, Homo sapiens; identical to SEQ ID NO: 881744

SEQ ID NO: 881747 - protein, 270 aa, Homo sapiens
MQAMIRAMETLKILYKLEQNKANALQIREVDVEKVTTFEHRYVSAIKTLWDDPGIHECYDRRREYQLSDSAKYCVTDVDCIATSSYLPTQQDVLRVRVPTTGRTFDLENIIFRMADVGGQRSAQRKWIHCFENLTSIPFLVALSEYDQVLVESDNENRMEESKALFRTIIDYPWFQNSPVITFLNKKDLLEDNILYSHMVDYFPEFEGPQQDAQAAREFILKMLVDMNPDSDKIIDSHFTYATDTKNIRFVFAAVKDTILQLSLKEYNLV

SEQ ID NO: 881748 - protein, 144 aa, Homo sapiens
MLLAMVLTSALLLCSVAGQGCPTLAGILDINFLINKMQEDPASKCHCSANVTSCLCLGIPSDNCTRPCFSERLSQMTNTTMQTRYPLIFSRVKKSVEVLKNNKCPYFSCEQPCNQTTAGNALTFLKSLLEIFQKEKMRGMRGKI

SEQ ID NO: 881749 - protein, 1675 aa, Homo sapiens
MAQILPIRFQEHLQLQNLGINPANIGFSTLTMESDKFICIREKVGEQAQVVIIDMNDPSNPIRRPISADSAIMNPASKVIALKAGKTLQIFNIEMKSKMKAHTMTDDVTFWKWISLNTVALVTDNAVYHWSMEGESQPVKMFDRHSSLAGCQIINYRTDAKQKWLLLTGISAQQNRVVGAMQLYSVDRKVSQPIEGHAASFAQFKMEGNAEESTLFCFAVRGQAGGKLHIIEVGTPPTGNQPFPKKAVDVFFPPEAQNDFPVAMQISEKHDVVFLITKYGYIHLYDLETGTCIYMNRISGETIFVTAPHEATAGIIGVNRKGQVLSVCVEEENIIPYITNVLQNPDLALRMAVRNNLAGAEELFARKFNALFAQGNYSEAAKVAANAPKGILRTPDTIRRFQSVPAQPGQTSPLLQYFGILLDQGQLNKYESLELCRPVLQQGRKQLLEKWLKEDKLECSEELGDLVKSVDPTLALSVYLRANVPNKVIQCFAETGQVQKIVLYAKKVGYTPDWIFLLRNVMRISPDQGQQFAQMLVQDEEPLADITQIVDVFMEYNLIQQCTAFLLDALKNNRPSEGPLQTRLLEMNLMHAPQVADAILGNQMFTHYDRAHIAQLCEKAGLLQRALEHFTDLYDIKRAVVHTHLLNPEWLVNYFGSLSVEDSLECLRAMLSANIRQNLQICVQVASKYHEQLSTQSLIELFESFKSFEGLFYFLGSIVNFSQDPDVHFKYIQAACKTGQIKEVERICRESNCYDPERVKNFLKEAKLTDQLPLIIVCDRFDFVHDLVLYLYRNNLQKYIEIYVQKVNPSRLPVVIGGLLDVDCSEDVIKNLILVVRGQFSTDELVAEVEKRNRLKLLLPWLEARIHEGCEEPATHNALAKIYIDSNNNPERFLRENPYYDSRVVGKYCEKRDPHLACVAYERGQCDLELINVCNENSLFKSLSRYLVRRKDPELWGSVLLESNPYRRPLIDQVVQTALSETQDPEEVSVTVKAFMTADLPNELIELLEKIVLDNSVFSEHRNLQNLLILTAIKADRTRVMEYINRLDNYDAPDIANIAISNELFEEAFAIFRKFDVNTSAVQVLIEHIGNLDRAYEFAERCNEPAVWSQLAKAQLQKGMVKEAIDSYIKADDPSSYMEVVQAANTSGNWEELVKYLQMARKKARESYVETELIFALAKTNRLAELEEFINGPNNAHIQQVGDRCYDEKMYDAAKLLYNNVSNFGRLASTLVHLGEYQAAVDGARKANSTRTWKEVCFACVDGKEFRLAQMCGLHIVVHADELEELINYYQDRGYFEELITMLEAALGLERAHMGMFTELAILYSKFKPQKMREHLELFWSRVNIPKVLRAAEQAHLWAELVFLYDKYEEYDNAIITMMNHPTDAWKEGQFKDIITKVANVELYYRAIQFYLEFKPLLLNDLLMVLSPRLDHTRAVNYFSKVKQLPLVKPYLRSVQNHNNKSVNESLNNLFITEEDYQALRTSIDAYDNFDNISLAQRLEKHELIEFRRIAAYLFKGNNRWKQSVELCKKDSLYKDAMQYASESKDTELAEELLQWFLQEEKRECFGACLFTCYDLLRPDVVLETAWRHNIMDFAMPYFIQVMKEYLTKVDKLDASESLRKEEEQATETQPIVYGQPQLMLTAGPSVAVPPQAPFGYGYTAPPYGQPQPGFGYSM

SEQ ID NO: 881750 - protein, 1675 aa, Homo sapiens; identical to SEQ ID NO: 881749

SEQ ID NO: 881751 - protein, 1723 aa, Homo sapiens
MAQILPIRFQEHLQLQNLGINPANIGFSTLTMESDKFICIREKVGEQAQVVIIDMNDPSNPIRRPISADSAIMNPASKVIALKAGKTLQIFNIEMKSKMKAHTMTDDVTFWKWISLNTVALVTDNAVYHWSMEGESQPVKMFDRHSSLAGCQIINYRTDAKQKWLLLTGISAQQNRVVGAMQLYSVDRKVSQPIEGHAASFAQFKMEGNAEESTLFCFAVRGQAGGKLHIIEVGTPPTGNQPFPKKAVDVFFPPEAQNDFPVAMQISEKHDVVFLITKYGYIHLYDLETGTCIYMNRISGETIFVTAPHEATAGIIGVNRKGQKLSTLEDTGAFSVSCSRSYYGLVARNLLEQSLSMITIKLWIQYVGKPKVLSVCVEEENIIPYITNVLQNPDLALRMAVRNNLAGAEELFARKFNALFAQGNYSEAAKVAANAPKGILRTPDTIRRFQSVPAQPGQTSPLLQYFGILLDQGQLNKYESLELCRPVLQQGRKQLLEKWLKEDKLECSEELGDLVKSVDPTLALSVYLRANVPNKVIQCFAETGQVQKIVLYAKKVGYTPDWIFLLRNVMRISPDQGQQFAQMLVQDEEPLADITQIVDVFMEYNLIQQCTAFLLDALKNNRPSEGPLQTRLLEMNLMHAPQVADAILGNQMFTHYDRAHIAQLCEKAGLLQRALEHFTDLYDIKRAVVHTHLLNPEWLVNYFGSLSVEDSLECLRAMLSANIRQNLQICVQVASKYHEQLSTQSLIELFESFKSFEGLFYFLGSIVNFSQDPDVHFKYIQAACKTGQIKEVERICRESNCYDPERVKNFLKEAKLTDQLPLIIVCDRFDFVHDLVLYLYRNNLQKYIEIYVQKVNPSRLPVVIGGLLDVDCSEDVIKNLILVVRGQFSTDELVAEVEKRNRLKLLLPWLEARIHEGCEEPATHNALAKIYIDSNNNPERFLRENPYYDSRVVGKYCEKRDPHLACVAYERGQCDLELINVCNENSLFKSLSRYLVRRKDPELWGSVLLESNPYRRPLIDQVVQTALSETQDPEEVSVTVKAFMTADLPNELIELLEKIVLDNSVFSEHRNLQNLLILTAIKADRTRVMEYINRLDNYDAPDIANIAISNELFEEAFAIFRKFDVNTSAVQVLIEHIGNLDRAYEFAERCNEPAVWSQLAKAQLQKGMVKEAIDSYIKADDPSSYMEVVQAANTSGNWEELVKYLQMARKKARESYVETELIFALAKTNRLAELEEFINGPNNAHIQQVGDRCYDEKMYDAAKLLYNNVSNFGRLASTLVHLGEYQAAVDGARKANSTRTWKEVCFACVDGKEFRLAQMCGLHIVVHADELEELINYYQDRGYFEELITMLEAALGLERAHMGMFTELAILYSKFKPQKMREHLELFWSRVNIPKVLRAAEQAHLWAELVFLYDKYEEYDNAIITMMNHPTDAWKEGQFKDIITKVANVELYYRAIQFYLEFKPLLLNDLLMVLSPRLDHTRAVNYFSKVKQLPLVKPYLRSVQNHNNKSVNESLNNLFITEEDYQALRTSIDAYDNFDNISLAQRLEKHELIEFRRIAAYLFKGNNRWKQSVELCKKDSLYKDAMQYASESKDTELAEELLQWFLQEEKRECFGACLFTCYDLLRPDVVLETAWRHNIMDFAMPYFIQVMKEYLTKVDKLDASESLRKEEEQATETQPIVYGQPQLMLTAGPSVAVPPQAPFGYGYTAPPYGQPQPGFGYSM

SEQ ID NO: 881752 - protein, 1675 aa, Homo sapiens; identical to SEQ ID NO: 881749

SEQ ID NO: 881753 - protein, 1113 aa, Homo sapiens
IDTRGSPKSIGQSKCPFRRTLILHITLMTCACVADAILGNQMFTHYDRAHIAQLCEKAGLLQRALEHFTDLYDIKRAVVHTHLLNPEWLVNYFGSLSVEDSLECLRAMLSANIRQNLQICVQVASKYHEQLSTQSLIELFESFKSFEGLFYFLGSIVNFSQDPDVHFKYIQAACKTGQIKEVERICRESNCYDPERVKNFLKEAKLTDQLPLIIVCDRFDFVHDLVLYLYRNNLQKYIEIYVQKVNPSRLPVVIGGLLDVDCSEDVIKNLILVVRGQFSTDELVAEVEKRNRLKLLLPWLEARIHEGCEEPATHNALAKIYIDSNNNPERFLRENPYYDSRVVGKYCEKRDPHLACVAYERGQCDLELINVCNENSLFKSLSRYLVRRKDPELWGSVLLESNPYRRPLIDQVVQTALSETQDPEEVSVTVKAFMTADLPNELIELLEKIVLDNSVFSEHRNLQNLLILTAIKADRTRVMEYINRLDNYDAPDIANIAISNELFEEAFAIFRKFDVNTSAVQVLIEHIGNLDRAYEFAERCNEPAVWSQLAKAQLQKGMVKEAIDSYIKADDPSSYMEVVQAANTSGNWEELVKYLQMARKKARESYVETELIFALAKTNRLAELEEFINGPNNAHIQQVGDRCYDEKMYDAAKLLYNNVSNFGRLASTLVHLGEYQAAVDGARKANSTRTWKEVCFACVDGKEFRLAQMCGLHIVVHADELEELINYYQDRGYFEELITMLEAALGLERAHMGMFTELAILYSKFKPQKMREHLELFWSRVNIPKVLRAAEQAHLWAELVFLYDKYEEYDNAIITMMNHPTDAWKEGQFKDIITKVANVELYYRAIQFYLEFKPLLLNDLLMVLSPRLDHTRAVNYFSKVKQLPLVKPYLRSVQNHNNKSVNESLNNLFITEEDYQALRTSIDAYDNFDNISLAQRLEKHELIEFRRIAAYLFKGNNRWKQSVELCKKDSLYKDAMQYASESKDTELAEELLQWFLQEEKRECFGACLFTCYDLLRPDVVLETAWRHNIMDFAMPYFIQVMKEYLTKVDKLDASESLRKEEEQATETQPIVYGQPQLMLTAGPSVAVPPQAPFGYGYTAPPYGQPQPGFGYSM

SEQ ID NO: 881754 - protein, 930 aa, Homo sapiens
TLRGSPLRYDPERVKNNLKEAKLTDQLPLIIVCDRFDFVHDLVLYLYRNNLQKYIEIYVQKVNPSRLPVVIGGLLDVDCSEDVIKNLILVVRGQFSTDELVAEVEKRNRLKLLLPWLEARIHEGCEEPATHNALAKIYIDSNNNPERFLRENPYYDSRVVGKYCEKRDPHLACVAYERGQCDLELINVCNENSLFKSLSRYLVRRKDPELWGSVLLESNPYRRPLIDQVVQTALSETQDPEEVSVTVKAFMTADLPNELIELLEKIVLDNSVFSEHRNLQNLLILTAIKADRTRVMEYINRLDNYDAPDIANIAISNELFEEAFAIFRKFDVNTSAVQVLIEHIGNLDRAYEFAERCNEPAVWSQLAKAQLQKGMVKEAIDSYIKADDPSSYMEVVQAANTSGNWEELVKYLQMARKKARESYVETELIFALAKTNRLAELEEFINGPNNAHIQQVGDRCYDEKMYDAAKLLYNNVSNFGRLASTLVHLGEYQAAVDGARKANSTRTWKEVCFACVDGKEFRLAQMCGLHIVVHADELEELINYYQDRGYFEELITMLEAALGLERAHMGMFTELAILYSKFKPQKMREHLELFWSRVNIPKVLRAAEQAHLWAELVFLYDKYEEYDNAIITMMNHPTDAWKEGQFKDIITKVANVELYYRAIQFYLEFKPLLLNDLLMVLSPRLDHTRAVNYFSKVKQLPLVKPYLRSVQNHNNKSVNESLNNLFITEEDYQALRTSIDAYDNFDNISLAQRLEKHELIEFRRIAAYLFKGNNRWKQSVELCKKDSLYKDAMQYASESKDTELAEELLQWFLQEEKRECFGACLFTCYDLLRPDVVLETAWRHNIMDFAMPYFIQVMKEYLTKVDKLDASESLRKEEEQATETQPIVYGQPQLMLTAGPSVAVPPQAPFGYGYTAPPYGQPQPGFGYSM

SEQ ID NO: 881755 - protein, 876 aa, Homo sapiens
FYFFLTKVNPSRLPVVIGGLLDVDCSEDVIKNLILVVRGQFSTDELVAEVEKRNRLKLLLPWLEARIHEGCEEPATHNALAKIYIDSNNNPERFLRENPYYDSRVVGKYCEKRDPHLACVAYERGQCDLELINVCNENSLFKSLSRYLVRRKDPELWGSVLLESNPYRRPLIDQVVQTALSETQDPEEVSVTVKAFMTADLPNELIELLEKIVLDNSVFSEHRNLQNLLILTAIKADRTRVMEYINRLDNYDAPDIANIAISNELFEEAFAIFRKFDVNTSAVQVLIEHIGNLDRAYEFAERCNEPAVWSQLAKAQLQKGMVKEAIDSYIKADDPSSYMEVVQAANTSGNWEELVKYLQMARKKARESYVETELIFALAKTNRLAELEEFINGPNNAHIQQVGDRCYDEKMYDAAKLLYNNVSNFGRLASTLVHLGEYQAAVDGARKANSTRTWKEVCFACVDGKEFRLAQMCGLHIVVHADELEELINYYQDRGYFEELITMLEAALGLERAHMGMFTELAILYSKFKPQKMREHLELFWSRVNIPKVLRAAEQAHLWAELVFLYDKYEEYDNAIITMMNHPTDAWKEGQFKDIITKVANVELYYRAIQFYLEFKPLLLNDLLMVLSPRLDHTRAVNYFSKVKQLPLVKPYLRSVQNHNNKSVNESLNNLFITEEDYQALRTSIDAYDNFDNISLAQRLEKHELIEFRRIAAYLFKGNNRWKQSVELCKKDSLYKDAMQYASESKDTELAEELLQWFLQEEKRECFGACLFTCYDLLRPDVVLETAWRHNIMDFAMPYFIQVMKEYLTKVDKLDASESLRKEEEQATETQPIVYGQPQLMLTAGPSVAVPPQAPFGYGYTAPPYGQPQPGFGYSM

SEQ ID NO: 881756 - protein, 625 aa, Homo sapiens
IIEDPPSKPSSNELFEEAFAIFRKFDVNTSAVQVLIEHIGNLDRAYEFAERCNEPAVWSQLAKAQLQKGMVKEAIDSYIKADDPSSYMEVVQAANTSGNWEELVKYLQMARKKARESYVETELIFALAKTNRLAELEEFINGPNNAHIQQVGDRCYDEKMYDAAKLLYNNVSNFGRLASTLVHLGEYQAAVDGARKANSTRTWKEVCFACVDGKEFRLAQMCGLHIVVHADELEELINYYQDRGYFEELITMLEAALGLERAHMGMFTELAILYSKFKPQKMREHLELFWSRVNIPKVLRAAEQAHLWAELVFLYDKYEEYDNAIITMMNHPTDAWKEGQFKDIITKVANVELYYRAIQFYLEFKPLLLNDLLMVLSPRLDHTRAVNYFSKVKQLPLVKPYLRSVQNHNNKSVNESLNNLFITEEDYQALRTSIDAYDNFDNISLAQRLEKHELIEFRRIAAYLFKGNNRWKQSVELCKKDSLYKDAMQYASESKDTELAEELLQWFLQEEKRECFGACLFTCYDLLRPDVVLETAWRHNIMDFAMPYFIQVMKEYLTKVDKLDASESLRKEEEQATETQPIVYGQPQLMLTAGPSVAVPPQAPFGYGYTAPPYGQPQPGFGYSM

SEQ ID NO: 881757 - protein, 1545 aa, Homo sapiens
MAQILPIRFQEHLQLQNLGINPANIGFSTLTMESDKFICIREKVGEQAQVVIIDMNDPSNPIRRPISADSAIMNPASKVIALKAGKTLQIFNIEMKSKMKAHTMTDDVTFWKWISLNTVALVTDNAVYHWSMEGESQPVKMFDRHSSLAGCQIINYRTDAKQKWLLLTGISAQQNRVVGAMQLYSVDRKVSQPIEGHAASFAQFKMEGNAEESTLFCFAVRGQAGGKLHIIEVGTPPTGNQPFPKKAVDVFFPPEAQNDFPVAMQISEKHDVVFLITKYGYIHLYDLETGTCIYMNRISGETIFVTAPHEATAGIIGVNRKGQVLSVCVEEENIIPYITNVLQNPDLALRMAVRNNLAGAEELFARKFNALFAQGNYSEAAKVAANAPKGILRTPDTIRRFQSVPAQPGQTSPLLQYFGILLDQGQLNKYESLELCRPVLQQGRKQLLEKWLKEDKLECSEELGDLVKSVDPTLALSVYLRANVPNKVIQCFAETGQVQKIVLYAKKVGYTPDWIFLLRNVMRISPDQGQQFAQMLVQDEEPLADITQIVDVFMEYNLIQQCTAFLLDALKNNRPSEGPLQTRLLEMNLMHAPQVADAILGNQMFTHYDRAHIAQLCEKAGLLQRALEHFTDLYDIKRAVVHTHLLNPEWLVNYFGSLSVEDSLECLRAMLSANIRQNLQICVQVASKYHEQLSTQSLIELFESFKSFEGLFYFLGSIVNFSQDPDVHFKYIQAACKTGQIKEVERICRESNCYDPERVKNFLKEAKLTDQLPLIIVCDRFDFVHDLVLYLYRNNLQKYIEIYVQKVNPSRLPVVIGGLLDVDCSEDVIKNLILVVRGQFSTDELVAEVEKRNRLKLLLPWLEARIHEGCEEPATHNALAKIYIDSNNNPERFLRENPYYDSRVVGKYCEKRDPHLACVAYERGQCDLELINVCNENSLFKSLSRYLVRRKDPELWGSVLLESNPYRRPLIDQVVQTALSETQDPEEVSVTVKAFMTADLPNELIELLEKIVLDNSVFSEHRNLQNLLILTAIKADRTRVMEYINRLDNYDAPDIANIAISNELFEEAFAIFRKFDVNTSAVQVLIEHIGNLDRAYEFAERCNEPAVWSQLAKAQLQKGMVKEAIDSYIKADDPSSYMEVVQAANTSGNWEELVKYLQMARKKARESYVETELIFALAKTNRLAELEEFINGPNNAHIQQVGDRCYDEKMYDAAKLLYNNVSNFGRLASTLVHLGEYQAAVDGARKANSTRTWKEVCFACVDGKEFRLAQMCGLHIVVHADELEELINYYQDRGYFEELITMLEAALGLERAHMGMFTELAILYSKFKPQKMREHLELFWSRVNIPKVLRAAEQAHLWAELVFLYDKYEEYDNAIITMMNHPTDAWKEGQFKDIITKVANVELYYRAIQFYLEFKPLLLNDLLMVLSPRLDHTRAVNYFSKVKQLPLVKPYLRSVQNHNNKSVNESLNNLFITEEDYQALRTSIDAYDNFDNISLAQRLEKHELIEFRRIAAYLFKGNNRWKQSVELCKKDSLYKVDKVAGQGLF

SEQ ID NO: 881758 - protein, 533 aa, Homo sapiens
PTLVSLPSHVTLTLVITQCRRRPQSYVETELIFALAKTNRLAELEEFINGPNNAHIQQVGDRCYDEKMYDAAKLLYNNVSNFGRLASTLVHLGEYQAAVDGARKANSTRTWKEVCFACVDGKEFRLAQMCGLHIVVHADELEELINYYQDRGYFEELITMLEAALGLERAHMGMFTELAILYSKFKPQKMREHLELFWSRVNIPKVLRAAEQAHLWAELVFLYDKYEEYDNAIITMMNHPTDAWKEGQFKDIITKVANVELYYRAIQFYLEFKPLLLNDLLMVLSPRLDHTRAVNYFSKVKQLPLVKPYLRSVQNHNNKSVNESLNNLFITEEDYQALRTSIDAYDNFDNISLAQRLEKHELIEFRRIAAYLFKGNNRWKQSVELCKKDSLYKDAMQYASESKDTELAEELLQWFLQEEKRECFGACLFTCYDLLRPDVVLETAWRHNIMDFAMPYFIQVMKEYLTKVDKLDASESLRKEEEQATETQPIVYGQPQLMLTAGPSVAVPPQAPFGYGYTAPPYGQPQPGFGYSM

SEQ ID NO: 881759 - protein, 1682 aa, Homo sapiens
MAQILPIRFQEHLQLQNLGINPANIGFSTLTMESDKFICIREKVGEQAQVVIIDMNDPSNPIRRPISADSAIMNPASKVIALKAGKTLQIFNIEMKSKMKAHTMTDDVTFWKWISLNTVALVTDNAVYHWSMEGESQPVKMFDRHSSLAGCQIINYRTDAKQKWLLLTGISAQQNRVVGAMQLYSVDRKVSQPIEGHAASFAQFKMEGNAEESTLFCFAVRGQAGGKLHIIEVGTPPTGNQPFPKKAVDVFFPPEAQNDFPVAMQISEKHDVVFLITKYGYIHLYDLETGTCIYMNRISGETIFVTAPHEATAGIIGVNRKGQVLSVCVEEENIIPYITNVLQNPDLALRMAVRNNLAGAEELFARKFNALFAQGNYSEAAKVAANAPKGILRTPDTIRRFQSVPAQPGQTSPLLQYFGILLDQGQLNKYESLELCRPVLQQGRKQLLEKWLKEDKLECSEELGDLVKSVDPTLALSVYLRANVPNKVIQCFAETGQVQKIVLYAKKVGYTPDWIFLLRNVMRISPDQGQQFAQMLVQDEEPLADITQIVDVFMEYNLIQQCTAFLLDALKNNRPSEGPLQTRLLEMNLMHAPQVADAILGNQMFTHYDRAHIAQLCEKAGLLQRALEHFTDLYDIKRAVVHTHLLNPEWLVNYFGSLSVEDSLECLRAMLSANIRQNLQICVQVASKYHEQLSTQSLIELFESFKSFEGLFYFLGSIVNFSQDPDVHFKYIQAACKTGQIKEVERICRESNCYDPERVKNFLKEAKLTDQLPLIIVCDRFDFVHDLVLYLYRNNLQKYIEIYVQKVNPSRLPVVIGGLLDVDCSEDVIKNLILVVRGQFSTDELVAEVEKRNRLKLLLPWLEARIHEGCEEPATHNALAKIYIDSNNNPERFLRENPYYDSRVVGKYCEKRDPHLACVAYERGQCDLELINVCNENSLFKSLSRYLVRRKDPELWGSVLLESNPYRRPLIDQVVQTALSETQDPEEVSVTVKAFMTADLPNELIELLEKIVLDNSVFSEHRNLQNLLILTAIKADRTRVMEYINRLDNYDAPDIANIAISNELFEEAFAIFRKFDVNTSAVQVLIEHIGNLDRAYEFAERCNEPAVWSQLAKAQLQKGMVKEAIDSYIKADDPSSYMEVVQAANTSGNWEELVKYLQMARKKARESYVETELIFALAKTNRLAELEEFINGPNNAHIQQVGDRCYDEKMYDAAKLLYNNVSNFGRLASTLVHLGEYQAAVDGARKANSTRTWKEVCFACVDGKEFRLAQMCGLHIVVHADELEELINYYQDRGYFEELITMLEAALGLERAHMGMFTELAILYSKFKPQKMREHLELFWSRVNIPKVLRAAEQAHLWAELVFLYDKYEEYDNAIITMMNHPTDAWKEGQFKDIITKVANVELYYRAIQFYLEFKPLLLNDLLMVLSPRLDHTRAVNYFSKVKQLPLVKPYLRSVQNHNNKSVNESLNNLFITEEDYQALRTSIDAYDNFDNISLAQRLEKHELIEFRRIAAYLFKGNNRWKQSVELCKKDSLYKDAMQYASESKDTELAEELLQWFLQEEKRECFGACLFTCYDLLRPDVVLETAWRHNIMDFAMPYFIQVMKEYLTKVDAIKEKVDKLDASESLRKEEEQATETQPIVYGQPQLMLTAGPSVAVPPQAPFGYGYTAPPYGQPQPGFGYSM

SEQ ID NO: 881760 - protein, 1624 aa, Homo sapiens
MAQILPIRFQEHLQLQNLGINPANIGFSTLTMESDKFICIREKVGEQAQVVIIDMNDPSNPIRRPISADSAIMNPASKVIALKAGKTLQIFNIEMKSKMKAHTMTDDVTFWKWISLNTVALVTDNAVYHWSMEGESQPVKMFDRHSSLAGCQIINYRTDAKQKWLLLTGISAQQNRVVGAMQLYSVDRKVSQPIEGHAASFAQFKMEGNAEESTLFCFAVRGQAGGKLHIIEVGTPPTGNQPFPKKAVDVFFPPEAQNDFPVAMQISEKHDVVFLITKYGYIHLYDLETGTCIYMNRISGETIFVTAPHEATAGIIGVNRKGQVLSVCVEEENIIPYITNVLQNPDLALRMAVRNNLAGAEELFARKFNALFAQGNYSEAAKVAANAPKGILRTPDTIRRFQSVPAQPGQTSPLLQYFGILLDQGQLNKYESLELCRPVLQQGRKQLLEKWLKEDKLECSEELGDLVKSVDPTLALSVYLRANVPNKVIQCFAETGQVQKIVLYAKKVGYTPDWIFLLRNVMRISPDQGQQFAQMLVQDEEPLADITQIVDVFMEYNLIQQCTAFLLDALKNNRPSEGPLQTRLLEMNLMHAPQVADAILGNQMFTHYDRAHIAQLCEKAGLLQRALEHFTDLYDIKRAVVHTHLLNPEWLVNYFGSLSVEDSLECLRAMLSANIRQNLQICVQVASKYHEQLSTQSLIELFESFKSFEGLFYFLGSIVNFSQDPDVHFKYIQAACKTGQIKEVERICRESNCYDPERVKNFLKEAKLTDQLPLIIVCDRFDFVHDLVLYLYRNNLQKYIEIYVQKVNPSRLPVVIGGLLDVDCSEDVIKNLILVVRGQFSTDELVAEVEKRNRLKLLLPWLEARIHEGCEEPATHNALAKIYIDSNNNPERFLRENPYYDSRVVGKYCEKRDPHLACVAYERGQCDLELINVCNENSLFKSLSRYLVRRKDPELWGSVLLESNPYRRPLIDQVVQTALSETQDPEEVSVTVKAFMTADLPNELIELLEKIVLDNSVFSEHRNLQNLLILTAIKADRTRVMEYINRLDNYDAPDIANIAISNELFEEAFAIFRKFDVNTSAVQVLIEHIGNLDRAYEFAERCNEPAVWSQLAKAQLQKGMVKEAIDSYIKADDPSSYMEVVQAANTSGNWEELVKYLQMARKKARESYVETELIFALAKTNRLAELEEFINGPNNAHIQQVGDRCYDEKMYDAAKLLYNNVSNFGRLASTLVHLGEYQAAVDGARKANSTRTWKEVCFACVDGKEFRLAQMCGLHIVVHADELEELINYYQDRGYFEELITMLEAALGLERAHMGMFTELAILYSKFKPQKMREHLELFWSRVNIPKVLRAAEQAHLWAELVFLYDKYEEYDNAIITMMNHPTDAWKEGQFKDIITKVANVELYYRAIQFYLEFKPLLLNDLLMVLSPRLDHTRAVNYFSKVKQLPLVKPYLRSVQNHNNKSVNESLNNLFITEEDYQALRTSIDAYDNFDNISLAQRLEKHELIEFRRIAAYLFKGNNRWKQSVELCKKDSLYKDAMQYASESKDTELAEELLQWFLQEEKRECFGACLFTCYDLLRPDVVLETAWRHNIMDFAMPYFIQVMKEYLTKVDKLDASESLRVSPS

SEQ ID NO: 881761 - protein, 1675 aa, Homo sapiens; identical to SEQ ID NO: 881749

SEQ ID NO: 881762 - protein, 148 aa, Homo sapiens
ADLQQLSKDAMQYASESKDTELAEELLQWFLQEEKRECFGACLFTCYDLLRPDVVLETAWRHNIMDFAMPYFIQVMKEYLTKVDKLDASESLRKEEEQATETQPIVYGQPQLMLTAGPSVAVPPQAPFGYGYTAPPYGQPQPGFGYSM

SEQ ID NO: 881763 - protein, 1675 aa, Homo sapiens; identical to SEQ ID NO: 881749

SEQ ID NO: 881764 - protein, 1675 aa, Homo sapiens; identical to SEQ ID NO: 881749

SEQ ID NO: 881765 - protein, 1545 aa, Homo sapiens; identical to SEQ ID NO: 881757

SEQ ID NO: 881766 - protein, 1486 aa, Homo sapiens
MAQILPIRFQEHLQLQNLGINPANIGFSTLTMESDKFICIREKVGEQAQVVIIDMNDPSNPIRRPISADSAIMNPASKVIALKAGKTLQIFNIEMKSKMKAHTMTDDVTFWKWISLNTVALVTDNAVYHWSMEGESQPVKMFDRHSSLAGCQIINYRTDAKQKWLLLTGISAQQNRVVGAMQLYSVDRKVSQPIEGHAASFAQFKMEGNAEESTLFCFAVRGQAGGKLHIIEVGTPPTGNQPFPKKAVDVFFPPEAQNDFPVAMQISEKHDVVFLITKYGYIHLYDLETGTCIYMNRISGETIFVTAPHEATAGIIGVNRKGQVLSVCVEEENIIPYITNVLQNPDLALRMAVRNNLAGAEELFARKFNALFAQGNYSEAAKVAANAPKGILRTPDTIRRFQSVPAQPGQTSPLLQYFGILLDQGQLNKYESLELCRPVLQQGRKQLLEKWLKEDKLECSEELGDLVKSVDPTLALSVYLRANVPNKVIQCFAETGQVQKIVLYAKKVGYTPDWIFLLRNVMRISPDQGQQFAQMLVQDEEPLADITQIVDVFMEYNLIQQCTAFLLDALKNNRPSEGPLQTRLLEMNLMHAPQVADAILGNQMFTHYDRAHIAQLCEKAGLLQRALEHFTDLYDIKRAVVHTHLLNPEWLVNYFGSLSVEDSLECLRAMLSANIRQNLQICVQVASKYHEQLSTQSLIELFESFKSFEGLFYFLGSIVNFSQDPDVHFKYIQAACKTGQIKEVERICRESNCYDPERVKNFLKEAKLTDQLPLIIVCDRFDFVHDLVLYLYRNNLQKYIEIYVQKVNPSRLPVVIGGLLDVDCSEDVIKNLILVVRGQFSTDELVAEVEKRNRLKLLLPWLEARIHEGCEEPATHNALAKIYIDSNNNPERFLRENPYYDSRVVGKYCEKRDPHLACVAYERGQCDLELINVCNENSLFKSLSRYLVRRKDPELWGSVLLESNPYRRPLIDQVVQTALSETQDPEEVSVTVKAFMTADLPNELIELLEKIVLDNSVFSEHRNLQNLLILTAIKADRTRVMEYINRLDNYDAPDIANIAISNELFEEAFAIFRKFDVNTSAVQVLIEHIGNLDRAYEFAERCNEPAVWSQLAKAQLQKGMVKEAIDSYIKADDPSSYMEVVQAANTSGNWEELVKYLQMARKKARESYVETELIFALAKTNRLAELEEFINGPNNAHIQQVGDRCYDEKMYDAAKLLYNNVSNFGRLASTLVHLGEYQAAVDGARKANSTRTWKEVCFACVDGKEFRLAQMCGLHIVVHADELEELINYYQDRGYFEELITMLEAALGLERAHMGMFTELAILYSKFKPQKMREHLELFWSRVNIPKVLRAAEQAHLWAELVFLYDKYEEYDNAIITMMNHPTDAWKEGQFKDIITKVANVELYYRAIQFYLEFKPLLLNDLLMVLSPRLDHTRAVNYFSKVKQLPLVKPYLRSVQNHNNKSVNESLNNLFITEEDYQVKPFDSCT

SEQ ID NO: 881767 - protein, 1480 aa, Homo sapiens
  misc_feature (1454)..(1454): Xaa can be any naturally occurring amino acid
  misc_feature (1469)..(1469): Xaa can be any naturally occurring amino acid
MAQILPIRFQEHLQLQNLGINPANIGFSTLTMESDKFICIREKVGEQAQVVIIDMNDPSNPIRRPISADSAIMNPASKVIALKAGKTLQIFNIEMKSKMKAHTMTDDVTFWKWISLNTVALVTDNAVYHWSMEGESQPVKMFDRHSSLAGCQIINYRTDAKQKWLLLTGISAQQNRVVGAMQLYSVDRKVSQPIEGHAASFAQFKMEGNAEESTLFCFAVRGQAGGKLHIIEVGTPPTGNQPFPKKAVDVFFPPEAQNDFPVAMQISEKHDVVFLITKYGYIHLYDLETGTCIYMNRISGETIFVTAPHEATAGIIGVNRKGQVLSVCVEEENIIPYITNVLQNPDLALRMAVRNNLAGAEELFARKFNALFAQGNYSEAAKVAANAPKGILRTPDTIRRFQSVPAQPGQTSPLLQYFGILLDQGQLNKYESLELCRPVLQQGRKQLLEKWLKEDKLECSEELGDLVKSVDPTLALSVYLRANVPNKVIQCFAETGQVQKIVLYAKKVGYTPDWIFLLRNVMRISPDQGQQFAQMLVQDEEPLADITQIVDVFMEYNLIQQCTAFLLDALKNNRPSEGPLQTRLLEMNLMHAPQVADAILGNQMFTHYDRAHIAQLCEKAGLLQRALEHFTDLYDIKRAVVHTHLLNPEWLVNYFGSLSVEDSLECLRAMLSANIRQNLQICVQVASKYHEQLSTQSLIELFESFKSFEGLFYFLGSIVNFSQDPDVHFKYIQAACKTGQIKEVERICRESNCYDPERVKNFLKEAKLTDQLPLIIVCDRFDFVHDLVLYLYRNNLQKYIEIYVQKVNPSRLPVVIGGLLDVDCSEDVIKNLILVVRGQFSTDELVAEVEKRNRLKLLLPWLEARIHEGCEEPATHNALAKIYIDSNNNPERFLRENPYYDSRVVGKYCEKRDPHLACVAYERGQCDLELINVCNENSLFKSLSRYLVRRKDPELWGSVLLESNPYRRPLIDQVVQTALSETQDPEEVSVTVKAFMTADLPNELIELLEKIVLDNSVFSEHRNLQNLLILTAIKADRTRVMEYINRLDNYDAPDIANIAISNELFEEAFAIFRKFDVNTSAVQVLIEHIGNLDRAYEFAERCNEPAVWSQLAKAQLQKGMVKEAIDSYIKADDPSSYMEVVQAANTSGNWEELVKYLQMARKKARESYVETELIFALAKTNRLAELEEFINGPNNAHIQQVGDRCYDEKMYDAAKLLYNNVSNFGRLASTLVHLGEYQAAVDGARKANSTRTWKEVCFACVDGKEFRLAQMCGLHIVVHADELEELINYYQDRGYFEELITMLEAALGLERAHMGMFTELAILYSKFKPQKMREHLELFWSRVNIPKVLRAAEQAHLWAELVFLYDKYEEYDNAIITMMNHPTDAWKEGQFKDIITKVANVELYYRAIQFYLEFKPLLLNDLLMVLSPRLDHTRAVNYFSKVNSTLGNVLRQSXPYTNAVNDHDIFIQXRYRPAHIIYAL

SEQ ID NO: 881768 - protein, 1330 aa, Homo sapiens
MAQILPIRFQEHLQLQNLGINPANIGFSTLTMESDKFICIREKVGEQAQVVIIDMNDPSNPIRRPISADSAIMNPASKVIALKAGKTLQIFNIEMKSKMKAHTMTDDVTFWKWISLNTVALVTDNAVYHWSMEGESQPVKMFDRHSSLAGCQIINYRTDAKQKWLLLTGISAQQNRVVGAMQLYSVDRKVSQPIEGHAASFAQFKMEGNAEESTLFCFAVRGQAGGKLHIIEVGTPPTGNQPFPKKAVDVFFPPEAQNDFPVAMQISEKHDVVFLITKYGYIHLYDLETGTCIYMNRISGETIFVTAPHEATAGIIGVNRKGQVLSVCVEEENIIPYITNVLQNPDLALRMAVRNNLAGAEELFARKFNALFAQGNYSEAAKVAANAPKGILRTPDTIRRFQSVPAQPGQTSPLLQYFGILLDQGQLNKYESLELCRPVLQQGRKQLLEKWLKEDKLECSEELGDLVKSVDPTLALSVYLRANVPNKVIQCFAETGQVQKIVLYAKKVGYTPDWIFLLRNVMRISPDQGQQFAQMLVQDEEPLADITQIVDVFMEYNLIQQCTAFLLDALKNNRPSEGPLQTRLLEMNLMHAPQVADAILGNQMFTHYDRAHIAQLCEKAGLLQRALEHFTDLYDIKRAVVHTHLLNPEWLVNYFGSLSVEDSLECLRAMLSANIRQNLQICVQVASKYHEQLSTQSLIELFESFKSFEGLFYFLGSIVNFSQDPDVHFKYIQAACKTGQIKEVERICRESNCYDPERVKNFLKEAKLTDQLPLIIVCDRFDFVHDLVLYLYRNNLQKYIEIYVQKVNPSRLPVVIGGLLDVDCSEDVIKNLILVVRGQFSTDELVAEVEKRNRLKLLLPWLEARIHEGCEEPATHNALAKIYIDSNNNPERFLRENPYYDSRVVGKYCEKRDPHLACVAYERGQCDLELINVCNENSLFKSLSRYLVRRKDPELWGSVLLESNPYRRPLIDQVVQTALSETQDPEEVSVTVKAFMTADLPNELIELLEKIVLDNSVFSEHRNLQNLLILTAIKADRTRVMEYINRLDNYDAPDIANIAISNELFEEAFAIFRKFDVNTSAVQVLIEHIGNLDRAYEFAERCNEPAVWSQLAKAQLQKGMVKEAIDSYIKADDPSSYMEVVQAANTSGNWEELVKYLQMARKKARESYVETELIFALAKTNRLAELEEFINGPNNAHIQQVGDRCYDEKMYDAAKLLYNNVSNFGRLASTLVHLGEYQAAVDGARKANSTRTWKEVCFACVDGKEFRLAQMCGLHIVVHADELEELINYYQDRGYFEELITMLEAALGLEQGRRAEQDRRPDQPGDLSKP

SEQ ID NO: 881769 - protein, 1204 aa, Homo sapiens
MAQILPIRFQEHLQLQNLGINPANIGFSTLTMESDKFICIREKVGEQAQVVIIDMNDPSNPIRRPISADSAIMNPASKVIALKAGKTLQIFNIEMKSKMKAHTMTDDVTFWKWISLNTVALVTDNAVYHWSMEGESQPVKMFDRHSSLAGCQIINYRTDAKQKWLLLTGISAQQNRVVGAMQLYSVDRKVSQPIEGHAASFAQFKMEGNAEESTLFCFAVRGQAGGKLHIIEVGTPPTGNQPFPKKAVDVFFPPEAQNDFPVAMQISEKHDVVFLITKYGYIHLYDLETGTCIYMNRISGETIFVTAPHEATAGIIGVNRKGQVLSVCVEEENIIPYITNVLQNPDLALRMAVRNNLAGAEELFARKFNALFAQGNYSEAAKVAANAPKGILRTPDTIRRFQSVPAQPGQTSPLLQYFGILLDQGQLNKYESLELCRPVLQQGRKQLLEKWLKEDKLECSEELGDLVKSVDPTLALSVYLRANVPNKVIQCFAETGQVQKIVLYAKKVGYTPDWIFLLRNVMRISPDQGQQFAQMLVQDEEPLADITQIVDVFMEYNLIQQCTAFLLDALKNNRPSEGPLQTRLLEMNLMHAPQVADAILGNQMFTHYDRAHIAQLCEKAGLLQRALEHFTDLYDIKRAVVHTHLLNPEWLVNYFGSLSVEDSLECLRAMLSANIRQNLQICVQVASKYHEQLSTQSLIELFESFKSFEGLFYFLGSIVNFSQDPDVHFKYIQAACKTGQIKEVERICRESNCYDPERVKNFLKEAKLTDQLPLIIVCDRFDFVHDLVLYLYRNNLQKYIEIYVQKVNPSRLPVVIGGLLDVDCSEDVIKNLILVVRGQFSTDELVAEVEKRNRLKLLLPWLEARIHEGCEEPATHNALAKIYIDSNNNPERFLRENPYYDSRVVGKYCEKRDPHLACVAYERGQCDLELINVCNENSLFKSLSRYLVRRKDPELWGSVLLESNPYRRPLIDQVVQTALSETQDPEEVSVTVKAFMTADLPNELIELLEKIVLDNSVFSEHRNLQNLLILTAIKADRTRVMEYINRLDNYDAPDIANIAISNELFEEAFAIFRKFDVNTSAVQVLIEHIGNLDRAYEFAERCNEPAVWSQLAKAQLQKGMVKEAIDSYIKADDPSSYMEVVQAANTSGNWEELVKYLQMARKKARESYVETELIFALAKTNRLAELEEFIRGVNPMVRARIVTW

SEQ ID NO: 881770 - protein, 1086 aa, Homo sapiens
MAQILPIRFQEHLQLQNLGINPANIGFSTLTMESDKFICIREKVGEQAQVVIIDMNDPSNPIRRPISADSAIMNPASKVIALKAGKTLQIFNIEMKSKMKAHTMTDDVTFWKWISLNTVALVTDNAVYHWSMEGESQPVKMFDRHSSLAGCQIINYRTDAKQKWLLLTGISAQQNRVVGAMQLYSVDRKVSQPIEGHAASFAQFKMEGNAEESTLFCFAVRGQAGGKLHIIEVGTPPTGNQPFPKKAVDVFFPPEAQNDFPVAMQISEKHDVVFLITKYGYIHLYDLETGTCIYMNRISGETIFVTAPHEATAGIIGVNRKGQVLSVCVEEENIIPYITNVLQNPDLALRMAVRNNLAGAEELFARKFNALFAQGNYSEAAKVAANAPKGILRTPDTIRRFQSVPAQPGQTSPLLQYFGILLDQGQLNKYESLELCRPVLQQGRKQLLEKWLKEDKLECSEELGDLVKSVDPTLALSVYLRANVPNKVIQCFAETGQVQKIVLYAKKVGYTPDWIFLLRNVMRISPDQGQQFAQMLVQDEEPLADITQIVDVFMEYNLIQQCTAFLLDALKNNRPSEGPLQTRLLEMNLMHAPQVADAILGNQMFTHYDRAHIAQLCEKAGLLQRALEHFTDLYDIKRAVVHTHLLNPEWLVNYFGSLSVEDSLECLRAMLSANIRQNLQICVQVASKYHEQLSTQSLIELFESFKSFEGLFYFLGSIVNFSQDPDVHFKYIQAACKTGQIKEVERICRESNCYDPERVKNFLKEAKLTDQLPLIIVCDRFDFVHDLVLYLYRNNLQKYIEIYVQKVNPSRLPVVIGGLLDVDCSEDVIKNLILVVRGQFSTDELVAEVEKRNRLKLLLPWLEARIHEGCEEPATHNALAKIYIDSNNNPERFLRENPYYDSRVVGKYCEKRDPHLACVAYERGQCDLELINVCNENSLFKSLSRYLVRRKDPELWGSVLLESNPYRRPLIDQVVQTALSETQDPEEVSVTVKAFMTADLPNELIELLEKIVLDNSVFSEHRNLQNLLILTAIKADRTRVMEYINRLDNYDAPDIANIAISNELFEEAFAIFRKFDVNTSAVQVIN

SEQ ID NO: 881771 - protein, 1036 aa, Homo sapiens
MAQILPIRFQEHLQLQNLGINPANIGFSTLTMESDKFICIREKVGEQAQVVIIDMNDPSNPIRRPISADSAIMNPASKVIALKAGKTLQIFNIEMKSKMKAHTMTDDVTFWKWISLNTVALVTDNAVYHWSMEGESQPVKMFDRHSSLAGCQIINYRTDAKQKWLLLTGISAQQNRVVGAMQLYSVDRKVSQPIEGHAASFAQFKMEGNAEESTLFCFAVRGQAGGKLHIIEVGTPPTGNQPFPKKAVDVFFPPEAQNDFPVAMQISEKHDVVFLITKYGYIHLYDLETGTCIYMNRISGETIFVTAPHEATAGIIGVNRKGQVLSVCVEEENIIPYITNVLQNPDLALRMAVRNNLAGAEELFARKFNALFAQGNYSEAAKVAANAPKGILRTPDTIRRFQSVPAQPGQTSPLLQYFGILLDQGQLNKYESLELCRPVLQQGRKQLLEKWLKEDKLECSEELGDLVKSVDPTLALSVYLRANVPNKVIQCFAETGQVQKIVLYAKKVGYTPDWIFLLRNVMRISPDQGQQFAQMLVQDEEPLADITQIVDVFMEYNLIQQCTAFLLDALKNNRPSEGPLQTRLLEMNLMHAPQVADAILGNQMFTHYDRAHIAQLCEKAGLLQRALEHFTDLYDIKRAVVHTHLLNPEWLVNYFGSLSVEDSLECLRAMLSANIRQNLQICVQVASKYHEQLSTQSLIELFESFKSFEGLFYFLGSIVNFSQDPDVHFKYIQAACKTGQIKEVERICRESNCYDPERVKNFLKEAKLTDQLPLIIVCDRFDFVHDLVLYLYRNNLQKYIEIYVQKVNPSRLPVVIGGLLDVDCSEDVIKNLILVVRGQFSTDELVAEVEKRNRLKLLLPWLEARIHEGCEEPATHNALAKIYIDSNNNPERFLRENPYYDSRVVGKYCEKRDPHLACVAYERGQCDLELINVCNENSLFKSLSRYLVRRKDPELWGSVLLESNPYRRPLIDQVVQTALSETQDPEEVSVTVKAFMTADLPNELIELLEKIVLDNSVFSEHRNLQTLSTAELTYRV

SEQ ID NO: 881772 - protein, 937 aa, Homo sapiens
MAQILPIRFQEHLQLQNLGINPANIGFSTLTMESDKFICIREKVGEQAQVVIIDMNDPSNPIRRPISADSAIMNPASKVIALKAGKTLQIFNIEMKSKMKAHTMTDDVTFWKWISLNTVALVTDNAVYHWSMEGESQPVKMFDRHSSLAGCQIINYRTDAKQKWLLLTGISAQQNRVVGAMQLYSVDRKVSQPIEGHAASFAQFKMEGNAEESTLFCFAVRGQAGGKLHIIEVGTPPTGNQPFPKKAVDVFFPPEAQNDFPVAMQISEKHDVVFLITKYGYIHLYDLETGTCIYMNRISGETIFVTAPHEATAGIIGVNRKGQVLSVCVEEENIIPYITNVLQNPDLALRMAVRNNLAGAEELFARKFNALFAQGNYSEAAKVAANAPKGILRTPDTIRRFQSVPAQPGQTSPLLQYFGILLDQGQLNKYESLELCRPVLQQGRKQLLEKWLKEDKLECSEELGDLVKSVDPTLALSVYLRANVPNKVIQCFAETGQVQKIVLYAKKVGYTPDWIFLLRNVMRISPDQGQQFAQMLVQDEEPLADITQIVDVFMEYNLIQQCTAFLLDALKNNRPSEGPLQTRLLEMNLMHAPQVADAILGNQMFTHYDRAHIAQLCEKAGLLQRALEHFTDLYDIKRAVVHTHLLNPEWLVNYFGSLSVEDSLECLRAMLSANIRQNLQICVQVASKYHEQLSTQSLIELFESFKSFEGLFYFLGSIVNFSQDPDVHFKYIQAACKTGQIKEVERICRESNCYDPERVKNFLKEAKLTDQLPLIIVCDRFDFVHDLVLYLYRNNLQKYIEIYVQKVNPSRLPVVIGGLLDVDCSEDVIKNLILVVRGQFSTDELVAEVEKRNRLKLLLPWLEARIHEGCEEPATHNALAKIYIDSNNNPERFLRENPYYDSRVVGKYCEKRDPHLACVAYERGQCDLELINVSTAS

SEQ ID NO: 881773 - protein, 810 aa, Homo sapiens
MAQILPIRFQEHLQLQNLGINPANIGFSTLTMESDKFICIREKVGEQAQVVIIDMNDPSNPIRRPISADSAIMNPASKVIALKAGKTLQIFNIEMKSKMKAHTMTDDVTFWKWISLNTVALVTDNAVYHWSMEGESQPVKMFDRHSSLAGCQIINYRTDAKQKWLLLTGISAQQNRVVGAMQLYSVDRKVSQPIEGHAASFAQFKMEGNAEESTLFCFAVRGQAGGKLHIIEVGTPPTGNQPFPKKAVDVFFPPEAQNDFPVAMQISEKHDVVFLITKYGYIHLYDLETGTCIYMNRISGETIFVTAPHEATAGIIGVNRKGQVLSVCVEEENIIPYITNVLQNPDLALRMAVRNNLAGAEELFARKFNALFAQGNYSEAAKVAANAPKGILRTPDTIRRFQSVPAQPGQTSPLLQYFGILLDQGQLNKYESLELCRPVLQQGRKQLLEKWLKEDKLECSEELGDLVKSVDPTLALSVYLRANVPNKVIQCFAETGQVQKIVLYAKKVGYTPDWIFLLRNVMRISPDQGQQFAQMLVQDEEPLADITQIVDVFMEYNLIQQCTAFLLDALKNNRPSEGPLQTRLLEMNLMHAPQVADAILGNQMFTHYDRAHIAQLCEKAGLLQRALEHFTDLYDIKRAVVHTHLLNPEWLVNYFGSLSVEDSLECLRAMLSANIRQNLQICVQVASKYHEQLSTQSLIELFESFKSFEGLFYFLGSIVNFSQDPDVHFKYIQAACKTGQIKEVERICRESNCYDPERVKNFLKEAKLTDQLPLIIVCDRFDFVHDLVLYLYRNNLQKYIEIYVQKVSNM

SEQ ID NO: 881774 - protein, 737 aa, Homo sapiens
MAQILPIRFQEHLQLQNLGINPANIGFSTLTMESDKFICIREKVGEQAQVVIIDMNDPSNPIRRPISADSAIMNPASKVIALKAGKTLQIFNIEMKSKMKAHTMTDDVTFWKWISLNTVALVTDNAVYHWSMEGESQPVKMFDRHSSLAGCQIINYRTDAKQKWLLLTGISAQQNRVVGAMQLYSVDRKVSQPIEGHAASFAQFKMEGNAEESTLFCFAVRGQAGGKLHIIEVGTPPTGNQPFPKKAVDVFFPPEAQNDFPVAMQISEKHDVVFLITKYGYIHLYDLETGTCIYMNRISGETIFVTAPHEATAGIIGVNRKGQVLSVCVEEENIIPYITNVLQNPDLALRMAVRNNLAGAEELFARKFNALFAQGNYSEAAKVAANAPKGILRTPDTIRRFQSVPAQPGQTSPLLQYFGILLDQGQLNKYESLELCRPVLQQGRKQLLEKWLKEDKLECSEELGDLVKSVDPTLALSVYLRANVPNKVIQCFAETGQVQKIVLYAKKVGYTPDWIFLLRNVMRISPDQGQQFAQMLVQDEEPLADITQIVDVFMEYNLIQQCTAFLLDALKNNRPSEGPLQTRLLEMNLMHAPQVADAILGNQMFTHYDRAHIAQLCEKAGLLQRALEHFTDLYDIKRAVVHTHLLNPEWLVNYFGSLSVEDSLECLRAMLSANIRQNLQICVQVASKYHEQLSTQSLIELFESFKSFEGLFYFLGSIVNFSQDPDVHFKYIQAARP

SEQ ID NO: 881775 - protein, 701 aa, Homo sapiens
MAQILPIRFQEHLQLQNLGINPANIGFSTLTMESDKFICIREKVGEQAQVVIIDMNDPSNPIRRPISADSAIMNPASKVIALKAGKTLQIFNIEMKSKMKAHTMTDDVTFWKWISLNTVALVTDNAVYHWSMEGESQPVKMFDRHSSLAGCQIINYRTDAKQKWLLLTGISAQQNRVVGAMQLYSVDRKVSQPIEGHAASFAQFKMEGNAEESTLFCFAVRGQAGGKLHIIEVGTPPTGNQPFPKKAVDVFFPPEAQNDFPVAMQISEKHDVVFLITKYGYIHLYDLETGTCIYMNRISGETIFVTAPHEATAGIIGVNRKGQVLSVCVEEENIIPYITNVLQNPDLALRMAVRNNLAGAEELFARKFNALFAQGNYSEAAKVAANAPKGILRTPDTIRRFQSVPAQPGQTSPLLQYFGILLDQGQLNKYESLELCRPVLQQGRKQLLEKWLKEDKLECSEELGDLVKSVDPTLALSVYLRANVPNKVIQCFAETGQVQKIVLYAKKVGYTPDWIFLLRNVMRISPDQGQQFAQMLVQDEEPLADITQIVDVFMEYNLIQQCTAFLLDALKNNRPSEGPLQTRLLEMNLMHAPQVADAILGNQMFTHYDRAHIAQLCEKAGLLQRALEHFTDLYDIKRAVVHTHLLNPEWLVNYFGSLSVEDSLECLRAMLSANIRQNLQICVQVASKYHDISHHGDPLGR

SEQ ID NO: 881776 - protein, 73 aa, Homo sapiens
RCDGDSCFVVAVRCARVSAPVGVHPRAGHILGASSAIGFTPLVTATRGVVNHQWDTGSFVLMVGPPDSPVRPT

SEQ ID NO: 881777 - protein, 389 aa, Homo sapiens
MAQILPIRFQEHLQLQNLGINPANIGFSTLTMESDKFICIREKVGEQAQVVIIDMNDPSNPIRRPISADSAIMNPASKVIALKAGKTLQIFNIEMKSKMKAHTMTDDVTFWKWISLNTVALVTDNAVYHWSMEGESQPVKMFDRHSSLAGCQIINYRTDAKQKWLLLTGISAQQNRVVGAMQLYSVDRKVSQPIEGHAASFAQFKMEGNAEESTLFCFAVRGQAGGKLHIIEVGTPPTGNQPFPKKAVDVFFPPEAQNDFPVAMQISEKHDVVFLITKYGYIHLYDLETGTCIYMNRISGETIFVTAPHEATAGIIGVNRKGQVLSVCVEEENIIPYITNVLQNPDLALRMAVRNNLAGAEELFARTLIRLREETPQTKMAKFVIRPAT

SEQ ID NO: 881778 - protein, 327 aa, Homo sapiens
MAQILPIRFQEHLQLQNLGINPANIGFSTLTMESDKFICIREKVGEQAQVVIIDMNDPSNPIRRPISADSAIMNPASKVIALKAGKTLQIFNIEMKSKMKAHTMTDDVTFWKWISLNTVALVTDNAVYHWSMEGESQPVKMFDRHSSLAGCQIINYRTDAKQKWLLLTGISAQQNRVVGAMQLYSVDRKVSQPIEGHAASFAQFKMEGNAEESTLFCFAVRGQAGGKLHIIEVGTPPTGNQPFPKKAVDVFFPPEAQNDFPVAMQISEKHDVVFLITKYGYIHLYDLETGTCIYMNRISGETIFVTAPHEATAGIIGVNRKGQVRKP

SEQ ID NO: 881779 - protein, 176 aa, Homo sapiens
MAQILPIRFQEHLQLQNLGINPANIGFSTLTMESDKFICIREKVGEQAQVVIIDMNDPSNPIRRPISADSAIMNPASKVIALKAGKTLQIFNIEMKSKMKAHTMTDDVTFWKWISLNTVALVTDNAVYHWSMEGESQPVKMFDRHSSLAGCQIINYRTDAKQKWLLLTGISAQVTF

SEQ ID NO: 881780 - protein, 184 aa, Homo sapiens
MAQILPIRFQEHLQLQNLGINPANIGFSTLTMESDKFICIREKVGEQAQVVIIDMNDPSNPIRRPISADSAIMNPASKVIALKAGKTLQIFNIEMKSKMKAHTMTDDVTFWKWISLNTVALVTDNAVYHWSMEGESQPVKMFDRHSSLAGCQIINYRTDAKQKWLLLTGISAQQNRVESDRDPL

SEQ ID NO: 881781 - protein, 160 aa, Homo sapiens
MAQILPIRFQEHLQLQNLGINPANIGFSTLTMESDKFICIREKVGEQAQVVIIDMNDPSNPIRRPISADSAIMNPASKVIALKAGKTLQIFNIEMKSKMKAHTMTDDVTFWKWISLNTVALVTDNAVYHWSMEGESQPVKMFDRHLTHEDAIYTHEDAIY

SEQ ID NO: 881782 - protein, 126 aa, Homo sapiens
SALRPVPPLRLSWPLEPPPPTRALSSACQFPASPERILLSPASPLPFSSSPLESPGSHCPAAPVTGGDHNPRQRHGPDSANSFSGASPGAAGPGLVRAVEKVVGRMEDAGVWARAVSELEGRGGCR

SEQ ID NO: 881783 - protein, 241 aa, Homo sapiens
  misc_feature (238)..(238): Xaa can be any naturally occurring amino acid
TLRGSPLRYDPERVKNNLKEAKLTDQLPLIIVCDRFDFVHDLVLYLYRNNLQKYIEIYVQKVNPSRLPVVIGGLLDVDCSEDVIKNLILVVRGQFSTDELVAEVEKRNRLKLLLPWLEARIHEGCEEPATHNALAKIYIDSNNNPERFLRENPYYDSRVVGKYCEKRDPHLACVAYERGQCDLELINVCNENSLFKSLSRYLVRRKDPELWGSVLLESNPYRRPLIDQVVQTALSETXGPP

SEQ ID NO: 881784 - protein, 1675 aa, Homo sapiens; identical to SEQ ID NO: 881749

SEQ ID NO: 881785 - protein, 1675 aa, Homo sapiens; identical to SEQ ID NO: 881749

SEQ ID NO: 881786 - protein, 1675 aa, Homo sapiens; identical to SEQ ID NO: 881749

SEQ ID NO: 881787 - protein, 1675 aa, Homo sapiens; identical to SEQ ID NO: 881749

SEQ ID NO: 881788 - protein, 584 aa, Homo sapiens
TLRIPVSEMFTNEPAVWSQLAKAQLQKGMVKEAIDSYIKADDPSSYMEVVQAANTSGNWEELVKYLQMARKKARESYVETELIFALAKTNRLAELEEFINGPNNAHIQQVGDRCYDEKMYDAAKLLYNNVSNFGRLASTLVHLGEYQAAVDGARKANSTRTWKEVCFACVDGKEFRLAQMCGLHIVVHADELEELINYYQDRGYFEELITMLEAALGLERAHMGMFTELAILYSKFKPQKMREHLELFWSRVNIPKVLRAAEQAHLWAELVFLYDKYEEYDNAIITMMNHPTDAWKEGQFKDIITKVANVELYYRAIQFYLEFKPLLLNDLLMVLSPRLDHTRAVNYFSKVKQLPLVKPYLRSVQNHNNKSVNESLNNLFITEEDYQALRTSIDAYDNFDNISLAQRLEKHELIEFRRIAAYLFKGNNRWKQSVELCKKDSLYKDAMQYASESKDTELAEELLQWFLQEEKRECFGACLFTCYDLLRPDVVLETAWRHNIMDFAMPYFIQVMKEYLTKVDKLDASESLRKEEEQATETQPIVYGQPQLMLTAGPSVAVPPQAPFGYGYTAPPYGQPQPGFGYSM

SEQ ID NO: 881789 - protein, 517 aa, Homo sapiens
MARKKARESYVETELIFALAKTNRLAELEEFINGPNNAHIQQVGDRCYDEKMYDAAKLLYNNVSNFGRLASTLVHLGEYQAAVDGARKANSTRTWKEVCFACVDGKEFRLAQMCGLHIVVHADELEELINYYQDRGYFEELITMLEAALGLERAHMGMFTELAILYSKFKPQKMREHLELFWSRVNIPKVLRAAEQAHLWAELVFLYDKYEEYDNAIITMMNHPTDAWKEGQFKDIITKVANVELYYRAIQFYLEFKPLLLNDLLMVLSPRLDHTRAVNYFSKVKQLPLVKPYLRSVQNHNNKSVNESLNNLFITEEDYQALRTSIDAYDNFDNISLAQRLEKHELIEFRRIAAYLFKGNNRWKQSVELCKKDSLYKDAMQYASESKDTELAEELLQWFLQEEKRECFGACLFTCYDLLRPDVVLETAWRHNIMDFAMPYFIQVMKEYLTKVDKLDASESLRKEEEQATETQPIVYGQPQLMLTAGPSVAVPPQAPFGYGYTAPPYGQPQPGFGYSM

SEQ ID NO: 881790 - protein, 1657 aa, Homo sapiens
MAQILPIRFQEHLQLQNLGINPANIGFSTLTMESDKFICIREKVGEQAQVVIIDMNDPSNPIRRPISADSAIMNPASKVIALKAGKTLQIFNIEMKSKMKAHTMTDDVTFWKWISLNTVALVTDNAVYHWSMEGESQPVKMFDRHSSLAGCQIINYRTDAKQKWLLLTGISAQQNRVVGAMQLYSVDRKVSQPIEGHAASFAQFKMEGNAEESTLFCFAVRGQAGGKLHIIEVGTPPTGNQPFPKKAVDVFFPPEAQNDFPVAMQISEKHDVVFLITKYGYIHLYDLETGTCIYMNRISGETIFVTAPHEATAGIIGVNRKGQVLSVCVEEENIIPYITNVLQNPDLALRMAVRNNLAGAEELFARKFNALFAQGNYSEAAKVAANAPKGILRTPDTIRRFQSVPAQPGQTSPLLQYFGILLDQGQLNKYESLELCRPVLQQGRKQLLEKWLKEDKLECSEELGDLVKSVDPTLALSVYLRANVPNKVIQCFAETGQVQKIVLYAKKVGYTPDWIFLLRNVMRISPDQGQQFAQMLVQDEEPLADITQIVDVFMEYNLIQQCTAFLLDALKNNRPSEGPLQTRLLEMNLMHAPQVADAILGNQMFTHYDRAHIAQLCEKAGLLQRALEHFTDLYDIKRAVVHTHLLNPEWLVNYFGSLSVEDSLECLRAMLSANIRQNLQICVQVASKYHEQLSTQSLIELFESFKSFEGLFYFLGSIVNFSQDPDVHFKYIQAACKTGQIKEVERICRESNCYDPERVKNFLKEAKLTDQLPLIIVCDRFDFVHDLVLYLYRNNLQKYIEIYVQKVNPSRLPVVIGGLLDVDCSEDVIKNLILVVRGQFSTDELVAEVEKRNRLKLLLPWLEARIHEGCEEPATHNALAKIYIDSNNNPERFLRENPYYDSRVVGKYCEKRDPHLACVAYERGQCDLELINVCNENSLFKSLSRYLVRRKDPELWGSVLLESNPYRRPLIDQVVQTALSETQDPEEVSVTVKAFMTADLPNELIELLEKIVLDNSVFSEHRNLQNLLILTAIKADRTRVMEYINRLDNYDAPDIANIAISNELFEEAFAIFRKFDVNTSAVQVLIEHIGNLDRAYEFAERCNEPAVWSQLAKAQLQKGMVKEAIDSYIKADDPSSYMEVVQAANTSGNWEELVKYLQMARKKARESYVETELIFALAKTNRLAELEEFINGPNNAHIQQVGDRCYDEKMYDAAKLLYNNVSNFGRLASTLVHLGEYQAAVDGARKANSTRTWKEVCFACVDGKEFRLAQMCGLHIVVHADELEELINYYQDRGYFEELITMLEAALGLERAHMGMFTELAILYSKFKPQKMREHLELFWSRVNIPKVLRAAEQAHLWAELVFLYDKYEEYDNAIITMMNHPTDAWKEGQFKDIITKVANVELYYRAIQFYLEFKPLLLNDLLMVLSPRLDHTRAVNYFSKVKQLPLVKPYLRSVQNHNNKSVNESLNNLFITEEDYQALRTSIDAYDNFDNISLAQRLEKHELIEFRRIAAYLFKGNNRWKQSVELCKKDSLYKDAMQYASESKDTELAEELLQWFLQEENVVLETAWRHNIMDFAMPYFIQVMKEYLTKVDKLDASESLRKEEEQATETQPIVYGQPQLMLTAGPSVAVPPQAPFGYGYTAPPYGQPQPGFGYSM

SEQ ID NO: 881791 - protein, 303 aa, Homo sapiens
PDRHTGPSHPTDAWKEGQFKDIITKVANVELYYRAIQFYLEFKPLLLNDLLMVLSPRLDHTRAVNYFSKVKQLPLVKPYLRSVQNHNNKSVNESLNNLFITEEDYQALRTSIDAYDNFDNISLAQRLEKHELIEFRRIAAYLFKGNNRWKQSVELCKKDSLYKDAMQYASESKDTELAEELLQWFLQEEKRECFGACLFTCYDLLRPDVVLETAWRHNIMDFAMPYFIQVMKEYLTKVDKLDASESLRKEEEQATETQPIVYGQPQLMLTAGPSVAVPPQAPFGYGYTAPPYGQPQPGFGYSM

SEQ ID NO: 881792 - protein, 154 aa, Homo sapiens
KRTMARPKKDSLYKDAMQYASESKDTELAEELLQWFLQEEKRECFGACLFTCYDLLRPDVVLETAWRHNIMDFAMPYFIQVMKEYLTKVDKLDASESLRKEEEQATETQPIVYGQPQLMLTAGPSVAVPPQAPFGYGYTAPPYGQPQPGFGYSM

SEQ ID NO: 881793 - protein, 1675 aa, Homo sapiens; identical to SEQ ID NO: 881749

SEQ ID NO: 881794 - protein, 1630 aa, Homo sapiens
MAQILPIRFQEHLQLQNLGINPANIGFSTLTMESDKFICIREKVGEQAQVVIIDMNDPSNPIRRPISADSAIMNPASKVIALKAGKTLQIFNIEMKSKMKAHTMTDDVTFWKWISLNTVALVTDNAVYHWSMEGESQPVKMFDRHSSLAGCQIINYRTDAKQKWLLLTGISAQQNRVVGAMQLYSVDRKVSQPIEGHAASFAQFKMEGNAEESTLFCFAVRGQAGGKLHIIEVGTPPTGNQPFPKKAVDVFFPPEAQNDFPVAMQISEKHDVVFLITKYGYIHLYDLETGTCIYMNRISGETIFVTAPHEATAGIIGVNRKGQVLSVCVEEENIIPYITNVLQNPDLALRMAVRNNLAGAEELFARKFNALFAQGNYSEAAKVAANAPKGILRTPDTIRRFQSVPAQPGQTSPLLQYFGILLDQGQLNKYESLELCRPVLQQGRKQLLEKWLKEDKLECSEELGDLVKSVDPTLALSVYLRANVPNKVIQCFAETGQVQKIVLYAKKVGYTPDWIFLLRNVMRISPDQGQQFAQMLVQDEEPLADITQIVDVFMEYNLIQQCTAFLLDALKNNRPSEGPLQTRLLEMNLMHAPQVADAILGNQMFTHYDRAHIAQLCEKAGLLQRALEHFTDLYDIKRAVVHTHLLNPEWLVNYFGSLSVEDSLECLRAMLSANIRQNLQICVQVASKYHEQLSTQSLIELFESFKSFEGLFYFLGSIVNFSQDPDVHFKYIQAACKTGQIKEVERICRESNCYDPERVKNFLKEAKLTDQLPLIIVCDRFDFVHDLVLYLYRNNLQKYIEIYVQKVNPSRLPVVIGGLLDVDCSEDVIKNLILVVRGQFSTDELVAEVEKRNRLKLLLPWLEARIHEGCEEPATHNALAKIYIDSNNNPERFLRENPYYDSRVVGKYCEKRDPHLACVAYERGQCDLELINVCNENSLFKSLSRYLVRRKDPELWGSVLLESNPYRRPLIDQVVQTALSETQDPEEVSVTVKAFMTADLPNELIELLEKIVLDNSVFSEHRNLQNLLILTAIKADRTRVMEYINRLDNYDAPDIANIAISNELFEEAFAIFRKFDVNTSAVQVLIEHIGNLDRAYEFAERCNEPAVWSQLAKAQLQKGMVKEAIDSYIKADDPSSYMEVVQAANTSGNWEELVKYLQMARKKARESYVETELIFALAKTNRLAELEEFINGPNNAHIQQVGDRCYDEKMYDAAKLLYNNVSNFGRLASTLVHLGEYQAAVDGARKANSTRTWKEVCFACVDGKEFRLAQMCGLHIVVHADELEELINYYQDRGYFEELITMLEAALGLERAHMGMFTELAILYSKFKPQKMREHLELFWSRVNIPKVLRAAEQAHLWAELVFLYDKYEEYDNAIITMMNHPTDAWKEGQFKDIITKVANVELYYRAIQFYLEFKPLLLNDLLMVLSPRLDHTRAVNYFSKVKQLPLVKPYLRSVQNHNNKSVNESLNNLFITEEDYQALRTSIDAYDNFDNISLAQRLEKHELIEFRRIAAYLFKGNNRWKQSVELCKKDSLYKDAMQYASESKDTELAEELLQWFLQEEKRECFGACLFTCYDLLRPDVVLETAWRHNIMDFAMPYFIQVMKEYLTKVMTLLSVFRTSFLACKILHAH

SEQ ID NO: 881795 - protein, 1520 aa, Homo sapiens
MAQILPIRFQEHLQLQNLGINPANIGFSTLTMESDKFICIREKVGEQAQVVIIDMNDPSNPIRRPISADSAIMNPASKVIALKAGKTLQIFNIEMKSKMKAHTMTDDVTFWKWISLNTVALVTDNAVYHWSMEGESQPVKMFDRHSSLAGCQIINYRTDAKQKWLLLTGISAQQNRVVGAMQLYSVDRKVSQPIEGHAASFAQFKMEGNAEESTLFCFAVRGQAGGKLHIIEVGTPPTGNQPFPKKAVDVFFPPEAQNDFPVAMQISEKHDVVFLITKYGYIHLYDLETGTCIYMNRISGETIFVTAPHEATAGIIGVNRKGQVLSVCVEEENIIPYITNVLQNPDLALRMAVRNNLAGAEELFARKFNALFAQGNYSEAAKVAANAPKGILRTPDTIRRFQSVPAQPGQTSPLLQYFGILLDQGQLNKYESLELCRPVLQQGRKQLLEKWLKEDKLECSEELGDLVKSVDPTLALSVYLRANVPNKVIQCFAETGQVQKIVLYAKKVGYTPDWIFLLRNVMRISPDQGQQFAQMLVQDEEPLADITQIVDVFMEYNLIQQCTAFLLDALKNNRPSEGPLQTRLLEMNLMHAPQVADAILGNQMFTHYDRAHIAQLCEKAGLLQRALEHFTDLYDIKRAVVHTHLLNPEWLVNYFGSLSVEDSLECLRAMLSANIRQNLQICVQVASKYHEQLSTQSLIELFESFKSFEGLFYFLGSIVNFSQDPDVHFKYIQAACKTGQIKEVERICRESNCYDPERVKNFLKEAKLTDQLPLIIVCDRFDFVHDLVLYLYRNNLQKYIEIYVQKVNPSRLPVVIGGLLDVDCSEDVIKNLILVVRGQFSTDELVAEVEKRNRLKLLLPWLEARIHEGCEEPATHNALAKIYIDSNNNPERFLRENPYYDSRVVGKYCEKRDPHLACVAYERGQCDLELINVCNENSLFKSLSRYLVRRKDPELWGSVLLESNPYRRPLIDQVVQTALSETQDPEEVSVTVKAFMTADLPNELIELLEKIVLDNSVFSEHRNLQNLLILTAIKADRTRVMEYINRLDNYDAPDIANIAISNELFEEAFAIFRKFDVNTSAVQVLIEHIGNLDRAYEFAERCNEPAVWSQLAKAQLQKGMVKEAIDSYIKADDPSSYMEVVQAANTSGNWEELVKYLQMARKKARESYVETELIFALAKTNRLAELEEFINGPNNAHIQQVGDRCYDEKMYDAAKLLYNNVSNFGRLASTLVHLGEYQAAVDGARKANSTRTWKEVCFACVDGKEFRLAQMCGLHIVVHADELEELINYYQDRGYFEELITMLEAALGLERAHMGMFTELAILYSKFKPQKMREHLELFWSRVNIPKVLRAAEQAHLWAELVFLYDKYEEYDNAIITMMNHPTDAWKEGQFKDIITKVANVELYYRAIQFYLEFKPLLLNDLLMVLSPRLDHTRAVNYFSKVKQLPLVKPYLRSVQNHNNKSVNESLNNLFITEEDYQALRTSIDAYDNFDNISLAQRSLSNTRPRRNLIPEQTNIEFQN

SEQ ID NO: 881796 - protein, 258 aa, Homo sapiens
MSGCELSPLGLRVGLSAGPVHGRRFPAPSGPWTGLNLASRQGAGPKPRDSRPYKAAAVGAWHARPEACAHTLSCPAFARLGRARRRPWMSHRTSSTFRAERSFHSSSSSSSSSTSSSASRALPAQDPPMEKALSMFSDDFGSFMRPHSEPLAFPARPGGAGNIKTLGDAYEFAVDVRDFSPEDIIVTTSNNHIEVRAEKLAADGTVMNTFAHKCQLPEDVDPTSVTSALREDGSLTIRARRHPHTEHVQQTFRTEIKI

SEQ ID NO: 881797 - protein, 119 aa, Homo sapiens
MQGLLHASLTAAHPTARPGGAGNIKTLGDAYEFAVDVRDFSPEDIIVTTSNNHIEVRAEKLAADGTVMNTFAHKCQLPEDVDPTSVTSALREDGSLTIRARRHPHTEHVQQTFRTEIKI

SEQ ID NO: 881798 - protein, 258 aa, Homo sapiens; identical to SEQ ID NO: 881796

SEQ ID NO: 881799 - protein, 258 aa, Homo sapiens; identical to SEQ ID NO: 881796

SEQ ID NO: 881800 - protein, 258 aa, Homo sapiens; identical to SEQ ID NO: 881796

SEQ ID NO: 881801 - protein, 250 aa, Homo sapiens
MSGCELSPLGLRVGLSAGPVHGRRFPAPSGPWTGLNLASRQGAGPKPRDSRPYKAAAVGAWHARPEACAHTLSCPAFARLGRARRRPWMSHRTSSTFRAERSFHSSSSSSSSSTSSSASRALPAQDPPMEKALSMFSDDFGSFMRPHSEPLAFPGKCPGPEGRGGAQGGDVCSRAPPKALWLPVGLEQVLHSLQPCVATKTDVATGTDVAMKTGGPLRNSCGPGGWTWFHGHPCSVTTANPSWSPGGLDG

SEQ ID NO: 881802 - protein, 258 aa, Homo sapiens; identical to SEQ ID NO: 881796

SEQ ID NO: 881803 - protein, 343 aa, Homo sapiens
RTAARTPDVRQLQASRRGIAVASWCSPRWFAGEEMAFVKSGWLLRQSTILKRWKKNWFDLWSDGHLIYYDDQTRQNIEDKVHMPMDCINIRTGQECRDTQPPDGKSKDCMLQIVCRDGKTISLCAESTDDCLAWKFTLQDSRTNTAYVGSAVMTDETSVVSSPPPYTAYAAPAPEELHSKGPKIHTTTSAKTQAVLPTRCFFPSESPIRRSVQISVLLPAVNIRRRIKLTFPQPARPRAPRSLCLWQTWFAGKRAPSLPTAATAPALPSCPSPPAPSQALPPSLAGWRSPSSAPLPPEQALAPRSFQLSKHQARPRPHRPGTPPVPAWPGVPPPPPARPPALR

SEQ ID NO: 881804 - protein, 256 aa, Homo sapiens
RTAARTPDVRQLQASRRGIAVASWCSPRWFAGEEMAFVKSGWLLRQSTILKRWKKNWFDLWSDGHLIYYDDQTRQNIEDKVHMPMDCINIRTGQECRDTQPPDGKSKDCMLQIVCRDGKTISLCAESTDDCLAWKFTLQDSRTNTAYVGSAVMTDETSVVSSPPPYTAYAAPAPEQAYGYGPYGGAYPPGTQVVYAANGQAYAVPYQYPYAGLYGQQPANQVIIRERYRDNDSDLALGMLAGAATGMALGSLFWVF

SEQ ID NO: 881805 - protein, 252 aa, Homo sapiens
GLRATRPWVASAEARSPCVLLFSTLFAGEEMAFVKSGWLLRQSTILKRWKKNWFDLWSDGHLIYYDDQTRQNIEDKVHMPMDCINIRTGQECRDTQPPDGKSKDCMLQIVCRDGKTISLCAESTDDCLAWKFTLQDSRTNTAYVGSAVMTDETSVVSSPPPYTAYAAPAPEQAYGYGPYGGAYPPGTQVVYAANGQAYAVPYQYPYAGLYGQQPANQVIIRERYRDNDSDLALGMLAGAATGMALGSLFWVF

SEQ ID NO: 881806 - protein, 264 aa, Homo sapiens
RTAARTPDVRQLQASRRGIAVASWCSPRWFAGEEMAFVKSGWLLRQSTILKRWKKNWFDLWSDGHLIYYDDQTRQNIEDKVHMPMDCINIRTGQECRDTQPPDGKSKDCMLQIVCRDGKTISLCAESTDDCLAWKFTLQDSRTNTAYVGSAVMTDETSVVSSPPPYTAYAAPAPEVGRTLSLQQAYGYGPYGGAYPPGTQVVYAANGQAYAVPYQYPYAGLYGQQPANQVIIRERYRDNDSDLALGMLAGAATGMALGSLFWVF

SEQ ID NO: 881807 - protein, 270 aa, Homo sapiens
RTAARTPDVRQLQASRRGIAVASWCSPRWFAGEEMAFVKSGWLLRQSTILKRWKKNWFDLWSDGHLIYYDDQTRQNIEDKVHMPMDCINIRTGQECRDTQPPDGKSKDCMLQIVCRDGKTISLCAESTDDCLAWKFTLQDSRTNTAYVGSAVMTDETSVVSSPPPYTAYAAPAPEQAYGYGPYGGAYPPGTQVVYAANGQAYAVPYQYPYAETILMTRHCTAVSRGLYGQQPANQVIIRERYRDNDSDLALGMLAGAATGMALGSLFWVF

SEQ ID NO: 881808 - protein, 226 aa, Homo sapiens
RTAARTPDVRQLQASRRGIAVASWCSPRWFAGEEMAFVKSGWLLRQSTILKRWKKNWFDLWSDGHLIYYDDQTRQNIEDKVHMPMDCINIRTGQECRDTQPPDGKSKDCMLQIVCRDGKTISLCAESTDDCLAWKFTLQDSRTNTAYVGSAVMTDETSVVSSPPPYTAYAAPAPEQAYGYGPYGGAYPPGTQVVYAANGQAYAVPYQYPYADFMDSSLRPMRYRLT

SEQ ID NO: 881809 - protein, 208 aa, Homo sapiens
VHIQSSSVPHRFAGEEMAFVKSGWLLRQSTILKRWKKNWFDLWSDGHLIYYDDQTRQNIEDKVHMPMDCINIRTGQECRDTQPPDGKSKDCMLQIVCRDGKTISLCAESTDDCLAWKFTLQDSRTNTAYVGSAVMTDETSVVSSPPPYTAYAAPAPEQAYGYGPYGGAYPPGTQVVYAANGQAYAVPYQYPYADFMDSSLRPMRYRLT

SEQ ID NO: 881810 - protein, 256 aa, Homo sapiens; identical to SEQ ID NO: 881804

SEQ ID NO: 881811 - protein, 241 aa, Homo sapiens
RTAARTPDVRQLQASRRGIAVASWCSPRWFAGTILKRWKKNWFDLWSDGHLIYYDDQTRQNIEDKVHMPMDCINIRTGQECRDTQPPDGKSKDCMLQIVCRDGKTISLCAESTDDCLAWKFTLQDSRTNTAYVGSAVMTDETSVVSSPPPYTAYAAPAPEQAYGYGPYGGAYPPGTQVVYAANGQAYAVPYQYPYAGLYGQQPANQVIIRERYRDNDSDLALGMLAGAATGMALGSLFWVF

SEQ ID NO: 881812 - protein, 185 aa, Homo sapiens
YDFEPACFCSVGEEMAFVKSGWLLRQSTILKRWKKNWFDLWSDGHLIYYDDQTRQNIEDKVHMPMDCINIRTGQECRDTQPPDGKSKDCMLQIVCRDGKTISLCAESTDDCFRLMAMGHTVVRTRQELKLSTLRMGRRMPCPTSTHMQDFMDSSLLTKSSFESAIETTTATWHWACWQEQPRAWP

SEQ ID NO: 881813 - protein, 474 aa, Homo sapiens
MWTVQNRESLGLLSFPVMITMVCCAHSTNEPSNMSYVKETVDRLLKGYDIRLRPDFGGPPVDVGMRIDVASIDMVSEVNMDYTLTMYFQQSWKDKRLSYSGIPLNLTLDNRVADQLWVPDTYFLNDKKSFVHGVTVKNRMIRLHPDGTVLYGLRITTTAACMMDLRRYPLDEQNCTLEIESYGYTTDDIEFYWNGGEGAVTGVNKIELPQFSIVDYKMVSKKVEFTTGAYPRLSLSFRLKRNIGYFILQTYMPSTLITILSWVSFWINYDASAARVALGITTVLTMTTISTHLRETLPKIPYVKAIDIYLMGCFVFVFLALLEYAFVNYIFFGKGPQKKGASKQDQSANEKNKLEMNKVQVDAHGNILLSTLEIRNETSGSEVLTSVSDPKATMYSYDSASIQYRKPLSSREAYGRALDRHGVPSKGRIRRRASQLKVKIPDLTDVNSIDKWSRMFFPITFSLFNVVYWLYYVH

SEQ ID NO: 881814 - protein, 69 aa, Homo sapiens [sequence omitted]

SEQ ID NO: 881815 - protein, 195 aa, Homo sapiens
MALLFPLLAALVMTSYSPVGSLGCDLPQNHGLLSRNTLVLLHQMRRISPFLCLKDRRDFRFPQEMVKGSQLQKAHVMSVLHEMLQQIFSLFHTERSSAAWNMTLLDQLHTGLHQQLQHLETCLLQVVGEGESAGAISSPALTLRRYFQGIRVYLKEKKYSDCAWEVVRMEIMKSLFLSTNMQERLRSKDRDLGSS

SEQ ID NO: 881816 - protein, 250 aa, Homo sapiens
MAALSCLLDSVRRDIKKVDRELRQLRCIDEFSTRCLCDLYMHPYCCCDLHPYPYCLCYSKRSRSCGLCDLYPCCLCDYKLYCLRPSLRSLERKAIRAIEDEKRELAKLRRTTNRILASSCCSSNILGSVNVCGFEPDQVKVRVKDGKVCVSAERENRYDCLGSKKYSYMNICKEFSLPPCVDEKDVTYSYGLGSCVKIESPCYPCTSPCSPCSPCNPCNPCSPCNPCSPYDPCNPCYPCGSRFSCRKMIL

SEQ ID NO: 881817 - protein, 171 aa, Homo sapiens
MAALSCLLDSVRRDIKKVDRELRQLRCIDEFSTRCLCDLYMHPYCCCDLHPYPYCLCYSKRSRSCGLCDLYPCCLCDYKLYCLRPSLRSLERKAIRAIEDEKRELAKLRRTTNRILASSCCSSNILGSVNVCGFEPDQVKVRVKDGKDLPETFPKLLSCDGRNMEGQRSST

SEQ ID NO: 881818 - protein, 167 aa, Homo sapiens
MAALSCLLDSVRRDIKKVDRELRQLRCIDEFSTRCLCDLYMHPYCCCDLHPYPYCLCYSKRSRSCGLCDLYPCCLCDYKLYCLRPSLRSLERKAIRAIEDEKRELAKLRRTTNRILASSCCSSNILGSVNVCGFEPDQVKVRVKDGKPVQPVQPLQPLQPLQPVQPI

SEQ ID NO: 881819 - protein, 108 aa, Homo sapiens
PQAVGSVRSRYRAGAGAKAGRDLRRDRRTSEELPCLGHLPQNRTTTAMKPKPQIFECQRRNVVSSGREEGLLSLSILSWEYSYNPGLCCLVGVINNYLTWKFNAKSPG

SEQ ID NO: 881820 - protein, 205 aa, Homo sapiens
MSGASSSEQNNNSYETKTPNLRMSEKKCSWASYMTNSPTLIVMIGLPARGKTYVSKKLTRYLNWIGVPTKVFNLGVYRREAVKSYKSYDFFRHDNEEAMKIRKQCALVALEDVKAYLTEENGQIAVFDATNTTRERRDMILNFAEQNSFKVFFVESVCDDPDVIAANILVGDTPTYHLLFTFCAVCVVGCVCVCVCVCCWGGVFS

SEQ ID NO: 881821 - protein, 471 aa, Homo sapiens
MSGASSSEQNNNSYETKTPNLRMSEKKCSWASYMTNSPTLIVMIGLPARGKTYVSKKLTRYLNWIGVPTKVFNLGVYRREAVKSYKSYDFFRHDNEEAMKIRKQCALVALEDVKAYLTEENGQIAVFDATNTTRERRDMILNFAEQNSFKVFFVESVCDDPDVIAANILEVKVSSPDYPERNRENVMEDFLKRIECYKVTYRPLDPDNYDKDLSFIKVINVGQRFLVNRVQDYIQSKIVYYLMNIHVQPRTIYLCRHGESEFNLLGKIGGDSGLSVRGKQFAQALRKFLEEQEITDLKVWTSQLKRTIQTAESLGVPYEQWKILNEIDAGVCEEMTYAEIEKRYPEEFALRDQEKYLYRYPGGESYQDLVQRLEPVIMELERQGNVLVISHQAVMRCLLAYFLDKGADELPYLRCPLHTIFKLTPVAYGCKVETIKLNVEAVNTHRDKPTAAETTLAVRRRPSAASLMLPC

SEQ ID NO: 881822 - protein, 505 aa, Homo sapiens
MSGASSSEQNNNSYETKTPNLRMSEKKCSWASYMTNSPTLIVMIGLPARGKTYVSKKLTRYLNWIGVPTKVFNLGVYRREAVKSYKSYDFFRHDNEEAMKIRKQCALVALEDVKAYLTEENGQIAVFDATNTTRERRDMILNFAEQNSFKVFFVESVCDDPDVIAANILEVKVSSPDYPERNRENVMEDFLKRIECYKVTYRPLDPDNYDKDLSFIKVINVGQRFLVNRVQDYIQSKIVYYLMNIHVQPRTIYLCRHGESEFNLLGKIGGDSGLSVRGKQFAQALRKFLEEQEITDLKVWTSQLKRTIQTAESLGVPYEQWKILNEIDAGVCEEMTYAEIEKRYPEEFALRDQEKYLYRYPGGESYQDLVQRLEPVIMELERQGNVLVISHQAVMRCLLAYFLDKGADELPYLRCPLHTIFKLTPVAYGCKVETIKLNVEAVNTHRDKPTNNFPKNQTPVRMRRNSFTPLSSSNTIRRPRNYSVGSRPLKPLSPLRAQDMQEGAD

SEQ ID NO: 881823 - protein, 505 aa, Homo sapiens; identical to SEQ ID NO: 881822

SEQ ID NO: 881824 - protein, 436 aa, Homo sapiens [sequence omitted]

SEQ ID NO: 881825 - protein, 436 aa, Homo sapiens [sequence omitted]

SEQ ID NO: 881826 - protein, 112 aa, Homo sapiens
MSSRKSKSNSLIHTECLSQVQRILRERFCRQSPHSNLFGVQVQYKHLSELLKRTALHGESNSVLIIGPRGSGKTMLISHALKELMEIEEVSENVLQVHLNGKYAIILPLEIM

SEQ ID NO: 881827 - protein, 436 aa, Homo sapiens [sequence omitted]

SEQ ID NO: 881828 - protein, 481 aa, Homo sapiens
MSSRKSKSNSLIHTECLSQVQRILRERFCRQSPHSNLFGVQVQYKHLSELLKRTALHGESNSVLIIGPRGSGKTMLISHALKELMEIEEVSENVLQVHLNGLLQINDKIALKEITRQLNLENVVGDKVFGSFAENLSFLLEALKKGDRTSSCPVIFILDEFDLFAHHKNQTLLYNLFDISQSAQTPIAVIGLTCRLDILELLEKRVKSRFSHRQIHLMNSFGFPQYVKIFKEQLSLPAEFPDKVFAEKWNENVQFSLATSAFILLGLKRQYRLWHLQLYYLIGDHISQSLENLRVLDTKYLSEDRSVQEVLQKHFNISKNLRSLHMLLMLALNRVTASHPFMTAVDLMEASQLCSMDSKANIVHGLSVLEICLIIAMKHLNDIYEEEPFNFQMVYNEFQKFVQRKAHSVYNFEKPVVMKAFEHLQQLELIKPMERTSGNSQREYQLMKLLLDNTQIMNALQKYPNCPTDVRQWATSSLSWL

SEQ ID NO: 881829 - protein, 436 aa, Homo sapiens [sequence omitted]

SEQ ID NO: 881830 - protein, 321 aa, Homo sapiens
MSSRKSKSNSLIHTECLSQVQRILRERFCRQSPHSNLFGVQVQYKHLSELLKRTALHGESNSVLIIGPRGSGKTMLISHALKELMEIEEVSENVLQVHLNGLLQINDKIALKEITRQLNLENVVGDKVFGSFAENLSFLLEALKKGDRTSSCPVIFILDEFDLFAHHKNQTLLYNLFDISQSAQTPIAVIGLTCRLDILELLEKRVKSRFSHRQIHLMNSFGFPQYVKIFKEQLSLPAEFPDKVFAEKWNENVQYLSEDRSVQEVLQKHFNISKNLRSLHMLLMLALNRVTASHPFMTAVDLMEASQLCSMDSKANIVHGF

SEQ ID NO: 881831 - protein, 240 aa, Homo sapiens
MSSRKSKSNSLIHTECLSQVQRILRERFCRQSPHSNLFGVQVQYKHLSELLKRTALHGESNSVLIIGPRGSGKTMLISHALKELMEIEEVSENVLQVHLNGLLQINDKIALKEITRQLNLENVVGDKVFGSFAENLSFLLEALKKGDRTSSCPVIFILDEFDLFAHHKNQTLLYNLFDISQSAQTPIAVIGLTCRLDILELLEKRVKSRFSHRQIHLMNSFGFPQYVKIFKEHCGHYTCY

SEQ ID NO: 881832 - protein, 362 aa, Homo sapiens [sequence omitted]

SEQ ID NO: 881833 - protein, 436 aa, Homo sapiens [sequence omitted]

SEQ ID NO: 881834 - protein, 436 aa, Homo sapiens [sequence omitted]

SEQ ID NO: 881835 - protein, 345 aa, Homo sapiens
MSSRKSKSNSLIHTECLSQVQRILRERFCRQSPHSNLFGVQVQYKHLSELLKRTALHGESNSVLIIGPRGSGKTMLISHALKELMEIEEVSENVLQVHLNGLLQINDKIALKEITRQLNLENVVGDKVFGSFAENLSFLLEALKKGDRTSSCPVIFILDEFDLFAHHKNQTLLYNLFDISQSAQTPIAVIGLTCRLDILELLEKRVKSRFSHRQIHLMNSFGFPQYVKIFKEQLSLPAEFPDKVFAEKWNENVQYLSEDRSVQEVLQKHFNISKNLRSLHMLLMLALNRVTASHPFMTAVDLMEASQLCSMDSKANIVHGLSVLEICLIIAIVSEVCSKESTFRL

SEQ ID NO: 881836 - protein, 352 aa, Homo sapiens
MEIEEVSENVLQVHLNGLLQINDKIALKEITRQLNLENVVGDKVFGSFAENLSFLLEALKKGDRTSSCPVIFILDEFDLFAHHKNQTLLYNLFDISQSAQTPIAVIGLTCRLDILELLEKRVKSRFSHRQIHLMNSFGFPQYVKIFKEQLSLPAEFPDKVFAEKWNENVQYLSEDRSVQEVLQKHFNISKNLRSLHMLLMLALNRVTASHPFMTAVDLMEASQLCSMDSKANIVHGLSVLEICLIIAMKHLNDIYEEEPFNFQMVYNEFQKFVQRKAHSVYNFEKPVVMKAFEHLQQLELIKPMERTSGNSQREYQLMKLLLDNTQIMNALQKYPNCPTDVRQWATSSLSWL

SEQ ID NO: 881837 - protein, 352 aa, Homo sapiens; identical to SEQ ID NO: 881836

SEQ ID NO: 881838 - protein, 341 aa, Homo sapiens
MDFILGLLQINDKIALKEITRQLNLENVVGDKVFGSFAENLSFLLEALKKGDRTSSCPVIFILDEFDLFAHHKNQTLLYNLFDISQSAQTPIAVIGLTCRLDILELLEKRVKSRFSHRQIHLMNSFGFPQYVKIFKEQLSLPAEFPDKVFAEKWNENVQYLSEDRSVQEVLQKHFNISKNLRSLHMLLMLALNRVTASHPFMTAVDLMEASQLCSMDSKANIVHGLSVLEICLIIAMKHLNDIYEEEPFNFQMVYNEFQKFVQRKAHSVYNFEKPVVMKAFEHLQQLELIKPMERTSGNSQREYQLMKLLLDNTQIMNALQKYPNCPTDVRQWATSSLSWL

SEQ ID NO: 881839 - protein, 256 aa, Homo sapiens
MSSRKSKSNSLIHTECLSQVQRILRERFCRQSPHSNLFGVQVQYKHLSELLKRTALHGESNSVLIIGPRGSGKTMLISHALKELMEIEEVSENVLQVHLNGLLQINDKIALKEITRQLNLENVVGDKVFGSFAENLSFLLEALKKGDRTSSCPVIFILDEFDLFAHHKNQTLLYNLFDISQSAQTPIAVIGLTCRLDILELLEKRVKSRFSHRQIHLMNSFGFPQYVKIFKEQLSLPAEFPDKVFAEKWNENVQVS

SEQ ID NO: 881840 - protein, 981 aa, Homo sapiens
MDGFAGSLDDSISAASTSDVQDRLSALESRVQQQEDEITVLKAALADVLRRLAISEDHVASVKKSVSSKGQPSPRAVIPMSCITNGSGANRKPSHTSAVSIAGKETLSSAAKSGTEKKKEKPQGQREKKEESHSNDQSPQIRASPSPQPSSQPLQIHRQTPESKNATPTKSIKRPSPAEKSHNSWENSDDSRNKLSKIPSTPKLIPKVTKTADKHKDVIINQEGEYIKMFMRGRPITMFIPSDVDNYDDIRTELPPEKLKLEWAYGYRGKDCRANVYLLPTGEIVYFIASVVVLFNYEERTQRHYLGHTDCVKCLAIHPDKIRIATGQIAGVDKDGRPLQPHVRVWDSVTLSTLQIIGLGTFERGVGCLDFSKADSGVHLCVIDDSNEHMLTVWDWQKKAKGAEIKTTNEVVLAVEFHPTDANTIITCGKSHIFFWTWSGNSLTRKQGIFGKYEKPKFVQCLAFLGNGDVLTGDSGGVMLIWSKTTVEPTPGKGPKGVYQISKQIKAHDGSVFTLCQMRNGMLLTGGGKDRKIILWDHDLNPEREIEVPDQYGTIRAVAEGKADQFLVGTSRNFILRGTFNDGFQIEVQGHTDELWGLATHPFKDLLLTCAQDRQVCLWNSMEHRLEWTRLVDEPGHCADFHPSGTVVAIGTHSGRWFVLDAETRDLVSIHTDGNEQLSVMRYSIDGTFLAVGSHDNFIYLYVVSENGRKYSRYGRCTGHSSYITHLDWSPDNKYIMSNSGDYEILYWDIPNGCKLIRNRSDCKDIDWTTYTCVLGFQVFGVWPEGSDGTDINALVRSHNRKVIAVADDFCKVHLFQYPCSKAKAPSHKYSAHSSHVTNVSFTHNDSHLISTGGKDMSIIQWKLVEKLSLPQNETVADTTLTKAPVSSTESVIQSNTPTPPPSQPLNETAEEESRISSSPTLLENSLEQTVEPSEDHSEEESEEGSGDLGEPLYEEPCNEISKEQAKATLLEDQQDPSPSS

SEQ ID NO: 881841 - protein, 116 aa, Homo sapiens
LFNYEERTQRHYLGHTDCVKCLAIHPDKIRIATGQIAGVDKDGRPLQPHVRVWDSVTLSTLQIIGLGTFERGVGCLDFSKADSGVHLCVIDDSNEHMLTVWDWQKKAKGAEIKVNF

SEQ ID NO: 881842 - protein, 98 aa, Homo sapiens
PASLRLLQVGAPGGRAGPGRGHTTSSVTGMGLTWGPPGGPPAAAAASSSLGFLRASAGGRGGGLLGGCLMVPPICGRKRFFFFFFFFSILGLFWFFIS

SEQ ID NO: 881843 - protein, 245 aa, Homo sapiens [sequence omitted]

SEQ ID NO: 881844 - protein, 125 aa, Homo sapiens
MSIIQWKLVEKLSLPQNETVADTTLTKAPVSSTESVIQSNTPTPPPSQPLNETAEEESRISSSPTLLENSLEQTVEPSEDHSEEESEEGSGDLGEPLYEEPCNEISKEQAKATLLEDQQDPSPSS

SEQ ID NO: 881845 - protein, 214 aa, Homo sapiens
SSRPCWVLGFQVFGVWPEGSDGTDINALVRSHNRKVIAVADDFCKVHLFQYPCSKAKAPSHKYSAHSSHVTNVSFTHNDSHLISTGGKDMSIIQWKLVEKLSLPQNETVADTTLTKAPVSSTESVIQSNTPTPPPSQPLNETAEEESRISSSPTLLENSLEQTVEPSEDHSEEESEEGSGDLGEPLYEEPCNEISKEQAKATLLEDQQDPSPSS

SEQ ID NO: 881846 - protein, 981 aa, Homo sapiens; identical to SEQ ID NO: 881840

SEQ ID NO: 881847 - protein, 981 aa, Homo sapiens; identical to SEQ ID NO: 881840

SEQ ID NO: 881848 - protein, 981 aa, Homo sapiens; identical to SEQ ID NO: 881840

SEQ ID NO: 881849 - protein, 981 aa, Homo sapiens; identical to SEQ ID NO: 881840

SEQ ID NO: 881850 - protein, 981 aa, Homo sapiens; identical to SEQ ID NO: 881840

SEQ ID NO: 881851 - protein, 981 aa, Homo sapiens; identical to SEQ ID NO: 881840

SEQ ID NO: 881852 - protein, 214 aa, Homo sapiens; identical to SEQ ID NO: 881845

SEQ ID NO: 881853 - protein, 981 aa, Homo sapiens; identical to SEQ ID NO: 881840

SEQ ID NO: 881854 - protein, 929 aa, Homo sapiens
MDGFAGSLDDSISAASTSDVQDRLSALESRVQQQEDEITVLKAALADVLRRLAISEDHVASVKKSVSSKGQPSPRAVIPMSCITNGSGANRKPSHTSAVSIAGKETLSSAAKSGTEKKKEKPQGQREKKEESHSNDQSPQIRASPSPQPSSQPLQIHRQTPESKNATPTKSIKRPSPAEKSHNSWENSDDSRNKLSKIPSTPKLIPKVTKTADKHKDVIINQEGEYIKMFMRGRPITMFIPSDVDNYDDIRTELPPEKLKLEWAYGYRGKDCRANVYLLPTGEIVYFIASVVVLFNYEERTQRHYLGHTDCVKCLAIHPDKIRIATGQIAGVDKDGRPLQPHVRVWDSVTLSTLQIIGLGTFERGVGCLDFSKADSGVHLCVIDDSNEHMLTVWDWQKKAKGAEIKTTNEVVLAVEFHPTDANTIITCGKSHIFFWTWSGNSLTRKQGIFGKYEKPKFVQCLAFLGNGDVLTGDSGGVMLIWSKTTVEPTPGKGPKGVYQISKQIKAHDGSVFTLCQMRNGMLLTGGGKDRKIILWDHDLNPEREIEVPDQYGTIRAVAEGKADQFLVGTSRNFILRGTFNDGFQIEVQGHTDELWGLATHPFKDLLLTCAQDRQVCLWNSMEHRLEWTRLVDEPGHCADFHPSGTVVAIGTHSGRWFVLDAETRDLVSIHTDGNEQLSVMRYSIDGTFLAVGSHDNFIYLYVVSENGRKYSRYGRCTGHSSYITHLDWSPDNKYIMSNSGDYEILYWDIPNGCKLIRNRSDCKDIDWTTYTCVLGFQVFGVWPEGSDGTDINALVRSHNRKVIAVADDFCKVHLFQYPCSKAKAPSHKYSAHSSHVTNVSFTHNDSHLISTGGKDMSIIQWKLVEKLSLPQNETVADTTLTKAPVSSTESVIQSADRRIISIREIVGIRSRIVVKYSTDATCPMMVKG

SEQ ID NO: 881855 - protein, 126 aa, Homo sapiens
MEVVQTENQVIPVLSQLQEKKLFHLLLNGTEKKKEKPQGQREKKEESHSNDQSPQIRASPSPQPSSQPLQIHRQTPESKNATPTKSIKRPSPAEKSHNSWENSDDSRNKLSKIPSTPKLIPKVTKT

SEQ ID NO: 881856 - protein, 431 aa, Homo sapiens
MALVLCAIGVYLHPPVQLLCCLVFLQPLQPHVRVWDSVTLSTLQIIGLGTFERGVGCLDFSKADSGVHLCVIDDSNEHMLTVWDWQKKAKGAEIKTTNEVVLAVEFHPTDANTIITCGKSHIFFWTWSGNSLTRKQGIFGKYEKPKFVQCLAFLGNGDVLTGDSGGVMLIWSKTTVEPTPGKGPKGVYQISKQIKAHDGSVFTLCQMRNGMLLTGGGKDRKIILWDHDLNPEREIEVPDQYGTIRAVAEGKADQFLVGTSRNFILRGTFNDGFQIEVQGHTDELWGLATHPFKDLLLTCAQDRQVCLWNSMEHRLEWTRLVDEPGHCADFHPSGTVVAIGTHSGRWFVLDAETRDLVSIHTDGNEQLSVMRYSIDGTFLAVGSHDNFIYLYVVSENGRKYSRYGRCTVSSEVEQVVKLLGNFTSVKNKFLH

SEQ ID NO: 881857 - protein, 166 aa, Homo sapiens
MDGFAGSLDDSISAASTSDVQDRLSALESRVQQQEDEITVLKAALADVLRRLAISEDHVASVKKSVSSKGQPSPRAVIPMSCITNGSGANRKPSHTSAVSIAGKETLSSAAKSGTEKKKEKPQGQREKKEESHSNDQSPQIRASPSPQPSSQPLQIHRQTPAWVTE

SEQ ID NO: 881858 - protein, 133 aa, Homo sapiens
MSCITNGSGANRKPSHTSAVSIAGKETLSSAAKRLECNGAISAHRNLHLPCSRDSPAAAPGVAGITVVQKKRKKNHKDREKKKRNLILMIKVHKFEHHLLPSPLHNLSKYTDKLQKARMLLPPKGFNCPQVQS

SEQ ID NO: 881859 - protein, 71 aa, Homo sapiens
MDGFAGSLGEYGWGVLRLLRRVGTFFLPHTAQALPSRLPLGVAAAPLHMFPSRLPPSADSGGLRAPPPCPT

SEQ ID NO: 881860 - protein, 690 aa, Homo sapiens
HASGSRGPRSRPPLAWPGPEAAPHGLGLARGAGTGARSDMGKKHKKHKSDKHLYEEYVEKPLKLVLKVGGNEVTELSTGSSGHDSSLFEDKNDHDKHKDRKRKKRKKGEKQIPGEEKGRKRRRVKEDKKKRDRDQVENEAEKDLQCHAPVRLDLPPEKPLTSSLAKQEEVEQTPLQEALNQLMRQLQRKDPSAFFSFPVTDFIAPGYSMIIKHPMDFSTMKEKIKNNDYQSIEELKDNFKLMCTNAMIYNKPETIYYKAAKKLLHSGMKILSQERIQSLKQSIDFMADLQKTRKQKDGTDTSQSGEDGGCWQREREDSGDAEAHAFKSPSKENKKKDKDMLEDKFKSNNLEREQEQLDRIVKESGGKLTRRLVNSQCEFERRKPDGTTTLGLLHPVDPIVGEPGYCPVRLGMTTGRLQSGVNTLQGFKEDKRNKVTPVLYLNYGPYSSYAPHYDSTFANISKDDSDLIYSTYGEDSDLPSDFSIHEFLATCQDYPYVMADSLLDVLTKGGHSRTLQEMEMSLPEDEGHTRTLDTAKEMEITEVEPPGRLDSSTQDRLIALKAVTNFGVPVEVFDSEEAEIFQKKLDETTRLLRELQEAQNERLSTRPPPNMICLLGPSYREMHLAEQVTNNLKELAQQVTPGDIVSTYGVRKAMGISIPSPVMENNFVDLTEDTEEPKKTDVAECGPGGS

SEQ ID NO: 881861 - protein, 690 aa, Homo sapiens; identical to SEQ ID NO: 881860

SEQ ID NO: 881862 - protein, 690 aa, Homo sapiens; identical to SEQ ID NO: 881860

SEQ ID NO: 881863 - protein, 690 aa, Homo sapiens; identical to SEQ ID NO: 881860

SEQ ID NO: 881864 - protein, 654 aa, Homo sapiens
HASGSRGPRSRPPLAWPGPEAAPHGLGLARGAGTGARSDMGKKHKKHKSDKHLYEEYVEKPLKLVLKVGGNEVTELSTGSSGHDSSLFEDKNDHDKHKDRKRKKRKKGEKQIPGEEKGRKRRRVKEDKKKRDRDQVENEAEKDLQCHAPVRLDLPPEKPLTSSLAKQEEVEQTPLQEALNQLMRQLQRKDPSAFFSFPVTDFIAPGYSMIIKHPMDFSTMKEKIKNNDYQSIEELKDNFKLMCTNAMIYNKPETIYYKAAKKLLHSGMKILSQERIQSLKQSIDFMADLQKTRKQKDGTDTSQSGEDGGCWQREREDSGDAEAHAFKSPSKENKKKDKDMLEDKFKSNNLEREQEQLDRIVKESGGKLTRRLVNSQCEFERRKPDGTTTLGLLHPVDPIVGVLYLNYGPYSSYAPHYDSTFANISKDDSDLIYSTYGEDSDLPSDFSIHEFLATCQDYPYVMADSLLDVLTKGGHSRTLQEMEMSLPEDEGHTRTLDTAKEMEITEVEPPGRLDSSTQDRLIALKAVTNFGVPVEVFDSEEAEIFQKKLDETTRLLRELQEAQNERLSTRPPPNMICLLGPSYREMHLAEQVTNNLKELAQQVTPGDIVSTYGVRKAMGISIPSPVMENNFVDLTEDTEEPKKTDVAECGPGGS

SEQ ID NO: 881865 - protein, 636 aa, Homo sapiens
HASGSRGPRSRPPLAWPGPEAAPHGLGLARGAGTGARSDMGKKHKKHKSDKHLYEEYVEKPLKLVLKVGGNEVTELSTGSSGHDSSLFEDKNDHDKHKDRKRKKRKKGEKQIPGEEKGRKRRRVKEDKKKRDRDQVENEAEKDLQCHAPVRLDLPPEKPLTSSLAKQEEVEQTPLQEALNQLMRQLQRKDPSAFFSFPVTDFIAPGYSMIIKHPMDFSTMKEKIKNNDYQSIEELKDNFKLMCTNAMIYNKPETIYYKAAKKLLHSGMKILSQERIQSLKQSIDFMADLQKTRKQKDGTDTSQSGEDGGCWQREREDSGDAEAHAFKSPSKENKKKDKDMLEDKFKSNNLEREQEQLDRIVKESGGKLTRRLVNSQCEFERRKVLYLNYGPYSSYAPHYDSTFANISKDDSDLIYSTYGEDSDLPSDFSIHEFLATCQDYPYVMADSLLDVLTKGGHSRTLQEMEMSLPEDEGHTRTLDTAKEMEITEVEPPGRLDSSTQDRLIALKAVTNFGVPVEVFDSEEAEIFQKKLDETTRLLRELQEAQNERLSTRPPPNMICLLGPSYREMHLAEQVTNNLKELAQQVTPGDIVSTYGVRKAMGISIPSPVMENNFVDLTEDTEEPKKTDVAECGPGGS

SEQ ID NO: 881866 - protein, 505 aa, Homo sapiens
HASGSRGPRSRPPLAWPGPEAAPHGLGLARGAGTGARSDMGKKHKKHKSDKHLYEEYVEKPLKLVLKVGGNEVTELSTGSSGHDSSLFEDKNDHDKHKDRKRKKRKKGEKQIPGEEKGRKRRRVKEDKKKRDRDQVENEAEKDLQCHAPVRLDLPPEKPLTSSLAKQEEVEQTPLQEALNQLMRQLQRKDPSAFFSFPVTDFIAPGYSMIIKHPMDFSTMKEKIKNNDYQSIEELKDNFKLMCTNAMIYNKPETIYYKAAKKLLHSGMKILSQERIQSLKQSIDFMADLQKTRKQKDGTDTSQSGEDGGCWQREREDSGDAEAHAFKSPSKENKKKDKDMLEDKFKSNNLEREQEQLDRIVKESGGKLTRRLVNSQCEFERRKPDGTTTLGLLHPVDPIVGEPGYCPVRLGMTTGRLQSGVNTLQGFKEDKRNKVTPVLYLNYGPYSSYAPHYDSTFANISKDDSDLIYSTYGEDSDLPSDFSHCLKMKAILGHLTQQKKWRLQK

SEQ ID NO: 881867 - protein, 690 aa, Homo sapiens; identical to SEQ ID NO: 881860

SEQ ID NO: 881868 - protein, 568 aa, Homo sapiens
HASGSRGPRSRPPLAWPGPEAAPHGLGLARGAGTGARSDMGKKHKKHKSDKHLYEEYVEKPLKLVLKVGGNEVTELSTGSSGHDSSLFEDKNDHDKHKDRKRKKRKKGEKQIPGEEKGRKRRRVKEDKKKRDRDQVENEAEKDLQCHAPVRLDLPPEKPLTSSLAKQEEVEQTPLQEALNQLMRQLQRKDPSAFFSFPVTDFIAPGYSMIIKHPMDFSTMKEKIKNNDYQSIEELKDNFKLMCTNAMIYNKPETIYYKAAKKLLHSGMKILSQERIQSLKQSIDFMADLQKTRKQKDGTDTSQSGEDGGCWQREREDSGDAEAHAFKSPSKENKKKDKDMLEDKFKSNNLEREQEQLDRIVKESGGKLTRRLVNSQCEFERRKPDGTTTLGLLHPVDPIVGEPGYCPVRLGMTTGRLQSGVNTLQGFKEDKRNKVTPVLYLNYGPYSSYAPHYDSTFANISKDDSDLIYSTYGEDSDLPSDFSIHEFLATCQDYPYVMADSLLDVLTKGGHSRTLQEMEMSLPEDEGHTRTLDTAKEMEVILFYTLQEIFKWKIRGVREVLRMGRPIG

SEQ ID NO: 881869 - protein, 341 aa, Homo sapiens
LRCTRAECGRDGAGGLSGAQSWPRVLGAWRSNLPSDLHPDPDPEPGLARPPPPPPGPMDYSYLNSYDSCVAAMEASAYGDFGACSQPGGFQYSPLRPAFPAAGPPCPALGSSNCALGALRDHQPAPYSAVPYNFFPEPSGLHEKRKQRRIRTTFTSAQLKELERVFAETHYPDIYTREELALKIDLTEARVQVWFQNRRAKFRKQERAASAKGAAGAAGAKKGEARCSSEDDDSKESTCSPTPDSTASLPPPPAPGLASPRLSPSPLPVALGSGPGPGPGPQPLKGALWAGVAGGGGGGPGAGAAELLKAWQPAESGPGPFSGVLSSFHRKPGPALKTNLF

SEQ ID NO: 881870 - protein, 342 aa, Homo sapiens
RSAGSAPRCERYGRRGGEPARSAVSSGAGVSPGPSLFEPNPTNGRMTMESREMDCYLRRLKQELMSMKEVGDGLQDQMNCMMGALQELKLLQVQTALEQLEISGGGPVPGSPEGPRTQCEHPCWEGGRGPARPTVCSPSSQPSLGSSTKFPSHRSVCGRDLAPLPRTQPHQSCAQQGPERVEPDDWTSTLMSRGRNRQPLVLGDNVFADLVGNWLDLPELEKGGEKGETGGAREPKGEKGQPQELGRRFALTANIFKKFLRSVRPDRDRLLKEKPGWVTPMVPESRTGRSQKVKKRSLSKGSGHFPFPGTGEHRRGENPPTSCPKALEHSPSGFDINTAVWV

SEQ ID NO: 881871 - protein, 282 aa, Homo sapiens
MRQLMSMKEVGDGLQDQMNCMMGALQELKLLQVQTALEQLEISGGGPVPGSPEGPRTQCEHPCWEGGRGPARPTVCSPSSQPSLGSSTKFPSHRSVCGRDLAPLPRTQPHQSCAQQGPERVEPDDWTSTLMSRGRNRQPLVLGDNVFADLVGNWLDLPELEKGGEKGETGGAREPKGEKGQPQELGRRFALTANIFKKFLRSVRPDRDRLLKEKPGWVTPMVPESRTGRSQKVKKRSLSKGSGHFPFPGTGEHRRGENPPTSCPKALEHSPSGFDINTAVWV

SEQ ID NO: 881872 - protein, 225 aa, Homo sapiens
PPFELVFIVLAEHYKVVVNGNPFYEYGHRLPLQMVTHLQVDGDLQLQSINFIGGQPLRPQGPPMMPPYPGPGHCHQQLNSLPTMEGPPTFNPPVPYFGRLQGGLTARRTIIIKGYVPPTGKSFAINFKVGSSGDIALHINPRMGNGTVVRNSLLNGSWGSEEKKITHNPFGPGQFFDLSIRCGLDRFKVYANGQHLFDFAHRLSAFQRVDTLEIQGDVTLSYVQI

SEQ ID NO: 881873 - protein, 219 aa, Homo sapiens
EERKRSMPFMVVNGNPFYEYGHRLPLQMVTHLQVDGDLQLQSINFIGGQPLRPQGPPMMPPYPGPGHCHQQLNSLPTMEGPPTFNPPVPYFGRLQGGLTARRTIIIKGYVPPTGKSFAINFKVGSSGDIALHINPRMGNGTVVRNSLLNGSWGSEEKKITHNPFGPGQFFDLSIRCGLDRFKVYANGQHLFDFAHRLSAFQRVDTLEIQGDVTLSYVQI

SEQ ID NO: 881874 - protein, 224 aa, Homo sapiens
MEIPSMSTGTGFPYRWSPTCKWMGICNFNQSTSSEASPSGPRGCSPRCTNPAPRETPESNGCVIDICRLLENEYRFFLTSQTMEGPPTFNPPVPYFGRLQGGLTARRTIIIKGYVPPTGKSFAINFKVGSSGDIALHINPRMGNGTVVRNSLLNGSWGSEEKKITHNPFGPGQFFDLSIRCGLDRFKVYANGQHLFDFAHRLSAFQRVDTLEIQGDVTLSYVQI

SEQ ID NO: 881875 - protein, 137 aa, Homo sapiens
PIMNGGGVNGVRVEGRRRRMAIIIKGYVPPTGKSFAINFKVGSSGDIALHINPRMGNGTVVRNSLLNGSWGSEEKKITHNPFGPGQFFDLSIRCGLDRFKVYANGQHLFDFAHRLSAFQRVDTLEIQGDVTLSYVQI

SEQ ID NO: 881876 - protein, 189 aa, Homo sapiens
PPFELVFIVLAEHYKVVVNGNPFYEYGHRLPLQMVTHLQVDGDLQLQSINFIGGQPLRPQGPPMMPPYPGPGHCHQQLNSLPTMEGPPTFNPPVPYFGRLQGGLTARRTIIIKGYVPPTGKSFAINFKVGSSGDIALHINPRMGNGTVVRNSLLNGSWGSEEKKITHNPFGPGQFFDLSIRCGGRIGIL

SEQ ID NO: 881877 - protein, 83 aa, Homo sapiens
ATRLSRGFPTHLVNCLMTFIPARVFSTPGALGVCSLSIRCGLDRFKVYANGQHLFDFAHRLSAFQRVDTLEIQGDVTLSYVQI

SEQ ID NO: 881878 - protein, 371 aa, Homo sapiens
MSMSPKHTTPFSVSDILSPLEESYKKVGMEGGGLGAPLAAYRQGQAAPPTAAMQQHAVGHHGAVTAAYHMTAAGVPQLSHSAVGGYCNGNLGNMSELPPYQDTMRNSASGPGWYGANPDPRFPAISRFMGPASGMNMSGMGGLGSLGDVSKNMAPLPSAPRRKRRVLFSQAQVYELERRFKQQKYLSAPEREHLASMIHLTPTQVKIWFQNHRYKMKRQAKDKAAQQQLQQDSGGGGGGGGTGCPQQQQAQQQSPRRVAVPVLVKDGKPCQAGAPAPGAASLQGHAQQQAQHQAQAAQAAAAAISVGSGGAGLGAHPGHQPGSAGQSPDLAHHAASPAALQGQVSSLSHLNSSGSDYGTMSCSTLLYGRTW

SEQ ID NO: 881879 - protein, 253 aa, Homo sapiens
KHASSPSTPRASLGGPALQSPTAVTEISPPTTGAQPEPSTTTNSLDHPLDYAAKGAFSYGPAEDREALVDTLLCVVAAVPVRQCVWGAVLWALSLVGCGAPRCPASVLAARCSSPSRSALFSLSLSLLSLSLSLSLSLSLSLSLSLSARETRRPTVRPQGSSPDSLAHLLATGAQRSEARCGPEAVGRRGAGRPRREGGAAPAGSGETPTLSLSPLLLKTCPCPGNPDRIGKWFHFVTPQVGCKAAFTFLPLN

SEQ ID NO: 881880 - protein, 371 aa, Homo sapiens; identical to SEQ ID NO: 881878

SEQ ID NO: 881881 - protein, 629 aa, Homo sapiens
KHASSPSTPRASLGGPALQSPTAVTEISPPTTGAQPEPSTTTNSLDHPLDYAAKGAFSYGPAEDREALVDTLLCVVAAVPVRQCVWGAVLWALSLVGCGAPRCPASVLAARCSSPSRSALFSLSLSLLSLSLSLSLSLSLSLSLSLSARETRRPTVRPQGSSPDSLAHLLATGAQRSEARCGPEAVGRRGAGRPRREGGAAPAGSALTPRLWWLPKTWRRAKTNARQPPSLHSSQLRRTRSTPLRVHPTRSALSRRRIMSMSPKHTTPFSVSDILSPLEESYKKVGMEGGGLGAPLAAYRQGQAAPPTAAMQQHAVGHHGAVTAAYHMTAAGVPQLSHSAVGGYCNGNLGNMSELPPYQDTMRNSASGPGWYGANPDPRFPAISRFMGPASGMNMSGMGGLGSLGDVSKNMAPLPSAPRRKRRVLFSQAQVYELERRFKQQKYLSAPEREHLASMIHLTPTQVKIWFQNHRYKMKRQAKDKAAQQQLQQDSGGGGGGGGTGCPQQQQAQQQSPRRVAVPVLVKDGKPCQAGAPAPGAASLQGHAQQQAQHQAQAAQAAAAAISVGSGGAGLGAHPGHQPGSAGQSPDLAHHAASPAALQGQVSSLSHLNSSGSDYGTMSCSTLLYGRTW

SEQ ID NO: 881882 - protein, 270 aa, Homo sapiens [sequence omitted]

SEQ ID NO: 881883 - protein, 550 aa, Homo sapiens
KHASSPSTPRASLGGPALQSPTAVTEISPPTTGAQPEPSTTTNSLDHPLDYAAKGAFSYGPAEDREALVDTLLCVVAAVPVRQCVWGAVLWALSLVGCGAPRCPASVLAARCSSPSRSALFSLSLSLLSLSLSLSLSLSLSLSLSLSAERHVDQQCGPRVRPQTRSLICWRLGLSRRRIMSMSPKHTTPFSVSDILSPLEESYKKVGMEGGGLGAPLAAYRQGQAAPPTAAMQQHAVGHHGAVTAAYHMTAAGVPQLSHSAVGGYCNGNLGNMSELPPYQDTMRNSASGPGWYGANPDPRFPAISRFMGPASGMNMSGMGGLGSLGDVSKNMAPLPSAPRRKRRVLFSQAQVYELERRFKQQKYLSAPEREHLASMIHLTPTQVKIWFQNHRYKMKRQAKDKAAQQQLQQDSGGGGGGGGTGCPQQQQAQQQSPRRVAVPVLVKDGKPCQAGAPAPGAASLQGHAQQQAQHQAQAAQAAAAAISVGSGGAGLGAHPGHQPGSAGQSPDLAHHAASPAALQGQVSSLSHLNSSGSDYGTMSCSTLLYGRTW

SEQ ID NO: 881884 - protein, 220 aa, Homo sapiens
MSWLLACRLILLISLLGKTDDAKVSEKGRLSPKASQVKRSPSDAGRSSGDESKKPLPSSSRTPTANANSFGFKKQSGSAAGLAMITASGVTVTSRSATLGKIPKSSALVSRSAGRKSSMDGAQNQDDGYLALSSRTNLQYRSLPRPSKSNSRNGAGNRSSTSSIDSNISSKSAGLPVPKLREPSKTALGSSLPGLVNQTDKEKGISSDNESVASCNSVKV

SEQ ID NO: 881885 - protein, 239 aa, Homo sapiens
SQTGSWRRGMTAQVGITMPRTKPSAPAGALKTPGTGKTDDAKVSEKGRLSPKASQVKRSPSDAGRSSGDESKKPLPSSSRTPTANANSFGFKKQSGSAAGLAMITASGVTVTSRSATLGKIPKSSALVSRSAGRKSSMDGAQNQDDGYLALSSRTNLQYRSLPRPSKSNSRNGAGNRSSTSSIDSNISSKSAGLPVPKLREPSKTALGSSLPGLVNQTDKEKGISSDNESVASCNSVKV

SEQ ID NO: 881886 - protein, 874 aa, Homo sapiens
MSLSNPTMLRTHSLSNADGQYDPYTDSRFRNSSMSLDEKSRTMSRSGSFRDGFEEVHGSSLSLVSSTSSVYSTPEEKCQSEIRKLRRELDASQEKVSALTTQLTANAHLVAAFEQSLGNMTIRLQSLTMTAEQKDSELNELRKTIELLKKQNAAAQAAINGVINTPELNCKGNGTAQSADLRIRRQHSSDSVSSINSATSHSSVGSNIESDSKKKKRKNWLRSSFKQAFGKKKSPKSASSHSDIEEMTDSSLPSSPKLPHNGSTGSTPLLRNSHSNSLISECMDSEAETVMQLRNELRDKEMKLTDIRLEALSSAHQLDQLREAMNRMQSEIEKLKAENDRLKSESQGSGCSRAPSQVSISASPRQSMGLSQHSLNLTESTSLDMLLDDTGECSARKEGGRHVKIVVSFQEEMKWKEDSRPHLFLIGCIGVSGKTKWDVLDGVVRRLFKEYIIHVDPVSQLGLNSDSVLGYSIGEIKRSNTSETPELLPCGYLVGENTTISVTVKGLAENSLDSLVFESLIPKPILQRYVSLLIEHRRIILSGPSGTGKTYLANRLSEYIVLREGRELTDGVIATFNVDHKSSKELRQYLSNLADQCNSENNAVDMPLVIILDNLHHVSSLGEIFNGLLNCKYHKCPYIIGTMNQATSSTPNLQLHHNFRWVLCANHTEPVKGFLGRFLRRKLMETEISGRVRNMELVKIIDWIPKVWHHLNRFLEAHSSSDVTIGPRLFLSCPIDVDGSRVWFTDLWNYSIIPYLLEAVREGLQLYGRRAPWEDPAKWVMDTYPWAASPQQHEWPPLLQLRPEDVGFDGYSMPREGSTSKQMPPSDAEGDPLMNMLMRLQEAANYSSPQSYDSDSNSNSHHDDILDSSLESTL

SEQ ID NO: 881887 - protein, 128 aa, Homo sapiens
SQTGSWRRGMTAQVGITMPRTKPSAPAGALKTPGTGKRPGLSWPWGTNASSSSAVSKDGLGFQSVSSLHTSCESIDISLSSGGVPSHNSSTGLIASSKDDSLTPFVRTNSVKTTLSERPCLPFSSLRV

SEQ ID NO: 881888 - protein, 278 aa, Homo sapiens
MSLSNPTMLRTHSLSNADGQYDPYTDSRFRNSSMSLDEKSRTMSRSGSFRDGFEEVHGSSLSLVSSTSSVYSTPEEKCQSEIRKLRRELDASQEKVSALTTQLTANAHLVAAFEQSLGNMTIRLQSLTMTAEQKDSELNELRKTIELLKKQNAAAQAAINGVINTPELNCKGNGTAQSADLRIRRQHSSDSVSSINSATSHSSVGSNIESDSKKKKRKNWLRSSFKQAFGKKKSPKSASSHSDIEEMTDSSLPSSPKLPHNGSTGSTPLLRNSHSNSL

SEQ ID NO: 881889 - protein, 140 aa, Homo sapiens
SQTGSWRRGMTAQVGITMPRTKPSAPAGALKTPGTGKRPGLSWPWGTNASSSSAVSKDGLGFQSVSSLHTSCESIDISLSSGGVPSHNSSTGLIASSKDDSLTPFVRTNSVKTTLSESPLSSPAASPKFCRSTLPRKQDR

SEQ ID NO: 881890 - protein, 207 aa, Homo sapiens
SQTGSWRRGMTAQVGITMPRTKPSAPAGALKTPGTGKRPGLSWPWGTNASSSSAVSKDGLGFQSVSSLHTSCESIDISLSSGGVPSHNSSTGLIASSKDDSLTPFVRTNSVKTTLSESPLSSPAASPKFCRSTLPRKQDSDPHLDRNTLPKKGLRYTPTSQLRTQEDAKEWLRSHSAGGLQDTAANSPFSSGSSVTSPSGTRFNFSQ

SEQ ID NO: 881891 - protein, 170 aa, Homo sapiens
SQTGSWRRGMTAQVGITMPRTKPSAPAGALKTPGTGKRPGLSWPWGTNASSSSAVSKDGLGFQSVSSLHTSCESIDISLSSGGVPSHNSSTGLIASSKDDSLTPFVRTNSVKTTLSERYTPTSQLRTQEDAKEWLRSHSAGGLQDTAANSPFSSGSSVTSPSGTRFNFSQ

SEQ ID NO: 881892 - protein, 93 aa, Homo sapiens
AVSKDGLGFQSVSSLHTSCESIDISLSSGGVPSHNSSTGLIASSKDDSLTPFVRTNSVKTTLSERLVLCLWLPFSERHPSKNKKISLGIPNVE

SEQ ID NO: 881893 - protein, 107 aa, Homo sapiens
NQALSHLCIVYECFCTTVAELSSCEKPRGLQSLEYLLFGSLQKNFVNPCSEVLNSGLVFISLFLNFLKKFRGTCAGLLHRQTCVMGVCCTDYFVTQVLSLVPIGYSS

SEQ ID NO: 881894 - protein, 384 aa, Homo sapiens
LCPKPGDEPTDRPPGARTRALALCSGLASARLELAARGFPAFSRPPRLRRPRRARGWRCGSRSPPVGPRAAEPRPPAPRPRAVSLSSCSPPGCSEQRCFGAPNSGCRGKCLHETQRMSGKHYKGPEVSCCIKYFIFGFNVIFWFLGITFLGIGLWAWNEKGVLSNISSITDLGGFDPVWLFLVVGGVMFILGFAGCIGALRENTFLLKFFSVFLGIIFFLELTAGVLAFVFKDWIKDQLYFFINNNIRAYRDDIDLQNLIDFTQEYWQCCGAFGADDWNLNIYFNCTDSNASRERCGVPFSCCTKDPAEDVINTQCGYDARQKPEVDQQIVIYTKGCVPQFEKWLQDNLTIVAGIFIGIALLQIFGICLAQNLVSDIEAVRASW

SEQ ID NO: 881895 - protein, 227 aa, Homo sapiens
MKKEVLSNISSITDLGGFDPVWLFLVVGGVMFILGFAGCIGALRENTFLLKFFSVFLGIIFFLELTAGVLAFVFKDWIKDQLYFFINNNIRAYRDDIDLQNLIDFTQEYWQCCGAFGADDWNLNIYFNCTDSNASRERCGVPFSCCTKDPAEDVINTQCGYDARQKPEVDQQIVIYTKGCVPQFEKWLQDNLTIVAGIFIGIALLQIFGICLAQNLVSDIEAVRASW

SEQ ID NO: 881896 - protein, 152 aa, Homo sapiens
MKKEVLSNISSITDLGGFDPVWLFLVVGGVMFILGFAGCIGALRENTFLLKFFSVFLGIIFFLELTAGVLAFVFKDWIKDQLYFFINNNIRAYRDDIDLQNLIDFTQEYIPMQVESDVAFHSPAALKIPQKMSSTLSVAMMPGKNQKLTSRL

SEQ ID NO: 881897 - protein, 384 aa, Homo sapiens; identical to SEQ ID NO: 881894

SEQ ID NO: 881898 - protein, 221 aa, Homo sapiens
  misc_feature (1)..(1): Xaa can be any naturally occurring amino acid
  misc_feature (25)..(25): Xaa can be any naturally occurring amino acid
XPSVYGPVIARKKRFLHALLFSWKXLPFLGITFLGIGLWAWNEKGVFSVFLGIIFFLELTAGVLAFVFKDWIKDQLYFFINNNIRAYRDDIDLQNLIDFTQEYWQCCGAFGADDWNLNIYFNCTDSNASRERCGVPFSCCTKDPAEDVINTQCGYDARQKPEVDQQIVIYTKGCVPQFEKWLQDNLTIVAGIFIGIALLQIFGICLAQNLVSDIEAVRASW

SEQ ID NO: 881899 - protein, 146 aa, Homo sapiens
AEVRERAVPLRRRSRRSAWGAMPGRHVSRVRALYKRVLQLHRVLPPDLKSLGDQYVKDEFRRHKTVGSDEAQRFLQEWEVYATALLQQANENRQNSTGKACFGTFLPEEKLNDFRDEQIGQLQELMQEATKPNRQFSISESMKPKF

SEQ ID NO: 881900 - protein, 137 aa, Homo sapiens
LESGHCTSASCNLHRCVCAPGTFESPHRVVGGGAVGCWDAWQVVVIGCVCGCCVGLGGVCVDGVVGCVGVWLWWGLGGRGVGGGGLGLVWMGRGGVLPEEKLNDFRDEQIGQLQELMQEATKPNRQFSISESMKPKF

SEQ ID NO: 881901 - protein, 89 aa, Homo sapiens
AEVRERAVPLRRRSRRSAWGAMPGRHVSRVRALYKRVLQLHRVLPPDLKSLGDQYVKDEFRRHKTVGSDEAQRFLQEWEGMSRNLDACI

SEQ ID NO: 881902 - protein, 87 aa, Homo sapiens
ELGMRWVWKEKREETSLDVTVYATALLQQANENRQNSTGKACFGTFLPEEKLNDFRDEQIGQLQELMQEATKPNRQFSISESMKPKF

SEQ ID NO: 881903 - protein, 99 aa, Homo sapiens
AEVRERAVPLRRRSRRSAWGAMPGRHVSRVRALYKRVLQLHRVLPPDLKSLGDQYVKDEFRRHKTVGSDEAQRFLQEWEVYATALLQQANENSPPRRKT

SEQ ID NO: 881904 - protein, 99 aa, Homo sapiens
AEVRERAVPLRRRSRRSAWGAMPGRHVSRVRALYKRVLQLHRVLPPDLKSLGDQCMQQRYCNRLTKTDKIQLEKHVLAPSSQKKNLMTFVMNKLDSCRS

SEQ ID NO: 881905 - protein, 146 aa, Homo sapiens; identical to SEQ ID NO: 881899

SEQ ID NO: 881906 - protein, 146 aa, Homo sapiens; identical to SEQ ID NO: 881899

SEQ ID NO: 881907 - protein, 78 aa, Homo sapiens
DLYLNGCQEWEVYATALLQQANENRQNSTGKACFGTFLPEEKLNDFRDEQIGQLQELMQEATKPNRQFSISESMKPKF

SEQ ID NO: 881908 - protein, 137 aa, Homo sapiens; identical to SEQ ID NO: 881900

SEQ ID NO: 881909 - protein, 625 aa, Homo sapiens
MLNMWKVRELVDKATNVVMNYSEIESKVREATNDDPWGPSGQLMGEIAKATFMYEQFPELMNMLWSRMLKDNKKNWRRVYKSLLLLAYLIRNGSERVVTSAREHIYDLRSLENYHFVDEHGKDQGINIRQKVKELVEFAQDDDRLREERKKAKKNKDKYVGVSSDSVGGFRYSERYDPEPKSKWDEEWDKNKSAFPFSDKLGELSDKIGSTIDDTISKFRRKDREDSPERCSDSDEEKKARRGRSPKGEFKDEEETVTTKHIHITQATETTTTRHKRTANPSKTIDLGAAAHYTGDKASPDQNASTHTPQSSVKTSVPSSKSSGDLVDLFDGTSQSTGGSADLFGGFADFGSAAASGSFPSQVTATSGNGDFGDWSAFNQAPSGPVASSGEFFGSASQPAVELVSGSQSALGPPPAASNSSDLFDLMGSSQATMTSSQSMNFSMMSTNTVGLGLPMSRSQNTDMVQKSVSKTLPSTWSDPSVNISLDNLLPGMQPSKPQQPSLNTMIQQQNMQQPMNVMTQSFGAVNLSSPSNMLPVRPQTNALIGGPMPMSMPNVMTGTMGMAPLGNTPMMNQSMMGMNMNIGMSAAGMGLTGTMGMGMPNIAMTSGTVQPKQDAFANFANFSK

SEQ ID NO: 881910 - protein, 643 aa, Homo sapiens
MLNMWKVRELVDKATNVVMNYSEIESKVREATNDDPWGPSGQLMGEIAKATFMYEQFPELMNMLWSRMLKDNKKNWRRVYKSLLLLAYLIRNGSERVVTSAREHIYDLRSLENYHFVDEHGKDQGINIRQKVKELVEFAQDDDRLREERKKAKKNKDKYVGVSSDSVGGFRYSERYDPEPKSKWDEEWDKNKSAFPFSDKLGELSDKIGSTIDDTISKFRRKDREDSPERCSDSDEEKKARRGRSPKGEFKDEEETVTTKHIHITQATETTTTRHKRTANPSKTIDLGAAAHYTGDKASPDQNASTHTPQSSVKTSVPSSKSSGDLVDLFDGTSQSTGGSADLFGGFADFGSAAASGSFPSQVTATSGNGDFGDWSAFNQAPSGPVASSGEFFGSASQPAVELVSGSQSALGPPPAASNSSDLFDLMGSSQATMTSSQSMNFSMMSTNTVGLGLPMSRSQPLQNVSTVLQKPNPLYNQNTDMVQKSVSKTLPSTWSDPSVNISLDNLLPGMQPSKPQQPSLNTMIQQQNMQQPMNVMTQSFGAVNLSSPSNMLPVRPQTNALIGGPMPMSMPNVMTGTMGMAPLGNTPMMNQSMMGMNMNIGMSAAGMGLTGTMGMGMPNIAMTSGTVQPKQDAFANFANFSK

SEQ ID NO: 881911 - protein, 607 aa, Homo sapiens
MLNMWKVRELVDKATNVVMNYSEIESKVREATNDDPWGPSGQLMGEIAKATFMYEQFPELMNMLWSRMLKDNKKNWRRVYKSLLLLAYLIRNGSERVVTSAREHIYDLRSLENYHFVDEHGKDQGINIRQKVKELVEFAQDDDRLREERKKAKKNKDKYVGVSSDSVGGFRYSERYDPEPKSKWDEEWDKNKSAFPFSDKLGELSDKIGSTIDDTISKFRRKDREDSPERCSKDEEETVTTKHIHITQATETTTTRHKRTANPSKTIDLGAAAHYTGDKASPDQNASTHTPQSSVKTSVPSSKSSGDLVDLFDGTSQSTGGSADLFGGFADFGSAAASGSFPSQVTATSGNGDFGDWSAFNQAPSGPVASSGEFFGSASQPAVELVSGSQSALGPPPAASNSSDLFDLMGSSQATMTSSQSMNFSMMSTNTVGLGLPMSRSQNTDMVQKSVSKTLPSTWSDPSVNISLDNLLPGMQPSKPQQPSLNTMIQQQNMQQPMNVMTQSFGAVNLSSPSNMLPVRPQTNALIGGPMPMSMPNVMTGTMGMAPLGNTPMMNQSMMGMNMNIGMSAAGMGLTGTMGMGMPNIAMTSGTVQPKQDAFANFANFSK

SEQ ID NO: 881912 - protein, 607 aa, Homo sapiens
MLNMWKVRELVDKATNVVMNYSEIESKVREATNDDPWGPSGQLMGEIAKATFMYEQFPELMNMLWSRMLKDNKKNWRRVYKSLLLLAYLIRNGSERVVTSAREHIYDLRSLEKVKELVEFAQDDDRLREERKKAKKNKDKYVGVSSDSVGGFRYSERYDPEPKSKWDEEWDKNKSAFPFSDKLGELSDKIGSTIDDTISKFRRKDREDSPERCSDSDEEKKARRGRSPKGEFKDEEETVTTKHIHITQATETTTTRHKRTANPSKTIDLGAAAHYTGDKASPDQNASTHTPQSSVKTSVPSSKSSGDLVDLFDGTSQSTGGSADLFGGFADFGSAAASGSFPSQVTATSGNGDFGDWSAFNQAPSGPVASSGEFFGSASQPAVELVSGSQSALGPPPAASNSSDLFDLMGSSQATMTSSQSMNFSMMSTNTVGLGLPMSRSQNTDMVQKSVSKTLPSTWSDPSVNISLDNLLPGMQPSKPQQPSLNTMIQQQNMQQPMNVMTQSFGAVNLSSPSNMLPVRPQTNALIGGPMPMSMPNVMTGTMGMAPLGNTPMMNQSMMGMNMNIGMSAAGMGLTGTMGMGMPNIAMTSGTVQPKQDAFANFANFSK

SEQ ID NO: 881913 - protein, 634 aa, Homo sapiens
MLNMWKVRELVDKATNVVMNYSEIESKVREATNDDPWGPSGQLMGEIAKATFMYEQFPELMNMLWSRMLKDNKKNWRRVYKSLLLLAYLIRNGSERVVTSAREHIYDLRSLENYHFVDEHGKDQGINIRQKVKELVEFAQDDDRLREERKKAKKNKDKYVGVSSDSVGGFRYSERYDPEPKSKWDEEWDKNKSAFPFSDKLGELSDKIGSTIDDTISKFRRKDREDSPERCSDSDEEKKARRGRSPKGEFKDEEETVTTKHIHITQATETTTTRHKRTANPSKTIDLGAAAHYTGDKASPDQNASTHTPQSSVKTSVPSSKSSGDLVDLFDGTSQSTGGSADLFGGFADFGSAAASGSFPSQVTATSGNGDFGDWSAFNQAPSGPVASSGEFFGSASQPAVELVSGSQSALGPPPAASNSSDLFDLMGSSQATMTSSQSMNFSMMSTNTVGLGLPMSRSQNTDMVQKSVSKTLPSTWSDPSVNISLDNLLPGMQPSKPQQPSLNTMIQQQILLSVFVLVDMQQPMNVMTQSFGAVNLSSPSNMLPVRPQTNALIGGPMPMSMPNVMTGTMGMAPLGNTPMMNQSMMGMNMNIGMSAAGMGLTGTMGMGMPNIAMTSGTVQPKQDAFANFANFSK

SEQ ID NO: 881914 - protein, 625 aa, Homo sapiens; identical to SEQ ID NO: 881909

SEQ ID NO: 881915 - protein, 643 aa, Homo sapiens; identical to SEQ ID NO: 881910

SEQ ID NO: 881916 - protein, 301 aa, Homo sapiens
MLNMWKVRELVDKATNVVMNYSEIESKVREATNDDPWGPSGQLMGEIAKATFMYEQFPELMNMLWSRMLKDNKKNWRRVYKSLLLLAYLIRNGSERVVTSAREHIYDLRSLENYHFVDEHGKDQGINIRQKVKELVEFAQDDDRLREERKKAKKNKDKYVGVSSDSVGGFRYSERYDPEPKSKWDEEWDKNKSAFPFSDKLGELSDKIGSTIDDTISKFRRKDREDSPERCSDSDEEKKARRGRSPKGEFKDEEETVTTKHIHITQATETTTTRHKRTANPSKTIDLGAAAHYTGDKARSN

SEQ ID NO: 881917 - protein, 136 aa, Homo sapiens
MLNMWKVRELVDKATNVVMNYSEIESKVREATNDDPWGPSGQLMGEIAKATFMYEQFPELMNMLWSRMLKDNKKNWRRVYKSLLLLAYLIRNGSERVVTSAREHIYDLRSLENYHFVDVHMIVSRYIYMAEGVRDL

SEQ ID NO: 881918 - protein, 625 aa, Homo sapiens; identical to SEQ ID NO: 881909

SEQ ID NO: 881919 - protein, 281 aa, Homo sapiens
MLNMWKVRELVDKATNVVMNYSEIESKVREATNDDPWGPSGQLMGEIAKATFMYEQFPELMNMLWSRMLKDNKKNWRRVYKSLLLLAYLIRNGSERVVTSAREHIYDLRSLENYHFVDEHGKDQGINIRQKVKELVEFAQDDDRLREERKKAKKNKDKYVGVSSDSVGGFRYSERYDPEPKSKWDEEWDKNKSAFPFSDKLGELSDKIGSTIDDTISKFRRKDREDSPERCSDSDEEKKARRGRSPKGEFKDEEETVTTKHIHITQATETTTTRHKRTANP

SEQ ID NO: 881920 - protein, 600 aa, Homo sapiens
MLNMWKVRELVDKATNVVMNYSEIESKVREATNDDPWGPSGQLMGEIAKATFMYEQFPELMNMLWSRMLKDNKKNWRRVYKSLLLLAYLIRNGSERVVTSAREHIYDLRSLENYHFVDEHGKDQGINIRQKVKELVEFAQDDDRLREERKKAKKNKDKYVGVSSDSVGGFRYSERYDPEPKSKWDEEWDKNKSAFPFSDKLGELSDKIGSTIDDTISKFRRKDREDSPERCSDSDEEKKARRGRSPKGEFKDEEETVTTKHIHITQATETTTTRHKRTANPSKTIDLGAAAHYTGDKASPDQNASTHTPQSSVKTSVPSSKSSGDLVDLFDGTSQSTVTATSGNGDFGDWSAFNQAPSGPVASSGEFFGSASQPAVELVSGSQSALGPPPAASNSSDLFDLMGSSQATMTSSQSMNFSMMSTNTVGLGLPMSRSQNTDMVQKSVSKTLPSTWSDPSVNISLDNLLPGMQPSKPQQPSLNTMIQQQNMQQPMNVMTQSFGAVNLSSPSNMLPVRPQTNALIGGPMPMSMPNVMTGTMGMAPLGNTPMMNQSMMGMNMNIGMSAAGMGLTGTMGMGMPNIAMTSGTVQPKQDAFANFANFSK

SEQ ID NO: 881921 - protein, 396 aa, Homo sapiens
MWSDSDEEKKARRGRSPKGEFKDEEETVTTKHIHITQATETTTTRHKRTANPSKTIDLGAAAHYTGDKASPDQNASTHTPQSSVKTSVPSSKSSGDLVDLFDGTSQSTGGSADLFGGFADFGSAAASGSFPSQVTATSGNGDFGDWSAFNQAPSGPVASSGEFFGSASQPAVELVSGSQSALGPPPAASNSSDLFDLMGSSQATMTSSQSMNFSMMSTNTVGLGLPMSRSQNTDMVQKSVSKTLPSTWSDPSVNISLDNLLPGMQPSKPQQPSLNTMIQQQNMQQPMNVMTQSFGAVNLSSPSNMLPVRPQTNALIGGPMPMSMPNVMTGTMGMAPLGNTPMMNQSMMGMNMNIGMSAAGMGLTGTMGMGMPNIAMTSGTVQPKQDAFANFANFSK

SEQ ID NO: 881922 - protein, 69 aa, Homo sapiens
IVPVKPIPAADIPMFMFMPIMLWFIIGVFPRGAIPMVPVITLGMPNIAMTSGTVQPKQDAFANFANFSK

SEQ ID NO: 881923 - protein, 474 aa, Homo sapiens
MLNMWKVRELVDKATNVVMNYSEIESKVREATNDDPWGPSGQLMGEIAKATFMYEQFPELMNMLWSRMLKDNKKNWRRVYKSLLLLAYLIRNGSERVVTSAREHIYDLRSLENYHFVDEHGKDQGINIRQKVKELVEFAQDDDRLREERKKAKKNKDKYVGVSSDSVGGFRYSERYDPEPKSKWDEEWDKNKSAFPFSDKLGELSDKIGSTIDDTISKFRRKDREDSPERCSDSDEEKKARRGRSPKGEFKDEEETVTTKHIHITQATETTTTRHKRTANPSKTIDLGAAAHYTGDKASPDQNASTHTPQSSVKTSVPSSKSSGDLVDLFDGTSQSTGGSADLFGGFADFGSAAASGSFPSQVTATSGNGDFGDWSAFNQAPSGPVASSGEFFGSASQPAVELVSGSQSALGPPPAASNSSDLFDLMGSSQATMTSSQSMNFSMMSTNTVGLGLPMSRSQVSCLVPLEFVIYNL

SEQ ID NO: 881924 - protein, 281 aa, Homo sapiens
AAAGARSREAAAAAALVASASASAAAAAASGGAGRTDRRTEGARARVPPGPAMEGASFGAGRAGAALDPVSFARRPQTLLRVASWVFSIAVFGPIVNEGYVNTDSGPELRCVFNGNAGACRFGVALGLGAFLACAAFLLLDVRFQQISSVRDRRRAVLLDLGFSGLWSFLWFVGFCFLTNQWQRTAPGPATTQAGDAARAAIAFSFFSILSWVALTVKALQRFRLGTDMSLFATEQLSTGASQAYPGYPVGSGVEGTETYQSPPFTETLDTSPKGYQVPAY

SEQ ID NO: 881925 - protein, 176 aa, Homo sapiens
VWRSRVGGVSAGEGGGTSRHAASPGEAPQASGPPTFPPPGEAAVGHRVERRPDAPHLFAGLWSFLWFVGFCFLTNQWQRTAPGPATTQAGDAARAAIAFSFFSILSWVALTVKALQRFRLGTDMSLFATEQLSTGASQAYPGYPVGSGVEGTETYQSPPFTETLDTSPKGYQVPAY

SEQ ID NO: 881926 - protein, 410 aa, Homo sapiens
RKLASWSLLSPQRQTDRQTDSWQEAAWGPQLLQQTSWLSEPPLGPAPHLSMVQAHGGRSRAQPLTLSLGAAMTQPPPEKTPAKKHVRLQERRGSNVALMLDVRSLGAVEPICSVNTPREVTLHFLRTAGHPLTRWALQRQPPSPKQLEEEFLKIPSNFVSPEDLDIPGHASKDRYKTILPNPQSRVCLGRAQSQEDGDYINANYIRGYDGKEKVYIATQGPMPNTVSDFWEMVWQEEVSLIVMLTQLREGKEKCVHYWPTEEETYGPFQIRIQDMKECPEYTVRQLTIQYQEERRSVKHILFSAWPDHQTPESAGPLLRLVAEVEESPETAAHPGPIVVHCSAGIGRTGCFIATRIGCQQLKARGEVDILGIVCQLRLDRGGMIQTAEQYQFLHHTLALYAGQLPEEPSP

SEQ ID NO: 881927 - protein, 399 aa, Homo sapiens
MGASFWPIRQAREQQRRALSFRQTSWLSEPPLGPAPHLSMVQAHGGRSRAQPLTLSLGAAMTQPPPEKTPAKKHVRLQERRGSNVALMLDVRSLGAVEPICSVNTPREVTLHFLRTAGHPLTRWALQRQPPSPKQLEEEFLKIPSNFVSPEDLDIPGHASKDRYKTILPNPQSRVCLGRAQSQEDGDYINANYIRGYDGKEKVYIATQGPMPNTVSDFWEMVWQEEVSLIVMLTQLREGKEKCVHYWPTEEETYGPFQIRIQDMKECPEYTVRQLTIQYQEERRSVKHILFSAWPDHQTPESAGPLLRLVAEVEESPETAAHPGPIVVHCSAGIGRTGCFIATRIGCQQLKARGEVDILGIVCQLRLDRGGMIQTAEQYQFLHHTLALYAGQLPEEPSP

SEQ ID NO: 881928 - protein, 291 aa, Homo sapiens
EEAGFLEPSQPSKTDRQTDRQLARGSLGATAASKIPSNFVSPEDLDIPGHASKDRYKTILPNPQSRVCLGRAQSQEDGDYINANYIRGYDGKEKVYIATQGPMPNTVSDFWEMVWQEEVSLIVMLTQLREGKEKCVHYWPTEEETYGPFQIRIQDMKECPEYTVRQLTIQYQEERRSVKHILFSAWPDHQTPESAGPLLRLVAEVEESPETAAHPGPIVVHCSAGIGRTGCFIATRIGCQQLKARGEVDILGIVCQLRLDRGGMIQTAEQYQFLHHTLALYAGQLPEEPSP

SEQ ID NO: 881929 - protein, 189 aa, Homo sapiens
EGKEKCVHSELSEHDNEGHFLLPHHLREGKEKCVHYWPTEEETYGPFQIRIQDMKECPEYTVRQLTIQYQEERRSVKHILFSAWPDHQTPESAGPLLRLVAEVEESPETAAHPGPIVVHCSAGIGRTGCFIATRIGCQQLKARGEVDILGIVCQLRLDRGGMIQTAEQYQFLHHTLALYAGQLPEEPSP

SEQ ID NO: 881930 - protein, 208 aa, Homo sapiens [sequence omitted]

SEQ ID NO: 881931 - protein, 410 aa, Homo sapiens; identical to SEQ ID NO: 881926

SEQ ID NO: 881932 - protein, 33 aa, Homo sapiens
MHLACAWAGPRVKDDLGITLFVSPRKDWLEWLL

SEQ ID NO: 881933 - protein, 308 aa, Homo sapiens
MCDCRREPICSVNTPREVTLHFLRTAGHPLTRWALQRQPPSPKQLEEEFLKIPSNFVSPEDLDIPGHASKDRYKTILPNPQSRVCLGRAQSQEDGDYINANYIRGYDGKEKVYIATQGPMPNTVSDFWEMVWQEEVSLIVMLTQLREGKEKCVHYWPTEEETYGPFQIRIQDMKECPEYTVRQLTIQYQEERRSVKHILFSAWPDHQTPESAGPLLRLVAEVEESPETAAHPGPIVVHCSAGIGRTGCFIATRIGCQQLKARGEVDILGIVCQLRLDRGGMIQTAEQYQFLHHTLALYAGQLPEEPSP

SEQ ID NO: 881934 - protein, 208 aa, Homo sapiens [sequence omitted]

SEQ ID NO: 881935 - protein, 568 aa, Homo sapiens
AVLVAALVDRGRADSGTGGGRRARPARGWGSGAAWRARRGPQAGPGREAAMGSVGSQRLEEPSVAGTPDPGVVMSFTFDSHQLEEAAEAAQGQGLRARGVPAFTDTTLDEPVPDDRYHAIYFAMLLAGVGFLLPYNSFITDVDYLHHKYPGTSIVFDMSLTYILVALAAVLLNNVLVERLTLHTRITSSICDVWLQLFSRDQAYAINLAAVGTVAFGCTVQQSSFYGYTGMLPKRYTQGVMTGESTAGVMISLSRILTKLLLPDERASTLIFFLVSVALELLCFLLHLLVRRSRFVLFYTTRPRDSHRGRPGLGRGYGYRVHHDVVAGDVHFEHPAPALAPNESPKDSPAHEVTGSGGAYMRFDVPRPRVQRSWPTFRALLLHRYVVARVIWADMLSIAVTYFITLCLFPGLESEIRHCILGEWLPILIMAVFNLSDFVGKILAALPVDWRGTHLLACSCLRVVFIPLFILCVYPSGMPALRHPAWPCIFSLLMGISNGYFGSVPMILAAGKVSPKQRELAGNTMTVSYMSGLTLGSAVAYCTYSLTRDAHGSCLHASTANGSILAGL

SEQ ID NO: 881936 - protein, 580 aa, Homo sapiens
AVLVAALVDRGRADSGTGGGRRARPARGWGSGAAWRARRGPQAGPGREAAMGSVGSQRLEEPSVAGTPDPGVVMSFTFDSHQLEEAAEAAQGQGLRARGVPAFTDTTLDEPVPDDRYHAIYFAMLLAGVGFLLPYNSFITDVDYLHHKYPGTSIVFDMSLTYILVALAAVLLNNVLVERLTLHTRITAGYLLALGPLLFISICDVWLQLFSRDQAYAINLAAVGTVAFGCTVQQSSFYGYTGMLPKRYTQGVMTGESTAGVMISLSRILTKLLLPDERASTLIFFLVSVALELLCFLLHLLVRRSRFVLFYTTRPRDSHRGRPGLGRGYGYRVHHDVVAGDVHFEHPAPALAPNESPKDSPAHEVTGSGGAYMRFDVPRPRVQRSWPTFRALLLHRYVVARVIWADMLSIAVTYFITLCLFPGLESEIRHCILGEWLPILIMAVFNLSDFVGKILAALPVDWRGTHLLACSCLRVVFIPLFILCVYPSGMPALRHPAWPCIFSLLMGISNGYFGSVPMILAAGKVSPKQRELAGNTMTVSYMSGLTLGSAVAYCTYSLTRDAHGSCLHASTANGSILAGL

SEQ ID NO: 881937 - protein, 580 aa, Homo sapiens; identical to SEQ ID NO: 881936

SEQ ID NO: 881938 - protein, 149 aa, Homo sapiens
AWHEASCQKMGAWGTQRRQARPGVHSRWPREEGMRKDRIRRGCSQEERWGSGSWRGGTVQAGVTAPHTRAAVATRWPPWPCSPQAGVVHREHHDRVLHVRADAGVRRGLLHLQPHPRRSRQLPARLHRQWFHPRRPLSQPRPLPGTPRA

SEQ ID NO: 881939 - protein, 247 aa, Homo sapiens
MLVLRSALTRALASRTLAPQMCSSFATGPRQYDGIFYEFRSYYLKPSKMNEFLENFEKNAHLRTAHSELVGYWSVEFGGRMNTVFHIWKYDNFAHRTEVRKALAKDKEWQEQFLIPNLALIDKQESEITYLVPWCKLEKPPKEGVYELATFQMKPGGPALWGDAFKRAVHAHVNLGYTKLVGVFHTEYGALNRVHVLWWNESADSRAAGRHKSHEDPRVVAAVRESVNYLVSQQNMLLIPTSFSPLK

SEQ ID NO: 881940 - protein, 184 aa, Homo sapiens
MLVLRSALTRALASRTLAPQMCSSFATGPRQYDGIFYEFRSYYLKPSKMNEFLENFEKNAHLRTAHSELVGYWSVEFGGRMNTVFHIWKYDNFAHRTEVRKALAKDKEWQEQFLIPNLALIDKQESEITYLVPWCKLEKPPKEGVYELATFQMKPGGPALWGDAFKRAVHAHVNLGYTSCSLVE

SEQ ID NO: 881941 - protein, 822 aa, Homo sapiens
MGTKPLHLPCRHSSLEFPCHHHLWDSPLCSLLRQPPPPPPGLGLGFPMAHPPNLGPPPPLRVGEPVALSEEERLKLAQQQAALLMQQEERAKQQGDHSLKEHELLEQQKRAAVLLEQERQQEIAKMGTPVPRPPQDMGQIGVRTPLGPRVAAPVGPVGPTPTVLPMGAPVPRPRGPPPPPGDENREMDDPSVGPKIPQALEKILQLKESRQEEMNSQQEEEEMETDARSSLGQSASETEEDTVSVSKKEKNRKRRNRKKKKKPQRVRGVSSESSGDREKDSTRSRGSDSPAADVEIEYVTEEPEIYEPNFIFFKRIFEAFKLTDDVKKEKEKEPEKLDKLENSAAPKKKGFEEEHKDSDDDSSDDEQEKKPEAPKLSKKKLRRMNRFTVAELKQLVARPDVVEMHDVTAQDPKLLVHLKATRNSVPVPRHWCFKRKYLQGKRGIEKPPFELPDFIKRTGIQEMREALQEKEEQKTMKSKMREKVRPKMGKIDIDYQKLHDAFFKWQTKPKLTIHGDLYYEGKEFETRLKEKKPGDLSDELRISLGMPVGPNAHKVPPPWLIAMQRYGPPPSYPNLKIPGLNSPIPESCSFGYHAGGWGKPPVDETGKPLYGDVFGTNAAEFQTKTEEEEIDRTPWGELEPSDEESSEEEEEEESDEDKPDETGFITPADSGLITPGGFSSVPAGMETPELIELRKKKIEEAMDGSETPQLFTVLPEKRTATVGGAMMGSTHIYDMSTVMSRKGPAPELQGVEVALAPEELELDPMAMTQKYEEHVREQQAQVEKEDFSDMVAEHAAKQKQKKRKAQPQDSRGGSKKYKEFKF

SEQ ID NO: 881942 - protein, 829 aa, Homo sapiens
ASSPCGGGGPKFGGWAIGKPRPRPGGGGGGGGGGCRGGSPKGGSGMGIPGSCADMGGGAALSPSSPLRVGEPVALSEEERLKLAQQQAALLMQQEERAKQQGDHSLKEHELLEQQKRAAVLLEQERQQEIAKMGTPVPRPPQDMGQIGVRTPLGPRVAAPVGPVGPTPTVLPMGAPVPRPRGPPPPPGDENREMDDPSVGPKIPQALEKILQLKESRQEEMNSQQEEEEMETDARSSLGQSASETEEDTVSVSKKEKNRKRRNRKKKKKPQRVRGVSSESSGDREKDSTRSRGSDSPAADVEIEYVTEEPEIYEPNFIFFKRIFEAFKLTDDVKKEKEKEPEKLDKLENSAAPKKKGFEEEHKDSDDDSSDDEQEKKPEAPKLSKKKLRRMNRFTVAELKQLVARPDVVEMHDVTAQDPKLLVHLKATRNSVPVPRHWCFKRKYLQGKRGIEKPPFELPDFIKRTGIQEMREALQEKEEQKTMKSKMREKVRPKMGKIDIDYQKLHDAFFKWQTKPKLTIHGDLYYEGKEFETRLKEKKPGDLSDELRISLGMPVGPNAHKVPPPWLIAMQRYGPPPSYPNLKIPGLNSPIPESCSFGYHAGGWGKPPVDETGKPLYGDVFGTNAAEFQTKTEEEEIDRTPWGELEPSDEESSEEEEEEESDEDKPDETGFITPADSGLITPGGFSSVPAGMETPELIELRKKKIEEAMDGSETPQLFTVLPEKRTATVGGAMMGSTHIYDMSTVMSRKGPAPELQGVEVALAPEELELDPMAMTQKYEEHVREQQAQVEKEDFSDMVAEHAAKQKQKKRKAQPQDSRGGSKKYKEFKF

SEQ ID NO: 881943 - protein, 292 aa, Homo sapiens
MGTKPLHLPCRHSSLEFPCHHHLWDSPLCSLLRQPPPPPPGLGLGFPMAHPPNLGPPPPLRVGEPVALSEEERLKLAQQQAALLMQQEERAKQQGDHSLKEHELLEQQKRAAVLLEQERQQEIAKMGTPVPRPPQDMGQIGVRTPLGPRVAAPVGPVGPTPTVLPMGAPVPRPRRTTHTTMTIQTRNGYTLVEPEAHSMKEKRKRSGSQERNNNTRKQAGTDGTRHRQQPTAQQRAHAGAHTRRRRAVTTHEAHQSDDPPTARRATKPPSHQRPCGTHDKEQNEPREQQRVD

SEQ ID NO: 881944 - protein, 87 aa, Homo sapiens
ALRLAPASGLVARLPAAKMATEHPEPPKAELQLPPPPPPGHYGAWAAQELQAKLAEIGAPIQGNREELVERLQSYTRQVGVGGGTSG

SEQ ID NO: 881945 - protein, 343 aa, Homo sapiens
ALRLAPASGLVARLPAAKMATEHPEPPKAELQLPPPPPPGHYGAWAAQELQAKLAEIGAPIQEEERLKLAQQQAALLMQQEERAKQQGDHSLKEHELLEQQKRAAVLLEQERQQEIAKMGTPVPRPPQDMGQIGVRTPLGPRVAAPVGPVGPTPTVLPMGAPVPRPRGPPPPPGDENREMDDPSVGPKIPQALEKILQLKESRQEEMNSQQEEAGIMEPDDSHAHGASQRQTLPRTQVRISKGEKRTRKTERRQTAPPVPQGPQHSPEGQRKHTNRISAPDDPHRRAATNIQDSTRTHRHKNNNRISAPDQQRQSHAAHHSHTERGKSGGGKQTANDKSKTRA

SEQ ID NO: 881946 - protein, 821 aa, Homo sapiens
MGTSAHLPCRHSSLEFPCHHHLWDSPLCSLLRQPPPPPPGLGLGFPMAHPPNLGPPPPLRVGEPVALSEEERLKLAQQQAALLMQQEERAKQQGDHSLKEHELLEQQKRAAVLLEQERQQEIAKMGTPVPRPPQDMGQIGVRTPLGPRVAAPVGPVGPTPTVLPMGAPVPRPRGPPPPPGDENREMDDPSVGPKIPQALEKILQLKESRQEEMNSQQEEEEMETDARSSLGQSASETEEDTVSVSKKEKNRKRRNRKKKKKPQRVRGVSSESSGDREKDSTRSRGSDSPAADVEIEYVTEEPEIYEPNFIFFKRIFEAFKLTDDVKKEKEKEPEKLDKLENSAAPKKKGFEEEHKDSDDDSSDDEQEKKPEAPKLSKKKLRRMNRFTVAELKQLVARPDVVEMHDVTAQDPKLLVHLKATRNSVPVPRHWCFKRKYLQGKRGIEKPPFELPDFIKRTGIQEMREALQEKEEQKTMKSKMREKVRPKMGKIDIDYQKLHDAFFKWQTKPKLTIHGDLYYEGKEFETRLKEKKPGDLSDELRISLGMPVGPNAHKVPPPWLIAMQRYGPPPSYPNLKIPGLNSPIPESCSFGYHAGGWGKPPVDETGKPLYGDVFGTNAAEFQTKTEEEEIDRTPWGELEPSDEESSEEEEEEESDEDKPDETGFITPADSGLITPGGFSSVPAGMETPELIELRKKKIEEAMDGSETPQLFTVLPEKRTATVGGAMMGSTHIYDMSTVMSRKGPAPELQGVEVALAPEELELDPMAMTQKYEEHVREQQAQVEKEDFSDMVAEHAAKQKQKKRKAQPQDSRGGSKKYKEFKF

SEQ ID NO: 881947 - protein, 822 aa, Homo sapiens; identical to SEQ ID NO: 881941

SEQ ID NO: 881948 - protein, 822 aa, Homo sapiens; identical to SEQ ID NO: 881941

SEQ ID NO: 881949 - protein, 822 aa, Homo sapiens; identical to SEQ ID NO: 881941

SEQ ID NO: 881950 - protein, 643 aa, Homo sapiens
ALRLAPASGLVARLPAAKMATEHPEPPKAELQLPPPPPPGHYGAWAAQELQAKLAEIGAPIQGNREELVERLQSYTRQTGIVLNRPVLRGEDGDKAAPPPMSAQLPGIPMPPPPLGIEYVTEEPEIYEPNFIFFKRIFEAFKLTDDVKKEKEKEPEKLDKLENSAAPKKKGFEEEHKDSDDDSSDDEQEKKPEAPKLSKKKLRRMNRFTVAELKQLVARPDVVEMHDVTAQDPKLLVHLKATRNSVPVPRHWCFKRKYLQGKRGIEKPPFELPDFIKRTGIQEMREALQEKEEQKTMKSKMREKVRPKMGKIDIDYQKLHDAFFKWQTKPKLTIHGDLYYEGKEFETRLKEKKPGDLSDELRISLGMPVGPNAHKVPPPWLIAMQRYGPPPSYPNLKIPGLNSPIPESCSFGYHAGGWGKPPVDETGKPLYGDVFGTNAAEFQTKTEEEEIDRTPWGELEPSDEESSEEEEEEESDEDKPDETGFITPADSGLITPGGFSSVPAGMETPELIELRKKKIEEAMDGSETPQLFTVLPEKRTATVGGAMMGSTHIYDMSTVMSRKGPAPELQGVEVALAPEELELDPMAMTQKYEEHVREQQAQVEKEDFSDMVAEHAAKQKQKKRKAQPQDSRGGSKKYKEFKF

SEQ ID NO: 881951 - protein, 804 aa, Homo sapiens
MGTKPLHLPCRHSSLEFPCHHHLWDSPLCSLLRQPPPPPPGLGLGFPMAHPPNLGPPPPLRVGEPVALSEEERLKLAQQQAALLMQQEERAKQQGDHSLKEHELLEQQKRAAVLLEQERQQEIAKMGTPVPRPPQDMGQIGVRTPLGPRVAAPVGPVGPTPTVLPMGAPVPRPRGPPPPPGDENREMDDPSVGPKIPQALEKILQLKESRQEEMNSQQEEEEMETDARSSLGQSASETEEDTVSVSKKEKNRKRRNRKKKKKPQRVRGVSSESSGDREKDSTRSRGSDSPAADVEIEYVTEEPEIYEPNFIFFKRIFEAFKLTDDVKKEKEKEPEKLDKLENSAAPKKKGFEEEHKDSDDDSSDDEQEKKPEAPKLSKKKLRRMNRFTVAELKQLVARPDVVEMHDVTAQDPKLLVHLKATRNSVPVPRHWCFKRKYLQGKRGIEKPPFELPDFIKRTGIQEMREALQEKEEQKTMKSKMREKVRPKMGKIDIDYQKLHDAFFKWQTKPKLTIHGDLYYEGKEFETRLKEKKPGDLSDELRISLGMPVGPNAHKVPPPWLIAMQRYGPPPSYPNHAGGWGKPPVDETGKPLYGDVFGTNAAEFQTKTEEEEIDRTPWGELEPSDEESSEEEEEEESDEDKPDETGFITPADSGLITPGGFSSVPAGMETPELIELRKKKIEEAMDGSETPQLFTVLPEKRTATVGGAMMGSTHIYDMSTVMSRKGPAPELQGVEVALAPEELELDPMAMTQKYEEHVREQQAQVEKEDFSDMVAEHAAKQKQKKRKAQPQDSRGGSKKYKEFKF

SEQ ID NO: 881952 - protein, 883 aa, Homo sapiens
MGTKPLHLPCRHSSLEFPCHHHLWDSPLCSLLRQPPPPPPGLGLGFPMAHPPNLGPPPPLRVGEPVALSEEERLKLAQQQAALLMQQEERAKQQGDHSLKEHELLEQQKRAAVLLEQERQQEIAKMGTPVPRPPQDMGQIGVRTPLGPRVAAPVGPVGPTPTVLPMGAPVPRPRGPPPPPGDENREMDDPSVGPKIPQALEKILQLKESRQEEMNSQQEEEEMETDARSSLGQSASETEEDTVSVSKKEKNRKRRNRKKKKKPQRVRGVSSESSGDREKDSTRSRGSDSPAADVEIEYVTEEPEIYEPNFIFFKRIFEAFKLTDDVKKEKEKEPEKLDKLENSAAPKKKGFEEEHKDSDDDSSDDEQEKKPEAPKLSKKKLRRMNRFTVAELKQLVARPDVVEMHDVTAQDPKLLVHLKATRNSVPVPRHWCFKRKYLQGKRGIEKPPFELPDFIKRTGIQEMREALQEKEEQKTMKSKMREKVRPKMGKIDIDYQKLHDAFFKWQTKPKLTIHGDLYYEGKEFETRLKEKKPGDLSDELRISLGMPVGPNAHKVPPPWLIAMQRYGPPPSYPNLKIPGLNSPIPESCSFGYHAGGWGKPPVDETGKPLYGDVFGTNAAEFQTKTEEEEIDRTPWGELEPSDEESSEEEEEEESDEDKPDETGFITPADSGLITPGGFSSVPAGMETPELIELRKKKIEEAMDGSETPQLFTVLPEKRTATVGGAMMGSTHIYDMSTVMSRKGPAPELQGVEVALAPEELELDPMAMTQKYEEHVREQQAQVEKEEGSSRTLVRVESVLARNQKLTKTREISPRTSPEGQTREIKEIQACKVPYSTYALLDLGLTVQDAMGFNTRDHFIRAVLEDVCHFNVRIVTDPEYSSVS

SEQ ID NO: 881953 - protein, 894 aa, Homo sapiens
MGTKPLHLPCRHSSLEFPCHHHLWDSPLCSLLRQPPPPPPGLGLGFPMAHPPNLGPPPPLRVGEPVALSEEERLKLAQQQAALLMQQEERAKQQGDHSLKEHELLEQQKRAAVLLEQERQQEIAKMGTPVPRPPQDMGQIGVRTPLGPRVAAPVGPVGPTPTVLPMGAPVPRPRGPPPPPGDENREMDDPSVGPKIPQALEKILQLKESRQEEMNSQQEEEEMETDARSSLGQSASETEEDTVSVSKKEKNRKRRNRKKKKKPQRVRGVSSESSGDREKDSTRSRGSDSPAADVEIEYVTEEPEIYEPNFIFFKRIFEAFKLTDDVKKEKEKEPEKLDKLENSAAPKKKGFEEEHKDSDDDSSDDEQEKKPEAPKLSKKKLRRMNRFTVAELKQLVARPDVVEMHDVTAQDPKLLVHLKATRNSVPVPRHWCFKRKYLQGKRGIEKPPFELPDFIKRTGIQEMREALQEKEEQKTMKSKMREKVRPKMGKIDIDYQKLHDAFFKWQTKPKLTIHGDLYYEGKEFETRLKEKKPGDLSDELRISLGMPVGPNAHKVPPPWLIAMQRYGPPPSYPNLKIPGLNSPIPESCSFGYHAGGWGKPPVDETGKPLYGDVFGTNAAEFQTKTEEEEIDRTPWGELEPSDEESSEEEEEEESDEDKPDETGFITPADSGLITPGGFSSVPAGMETPELIELRKKKIEEAMDGSETPQLFTVLPEKRTATVGGAMMGSTHIYDMSTVMSRKGPAPELQGVEVALAPEELELDPMAMTQKLRRMNRFTVAELKQLVARPDVVEMHDVTAQDPKLLVHLKATRNSVPVPRHWCFKRKYLQGKRGIEKPPFELPDFIKRTGIQEMREALQEKEEQKTMKSKMREKVRPKMGKIDIDYQKLHDAFFM

SEQ ID NO: 881954 - protein, 475 aa, Homo sapiens
LTLQDPLSIPLRDHSIYDEQEKKPEAPKLSKKKLRRMNRFTVAELKQLVARPDVVEMHDVTAQDPKLLVHLKATRNSVPVPRHWCFKRKYLQGKRGIEKPPFELPDFIKRTGIQEMREALQEKEEQKTMKSKMREKVRPKMGKIDIDYQKLHDAFFKWQTKPKLTIHGDLYYEGKEFETRLKEKKPGDLSDELRISLGMPVGPNAHKVPPPWLIAMQRYGPPPSYPNLKIPGLNSPIPESCSFGYHAGGWGKPPVDETGKPLYGDVFGTNAAEFQTKTEEEEIDRTPWGELEPSDEESSEEEEEEESDEDKPDETGFITPADSGLITPGGFSSVPAGMETPELIELRKKKIEEAMDGSETPQLFTVLPEKRTATVGGAMMGSTHIYDMSTVMSRKGPAPELQGVEVALAPEELELDPMAMTQKYEEHVREQQAQVEKEDFSDMVAEHAAKQKQKKRKAQPQDSRGGSKKYKEFKF

SEQ ID NO: 881955 - protein, 738 aa, Homo sapiens
MGTKPLHLPCRHSSLEFPCHHHLWDSPLCSLLRQPPPPPPGLGLGFPMAHPPNLGPPPPLRVGEPVALSEEERLKLAQQQAALLMQQEERAKQQGDHSLKEHELLEQQKRAAVLLEQERQQEIAKMGTPVPRPPQDMGQIGVRTPLGPRVAAPVGPVGPTPTVLPMGAPVPRPRGPPPPPGDENREMDDPSVGPKIPQALEKILQLKESRQEEMNSQQEEEEMETDARSSLGQSASETEEDTVSVSKKEKNRKRRNRKKKKKPQRVRGVSSESSGDREKDSTRSRGSDSPAADVEIEYVTEEPEIYEPNFIFFKRIFEAFKLTDDVKKEKEKEPEKLDKLENSAAPKKKGFEEEHKDSDDDSSDDEQEKKPEAPKLSKKKLRRMNRFTVAELKQLVARPDVVEMHDVTAQDPKLLVHLKATRNSVPVPRHWCFKRKYLQGKRGIEKPPFELPDFIKRTGIQEMREALQEKEEQKTMKSKMREKVRPKMGKIDIDYQKLHDAFFKWQTKPKLTIHGDLYYEGKEFETRLKEKKPGDLSDELRISLGMPVGPNAHKVPPPWLIAMQRYGPPPSYPNLKIPGLNSPIPESCSFGYHAGGWGKPPVDETGKPLYGDVFGTNAAEFQTKTEEEEIDRTPWGELEPSDEESSEEEEEEESDEDKPDETGFITPADSGLITPGGFSSVPAGMETPELIELRKKKIEEAMDGSETPQLFTVLPEKRTATVGGAMMGSTHIYDMSTL

SEQ ID NO: 881956 - protein, 810 aa, Homo sapiens
MGTKPLHLPCRHSSLEFPCHHHLWDSPLCSLLRQPPPPPPGLGLGFPMAHPPNLGPPPPLRVGEPVALSEEERLKLAQQQAALLMQQEERAKQQGDHSLKEHELLEQQKRAAVLLEQERQQEIAKMGTPVPRPPQDMGQIGVRTPLGPRVAAPVGPVGPTPTVLPMGAPVPRPRGPPPPPGDENREMDDPSVGPKIPQALEKILQLKESRQEEMNSQQEEEEMETDARSSLGQSASETEEDTVSVSKKEKNRKRRNRKKKKKPQRVRGVSSESSGDREKDSTRSRGSDSPAADVEIEYVTEEPEIYEPNFIFFKRIFEAFKLTDDVKKEKEKEPEKLDKLENSAAPKKKGFEEEHKDSDDDSSDDEQEKKPEAPKLSKKKLRRMNRFTVAELKQLVARPDVVEMHDVTAQDPKLLVHLKATRNSVPVPRHWCFKRKYLQGKRGIEKPPFELPDFIKRTGIQEMREALQEKEEQKTMKSKMREKVRPKMGKIDIDYQKLHDAFFKWQTKPKLTIHGDLYYEGKEFETRLKEKKPGDLSDELRISLGMPVGPNAHKVPPPWLIAMQRYGPPPSYPNLKIPGLNSPIPESCSFGYHAGGWGKPPVDETGKPLYGDVFGTNAAEFQTKTEEEEIDRTPWGELEPSDEESSEEEEEEESDEDKPDETGFITPADSGLITPGGFSSVPAGMETPELIELRKKKIEEAMDGKLRQPSSSFTCVRQDEEEQGTWWRGPLDGVHPTIYDRVTGYVDRERPVLEAAKCGKWALAPEKVGAGSLGKDHKVLGRSAETDVHRKETDWGTPNKKKGGPERGAK

SEQ ID NO: 881957 - protein, 690 aa, Homo sapiens
MGTKPLHLPCRHSSLEFPCHHHLWDSPLCSLLRQPPPPPPGLGLGFPMAHPPNLGPPPPLRVGEPVALSEEERLKLAQQQAALLMQQEERAKQQGDHSLKEHELLEQQKRAAVLLEQERQQEIAKMGTPVPRPPQDMGQIGVRTPLGPRVAAPVGPVGPTPTVLPMGAPVPRPRGPPPPPGDENREMDDPSVGPKIPQALEKILQLKESRQEEMNSQQEEEEMETDARSSLGQSASETEEDTVSVSKKEKNRKRRNRKKKKKPQRVRGVSSESSGDREKDSTRSRGSDSPAADVEIEYVTEEPEIYEPNFIFFKRIFEAFKLTDDVKKEKEKEPEKLDKLENSAAPKKKGFEEEHKDSDDDSSDDEQEKKPEAPKLSKKKLRRMNRFTVAELKQLVARPDVVEMHDVTAQDPKLLVHLKATRNSVPVPRHWCFKRKYLQGKRGIEKPPFELPDFIKRTGIQEMREALQEKEEQKTMKSKMREKVRPKMGKIDIDYQKLHDAFFKWQTKPKLTIHGDLYYEGKEFETRLKEKKPGDLSDELRISLGMPVGPNAHKVPPPWLIAMQRYGPPPSYPNLKIPGLNSPIPESCSFGYHAGGWGKPPVDETGKPLYGDVFGTNAAEFQTKTEEEEIDRTPWGELEPSDEESSEEEEEEESDEDKPDETGFITPADSDLITPGWLFLSLSTAIASYT

SEQ ID NO: 881958 - protein, 384 aa, Homo sapiens
FSMPRLPCRYLRLKHQWRGTGIQEMREALQEKEEQKTMKSKMREKVRPKMGKIDIDYQKLHDAFFKWQTKPKLTIHGDLYYEGKEFETRLKEKKPGDLSDELRISLGMPVGPNAHKVPPPWLIAMQRYGPPPSYPNLKIPGLNSPIPESCSFGYHAGGWGKPPVDETGKPLYGDVFGTNAAEFQTKTEEEEIDRTPWGELEPSDEESSEEEEEEESDEDKPDETGFITPADSGLITPGGFSSVPAGMETPELIELRKKKIEEAMDGSETPQLFTVLPEKRTATVGGAMMGSTHIYDMSTVMSRKGPAPELQGVEVALAPEELELDPMAMTQKYEEHVREQQAQVEKEDFSDMVAEHAAKQKQKKRKAQPQDSRGGSKKYKEFKF

SEQ ID NO: 881959 - protein, 316 aa, Homo sapiens
RSVPGFSLWGLYYEGKEFETRLKEKKPGDLSDELRISLGMPVGPNAHKVPPPWLIAMQRYGPPPSYPNLKIPGLNSPIPESCSFGYHAGGWGKPPVDETGKPLYGDVFGTNAAEFQTKTEEEEIDRTPWGELEPSDEESSEEEEEEESDEDKPDETGFITPADSGLITPGGFSSVPAGMETPELIELRKKKIEEAMDGSETPQLFTVLPEKRTATVGGAMMGSTHIYDMSTVMSRKGPAPELQGVEVALAPEELELDPMAMTQKYEEHVREQQAQVEKEDFSDMVAEHAAKQKQKKRKAQPQDSRGGSKKYKEFKF

SEQ ID NO: 881960 - protein, 333 aa, Homo sapiens
MKKRGVCFMSSSWLSKCLIWPVALRPDLYYEGKEFETRLKEKKPGDLSDELRISLGMPVGPNAHKVPPPWLIAMQRYGPPPSYPNLKIPGLNSPIPESCSFGYHAGGWGKPPVDETGKPLYGDVFGTNAAEFQTKTEEEEIDRTPWGELEPSDEESSEEEEEEESDEDKPDETGFITPADSGLITPGGFSSVPAGMETPELIELRKKKIEEAMDGSETPQLFTVLPEKRTATVGGAMMGSTHIYDMSTVMSRKGPAPELQGVEVALAPEELELDPMAMTQKYEEHVREQQAQVEKEDFSDMVAEHAAKQKQKKRKAQPQDSRGGSKKYKEFKF

SEQ ID NO: 881961 - protein, 154 aa, Homo sapiens
ALRLAPASGLVARLPAAKMATEHPEPPKAELQLPPPPPPGHYGAWAAQELQAKLAEIGAPIQGNREELVERLQSYTRQTGIVLNRPVLRGEDGDKAAPPPMSAQLPGIPMPPPPLGLPPLQPPPPAPTTSTRPWPWLSYGPPTKFGAPASSPCG

SEQ ID NO: 881962 - protein, 261 aa, Homo sapiens
GDSRGLVSSPFVSNLNPGLNSPSHESCSFGYHAGGWGKPPVDETGKPLYGDVFGTNAAEFQTKTEEEEIDRTPWGELEPSDEESSEEEEEEESDEDKPDETGFITPADSGLITPGGFSSVPAGMETPELIELRKKKIEEAMDGSETPQLFTVLPEKRTATVGGAMMGSTHIYDMSTVMSRKGPAPELQGVEVALAPEELELDPMAMTQKYEEHVREQQAQVEKEDFSDMVAEHAAKQKQKKRKAQPQDSRGGSKKYKEFKF

SEQ ID NO: 881963 - protein, 357 aa, Homo sapiens
MGELPDFIKRTGIQEMREALQEKEEQKTMKSKMREKVRPKMGKIDIDYQKLHDAFFKWQTKPKLTIHGDLYYEGKEFETRLKEKKPGDLSDELRISLGMPVGPNAHKVPPPWLIAMQRYGPPPSYPNHAGGWGKPPVDETGKPLYGDVFGTNAAEFQTKTEEEEIDRTPWGELEPSDEESSEEEEEEESDEDKPDETGFITPADSGLITPGGFSSVPAGMETPELIELRKKKIEEAMDGSETPQLFTVLPEKRTATVGGAMMGSTHIYDMSTVMSRKGPAPELQGVEVALAPEELELDPMAMTQKYEEHVREQQAQVEKEDFSDMVAEHAAKQKQKKRKAQPQDSRGGSKKYKEFKF

SEQ ID NO: 881964 - protein, 268 aa, Homo sapiens
KSSLGVAMDGGKSGWPVAWVGGEGTERALGPLQSDPSLLRAGNTESDSLGGGEPLYGDVFGTNAAEFQTKTEEEEIDRTPWGELEPSDEESSEEEEEEESDEDKPDETGFITPADSGLITPGGFSSVPAGMETPELIELRKKKIEEAMDGSETPQLFTVLPEKRTATVGGAMMGSTHIYDMSTVMSRKGPAPELQGVEVALAPEELELDPMAMTQKYEEHVREQQAQVEKEDFSDMVAEHAAKQKQKKRKAQPQDSRGGSKKYKEFKF

SEQ ID NO: 881965 - protein, 569 aa, Homo sapiens
MGTKPLHLPCRHSSLEFPCHHHLWDSPLCSLLRQPPPPPPGLGLGFPMAHPPNLGPPPPLRVGEPVALSEEERLKLAQQQAALLMQQEERAKQQGDHSLKEHELLEQQKRAAVLLEQERQQEIAKMGTPVPRPPQDMGQIGVRTPLGPRVAAPVGPVGPTPTVLPMGAPVPRPRGPPPPPGDENREMDDPSVGPKIPQALEKILQLKESRQEEMNSQQEEEEMETDARSSLGQSASETEEDTVSVSKKEKNRKRRNRKKKKKPQRVRGVSSESSGDREKDSTRSRGSDSPAADVEIEYVTEEPEIYEPNFIFFKRIFEAFKLTDDVKKEKEKEPEKLDKLENSAAPKKKGFEEEHKDSDDDSSDDEQEKKPEAPKLSKKKLRRMNRFTVAELKQLVARPDVVEMHDVTAQDPKLLVHLKATRNSVPVPRHWCFKRKYLQGKRGIEKPPFELPDFIKRTGIQEMREALQEKEEQKTMKSKMREKYDALVGIETERDSRDRESRREKEEARGKEKPEVTDRAGGNKTVEPPISQVGNVDTASELEKGVSEAAVLKPSEELPAEVTHPLNRK

SEQ ID NO: 881966 - protein, 412 aa, Homo sapiens
MGTKPLHLPCRHSSLEFPCHHHLWDSPLCSLLRQPPPPPPGLGLGFPMAHPPNLGPPPPLRVGEPVALSEEERLKLAQQQAALLMQQEERAKQQGDHSLKEHELLEQQKRAAVLLEQERQQEIAKMGTPVPRPPQDMGQIGVRTPLGPRVAAPVGPVGPTPTVLPMGAPVPRPRGPPPPPGDENREMDDPSVGPKIPQALEKILQLKESRQEEMNSQQEEEEMETDARSSLGQSASETEEDTVSVSKKEKNRKRRNRKKKKKPQRVRGVSSESSGDREKDSTRSRGSDSPAADVEIEYVTEEPEIYEPNFIFFKRIFEAFKLTDDVKKEKEKEPEKLDKLENSAAPKKKGFEEEHKDSDDDSSDDEQEKKPEAPKLSKKKLRRMNRFTVAELKQLVARPDVVEMHDVTADPN

SEQ ID NO: 881967 - protein, 137 aa, Homo sapiens
LEVIQRIFKSALFYIYMDRSETPQLFTVLPEKRTATVGGAMMGSTHIYDMSTVMSRKGPAPELQGVEVALAPEELELDPMAMTQKYEEHVREQQAQVEKEDFSDMVAEHAAKQKQKKRKAQPQDSRGGSKKYKEFKF

SEQ ID NO: 881968 - protein, 133 aa, Homo sapiens
MDATKRIMQMLKLDGSETPQLFTVLPEKRTATVGGAMMGSTHIYDMSTVMSRKGPAPELQGVEVALAPEELELDPMAMTQKYEEHVREQQAQVEKEDFSDMVAEHAAKQKQKKRKAQPQDSRGGSKKYKEFKF

SEQ ID NO: 881969 - protein, 154 aa, Homo sapiens; identical to SEQ ID NO: 881961

SEQ ID NO: 881970 - protein, 287 aa, Homo sapiens
MGTPVPRPPQDMGQIGVRTPLGPRVAAPVGPVGPTPTVLPMGAPVPRPRGPPPPPGDENREMDDPSVGPKIPQALEKILQLKESRQEEMNSQQEEEEMETDARSSLGQSASETEEDTVSVSKKEKNRKRRNRKKKKKPQRVRGVSSESSGDREKDSTRSRGSDSPAADVEIEYVTEEPEIYEPNFIFFKRIFEAFKLTDDVKKEKEKEPEKLDKLENSAAPKKKGFEEEHKDSDDDSSDDEQEKKPEAPKLSKKKLRRMNRFTVAELKQLVARPDVVEMHDVTADPN

SEQ ID NO: 881971 - protein, 128 aa, Homo sapiens [sequence omitted]

SEQ ID NO: 881972 - protein, 104 aa, Homo sapiens
PPPPPGHYGAWAAQELQAKLAEIGAPIQGGTQEVEGPLRACGEAEPGYPGDSGARGGGRPLGPDLAGLACPIDRVLCPAGNREELVERLQSYTRQVGVGGGTSG

SEQ ID NO: 881973 - protein, 673 aa, Homo sapiens [sequence omitted]

SEQ ID NO: 881974 - protein, 712 aa, Homo sapiens
MNRKDSKRKSHQECTGKTGGRGRPRQVRRHKTCPSPREISKVMASMNLGLLSEGGCSEDELLEKCIQSFDSAGSLCHEDHMLNMVLAMHSWVLPSADLAARLLTSYQKATGDTQELRRLQICHLVRYWLMRHPEVMHQDPQLEEVIGRFWATVAREGNSAQRRLGDSSDLGVSPVLPSSLPHRHSAISLYIPKPSTVSHSNTLPLLAPSLSPGGPGPPLPMSSPGLGKKRKVSLLFDHLETGELAQHLTYLEFRSFQAITPQDLRSYVLQGSVRGCPALEGSVGLSNSVSRWVQVMVLSRPGPLQRAQVLDKFIHVAQRLHQLQNFNTLMAVTGGLCHSAISRLKDSHAHLSPDSTKALLELTELLASHNNYARYRRTWAGCAGFRLPVLGVHLKDLVSLHEAQPDRLPDGRLHLPKLNNLYLRLQELVALQGQHPPCSANEDLLHLLTLSLDLFYTEDEIYELSYAREPRCPKSLPPSPFNAPLVVEWAPGVTPKPDRVTLGRHVEQLVESVFKNYDPEGRGTISQEDFERLSGNFPFACHGLHPPPRQGRGSFSREELTGYLLRASAICSKLGLAFLHTFHEVTFRKPTFCDSCSGFLWGVTKQGYRCRECGLCCHKHCRDQVKVECKKRPGAKGDAGPPGAPVPSTPAPHASCGSEENHSYTLSLEPETGCQLRHAWTQTESPHPSWETDTVPCPVMDPPSTASSKLDS

SEQ ID NO: 881975 - protein, 659 aa, Homo sapiens [sequence omitted]

SEQ ID NO: 881976 - protein, 69 aa, Homo sapiens
  misc_feature (16)..(16): Xaa can be any naturally occurring amino acid
LLPPPASVGRAPPAPXGGSPTRPRHAPPCPANFCIFSRDGVSPCWPRWSQTPDLMIHQPQPPKVLGIQA

SEQ ID NO: 881977 - protein, 617 aa, Homo sapiens [sequence omitted]

SEQ ID NO: 881978 - protein, 480 aa, Homo sapiens
MFPNSILGRPPFTPNHQQHNNFFTLSPTVYSHQQLIDAQFNFQNADLSRAVSLQQLTYGNVSPIQTSASPLFRGRKRLSDEKNLPLDGKRQRFHSPHQEPTVVNQIVPLSGERRYSMPPLFHTHYVPDIVRCVPPFREIAFLEPREITLPEAKDKLSQQILELFETCQQQISDLKKKELCRTQLQREIQLLFPQSRLFLVGSSLNGFGTRSSDGDLCLVVKEEPVNQKTEARHILTLVHKHFCTRLSGYIERPQLIRAKVPIVKFRDKVSCVEFDLNVNNIVGIRNTFLLRTYAYLENRVRPLVLVIKKWASHHQINDASRGTLSSYSLVLMVLHYLQTLPEPILPSLQKIYPESFSPAIQLHLVHQAPCNVPPYLSKNESNLGDLLLGFLKYYATEFDWNSQMISVREAKAIPRPDGIEWRNKYICVEEPFDGTNTARAVHEKQKFDMIKDQFLKSWHRLKNKRDLNSILPVRAAVLKR

SEQ ID NO: 881979 - protein, 341 aa, Homo sapiens
MFPNSILGRPPFTPNHQQHNNFFTLSPTVYSHQQLIDAQFNFQNADLSRAVSLQQLTYGNVSPIQTSASPLFRGRKRLSDEKNLPLDGKRQRFHSPHQEPTVVNQIVPLSGERRYSMPPLFHTHYVPDIVRCVPPFREIAFLEPREITLPEAKDKLSQQILELFETCQQQISDLKKKELCRTQLQREIQLLFPQSRLFLVGSSLNGFGTRSSDGDLCLVVKEEPVNQKTEARHILTLVHKHFCTRLSGYIERPQLIRAKVPIVKFRDKVSCVEFDLNVNNIVGIRNTFLLRTYAYLENRVRPLVLVIKKWASHHQINDASRGTLSSYSLVLMVLHYLQRVF

SEQ ID NO: 881980 - protein, 480 aa, Homo sapiens; identical to SEQ ID NO: 881978

SEQ ID NO: 881981 - protein, 480 aa, Homo sapiens; identical to SEQ ID NO: 881978

SEQ ID NO: 881982 - protein, 480 aa, Homo sapiens; identical to SEQ ID NO: 881978

SEQ ID NO: 881983 - protein, 159 aa, Homo sapiens
MFPNSILGRPPFTPNHQQHNNFFTLSPTVYSHQQLIDAQFNFQNADLSRAVSLQQLTYGNVSPIQTSASPLFRGRKRLSDEKNLPLDGKRQRFHSPHQEPTVVNQIVPLSGERRYSMPPLFHTHYVPDIVRCVPPFREIAFLEPREITLPEAKDKVIIM

SEQ ID NO: 881984 - protein, 337 aa, Homo sapiens
MFPNSILGRPPFTPNHQQHNNFFTLSPTVYSHQQLIDAQFNFQNADLSRAVSLQQLTYGNVSPIQTSASPLFRGRKRLSDEKNLPLDGKRQRFHSPHQEPTVVNQIVPLSGERRYSMPPLFHTHYVPDIVRCVPPFREIAFLEPREITLPEAKDKLSQQILELFETCQQQISDLKKKELCRTQLQREIQLLFPQSRLFLVGSSLNGFGTRSSDGDLCLVVKEEPVNQKTEARHILTLVHKHFCTRLSGYIERPQLIRAKVPIVKFRDKVSCVAVWLECNHCWENLPPNLSLKPVAVRDKRDPQMRGYTFWLQTLPPPISRRTVPKAGYVPLSSDILW

SEQ ID NO: 881985 - protein, 230 aa, Homo sapiens
MFPNSILGRPPFTPNHQQHNNFFTLSPTVYSHQQLIDAQFNFQNADLSRAVSLQQLTYGNVSPIQTSASPLFRGRKRLSDEKNLPLDGKRQRFHSPHQEPTVVNQIVPLSGERRYSMPPLFHTHYVPDIVRCVPPFREIAFLEPREITLPEAKDKLSQQILELFETCQQQISDLKKKELCRTQLQREIQLLFPQSRLFLVGSSLNGFGTRSSDGDLCLVVKEEPVSKETF

SEQ ID NO: 881986 - protein, 762 aa, Homo sapiens
APDRPPPRHQDTGPCLEKTPAEGRDSPTREPGALPCACGQLPDLEDELSLLDPLPRYLKSCQDLIVPEQCRCADTRPGSEQPPLGGAASPEVLAPVSKEAADLAPTGPSPRPGPGLLLDVCTKDLADAPAEELQEKGSPAGPPPSQGQPAARPPKEVPASRLAQQLREEGWNLQTSESLTLAEVYLMMGKPSKLQLEYDWLGPGRQDPRPGSLPTALHKQRLLSCLLKLISTEVNPKLALEANTISTASVRPAQEEQSMTPPGKVVTVSSRSPRCPRNQASLRSSKTFPPSSAPCSSGLRNPPRPLLVPGPSSTGSNDSDGGLFAVPTTLPPNSRHGKLFSPSKEAELTFRQHLNSISMQSDFFLPKPRKLRNRHLRKPLVVQRTLLPRPSENQSHNVCSFSILSNSSVTGRGSFRPIQSSLTKAALSRPIVPKVLPPQATSHLASAIDLAATSAGILSGNPLPALDTEGLSGISPLSSDEVTGAISGQDSTGTHQDGDTLPTVGGSDPFVSIPSRPEQEPVADSFQGSSVLSLSELPKAPLQNGLSIPLSSSESSSTRLSPPDVSALLDISLPGPPEDALSQGEPATHISDSIIEIAISSGQYGEGVPLSPAKLNGSDSSKSLPSPSSSPQPHWIASPTHDPQWYPSDSTDSSLSSLFASFISPEKSRKMLPTPIGTNSGTSLLGPSLLDGNSRDSFVSRSLADVAEVVDSQLVCMMNENSIDYISRFNDLAQELSIAEPGRREALFDGGGGGPAVSDLSQ

SEQ ID NO: 881987 - protein, 792 aa, Homo sapiens
APDRPPPRHQDTGPCLEKTPAEGRDSPTREPGALPCACGQLPDLEDELSLLDPLPRYLKSCQDLIVPEQCRCADTRPGSEQPPLGGAASPEVLAPVSKEAADLAPTGPSPRPGPGLLLDVCTKDLADAPAEELQEKGSPAGPPPSQGQPAARPPKEVPASRLAQQLREEGWNLQTSESLTLAEVYLMMGKPSKLQLEYDWLGPGRQDPRPGSLPTALHKQRLLSCLLKLISTEVNPKLALEANTISTASVRPAQEEQSMTPPGKVVTVSSRSPRCPRNQASLRSSKTFPPSSAPCSSGLRNPPRPLLVPGPSSTGSNDSDGGLFAVPTTLPPNSRHGKLFSPSKEAELTFRQHLNSISVSVWGRAARVRASPWSGELHLQVPDAAPLQMQSDFFLPKPRKLRNRHLRKPLVVQRTLLPRPSENQSHNVCSFSILSNSSVTGRGSFRPIQSSLTKAALSRPIVPKVLPPQATSHLASAIDLAATSAGILSGNPLPALDTEGLSGISPLSSDEVTGAISGQDSTGTHQDGDTLPTVGGSDPFVSIPSRPEQEPVADSFQGSSVLSLSELPKAPLQNGLSIPLSSSESSSTRLSPPDVSALLDISLPGPPEDALSQGEPATHISDSIIEIAISSGQYGEGVPLSPAKLNGSDSSKSLPSPSSSPQPHWIASPTHDPQWYPSDSTDSSLSSLFASFISPEKSRKMLPTPIGTNSGTSLLGPSLLDGNSRDSFVSRSLADVAEVVDSQLVCMMNENSIDYISRFNDLAQELSIAEPGRREALFDGGGGGPAVSDLSQ

SEQ ID NO: 881988 - protein, 757 aa, Homo sapiens
APDRPPPRHQDTGPCLEKTPAEGRDSPTREPGALPCACGQLPDLEDELSLLDPLPRYLKSCQDLIVPEQCRCADTRPGSEQPPLGGAASPEVLAPVSKEAADLAPTGPSPRPGPGLLLDVCTKDLADAPAEELQEKGSPAGPPPSQGQPAARPPKEVPASRLAQQLREEGWNLQTSESLTLAEVYLMMGKPSKLQLEYDWLGPGRQDPRPGSLPTALHKQRLLSCLLKLISTEVNPKLALEANTISTASVRPAQEEQSMTPPGKVVTVSSRSPRCPRNQASLRSSKTFPPSSAPCSSGLRNPPRPLLVPGPSSTGSNDSDGGLFAVPTTLPPNSRHGKLFSPSKEAELTFRQHLNSISVSVWGRAARVRASPWSGELHLQVPDAAPLQMQSDFFLPKPRKLRNRHLRKPLVVQRTLLPRPSENQSHNVCSFSILSNSSVTGAIDLAATSAGILSGNPLPALDTEGLSGISPLSSDEVTGAISGQDSTGTHQDGDTLPTVGGSDPFVSIPSRPEQEPVADSFQGSSVLSLSELPKAPLQNGLSIPLSSSESSSTRLSPPDVSALLDISLPGPPEDALSQGEPATHISDSIIEIAISSGQYGEGVPLSPAKLNGSDSSKSLPSPSSSPQPHWIASPTHDPQWYPSDSTDSSLSSLFASFISPEKSRKMLPTPIGTNSGTSLLGPSLLDGNSRDSFVSRSLADVAEVVDSQLVCMMNENSIDYISRFNDLAQELSIAEPGRREALFDGGGGGPAVSDLSQ

SEQ ID NO: 881989 - protein, 737 aa, Homo sapiens
APDRPPPRHQDTGPCLEKTPAEGRDSPTREPGALPCACGQLPDLEDELSLLDPLPRYLKSCQDLIVPEQCRCADTRPGSEQPPLGGAASPEVLAPVSKEAADLAPTGPSPRPGPGLLLDVCTKDLADAPAEELQEKGSPAGPPPSQGQPAARPPKEVPASRLAQQLREEGWNLQTSESLTLAEVYLMMGKPSKLQLEYDWLGPGRQDPRPGSLPTALHKQRLLSCLLKLISTEVNPKLALEANTISTASVRPAQEEQSMTPPGKVVTVSSRSPRCPRNQASLRSSKTFPPSSAPCSSGLRNPPRPLLVPGPSSTGSNDSDGGLFAVPTTLPPNSRHGKLFSPSKEAELTFRQHLNSISRTLLPRPSENQSHNVCSFSILSNSSVTGRGSFRPIQSSLTKAALSRPIVPKVLPPQATSHLASAIDLAATSAGILSGNPLPALDTEGLSGISPLSSDEVTGAISGQDSTGTHQDGDTLPTVGGSDPFVSIPSRPEQEPVADSFQGSSVLSLSELPKAPLQNGLSIPLSSSESSSTRLSPPDVSALLDISLPGPPEDALSQGEPATHISDSIIEIAISSGQYGEGVPLSPAKLNGSDSSKSLPSPSSSPQPHWIASPTHDPQWYPSDSTDSSLSSLFASFISPEKSRKMLPTPIGTNSGTSLLGPSLLDGNSRDSFVSRSLADVAEVVDSQLVCMMNENSIDYISRFNDLAQELSIAEPGRREALFDGGGGGPAVSDLSQ

SEQ ID NO: 881990 - protein, 705 aa, Homo sapiens
APDRPPPRHQDTGPCLEKTPAEGRDSPTREPGALPCACGQLPDLEDELSLLDPLPRYLKSCQDLIVPEQCRCADTRPGSEQPPLGGAASPEVLAPVSKEAADLAPTGPSPRPGPGLLLDVCTKDLADAPAEELQEKGSPAGPPPSQGQPAARPPKEVPASRLAQQLREEGWNLQTSESLTLAEVYLMMGKPSKLQLEYDWLGPGRQDPRPGSLPTALHKQRLLSCLLKLISTEVNPKLALEANTISTASVRPAQEEQSMTPPGKVVTVSSRSPRCPRNQASLRSSKTFPPSSAPCSSGLRNPPRPLLVPGPSSTGSNDSDGGLFAVPTTLPPNSRHGKLFSPSKEAELTFRQHLNSISMQSDFFLPKPRKLRNRHLRKPLVVQRTLLPRPSENQSHNVCSFSILSNSSVTGAIDLAATSAGILSGNPLPALDTEGLSGISPLSSDEVTGAISGQDSTGTHQDGDTLPTVGGSSVLSLSELPKAPLQNGLSIPLSSSESSSTRLSPPDVSALLDISLPGPPEDALSQGEPATHISDSIIEIAISSGQYGEGVPLSPAKLNGSDSSKSLPSPSSSPQPHWIASPTHDPQWYPSDSTDSSLSSLFASFISPEKSRKMLPTPIGTNSGTSLLGPSLLDGNSRDSFVSRSLADVAEVVDSQLVCMMNENSIDYISRFNDLAQELSIAEPGRREALFDGGGGGPAVSDLSQ

SEQ ID NO: 881991 - protein, 367 aa, Homo sapiens
MAGGLDMSAFALALAGRGSFRPIQSSLTKAALSRPIVPKVLPPQATSHLASAIDLAATSAGILSGNPLPALDTEGLSGISPLSSDEVTGAISGQDSTGTHQDGDTLPTVGGSDPFVSIPSRPEQEPVADSFQGSSVLSLSELPKAPLQNGLSIPLSSSESSSTRLSPPDVSALLDISLPGPPEDALSQGEPATHISDSIIEIAISSGQYGEGVPLSPAKLNGSDSSKSLPSPSSSPQPHWIASPTHDPQWYPSDSTDSSLSSLFASFISPEKSRKMLPTPIGTNSGTSLLGPSLLDGNSRDSFVSRSLADVAEVVDSQLVCMMNENSIDYISRFNDLAQELSIAEPGRREALFDGGGGGPAVSDLSQ

SEQ ID NO: 881992 - protein, 792 aa, Homo sapiens; identical to SEQ ID NO: 881987

SEQ ID NO: 881993 - protein, 792 aa, Homo sapiens; identical to SEQ ID NO: 881987

SEQ ID NO: 881994 - protein, 792 aa, Homo sapiens; identical to SEQ ID NO: 881987

SEQ ID NO: 881995 - protein, 419 aa, Homo sapiens
APDRPPPRHQDTGPCLEKTPAEGRDSPTREPGALPCACGQLPDLEDELSLLDPLPRYLKSCQDLIVPEQCRCADTRPGSEQPPLGGAASPEVLAPVSKEAADLAPTGPSPRPGPGLLLDVCTKDLADAPAEELQEKGSPAGPPPSQGQPAARPPKEVPASRLAQQLREEGWNLQTSESLTLAEVYLMMGKPSKLQLEYDWLGPGRQDPRPGSLPTALHKQRLLSCLLKLISTEVNPKLALEANTISTASVRPAQEEQSMTPPGKVVTVSSRSPRCPRNQASLRSSKTFPPSSAPCSSGLRNPPRPLLVPGPSSTGSNDSDGGLFAVPTTLPPNSRHGKLFSPSKEAELTFRQHLNSISVSVWGRAARVRASPWSGECTFRCRTLLPYRCSRISSCQSPGSCGTGTCGSHWWSRSGSSQV

SEQ ID NO: 881996 - protein, 401 aa, Homo sapiens
MVVFLDGGQLGTLVGKRVSNLSEAVGSPLPEPPEKMVPRGCLSPRAVPPATRERGGGGPEEEPVDGLAGSAAGPGAEPQVAGAAMLGPGPPAPSVDSLSGQGQPSSSDTESDFYEEIEVSCTPDCATGNAEYQHSKGSGSEALVGSPNGGSETPKSNGGSGGGGSQGTLACSASDQMRRYRTAFTREQIARLEKEFYRENYVSRPRRCELAAALNLPETTIKVWFQNRRMKDKRQRLAMTWPHPADPAFYTYMMSHAAAAGGLPYPFPSHLPLPYYSPVGLGAASAASAAASPFSGSLRPLDTFRVLSQPYPRPELLCAFRHPPLYPGPAHGLGASAGGPCSCLACHSGPANGLAPRAAAASDFTCASTSRSDSFLTFAPSVLSKASSVALDQREEVPLTR

SEQ ID NO: 881997 - protein, 283 aa, Homo sapiens
MAFVCLCLYTPVLWTRCAGSGSEALVGSPNGGSETPKSNGGSGGGGSQGTLACSASDQMRRYRTAFTREQIARLEKEFYRENYVSRPRRCELAAALNLPETTIKVWFQNRRMKDKRQRLAMTWPHPADPAFYTYMMSHAAAAGGLPYPFPSHLPLPYYSPVGLGAASAASAAASPFSGSLRPLDTFRVLSQPYPRPELLCAFRHPPLYPGPAHGLGASAGGPCSCLACHSGPANGLAPRAAAASDFTCASTSRSDSFLTFAPSVLSKASSVALDQREEVPLTR

SEQ ID NO: 881998 - protein, 350 aa, Homo sapiens
MSNITDPQMWDFDDLNFTGMPPADEDYSPCMLETETLNKYVVIIAYALVFLLSLLGNSLVMLVILYSRVGRSVTDVYLLNLALADLLFALTLPIWAASKVNGWIFGTFLCKVVSLLKEVNFYSGILLLACISVDRYLAIVHATRTLTQKRHLVKFVCLGCWGLSMNLSLPFFLFRQAYHPNNSSPVCYEVLGNDTAKWRMVLRILPHTFGFIVPLFVMLFCYGFTLRTLFKAHMGQKHRAMRVIFAVVLIFLLCWLPYNLVLLADTLMRTQVIQESCERRNNIGRALDATEILGFLHSCLNPIIYAFIGQNFRHGFLKILAMHGLVSKEFLARHRVTSYTSSSVNVSSNL

SEQ ID NO: 881999 - protein, 390 aa, Homo sapiens
NHKHQSRGAGSTPPSSQSTSPAMVLEVSDHQVLNDAEVAALLENFSSSYDYGENESDSCCTSPPCPQDFSLNFDRAFLPALYSLLFLLGLLGNGAVAAVLLSRRTALSSTDTFLLHLAVADTLLVLTLPLWAVDAAVQWVFGSGLCKVAGALFNINFYAGALLLACISFDRYLNIVHATQLYRRGPPARVTLTCLAVWGLCLLFALPDFIFLSAHHDERLNATHCQYNFPQVGRTALRVLQLVAGFLLPLLVMAYCYAHILAVLLVSRGQRRLRAMRLVVVVVVAFALCWTPYHLVVLVDILMDLGALARNCGRESRVDVAKSVTSGLGYMHCCLNPLLYAFVGVKFRERMWMLLLRLGCPNQRGLQRQPSSSRRDSSWSETSEASYSGL

SEQ ID NO: 882000 - protein, 153 aa, Homo sapiens
MASPDPPATSYAPSDVPSGVALFLTIPFAFFLPELIFGFLVWTMVAATHIVYPLLQGWVMYVSLTSFLISLMFLLSYLFGFYKRFESWRVLDSLYHGTTGILYMSAAVLQVHATIVSEKLLDPRIYYINSAASFFAFIATLLYILHAFSIYYH

SEQ ID NO: 882001 - protein, 153 aa, Homo sapiens; identical to SEQ ID NO: 882000

SEQ ID NO: 882002 - protein, 248 aa, Homo sapiens
MSGAGLAAVVSCLRPQPGEEPQTHETFCQKVGLLCTLQGKLQPQDWTLLDELLQGLQTLLLMILWQASRGLFLHYHVEALTLRRISSFRQYKYDLVAAGKALEGMFCKLNHLLEHPHQLFFLYLLPTLSRFVSIGLYMPATSFLLLVLGFKALQLWMQLHEAGVGLEELRGVPDPSVPPPPAQDGKHTGPRQGLDGSEAGSPDLPNTAAGLHRPHQLLTGLPAGRHYGAAAVLAEPLGPGPSVLPCWC

SEQ ID NO: 882003 - protein, 153 aa, Homo sapiens; identical to SEQ ID NO: 882000

SEQ ID NO: 882004 - protein, 143 aa, Homo sapiens [sequence omitted]

SEQ ID NO: 882005 - protein, 110 aa, Homo sapiens [sequence omitted]

SEQ ID NO: 882006 - protein, 153 aa, Homo sapiens; identical to SEQ ID NO: 882000

SEQ ID NO: 882007 - protein, 153 aa, Homo sapiens; identical to SEQ ID NO: 882000

SEQ ID NO: 882008 - protein, 112 aa, Homo sapiens
QEVIFDKAARGRAAAEHPAGADSMASPDPPATSYAPSDVPSGVALFLTIPFAFFLPELIFGFLVWTMVAATHIVYPSHSLKHPVALRGLAEWWCPRGWARAHQDLNGQSCAH

SEQ ID NO: 882009 - protein, 119 aa, Homo sapiens
MVAATHIVYPLLQGWVMYVSLTSFLISLMFLLSYLFGFYKRFESWRVLDSLYHGTTGILYMSAAVLQVHATIVSEKLLDPRIYYINSAASFFAFIATLLYILLPQPHWKKRLPQHLSEE

SEQ ID NO: 882010 - protein, 507 aa, Homo sapiens
RVLQEQPVGTAAVVGGGRGSVAAPPCPAMGLLSDPVRRRALARLVLRLNAPLCVLSYVAGIAWFLALVFPPLTQRTYMSENAMGSTMVEEQFAGGDRARAFARDFAAHRKKSGALPVAWLERTMRSVGLEVYTQSFSRKLPFPDETHERYMVSGTNVYGILRAPRAASTESLVLTVPCGSDSTNSQAVGLLLALAAHFRGQIYWAKDIVFLVTEHDLLGTEAWLEAYHDVNVTGMQSSPLQGRAGAIQAAVALELSSDVVTSLDVAVEGLNGQLPNLDLLNLFQTFCQKVGLLCTLQGKLQPQDWTLLDELLQGLQTLLLMILWQASRGLFLHYHVEALTLRRISSFRQYKYDLVAAGKALEGMFCKLNHLLEHPHQLFFLYLLPTLSRFVSIGLYMPATSFLLLVLGFKALQLWMQLHEAGVGLEELRGVPDPSVPPPPAQDGKHTGPRQGLDGSEAGSPDLPNTAAGLHRPHQLLTGLPAGRHYGAAAVLAEPLGPGPSVLPCWC

SEQ ID NO: 882011 - protein, 507 aa, Homo sapiens; identical to SEQ ID NO: 882010

SEQ ID NO: 882012 - protein, 385 aa, Homo sapiens
GGSSHPMSSAPEKQQPPHGGGGGGGGGGGAAMDPASSGPSKAKKTNAGIRRPEKPPYSYIALIVMAIQSSPTKRLTLSEIYQFLQSRFPFFRGSYQGWKNSVRHNLSLNECFIKLPKGLGRPGKGHYWTIDPASEFMFEEGSFRRRPRGFRRKCQALKPMYSMMNGLGFNHLPDTYGFQGSAGGLSCPPNSLALEGGLGMMNGHLPGNVDGMALPSHSVPHLPSNGGHSYMGGCGGAAAGEYPHHDSSVPASPLLPTGAGGVMEPHAVYSGSAAAWPPSASAALNSGASYIKQQPLSPCNPAANPLSGSLSTHSLEQPYLHQNSHNAPAELQGIPRYHSQSPSMCDRKEFVFSFNAMASSSMHSAGGGSYYHQQVTYQDIKPCVM

SEQ ID NO: 882013 - protein, 418 aa, Homo sapiens
DRDKSDFLFPVHLRRSLEVPGSTGGHPVMGDTFIRHIALLGFEKRFVPSQHYVYMFLVKWQDLSEKVVYRRFTEIYEFHKTLKEMFPIEAGAINPENRIIPHLPAPKWFDGQRAAENRQGTLTEYCSTLMSLPTKISRCPHLLDFFKVRPDDLKLPTDNQTKKPETYLMPKDGKSTATDITGPIILQTYRAIANYEKTSGSEMALSTGDVVEVVEKSESGWWFCQMKAKRGWIPASFLEPLDSPDETEDPEPNYAGEPYVAIKAYTAVEGDEVSLLEGEAVEVIHKLLDGWWVIRKDDVTGYFPSMYLQKSGQDVSQAQRQIKRGAPPRRSSIRNAHSIHQRSRKRLSQDAYRRNSVRFLQQRRRQARPGPQSPGSPLEEERQTQRSKPQPAVPPRPSADLILNRCSESTKRKLASAV

SEQ ID NO: 882014 - protein, 418 aa, Homo sapiens; identical to SEQ ID NO: 882013

SEQ ID NO: 882015 - protein, 401 aa, Homo sapiens
SCEPFRERHPVMGDTFIRHIALLGFEKRFVPSQHYVYMFLVKWQDLSEKVVYRRFTEIYEFHKTLKEMFPIEAGAINPENRIIPHLPAPKWFDGQRAAENRQGTLTEYCSTLMSLPTKISRCPHLLDFFKVRPDDLKLPTDNQTKKPETYLMPKDGKSTATDITGPIILQTYRAIANYEKTSGSEMALSTGDVVEVVEKSESGWWFCQMKAKRGWIPASFLEPLDSPDETEDPEPNYAGEPYVAIKAYTAVEGDEVSLLEGEAVEVIHKLLDGWWVIRKDDVTGYFPSMYLQKSGQDVSQAQRQIKRGAPPRRSSIRNAHSIHQRSRKRLSQDAYRRNSVRFLQQRRRQARPGPQSPGSPLEEERQTQRSKPQPAVPPRPSADLILNRCSESTKRKLASAV

SEQ ID NO: 882016 - protein, 418 aa, Homo sapiens; identical to SEQ ID NO: 882013

SEQ ID NO: 882017 - protein, 418 aa, Homo sapiens; identical to SEQ ID NO: 882013

SEQ ID NO: 882018 - protein, 573 aa, Homo sapiens
DRDKSDFLFPVHLRRSLEVPGSTGGHPVMGDTFIRHIALLGFEKRFVPSQHYVYMFLVKWQDLSEKVVYRRFTEIYEFHKTLKEMFPIEAGAINPENRIIPHLPAPKWFDGQRAAENRQGTLTEYCSTLMSLPTKISRCPHLLDFFKVRPDDLKLPTDNQTKKPETYLMPKDGKSTATDITGPIILQTYRAIANYEKTSGSEMALSTGDVVEVVEKSESGQTSHLTGLLPLVLRNPQPQAPCQGSGSLAPGRTPALLGALNVLPTLWVAFCLSVHPVVAVGICAWQAGAGHVCVFCLDGVWDRLFIMKWAQSCDSVSMCACMHVTSLSSVVKVTFPNLSIGHQCVCVPVSSPSLMAAEEPLGPAPQSHSRTSGTGWWFCQMKAKRGWIPASFLEPLDSPDETEDPEPNYAGEPYVAIKAYTAVEGDEVSLLEGEAVEVIHKLLDGWWVIRKDDVTGYFPSMYLQKSGQDVSQAQRQIKRGAPPRRSSIRNAHSIHQRSRKRLSQDAYRRNSVRFLQQRRRQARPGPQSPGSPLEEERQTQRSKPQPAVPPRPSADLILNRCSESTKRKLASAV

SEQ ID NO: 882019 - protein, 412 aa, Homo sapiens
SISRISGSRCATVLEKMLPVTSFTFIRAHRSIAAHLLIKPLLGLSGLVQSHAGRCGRAPGAVGVPRQHTVLAGAVLPTEGQRGLDHARVRASIDKPVALLGRQQQGLDWLKVLEVLGLLDDVNKLGSRPGARCPHLLDFFKVRPDDLKLPTDNQTKKPETYLMPKDGKSTATDITGPIILQTYRAIANYEKTSGSEMALSTGDVVEVVEKSESGWWFCQMKAKRGWIPASFLEPLDSPDETEDPEPNYAGEPYVAIKAYTAVEGDEVSLLEGEAVEVIHKLLDGWWVIRKDDVTGYFPSMYLQKSGQDVSQAQRQIKRGAPPRRSSIRNAHSIHQRSRKRLSQDAYRRNSVRFLQQRRRQARPGPQSPGSPLEEERQTQRSKPQPAVPPRPSADLILNRCSESTKRKLASAV

SEQ ID NO: 882020 - protein, 374 aa, Homo sapiens
DRDKSDFLFPVHLRRSLEVPGSTGGHPVMGDTFIRHIALLGFEKRFVPSQHYVYMFLVKWQDLSEKVVYRRFTEIYEFHKTLKEMFPIEAGAINPENRIIPHLPAPKWFDGQRAAENRQGTLTEYCSTLMSLPTKISRCPHLLDFFKVRPDDLKLPTDNQTKKPETYLMPKDGKSTATDITGPIILQTYRAIANYEKTSGSEMALSTGDVVEVVEKSESGWWFCQMKAKRGWIPASFLEPLDSPDETEDPEPNYAGEPYVAIKAYTAVEGDEVSLLEGEAVEERRRHRLLPVHVPAKVRARRVPGPTPDQAGGAAPQVVHPQRAQHPPAVAEAPQPGRLSPQQRPFSAAATPPGAAGTAEPREPARGGAADAAL

SEQ ID NO: 882021 - protein, 670 aa, Homo sapiens
DRDKSDFLFPVHLRRSLEVPGSTGGHPVMGDTFIRHIALLGFEKRFVPSQHYVYMFLVKWQDLSEKVVYRRFTEIYEFHKTLKEMFPIEAGAINPENRIIPHLPAPKWFDGQRAAENRQGTLTEYCSTLMSLPTKISRCPHLLDFFKVRPDDLKLPTDNQTKKPETYLMPKDGKSTATDITGPIILQTYRAIANYEKTSGSEMALSTGDVVEVVEKSESGQTSHLTGLLPLVLRNPQPQAPCQGSGSLAPGRTPALLGALNVLPTLWVAFCLSVHPVVAVGICAWQAGAGHVCVFCLDGVWDRLFIMKWAQSCDSVSMCACMHVTSLSSVVKVTFPNLSIGHQCVCVPVSSPSLMAAEEPLGPAPQSHSRTSGTGWWFCQMKAKRGWIPASFLEPLDSPDETEDPEPNYAGEPYVAIKAYTAVEGDEVSLLEGEAVEVIHKLLDGWWVIRKDDVTGYFPSMYLQKSGQDVSQAQRQIKRGAPPRRYSRGVPGAGRGRAGRTTGSLCLGHSLAVPGRGLSAWQERQDPHGGKGLDAPGRGVGLARGRKESGDAPHFLDQGCPSESLGAGAPSGFDDAPSRWARSSIRNAHSIHQRSRKRLSQDAYRRNSVRFLQQRRRQARPGPQSPGSPLEEERQTQRSKPQPAVPPRPSADLILNRCSESTKRKLASAV

SEQ ID NO: 882022 - protein, 502 aa, Homo sapiens
DRDKSDFLFPVHLRRSLEVPGSTGGHPVMGDTFIRHIALLGFEKRFVPSQHYVYMFLVKWQDLSEKVVYRRFTEIYEFHKTLKEMFPIEAGAINPENRIIPHLPAPKWFDGQRAAENRQGTLTEYCSTLMSLPTKISRCPHLLDFFKVRPDDLKLPTDNQTKKPETYLMPKDGKSTATDITGPIILQTYRAIANYEKTSGSEMALSTGDVVEVVEKSESGWWFCQMKAKRGWIPASFLEPLDSPDETEDPEPNYAGEPYVAIKAYTAVEGDEVSLLEGEAVEERRRHRLLPVHVPAKVRARRVPGPTPDQAGGAAPQVQPGVPGAGRGRAGRTTGSLCLGHSLAVPGRGLSAWQERQDPHGGKGLDAPGRGVGLARGRKESGDAPHFLDQGCPSESLGAGAPSGFDDAPSRWARSSIRNAHSIHQRSRKRLSQDAYRRNSVRFLQQRRRQARPGPQSPGSPLEEERQTQRSKPQPAVPPRPSADLILNRCSESTKRKLASAV

SEQ ID NO: 882023 - protein, 435 aa, Homo sapiens
DRDKSDFLFPVHLRRSLEVPGSTGGHPVMGDTFIRHIALLGFEKRFVPSQHYVYMFLVKWQDLSEKVVYRRFTEIYEFHKTLKEMFPIEAGAINPENRIIPHLPAPKWFDGQRAAENRQGTLTEYCSTLMSLPTKISRCPHLLDFFKVRPDDLKLPTDNQTKKPETYLMPKDGKSTATDITGPIILQTYRAIANYEKTSGSEMALSTGDVVEVVEKSESGQTSHLTGLLPLVLRNPQPQAPCQGSGSLAPGRTPALLGALNVLPTLWVAFCLSVHPVVAVGICAWQAGAGHVCVFCLDGVWDRLFIMKWAQSCDSVSMCACMHVTSLSSVVKVTFPNLSIGHQCVCVPVSSPSLMAAEEPLGPAPQSHSRTSGTGWWFCQMKAKRGWIPASFLEPLDSPDETEDPEPNYAATPPGAAGTAEPREPARGGAADAAL

SEQ ID NO: 882024 - protein, 377 aa, Homo sapiens
DRDKSDFLFPVHLRRSLEVPGSTGGHPVMGDTFIRHIALLGFEKRFVPSQHYVYMFLVKWQDLSEKVVYRRFTEIYEFHKTLKEMFPIEAGAINPENRIIPHLPAPKWFDGQRAAENRQGTLTEYCSTLMSLPTKISRCPHLLDFFKVRPDDLKLPTDNQTKKPETYLMPKDGKSTATDITGPIILQTYRAIANYEKTSGSEMALSTGDVVEVVEKSESGWWFCQMKAKRGWIPASFLEPLDSPDETEDPEPNYAGEPYVAIKAYTAVEGDEVSLLEGEAVEVIHKLLDGWWVIRKDDVTGYFPSMYLQKSGQDVSQAQRQIKRGAPPRRYSRGVPGEEERQTQRSKPQPAVPPRPSADLILNRCSESTKRKLASAV

SEQ ID NO: 882025 - protein, 348 aa, Homo sapiens
DRDKSDFLFPVHLRRSLEVPGSTGGHPVMGDTFIRHIALLGFEKRFVPSQHYVYMFLVKWQDLSEKVVYRRFTEIYEFHKTLKEMFPIEAGAINPENRIIPHLPAPKWFDGQRAAENRQGTLTEYCSTLMSLPTKISRCPHLLDFFKVRPDDLKLPTDNQTKKPETYLMPKDGKSTATDITGPIILQTYRAIANYEKTSGSEMALSTGDVVEVVEKSESGQTSHLTGLLPLVLRNPQPQAPCQGSGSLAPGRTPALLGALNVLPTLWVAFCLSVHPVVAVGICAWQAGAGHVCVFCLDGVWDRLFIMKWAQSCDSVSMCACMHVTSLSSVVKVTFPNLSRGRGVPARG

SEQ ID NO: 882026 - protein, 280 aa, Homo sapiens
DRDKSDFLFPVHLRRSLEVPGSTGGHPVMGDTFIRHIALLGFEKRFVPSQHYVYMFLVKWQDLSEKVVYRRFTEIYEFHKTLKEMFPIEAGAINPENRIIPHLPAPKWFDGQRAAENRQGTLTEYCSTLMSLPTKISRCPHLLDFFKVRPDDLKLPTDNQTKKPETYLMPKDGKSTATDITGPIILQTYRAIANYEKTSGSEMALSTGDVVEVVEKSESGWWFCQMKAKRGWIPASFLEPLDSPDETEDPEPNYAATPPGAAGTAEPREPARGGAADAAL

SEQ ID NO: 882027 - protein, 210 aa, Homo sapiens
MYLQKSGQDVSQAQRQIKRGAPPRRYSRGVPGAGRGRAGRTTGSLCLGHSLAVPGRGLSAWQERQDPHGGKGLDAPGRGVGLARGRKESGDAPHFLDQGCPSESLGAGAPSGFDDAPSRWARSSIRNAHSIHQRSRKRLSQDAYRRNSVRFLQQRRRQARPGPQSPGSPLEEERQTQRSKPQPAVPPRPSADLILNRCSESTKRKLASAV

SEQ ID NO: 882028 - protein, 225 aa, Homo sapiens
DRDKSDFLFPVHLRRSLEVPGSTGGHPVMGDTFIRHIALLGFEKRFVPSQHYVYMFLVKWQDLSEKVVYRRFTEIYEFHKTLKEMFPIEAGAINPENRIIPHLPAPKWFDGQRAAENRQGTLTEYCSTLMSLPTKISRCPHLLDFFKVRPDDLKLPTDNQTKKPETYLMPKDGKSTATDITGPIILQTYRAIANYEKTSGSEMALSTGDVVEVVEKSESGQTSQG

SEQ ID NO: 882029 - protein, 566 aa, Homo sapiens
MISKHLPENFQGLSGYPHPPRGPRLGARFPSQIQEPTSAARQHHCVGLVLVQLAPHLRFTPGQMSGGRRGHMQMAEEDAGSGGRRRPRGGHSSMGQSGRSRHQKRARAQAQLRNLEAYAANPHSFVFTRGCTGRNIRQLSLDVRRVMEPLTASRLQVRKKNSLKDCVAVAGPLGVTHFLILSKTETNVYFKLMRLPGGPTLTFQVKKYSLVRDVVSSLRRHRMHEQQFAHPPLLVLNSFGPHGMHVKLMATMFQNLFPSINVHKVNLNTIKRCLLIDYNPDSQELDFRHYSIKVVPVGASRGMKKLLQEKFPNMSRLQDISELLATGAGLSESEAEPDGDHNITELPQAVAGRGNMRAQQSAVRLTEIGPRMTLQLIKVQEGVGEGKVMFHSFVSKTEEELQAILEAKEKKLRLKAQRQAQQAQNVQRKQEQREAHRKKSLEGMKKARVGGSDEEASGIPSRTASLELGEDDDEQEDDDIEYFCQAVGEAPSEDLFPEAKQKRLAKSPGRKRKRWEMDRGRGRLCDQKFPKTKDKSQGAQARRGPRGASRDGGRGRGRGRPGKRVA

SEQ ID NO: 882030 - protein, 550 aa, Homo sapiens
GTLWGESGFLAATPWPSVSTWKQKDGAGLQRSRVLSGGHGEKRLWAAAGAKVRAEWGLDPHGALDGTDLKWSRQALLGLDFGEEASSGARCGGGVGWPLSVLPVDLELQDCLARLSWSIGAQCITLALSLNPVHIKEWSPVPLQGGERTRVQGSTPWQTWALGVAGAALWGNRAQLVTPSAHRCQVLPCQLLGSCRRQTQWVPGDFLWPILVVEFLVAVASNGLALYRFSIRKQRPWHPAVVFSVQLAVSDLLCALTLPPLAAYLYPPKHWRYGEAACRLERFLFTCNLLGSVIFITCISLNRYLGIVHPFFARSHLRPKHAWAVSAAGWVLAALLAMPTLSFSHLKRPQQGAGNCSVARPEACIKCLGTADHGLAAYRAYSLVLAGLGCGLPLLLTLAAYGALGRAVLRSPGMTVAEKLRVAALVASGVALYASSYVPYHIMRVLNVDARRRWSTRCPSFADIAQATAALELGPYVGYQVMRGLMPLAFCVHPLLYMAAVPSLGCCCRHCPGYRDSWNPEDAKSTGQALPLNATAAPKPSEPQSRELSQ

SEQ ID NO: 882031 - protein, 887 aa, Homo sapiens
MISKHLPENFQGLSGYPHPPRGPRLGARFPSQIQEPTSAARQHHCVGLVLVQLAPHLRFTPGQMSGGRRGHMQMAEEDAGSGGRRRPRGGHSSMGQSGRSRHQKRARAQAQLRNLEAYAANPHSFVFTRGCTGRNIRQLSLDVRRVMEPLTASRLQVRKKNSLKDCVAVAGPLGVTHFLILSKTETNVYFKLMRLPGGPTLTFQVKKYSLVRDVVSSLRRHRMHEQQFAHPPLLVLNSFGPHGMHVKLMATMFQNLFPSINVHKVNLNTIKRCLLIDYNPDSQELDFRHYSIKVVPVGASRGMKKLLQEKFPNMSRLQDISELLATGAGLSESEAEPDGDHNITELPQAVAGRGNMRAQQSAVRLTEIGPRMTLQLIKVQEGVGEGKVMFHSFVSKTEEELQAILEAKEKKLRLKAQRQAQQAQNVQRKQEQREAHRKKSLEGMKKARVGGSDEEASGIPSRTASLELGEDDDEQEDDDIEYFCQAVGEAPSEDLFPEAKQKRLAKSPGRKRKRWEMDRGAKSCPANFLAAADDKLSGFQGDFLWPILVVEFLVAVASNGLALYRFSIRKQRPWHPAVVFSVQLAVSDLLCALTLPPLAAYLYPPKHWRYGEAACRLERFLFTCNLLGSVIFITCISLNRYLGIVHPFFARSHLRPKHAWAVSAAGWVLAALLAMPTLSFSHLKRPQQGAGNCSVARPEACIKCLGTADHGLAAYRAYSLVLAGLGCGLPLLLTLAAYGALGRAVLRSPGMTVAEKLRVAALVASGVALYASSYVPYHIMRVLNVDARRRWSTRCPSFADIAQATAALELGPYVGYQVMRGLMPLAFCVHPLLYMAAVPSLGCCCRHCPGYRDSWNPEDAKSTGQALPLNATAAPKPSEPQSRELSQ

SEQ ID NO: 882032 - protein, 566 aa, Homo sapiens; identical to SEQ ID NO: 882029

SEQ ID NO: 882033 - protein, 103 aa, Homo sapiens
MKRPLGSLQGRRAWSWVRTMMNRKMMTSSISARRWARRPVRTCSPRPSRNGLPSLQGGSGSGGKWIEAGVAFVTRSFPRPRTSPREPRPGGGRGRGRPGKRVA

SEQ ID NO: 882034 - protein, 541 aa, Homo sapiens
MISKHLPENFQGLSGYPHPPRGPRLGARFPSQIQEPTSAARQHHCVGLVLVQLAPHLRFTPGQMSGGRRGHMQMAEEDAGSGGRRRPRGGHSSMGQSGRSRHQKRARAQAQLRNLEAYAANPHSFVFTRGCTGRNIRQLSLDVRRVMEPLTASRLQVRKKNSLKDCVAVAGPLGVTHFLILSKTETNVYFKLMRLPGGPTLTFQVKKYSLVRDVVSSLRRHRMHEQQFAHPPLLVLNSFGPHGMHVKLMATMFQNLFPSINVHKVNLNTIKRCLLIDYNPDSQELDFRHYSIKVVPVGASRGMKKLLQEKFPNMSRLQDISELLATGAGLSESEAEPDGDHNITELPQAVAGRGNMRAQQSAVRLTEIGPRMTLQLIKVQEGVGEGKVMFHSFVSKTEEELQAILEAKEKKLRLKAQRQAQQAQNVQRKQEQREAHRKKSLEGMKKARVGGSDEEASGIPSRTASLELDLFPEAKQKRLAKSPGRKRKRWEMDRGRGRLCDQKFPKTKDKSQGAQARRGPRGASRDGGRGRGRGRPGKRVA

SEQ ID NO: 882035 - protein, 541 aa, Homo sapiens; identical to SEQ ID NO: 882034

SEQ ID NO: 882036 - protein, 541 aa, Homo sapiens
MISKHLPENFQGLSGYPHPPRGPRLGARFPSQIQEPTSAARQHHCVGLVLVQLAPHLRFTPGQMSGGRRGHMQMAEEDAGSGGRRRPRGGHSSMGQSGRSRHQKRARAQAQLRNLEAYAANPHSFVFTRGCTGRNIRQLSLDVRRVMEPLTASRLQVRKKNSLKDCVAVAGPLGVTHFLILSKTETNVYFKLMRLPGGPTLTFQVKKYSLVRDVVSSLRRHRMHEQQFAHPPLLVLNSFGPHGMHVKLMATMFQNLFPSINVHKVNLNTIKRCLLIDYNPDSQELDFRHYSIKVVPVGASRGMKKLLQEKFPNMSRLQDISELLATGAGLSESEAEPDGDHNITELPQAVAGRGNMRAQQSAVRLTEIGPRMTLQLIKVQEGVGEGKVMFHSFVSKTEEELQAILEAKEKKLRLKAQRQAQQAQNVQRKQEQREAHRKKSLEGMKKARVGGSDEEASGIPSRTASLELGEDDDEQEDDDIEYFCQAVGEAPSEDLFPEAKQKRLAKSHRSSGWIERPRLGPEMWPSVSFHKGVVSPALPLQ

SEQ ID NO: 882037 - protein, 522 aa, Homo sapiens
MAKRTPEAADAGGLVEDTAAWDSQGGKGPAAWEAGGAGGVPAEVAALTLCLSSPQSRHQKRARAQAQLRNLEAYAANPHSFVFTRGCTGRNIRQLSLDVRRVMEPLTASRLQVRKKNSLKDCVAVAGPLGVTHFLILSKTETNVYFKLMRLPGGPTLTFQVKKYSLVRDVVSSLRRHRMHEQQFAHPPLLVLNSFGPHGMHVKLMATMFQNLFPSINVHKVNLNTIKRCLLIDYNPDSQELDFRHYSIKVVPVGASRGMKKLLQEKFPNMSRLQDISELLATGAGLSESEAEPDGDHNITELPQAVAGRGNMRAQQSAVRLTEIGPRMTLQLIKVQEGVGEGKVMFHSFVSKTEEELQAILEAKEKKLRLKAQRQAQQAQNVQRKQEQREAHRKKSLEGMKKARVGGSDEEASGIPSRTASLELGEDDDEQEDDDIEYFCQAVGEAPSEDLFPEAKQKRLAKSPGRKRKRWEMDRGRGRLCDQKFPKTKDKSQGAQARRGPRGASRDGGRGRGRGRPGKRVA

SEQ ID NO: 882038 - protein, 591 aa, Homo sapiens
MISKHLPENFQGLSGYPHPPRGPRLGARFPSQIQEPTSAARQHHCVGLVLVQLAPHLRFTPGQMSGGRRGHMQMAEEDAGSGGRRRPRGGHSSMGQSGRSRHQKRARAQAQLRNLEAYAANPHSFVFTRGCTGRNIRQLSLDVRRVMEPLTASRLQVRKKNSLKDCVAVAGPLGVTHFLILSKTETNVYFKLMRLPGGPTLTFQVKKYSLVRDVVSSLRRHRMHEQQFAHPPLLVLNSFGPHGMHVKLMATMFQNLFPSINVHKVNLNTIKRCLLIDYNPDSQELDFRHYSIKVVPVGASRGMKKLLQEKFPNMSRLQDISELLATGAGLSESEAEPDGDHNITELPQAVAGRGNMRAQQSAVRLTEVRPRAGGPPGSTSPNGGLTLLPRPQIGPRMTLQLIKVQEGVGEGKVMFHSFVSKTEEELQAILEAKEKKLRLKAQRQAQQAQNVQRKQEQREAHRKKSLEGMKKARVGGSDEEASGIPSRTASLELGEDDDEQEDDDIEYFCQAVGEAPSEDLFPEAKQKRLAKSPGRKRKRWEMDRGRGRLCDQKFPKTKDKSQGAQARRGPRGASRDGGRGRGRGRPGKRVA

SEQ ID NO: 882039 - protein, 253 aa, Homo sapiens
MSRLQDISELLATGAGLSESEAEPDGDHNITELPQAVAGRGNMRAQQSAVRLTEIGPRMTLQLIKVQEGVGEGKVMFHSFVSKTEEELQAILEAKEKKLRLKAQRQAQQAQNVQRKQEQREAHRKKSLEGMKKARVGGSDEEASGIPSRTASLELGEDDDEQEDDDIEYFCQAVGEAPSEDLFPEAKQKRLAKSPGRKRKRWEMDRGRGRLCDQKFPKTKDKSQGAQARRGPRGASRDGGRGRGRGRPGKRVA

SEQ ID NO: 882040 - protein, 228 aa, Homo sapiens
MSRLQDISELLATGAGLSESEAEPDGDHNITELPQAVAGRGNMRAQQSAVRLTEIGPRMTLQLIKVQEGVGEGKVMFHSFVSKTEEELQAILEAKEKKLRLKAQRQAQQAQNVQRKQEQREAHRKKSLEGMKKARVGGSDEEASGIPSRTASLELDLFPEAKQKRLAKSPGRKRKRWEMDRGRGRLCDQKFPKTKDKSQGAQARRGPRGASRDGGRGRGRGRPGKRVA

SEQ ID NO: 882041 - protein, 282 aa, Homo sapiens
  misc_feature (14)..(14): Xaa can be any naturally occurring amino acid
LGTPARWTLSRPPXTHFSGTDSLVEPAQQWYRELQLSTESKVTEFLHQSKLKSFESERVQLLQEETARNLTQCQLECEKYQKKLEVLTKEFYSLQASSEKRITELQAQNSEHQARLDIYEKLEKELDEIIMQTAEIENEDEAERVLFSYGYGANVPTTAKRRLKQSVHLARRVLQLEKQNSLILKDLEHRKDQVTQLSQELDRANSLLNQTQQPYRYLIESVRQRDSKIDSLTESIAQLEKDVSNLNKEKSALLQTKNQMALDLEQLLNHREVFFLFCHNCN

SEQ ID NO: 882042 - protein, 757 aa, Homo sapiens
MSRKISKESKKVNISSSLESEDISLETTVPTDDISSSEEREGKVRITRQLIERKELLHNIQLLKIELSQKTMMIDNLKVDYLTKIEELEEKLNDALHQKQLLTLRLDNQLAFQQKDASKYQELMKQEMETILLRQKQLEETNLQLREKAGDVRRNLRDFELTEEQYIKLKAFPEDQLSIPEYVSVRFYELVNPLRKEICELQVKKNILAEELSTNKNQLKQLTETYEEDRKNYSEVQIRCQRLALELADTKQLIQQGDYRQENYDKVKSERDALEQEVIELRRKHEILEASHMIQTKERSELSKEVVTLEQTVTLLQKDKEYLNRQNMELSVRCAHEEDRLERLQAQLEESKKAREEMYEKYVASRDHYKTEYENKLHDELEQIRLKTNQEIDQLRNASREMYERENRNLREARDNAVAEKERAVMAEKDALEKHDQLLDRYRELQLSTESKVTEFLHQSKLKSFESERVQLLQEETARNLTQCQLECEKYQKKLEVLTKEFYSLQASSEKRITELQAQNSEHQARLDIYEKLEKELDEIIMQTAEIENEDEAERVLFSYGYGANVPTTAKRRLKQSVHLARRVLQLEKQNSLILKDLEHRKDQVTQLSQELDRANSLLNQTQQPYRYLIESVRQRDSKIDSLTESIAQLEKDVSNLNKEKSALLQTKNQMALDLEQLLNHREELAAMKQILVKMHSKHSENSLLLTKTEPKHVTENQKSKTLNVPKEHEDNIFTPKPTLFTKKEAPEWSKKQKMKT

SEQ ID NO: 882043 - protein, 757 aa, Homo sapiens; identical to SEQ ID NO: 882042

SEQ ID NO: 882044 - protein, 757 aa, Homo sapiens; identical to SEQ ID NO: 882042

SEQ ID NO: 882045 - protein, 696 aa, Homo sapiens
MSRKISKESKKVNISSSLESEDISLETTVPTDDISSSEEREGKVRITRQLIERKELLHNIQLLKIELSQKTMMIDNLKVDYLTKIEELEEKLNDALHQKQLLTLRLDNQLAFQQKDASKYQELMKQEMETILLRQKQLEETNLQLREKAGDVRRNLRDFELTEEQYIKLKAFPEDQLSIPEYVSVRFYELVNPLRKEICELQVKKNILAEELSTNKNQLKQLTETYEEDRKNYSEVQIRCQRLALELADTKQLIQQGDYRQENYDKVKSERDALEQEVIELRRKHEILEASHMIQTKEEVNYQKRDHYKTEYENKLHDELEQIRLKTNQEIDQLRNASREMYERENRNLREARDNAVAEKERAVMAEKDALEKHDQLLDRYRELQLSTESKVTEFLHQSKLKSFESERVQLLQEETARNLTQCQLECEKYQKKLEVLTKEFYSLQASSEKRITELQAQNSEHQARLDIYEKLEKELDEIIMQTAEIENEDEAERVLFSYGYGANVPTTAKRRLKQSVHLARRVLQLEKQNSLILKDLEHRKDQVTQLSQELDRANSLLNQTQQPYRYLIESVRQRDSKIDSLTESIAQLEKDVSNLNKEKSALLQTKNQMALDLEQLLNHREELAAMKQILVKMHSKHSENSLLLTKTEPKHVTENQKSKTLNVPKEHEDNIFTPKPTLFTKKEAPEWSKKQKMKT

SEQ ID NO: 882046 - protein, 632 aa, Homo sapiens
MSRKISKESKKVNISSSLESEDISLETTVPTDDISSSEEREGKVRITRQLIERKELLHNIQLLKIELSQKTMMIDNLKVDYLTKIEELEEKLNDALHQKQLLTLRLDNQLAFQQKDASKYQELMKQEMETILLRQKQLEETNLQLREKAGDVRRNLRDFELTEEQYIKLKAFPEDQLSIPEYVSVRFYELVNPLRKEICELQVKKNILAEELSTNKNQLKQLTETYEEDRKNYSEVQIRCQRLALELADTKQLIQQGDYRQENYDKVKSERDALEQEVIELRRKHEILEASHMIQTKERSELSKEVVTLEQTVTLLQKDKEYLNRQNMELSVRCAHEEDRLERLQAQLEESKKAREEMYEKYVASRDHYKTEYENKLHDELEQIRLKTNQEIDQLRNASREMYERENRNLREARDNAVAEKERAVMAEKDALEKHDQLLDRYRELQLSTESKVTEFLHQSKLKSFESERVQLLQEETARNLTQCQLECEKYQKKLEVLTKEFYSLQASSEKRITELQAQNSEHQARLDIYEKLEKELDEIIMQTAEIENEDEAERVLFSYGYGANVPTTAKRRLKQSVHLARRVLQLEKQNSLILKDLEHRKDQVTQLSQELDRANSLLNQTQQPYRYLIEF

SEQ ID NO: 882047 - protein, 655 aa, Homo sapiens
MSRKISKESKKVNISSSLESEDISLETTVPTDDISSSEEREGKVRITRQLIERKELLHNIQLLKIELSQKTMMIDNLKVDYLTKIEELEEKLNDALHQKQLLTLRLDNQLAFQQKDASKYQELMKQEMETILLRQKQLEETNLQLREKAGDVRRNLRDFELTEEQYIKLKAFPEDQLSIPEYVSVRFYELVNPLRKEICELQVKKNILAEELSTNKNQLKQLTETYEEDRKNYSEVQIRCQRLALELADTKQLIQQGDYRQENYDKVKSERDALEQEVIELRRKHEILEASHMIQTKERSELSKEVVTLEQTVTLLQKDKEYLNRQNMELSVRCAHEEDRLERLQAQLEESKKAREEMYEKYVASRDHYKTEYENKLHDELEQIRLKTNQEIDQLRNASREMYERENRNLREARDNAVAEKERAVMAEKDALEKHDQLLDRYRELQLSTESKVTEFLHQSKLKSFESERVQLLQEETARNLTQCQLECEKYQKKLEVLTKEFYSLQASSEKRITELQAQNSEHQARLDIYEKLEKELDEIIMQTAEIENEDEAERVLFSYGYGANVPTTAKRRLKQSVHLARRVLQLEKQNSLILKDLEHRKDQVTQLSQELDRANSLLNQTQQPYRYLIESVRQRDSKIDSLTESIAQLEKDVR

SEQ ID NO: 882048 - protein, 634 aa, Homo sapiens
MKQEMETILLRQKQLEETNLQLREKAGDVRRNLRDFELTEEQYIKLKAFPEDQLSIPEYVSVRFYELVNPLRKEICELQVKKNILAEELSTNKNQLKQLTETYEEDRKNYSEVQIRCQRLALELADTKQLIQQGDYRQENYDKVKSERDALEQEVIELRRKHEILEASHMIQTKERSELSKEVVTLEQTVTLLQKDKEYLNRQNMELSVRCAHEEDRLERLQAQLEESKKAREEMYEKYVASRDHYKTEYENKLHDELEQIRLKTNQEIDQLRNASREMYERENRNLREARDNAVAEKERAVMAEKDALEKHDQLLDRYRELQLSTESKVTEFLHQSKLKSFESERVQLLQEETARNLTQCQLECEKYQKKLEVLTKEFYSLQASSEKRITELQAQNSEHQARLDIYEKLEKELDEIIMQTAEIENEDEAERVLFSYGYGANVPTTAKRRLKQSVHLARRVLQLEKQNSLILKDLEHRKDQVTQLSQELDRANSLLNQTQQPYRYLIESVRQRDSKIDSLTESIAQLEKDVSNLNKEKSALLQTKNQMALDLEQLLNHREELAAMKQILVKMHSKHSENSLLLTKTEPKHVTENQKSKTLNVPKEHEDNIFTPKPTLFTKKEAPEWSKKQKMKT

SEQ ID NO: 882049 - protein, 559 aa, Homo sapiens
  misc_feature (540)..(540): Xaa can be any naturally occurring amino acid
MSRKISKESKKVNISSSLESEDISLETTVPTDDISSSEEREGKVRITRQLIERKELLHNIQLLKIELSQKTMMIDNLKVDYLTKIEELEEKLNDALHQKQLLTLRLDNQLAFQQKDASKYQELMKQEMETILLRQKQLEETNLQLREKAGDVRRNLRDFELTEEQYIKLKAFPEDQLSIPEYVSVRFYELVNPLRKEICELQVKKNILAEELSTNKNQLKQLTETYEEDRKNYSEVQIRCQRLALELADTKQLIQQGDYRQENYDKVKSERDALEQEVIELRRKHEILEASHMIQTKERSELSKEVVTLEQTVTLLQKDKEYLNRQNMELSVRCAHEEDRLERLQAQLEESKKAREEMYEKYVASRDHYKTEYENKLHDELEQIRLKTNQEIDQLRNASREMYERENRNLREARDNAVAEKERAVMAEKDALEKHDQLLDRYRELQLSTESKVTEFLHQSKLKSFESERVQLLQEETARNLTQCQLECEKYQKKLEVLTKEFYSLQASSEKRITELQAQNSEHQARLDIYEKLGSFSTVXAKFINAKDTKEVYLAESVN

SEQ ID NO: 882050 - protein, 533 aa, Homo sapiens
MSRKISKESKKVNISSSLESEDISLETTVPTDDISSSEEREGKVRITRQLIERKELLHNIQLLKIELSQKTMMIDNLKVDYLTKIEELEEKLNDALHQKQLLTLRLDNQLAFQQKDASKYQELMKQEMETILLRQKQLEETNLQLREKAGDVRRNLRDFELTEEQYIKLKAFPEDQLSIPEYVSVRFYELVNPLRKEICELQVKKNILAEELSTNKNQLKQLTETYEEDRKNYSEVQIRCQRLALELADTKQLIQQGDYRQENYDKVKSERDALEQEVIELRRKHEILEASHMIQTKERSELSKEVVTLEQTVTLLQKDKEYLNRQNMELSVRCAHEEDRLERLQAQLEESKKAREEMYEKYVASRDHYKTEYENKLHDELEQIRLKTNQEIDQLRNASREMYERENRNLREARDNAVAEKERAVMAEKDALEKHDQLLDRYRELQLSTESKVTEFLHQSKLKSFESERVQLLQEETARNLTQCQLECEKYQKKLEVHVQAFLSTLAWHVNSLSTRFILSFISPIGCITILHK

SEQ ID NO: 882051 - protein, 216 aa, Homo sapiens
MQTAEIENEDEAERVLFSYGYGANVPTTAKRRLKQSVHLARRVLQLEKQNSLILKDLEHRKDQVTQLSQELDRANSLLNQTQQPYRYLIESVRQRDSKIDSLTESIAQLEKDVSNLNKEKSALLQTKNQMALDLEQLLNHREELAAMKQILVKMHSKHSENSLLLTKTEPKHVTENQKSKTLNVPKEHEDNIFTPKPTLFTKKEAPEWSKKQKMKT

SEQ ID NO: 882052 - protein, 204 aa, Homo sapiens
MLWARGGTPGRWAGVLGPRRPGPALPCAARSPWWAPRRGGGCGRWQRWPWSWRWPRGCPQPGPGSTPRPAERGPPVRLFTEEELARYGGEEEDQPIYLAVKGVVFDVTSGKEFYGRGAPYNALTGKDSTRGVAKMSLDPADLTHDTTGLTAKELEALDEVFTKVYKAKYPIVGYTARRILNEDGSPNLDFKPEDQPHFDIKDEF

SEQ ID NO: 882053 - protein, 152 aa, Homo sapiens
MVGPAPRRRLRPLAALALVLALAPGLPTARAGQYTAPCRAGAPSAAFHRGGAGPLWRGGEFYGRGAPYNALTGKDSTRGVAKMSLDPADLTHDTTGLTAKELEALDEVFTKVYKAKYPIVGYTARRILNEDGSPNLDFKPEDQPHFDIKDEF

SEQ ID NO: 882054 - protein, 105 aa, Homo sapiens
MALGAGRDSGTLGGRARAPPPWPGLALRCALTMVGPAPRRRLRPLAALALVLALAPGLPTARAGQYTAPCRAGAPSAAFHRGGAGPLWRGGGRSAHLLGSEGSGV

SEQ ID NO: 882055 - protein, 204 aa, Homo sapiens; identical to SEQ ID NO: 882052

SEQ ID NO: 882056 - protein, 152 aa, Homo sapiens; identical to SEQ ID NO: 882053

SEQ ID NO: 882057 - protein, 152 aa, Homo sapiens; identical to SEQ ID NO: 882053

SEQ ID NO: 882058 - protein, 126 aa, Homo sapiens
MRLSRGEWTHRREEDQPIYLAVKGVVFDVTSGKEFYGRGAPYNALTGKDSTRGVAKMSLDPADLTHDTTGLTAKELEALDEVFTKVYKAKYPIVGYTARRILNEDGSPNLDFKPEDQPHFDIKDEF

SEQ ID NO: 882059 - protein, 121 aa, Homo sapiens
MLWARGGTPGRWAGVLGPRRPGPALPCAARSPWWAPRRGGGCGRWQRWPWSWRWPRGCPQPGPGSTPRPAERGPPVRLFTEEELARYGGEETARRILNEDGSPNLDFKPEDQPHFDIKDEF

SEQ ID NO: 882060 - protein, 204 aa, Homo sapiens; identical to SEQ ID NO: 882052

SEQ ID NO: 882061 - protein, 204 aa, Homo sapiens; identical to SEQ ID NO: 882052

SEQ ID NO: 882062 - protein, 179 aa, Homo sapiens
MVGPAPRRRLRPLAALALVLALAPGLPTARAGQYTAPCRAGAPSAAFHRGGAGPLWRGGASPLLSEEDQPIYLAVKGVVFDVTSGKEFYGRGAPYNALTGKDSTRGVAKMSLDPADLTHDTTGLTAKELEALDEVFTKVYKAKYPIVGYTARRILNEDGSPNLDFKPEDQPHFDIKDEF

SEQ ID NO: 882063 - protein, 126 aa, Homo sapiens; identical to SEQ ID NO: 882058

SEQ ID NO: 882064 - protein, 119 aa, Homo sapiens
LRYSSRISTSALLAVKGVVFDVTSGKEFYGRGAPYNALTGKDSTRGVAKMSLDPADLTHDTTGLTAKELEALDEVFTKVYKAKYPIVGYTARRILNEDGSPNLDFKPEDQPHFDIKDEF

SEQ ID NO: 882065 - protein, 645 aa, Homo sapiens
GSSLEVGWRGRRHRVLTLSPLPQLHQVLVQLQAGEKEQDLASAPIQVSISVQLWRLPGCHEFLAALGFDLCEVGQEEVILKTGKQANRRTVHFALQSLLSLFDSTELPKRLSLDSSSSLESLASAQSVSNALPLGYQQPPFSPTGADSIASDAISVYSLSSIASSMSFVSKPEGGSEGGGPGGRQDHDRSKNAYLQRSTLPRSQLPPQTRPAGNKDEEEYEGFSIISNEPLATYQENRNTCFSPDHKQPQPGTAGGMRVSVSSKGSISTPNSPVKMTLIPSPNSPFQKVGKLASSDTGESDQSSTETDSTVKSQEESNPKLDPQELAQKILEETQSHLIAVERLQRSGGQVSKSNNPEDGVQAPSSTAVFRASETSAFSRPVLSHQKSQPSPVTVKPKPPARSSSLPKVSSGYSSPTTSEMSIKDSPSQHSGRPSPGCDSQTSQLDQPLFKLKYPSSPYSAHISKSPRNMSPSSGHQSPAGSAPSPALSYSSAGSARSSPADAPDIDKLKMAAIDEKVQAVHNLKMFWQSTPQHSTGPMKIFRGAPGTMTSKRDVLSLLNLSPRHNKKEEGVDKLELKELSLQQHDGAPPKAPPNGHWRTETTSLGSLPLPAGPPATAPARPLRLPSGNGYKFLSPGRFFPSSKC

SEQ ID NO: 882066 - protein, 1699 aa, Homo sapiens
VYQELSDLPGECRAHGHLAAVYMALGKYTMAFKCYEEQLDLGQKLKDPSLEAQVYGNMGITKMNMNVMEEAIGYFEQQLAMLQQLSGNESVLDRGRAYGNLGDCYEALGDYEEAIKYYEQYLSVAQSLNRMQDQAKAYRGLGNGHRAMGSLQQALVCFEKRLVVAHELGEAFNKAQAYGELGSLHSQLGNYEQAISCLERQLNIARDMKDRALESDAACGLGGVYQQMGEYDTALQYHQLDLQIAEETNNPTCQGRAYGNLGLTYESLGTFERAVVYQEQHLSIAAQMNDLAAKTVSYSSLGRTHHALQNYSQAVMYLQEGLRLAEQLGRREDEAKIRHGLGLSLWASGNLEEAQHQLYRASALFETIRHEAQLSTDYKLSLFDLQTSSYQALQRVLVSLGHHDEALAVAERGRTRAFADLLVERQTGQQDSDPYSPVTIDQILEMVNGQRGLVLYYSLAAGYLYSWLLAPGAGIVKFHEHYLGENTVENSSDFQASSSVTLPTATGSALEQHIASVREALGVESHYSRACASSETESEAGDIMDQQFEEMNNKLNSVTDPTGFLRMVRRNNLFNRSCQSMTSLFSNTVSPTQDGTSSLPRRQSSFAKPPLRALYDLLIAPMEGGLMHSSGPVGRHRQLILVLEGELYLIPFALLKGSSSNEYLYERFGLLAVPSIRSLSVQSKSHLRKNPPTYSSSTSMAAVIGNPKLPSAVMDRWLWGPMPSAEEEAYMVSELLGCQPLVGSVATKERVMSALTQAECVHFATHISWKLSALVLTPSMDGNPASSKSSFGHPYTIPESLRVQDDASDGESISDCPPLQELLLTAADVLDLQLPVKLVVLGSSQESNSKVTADGVIALTRAFLAAGAQCVLVSLWPVPVAASKMFIHAFYSSLLNGLKASAALGEAMKVVQSSKAFSHPSNWAGFMLIGSDVKLNSPSSLIGQALTEILQHPERARDALRVLLHLVEKSLQRIQNGQRNAMYTSQQSVENKVGGIPGWQALLTAVGFRLDPPTSGLPAAVFFPTSDPGDRLQQCSSTLQSLLGLPNPALQALCKLITASETGEQLISRAVKNMVGMLHQVLVQLQAGEKEQDLASAPIQVSISVQLWRLPGCHEFLAALGFDLCEVGQEEVILKTGKQANRRTVHFALQSLLSLFDSTELPKRLSLDSSSSLESLASAQSVSNALPLGYQQPPFSPTGADSIASDAISVYSLSSIASSMSFVSKPEGGSEGGGPGGRQDHDRSKNAYLQRSTLPRSQLPPQTRPAGNKDEEEYEGFSIISNEPLATYQENRNTCFSPDHKQPQPGTAGGMRVSVSSKGSISTPNSPVKMTLIPSPNSPFQKVGKLASSDTGESDQSSTETDSTVKSQEESNPKLDPQELAQKILEETQSHLIAVERLQRSGGQVSKSNNPEDGVQAPSSTAVFRASETSAFSRPVLSHQKSQPSPVTVKPKPPARSSSLPKVSSGYSSPTTSEMSIKDSPSQHSGRPSPGCDSQTSQLDQPLFKLKYPSSPYSAHISKSPRNMSPSSGHQSPAGSAPSPALSYSSAGSARSSPADAPDIDKLKMAAIDEKVQAVHNLKMFWQSTPQHSTGPMKIFRGAPGTMTSKRDVLSLLNLSPRHNKKEEGVDKLELKELSLQQHDGAPPKAPPNGHWRTETTSLGSLPLPAGPPATAPARPLRLPSGNGYKFLSPGRFFPSSKC

SEQ ID NO: 882067 - protein, 618 aa, Homo sapiens
VYQELSDLPGECRAHGHLAAVYMALGKYTMAFKCYEEQLDLGQKLKDPSLEAQVYGNMGITKMNMNVMEEAIGYFEQQLAMLQQLSGNESVLDRGRAYGNLGDCYEALGDYEEAIKYYEQYLSVAQSLNRMQDQAKAYRGLGNGHRAMGSLQQALVCFEKRLVVAHELGEAFNKAQAYGELGSLHSQLGNYEQAISCLERQLNIARDMKDRALESDAACGLGGVYQQMGEYDTALQYHQLDLQIAEETNNPTCQGRAYGNLGLTYESLGTFERAVVYQEQHLSIAAQMNDLAAKTVSYSSLGRTHHALQNYSQAVMYLQEGLRLAEQLGRREDEAKIRHGLGLSLWASGNLEEAQHQLYRASALFETIRHEAQLSTDYKLSLFDLQTSSYQALQRVLVSLGHHDEALAVAERGRTRAFADLLVERQTGQQDSDPYSPVTIDQILEMVNGQRGLVLYYSLAAGYLYSWLLAPGAGIVKFHEHYLGENTVENSSDFQASSSVTLPTATGSALEQHIASVREALGVESHYSRACASSETESEAGDIMDQQFEEMNNKLNSVTDPTGFLRMVRRNNLFNRDATRFAEAWDWAWTHVLALPTSQPVKAGDTYLHQVMQAVVIN

SEQ ID NO: 882068 - protein, 521 aa, Homo sapiens
MNSSTPSTANGNDSKKFKRDRPPCSPSRVLHLRKIPCDVTEAEIISLGLPFGKVTNLLMLKGKSQAFLEMASEEAAVTMVNYYTPITPHLRSQPVYIQYSNHRELKTDNLPNQARAQAALQAVSAVQSGSLALSGGPSNEGTVLPGQSPVLRIIIENLFYPVTLEVLHQIFSKFGTVLKIITFTKNNQFQALLQYADPVNAHYAKMALDGQNIYNACCTLRIDFSKLTSLNVKYNNDKSRDFTRLDLPTGDGQPSLEPPMAAAFGAPGIISSPYAGAAGFAPAIGFPQATGLSVPAVPGALGPLTITSSAVTGRMAIPGASGIPGNSVLLVTNLNPDLITPHGLFILFGVYGDVHRVKIMFNKKENALVQMADANQAQLAMNHLSGQRLYGKVLRATLSKHQAVQLPREGQEDQGLTKDFSNSPLHRFKKPGSKNFQNIFPPSATLHLSNIPPSVTVDDLKNLFIEAGCSVKAFKFFQKDRKMALIQLGSVEEAIQALIELHNHDLGENHHLRVSFSKSTI

SEQ ID NO: 882069 - protein, 521 aa, Homo sapiens; identical to SEQ ID NO: 882068

SEQ ID NO: 882070 - protein, 521 aa, Homo sapiens; identical to SEQ ID NO: 882068

SEQ ID NO: 882071 - protein, 521 aa, Homo sapiens; identical to SEQ ID NO: 882068

SEQ ID NO: 882072 - protein, 521 aa, Homo sapiens; identical to SEQ ID NO: 882068

SEQ ID NO: 882073 - protein, 521 aa, Homo sapiens; identical to SEQ ID NO: 882068

SEQ ID NO: 882074 - protein, 594 aa, Homo sapiens
PVPTLLPPRTGRGSAEPKLACPRNRPAAAACFLCSRLARQSLLCARLHLGHGWRGSDELLSSGIINGPFTMNSSTPSTGVYANGNDSKKFKRDRPPCSPSRVLHLRKIPCDVTEAEIISLGLPFGKVTNLLMLKGKSQAFLEMASEEAAVTMVNYYTPITPHLRSQPVYIQYSNHRELKTDNLPNQARAQAALQAVSAVQSGSLALSGGPSNEGTVLPGQSPVLRIIIENLFYPVTLEVLHQIFSKFGTVLKIITFTKNNQFQALLQYADPVNAHYAKMALDGQNIYNACCTLRIDFSKLTSLNVKYNNDKSRDFTRLDLPTGDGQPSLEPPMAAAFGAPGIISSPYAGAAGFAPAIGFPQATGLSVPAVPGALGPLTITSSAVTGRMAIPGASGIPGNSVLLVTNLNPDLITPHGLFILFGVYGDVHRVKIMFNKKENALVQMADANQAQLAMNHLSGQRLYGKVLRATLSKHQAVQLPREGQEDQGLTKDFSNSPLHRFKKPGSKNFQNIFPPSATLHLSNIPPSVTVDDLKNLFIEAGCSVKAFKFFQKDRKMALIQLGSVEEAIQALIELHNHDLGENHHLRVSFSKSTI

SEQ ID NO: 882075 - protein, 235 aa, Homo sapiens
MAFLEMASEEAAVTMVNYYTPITPHLRSQPVYIQYSNHRELKTDNLPNQARAQAALQAVSAVQSGSLALSGGPSNEGTVLPGQSPVLRIIIENLFYPVTLEVLHQIFSKFGTVLKIITFTKNNQFQALLQYADPVNAHYAKMALDGQNIYNACCTLRIDFSKLTSLNVKYNNDKSRDFTRLDLPTGDGQPSLEPPMAAAFGAPGIISSPYAGAAGFAPAIGFPQATGDSFKLDLK

SEQ ID NO: 882076 - protein, 205 aa, Homo sapiens
PVPTLLPPRTGRGSAEPKLACPRNRPAAAACFLCSRLARQSLLCARLHLGHGWRGSDELLSSGIINGPFTMNSSTPSTGVYANGNDSKKFKRDRPPCSPSRVLHLRKIPCDVTEAEIISLGLPFGKVTNLLMLKGKSQAFLEMASEEAAVTMVNYYTPITPHLRSQPVYIQYSNHRELKTDNLPNQARCGHAPFPSPTSQPRTQR

SEQ ID NO: 882077 - protein, 87 aa, Homo sapiens
ERSRARATAHSPCARRSPKLATAGSGGDSGDRELRPGRAGASAAESAPEGHGDRVLLCCPGWNAVAQSWLTAASTFQGLSDPLTSSS

SEQ ID NO: 882078 - protein, 80 aa, Homo sapiens
PSAAGRAPPPTRPVPAAARNWPRPGAEGTAGIVSSGPGERVRLPQSRHLKDMERPSATLEGQSCMALDSAPWTVGNSERC

SEQ ID NO: 882079 - protein, 108 aa, Homo sapiens
PSAAGRAPPPTRPVPAAARNWPRPGAEGTAGIVSSGPGERVRLPQSRHLKDMEGINLLVGQWLLLKFLCPNAWKTKNNKNETNKQKNNMQLLVKKVKRKSRGQGSDHS

SEQ ID NO: 882080 - protein, 467 aa, Homo sapiens
PSAAGRAPPPTRPVPAAARNWPRPGAEGTAGIVSSGPGERVRLPQSRHLKDMEERPAETNANVDNSASPSVAQLAGRFREQAAAAKETPASKPTRRKPPCSLPLFPPKVDLGQNGEEKSPPNASHPPKFKVKSSPLIEKLQANLTFDPAALLPGASPKSPGLKAMVSPFHSPPSTPSSPGVRSRPSEAEEVPVSFDQPPEGSHLPCYNKVRTRGSIKRRPPSRRFRRSQSDCGELGDFRAVESSQQNGAKEEDGDEVLPSKSKAPGSPLSSEGAAGEGVRTLGPAEKPPLRRSPSRTEKQEEDRATEEAKNGEKARRSSEEVDGQHPAQEEVPESPQTSGPEAENRCGSPREEKPAGEEAEMEKATEVKGERVQNEEVGPEHDSQETKKLEEGAAVKETPHSPPGGVKGGDVPKQEKGKEKQQEGAVLEPGCSPQTGPAQLETSSEVQSEPAVPKPEDDTPVQDTKM

SEQ ID NO: 882081 - protein, 467 aa, Homo sapiens; identical to SEQ ID NO: 882080

SEQ ID NO: 882082 - protein, 467 aa, Homo sapiens; identical to SEQ ID NO: 882080

SEQ ID NO: 882083 - protein, 80 aa, Homo sapiens; identical to SEQ ID NO: 882078

SEQ ID NO: 882084 - protein, 133 aa, Homo sapiens
GGFLPEGGTRAGRWGAGARVRGGAGGMASGAARWLVLAPVRSGALRSGPSLRKDGDVSAAWSGSGRSLVPSRSVIVTRSGAILPKPVKMSFGLLRVFSIVIPFLYVGTLISKNFAALLEEHDIFVPEDDDDDD

SEQ ID NO: 882085 - protein, 133 aa, Homo sapiens; identical to SEQ ID NO: 882084

SEQ ID NO: 882086 - protein, 83 aa, Homo sapiens
GGFLPEGGTRAGRWGAGARVRGGAGGMASGAARWLVLAPVRSGALRSGPSLRKDGDVSAAWSGSGRSLVPSRCPSAFSVCSPL

SEQ ID NO: 882087 - protein, 97 aa, Homo sapiens
GGFLPEGGTRAGRWGAGARVRGGAGGMASGAARWLVLAPVRSGALRSGPSLRKDGDVSAAWSGSGRSLVPSRSVIVTRSGAILPKPVKELQKGESTN

SEQ ID NO: 882088 - protein, 133 aa, Homo sapiens; identical to SEQ ID NO: 882084

SEQ ID NO: 882089 - protein, 111 aa, Homo sapiens; identical to SEQ ID NO: 880207

SEQ ID NO: 882090 - protein, 111 aa, Homo sapiens; identical to SEQ ID NO: 880207

SEQ ID NO: 882091 - protein, 111 aa, Homo sapiens; identical to SEQ ID NO: 880207

SEQ ID NO: 882092 - protein, 102 aa, Homo sapiens
MADWARAQSPGAVEEILDRENKRMADSLASKVTRLKSLALDIDRDAEDQNRYLDGMVRAHGVRVSVPCPSTTCCRACSVSFSTGAGGWSNHHFCVILLGFLP

SEQ ID NO: 882093 - protein, 144 aa, Homo sapiens
RTDVATFMRLASVPGDRDVLQLDVTPGGSVTDVRDWVSGAQSPGAVEEILDRENKRMADSLASKVTRLKSLALDIDRDAEDQNRYLDGMDSDFTSMTSLLTGSVKRFSTMARSGQDNRKLLCGMAVGLIVAFFILSYFLSRART

SEQ ID NO: 882094 - protein, 171 aa, Homo sapiens
MPAAPLCSPFPSPPPSFHTASLPFSIHAHHSPLPCDLDPPLYLAETVSLLEEWGPPSSCPMQCKLTSHPARLTHLPPCLWGFAVALKPSWAGLAPSLLPPPRMSLCRPLSFLRHQCPWLPWQAHQGLVPWSPSMVAAACIVSPSGHCRCQPFIPHVFLGHGGLTSVSGECG

SEQ ID NO: 882095 - protein, 111 aa, Homo sapiens; identical to SEQ ID NO: 880207

SEQ ID NO: 882096 - protein, 111 aa, Homo sapiens; identical to SEQ ID NO: 880207

SEQ ID NO: 882097 - protein, 111 aa, Homo sapiens; identical to SEQ ID NO: 880207

SEQ ID NO: 882098 - protein, 111 aa, Homo sapiens; identical to SEQ ID NO: 880207

SEQ ID NO: 882099 - protein, 171 aa, Homo sapiens; identical to SEQ ID NO: 882094

SEQ ID NO: 882100 - protein, 111 aa, Homo sapiens; identical to SEQ ID NO: 880207

SEQ ID NO: 882101 - protein, 111 aa, Homo sapiens; identical to SEQ ID NO: 880207

SEQ ID NO: 882102 - protein, 111 aa, Homo sapiens; identical to SEQ ID NO: 880207

SEQ ID NO: 882103 - protein, 111 aa, Homo sapiens; identical to SEQ ID NO: 880207

SEQ ID NO: 882104 - protein, 106 aa, Homo sapiens
MVEAGANRPRARLRGCGGCGRVGVRVEEPGQGTMADWARAQSPGAVEEILDRENKRMADSLASKVTRLKSLALDIDRDAEDQNRYLDGMVQVMVLPVCLLRSPVLK

SEQ ID NO: 882105 - protein, 385 aa, Homo sapiens
MSGDSSGRGPEGRGRGRDPHRDRTRSRSRSRSPLSPRSRRGSARERREAPERPSLEDTEPSDSGDEMMDPASLEAEADQGLCRQIRHQYRALINSVQQNREDILNAGDKLTEVLEEANTLFNEVSRAREAVLDAHFLVLASDLGKEKAKQLRSDLSSFDMLRYVETLLTHMGVNPLEAEELIRDEDSPDFEFIVYDSWKITGRTAENTFNKTHTFHFLLGSIYGECPVPKPRVDRPRKVPVIQEERAMPAQLRRMEESHQEATEKEVERILGLLQTYFREDPDTPMSFFDFVVDPHSFPRTVENIFHVSFIIRDGFARIRLDQDRLPVIEPVSINEENEGFEHNTQVRNQGIIALSYRDWEEIVKTFEISEPVITPSQRQQKPSA

SEQ ID NO: 882106 - protein, 218 aa, Homo sapiens
MSGDSSGRGPEGRGRGRDPHRDRTRSRSRSRSPLSPRSRRGSARERREAPERPSLEDTEPSDSGDEMMDPASLEAEADQGLCRQIRHQYRALINSVQQNREDILNAGDKLTEVLEEANTLFNEVSRAREAVLDAHFLVLASDLGKEKAKQLRSDLSSFDMLRYVETLLTHMGVNPLEAEELIRDEDSPDFEFIVYDSWKITGRTAENTFNKTHTFHFL

SEQ ID NO: 882107 - protein, 316 aa, Homo sapiens
MSGDSSGRGPEGRGRGRDPHRDRTRSRSRSRSPLSPRSRRGSARERREAPERPSLEDTEPSDSGDEMMDPASLEAEADQGLCRQIRHQYRALINSVQQNREDILNAGDKLTEVLEEANTLFNEVSRAREAVLDAHFLVLASDLGKEKAKQLRSDLSSFDMLRYVETLLTHMGVNPLEAEELIRDEDSPDFEFIVYDSWKITGRTAENTFNKTHTFHFLLGSIYGECPVPKPRVDRPRKVPVIQEERAMPAQLRRMEESHQEATEKEVERILGLLQTYFREDRDSLTLSPRLECSGTISTHCNLHLLDSSNSPASAS

SEQ ID NO: 882108 - protein, 331 aa, Homo sapiens [sequence omitted]

SEQ ID NO: 882109 - protein, 331 aa, Homo sapiens [sequence omitted]

SEQ ID NO: 882110 - protein, 331 aa, Homo sapiens [sequence omitted]

SEQ ID NO: 882111 - protein, 385 aa, Homo sapiens; identical to SEQ ID NO: 882105

SEQ ID NO: 882112 - protein, 331 aa, Homo sapiens [sequence omitted]

SEQ ID NO: 882113 - protein, 385 aa, Homo sapiens; identical to SEQ ID NO: 882105

SEQ ID NO: 882114 - protein, 335 aa, Homo sapiens
MSGDSSGRGPEGRGRGRDPHRDRTRSRSRSRSPLSPRSRRGSARERREAPERPSLEDTEPSDSGDEMMDPASLEAEADQGLCRQIRHQYRALINSVQQNREDILNAGDKLTEVLEEANTLFNEVSRAREAVLDAHFLVLASDLGKEKAKQLRSDLSSFDMLRYVETLLTHMGVNPLEAEELIRDEDSPDFEFIVYDSWKITGRTAENTFNKTHTFHFLLGSIYGECPVPKPRVDRPRKVPVIQEERAMPAQLRRMEESHQEATEKEVERILGLLQTYFREDPDTPMSFFDFVVDPHSFPRTVENIFHVSFIIRDGFARIRLDQDRLPVIGDCEDL

SEQ ID NO: 882115 - protein, 172 aa, Homo sapiens [sequence omitted]

SEQ ID NO: 882116 - protein, 226 aa, Homo sapiens
MLRYVETLLTHMGVNPLEAEELIRDEDSPDFEFIVYDSWKITGRTAENTFNKTHTFHFLLGSIYGECPVPKPRVDRPRKVPVIQEERAMPAQLRRMEESHQEATEKEVERILGLLQTYFREDPDTPMSFFDFVVDPHSFPRTVENIFHVSFIIRDGFARIRLDQDRLPVIEPVSINEENEGFEHNTQVRNQGIIALSYRDWEEIVKTFEISEPVITPSQRQQKPSA

SEQ ID NO: 882117 - protein, 172 aa, Homo sapiens [sequence omitted]

SEQ ID NO: 882118 - protein, 499 aa, Homo sapiens
MSGDSSGRGPEGRGRGRDPHRDRTRSRSRSRSPLSPRSRRGSARERREAPERPSLEDTEPSDSGDEMMDPASLEAEADQGLCRQIRHQYRALINSVQRKAAPPGGAGPDGPLSPPLRRARGEGTGGRCRAEARRGVSRDAPGASPSPHLKLLTKCSHFVAGAVRPWRGSPSGGLEKLEARAVRGLARAQPASGERQDADSACFDCARQSSAWAPGLAAAAAAAAARESCQMHVLGPHPDPRNSNLWVGPRNCGVALQVMFVFLKIENREDILNAGDKLTEVLEEANTLFNEVSRAREAVLDAHFLVLASDLGKEKAKQLRSDLSSFDMLRYVETLLTHMGVNPLEAEELIRDEDSPDFEFIVYDSWKITGRTAENTFNKTHTFHFLLGSIYGECPVPKPRVDRPRKVPVIQEERAMPAQLRRMEESHQEATEKEVERILGLLQTYFREDPDTPMSFFDFVVDPHSFPRTVENIFHVSFIIRDGFARIRLDQDRLPVIGK

SEQ ID NO: 882119 - protein, 172 aa, Homo sapiens [sequence omitted]

SEQ ID NO: 882120 - protein, 248 aa, Homo sapiens
RPLLSPDKRQFTVQQNREDILNAGDKLTEVLEEANTLFNEVSRAREAVLDAHFLVLASDLGKEKAKQLRSDLSSFDMLRYVETLLTHMGVNPLEAEELIRDEDSPDFEFIVYDSWKITGRTAENTFNKTHTFHFLLGSIYGECPVPKPRVDRPRKVPVIQEERAMPAQLRRMEESHQEATEKEVERILGLLQTYFREDPDTPMSFFDFVVDPHSFPRTVENIFHVSFIIRDGFARIRLDQDRLPVIGK

SEQ ID NO: 882121 - protein, 168 aa, Homo sapiens
GIVTGNNFTRVQLMADYLFYPLRHRNLGLEEPKFSPRQSIQQRSPFNKTHTFPFLLGSIYGECPVPKPRVDRPRKVPVIQEERAMPAQLRRMEESHQEATEKEVERILGLLQTYFREDPDTPMSFFDFVVDPHSFPRTVENIFHVSFIIRDGFARIRLDQDRLPVIGK

SEQ ID NO: 882122 - protein, 555 aa, Homo sapiens
MTLRAAVFDLDGVLALPAVFGVLGRTEEALALPRGLLNDAFQKGGPEGATTRLMKGEITLSQWIPLMEENCRKCSETAKVCLPKNFSIKEIFDKAISARKINRPMLQAALMLRKKGFTTAILTNTWLDDRAERDGLAQLMCELKMHFDFLIESCQVGMVKPEPQIYKFLLDTLKASPSEVVFLDDIGANLKPARDLGMVTILVQDTDTALKELEKVTGIQLLNTPAPLPTSCNPSDMSHGYVTVKPRVRLHFVELGSGPAVCLCHGFPESWYSWRYQIPALAQAGYRVLAMDMKGYGESSAPPEIEEYCMEVLCKEMVTFLDKLGLSQAVFIGHDWGGMLVWYMALFYPERVRAVASLNTPFIPANPNMSPLESIKANPVFDYQLYFQEPGVAEAELEQNLSRTFKSLFRASDESVLSMHKVCEAGGLFVNSPEEPSLSRMVTEEEIQFYVQQFKKSGFRGPLNWYRNMERNWKWACKSLGRKILIPALMVTAEKDFVLVPQMSQHMEDWIPHLKRGHIEDCGHWTQMDKPTEVNQILIKWLDSDARNPPVVSKM

SEQ ID NO: 882123 - protein, 168 aa, Homo sapiens
MKGEITLSQWIPLMEENCRKCSETAKVCLPKNFSIKEIFDKAISARKINRPMLQAALMLRKKGFTTAILTNTWLDDRAERDGLAQLMCELKMHFDFLIESCQVGMVKPEPQIYKFLLDTLKASPSEVVFLDDIGANLKPARDLGMVTILVQDTDTALKELEKVTGIQG

SEQ ID NO: 882124 - protein, 588 aa, Homo sapiens
MTLRAAVFDLDGVLALPAVFGVLGRTEEALALPSPSGRQVKDVCDSSPHDLSLGPSGDPYWGRLVDRGLLNDAFQKGGPEGATTRLMKGEITLSQWIPLMEENCRKCSETAKVCLPKNFSIKEIFDKAISARKINRPMLQAALMLRKKGFTTAILTNTWLDDRAERDGLAQLMCELKMHFDFLIESCQVGMVKPEPQIYKFLLDTLKASPSEVVFLDDIGANLKPARDLGMVTILVQDTDTALKELEKVTGIQLLNTPAPLPTSCNPSDMSHGYVTVKPRVRLHFVELGSGPAVCLCHGFPESWYSWRYQIPALAQAGYRVLAMDMKGYGESSAPPEIEEYCMEVLCKEMVTFLDKLGLSQAVFIGHDWGGMLVWYMALFYPERVRAVASLNTPFIPANPNMSPLESIKANPVFDYQLYFQEPGVAEAELEQNLSRTFKSLFRASDESVLSMHKVCEAGGLFVNSPEEPSLSRMVTEEEIQFYVQQFKKSGFRGPLNWYRNMERNWKWACKSLGRKILIPALMVTAEKDFVLVPQMSQHMEDWIPHLKRGHIEDCGHWTQMDKPTEVNQILIKWLDSDARNPPVVSKM

SEQ ID NO: 882125 - protein, 502 aa, Homo sapiens
MKGEITLSQWIPLMEENCRKCSETAKVCLPKNFSIKEIFDKAISARKINRPMLQAALMLRKKGFTTAILTNTWLDDRAERDGLAQLMCELKMHFDFLIESCQVGMVKPEPQIYKFLLDTLKASPSEVVFLDDIGANLKPARDLGMVTILVQDTDTALKELEKVTGIQLLNTPAPLPTSCNPSDMSHGYVTVKPRVRLHFVELGSGPAVCLCHGFPESWYSWRYQIPALAQAGYRVLAMDMKGYGESSAPPEIEEYCMEVLCKEMVTFLDKLGLSQAVFIGHDWGGMLVWYMALFYPERVRAVASLNTPFIPANPNMSPLESIKANPVFDYQLYFQEPGVAEAELEQNLSRTFKSLFRASDESVLSMHKVCEAGGLFVNSPEEPSLSRMVTEEEIQFYVQQFKKSGFRGPLNWYRNMERNWKWACKSLGRKILIPALMVTAEKDFVLVPQMSQHMEDWIPHLKRGHIEDCGHWTQMDKPTEVNQILIKWLDSDARNPPVVSKM

SEQ ID NO: 882126 - protein, 491 aa, Homo sapiens
MTLRAAVFDLDGVLALPAVFGVLGRTEEALALPRGLLNDAFQKGGPEGATTRLMKGEITLSQWIPLMEENCRKCSETAKVCLPKNFSIKEIFDKAISARKINRPMLQAALMLRKKGFTTAILTNTWLDDRAERDGLAQLMCELKMHFDFLIESCQVGMVKPEPQIYKFLLDTLKASPSEVVFLDDIGANLKPARDLGMVTILVQDTDTALKELEKVTGIQLLNTPAPLPTSCNPSDMSHGYVTVKPRVRLHFVELGSGPAVCLCHGFPESWYSWRYQIPALAQAGYRVLAMDMKGYGESSAPPEIEEYCMEVLCKEMVTFLDKLGLSQAVFIGHDWGGMLVWYMALFYPERVRAVASLNTPFIPANPNMSPLESIKANPVFDYQLYFQEPGVAEAELEQNLSRTFKSLFRASDESVLSMHKVCEAGGLFVNSPEEPSLSRMVTEEEIQFYVQQFKKSGFRGPLNWYRNMERNWKWACKSLGRKVSARFSVV

SEQ ID NO: 882127 - protein, 465 aa, Homo sapiens
MTLRAAVFDLDGVLALPAVFGVLGRTEEALALPRGLLNDAFQKGGPEGATTRLMKGEITLSQWIPLMEENCRKCSETAKVCLPKNFSIKEIFDKAISARKINRPMLQAALMLRKKGFTTAILTNTWLDDRAERDGLAQLMCELKMHFDFLIESCQVGMVKPEPQIYKFLLDTLKASPSEVVFLDDIGANLKPARDLGMVTILVQDTDTALKELEKVTGIQLLNTPAPLPTSCNPSDMSHGYVTVKPRVRLHFVELGSGPAVCLCHGFPESWYSWRYQIPALAQAGYRVLAMDMKGYGESSAPPEIERILPGSGYVGDWYRSWINWGFLKQCSWALTGGGMQGWTLVSYNPERIRAGHIDIIPGQTQNNTQGPTLGKRMTKTKTRYGKHGLNRKKQEEDDDSKGHTTRKGEHKHHHENTQTGEQHDKKNKGGNGTTKTLPQMDQRGNTTIGIQKGKKTEVTKKRKW

SEQ ID NO: 882128 - protein, 221 aa, Homo sapiens
MTLRAAVFDLDGVLALPAVFGVLGRTEEALALPRGLLNDAFQKGGPEGATTRLMKGEITLSQWIPLMEENCRKCSETAKVCLPKNFSIKEIFDKAISARKINRPMLQAALMLRKKGFTTAILTNTWLDDRAERDGLAQLMCELKMHFDFLIESCQVGMVKPEPQIYKFLLDTLKASPSEVVFLDDIGANLKPARDLGMVTILVQDTDTALKELEKVTGIQG

SEQ ID NO: 882129 - protein, 179 aa, Homo sapiens
MTLRAAVFDLDGVLALPAVFGVLGRTEEALALPRGLLNDAFQKGGPEGATTRLMKGEITLSQWIPLMEENCRKCSETAKVCLPKNFSIKEIFDKAISARKINRPMLQAALMLRKKGFTTAILTNTWLDDRAERDGLAQLMCELKMHFDFLIESCQVGMVKPEPQIYKFLLDTLKASPSE

SEQ ID NO: 882130 - protein, 555 aa, Homo sapiens; identical to SEQ ID NO: 882122

SEQ ID NO: 882131 - protein, 555 aa, Homo sapiens; identical to SEQ ID NO: 882122

SEQ ID NO: 882132 - protein, 357 aa, Homo sapiens
MYILVQDTDTALKELEKVTGIQLLNTPAPLPTSCNPSDMSHGYVTVKPRVRLHFVELGSGPAVCLCHGFPESWYSWRYQIPALAQAGYRVLAMDMKGYGESSAPPEIEEYCMEVLCKEMVTFLDKLGLSQAVFIGHDWGGMLVWYMALFYPERVRAVASLNTPFIPANPNMSPLESIKANPVFDYQLYFQEPGVAEAELEQNLSRTFKSLFRASDESVLSMHKVCEAGGLFVNSPEEPSLSRMVTEEEIQFYVQQFKKSGFRGPLNWYRNMERNWKWACKSLGRKILIPALMVTAEKDFVLVPQMSQHMEDWIPHLKRGHIEDCGHWTQMDKPTEVNQILIKWLDSDARNPPVVSKM

SEQ ID NO: 882133 - protein, 254 aa, Homo sapiens [sequence omitted]

SEQ ID NO: 882134 - protein, 231 aa, Homo sapiens
MTLRAAVFDLDGVLALPAVFGVLGRTEEALALPRGLLNDAFQKGGPEGATTRLMKGEITLSQWIPLMEENCRKCSETAKVCLPKNFSIKEIFDKAISARKINRPMLQAALMLRKKGFTTAILTNTWLDDRAERDGLAQLMCELKMHFDFLIESCQVGMVKPEPQIYKFLLDTLKASPSEVVFLDDIGANLKPARDLGMVTILVQDTDTALKELEKVTGIQPQQTNTKAQRV

SEQ ID NO: 882135 - protein, 144 aa, Homo sapiens
PRGRGGRCGAEGVLEGSPRGLRPGPSRGARAPQIFHRDRTPGTRLFPGRSFLAGLWAAGVGAEEDDPGWTLVSILLVRPVPRSAALVAARFVYGRICRLSYLKTTASAKREKPYLPTDAREIIVELYQRWGCWSPLPSLSFLFS

SEQ ID NO: 882136 - protein, 138 aa, Homo sapiens
SFAHRDFQGHILCSSLPAIQTIPSQGGRSCCPFLPESWSWVVEMCHDAHGGMLTPSSVAEGMAARQLFPVLSKASVVPLFGAKQEYWKREKVVLSIVIKLTLIQVHAWGKDRATNNYNAGSNGIFSWVCGRFNFNYPS

SEQ ID NO: 882137 - protein, 210 aa, Homo sapiens
MANSGCKDVTGPDEESFLYFAYGSNLLTERIHLRNPSAAFFCVARLQAREFFKSFEPLGKFPKAKNQSAKTFGRIAQRPTLAPNPIFFFPKKVSLWAGLHRLVGGTVTINWAPTLETKKGQQFFNKNFSFLRRTLERANKETRAGGFFNTPTGFGGKHLGFNFVFSGLTQFTAKNGFLTNKGVFLGPKKTFPKRETRRHPTREKNFKTPL

SEQ ID NO: 882138 - protein, 98 aa, Homo sapiens
MANSGCKDVTGPDEESFLYFAYGSNLLTERIHLRNPSAAFFCVARLQNLNAFVHFPYYSPHFIARTLKNGGYPSMPSLTCFALGIAKVKLKILQAGHT

SEQ ID NO: 882139 - protein, 188 aa, Homo sapiens
MANSGCKDVTGPDEESFLYFAYGSNLLTERIHLRNPSAAFFCVARLQDFKLDFGNSQGKTSQTWHGGIATIFQSPGDEVWGVVWKMNKSNLNSLDEQEGVKSGMYVVIEVKVATQEGKEITCRSYLMTNYESAPPSPQYKKIICMGAKENGLPLEYQEKLKAIEPNDYTGKVSEEIEDIIKKGETQTL

SEQ ID NO: 882140 - protein, 188 aa, Homo sapiens; identical to SEQ ID NO: 882139

SEQ ID NO: 882141 - protein, 166 aa, Homo sapiens
MANSGCKDVTGPDEESFLYFAYGSNLLTERIHLRNPSAAFFCVARLQDFKLDFGNSQGKTSQTWHGGIATIFQSPGDEVWGVVWKMNKSNLNSLDEQEGVKSGMYVVIEVKVATQEGKEITCRSYLMTNYESAPPSPQYKKVEKETSHCLSESGKSPLQAQDKNVG

SEQ ID NO: 882142 - protein, 133 aa, Homo sapiens
MPNSLTFVIVRDIHYCLTVLGYRKGGNTVVHEHKGLHSLDEQEGVKSGMYVVIEVKVATQEGKEITCRSYLMTNYESAPPSPQYKKIICMGAKENGLPLEYQEKLKAIEPNDYTGKVSEEIEDIIKKGETQTL

SEQ ID NO: 882143 - protein, 201 aa, Homo sapiens
MANSGCKDVTGPDEESFLYFAYGSNLLTERIHLRNPSAAFFCVARLQDFKLDFGNSQGKTSQTWHGGIATIFQSPGDEVWGVVWKMNKSNLNSLDEQEGVKSGMYVVIEVKVATQEGKEITCRSYLMTNYESAPPSPQYKKIICMGAKENGLPLEYQEKLKAIEPNDYTGKVSEEIEDIIKKGETQTFLTLENRDLGDLHV

SEQ ID NO: 882144 - protein, 166 aa, Homo sapiens; identical to SEQ ID NO: 882141

SEQ ID NO: 882145 - protein, 154 aa, Homo sapiens
MANSGCKDVTGPDEESFLYFAYGSNLLTERIHLRNPSAAFFCVARLQGECPLPRYPRRGRDAQKALPRGHTWPIGPGMQFFLMRVLGRGFRLLGGSTSSAAPTARPCPGHGALSGCLELSPSWPLHRLLGLHRFGLSSTNLTDCIQLVLLESLL

SEQ ID NO: 882146 - protein, 188 aa, Homo sapiens; identical to SEQ ID NO: 882139

SEQ ID NO: 882147 - protein, 188 aa, Homo sapiens; identical to SEQ ID NO: 882139

SEQ ID NO: 882148 - protein, 114 aa, Homo sapiens
MANSGCKDVTGPDEESFLYFAYGSNLLTERIHLRNPSAAFFCVARLQDFKLDFGNSQGKTSQTWHGGIATIFQSPGDEVWGVVWKMNKSNLNSLDELFAWVQKKMVCRWSIKRS

SEQ ID NO: 882149 - protein, 166 aa, Homo sapiens
MANSGCKDVTGPDEESFLYFAYGSNLLTERIHLRNPSAAFFCVARLQDFKLDFGNSQGKTSQTWHGGIATIFQSPGDEVWGVVWKMNKSNLNSLDEWRKKRHTAFQNQGNHPCKHKTRMWDRDPKIPVQNLSLALCWQAQSGHGTCNRLFAWVQKKMVCRWSIKRS

SEQ ID NO: 882150 - protein, 66 aa, Homo sapiens
  misc_feature (5)..(5): Xaa can be any naturally occurring amino acid
PLPSXLTYESAPPSPQYKKIICMGAKENGLPLEYQEKLKAIEPNDYTGKVSEEIEDIIKKGETQTL

SEQ ID NO: 882151 - protein, 159 aa, Homo sapiens
MANSGCKDVTGPDEESFLYFAYGSNLLTERIHLRNPSAAFFCVARLQDFKLDFGNSQGKTSQTWHGGIATIFQSPGDEVWGVVWKMNKSNLNSLDEQEGVKSGMYVVIEVKVATQEGKEITCRSYLMTNYESAPPSPQYKKVSYLQTGGDYFLNFTERN

SEQ ID NO: 882152 - protein, 556 aa, Homo sapiens [sequence omitted]

SEQ ID NO: 882153 - protein, 116 aa, Homo sapiens
MARFGLPALLCTLAVLSAALLAAELKSKSCSEVRRLYVSKGFNKNDAPLHEINGDHLKICPQGSTCCSQEMEEKYSLQSKDDFKSVVSEQCNHLQAVFASRYKKFDGMLFKSYVRT

SEQ ID NO: 882154 - protein, 112 aa, Homo sapiens
ICHPLRYTTIMKEGLCNLLVTVSWILSCTNALSHTLLLAQLSFCADNTIPHFFCDLVALLKLSCSDISLNELVIFTVGQAVITLPLICILISYGHIGVTILKAPSTKGIFKA

SEQ ID NO: 882155 - protein, 419 aa, Homo sapiens
MSGLESARVLLCALGSFLLNSLLSTFRLAELQCTQLDLERKLKLNENAISRLQANQKSVLVSVSEVKAVAEMQFGELLAAVRKAQANVMLFLEEKEQAALSQANGIKAHLEYRSAEMEKSKQELERMAAISNTVQFLEEYCKFKNTEDITFPSVYVGLKDKLSGIRKVITESTVHLIQLLENYKKKLQEFSKEEEYDIRTQVSAVVQRKYWTSKPEPSTREQFLQYAYDITFDPDTAHKYLRLQEENRKVTNTTPWEHPYPDLPSRFLHWRQVLSQQSLYLHRYYFEVEIFGAGTYVGLTCKGIDRKGEERNSCISGNNFSWSLQWNGKEFTAWYSDMETPLKAGPFRRLGVYIDFPGGILSFYGVEYDTMTLVHKFACKFSEPVYAAFWLSKKENAIRIVDLGEEPEKPAPSLVGTAP

SEQ ID NO: 882156 - protein, 564 aa, Homo sapiens
MAELDLMAPGPLPRATAQPPAPLSPDSGSPSPDSGSASPVEEEDVGSSEKLGRETEEQDSDSAEQGDPAGEGKEVLCDFCLDDTRRVKAVKSCLTCMVNYCEEHLQPHQVNIKLQSHLLTEPVKDHNWRYCPAHHSPLSAFCCPDQQCICQDCCQEHSGHTIVSLDAARRDKEAELQCTQLDLERKLKLNENAISRLQANQKSVLVSVSEVKAVAEMQFGELLAAVRKAQANVMLFLEEKEQAALSQANGIKAHLEYRSAEMEKSKQELERMAAISNTVQFLEEYCKFKNTEDITFPSVYVGLKDKLSGIRKVITESTVHLIQLLENYKKKLQEFSKEEEYDIRTQVSAVVQRKYWTSKPEPSTREQFLQYAYDITFDPDTAHKYLRLQEENRKVTNTTPWEHPYPDLPSRFLHWRQVLSQQSLYLHRYYFEVEIFGAGTYVGLTCKGIDRKGEERNSCISGNNFSWSLQWNGKEFTAWYSDMETPLKAGPFRRLGVYIDFPGGILSFYGVEYDTMTLVHKFACKFSEPVYAAFWLSKKENAIRIVDLGEEPEKPAPSLVGTAP

SEQ ID NO: 882157 - protein, 564 aa, Homo sapiens; identical to SEQ ID NO: 882156

SEQ ID NO: 882158 - protein, 348 aa, Homo sapiens
MQFGELLAAVRKAQANVMLFLEEKEQAALSQANGIKAHLEYRSAEMEKSKQELERMAAISNTVQFLEEYCKFKNTEDITFPSVYVGLKDKLSGIRKVITESTVHLIQLLENYKKKLQEFSKEEEYDIRTQVSAVVQRKYWTSKPEPSTREQFLQYAYDITFDPDTAHKYLRLQEENRKVTNTTPWEHPYPDLPSRFLHWRQVLSQQSLYLHRYYFEVEIFGAGTYVGLTCKGIDRKGEERNSCISGNNFSWSLQWNGKEFTAWYSDMETPLKAGPFRRLGVYIDFPGGILSFYGVEYDTMTLVHKFACKFSEPVYAAFWLSKKENAIRIVDLGEEPEKPAPSLVGTAP

SEQ ID NO: 882159 - protein, 360 aa, Homo sapiens
MVSVSEVKAVAEMQFGELLAAVRKAQANVMLFLEEKEQAALSQANGIKAHLEYRSAEMEKSKQELERMAAISNTVQFLEEYCKFKNTEDITFPSVYVGLKDKLSGIRKVITESTVHLIQLLENYKKKLQEFSKEEEYDIRTQVSAVVQRKYWTSKPEPSTREQFLQYAYDITFDPDTAHKYLRLQEENRKVTNTTPWEHPYPDLPSRFLHWRQVLSQQSLYLHRYYFEVEIFGAGTYVGLTCKGIDRKGEERNSCISGNNFSWSLQWNGKEFTAWYSDMETPLKAGPFRRLGVYIDFPGGILSFYGVEYDTMTLVHKFACKFSEPVYAAFWLSKKENAIRIVDLGEEPEKPAPSLVGTAP

SEQ ID NO: 882160 - protein, 348 aa, Homo sapiens; identical to SEQ ID NO: 882158

SEQ ID NO: 882161 - protein, 304 aa, Homo sapiens
MRREAQSLEIQKPQQVLLFPFLQEYCKFKNTEDITFPSVYVGLKDKLSGIRKVITESTVHLIQLLENYKKKLQEFSKEEEYDIRTQVSAVVQRKYWTSKPEPSTREQFLQYAYDITFDPDTAHKYLRLQEENRKVTNTTPWEHPYPDLPSRFLHWRQVLSQQSLYLHRYYFEVEIFGAGTYVGLTCKGIDRKGEERNSCISGNNFSWSLQWNGKEFTAWYSDMETPLKAGPFRRLGVYIDFPGGILSFYGVEYDTMTLVHKFACKFSEPVYAAFWLSKKENAIRIVDLGEEPEKPAPSLVGTAP

SEQ ID NO: 882162 - protein, 243 aa, Homo sapiens
MSGLESARVLLCALGSFLLNSLLSTFRLAELQCTQLDLERKLKLNENAISRLQANQKSVLVSVSEVKAVAEMQFGELLAAVRKAQANVMLFLEEKEQAALSQANGIKAHLEYRSAEMEKSKQELERMAAISNTVQFLERSMTSELKCLPLFSANIGLPNLSPAPGNSSSNMRMTSRLTRTQHTSISGCRRRTARSPTPRPGSIPTRTSPAGSCTGGRCCPSRVCTCTGTILRWRSSGQAPMLA

SEQ ID NO: 882163 - protein, 107 aa, Homo sapiens
PGGRARSGIWLLESREQSPPRTVLASRVPLPDLQSGWLGVYIDFPGGILSFYGVEYDTMTLVHKFACKFSEPVYAAFWLSKKENAIRIVDLGEEPEKPAPSLVGTAP

SEQ ID NO: 882164 - protein, 384 aa, Homo sapiens
MAELDLMAPGPLPRATAQPPAPLSPDSGSPSPDSGSASPVEEEDVGSSEKLGRETEEQDSDSAEQGDPAGEGKEVLCDFCLDDTRRVKAVKSCLTCMVNYCEEHLQPHQVNIKLQSHLLTEPVKDHNWRYCPAHHSPLSAFCCPDQQCICQDCCQEHSGHTIVSLDAARRDKEAELQCTQLDLERKLKLNENAISRLQANQKSVLVSVSEVKAVAEMQFGELLAAVRKAQANVMLFLEEKEQAALSQANGIKAHLEYRSAEMEKSKQELERMAAISNTVQFLEEYCKFKNTEDITFPSVYVGLKDKLSGIRKVITESTVHLIQLLENYKKKLQEFSKEEEYDIRTQVSAVVQRKYWTSKPEPSTREQFLQCKCHTVPRMDDQEP

SEQ ID NO: 882165 - protein, 207 aa, Homo sapiens [sequence omitted]

SEQ ID NO: 882166 - protein, 394 aa, Homo sapiens
PRPSGADRNVSVDSTHPTKKPGTRRPPLPPRPTHPRRKPLPPNNVTGKPGSAGIISSGPITTPPLRSTPRPTGTPLERIETDIKQPTVPASGEELENITDFSSSPTRETDPLGKPRFKGPHVRYIQKPDNSPCSITDSVKRFPKEEATEGNATSPPQNPPTNLTVVTVEGCPSFVILDWEKPLNDTVTEYEVISRENGSFSGKNKSIQMTNQTFSTVENLKPNTSYEFQVKPKNPLGEGPVSNTVAFSTESADPRVSEPVSAGRDAIWTERPFNSDSYSECKGKQYVKRTWYKKFVGVQLCNSLRYKIYLSDSLTGKFYNIGDQRGHGEDHCQFVDSFLDGRTGQQLTSDQLPIKEGYFRAVRQEPVQFGEIGGHTQINYVQWYECGTTIPGKW

SEQ ID NO: 882167 - protein, 394 aa, Homo sapiens; identical to SEQ ID NO: 882166

SEQ ID NO: 882168 - protein, 394 aa, Homo sapiens; identical to SEQ ID NO: 882166

SEQ ID NO: 882169 - protein, 1927 aa, Homo sapiens [sequence omitted]

SEQ ID NO: 882170 - protein, 1704 aa, Homo sapiens
MELSWHVVFIALLSFSCWGSDWESDRNFISTAGPLTNDLLHNLSGLLGDQSSNFVAGDKDMYVCHQPLPTFLPEYFSSLHASQITHYKVFLSWAQLLPAGSTQNPDEKTVQCYRRLLKALKTARLQPMVILHHQTLPASTLRRTEAFADLFADYATFAFHSFGDLVGIWFTFSDLEEVIKELPHQESRASQLQTLSDAHRKAYEIYHESYAFQGGKLSVVLRAEDIPELLLEPPISALAQDTVDFLSLDLSYECQNEASLRQKLSKLQTIEPKVKVFIFNLKLPDCPSTMKNPASLLFSLFEAINKDQVLTIGFDINEFLSCSSSSKKSMSCSLTGSLALQPDQQQDHETTDSSPASAYQRVWEAFANQSRAERDAFLQDTFPEGFLWGASTGAFNVEGGWAEGGRGVSIWDPRRPLNTTEGQATLEVASDSYHKVASDVALLCGLRAQVYKFSISWSRIFPMGHGSSPSLPGVAYYNKLIDRLQDAGIEPMATLFHWDLPQALQDHGGWQNESVVDAFLDYAAFCFSTFGDRVKLWVTFHEPWVMSYAGYGTGQHPPGISDPGVASFKVAHLVLKAHARTWHHYNSHHRPQQQGHVGIVLNSDWAEPLSPERPEDLRASERFLHFMLGWFAHPVFVDGDYPATLRTQIQQMNRQCSHPVAQLPEFTEAEKQLLKGSADFLGLSHYTSRLISNAPQNTCIPSYDTIGGFSQHVNHVWPQTSSSWIRVVPWGIRRLLQFVSLEYTRGKVPIYLAGNGMPIGESENLFDDSLRVDYFNQYINEVLKAIKEDSVDVRSYIARSLIDGFEGPSGYSQRFGLHHVNFSDSSKSRTPRKSAYFFTSIIEKNGFLTKGAKRLLPPNTVNLPSKVRAFTFPSEVPSKAKVVWEKFSSQPKFERDLFYHGTFRDDFLWGVSSSAYQIEGAWDADGKGPSIWDNFTHTPGSNVKDNATGDIACDSYHQLDADLNMLRALKVKAYRFSISWSRIFPTGRNSSINSHGVDYYNRLINGLVASNIFPMVTLFHWDLPQALQDIGGWENPALIDLFDSYADFCFQTFGDRVKFWMTFNEPMYLAWLGYGSGEFPPGVKDPGWAPYRIAHTVIKAHARVYHTYDEKYRQEQKGVISLSLSTHWAEPKSPGVPRDVEAADRMLQFSLGWFAHPIFRNGDYPDTMKWKVGNRSELQHLATSRLPSFTEEEKRFIRATADVFCLNTYYSRIVQHKTPRLNPPSYEDDQEMAEEEDPSWPSTAMNRAAPWGTRRLLNWIKEEYGDIPIYITENGVGLTNPNTEDTDRIFYHKTYINEALKAYRLDGIDLRGYVAWSLMDNFEWLNGYTVKFGLYHVDFNNTNRPRTARASARYYTEVITNNGMPLAREDEFLYGRFPEGFIWSAASAAYQIEGAWRADGKGLSIWDTFSHTPLRVENDAIGDVACDSYHKIAEDLVTLQNLGVSHYRFSISWSRILPDGTTRYINEAGLNYYVRLIDTLLAASIQPQVTIYHWDLPQTLQDVGGWENETIVQRFKEYADVLFQRLGDKVKFWITLNEPFVIAYQGYGYGTAAPGVSNRPGTAPYIVGHNLIKAHAEAWHLYNDVYRASQGGVISITISSDWAEPRDPSNQEDVEAARRYVQFMGGWFAHPIFKNGDYNEVMKTRIRDRSLAAGLNKSRLPEFTESEKRRINGTYDFFGFNHYTTVLAYNLNYATAISSFDADR

SEQ ID NO: 882171 - protein, 486 aa, Homo sapiens
ARGEKLQRAQAELENVSGALNEALLSSKDDVGKSVHELERACRVAEQAANDLRAQVTELEDELTAAEDAKLRLEVTVQALKTQHERDLQGRDEAGEERRRQLAKQLRDAEVERDEERKQRTLAVAARKKLEGELEELKAQMASAGQGKEEAVKQLRKMQAQMKELWREVEETRTSREEIFSQNRESEKRLKGLEAEVLRLQEELAASDRARRQAQQDRDEMADEVANGNLSKAAILEEKRQLEGRLGQLEEELEEEQSNSELLNDRYRKLLLQVESLTTELSAERSFSAKAESGRQQLERQIQELRGRLGEEDAGARARHKMTIAALESKLAQAEEQLEQETRERILSGKLVRRAEKRLKEVVLQVEEERRVADQLRDQLEKGNLRVKQLKRQLEEAEEEASRAQAGRRRLQRELEDVTESAESMNREVTTLRNRLRRGPLTFTTRTVRQVFRLEEGVASDEEAEEAQPGSGPSPEPEGSPPAHPQ

SEQ ID NO: 882172 - protein, 246 aa, Homo sapiens
HQGKGAWEKTRLALEAEVSELRAELSSLQTARQEGEQRRRRLELQLQEVQGRAGDGERARAEAAEKLQRAQAELENVSGALNEAESKTIRLSKELSSTEAQLHDAQELLQEETRAKLALGSRVRAMEAEAAGLREQLEEEAAARERAGRELQTAQAQLSEWRRRQEEEAGALEAGEEARRRAAREAEALTQRLAEKTETVDRLERGRRRLQQELDDATLSPDALTDGAQPPSSLDPTGPCPRNPAL

SEQ ID NO: 882173 - protein, 763 aa, Homo sapiens
HQGKGAWEKTRLALEAEVSELRAELSSLQTARQEGEQRRRRLELQLQEVQGRAGDGERARAEAAEKLQRAQAELENVSGALNEAESKTIRLSKELSSTEAQLHDAQELLQEETRAKLALGSRVRAMEAEAAGLREQLEEEAAARERAGRELQTAQAQLSEWRRRQEEEAGALEAGEEARRRAAREAEALTQRLAEKTETVDRLERGRRRLQQELDDATMDLEQQRQLVSTLEKKQRKFDQLLAEEKAAVLRAVEERERAEAEGREREARALSLTRALEEEQEAREELERQNRALRAELEALLSSKDDVGKSVHELERACRVAEQAANDLRAQVTELEDELTAAEDAKLRLEVTVQALKTQHERDLQGRDEAGEERRRQLAKQLRDAEVERDEERKQRTLAVAARKKLEGELEELKAQMASAGQGKEEAVKQLRKMQAQMKELWREVEETRTSREEIFSQNRESEKRLKGLEAEVLRLQEELAASDRARRQAQQDRDEMADEVANGNLSKAAILEEKRQLEGRLGQLEEELEEEQSNSELLNDRYRKLLLQVESLTTELSAERSFSAKAESGRQQLERQIQELRGRLGEEDAGARARHKMTIAALESKLAQAEEQLEQETRERILSGKLVRRAEKRLKEVVLQVEEERRVADQLRDQLEKGNLRVKQLKRQLEEAEEEASRAQAGRRRLQRELEDVTESAESMNREVTTLRNRLRRGPLTFTTRTVRQVFRLEEGVASDEEAEEAQPGSGPSPEPEGSPPAHPQ

SEQ ID NO: 882174 - protein, 763 aa, Homo sapiens; identical to SEQ ID NO: 882173

SEQ ID NO: 882175 - protein, 763 aa, Homo sapiens; identical to SEQ ID NO: 882173

SEQ ID NO: 882176 - protein, 270 aa, Homo sapiens
MDGDEMERGGNGNLSKAAILEEKRQLEGRLGQLEEELEEEQSNSELLNDRYRKLLLQVESLTTELSAERSFSAKAESGRQQLERQIQELRGRLGEEDAGARARHKMTIAALESKLAQAEEQLEQETRERILSGKLVRRAEKRLKEVVLQVEEERRVADQLRDQLEKGNLRVKQLKRQLEEAEEEASRAQAGRRRLQRELEDVTESAESMNREVTTLRNRLRRGPLTFTTRTVRQVFRLEEGVASDEEAEEAQPGSGPSPEPEGSPPAHPQ

SEQ ID NO: 882177 - protein, 763 aa, Homo sapiens; identical to SEQ ID NO: 882173

SEQ ID NO: 882178 - protein, 763 aa, Homo sapiens; identical to SEQ ID NO: 882173

SEQ ID NO: 882179 - protein, 763 aa, Homo sapiens; identical to SEQ ID NO: 882173

SEQ ID NO: 882180 - protein, 763 aa, Homo sapiens; identical to SEQ ID NO: 882173

SEQ ID NO: 882181 - protein, 767 aa, Homo sapiens
HQGKGAWEKTRLALEAEVSELRAELSSLQTARQEGEQRRRRLELQLQEVQGRAGDGERARAEAAEKLQRAQAELENVSGALNEAESKTIRLSKELSSTEAQLHDAQELLQEETRAKLALGSRVRAMEAEAAGLREQLEEEAAARERAGRELQTAQAQLSEWRRRQEEEAGALEAGEEARRRAAREAEALTQRLAEKTETVDRLERGRRRLQQELDDATMDLEQQRQLVSTLEKKQRKFDQLLAEEKAAVLRAVEERERAEAEGREREARALSLTRALEEEQEAREELERQNRALRAELEALLSSKDDVGKSVHELERACRVAEQAANDLRAQVTELEDELTAAEDAKLRLEVTVQALKTQHERDLQGRDEAGEERRRQLAKQLRDAEVERDEERKQRTLAVAARKKLEGELEELKAQMASAGQGKEEAVKQLRKMQAQMKELWREVEETRTSREEIFSQNRESEKRLKGLEAEVLRLQEELAASDRARRQAQQDRDEMADEVANGNLSKAAILEEKRQLEGRLGQLEEELEEEQSNSELLNDRYRKLLLQVESLTTELSAERSFSAKAESGRQQLERQIQELRGRLGEEDAGARARHKMTIAALESKLAQAEEQLEQETRERILSGKLVRRAEKRLKEVVLQVEEERRVADQLRDQLEKGNLRVKQLKRQLEEAEEEASRAQAGRRRLQRELEDVTESAESMNREVTTLRNRLRRGPLTFTTRTVRQVFRLEEGVASDEEAEEAQPGSGHPLSLLLLPMLCPPFWLL

SEQ ID NO: 882182 - protein, 1038 aa, Homo sapiens
EGIPACQTLAIILEVRLEAYVGLPSAGTARLSPLGWNNQPPRRLCLQVSITFKDLAVRFSEEEWRLLEEGQREFYRDVMRENYETLVSVGTAELLPLSAFLSPSEPGRAVGGGSHADEGQEPAGCGDPQGGQPRHSLHLTALVQLVKEIPEFLFGEVKGAMDSPESESRGASLDGERASPEAAAREPCPLRGLLSCLPDGPTSQPHLATTPTDSSCSSGPTGDGVQGSPLPIKTADKPWPTRKEGPGALGGEPSPPTHSPSRRKSHRGQERGTSEAGISPGNSPLQGLINCLKEILVPGPRHPETSPSFLPPLPSLGTSRLTRADLGPGSPPWAVKTEAVSGDCPLQGLLHCLKELPEAQDRHPSPSGVGNRRLQENPGAWKRGSGGPGYLLTPPPHPDLGAGGLLSVKMENSWVQSPPGPASCQPGRQPLSPSATGDTRGVPQPSWGPEAQAASASSSPLEALEACLKGIPPNGSSPSQLPPTSCSQNPQPGDSRSQKPELQPHRSHSEEATREPVLPLGLQSCVRDGPSRPLAARGSPTSFSSSSSTDWDLDFGSPVGNQGQHPGKGSPPGSSPLQGLENCLKEIPVPVLRPAWPCSSAADRGPRRAEPRNWTADKEGSAPKPSPLHCLESALRGILPVRPLRFACVGGPSPSPSPGSSSSFSGSEGEDPRPEPDLWKPLPQERDRLPSCKPPVPLSPCPGGTPAGSSGGSPGEDPRRTEPRYSSGSCPVSQLEKRPRVSEASRGLELGHGRPRVAAKTHERLLPQGPPELPSESPPPELPPPEAAPPVLPASSLQPPCHCGKPLQQELHSLGAALAEKLDRLATALAGLAQEVATMRTQVNRLGRRPQGPGPMGQASWMWTLPRGPRWAHGPGHRHLPYWRQKGPTRPKPKILRGQGESCRAGDLQGLSRGTARRARPLPPDAPPAEPPGLHCSSSQQLLSSTPSCHAAPPAHPLLAHTGGHQSPLPPLVPAALPLQGASPPAASADADVPTSGVAPDGIPERPKEPSSLLGGVQRALQEELWGGEHRDPRWGAH

SEQ ID NO: 882183 - protein, 1263 aa, Homo sapiens
MRENYETLVSVGTAELLPLSAFLSPSEPGRAVGGGSHADEGQEPAGCGDPQGGQPRHSLHLTALVQLVKEIPEFLFGEVKGAMDSPESESRGASLDGERASPEAAAREPCPLRGLLSCLPDGPTSQPHLATTPTDSSCSSGPTGDGVQGSPLPISESDTAGTGRTSISKALIVASEDLDPVPSSFFSRTQFPCCAVLLLTKYAREQDNIFSLWCNHQRGGMMLSPWGACHPAPITEHFVHRKSPAVSNMQPTASSIDLPVCTGLILRPSHHSNPNCRAGQGELLGFLWGLILFLKLLTNFDMSVFIKKYFKFIWNKIGTPKEHTPFSCGFIWCSGVVGHTCSGVLCALCVPWFEKRECEIVAYMSRLPASLPEPNSEAGLRGKGLGVFTVNQQSCCFQLNQKETVKALSPPRTGTWVAGEGFLYGNQIWCDFPESGAGARKALLSSPATETADKPWPTRKEGPGALGGEPSPPTHSPSRRKSHRGQERGTSEAGISPGNSPLQGLINCLKEILVPGPRHPETSPSFLPPLPSLGTSRLTRADLGPGSPPWAVKTEAVSGDCPLQGLLHCLKELPEAQDRHPSPSGVGNRRLQENPGAWKRGSGGPGYLLTPPPHPDLGAGGLLSVKMENSWVQSPPGPASCQPGRQPLSPSATGDTRGVPQPSWGPEAQAASASSSPLEALEACLKGIPPNGSSPSQLPPTSCSQNPQPGDSRSQKPELQPHRSHSEEATREPVLPLGLQSCVRDGPSRPLAARGSPTSFSSSSSTDWDLDFGSPVGNQGQHPGKGSPPGSSPLQGLENCLKEIPVPVLRPAWPCSSAADRGPRRAEPRNWTADKEGSAPKPSPLHCLESALRGILPVRPLRFACVGGPSPSPSPGSSSSFSGSEGEDPRPEPDLWKPLPQERDRLPSCKPPVPLSPCPGGTPAGSSGGSPGEDPRRTEPRYCSGLGAGTAQDPCPVSQLEKRPRVSEASRGLELGHGRPRVAAKTHERLLPQGPPELPSESPPPELPPPEAAPPVLPASSLQPPCHCGKPLQQELHSLGAALAEKLDRLATALAGLAQEVATMRTQVNRLGRRPQGPGPMGQASWMWTLPRGPRWAHGPGHRHLPYWRQKGPTRPKPKILRGQGESCRAGDLQGLSRGTARRARPLPPDAPPAEPPGLHCSSSQQLLSSTPSCHAAPPAHPLLAHTGGHQSPLPPLVPAALPLQGASPPAASADADVPTSGVAPDGIPERPKEPSSLLGGVQRALQEELWGGEHRDPRWGAH

SEQ ID NO: 882184 - protein, 164 aa, Homo sapiens
SAYKPLLKSRLYGPESRHRGRLCLKNNNQIKYFKFGSSFFQERLFGYLEYLHVCGLISVSGKGGREERQQPCSRVCPEMSLSPDTWAARALQMTKAGSSAHVQEGLKPILSFCSCCFNLNDYSPVKIIWEGRVLFGVCVCVCVCVCVYFFFYSGACLKYFSQHV

SEQ ID NO: 882185 - protein, 202 aa, Homo sapiens
MALTFPWEISSLWKSVPVALGEVSEKRGQDEHSRLSWVQLRPWRVRDCAPFHTCVACCCLWAFSFRGAWCVRAWRERTGVGVGGGSPTPVPVWPEPAPSRERPSRGASVITCCCSLPRGDYMSSGLPVATLMGDLCLLLGHCRLASSIQADVCRERRVLGLHHVLVTNRGRLLAWSAQAGPDPRGFLASETQRILPVSGSVL

SEQ ID NO: 882186 - protein, 354 aa, Homo sapiens
CGSAVRADLPRPEVAPLRGLPRPKFSAPRGLRAPRSPRPEVSARTMRLGSPGLLFLLFSSLRADTQEKEVRAMVGSDVELSCACPEGSRFDLNDVYVYWQTSESKTVVTYHIPQNSSLENVDSRYRNRALMSPAGMLRGDFSLRLFNVTPQDEQKFHCLVLSQSLGFQEVLSVEVTLHVAANFSVPVVSAPHSPSQDELTFTCTSINGYPRPNVYWINKTDNSLLDQALQNDTVFLNMRGLYDVVSVLRIARTPSVNIGCCIENVLLQQNLTVGSQTGNDIGERDKITENPVSTGEKNAATWSILAVLCLLVVVAVAIGWVCRDRCLQHSYAGAWAVSPETELTESWNLLLLLS

SEQ ID NO: 882187 - protein, 123 aa, Homo sapiens
MLSPISRAGQAWPFTPRILLRTATNSPPSHHDPCHTGALVALVAWAVALLPATLSEDPGSLGATQLLCGELAPGVMRALPNPPSALGQPGSPGAVCIQTSQGSSQLGPLSPQNPGTCSFCSRD

SEQ ID NO: 882188 - protein, 123 aa, Homo sapiens; identical to SEQ ID NO: 882187

SEQ ID NO: 882189 - protein, 347 aa, Homo sapiens
CGSAVRADLPRPEVAPLRGLPRPKFSAPRGLRAPRSPRPEVSARTMRLGSPGLLFLLFSSLRADTQEKEVRAMVGSDVELSCACPEGSRFDLNDVYVYWQTSESKTVVTYHIPQNSSLENVDSRYRNRALMSPAGMLRGDFSLRLFNVTPQDEQKFHCLVLSQSLGFQEVLSVEVTLHVAANFSVPVVSAPHSPSQDELTFTCTSINGYPRPNVYWINKTDNSLLDQALQNDTVFLNMRGLYDVVSVLRIARTPSVNIGCCIENVLLQQNLTVGSQTGNDIGERDKITENPVSTGEKNAATWSILAVLCLLVVVAVAIGWVCRDRCLQHSYAGAWAVSPETELTGHV

SEQ ID NO: 882190 - protein, 718 aa, Homo sapiens
ETTVPFWRFFVLETWQVLNQQNIPQISIVVDGGKKVVEFMFQATEGDVLNYIFRNRELRPLFDRQWHKLGISIQSQVISLYMDCNLIARRQTDEKDTVDFHGRTVIATRASDGKPVDIELHQLKIYCSANLIAQETCCEISDTKCPEQDGFGNIASSWVTAHASKMSSYLPAKQELKDQCQCIPNKGEAGLPGAPGSPGQKGHKGEPGENGLHGAPGFPGQKGEQGFEGSKGETGEKGEQGEKGDPALAGLNGENGLKGDLGPHGPPGPKGEKGDTGPPGPPALPGSLGIQGPQGPPGKEGQRGRRGKTGPPGKPGPPGPPGPPGIQGIHQTLGGYYNKDNKGNDEHEAGGLKGDKGETGLPGFPGSVGPKGQKGEPGEPFTKGEKGDRGEPGVIGSQGVKGEPGDPGPPGLIGSPGLKGQQGSAGSMGPRGPPGDVGLPGEHGIPGKQGIKGEKGDPGGIIGPPGLPGPKGEAGPPGKSLPGEPGLDGNPGAPGPRGPKGERGLPGVHGSPGDIGPQGIGIPGRTGAQGPAGEPGIQGPRGLPGLPGTPGTPGNDGVPGRDGKPGLPGPPGDPIALPLLGDIGALLKNFCGNCQASVPGLKSNKGEEGGAGEPGKYDSMARKGDIGPRGPPGIPGREGPKGSKGERGYPGIPGEKGDEGLQGIPGIPGAPGPTGPPGLMGRTGHPGPTGAKGEKGSDGPPGKPGPPGPPVSCSRLKI

SEQ ID NO: 882191 - protein, 249 aa, Homo sapiens
ETTVPFWRFFVLETWQVLNQQNIPQISIVVDGGKKVVEFMFQATEGDVLNYIFRNRELRPLFDRQWHKLGISIQSQVISLYMDCNLIARRQTDEKDTVDFHGRTVIATRASDGKPVDIELHQLKIYCSANLIAQETCCEISDTKCPEQDGFGNIASSWVTAHASKMSSYLPAKQELKDQCQCIPNKGEAGLPGAPGSPGQKGHKGEPGENGLHGAPGFPGQKGEQGFEGSKGETGEKELPACELLSQSM

SEQ ID NO: 882192 - protein, 357 aa, Homo sapiens
ETTVPFWRFFVLETWQVLNQQNIPQISIVVDGGKKVVEFMFQATEGDVLNYIFRNRELRPLFDRQWHKLGISIQSQVISLYMDCNLIARRQTDEKDTVDFHGRTVIATRASDGKPVDIELHQLKIYCSANLIAQETCCEISDTKCPEQDGFGNIASSWVTAHASKMSSYLPAKQELKDQCQCIPNKGEAGLPGAPGSPGQKGHKGEPGENGLHGAPGFPGQKGEQGFEGSKGETGEKGEQGEKGDPALAGLNGENGLKGDLGPHGPPGPKGEKGDTGPPGPPALPGSLGIQGPQGPPGKEGQRGRRGKTGPPGKPGPPGPPGPPGIQGIHQTLGGYYNKDNKGNDEHEAGGLKGDKV

SEQ ID NO: 882193 - protein, 1142 aa, Homo sapiens
MRLTGPWKLWLWMSIFLLPASTSVTVRDKTEESCPILRIEGHQLTYDNINKLEVSGFDLGDSFSLRRAFCESDKTCFKLGSALLIRDTIKIFPKGLPEEYSVAAMFRVRRNAKKERWFLWQVLNQQNIPQISIVVDGGKKVVEFMFQATEGDVLNYIFRNRELRPLFDRQWHKLGISIQSQVISLYMDCNLIARRQTDEKDTVDFHGRTVIATRASDGKPVDIELHQLKIYCSANLIAQETCCEISDTKCPEQDGFGNIASSWVTAHASKMSSYLPAKQELKDQCQCIPNKGEAGLPGAPGSPGQKGHKGEPGENGLHGAPGFPGQKGEQGFEGSKGETGEKGEQGEKGDPALAGLNGENGLKGDLGPHGPPGPKGEKGDTGPPGPPALPGSLGIQGPQGPPGKEGQRGRRGKTGPPGKPGPPGPPGPPGIQGIHQTLGGYYNKDNKGNDEHEAGGLKGDKGETGLPGFPGSVGPKGQKGEPGEPFTKGEKGDRGEPGVIGSQGVKGEPGDPGPPGLIGSPGLKGQQGSAGSMGPRGPPGDVGLPGEHGIPGKQGIKGEKGDPGGIIGPPGLPGPKGEAGPPGKSLPGEPGLDGNPGAPGPRGPKGERGLPGVHGSPGDIGPQGIGIPGRTGAQGPAGEPGIQGPRGLPGLPGTPGTPGNDGVPGRDGKPGLPGPPGDPIALPLLGDIGALLKNFCGNCQASVPGLKSNKGEEGGAGEPGKYDSMARKGDIGPRGPPGIPGREGPKGSKGERGYPGIPGEKGDEGLQGIPGIPGAPGPTGPPGLMGRTGHPGPTGAKGEKGSDGPPGKPGPPGPPGIPFNERNGMSSLYKIKGGVNVPSYPGPPGPPGPKGDPGPVGEPGAMGLPGLEGFPGVKGDRGPAGPPGIAGMSGKPGAPGPPGVPGEPGERGPVGDIGFPGPEGPSGKPGINGKDGIPGAQGIMGKPGDRGPKGERGDQGIPGDRGSQGERGKPGLTGMKGAIGPMGPPGNKGSMGSPGHQGPPGSPGIPGIPADAVSFEEIKKYINQEVLRIFEERMAVFLSQLKLPAAMLAAQAYGRPGPPGKDGLPGPPGDPGPQGYRGQKGERGEPGIGLPGSPGLPGTSALGLPGSPGAPGPQGPPGPSGRCNPEDCLYPVSHAHQRTGGN

SEQ ID NO: 882194 - protein, 72 aa, Homo sapiens
RRRAAQLGRCRVARKFVGPEPSTPSGTLAPREQAGASVAVHMVSRHNETHWPLETLALDVNISASCFHFRDR

SEQ ID NO: 882195 - protein, 218 aa, Homo sapiens
HTWTFFISSNETASAGMPGMPGGPKGERGDQGIPGDRGSQGERGKPGLTGMKGAIGPMGPPGNKGSMGSPGHQGPPGSPGIPGIPADAVSFEEIKKYINQEVLRIFEERMAVFLSQLKLPAAMLAAQAYGRPGPPGKDGLPGPPGDPGPQGYRGQKGERGEPGIGLPGSPGLPGTSALGLPGSPGAPGPQGPPGPSGRCNPEDCLYPVSHAHQRTGGN

SEQ ID NO: 882196 - protein, 141 aa, Homo sapiens
MAGMKIQLVCMLLLAFSSWSLCSDSEEEMKALEADFLTNMHTSKISKAHVPSWKMTLLNVCSLVNNLNSPAEETGEVHEEELVARRKLPTALDGFSLEAMLTIYQLHKICHSRAFQHWELIPRKNILLYTVEMTKMERKKS

SEQ ID NO: 882197 - protein, 141 aa, Homo sapiens; identical to SEQ ID NO: 882196

SEQ ID NO: 882198 - protein, 70 aa, Homo sapiens
  misc_feature (7)..(7): Xaa can be any naturally occurring amino acid
EQMEKMXSREKRALLMPVNTQEEYSFVYRGNDKNGKEEVIKRKIPYILKRQLYENKPRRPYILKRDSYYY

SEQ ID NO: 882199 - protein, 70 aa, Homo sapiens
ARTLLMHSALTHDRRRLINTQEEYSFVYRGNDKNGKEEVIKRKIPYILKRQLYENKPRRPYILKRDSYYY

SEQ ID NO: 882200 - protein, 71 aa, Homo sapiens
LEWPTTCTLRLITKLIDNINTQEEYSFVYRGNDKNGKEEVIKRKIPYILKRQLYENKPRRPYILKRDSYYY

SEQ ID NO: 882201 - protein, 141 aa, Homo sapiens; identical to SEQ ID NO: 882196

SEQ ID NO: 882202 - protein, 141 aa, Homo sapiens; identical to SEQ ID NO: 882196

SEQ ID NO: 882203 - protein, 73 aa, Homo sapiens
DSDEEVAFKKTEEGAAYGTEVNTQEEYSFVYRGNDKNGKEEVIKRKIPYILKRQLYENKPRRPYILKRDSYYY

SEQ ID NO: 882204 - protein, 80 aa, Homo sapiens
  misc_feature (10)..(10): Xaa can be any naturally occurring amino acid
  misc_feature (15)..(15): Xaa can be any naturally occurring amino acid
  misc_feature (25)..(25): Xaa can be any naturally occurring amino acid
VMIPGKQEYXSRGNXARGGCASVNXSEINTQEEYSFVYRGNDKNGKEEVIKRKIPYILKRQLYENKPRRPYILKRDSYYY

SEQ ID NO: 882205 - protein, 73 aa, Homo sapiens
  misc_feature (10)..(10): Xaa can be any naturally occurring amino acid
  misc_feature (15)..(16): Xaa can be any naturally occurring amino acid
LMLFTYRSRXYIRGXXSLDNINTQEEYSFVYRGNDKNGKEEVIKRKIPYILKRQLYENKPRRPYILKRDSYYY

SEQ ID NO: 882206 - protein, 141 aa, Homo sapiens; identical to SEQ ID NO: 882196

SEQ ID NO: 882207 - protein, 141 aa, Homo sapiens; identical to SEQ ID NO: 882196

SEQ ID NO: 882208 - protein, 336 aa, Homo sapiens
RVSKEGSAPPPGSPGELIEGSFPPFAVPTPVPTTQERVSQSMENQEKASIAGHMFDVVVIGGGISGLSAAKLLTEYGVSVLVLEARDRVGGRTYTIRNEHVDYVDVGGAYVGPTQNRILRLSKELGIETYKVNVSERLVQYVKGKTYPFRGAFPPVWNPIAYLDYNNLWRTIDNMGKEIPTDAPWEAQHADKWDKMTMKELIDKICWTKTARRFAYLFVNINVTSEPHEVSALWFLWYVKQCGGTTRIFSVTNGGQERKLEVDRSVERKGLMGPPSGEPRGKLEPFRVPHGGPRPGDTLHHKKRRNQEHYEMAQTAMKGTLRTGMANAFDQKIPER

SEQ ID NO: 882209 - protein, 321 aa, Homo sapiens
MEFLTFLKSDYTHANLVDKALQLLKERILKGDTLAYFLRGQLYFEEGWYEEALEQFEEIKEKDHQATYQLGVMYYDGLGTTLDAEKGVDYMKKILDSPCPKARHLKFAAAYNLGRAYYEGKGVKRSNEEAERLWLIAADNGNPKASVKAQSMLGLYYSTKEPKELEKAFYWHSEACGNGNLESQGALGLMYLYGQGIRQDTEAALQCLREAAERGNVYAQGNLVEYYYKMKFFTKCVAFSKRIADYDEVHDIPMIAQVTDCLPEFIGRGMAMASFYHARCLQLGLGITRDETTAKHYYSKACRLNPALADELHSLLIRQRI

SEQ ID NO: 882210 - protein, 347 aa, Homo sapiens
MKLTSEKLPKNPFYASVSQYAAKNQKFFQWKKEKTDYTHANLVDKALQLLKERILKGDTLAYFLRGQLYFEEGWYEEALEQFEEIKEKDHQATYQLGVMYYDGLGTTLDAEKGVDYMKKILDSPCPKARHLKFAAAYNLGRAYYEGKGVKRSNEEAERLWLIAADNGNPKASVKAQSMLGLYYSTKEPKELEKAFYWHSEACGNGNLESQGALGLMYLYGQGIRQDTEAALQCLREAAERGNVYAQGNLVEYYYKMKFFTKCVAFSKRIADYDEVHDIPMIAQVTDCLPEFIGRGMAMASFYHARCLQLGLGITRDETTAKHYYSKACRLNPALADELHSLLIRQRI

SEQ ID NO: 882211 - protein, 170 aa, Homo sapiens [sequence omitted]

SEQ ID NO: 882212 - protein, 249 aa, Homo sapiens
MYYDGLGTTLDAEKGVDYMKKILDSPCPKARHLKFAAAYNLGRAYYEGKGVKRSNEEAERLWLIAADNGNPKASVKAQSMLGLYYSTKEPKELEKAFYWHSEACGNGNLESQGALGLMYLYGQGIRQDTEAALQCLREAAERGNVYAQGNLVEYYYKMKFFTKCVAFSKRIADYDEVHDIPMIAQVTDCLPEFIGRGMAMASFYHARCLQLGLGITRDETTAKHYYSKACRLNPALADELHSLLIRQRI

SEQ ID NO: 882213 - protein, 504 aa, Homo sapiens
MLKMAEPIASLMIVECRACLRCSPLFLYQREKDRMTENMKECLAQTNAAVGDMVTVVNPSQEYGQPCSRRPDSSAMEVEPKKLKGKRDLIVPKSFQQVDFWFCESCQEYFVDECPNHGPPVFVSDTPVPVGIPDRAALTIPQGMEVVKDTSGESDVRCVNEVIPKGHIFGPYEGQISTQDKSAGFFSWLIVDKNNRYKSIDGSDETKANWMRYVVISREEREQNLLAFQHSERIYFRACRDIRPGEWLRVWYSEDYMKRLHSMSQETIHRNLARGEKRLQREKSEQVLDNPEDLRGPIHLSVLRQGKSPYKRGFDEGDVHPQAKKKKIDLIFKDVLEASLESAKVEAHQLALSTSLVIRKVPKYQDDAYSQCATTMTHGVQNIGQTQGEGDWKVPQGVSKEPGQLEDEEEEPSSFKADSPAEASLASDPHELPTTSFCPNCIRLKKKVRELQAELDMLKSGKLPEPPVLPPQVLELPEFSDPAGKLVWMRLLSEGRVRSGLCGG

SEQ ID NO: 882214 - protein, 511 aa, Homo sapiens
MLKMAEPIASLMIVECRACLRCSPLFLYQREKDRMTENMKECLAQTNAAVGDMVTVVKTEVCSPLRDQEYGQPCSRRPDSSAMEVEPKKLKGKRDLIVPKSFQQVDFWFCESCQEYFVDECPNHGPPVFVSDTPVPVGIPDRAALTIPQGMEVVKDTSGESDVRCVNEVIPKGHIFGPYEGQISTQDKSAGFFSWLIVDKNNRYKSIDGSDETKANWMRYVVISREEREQNLLAFQHSERIYFRACRDIRPGEWLRVWYSEDYMKRLHSMSQETIHRNLARGEKRLQREKSEQVLDNPEDLRGPIHLSVLRQGKSPYKRGFDEGDVHPQAKKKKIDLIFKDVLEASLESAKVEAHQLALSTSLVIRKVPKYQDDAYSQCATTMTHGVQNIGQTQGEGDWKVPQGVSKEPGQLEDEEEEPSSFKADSPAEASLASDPHELPTTSFCPNCIRLKKKVRELQAELDMLKSGKLPEPPVLPPQVLELPEFSDPAGKLVWMRLLSEGRVRSGLCGG

SEQ ID NO: 882215 - protein, 309 aa, Homo sapiens
MLKMAEPIASLMIVECRACLRCSPLFLYQREKDRMTENMKECLAQTNAAVGDMVTVVKTEVCSPLRDQEYGQPCSRRPDSSAMEVEPKKLKGKRDLIVPKSFQQVDFWFCESCQEYFVDECPNHGPPVFVSDTPVPVGIPDRAALTIPQGMEVVKDTSGESDVRCVNEVIPKGHIFGPYEGQISTQDKSAGFFSWLIVDKNNRYKSIDGSDETKANWMRNVAHLAERKRKPKFSKEELDILVTEVTHHEAVLFGRETMRLSHADRDKIWEGIARKITSVSQVPRSVKDIKHRWDDLKRRTKDKLAFMQQ

SEQ ID NO: 882216 - protein, 202 aa, Homo sapiens
MAAPWRRWPTGLLAVLRPLLTCRPLQGTTLQRDVLLFEHDRGRFFTILGLFCAGQGVFWASMAVAAVSRPPVPVQPLDAEVPNRGPFDLRSALWRYGLAVGCGAIGALVLGAGLLFSLRSVRSVVLRAGGQQVTLTTHAPFGLGAHFTVPLKQVSCMAHRGEVPAMLPLKVKGRRFYFLLDKTGHFPNTKLFDNTVGAYRSL

SEQ ID NO: 882217 - protein, 169 aa, Homo sapiens
NRLERPGVNRTRYILGLFCAGQGVFWASMAVAAVSRPPVPVQPLDAEVPNRGPFDLRSALWRYGLAVGCGAIGALVLGAGLLFSLRSVRSVVLRAGGQQVTLTTHAPFGLGAHFTVPLKQVSCMAHRGEVPAMLPLKVKGRRFYFLLDKTGHFPNTKLFDNTVGAYRSL

SEQ ID NO: 882218 - protein, 37 aa, Homo sapiens
MLPLKVKGRRFYFLLDKTGHFPNTKLFDNTVGAYRSL

SEQ ID NO: 882219 - protein, 106 aa, Homo sapiens
MAAPWRRWPTGLLAVLRPLLTCRPLQGTTLQRDVLLFEHDRGRFFTILGLFCAGQGVFWASMAVAAVSRPPVPVQPLDAEVPNRGPFDLRSALWRYGLAVGCGAIA

SEQ ID NO: 882220 - protein, 137 aa, Homo sapiens
MAAPWRRWPTGLLAVLRPLLTCRPLQGTTLQRDVLLFEHDRGRFFTILGLFCAGQGVFWASMAVAAVSRPPVPVQPLDAEVPNRGPFDLRSALWRYGLAVGCGAIGYSTIRNRQKQQLMTHSNNAQHQKARKSNLRG

SEQ ID NO: 882221 - protein, 314 aa, Homo sapiens
WGRLRQAGRKPGGGVQEPRPPGLDSAGGGAAGGACGSGNPDPAPFPTPPFLAMAPALLLIPAALASFILAFGTGVEFVRFTSLRPLLGGIPESGGPDARQGWLAALQDRSILAPLAWDLGLLLLFVGQHSLMAAERVKAWTSRYFGVLQRSLYVACTALALQLVMRYWEPIPKGPVLWEARAEPWATWVPLLCFVLHVISWLLIFSILLVFDYAELMGLKQVYYHVLGLGEPLALKSPRALRLFSHLRHPVCVELLTVLWVVPTLGTDRLLLAFLLTLYLGLAHGLDQQDLRYLRAQLQRKLHLLSRPQDGEAE

SEQ ID NO: 882222 - protein, 314 aa, Homo sapiens; identical to SEQ ID NO: 882221

SEQ ID NO: 882223 - protein, 279 aa, Homo sapiens
SATRGSKEAVLYGSKVARLGGPLLIPAALASFILAFGTGVEFVRFTSLRPLLGGIPESGGPDARQGWLAALQDRSILAPLAWDLGLLLLFVGQHSLMAAERVKAWTSRYFGVLQRSLYVACTALALQLVMRYWEPIPKGPVLWEARAEPWATWVPLLCFVLHVISWLLIFSILLVFDYAELMGLKQVYYHVLGLGEPLALKSPRALRLFSHLRHPVCVELLTVLWVVPTLGTDRLLLAFLLTLYLGLAHGLDQQDLRYLRAQLQRKLHLLSRPQDGEAE

SEQ ID NO: 882224 - protein, 314 aa, Homo sapiens; identical to SEQ ID NO: 882221

SEQ ID NO: 882225 - protein, 314 aa, Homo sapiens; identical to SEQ ID NO: 882221

SEQ ID NO: 882226 - protein, 321 aa, Homo sapiens
WGRLRQAGRKPGGGVQEPRPPGLDSAGGGAAGGACGSGNPDPAPFPTPPFLAMAPALLLIPAALASFILAFGTGVEFVRFTSLRPLLGGIPESGGPDARQGWLAALQDRSILAPLAWDLGLLLLFVGQHSLMAAERVKAWTSRYFGVLQRSLYVACTALALQDEALALQLVMRYWEPIPKGPVLWEARAEPWATWVPLLCFVLHVISWLLIFSILLVFDYAELMGLKQVYYHVLGLGEPLALKSPRALRLFSHLRHPVCVELLTVLWVVPTLGTDRLLLAFLLTLYLGLAHGLDQQDLRYLRAQLQRKLHLLSRPQDGEAE

SEQ ID NO: 882227 - protein, 261 aa, Homo sapiens
ESGREATGEGDLSSKLGTQGLEFWRGGRVRTEGAEKGGDRSILNARQGWLAALQDRSILAPLAWDLGLLLLFVGQHSLMAAERVKAWTSRYFGVLQRSLYVACTALALQLVMRYWEPIPKGPVLWEARAEPWATWVPLLCFVLHVISWLLIFSILLVFDYAELMGLKQVYYHVLGLGEPLALKSPRALRLFSHLRHPVCVELLTVLWVVPTLGTDRLLLAFLLTLYLGLAHGLDQQDLRYLRAQLQRKLHLLSRPQDGEAE

SEQ ID NO: 882228 - protein, 150 aa, Homo sapiens
MRYWEPIPKGPVLWEARAEPWATWVPLLCFVLHVISWLLIFSILLVFDYAELMGLKQVYYHVLGLGEPLALKSPRALRLFSHLRHPVCVELLTVLWVVPTLGTDRLLLAFLLTLYLGLAHGLDQQDLRYLRAQLQRKLHLLSRPQDGEAE

SEQ ID NO: 882229 - protein, 150 aa, Homo sapiens; identical to SEQ ID NO: 882228

SEQ ID NO: 882230 - protein, 255 aa, Homo sapiens
WGRLRQAGRKPGGGVQEPRPPGLDSAGGGAAGGACGSGNPDPAPFPTPPFLAMAPALLLIPAALASFILAFGTGVEFVRFTSLRPLLGGIPESGGPDARQGWLAALQDRSILAPLAWDLGLLLLFVGQHSLMAAERVKAWTSRYFGVLQRSLYVACTALALQVYYHVLGLGEPLALKSPRALRLFSHLRHPVCVELLTVLWVVPTLGTDRLLLAFLLTLYLGLAHGLDQQDLRYLRAQLQRKLHLLSRPQDGEAE

SEQ ID NO: 882231 - protein, 126 aa, Homo sapiens
SATRGSKEAVLYGSKVARLGGPLLIPAALASFILAFGTGVEFVRFTSLRPLLGGIPESGGPGILPCAGAGRASGPEVSPGSQTLLPPAPPSVCGAADSAVGGAYPGHGPSPPCFPPYPLPGPGSRA

SEQ ID NO: 882232 - protein, 134 aa, Homo sapiens
MGKAAPGGPEAWRWRAGAPPSWAGFSRGRGRGRGLWQRESRPRPFPHPSISRHGPCTAPDPCCPRLFHPGLWHRSGVRALYLPSATSWRDPGVWWSGCPPGMAGCPAGPQHPCPPGMGSGAPASICWAAQPHGS

SEQ ID NO: 882233 - protein, 306 aa, Homo sapiens
PAAAAGREAMEPRALVTALSLGLSLCSLGLLVTAIFTDHWYETDPRRHKESCERSRAGADPPDQKNRLMPLSHLPLRDSPPLGRRLLPGGPGRADPESWRSLLGLGGLDAECGRPLFATYSGLWRKCYFLGIDRDIDTLILKGIAHDCTAIKYHFSQPIRLRNIPFNLTKTIQQDEWHLLHLRRITAGFLGMAVAVLLCGCIVATVSFFWEESLTQHVAGLLFLMTGIFCTISLCTYAASISYDLNRLPKLIYSLPADVEHGYSWSIFCAWCSLGFIVAAGGLCIAYPFISRTKIAQLKSGRDSTV

SEQ ID NO: 882234 - protein, 211 aa, Homo sapiens
ESVRGRVGEKSGESRDRVKGREEDEGGEERLKGEGGSLERRAELWIGGIAHDCTAIKYHFSQPIRLRNIPFNLTKTIQQDEWHLLHLRRITAGFLGMAVAVLLCGCIVATVSFFWEESLTQHVAGLLFLMTGIFCTISLCTYAASISYDLNRLPKLIYSLPADVEHGYSWSIFCAWCSLGFIVAAGGLCIAYPFISRTKIAQLKSGRDSTV

SEQ ID NO: 882235 - protein, 177 aa, Homo sapiens
TLSPALSSFCDDAGIAHDCTAIKYHFSQPIRLRNIPFNLTKTIQQDEWHLLHLRRITAGFLGMAVAVLLCGCIVATVSFFWEESLTQHVAGLLFLMTGIFCTISLCTYAASISYDLNRLPKLIYSLPADVEHGYSWSIFCAWCSLGFIVAAGGLCIAYPFISRTKIAQLKSGRDSTV

SEQ ID NO: 882236 - protein, 604 aa, Homo sapiens
NSSKPLYLGQTGLGNIEELGKLGLEPGENFCMGGPGMIFSREVLRRMVPHIGECLREMYTTHEDVEVGRCVRRFGGTQCVWSYEMQQLFHENYEHNRKGYIQDLHNSKIHAAITLHPNKRPAYQYRLHNYMLSRKISELRYRTIQLHRESALMSKLSNTEVSKEDQQLGVIPSFNHFQPRERNEVIEWEFLTGKLLYSAAENQPPRQSLSSILRTALDDTVLQVMEMINENAKSRGRLIDFKEIQYGYRRVNPMHGVEYILDLLLLYKRHKGRKLTVPVRRHAYLQQLFSKPFFRETEELDVNSLVESINSETQSFSFISNSLKILSSFQGAKEMGGHNEKKVHILVPLIGRYDIFLRFMENFENMCLIPKQNVKLVIILFSRDSGQDSSKHIELIKGYQNKYPKAEMTLIPMKGEFSRGLGLEMASAQFDNDTLLLFCDVDLIFREDFLQRCRDNTIQGQQVYYPIIFSQYDPKVTNGGNPPTDGYFIFSKKTGFWRDYGYGITCIYKSDLLGAGGFDTSIQGWGLEDVDLYNKVILSGLRPFRSQEVGVVHIFHPVHCDPNLDPKQYKMCLGSKASTFASTMQLAELWLEKHLGVRYNRTLS

SEQ ID NO: 882237 - protein, 622 aa, Homo sapiens [sequence omitted]

SEQ ID NO: 882238 - protein, 98 aa, Homo sapiens
VTKVSKEEMTVVWNPPEYDGGKSITGYFLEKKEKHSTRWVPVNKSAIPERRMKVQNLLPDHEYQFRVKAENEIGIGEPSLPSRPVVAKDPIGRMSLFF

SEQ ID NO: 882239 - protein, 1223 aa, Homo sapiens
MRSRSNSGVRLDGYARLVQQTILCHQNPVTGLLPASYDQKDAWVRDNVYSILAVWGLGLAYRKNADRDEDKAKAYELEQSVVKLMRGLLHCMIRQVDKVESFKYSQSTKDSLHAKYNTKTCATVVGDDQWGHLQLDATSVYLLFLAQMTASGLHIIHSLDEVNFIQNLVFYIEAAYKTADFGIWERGDKTNQGISELNASSVGMAKAALEALDELDLFGVKGGPQSVIHVLADEVQHCQSILNSLLPRASTSKEVDASLLSVVSFPAFAVEDSQLVELTKQEIITKLQGRYGCCRFLRDGYKTPKEDPNRLYYEPAELKLFENIECEWPLFWTYFILDGVFSGNAEQVQEYKEALEAVLIKGKNGVPLLPELYSVPPDRVDEEYQNPHTVDRVPMGKLPHMWGQSLYILGSLMAEGFLAPGEIDPLNRRFSTVPKPDVVVQVSILAETEEIKTILKDKGIYVETIAEVYPIRVQPARILSHIYSSLGCNNRMKLSGRPYRHMGVLGTSKLYDIRKTIFTFTPQFIDQQQFYLALDNKMIVEMLRTDLSYLCSRWRMTGQPTITFPISHSMLDEDGTSLNSSILAALRKMQDGYFGGARVQTGKLSEFLTTSCCTHLSFMDPGPEGKLYSEDYDDNYDYLESGNWMNDYDSTSHARCGDEVARYLDHLLAHTAPHPKLAPTSQKGGLDRFQAAVQTTCDLMSLVTKAKELHVQNVHMYLPTKLFQASRPSFNLLDSPHPRQENQVPSVRVEIHLPRDQSGEVDFKALVLQLKETSSLQEQADILYMLYTMKGPDWNTELYNERSATVRELLTELYGKVGEIRHWGLIRYISGILRKKVEALDEACTDLLSHQKHLTVGLPPEPREKTISAPLPYEALTQLIDEASEGDMSISILTQEIMVYLAMYMRTQPGLFAEMFRLRIGLIIQVMATELAHSLRCSAEEATEGLMNLSPSAMKNLLHHILSGKEFGVERSVRPTDSNVSPAISIHEIGAVGATKTERTGIMQLKSEIKQVEFRRLSISAESQSPGTSMTPSSGSFPSAYDQQSSKDSRQGQWQRRRRLDGALNRVPVGFYQKVWKVLQKCHGLSVEGFVLPSSTTREMTPGEIKFSVHVESVLNRVPQPEYRQLLVEAILVLTMLADIEIHSIGSIIAVEKIVHIANDLFLQEQKTLGADDTMLAKDPASGICTLLYDSAPSGRFGTMTYLSKAAATYVQEFLPHSICAMQ

SEQ ID NO: 882240 - protein, 1223 aa, Homo sapiens; identical to SEQ ID NO: 882239

SEQ ID NO: 882241 - protein, 1210 aa, Homo sapiens
MRSRSNSGVRLDGYARLVQQTILCHQNPVTGLLPASYDQKDAWVRDNVYSILAVWGLGLAYRKNADRDEDKAKAYELEQSVVKLMRGLLHCMIRQVDKVESFKYSQSTKDSLHAKYNTKTCATVVGDDQWGHLQLDATSVYLLFLAQMTASGLHIIHSLDEVNFIQNLVFYIEAAYKTADFGIWERGDKTNQGISELNASSVGMAKAALEALDELDLFGVKGGPQSVIHVLADEVQHCQSILNSLLPRASTSKEVDASLLSVVSFPAFAVEDSQLVELTKQEIITKLQGRYGCCRFLRDGYKTPKEDPNRLYYEPAELKLFENIECEWPLFWTYFILDGVFSGNAEQVQEYKEALEAVLIKGKNGVPLLPELYSVPPDRVDEEYQNPHTVDRVPMGKLPHMWGQSLYILGSLMAEGFLAPGEIDPLNRRFSTVPKPDVVVQVSILAETEEIKTILKDKGIYVETIAEVYPIRVQPARILSHIYSSLGCNNRMKLSGRPYRHMGVLGTSKLYDIRKTIFTFTPQFIDQQQFYLALDNKMIVEMLRTDLSYLCSRWRMTGQPTITFPISHSMLDEDGTSLNSSILAALRKMQDGYFGGARVQTGKLSEFLTTSCCTHLSFMDPGPEGKLYSEDYDDNYDYLESGNWMNDYDSTSHARCGDEVARYLDHLLAHTAPHPKLAPTSQKGGLDRFQAAVQTTCDLMSLVTKAKELHVQNVHMYLPTKLFQASRPSFNLLDSPHPRQENQVPSVRVEIHLPRDQSGEVDFKALVLQLKETSSLQEQADILYMLYTMKGPDWNTELYNERSATVRELLTELYGKVGEIRHWGLIRYISGILRKKVEALDEACTDLLSHQKHLTVGLPPEPREKTISAPLPYEALTQLIDEASEGDMSISILTQEIMVYLAMYMRTQPGLFAEMFRLRIGLIIQVMATELAHSLRCSAEEATEGLMNLSPSAMKNLLHHILSGKEFGVERSVRPTDSNVSPAISIHEIGAVGATKTERTGIMQLKSEIKQSPGTSMTPSSGSFPSAYDQQSSKDSRQGQWQRRRRLDGALNRVPVGFYQKVWKVLQKCHGLSVEGFVLPSSTTREMTPGEIKFSVHVESVLNRVPQPEYRQLLVEAILVLTMLADIEIHSIGSIIAVEKIVHIANDLFLQEQKTLGADDTMLAKDPASGICTLLYDSAPSGRFGTMTYLSKAAATYVQEFLPHSICAMQ

SEQ ID NO: 882242 - protein, 1210 aa, Homo sapiens; identical to SEQ ID NO: 882241

SEQ ID NO: 882243 - protein, 1139 aa, Homo sapiens
SCFHLFLQSVVKLMRGLLHCMIRQVDKVESFKYSQSTKDSLHAKYNTKTCATVVGDDQWGHLQLDATSVYLLFLAQMTASGLHIIHSLDEVNFIQNLVFYIEAAYKTADFGIWERGDKTNQGISELNASSVGMAKAALEALDELDLFGVKGGPQSVIHVLADEVQHCQSILNSLLPRASTSKEVDASLLSVVSFPAFAVEDSQLVELTKQEIITKLQGRYGCCRFLRDGYKTPKEDPNRLYYEPAELKLFENIECEWPLFWTYFILDGVFSGNAEQVQEYKEALEAVLIKGKNGVPLLPELYSVPPDRVDEEYQNPHTVDRVPMGKLPHMWGQSLYILGSLMAEGFLAPGEIDPLNRRFSTVPKPDVVVQVSILAETEEIKTILKDKGIYVETIAEVYPIRVQPARILSHIYSSLGCNNRMKLSGRPYRHMGVLGTSKLYDIRKTIFTFTPQFIDQQQFYLALDNKMIVEMLRTDLSYLCSRWRMTGQPTITFPISHSMLDEDGTSLNSSILAALRKMQDGYFGGARVQTGKLSEFLTTSCCTHLSFMDPGPEGKLYSEDYDDNYDYLESGNWMNDYDSTSHARCGDEVARYLDHLLAHTAPHPKLAPTSQKGGLDRFQAAVQTTCDLMSLVTKAKELHVQNVHMYLPTKLFQASRPSFNLLDSPHPRQENQVPSVRVEIHLPRDQSGEVDFKALVLQLKETSSLQEQADILYMLYTMKGPDWNTELYNERSATVRELLTELYGKVGEIRHWGLIRYISGILRKKVEALDEACTDLLSHQKHLTVGLPPEPREKTISAPLPYEALTQLIDEASEGDMSISILTQEIMVYLAMYMRTQPGLFAEMFRLRIGLIIQVMATELAHSLRCSAEEATEGLMNLSPSAMKNLLHHILSGKEFGVERSVRPTDSNVSPAISIHEIGAVGATKTERTGIMQLKSEIKQSPGTSMTPSSGSFPSAYDQQSSKDSRQGQWQRRRRLDGALNRVPVGFYQKVWKVLQKCHGLSVEGFVLPSSTTREMTPGEIKFSVHVESVLNRVPQPEYRQLLVEAILVLTMLADIEIHSIGSIIAVEKIVHIANDLFLQEQKTLGADDTMLAKDPASGICTLLYDSAPSGRFGTMTYLSKAAATYVQEFLPHSICAMQ

SEQ ID NO: 882244 - protein, 563 aa, Homo sapiens
PPLTVHARCGDEVARYLDHLLAHTAPHPKLAPTSQKGGLDRFQAAVQTTCDLMSLVTKAKELHVQNVHMYLPTKLFQASRPSFNLLDSPHPRQENQVPSVRVEIHLPRDQSGEVDFKALVLQLKETSSLQEQADILYMLYTMKGPDWNTELYNERSATVRELLTELYGKVGEIRHWGLIRYISGILRKKVEALDEACTDLLSHQKHLTVGLPPEPREKTISAPLPYEALTQLIDEASEGDMSISILTQEIMVYLAMYMRTQPGLFAEMFRLRIGLIIQVMATELAHSLRCSAEEATEGLMNLSPSAMKNLLHHILSGKEFGVERSVRPTDSNVSPAISIHEIGAVGATKTERTGIMQLKSEIKQSPGTSMTPSSGSFPSAYDQQSSKDSRQGQWQRRRRLDGALNRVPVGFYQKVWKVLQKCHGLSVEGFVLPSSTTREMTPGEIKFSVHVESVLNRVPQPEYRQLLVEAILVLTMLADIEIHSIGSIIAVEKIVHIANDLFLQEQKTLGADDTMLAKDPASGICTLLYDSAPSGRFGTMTYLSKAAATYVQEFLPHSICAMQ

SEQ ID NO: 882245 - protein, 67 aa, Homo sapiens
GGRTGLRGQERRLGRCGGALDRGKPVLALARGGPLRPPESGEGPKAPVAPGLFLRGQLVTCRHEEPE

SEQ ID NO: 882246 - protein, 383 aa, Homo sapiens
MSLVDLGKKLLEAARAGQDDEVRILMANGAPFTTDWLGTSPLHLAAQYGHYSTTEVLLRAGVSRDARTKVDRTPLHMAASEGHASIVEVLLKHGADVNAKDMLKMTALHWATEHNHQEVVELLIKYGADVHTQSKFCKTAFDISIDNGNEDLAEILQIAMQNQINTNPESPDTVTIHAATPQFIIGPGGVVNLTDETGVSAVQFGNSSTSVLATLAALAEASAPLSNSSETPVVATEEVVTAESVDGAIQQVVSSGGQQVITIVTDGIQLGNLHSIPTSGIGQPIIVTMPDGQQVLTVPATDIAEETVISEEPPAKRQCIEIIENRVESAEIEEREALQKQLDEANREAQKYRQQLLKKEQEAEAYRQKLEAMTRLQTNKEAV

SEQ ID NO: 882247 - protein, 395 aa, Homo sapiens
MSLVDLGKKLLEAARAGQDDEVRILMANGAPFTTDWLGTSPLHLAAQYGHYSTTEVLLRAGVSRDARTKVDRTPLHMAASEGHASIVEVLLKHGADVNAKDMLKMTALHWATEHNHQEVVELLIKYGADVHTQSKFCKTAFDISIDNGNEDLAEILQIAMQNQINTNPESPDTVTIHAATPQFIIGPGGVVNLTGLVSSENSSKATDETGVSAVQFGNSSTSVLATLAALAEASAPLSNSSETPVVATEEVVTAESVDGAIQQVVSSGGQQVITIVTDGIQLGNLHSIPTSGIGQPIIVTMPDGQQVLTVPATDIAEETVISEEPPAKRQCIEIIENRVESAEIEEREALQKQLDEANREAQKYRQQLLKKEQEAEAYRQKLEAMTRLQTNKEAV

SEQ ID NO: 882248 - protein, 348 aa, Homo sapiens
MSLVDLGKKLLEAARAGQDDEVRILMANGAPFTTDWLGTSPLHLAAQYGHYSTTEVLLRAGVSRDARTKVDRTPLHMAASEGHASIVEVLLKHGADVNAKDMLKMTALHWATEHNHQEVVELLIKYGADVHTQSKFCKTAFDISIDNGNEDLAEILQIAMQNQINTNPESPDTVTIHAATPQFIIGPGGVVNLTDETGVSAVQFGNSSTSVLATLAALAEASAPLSNSSETPVVATEEVVTAESVDGAIQQVVSSGGQQVITIVTDGIQLGNLHSIPTSGIGQPIIVTMPDGQQVLTVPATDIAEETVISEEPPAKRQCIEIIENRVESAEIEVRSLLPGVLCRSHPK

SEQ ID NO: 882249 - protein, 360 aa, Homo sapiens
MSLVDLGKKLLEAARAGQDDEVRILMANGAPFTTDWLGTSPLHLAAQYGHYSTTEVLLRAGVSRDARTKVDRTPLHMAASEGHASIVEVLLKHGADVNAKDMLKMTALHWATEHNHQEVVELLIKYGADVHTQSKFCKTAFDISIDNGNEDLAEILQIAMQNQINTNPESPDTVTIHAATPQFIIGPGGVVNLTGLVSSENSSKATDETGVSAVQFGNSSTSVLATLAALAEASAPLSNSSETPVVATEEVVTAESVDGAIQQVVSSGGQQVITIVTDGIQLGNLHSIPTSGIGQPIIVTMPDGQQVLTVPATDIAEETVISEEPPAKRQCIEIIENRVESAEIEVRSLLPGVLCRSHPK

SEQ ID NO: 882250 - protein, 348 aa, Homo sapiens; identical to SEQ ID NO: 882248

SEQ ID NO: 882251 - protein, 383 aa, Homo sapiens; identical to SEQ ID NO: 882246

SEQ ID NO: 882252 - protein, 488 aa, Homo sapiens
MRNDSLNNQRYLVTAYLWRKDYSLLCWTSSIHGTCPLNAEQSILTFSLQNASINIQRALKGAVLLPMRTTDFQESIYINLPYGGRARWLTPVIPALWEAEAGRHEMSLVDLGKKLLEAARAGQDDEVRILMANGAPFTTDWLGTSPLHLAAQYGHYSTTEVLLRAGVSRDARTKVDRTPLHMAASEGHASIVEVLLKHGADVNAKDMLKMTALHWATEHNHQEVVELLIKYGADVHTQSKFCKTAFDISIDNGNEDLAEILQIAMQNQINTNPESPDTVTIHAATPQFIIGPGGVVNLTDETGVSAVQFGNSSTSVLATLAALAEASAPLSNSSETPVVATEEVVTAESVDGAIQQVVSSGGQQVITIVTDGIQLGNLHSIPTSGIGQPIIVTMPDGQQVLTVPATDIAEETVISEEPPAKRQCIEIIENRVESAEIEEREALQKQLDEANREAQKYRQQLLKKEQEAEAYRQKLEAMTRLQTNKEAV

SEQ ID NO: 882253 - protein, 377 aa, Homo sapiens
MSLVDLGKKLLEAARAGQDDEVRILMANGAPFTTDWLGTSPLHLAAQYGHYSTTEVLLRAGVSRDARTKVDRTPLHMAASEGHASIVEVLLKHGADVNAKDMLKMTALHWATEHNHQEVVELLIKYGADVHTQSKFCKTAFDISIDNGNEDLAEILQIAMQNQINTNPESPDTVTIHAATPQFIIGPGGVVNLTGLVSSENSSKATDETGVSAVQFGNSSTSVLATLAALAEASAPLSNSSETPVVATEEVVTAESVDGAIQQVVSSGGQQVITIVTDGIQLGNLHSIPTSGIGQPIIVTMPDGQQVLTVPATDIAEETVISEEPPAKRQCIEIIENRVESAEIERGCLAMLPRLVLDSWPQVILPPQPPEELRLLA

SEQ ID NO: 882254 - protein, 348 aa, Homo sapiens; identical to SEQ ID NO: 882248

SEQ ID NO: 882255 - protein, 338 aa, Homo sapiens
MFQAFPGDYDSGSRCSSSPSAESQYLSSVDSFGSPPTAAASQECAGLGEMPGSFVPTVTAITTSQDLQWLVQPTLISSMAQSQGQPLASQPPVVDPYDMPGTSYSTPGMSGYSSGGASGSGGPSTSGTTSGPGPARPARARPRRPREETLTPEEEEKRRVRRERNKLAAAKCRNRRRELTDRLQAETDQLEEEKAELESEIAELQKEKERLEFVLVAHKPGCKIPYEEGPGPGPLAEVRDLPGSAPAKEDGFSWLLPPPPPPPLPFQTSQDAPPNLTASLFTHSEVQVLGDPFPVVNPSYTSSFVLTCPEVSAFAGAQRTSGSDQPSDPLNSPSLLAL

SEQ ID NO: 882256 - protein, 124 aa, Homo sapiens
MSLLRGVSYLEWDRSSGILTGPLPREGVSGTYSLGVGWPLGSLSQNISGGVNLPSDIPGKFFCLCFFLRGGGGGRRWSLIWPGRSLWLSLGWGCRSLPKDGVSLGGVVPAIRDGSGPQGTTNHP

SEQ ID NO: 882257 - protein, 114 aa, Homo sapiens
MTLAVEEPSRAVLDAWWEGKAQGGSNMQVTLIPTHDSEVMREWYQETHEKQQDLNIRVLASSSTGVMQDDSFLAMQDGPVKTRASHTTGSELLFPEILQFEITFSKKSIHLVKA

SEQ ID NO: 882258 - protein, 237 aa, Homo sapiens
MFQAFPGDYDSGSRCSSSPSAESQYLSSVDSFGSPPTAAASQECAGLGEMPGSFVPTVTAITTSQDLQWLVQPTLISSMAQSQGQPLASQPPVVDPYDMPGTSYSTPGMSGYSSGGASGSGGPSTSGTTSGPGPARPARARPRRPREETLTPEEEEKRRVRRERNKLAAAKCRNRRRELTDRLQAETDQLEEEKAELESEIAELQKEKERLEFVLVAHKPGCKIPYEEGPGPGPLAE

SEQ ID NO: 882259 - protein, 188 aa, Homo sapiens
MPGSFVPTVTAITTSQDLQWLVQPTLISSMAQSQGQPLASQPPVVDPYDMPGTSYSTPGMSGYSSGGASGSGGPSTSGTTSGPGPARPARARPRRPREETLTPEEEEKRRVRRERNKLAAAKCRNRRRELTDRLQAETDQLEEEKAELESEIAELQKEKERLEFVLVAHKPGCKIPYEEGPGPGPLAE

SEQ ID NO: 882260 - protein, 210 aa, Homo sapiens
CPNSHGHQDSISGGVFSQPGAAFQQQVQGSHDPSFPVTDMLFSPSSLSSVTWPPWPQETDQLEEEKAELESEIAELQKEKERLEFVLVAHKPGCKIPYEEGPGPGPLAEVRDLPGSAPAKEDGFSWLLPPPPPPPLPFQTSQDAPPNLTASLFTHSEVQVLGDPFPVVNPSYTSSFVLTCPEVSAFAGAQRTSGSDQPSDPLNSPSLLAL

SEQ ID NO: 882261 - protein, 237 aa, Homo sapiens; identical to SEQ ID NO: 882258

SEQ ID NO: 882262 - protein, 237 aa, Homo sapiens; identical to SEQ ID NO: 882258

SEQ ID NO: 882263 - protein, 237 aa, Homo sapiens; identical to SEQ ID NO: 882258

SEQ ID NO: 882264 - protein, 237 aa, Homo sapiens; identical to SEQ ID NO: 882258

SEQ ID NO: 882265 - protein, 237 aa, Homo sapiens; identical to SEQ ID NO: 882258

SEQ ID NO: 882266 - protein, 218 aa, Homo sapiens
MFQAFPGDYDSGSRCSSSPSAESQYLSSVDSFGSPPTAAASQECAGLGEMPGSFVPTVTAITTSQDLQWLVQPTLISSMAQSQGQPLASQPPVVDPYDMPGTSYSTPGMSGYSSGGASGSGGPSTSGTTSGPGPARPARARPRRPREETLTPEEEEKRRVRRERNKLAAAKCRNRRRELTDRLQAVRTGPGVGEGMLRGALSPFSAPSPPVPLSWVEN

SEQ ID NO: 882267 - protein, 237 aa, Homo sapiens; identical to SEQ ID NO: 882258

SEQ ID NO: 882268 - protein, 68 aa, Homo sapiens
MEGGSTKASVLQKPQDPCYTSEDRRLVFWLLGVLKEVEVRDGWRSAVSPNLMASISLTQLTPEEEEKR

SEQ ID NO: 882269 - protein, 184 aa, Homo sapiens
FAGKMEYPAPATVQAADGGAAGPYSSSELLEGQEPDGVRFDRERARRLWEAVSGAQPVGREEALHQNREMIDPDKFCSLCHATFNDPVMAQQHYVGKKHRKQETKLKLMARYGRLADPAVTDFPAGKGYPCKTCKIVLNSIEQYQAHVSGFKHKNQSPKTVASSLGQIPMQRQPIQKDSTTLED

SEQ ID NO: 882270 - protein, 298 aa, Homo sapiens
FAGKMEYPAPATVQAADGGAAGPYSSSELLEGQEPDGVRFDRERARRLWEAVSGAQPVGREEVEHMIQKNQCLFTNTQCKVCCALLISESQKLAHYQSKKHANKVKRYLAIHGMETLKGETKKLDSDQKSSRSKDKNQCCPICNMTFSSPVVAQSHYLGKTHAKNLKLKQQSTKVEALHQNREMIDPDKFCSLCHATFNDPVMAQQHYVGKKHRKQETKLKLMARYGRLADPAVTDFPAGKGYPCKTCKIVLNSIEQYQAHVSGFKHKNQSPKTVASSLGQIPMQRQPIQKDSTTLED

SEQ ID NO: 882271 - protein, 298 aa, Homo sapiens; identical to SEQ ID NO: 882270

SEQ ID NO: 882272 - protein, 122 aa, Homo sapiens
FAGKMEYPAPATVQAADGGAAGPYSSSELLEGQEPDGVRFDRERARRLWEAVSGAQPVGREEAGKGYPCKTCKIVLNSIEQYQAHVSGFKHKNQSPKTVASSLGQIPMQRQPIQKDSTTLED

SEQ ID NO: 882273 - protein, 207 aa, Homo sapiens [sequence omitted]

SEQ ID NO: 882274 - protein, 139 aa, Homo sapiens
FAGKMEYPAPATVQAADGGAAGPYSSSELLEGQEPDGVRFDRERARRLWEAVSGAQPVGREEVEHMIQKNQCLFTNTQCKVCCALLISESQKLAHYQSKKHANKVKRYLAIHGMETLKGETKKLDSDQLERATPAKHVR

SEQ ID NO: 882275 - protein, 236 aa, Homo sapiens
FAGKMEYPAPATVQAADGGAAGPYSSSELLEGQEPDGVRFDRERARRLWEAVSGAQPVGREEVEHMIQKNQCLFTNTQCKVCCALLISESQKLAHYQSKKHANKVKRYLAIHGMETLKGETKKLDSDQKSSRSKDKNQCCPICNMTFSSPVVAQSHYLGKTHAKNLKLKQQSTKVEAGKGYPCKTCKIVLNSIEQYQAHVSGFKHKNQSPKTVASSLGQIPMQRQPIQKDSTTLED

SEQ ID NO: 882276 - protein, 184 aa, Homo sapiens; identical to SEQ ID NO: 882269

SEQ ID NO: 882277 - protein, 280 aa, Homo sapiens
FAGKMEYPAPATVQAADGGAAGPYSSSELLEGQEPDGVRFDRERARRLWEAVSGAQPVGREEVEHMIQKNQCLFTNTQCKVCCALLISESQKLAHYQSKKHANKVKRYLAIHGMETLKGETKKLDSDQKSSRSKDKNQCCPICNMTFSSPVVAQSHYLGKTHAKNLKLKQQSTKVEALHQNREMIDPDKFCSLCHATFNDPVMAQQHYVGKKHRKQETKLKLMARYGRLADPAVTDFPGHQKQWHHPWARFQCKGNPFRKTQPPWKTRGDSAQHPILGQP

SEQ ID NO: 882278 - protein, 344 aa, Homo sapiens
MGRWALDVAFLWKAVLTLGLVLLYYCFSIGITFYNKWLTKSFHFPLFMTMLHLAVIFLFSALSRALVQCSSHRARVVLSWADYLRRVAPTALATALDVGLSNWSFLYVTVSLYTMTKSSAVLFILIFSLIFKLEELSTQFNVEGFALVLGASFIGGIRWTLTQMLLQKAELGLQNPIDTMFHLQPLMFLGLFPLFAVFEGLHLSTSEKIFRFQDTGLLLRVLGSLFLGGILAFGLGFSEFLLVSRTSSLTLSIAGIFKEVCTLLLAAHLLGDQISLLNWLGFALCLSGISLHVALKALHSRGDGGPKALKGLGSSPDLELLLRSSQREEGDNEEEEYFVAQGQQ

SEQ ID NO: 882279 - protein, 109 aa, Homo sapiens
SVFPCRATPLYFTPEAQTSPPHHSAGLIMVAGSCGRESPGGGAKPGTHDFCPSLQSLVTQGASTRPAWDWPELGPSCAGIAAGEGSGLVLPTTSQALTAETHFQGTAAF

SEQ ID NO: 882280 - protein, 365 aa, Homo sapiens
MGRWALDVAFLWKAVLTLGLVLLYYCFSIGITFYNKWLTKSFHFPLFMTMLHLAVIFLFSALSRALVQCSSHRARVVLSWADYLRRVAPTALATALDVGLSNWSFLYVTVSLYTMTKSSAVLFILIFSLIFKLEELRAALVLVVLLIAGGLFMFTYKSTQFNVEGFALVLGASFIGGIRWTLTQMLLQKAELGLQNPIDTMFHLQPLMFLGLFPLFAVFEGLHLSTSEKIFRFQDTGLLLRVLGSLFLGGILAFGLGFSEFLLVSRTSSLTLSIAGIFKEVCTLLLAAHLLGDQISLLNWLGFALCLSGISLHVALKALHSRGDGGPKALKGLGSSPDLELLLRSSQREEGDNEEEEYFVAQGQQ

SEQ ID NO: 882281 - protein, 334 aa, Homo sapiens
MGRWALDVAFLWKAVLTLGLVLLYYCFSIGITFYNKWLTKSFHFPLFMTMLHLAVIFLFSALSRALVQCSSHRARVVLSWADYLRRVAPTALATALDVGLSNWSFLYVTVSLYTMTKSSAVLFILIFSLIFKLEELRAALVLVVLLIAGGLFMFTYKSTQFNVEGFALVLGASFIGGIRWTLTQMLLQKAELGLQNPIDTMFHLQPLMFLGLFPLFAVFEGLHLSTSEKIFRFQDTGLLLRVLGSLFLGGILAFGLGFSEFLLVSRTSSLTLSIAGIFKEVCTLLLAAHLLGDQISLLNWLGFALCLSGISLHVALKALHSRASRSLCFLFFSL

SEQ ID NO: 882282 - protein, 342 aa, Homo sapiens
MGRWALDVAFLWKAVLTLGLVLLYYCFSIGITFYNKWLTKSFHFPLFMTMLHLAVIFLFSALSRALVQCSSHRARVVLSWADYLRRVAPTALATALDVGLSNWSFLYVTVSLYTMTKSSAVLFILIFSLIFKLEELRAALVLVVLLIAGGLFMFTYKSTQFNVEGFALVLGASFIGGIRWTLTQMLLQKAELGLQNPIDTMFHLQPLMFLGLFPLFAVFEGLHLSTSEKIFRFQDTGLLLRVLGSLFLGGILAFGLGFSEFLLVSRTSSLTLSIAGIFKEVCTLLLAAHLLGDQISLLNWLGFALCLSGISLHVALKALHSRGGNPESLPEASVFCSSPCDS

SEQ ID NO: 882283 - protein, 365 aa, Homo sapiens; identical to SEQ ID NO: 882280

SEQ ID NO: 882284 - protein, 264 aa, Homo sapiens
MGRWALDVAFLWKAVLTLGLVLLYYCFSIGITFYNKWLTKSFHFPLFMTMLHLAVIFLFSALSRALVQCSSHRARVVLSWADYLRRVAPTALATALDVGLSNWSFLYVTVSLYTMTKSSAVLFILIFSLIFKLEELRAALVLVVLLIAGGLFMFTYKSTQFNVEGFALVLGASFIGGIRWTLTQMLLQKAELGLQNPIDTMFHLQPLMFLGLFPLFAVFEGSLHFAVGSSSAGRSDQPPELAGLRPLPLGNIPPRCPQSPAFQR

SEQ ID NO: 882285 - protein, 365 aa, Homo sapiens; identical to SEQ ID NO: 882280

SEQ ID NO: 882286 - protein, 384 aa, Homo sapiens
MGRWALDVAFLWKAVLTLGLVLLYYCFSIGITFYNKWLTKSFHFPLFMTMLHLAVIFLFSALSRALVQCSSHRARVVLSWADYLRRVAPTALATALDVGLSNWSFLYVTVSLYTMTKSSAVLFILIFSLIFKLEELVRPQRLLPPSELPLLPILPRAALVLVVLLIAGGLFMFTYKSTQFNVEGFALVLGASFIGGIRWTLTQMLLQKAELGLQNPIDTMFHLQPLMFLGLFPLFAVFEGLHLSTSEKIFRFQDTGLLLRVLGSLFLGGILAFGLGFSEFLLVSRTSSLTLSIAGIFKEVCTLLLAAHLLGDQISLLNWLGFALCLSGISLHVALKALHSRGDGGPKALKGLGSSPDLELLLRSSQREEGDNEEEEYFVAQGQQ

SEQ ID NO: 882287 - protein, 251 aa, Homo sapiens
MTKSSAVLFILIFSLIFKLEELRAALVLVVLLIAGGLFMFTYKSTQFNVEGFALVLGASFIGGIRWTLTQMLLQKAELGLQNPIDTMFHLQPLMFLGLFPLFAVFEGLHLSTSEKIFRFQDTGLLLRVLGSLFLGGILAFGLGFSEFLLVSRTSSLTLSIAGIFKEVCTLLLAAHLLGDQISLLNWLGFALCLSGISLHVALKALHSRGDGGPKALKGLGSSPDLELLLRSSQREEGDNEEEEYFVAQGQQ

SEQ ID NO: 882288 - protein, 151 aa, Homo sapiens
MGRWALDVAFLWKAVLTLGLVLLYYCFSIGITFYNKWLTKSFHFPLFMTMLHLAVIFLFSALSRALVQCSSHRARVVLSWADYLRRVAPTALATALDVGLSNWSFLYVTVSLYTMTKSSAVLFILIFSLIFKLEELVRPQRLLCPSCPHRC

SEQ ID NO: 882289 - protein, 181 aa, Homo sapiens
MLLQKAELGLQNPIDTMFHLQPLMFLGLFPLFAVFEGLHLSTSEKIFRFQDTGLLLRVLGSLFLGGILAFGLGFSEFLLVSRTSSLTLSIAGIFKEVCTLLLAAHLLGDQISLLNWLGFALCLSGISLHVALKALHSRGDGGPKALKGLGSSPDLELLLRSSQREEGDNEEEEYFVAQGQQ

SEQ ID NO: 882290 - protein, 230 aa, Homo sapiens
MTKSSAVLFILIFSLIFKLEELSTQFNVEGFALVLGASFIGGIRWTLTQMLLQKAELGLQNPIDTMFHLQPLMFLGLFPLFAVFEGLHLSTSEKIFRFQDTGLLLRVLGSLFLGGILAFGLGFSEFLLVSRTSSLTLSIAGIFKEVCTLLLAAHLLGDQISLLNWLGFALCLSGISLHVALKALHSRGDGGPKALKGLGSSPDLELLLRSSQREEGDNEEEEYFVAQGQQ

SEQ ID NO: 882291 - protein, 174 aa, Homo sapiens
WVQCDCGRESPGGGAKPGLMTFAPPFRAWSHKGRAPGQPGTGQSWAQAAAGIAAGEGSGLVLPTTSQALTAETHFQGTAALSIAGIFKEVCTLLLAAHLLGDQISLLNWLGFALCLSGISLHVALKALHSRGDGGPKALKGLGSSPDLELLLRSSQREEGDNEEEEYFVAQGQQ

SEQ ID NO: 882292 - protein, 237 aa, Homo sapiens
MGRWALDVAFLWKAVLTLGLVLLYYCFSIGITFYNKWLTKSFHFPLFMTMLHLAVIFLFSALSRALVQCSSHRARVVLSWADYLRRVAPTALATALDVGLSNWSFLYVTVSLEYWPCPAASLQAEAVCLSSGVSAHPAARPATPPLWDQPLLSQPLPGTQQLFREVASLFRKPSAEEMLCPPARQRGEARELSQNPIIRAGEGRLQGHRQVATGGWYTQPQQSPMWPGGYTRVSSSL

SEQ ID NO: 882293 - protein, 365 aa, Homo sapiens; identical to SEQ ID NO: 882280

SEQ ID NO: 882294 - protein, 365 aa, Homo sapiens; identical to SEQ ID NO: 882280

SEQ ID NO: 882295 - protein, 365 aa, Homo sapiens; identical to SEQ ID NO: 882280

SEQ ID NO: 882296 - protein, 365 aa, Homo sapiens; identical to SEQ ID NO: 882280

SEQ ID NO: 882297 - protein, 365 aa, Homo sapiens; identical to SEQ ID NO: 882280

SEQ ID NO: 882298 - protein, 213 aa, Homo sapiens
MFTYKSTQFNVEGFALVLGASFIGGIRWTLTQMLLQKAELGLQNPIDTMFHLQPLMFLGLFPLFAVFEGLHLSTSEKIFRFQDTGLLLRVLGSLFLGGILAFGLGFSEFLLVSRTSSLTLSIAGIFKEVCTLLLAAHLLGDQISLLNWLGFALCLSGISLHVALKALHSRGDGGPKALKGLGSSPDLELLLRSSQREEGDNEEEEYFVAQGQQ

SEQ ID NO: 882299 - protein, 213 aa, Homo sapiens; identical to SEQ ID NO: 882298

SEQ ID NO: 882300 - protein, 213 aa, Homo sapiens; identical to SEQ ID NO: 882298

SEQ ID NO: 882301 - protein, 231 aa, Homo sapiens
MERAALVLVVLLIAGGLFMFTYKSTQFNVEGFALVLGASFIGGIRWTLTQMLLQKAELGLQNPIDTMFHLQPLMFLGLFPLFAVFEGLHLSTSEKIFRFQDTGLLLRVLGSLFLGGILAFGLGFSEFLLVSRTSSLTLSIAGIFKEVCTLLLAAHLLGDQISLLNWLGFALCLSGISLHVALKALHSRGDGGPKALKGLGSSPDLELLLRSSQREEGDNEEEEYFVAQGQQ

SEQ ID NO: 882302 - protein, 151 aa, Homo sapiens; identical to SEQ ID NO: 882288

SEQ ID NO: 882303 - protein, 782 aa, Homo sapiens
MTSIIKLTTLSGVQEESALCYLLQVDEFRFLLDCGWDEHFSMDIIDSLRKHVHQIDAVLLSHPDPLHLGALPYAVGKLGLNCAIYATIPVYKMGQMFMYDLYQSRHNTEDFTLFTLDDVDAAFDKIQQLKFSQIVNLKGKGHGLSITPLPAGHMIGGTIWKIVKDGEEEIVYAVDFNHKREIHLNGCSLEMLSRPSLLITDSFNATYVQPRRKQRDEQLLTNVLETLRGDGNVLIAVDTAGRVLELAQLLDQIWRTKDAGLGVYSLALLNNVSYNVVEFSKSQVEWMSDKLMRCFEDKRNNPFQFRHLSLCHGLSDLARVPSPKVVLASQPDLECGFSRDLFIQWCQDPKNSIILTYRTTPGTLARFLIDNPSEKITEIELRKRVKLEGKELEEYLEKEKLKKEAAKKLEQSKEADIDSSDESDIEEDIDQPSAHKTKHDLMMKGEGSRKGSFFKQAKKSYPMFPAPEERIKWDEYGEIIKPEDFLVPELQATEEEKSKLESGLTNGDEPMDQDLSDVPTKCISTTESIEIKARVTYIDYEGRSDGDSIKKIINQMKPRQLIIVHGPPEASQDLAECCRAFGGKDIKVYMPKLHETVDATSETHIYQVRLKDSLVSSLQFCKAKDAELAWIDGVLDMRVSKVDTGVILEEGELKDDGEDSEMQVEAPSDSSVIAQQKAMKSLFGDDEKETGEESEIIPTLEPLPPHEVPGHQSVFMNEPRLSDFKQVLLREGIQAEFVGGVLVCNNQVAVRRTETGRIGLEGCLCQDFYRIRDLLYEQYAIV

SEQ ID NO: 882304 - protein, 644 aa, Homo sapiens
MTSIIKLTTLSGVQEESALCYLLQVDEFRFLLDCGWDEHFSMDIIDSLRKHVHQIDAVLLSHPDPLHLGALPYAVGKLGLNCAIYATIPVYKMGQMFMYDLYQSRHNTEDFTLFTLDDVDAGLGVYSLALLNNVSYNVVEFSKSQVEWMSDKLMRCFEDKRNNPFQFRHLSLCHGLSDLARVPSPKVVLASQPDLECGFSRDLFIQWCQDPKNSIILTYRTTPGTLARFLIDNPSEKITEIELRKRVKLEGKELEEYLEKEKLKKEAAKKLEQSKEADIDSSDESDIEEDIDQPSAHKTKHDLMMKGEGSRKGSFFKQAKKSYPMFPAPEERIKWDEYGEIIKPEDFLVPELQATEEEKSKLESGLTNGDEPMDQDLSDVPTKCISTTESIEIKARVTYIDYEGRSDGDSIKKIINQMKPRQLIIVHGPPEASQDLAECCRAFGGKDIKVYMPKLHETVDATSETHIYQVRLKDSLVSSLQFCKAKDAELAWIDGVLDMRVSKVDTGVILEEGELKDDGEDSEMQVEAPSDSSVIAQQKAMKSLFGDDEKETGEESEIIPTLEPLPPHEVPGHQSVFMNEPRLSDFKQVLLREGIQAEFVGGVLVCNNQVAVRRTETGRIGLEGCLCQDFYRIRDLLYEQYAIV

SEQ ID NO: 882305 - protein, 644 aa, Homo sapiens; identical to SEQ ID NO: 882304

SEQ ID NO: 882306 - protein, 644 aa, Homo sapiens; identical to SEQ ID NO: 882304

SEQ ID NO: 882307 - protein, 731 aa, Homo sapiens
MTSIIKLTTLSGVQEESALCYLLQVDEFRFLLDCGWDEHFSMDIIDSLRKHVHQIDAVLLSHPDPLHLGALPYAVGKLGLNCAIYATIPVYKMGQMFMYDLYQSRHNTEDFTLFTLDDVDAAFDKIQQLKFSQIVNLKGKGHGLSITPLPAGHMIGGTIWKIVKDGEEEIVYAVDFNHKREIHLNGCSLEMLSRPSLLITDSFNATYVQPRRKQRDEQLLTNVLETLRGDGNVLIAVDTAGRVLELAQLLDQIWRTKDAGLGVYSLALLNNVSYNVVEFSKSQVEWMSDKLMRCFEDKRNNPFQFRHLSLCHGLSDLARVPSPKVVLASQPDLECGFSRDLFIQWCQDPKNSIILTYRTTPGTLARFLIDNPSEKITEIELRKRVKLEGKELEEYLEKEKLKKEAAKKLEQSKEADIDSSDESDIEEDIDQPSAHKTKHDLMMKGEGSRKGSFFKQAKKSYPMFPAPEERIKWDEYGEIIKARVTYIDYEGRSDGDSIKKIINQMKPRQLIIVHGPPEASQDLAECCRAFGGKDIKVYMPKLHETVDATSETHIYQVRLKDSLVSSLQFCKAKDAELAWIDGVLDMRVSKVDTGVILEEGELKDDGEDSEMQVEAPSDSSVIAQQKAMKSLFGDDEKETGEESEIIPTLEPLPPHEVPGHQSVFMNEPRLSDFKQVLLREGIQAEFVGGVLVCNNQVAVRRTETGRIGLEGCLCQDFYRIRDLLYEQYAIV

SEQ ID NO: 882308 - protein, 146 aa, Homo sapiens [sequence omitted]

SEQ ID NO: 882309 - protein, 123 aa, Homo sapiens [sequence omitted]

SEQ ID NO: 882310 - protein, 782 aa, Homo sapiens; identical to SEQ ID NO: 882303

SEQ ID NO: 882311 - protein, 644 aa, Homo sapiens; identical to SEQ ID NO: 882304

SEQ ID NO: 882312 - protein, 644 aa, Homo sapiens; identical to SEQ ID NO: 882304

SEQ ID NO: 882313 - protein, 340 aa, Homo sapiens
MKGEGSRKGSFFKQAKKSYPMFPAPEERIKWDEYGEIIKPEDFLVPELQATEEEKSKLESGLTNGDEPMDQDLSDVPTKCISTTESIEIKARVTYIDYEGRSDGDSIKKIINQMKPRQLIIVHGPPEASQDLAECCRAFGGKDIKVYMPKLHETVDATSETHIYQVRLKDSLVSSLQFCKAKDAELAWIDGVLDMRVSKVDTGVILEEGELKDDGEDSEMQVEAPSDSSVIAQQKAMKSLFGDDEKETGEESEIIPTLEPLPPHEVPGHQSVFMNEPRLSDFKQVLLREGIQAEFVGGVLVCNNQVAVRRTETGRIGLEGCLCQDFYRIRDLLYEQYAIV

SEQ ID NO: 882314 - protein, 277 aa, Homo sapiens
MSLCEDMLLCNYRKCRIKLSGYAWVTACSHIFCDQHGSGEFSRSPAICPACNSTLSGKLDIVRTELSPSEEYKAMVLAGLRPEIVLDISSRALAFWTYQVHQERLYQEYNFSKAEGHLKQMEKIYTQQIQSKDVELTSMKGEVTSMKKVLEEYKKKFSDISEKLMERNRQYQKLQGLYDSLRLRNITIANHEGTLEPSMIAQSGVLGFPLGNNSKFPLDNTPVRNRGDGDGDFQFRPFFAGSPTAPEPSNSFFSFVSPSRELEQQQVSSRAFKVKRI

SEQ ID NO: 882315 - protein, 113 aa, Homo sapiens
IPRRTAGSKVQGLYDSLRLRNITIANHEGTLEPSMIAQSGVLGFPLGNNSKFPLDNTPVRNRGDGDGDFQFRPFFAGSPTAPEPSNSFFSFVSPSRELEQQQVSSRAFKVKRI

SEQ ID NO: 882316 - protein, 277 aa, Homo sapiens; identical to SEQ ID NO: 882314

SEQ ID NO: 882317 - protein, 157 aa, Homo sapiens
MEKIYTQQIQSKDVELTSMKGEVTSMKKVLEEYKKKFSDISEKLMERNRQYQKLQGLYDSLRLRNITIANHEGTLEPSMIAQSGVLGFPLGNNSKFPLDNTPVRNRGDGDGDFQFRPFFAGSPTAPEPSNSFFSFVSPSRELEQQQVSSRAFKVKRI

SEQ ID NO: 882318 - protein, 102 aa, Homo sapiens
MSLCEDMLLCNYRKCRIKLSGYAWVTACSHIFCDQHGSGEFSRSPAICPACNSTLSGKLDIVRTELSPSEEYKAMVLAGLRPEIVLDISSRALAFWTYQASL

SEQ ID NO: 882319 - protein, 113 aa, Homo sapiens; identical to SEQ ID NO: 882315

SEQ ID NO: 882320 - protein, 102 aa, Homo sapiens; identical to SEQ ID NO: 810294

SEQ ID NO: 882321 - protein, 113 aa, Homo sapiens
MSLCEDMLLCNYRKCRIKLSGYAWVTACSHIFCDQHGSGEFSRSPAICPACNSTLSGKLDIVRTELSPSEEYKAMVLAGLRPEIVLDISSRALAFWTYQTSGTSLSRIQFTAN

SEQ ID NO: 882322 - protein, 403 aa, Homo sapiens
MQRAVSVVARLGFRLQAFPPALCRPLSCAQEVLRRTPLYDFHLAHGGKMVAFAGWSLPVQYRDSHTDSHLHTRQHCSLFDVSHMLQTKILGSDRVKLMESLVVGDIAELRPNQGTLSLFTNEAGGILDDLIVTNTSEGHLYVVSNAGCWEKDLALMQDKVRELQNQGRDVGLEVLDNALLALQGPTAAQVLQAGVADDLRKLPFMTSAVMEVFGVSGCRVTRCGYTGEDGVEISVPVAGAVHLATAILKNPEVKLAGLAARDSLRLEAGLCLYGNDIDEHTTPVEGSLSWTLGKRRRAAMDFPGAKVIVPQLKGRVQRRRVGLMCEGAPMRAHSPILNMEGTKIGTVTSGCPSPSLKKNVAMGYVPCEYSRPGTMLLVEVRRKQQMAVVSKMPFVPTNYYTLK

SEQ ID NO: 882323 - protein, 386 aa, Homo sapiens
MQRAVSVVARLGFRLQAFPPALCRPLSCAQEVLRRTPLYDFHLAHGGKMVAFAGWSLPVQYRDSHTDSHLHTRQHCSLFDVSHMLQTKILGSDRVKLMESLVVGDIAELRPNQGTLSLFTNEAGGILDDLIVTNTSEGHLYVVSNAGCWEKDLALMQDKVRELQNQGRDVGLEVLDNALLALQGPTAAQVLQAGVADDLRKLPFMTSAVMEVFGVSGCRVTRCGYTGEDGVEISVPVAGAVHLATAILKNPEVKLAGLAARDSLRLEAGLCLYGNDIDEHTTPVEGSLSWTLGKRRRAAMDFPGAKVIVPQLKGRVQRRRVGLMCEGAPMRAHSPILNMEGTKIGTVTSGCPSPSLKKNVAMGYVPCEYSRPGTMLLVELPSGPCF

SEQ ID NO: 882324 - protein, 385 aa, Homo sapiens
MQRAVSVVARLGFRLQAFPPALCRPLSCAQEVLRRTPLYDFHLAHGGKMVAFAGWSLPVQYRDSHTDSHLHTRQHCSLFDVSHMLQTKILGSDRVKLMESLVVGDIAELRPNQGTLSLFTNEAGGILDDLIVTNTSEGHLYVVSNAGCWEKDLALMQDKVRELQNQGRDVGLEVLDNALLALQGPTAAQVLQAGVADDLRKLPFMTSAVMEVFGVSGCRVTRCGYTGEDGVEISVPVAGAVHLATAILEAGLCLYGNDIDEHTTPVEGSLSWTLGKRRRAAMDFPGAKVIVPQLKGRVQRRRVGLMCEGAPMRAHSPILNMEGTKIGTVTSGCPSPSLKKNVAMGYVPCEYSRPGTMLLVEVRRKQQMAVVSKMPFVPTNYYTLK

SEQ ID NO: 882325 - protein, 439 aa, Homo sapiens [sequence omitted]

SEQ ID NO: 882326 - protein, 403 aa, Homo sapiens; identical to SEQ ID NO: 882322

SEQ ID NO: 882327 - protein, 541 aa, Homo sapiens
MQRAVSVVARLGFRLQAFPPALCRPLSCAQEVLRRTPLYDFHLAHGGKMVAFAGWSLPVQYRDSHTDSHLHTRQHCSLFDVSHMLQTKILGSDRVKLMESLVVGDIAELRPNQGTLSLFTNEAGGILDDLIVTNTSEGHLYVVSNAGCWEKDLALMQDKVRELQNQGRDVGLEVLDNALLALQGERAGLGLEPTFAFLAFIDCLAQRPYQEECVEGVIFVCHNFKFCILPSSYLPQGSMGYGTRASSPTCRVRHAQGLFWSLNKALVQLRGMLGPGYLVTGSLGPGPTAAQVLQAGVADDLRKLPFMTSAVMEVFGVSGCRVTRCGYTGEDGVEVCQEVVWGQYRAQDACEGLGVCGTGSFPSALWCFIQISVPVAGAVHLATAILKNPEVKLAGLAARDSLRLEAGLCLYGNDIDEHTTPVEGSLSWTLGKRRRAAMDFPGAKVIVPQLKGRVQRRRVGLMCEGAPMRAHSPILNMEGTKIGTVTSGCPSPSLKKNVAMGYVPCEYSRPGTMLLVEVRRKQQMAVVSKMPFVPTNYYTLK

SEQ ID NO: 882328 - protein, 342 aa, Homo sapiens
MESLVVGDIAELRPNQGTLSLFTNEAGGILDDLIVTNTSEGHLYVVSNAGCWEKDLALMQDKVRELQNQGRDVGLEVLDNALLALQGPTAAQVLQAGVADDLRKLPFMTSAVMEVFGVSGCRVTRCGYTGEDGVEVCQEVVWGQYRAQDACEGLGVCGTGSFPSALWCFIQISVPVAGAVHLATAILKNPEVKLAGLAARDSLRLEAGLCLYGNDIDEHTTPVEGSLSWTLGKRRRAAMDFPGAKVIVPQLKGRVQRRRVGLMCEGAPMRAHSPILNMEGTKIGTVTSGCPSPSLKKNVAMGYVPCEYSRPGTMLLVEVRRKQQMAVVSKMPFVPTNYYTLK

SEQ ID NO: 882329 - protein, 270 aa, Homo sapiens [sequence omitted]

SEQ ID NO: 882330 - protein, 203 aa, Homo sapiens
MQRAVSVVARLGFRLQAFPPALCRPLSCAQEVLRRTPLYDFHLAHGGKMVAFAGWSLPVQYRDSHTDSHLHTRQHCSLFDVSHMLQTKILGSDRVKLMESLVVGDIAELRPNQGTLSLFTNEAGGILDDLIVTNTSEGHLYVVSNAGCWEKDLALMQDKVRELQNQGRDVGLEVLDNALLALQGERAGLGLEPTFAFLASLTA

SEQ ID NO: 882331 - protein, 1398 aa, Homo sapiens
  misc_feature (90)..(90): Xaa can be any naturally occurring amino acid
RAVERRWDPCGRDPRLPRGPAQPQRTKEHVRAGEGPSSGRHKAPVAAGPAPRSCPPGLRGGPLGQCAAARPAGPGPQHGAPRTPGGPRAXPLLLPLSLLALLALLGGGGGGGAAALPAGCKHDGRPRGAGRAAGAAEGKVVCSSLELAQVLPPDTLPNRTVTLILSNNKISELKNGSFSGLSLLERLDLRNNLISSIDPGAFWGLSSLKRLDLTNNRIGCLNADIFRGLTNLVRLNLSGNLFSSLSQGTFDYLASLRSLEFQTEYLLCDCNILWMHRWVKEKNITVRDTRCVYPKSLQAQPVTGVKQELLTCDPPLELPSFYMTPSHRQVVFEGDSLPFQCMASYIDQDMQVLWYQDGRIVETDESQGIFVEKNMIHNCSLIASALTISNIQAGSTGNWGCHVQTKRGNNTRTVDIVVLESSAQYCPPERVVNNKGDFRWPRTLAGITAYLQCTRNTHGSGIYPGNPQDERKAWRRCDRGGFWADDDYSRCQYANDVTRVLYMFNQMPLNLTNAVATARQLLAYTVEAANFSDKMDVIFVAEMIEKFGRFTKEEKSKELGDVMVDIASNIMLADERVLWLAQREAKACSRIVQCLQRIATYRLAGGAHVYSTYSPNIALEAYVIKSTGFTGMTCTVFQKVAASDRTGLSDYGRRDPEGNLDKQLSFKCNVSNTFSSLALKNTIVEASIQLPPSLFSPKQKRELRPTDDSLYKLQLIAFRNGKLFPATGNSTNLADDGKRRTVVTPVILTKIDGVNVDTHHIPVNVTLRRIAHGADAVAARWDFDLLNGQGGWKSDGCHILYSDENITTIQCYSLSNYAVLMDLTGSELYTQAASLLHPVVYTTAIILLLCLLAVIVSYIYHHSLIRISLKSWHMLVNLCFHIFLTCVVFVGGITQTRNASICQAVGIILHYSTLATVLWVGVTARNIYKQVTKKAKRCQDPDEPPPPPRPMLRFYLIGGGIPIIVCGITAAANIKNYGSRPNAPYCWMAWEPSLGAFYGPASFITFVNCMYFLSIFIQLKRHPERKYELKEPTEEQQRLAANENGEINHQDSMSLSLISTSALENEHTFHSQLLGASLTLLLYVALWMFGALAVSLYYPLDLVFSFVFGATSLSFSAFFVVHHCVNREDVRLAWIMTCCPGRSSYSVQVNVQPPNSNGTNGEAPKCPNSSAESSCTNKSASSFKNSSQGCKLTNLQAAAAQCHANSLPLNSTPQLDNSLTEHSMDNDIKMHVAPLEVQFRTNVHSSRHHKNRSKGHRASRLTVLREYAYDVPTSVEGSVQNGLPKSRLGNNEGHSRSRRAYLAYRERQYNPPQQDSSDACSTLPKSSRNFEKPVSTTSKKDALRKPAVVELENQQKSYGLNLAIQNGPIKSNGQEGPLLGTDSTGNVRTGLWKHETTV

SEQ ID NO: 882332 - protein, 1095 aa, Homo sapiens
MPLKRNNSKYPPLELPSFYMTPSHRQVVFEGDSLPFQCMASYIDQDMQVLWYQDGRIVETDESQGIFVEKNMIHNCSLIASALTISNIQAGSTGNWGCHVQTKRGNNTRTVDIVVLESSAQYCPPERVVNNKGDFRWPRTLAGITAYLQCTRNTHGSGIYPGNPQDERKAWRRCDRGGFWADDDYSRCQYANDVTRVLYMFNQMPLNLTNAVATARQLLAYTVEAANFSDKMDVIFVAEMIEKFGRFTKEEKSKELGDVMVDIASNIMLADERVLWLAQREAKACSRIVQCLQRIATYRLAGGAHVYSTYSPNIALEAYVIKSTGFTGMTCTVFQKVAASDRTGLSDYGRRDPEGNLDKQLSFKCNVSNTFSSLALKNTIVEASIQLPPSLFSPKQKRELRPTDDSLYKLQLIAFRNGKLFPATGNSTNLADDGKRRTVVTPVILTKIDGVNVDTHHIPVNVTLRRIAHGADAVAARWDFDLLNGQGGWKSDGCHILYSDENITTIQCYSLSNYAVLMDLTGSELYTQAASLLHPVVYTTAIILLLCLLAVIVSYIYHHSLIRISLKSWHMLVNLCFHIFLTCVVFVGGITQTRNASICQAVGIILHYSTLATVLWVGVTARNIYKQVTKKAKRCQDPDEPPPPPRPMLRFYLIGGGIPIIVCGITAAANIKNYGSRPNAPYCWMAWEPSLGAFYGPASFITFVNCMYFLSIFIQLKRHPERKYELKEPTEEQQRLAANENGEINHQDSMSLSLISTSALENEHTFHSQLLGASLTLLLYVALWMFGALAVSLYYPLDLVFSFVFGATSLSFSAFFVVHHCVNREDVRLAWIMTCCPGRSSYSVQVNVQPPNSNGTNGEAPKCPNSSAESSCTNKSASSFKNSSQGCKLTNLQAAAAQCHANSLPLNSTPQLDNSLTEHSMDNDIKMHVAPLEVQFRTNVHSSRHHKNRSKGHRASRLTVLREYAYDVPTSVEGSVQNGLPKSRLGNNEGHSRSRRAYLAYRERQYNPPQQDSSDACSTLPKSSRNFEKPVSTTSKKDALRKPAVVELENQQKSYGLNLAIQNGPIKSNGQEGPLLGTDSTGNVRTGLWKHETTV

SEQ ID NO: 882333 - protein, 681 aa, Homo sapiens
PLLADPATGSGNSTNLADDGKRRTVVTPVILTKIDGVNVDTHHIPVNVTLRRIAHGADAVAARWDFDLLNGQGGWKSDGCHILYSDENITTIQCYSLSNYAVLMDLTGSELYTQAASLLHPVVYTTAIILLLCLLAVIVSYIYHHSLIRISLKSWHMLVNLCFHIFLTCVVFVGGITQTRNASICQAVGIILHYSTLATVLWVGVTARNIYKQVTKKAKRCQDPDEPPPPPRPMLRFYLIGGGIPIIVCGITAAANIKNYGSRPNAPYCWMAWEPSLGAFYGPASFITFVNCMYFLSIFIQLKRHPERKYELKEPTEEQQRLAANENGEINHQDSMSLSLISTSALENEHTFHSQLLGASLTLLLYVALWMFGALAVSLYYPLDLVFSFVFGATSLSFSAFFVVHHCVNREDVRLAWIMTCCPGRSSYSVQVNVQPPNSNGTNGEAPKCPNSSAESSCTNKSASSFKNSSQGCKLTNLQAAAAQCHANSLPLNSTPQLDNSLTEHSMDNDIKMHVAPLEVQFRTNVHSSRHHKNRSKGHRASRLTVLREYAYDVPTSVEGSVQNGLPKSRLGNNEGHSRSRRAYLAYRERQYNPPQQDSSDACSTLPKSSRNFEKPVSTTSKKDALRKPAVVELENQQKSYGLNLAIQNGPIKSNGQEGPLLGTDSTGNVRTGLWKHETTV

SEQ ID NO: 882334 - protein, 1380 aa, Homo sapiens
  misc_feature (90)..(90): Xaa can be any naturally occurring amino acid
RAVERRWDPCGRDPRLPRGPAQPQRTKEHVRAGEGPSSGRHKAPVAAGPAPRSCPPGLRGGPLGQCAAARPAGPGPQHGAPRTPGGPRAXPLLLPLSLLALLALLGGGGGGGAAALPAGCKHDGRPRGAGRAAGAAEGKVVCSSLELAQVLPPDTLPNRTVTLILSNNKISELKNGSFSGLSLLERLDLRNNLISSIDPGAFWGLSSLKRLDLTNNRIGCLNADIFRGLTNLVRLNLSGNLFSSLSQGTFDYLASLRSLEFQTEYLLCDCNILWMHRWVKEKNITVRDTRCVYPKSLQAQPVTGVKQELLTCDPPLELPSFYMTPSHRQVVFEGDSLPFQCMASYIDQDMQVLWYQDGRIVETDESQGIFVEKNMIHNCSLIASALTISNIQAGSTGNWGCHVQTKRGNNTRTVDIVVLESSAQYCPPERVVNNKGDFRWPRTLAGITAYLQCTRNTHGSGIYPGNPQDERKAWRRCDRGGFWADDDYSRCQYANDVTRVLYMFNQMPLNLTNAVATARQLLAYTVEAANFSDKMDVIFVAEMIEKFGRFTKEEKSKELGDVMVDIASNIMLADERVLWLAQREAKACSRIVQCLQRIATYRLAGGAHVYSTYSPNIALEAYVIKSTGFTGMTCTVFQKVAASDRTGLSDYGRRDPEGNLDKQLSFKCNVSNTFSSLALKNTIVEASIQLPPSLFSPKQKRELRPTDDSLYKLQLIAFRNGKLFPATGNSTNLADDGKRRTVVTPVILTKIDGVNVDTHHIPVNVTLRRIAHGADAVAARWDFDLLNGQGGWKSDGCHILYSDENITTIQCYSLSNYAVLMDLTGSELYTQAASLLHPVVYTTAIILLLCLLAVIVSYIYHHSLIRISLKSWHMLVNLCFHIFLTCVVFVGGITQTRNASICQAVGIILHYSTLATVLWVGVTARNIYKQVTKKAKRCQDPDEPPPPPRPMLRFYLIGGGIPIIVCGITAAANIKNYGSRPNAPYCWMAWEPSLGAFYGPASFITFVNCMYFLSIFIQLKRHPERKYELKEPTEEQQRLAANENGEINHQDSMSLSLISTSALENEHTFHSQLLGASLTLLLYVALWMFGALAVSLYYPLDLVFSFVFGATSLSFSAFFVVHHCVNREDVRLAWIMTCCPGRSSYSVQVNVQPPNSNGTNGEAPKCPNSSAESSCTNKSASSFKNSSQGCKLTNLQAAAAQCHANSLPLNSTPQLDNSLTEHSMDNDIKMHVAPLEVQFRTNVHSSRHHKNRSKGHRASRLTVLREYAYDVPTSVEGSVQNGLPTYRERQYNPPQQDSSDACSTLPKSSRNFEKPVSTTSKKDALRKPAVVELENQQKSYGLNLAIQNGPIKSNGQEGPLLGTDSTGNVRTGLWKHETTV

SEQ ID NO: 882335 - protein, 846 aa, Homo sapiens
  misc_feature (90)..(90): Xaa can be any naturally occurring amino acid
RAVERRWDPCGRDPRLPRGPAQPQRTKEHVRAGEGPSSGRHKAPVAAGPAPRSCPPGLRGGPLGQCAAARPAGPGPQHGAPRTPGGPRAXPLLLPLSLLALLALLGGGGGGGAAALPAGCKHDGRPRGAGRAAGAAEGKVVCSSLELAQVLPPDTLPNRTVTLILSNNKISELKNGSFSGLSLLERLDLRNNLISSIDPGAFWGLSSLKRLDLTNNRIGCLNADIFRGLTNLVRLNLSGNLFSSLSQGTFDYLASLRSLEFQTEYLLCDCNILWMHRWVKEKNITVRDTRCVYPKSLQAQPVTGVKQELLTCDPPLELPSFYMTPSHRQVVFEGDSLPFQCMASYIDQDMQVLWYQDGRIVETDESQGIFVEKNMIHNCSLIASALTISNIQAGSTGNWGCHVQTKRGNNTRTVDIVVLESSAQYCPPERVVNNKGDFRWPRTLAGITAYLQCTRNTHGSGIYPGNPQDERKAWRRCDRGGFWADDDYSRCQYANDVTRVLYMFNQMPLNLTNAVATARQLLAYTVEAANFSDKMDVIFVAEMIEKFGRFTKEEKSKELGDVMVDIASNIMLADERVLWLAQREAKACSRIVQCLQRIATYRLAGGAHVYYNKCPNSSAESSCTNKSASSFKNSSQGCKLTNLQAAAAQCHANSLPLNSTPQLDNSLTEHSMDNDIKMHVAPLEVQFRTNVHSSRHHKNRSKGHRASRLTVLREYAYDVPTSVEGSVQNGLPKSRLGNNEGHSRSRRAYLAYRERQYNPPQQDSSDACSTLPKSSRNFEKPVSTTSKKDALRKPAVVELENQQKSYGLNLAIQNGPIKSNGQEGPLLGTDSTGNVRTGLWKHETTV

SEQ ID NO: 882336 - protein, 211 aa, Homo sapiens
  misc_feature (90)..(90): Xaa can be any naturally occurring amino acid
RAVERRWDPCGRDPRLPRGPAQPQRTKEHVRAGEGPSSGRHKAPVAAGPAPRSCPPGLRGGPLGQCAAARPAGPGPQHGAPRTPGGPRAXPLLLPLSLLALLALLGGGGGGGAAALPAGCKHDGRPRGAGRAAGAAEGKVVCSSLELAQVLPPDTLPNRTVTLILSNNKISELKNGSFSGLSLLERLDLRNNLISSIDPGAFWGLSSLKRL

SEQ ID NO: 882337 - protein, 226 aa, Homo sapiens
  misc_feature (90)..(90): Xaa can be any naturally occurring amino acid
RAVERRWDPCGRDPRLPRGPAQPQRTKEHVRAGEGPSSGRHKAPVAAGPAPRSCPPGLRGGPLGQCAAARPAGPGPQHGAPRTPGGPRAXPLLLPLSLLALLALLGGGGGGGAAALPAGCKHDGRPRGAGRAAGAAEGKVVCSSLELAQVLPPDTLPNRTVTLILSNNKISELKNGSFSGLSLLERLLYRKHGAGICSASKEASGSLQSWWKAKLACHMAKTEARM

SEQ ID NO: 882338 - protein, 1216 aa, Homo sapiens
MAGAQPGVHALQLKPVCVSDSLKKGTKFVKWDDDSTIVTPIILRTDPQGFFFYWTDQNKETELLDLSLVKDARCGRHAKAPKDPKLRELLDVGNIGRLEQRMITVVYGPDLVNISHLNLVAFQEEVAKEWTNEVFSLATNLLAQNMSRDAFLEKAYTKLKLQVTPEGRIPLKNIYRLFSADRKRVETALEACSLPSSRNDSIPQEDFTPEVYRVFLNNLCPRPEIDNIFSEFGAKSKPYLTVDQMMDFINLKQRDPRLNEILYPPLKQEQVQVLIEKYEPNNSLARKGQISVDGFMRYLSGEENGVVSPEKLDLNEDMSQPLSHYFINSSHNTYLTAGQLAGNSSVEMYRQVLLSGCRCVELDCWKGRTAEEEPVITHGFTMTTEISFKEVIEAIAECAFKTSPFPILLSFENHVDSPKQQAKMAEYCRLIFGDALLMEPLEKYPLESGVPLPSPMDLMYKILVKNKKKSHKSSEGSGKKKLSEQASNTYSDSSSMFEPSSPGAGEADTESDDDDDDDDCKKSSMDEGTAGSEAMATEEMSNLVNYIQPVKFESFEISKKRNKSFEMSSFVETKGLEQLTKSPVEFVEYNKMQLSRIYPKGTRVDSSNYMPQLFWNAGCQMVALNFQTMDLAMQINMGMYEYNGKSGYRLKPEFMRRPDKHFDPFTEGIVDGIVANTLSVKIISGQFLSDKKVGTYVEVDMFGLPVDTRRKAFKTKTSQGNAVNPVWEEEPIVFKKVVLPTLACLRIAVYEEGGKFIGHRILPVQAIRPGYHYICLRNERNQPLTLPAVFVYIEVKDYVPDTYADVIEALSNPIRYVNLMEQRAKQLAALTLEDEEEVKKEADPGETPSEAPSEARTTPAENGVNHTTTLTPKPPSQALHSQPAPGSVKAPAKTEDLIQSVLTEVEAQTIEELKQQKSFVKLQKKHYKEMKDLVKRHHKKTTDLIKEHTTKYNEIQNDYLRRRAALEKSAKKDSKKKSEPSSPDHGSSTIEQDLAALDAEMTQKLIDLKDKQQQQLLNLRQEQYYSEKYQKREHIKLLIQKLTDVAEECQNNQLKKLKEICEKEKKELKKKMDKKRQEKITEAKSKDKSQMEEEKTEMIRSYIQEVVQYIKRLEEAQSKRQEKLVEKHKEIRQQILDEKPKLQVELEQEYQDKFKRLPLEILEFVQEAMKGKISEDSNHGSAPLSLSSDPGKVNHKTPSSEELGGDIPGKEFDTPL

SEQ ID NO: 882339 - protein, 1115 aa, Homo sapiens
MITVVYGPDLVNISHLNLVAFQEEVAKEWTNEVFSLATNLLAQNMSRDAFLEKAYTKLKLQVTPEGRIPLKNIYRLFSADRKRVETALEACSLPSSRNDSIPQEDFTPEVYRVFLNNLCPRPEIDNIFSEFGAKSKPYLTVDQMMDFINLKQRDPRLNEILYPPLKQEQVQVLIEKYEPNNSLARKGQISVDGFMRYLSGEENGVVSPEKLDLNEDMSQPLSHYFINSSHNTYLTAGQLAGNSSVEMYRQVLLSGCRCVELDCWKGRTAEEEPVITHGFTMTTEISFKEVIEAIAECAFKTSPFPILLSFENHVDSPKQQAKMAEYCRLIFGDALLMEPLEKYPLESGVPLPSPMDLMYKILVKNKKKSHKSSEGSGKKKLSEQASNTYSDSSSMFEPSSPGAGEADTESDDDDDDDDCKKSSMDEGTAGSEAMATEEMSNLVNYIQPVKFESFEISKKRNKSFEMSSFVETKGLEQLTKSPVEFVEYNKMQLSRIYPKGTRVDSSNYMPQLFWNAGCQMVALNFQTMDLAMQINMGMYEYNGKSGYRLKPEFMRRPDKHFDPFTEGIVDGIVANTLSVKIISGQFLSDKKVGTYVEVDMFGLPVDTRRKAFKTKTSQGNAVNPVWEEEPIVFKKVVLPTLACLRIAVYEEGGKFIGHRILPVQAIRPGYHYICLRNERNQPLTLPAVFVYIEVKDYVPDTYADVIEALSNPIRYVNLMEQRAKQLAALTLEDEEEVKKEADPGETPSEAPSEARTTPAENGVNHTTTLTPKPPSQALHSQPAPGSVKAPAKTEDLIQSVLTEVEAQTIEELKQQKSFVKLQKKHYKEMKDLVKRHHKKTTDLIKEHTTKYNEIQNDYLRRRAALEKSAKKDSKKKSEPSSPDHGSSTIEQDLAALDAEMTQKLIDLKDKQQQQLLNLRQEQYYSEKYQKREHIKLLIQKLTDVAEECQNNQLKKLKEICEKEKKELKKKMDKKRQEKITEAKSKDKSQMEEEKTEMIRSYIQEVVQYIKRLEEAQSKRQEKLVEKHKEIRQQILDEKPKLQVELEQEYQDKFKRLPLEILEFVQEAMKGKISEDSNHGSAPLSLSSDPGKVNHKTPSSEELGGDIPGKEFDTPL

SEQ ID NO: 882340 - protein, 793 aa, Homo sapiens
MAEYCRLIFGDALLMEPLEKYPLESGVPLPSPMDLMYKILVKNKKKSHKSSEGSGKKKLSEQASNTYSDSSSMFEPSSPGAGEADTESDDDDDDDDCKKSSMDEGTAGSEAMATEEMSNLVNYIQPVKFESFEISKKRNKSFEMSSFVETKGLEQLTKSPVEFVEYNKMQLSRIYPKGTRVDSSNYMPQLFWNAGCQMVALNFQTMDLAMQINMGMYEYNGKSGYRLKPEFMRRPDKHFDPFTEGIVDGIVANTLSVKIISGQFLSDKKVGTYVEVDMFGLPVDTRRKAFKTKTSQGNAVNPVWEEEPIVFKKVVLPTLACLRIAVYEEGGKFIGHRILPVQAIRPGYHYICLRNERNQPLTLPAVFVYIEVKDYVPDTYADVIEALSNPIRYVNLMEQRAKQLAALTLEDEEEVKKEADPGETPSEAPSEARTTPAENGVNHTTTLTPKPPSQALHSQPAPGSVKAPAKTEDLIQSVLTEVEAQTIEELKQQKSFVKLQKKHYKEMKDLVKRHHKKTTDLIKEHTTKYNEIQNDYLRRRAALEKSAKKDSKKKSEPSSPDHGSSTIEQDLAALDAEMTQKLIDLKDKQQQQLLNLRQEQYYSEKYQKREHIKLLIQKLTDVAEECQNNQLKKLKEICEKEKKELKKKMDKKRQEKITEAKSKDKSQMEEEKTEMIRSYIQEVVQYIKRLEEAQSKRQEKLVEKHKEIRQQILDEKPKLQVELEQEYQDKFKRLPLEILEFVQEAMKGKISEDSNHGSAPLSLSSDPGKVNHKTPSSEELGGDIPGKEFDTPL

SEQ ID NO: 882341 - protein, 1216 aa, Homo sapiens; identical to SEQ ID NO: 882338

SEQ ID NO: 882342 - protein, 1216 aa, Homo sapiens; identical to SEQ ID NO: 882338

SEQ ID NO: 882343 - protein, 1074 aa, Homo sapiens
HTHHSHLRNGFFAELGKPGRRCRSLLLWVLRGGGRYHSVGSRVRAPLEACSLPSSRNDSIPQEDFTPEVYRVFLNNLCPRPEIDNIFSEFGAKSKPYLTVDQMMDFINLKQRDPRLNEILYPPLKQEQVQVLIEKYEPNNSLARKGQISVDGFMRYLSGEENGVVSPEKLDLNEDMSQPLSHYFINSSHNTYLTAGQLAGNSSVEMYRQVLLSGCRCVELDCWKGRTAEEEPVITHGFTMTTEISFKEVIEAIAECAFKTSPFPILLSFENHVDSPKQQAKMAEYCRLIFGDALLMEPLEKYPLESGVPLPSPMDLMYKILVKNKKKSHKSSEGSGKKKLSEQASNTYSDSSSMFEPSSPGAGEADTESDDDDDDDDCKKSSMDEGTAGSEAMATEEMSNLVNYIQPVKFESFEISKKRNKSFEMSSFVETKGLEQLTKSPVEFVEYNKMQLSRIYPKGTRVDSSNYMPQLFWNAGCQMVALNFQTMDLAMQINMGMYEYNGKSGYRLKPEFMRRPDKHFDPFTEGIVDGIVANTLSVKIISGQFLSDKKVGTYVEVDMFGLPVDTRRKAFKTKTSQGNAVNPVWEEEPIVFKKVVLPTLACLRIAVYEEGGKFIGHRILPVQAIRPGYHYICLRNERNQPLTLPAVFVYIEVKDYVPDTYADVIEALSNPIRYVNLMEQRAKQLAALTLEDEEEVKKEADPGETPSEAPSEARTTPAENGVNHTTTLTPKPPSQALHSQPAPGSVKAPAKTEDLIQSVLTEVEAQTIEELKQQKSFVKLQKKHYKEMKDLVKRHHKKTTDLIKEHTTKYNEIQNDYLRRRAALEKSAKKDSKKKSEPSSPDHGSSTIEQDLAALDAEMTQKLIDLKDKQQQQLLNLRQEQYYSEKYQKREHIKLLIQKLTDVAEECQNNQLKKLKEICEKEKKELKKKMDKKRQEKITEAKSKDKSQMEEEKTEMIRSYIQEVVQYIKRLEEAQSKRQEKLVEKHKEIRQQILDEKPKLQVELEQEYQDKFKRLPLEILEFVQEAMKGKISEDSNHGSAPLSLSSDPGKVNHKTPSSEELGGDIPGKEFDTPL

SEQ ID NO: 882344 - protein, 1255 aa, Homo sapiens
MAGAQPGVHALQLKPVCVSDSLKKGTKFVKWDDDSTIVTPIILRTDPQGFFFYWTDQNKETELLDLSLVKDARCGRHAKAPKDPKLRELLDVGNIGRLEQRMITVVYGPDLVNISHLNLVAFQEEVAKEWTNEVFSLATNLLAQNMSRDAFLEKAYTKLKLQVTPEGRIPLKNIYRLFSADRKRVETALEACSLPSSRNDSIPQEDFTPEVYRVFLNNLCPRPEIDNIFSEFGAKSKPYLTVDQMMDFINLKQRDPRLNEILYPPLKQEQVQVLIEKYEPNNSLARKGQISVDGFMRYLSGEENGVVSPEKLDLNEDMSQPLSHYFINSSHNTYLTAGQLAGNSSVEMYRQVLLSGCRCVELDCWKGRTAEEEPVITHGFTMTTEISFKEVIEAIAECAFKTSPFPILLSFENHVDSPKQQAKMAEYCRLIFGDALLMEPLEKYPLESGVPLPSPMDLMYKILVKNKKKSHKSSEGSGKKKLSEQASNTYSDSSSMFEPSSPGAGEADTESDDDDDDDDCKKSSMDEGTAGSEAMATEEMSNLVNYIQPVKFESFEISKKRNKSFEMSSFVETKGLEQLTKSPVEFVEYNKMQLSRIYPKGTRVDSSNYMPQLFWNAGCQMVALNFQTMDLAMQINMGMYEYNGKSGYRLKPEFMRRPDKHFDPFTEGIVDGIVANTLSVKIISGQFLSDKKVGTYVEVDMFGLPVDTRRKAFKTKTSQGNAVNPVWEEEPIVFKKVVLPTLACLRIAVYEEGGKFIGHRILPVQAIRPGYHYICLRNERNQPLTLPAVFVYIEVKDYVPDTYADVIEALSNPIRYVNLMEQRAKQLAALTLEDEEEVKKEADPGETPSEAPSEARTTPAENGVNHTTTLTPKPPSQALHSQPAPGSVKAPAKTEDLIQSVLTEVEAQTIEELKQQKSFVKLQKKHYKEMKDLVKRHHKKTTDLIKEHTTKYNEIQNDYLRRRAALEKSAKKDSKKKSEPSSPDHGSSTIEQDLAALDAEMTQKLIDLKDKQQQQLLNLRQEQYYSEKYQKREHIKLLIQKLTDVAEECQNNQLKKLKEICEKEKKELKKKMDKKRQEKITEAKSKDKSQMEEEKTEMIRSYIQEVVQYIKRLEEAQSKRQEKLVEKHKEIRQQILDEKPKGEGSSSFLSETCHEDPSVPPTLLPPTLKLSSGDHRPSGQLQVELEQEYQDKFKRLPLEILEFVQEAMKGKISEDSNHGSAPLSLSSDPGKVNHKTPSSEELGGDIPGKEFDTPL

SEQ ID NO: 882345 - protein, 1173 aa, Homo sapiens
MAGAQPGVHALQLKPVCVSDSLKKGTKFVKWDDDSTIVTPIILRTDPQGFFFYWTDQNKETELLDLSLVKDARCGRHAKAPKDPKLRELLDVGNIGRLEQRMITVVYGPDLVNISHLNLVAFQEEVAKEWTNEVFSLATNLLAQNMSRDAFLEKAYTKLKLQVTPEGRIPLKNIYRLFSADRKRVETALEACSLPSSRNDSIPQEDFTPEVYRVFLNNLCPRPEIDNIFSEFGAKSKPYLTVDQMMDFINLKQRDPRLNEILYPPLKQEQVQVLIEKYEPNNSLARKGQISVDGFMRYLSGEENGVVSPEKLDLNEDMSQPLSHYFINSSHNTYLTAGQLAGNSSVEMYRQVLLSGCRCVELDCWKGRTAEEEPVITHGFTMTTEISFKEVIEAIAECAFKTSPFPILLSFENHVDSPKQQAKMAEYCRLIFGDALLMEPLEKYPLESGVPLPSPMDLMYKILVKNKKKSHKSSEGSGKKKLSEQASNTYSDSSSMFEPSSPGAGEADTESDDDDDDDDCKKSSMDEGTAGSEAMATEEMSNLVNYIQPVKFESFEISKKRNKSFEMSSFVETKGLEQLTKSPVEFVEYNKMQLSRIYPKGTRVDSSNYMPQLFWNAGCQMVALNFQTMDLAMQINMGMYEYNGKSGYRLKPEFMRRPDKHFDPFTEGIVDGIVANTLSVKIISGQFLSDKKVGTYVEVDMFGLPVDTRRKAFKTKTSQGNAVNPVWEEEPIVFKKVVLPTLACLRIAVYEEGGKFIGHRILPVQAIRPGYHYICLRNERNQPLTLPAVFVYIEVKDYVPDTYADVIEALSNPIRYVNLMEQRAKQLAALTLEDEEEVKKEADPGETPSEAPSEARTTPAENGVNHTTTLTPKPPSQALHSQPAPGSVKAPAKTEDLIQSVLTEVEAQTIEELKQQKSFVKLQKKHYKEMKDLVKRHHKKTTDLIKEHTTKYNEIQNDYLRRRAALEKSAKKDSKKKSEPSSPDHGSSTIEQDLAALDAEMTQKLIDLKDKQQQQLLNLRQEQYYSEKYQKREHIKLLIQKLTDVAEECQNNQLKKLKEICEKEKKELKKKMDKKRQEKITEAKSKDKSQMEEEKTEMIRSYIQEVVQYIKRLEEAQSKRQEKLVEKHKEIRQQILDEKPKGEGSSSFLSETCHEDPSVSPNFTPPNPQALKW

SEQ ID NO: 882346 - protein, 720 aa, Homo sapiens
MAEYCRLIFGDALLMEPLEKYPLESGVPLPSPMDLMYKILVKNKKKSHKSSEGSGKKKLSEQASNTYSDSSSMFEPSSPGAGEADTESDDDDDDDDCKKSSMDEGTAGSEAMATEEMSNLVNYIQPVKFESFEISKKRNKSFEMSSFVETKGLEQLTKSPVEFVEYNKMQLSRIYPKGTRVDSSNYMPQLFWNAGCQMVALNFQTMDLAMQINMGMYEYNGKSGYRLKPEFMRRPDKHFDPFTEGIVDGIVANTLSVKIISGQFLSDKKVGTYVEVDMFGLPVDTRRKAFKTKTSQGNAVNPVWEEEPIVFKKVVLPTLACLRIAVYEEGGKFIGHRILPVQAIRPGYHYICLRNERNQPLTLPAVFVYIEVKDYVPDTYADVIEALSNPIRYVNLMEQRAKQLAALTLEDEEEVKKEADPGETPSEAPSEARTTPAENGVNHTTTLTPKPPSQALHSQPAPGSVKAPAKTEDLIQSVLTEVEAQTIEELKQQKSFVKLQKKHYKEMKDLVKRHHKKTTDLIKEHTTKYNEIQNDYLRRRAALEKSAKKDSKKKSEPSSPDHGSSTIEQDLAALDAEMTQKLIDLKDKQQQQLLNLRQEQYYSEKYQKREHIKLLIQKLTDVAEECQNNQLKKLKEICEKEKKELKKKMDKKRQEKITEAKSKDKSQMEEEKTEMIRSYIQEVVQYIKRLEEAQSKRQEKLVEKHKEIRQQILDEKPKVP

SEQ ID NO: 882347 - protein, 877 aa, Homo sapiens
MAGAQPGVHALQLKPVCVSDSLKKGTKFVKWDDDSTIVTPIILRTDPQGFFFYWTDQNKETELLDLSLVKDARCGRHAKAPKDPKLRELLDVGNIGRLEQRMITVVYGPDLVNISHLNLVAFQEEVAKEWTNEVFSLATNLLAQNMSRDAFLEKAYTKLKLQVTPEGRIPLKNIYRLFSADRKRVETALEACSLPSSRNDSIPQEDFTPEVYRVFLNNLCPRPEIDNIFSEFGAKSKPYLTVDQMMDFINLKQRDPRLNEILYPPLKQEQVQVLIEKYEPNNSLARKGQISVDGFMRYLSGEENGVVSPEKLDLNEDMSQPLSHYFINSSHNTYLTAGQLAGNSSVEMYRQVLLSGCRCVELDCWKGRTAEEEPVITHGFTMTTEISFKEVIEAIAECAFKTSPFPILLSFENHVDSPKQQAKMAEYCRLIFGDALLMEPLEKYPLESGVPLPSPMDLMYKILVKNKKKSHKSSEGSGKKKLSEQASNTYSDSSSMFEPSSPGAGEADTESDDDDDDDDCKKSSMDEGTAGSEAMATEEMSNLVNYIQPVKFESFEISKKRNKSFEMSSFVETKGLEQLTKSPVEFVEYNKMQLSRIYPKGTRVDSSNYMPQLFWNAGCQMVALNFQTMDLAMQINMGMYEYNGKSGYRLKPEFMRRPDKHFDPFTEGIVDGIVANTLSVKIISGQFLSDKKVGTYVEVDMFGLPVDTRRKAFKTKTSQGNAVNPVWEEEPIVFKKVVLPTLACLRIAVYEEGGKFIGHRILPVQAIRPGYHYICLRNERNQPLTLPAVFVYIEVKDYVPDTYADVIEALSNPIRYVNLMEQRAKQLAALTLEDEEEVKKEGGFLHDEIMRLTRNTLEKLMALPLTHVVPIQSKMLS

SEQ ID NO: 882348 - protein, 1169 aa, Homo sapiens
MAGAQPGVHALQLKPVCVSDSLKKGTKFVKWDDDSTIVTPIILRTDPQGFFFYWTDQNKETELLDLSLVKDARCGRHAKAPKDPKLRELLDVGNIGRLEQRMITVVYGPDLVNISHLNLVAFQEEVAKEWTNEVFSLATNLLAQNMSRDAFLEKAYTKLKLQVTPEGRIPLKNIYRLFSADRKRVETALEACSLPSSRNDSIPQEDFTPEVYRVFLNNLCPRPEIDNIFSEFGAKSKPYLTVDQMMDFINLKQRDPRLNEILYPPLKQEQVQVLIEKYEPNNSLARKGQISVDGFMRYLSGEENGVVSPEKLDLNEDMSQPLSHYFINSSHNTYLTAGQLAGNSSVEMYRQVLLSGCRCVELDCWKGRTAEEEPVITHGFTMTTEISFKEVIEAIAECAFKTSPFPILLSFENHVDSPKQQAKMAEYCRLIFGDALLMEPLEKYPLESGVPLPSPMDLMYKILVKNKKKSHKSSEGSGKKKLSEQASNTYSDSSSMFEPSSPGAGEADTESDDDDDDDDCKKSSMDEGTAGSEAMATEEMSNLVNYIQPVKFESFEISKKRNKSFEMSSFVETKGLEQLTKSPVEFVEYNKMQLSRIYPKGTRVDSSNYMPQLFWNAGCQMVALNFQTMDLAMQINMGMYEYNGKSGYRLKPEFMRRPDKHFDPFTEGIVDGIVANTLSVKIISGQFLSDKKVGTYVEVDMFGLPVDTRRKAFKTKTSQGNAVNPVWEEEPIVFKKVVLPTLACLRIAVYEEGGKFIGHRILPVQAIRPGYHYICLRNERNQPLTLPAVFVYIEVKDYVPDTYADVIEALSNPIRYVNLMEQRAKQLAALTLEDEEEVKKEADPGETPSEAPSEARTTPAENGVNHTTTLTPKPPSQALHSQPAPGSVKAPAKTEDLIQSVLTEVEAQTIEELKQQKSFVKLQKKHYKEMKDLVKRHHKKTTDLIKEHTTKYNEIQNDYLRRRAALEKSAKKDSKKKSEPSSPDHGSSTIEQDLAALDAEMTQKLIDLKDKQQQQLLNLRQEQYYSEKYQKREHIKLVEQNKKKKQNKKNVCVGARPWAPARKLFKTTIVGGGGARAPVGVKVNTCGSKEGVPRGKPRAEDTRWGGFLSHQHLKKPRPGGRNTESGVSVRQQNHQRGRASQRRGPHTKRGTAPYSKKASALQRRERLEH

SEQ ID NO: 882349 - protein, 248 aa, Homo sapiens
MAGAQPGVHALQLKPVCVSDSLKKGTKFVKWDDDSTIVTPIILRTDPQGFFFYWTDQNKETELLDLSLVKDARCGRHAKAPKDPKLRELLDVGNIGRLEQRMITVVYGPDLVNISHLNLVAFQEEVAKEWTNEVFSLATNLLAQNMSRDAFLEKAYTKLKLQVTPEGRIPLKNIYRLFSADRKRVETALEACSLPSSRVEKANEAAKSEQSCGKAPPKHFHLHFIKQNKMLEPACYCFFVRCFGIGKI

SEQ ID NO: 882350 - protein, 204 aa, Homo sapiens [sequence omitted]

SEQ ID NO: 882351 - protein, 233 aa, Homo sapiens
HTHHSHLRNGFFAELGKPGRRCRSLLLWVLRGGGRYHSVGSRVRAPLEACSLPSSRNDSIPQEDFTPEVYRVFLNNLCPRPEIDNIFSEFGAKSKPYLTVDQMMDFINLKQRDPRLNEILYPPLKQEQVQVLIEKYEPNNSLARKGQISVDGFMRYLSGEENGVVSPEKLDLNEDMSQPLSHYFINSSHNTYLTGMNFLVLCYFSQSHQISPTSTFCCSEAEVCFLPFPAKCL

SEQ ID NO: 882352 - protein, 736 aa, Homo sapiens
MATEGMILTNHDHQIRVGVLTVSDSCFRNLAEDRSGINLKDLVQDPSLLGGTISAYKIVPDEIEEIKETLIDWCDEKELNLILTTGGTGFAPRDVTPEATKEVIEREAPGMALAMLMGSLNVTPLGMLSRPVCGIRGKTLIINLPGSKKGSQECFQFILPALPHAIDLLRDAIVKVKEVHDELEDLPSPPPPLSPPPTTSPHKQTEDKGVQCEEEEEEKKDSGVASTEDSSSSHITAAAIAAKIPDSIISRGVQVLPRDTASLSTTPSESPRAQATSRLSTASCPTPKVQSRCSSKENILRASHSAVDITKVARRHRMSPFPLTSMDKAFITVLEMTPVLGTEIINYRDGMGRVLAQDVYAKDNLPPFPASVKDGYAVRAADGPGDRFIIGESQAGEQPTQTVMPGQVMRVTTGAPIPCGADAVVQVEDTELIRESDDGTEELEVRILVQARPGQDIRPIGHDIKRGECVLAKGTHMGPSEIGLLATVGVTEVEVNKFPVVAVMSTGNELLNPEDDLLPGKIRDSNRSTLLATIQEHGYPTINLGIVGDNPDDLLNALNEGISRADVIITSGGVSMGEKDYLKQVLDIDLHAQIHFGRVFMKPGLPTTFATLDIDGVRKIIFALPGNPVSAVVTCNLFVVPALRKMQGILDPRPTIIKARLSCDVKLDPRPEYHRCILTWHHQEPLPWAQSTGNQMSSRLMSMRSANGLLMLPPKTEQYVELHKGEVVDVMVIGRL

SEQ ID NO: 882353 - protein, 380 aa, Homo sapiens
MATEGMILTNHDHQIRVGVLTVSDSCFRNLAEDRSGINLKDLVQDPSLLGGTISAYKIVPDEIEEIKKFPTFPFCGLQKGATKEVIEREAPGMALAMLMGSLNVTPLGMLSRPVCGIRGKTLIINLPGSKKGSQECFQFILPALPHAIDLLRDAIVKVKEVHDELEDLPSPPPPLSPPPTTSPHKQTEDKGVQCEEEEEEKKDSGVASTEDSSSSHITAAAIAAKKHPFYTSPAVVMAHGEQPIPGLINYSHHSTDERIPDSIISRGVQVLPRDTASLSTTPSESPRAQATSRLSTASCPTPKVQSRCSSKENILRASHSAVDITKVARRHRMSPFPLTSMDKAFITVLEMTPVLGTEIINYRGTIIFDHCPFFSSFFSK

SEQ ID NO: 882354 - protein, 769 aa, Homo sapiens
MATEGMILTNHDHQIRVGVLTVSDSCFRNLAEDRSGINLKDLVQDPSLLGGTISAYKIVPDEIEEIKETLIDWCDEKELNLILTTGGTGFAPRDVTPEATKEVIEREAPGMALAMLMGSLNVTPLGMLSRPVCGIRGKTLIINLPGSKKGSQECFQFILPALPHAIDLLRDAIVKVKEVHDELEDLPSPPPPLSPPPTTSPHKQTEDKGVQCEEEEEEKKDSGVASTEDSSSSHITAAAIAAKKHPFYTSPAVVMAHGEQPIPGLINYSHHSTDERIPDSIISRGVQVLPRDTASLSTTPSESPRAQATSRLSTASCPTPKVQSRCSSKENILRASHSAVDITKVARRHRMSPFPLTSMDKAFITVLEMTPVLGTEIINYRDGMGRVLAQDVYAKDNLPPFPASVKDGYAVRAADGPGDRFIIGESQAGEQPTQTVMPGQVMRVTTGAPIPCGADAVVQVEDTELIRESDDGTEELEVRILVQARPGQDIRPIGHDIKRGECVLAKGTHMGPSEIGLLATVGVTEVEVNKFPVVAVMSTGNELLNPEDDLLPGKIRDSNRSTLLATIQEHGYPTINLGIVGDNPDDLLNALNEGISRADVIITSGGVSMGEKDYLKQVLDIDLHAQIHFGRVFMKPGLPTTFATLDIDGVRKIIFALPGNPVSAVVTCNLFVVPALRKMQGILDPRPTIIKARLSCDVKLDPRPEYHRCILTWHHQEPLPWAQSTGNQMSSRLMSMRSANGLLMLPPKTEQYVELHKGEVVDVMVIGRL

SEQ ID NO: 882355 - protein, 555 aa, Homo sapiens
QPIPDSIISRGVQVLPRDTASLSTTPSEAARAQATSRPLYSFLPNNKTPVQVQQQGENSQQPIPDSIISRGVQVLPRDTASLSTTPSESPRAQATSRLSTASCPTPKVQSRCSSKENILRASHSAVDITKVARRHRMSPFPLTSMDKAFITVLEMTPVLGTEIINYRDGMGRVLAQDVYAKDNLPPFPASVKDGYAVRAADGPGDRFIIGESQAGEQPTQTVMPGQVMRVTTGAPIPCGADAVVQVEDTELIRESDDGTEELEVRILVQARPGQDIRPIGHDIKRGECVLAKGTHMGPSEIGLLATVGVTEVEVNKFPVVAVMSTGNELLNPEDDLLPGKIRDSNRSTLLATIQEHGYPTINLGIVGDNPDDLLNALNEGISRADVIITSGGVSMGEKDYLKQVLDIDLHAQIHFGRVFMKPGLPTTFATLDIDGVRKIIFALPGNPVSAVVTCNLFVVPALRKMQGILDPRPTIIKARLSCDVKLDPRPEYHRCILTWHHQEPLPWAQSTGNQMSSRLMSMRSANGLLMLPPKTEQYVELHKGEVVDVMVIGRL

SEQ ID NO: 882356 - protein, 722 aa, Homo sapiens
MLGGTISAYKIVPDEIEEIKETLIDWCDEKELNLILTTGGTGFAPRDVTPEATKEVIEREAPGMALAMLMGSLNVTPLGMLSRPVCGIRGKTLIINLPGSKKGSQECFQFILPALPHAIDLLRDAIVKVKEVHDELEDLPSPPPPLSPPPTTSPHKQTEDKGVQCEEEEEEKKDSGVASTEDSSSSHITAAAIAAKKHPFYTSPAVVMAHGEQPIPGLINYSHHSTDERIPDSIISRGVQVLPRDTASLSTTPSESPRAQATSRLSTASCPTPKVQSRCSSKENILRASHSAVDITKVARRHRMSPFPLTSMDKAFITVLEMTPVLGTEIINYRDGMGRVLAQDVYAKDNLPPFPASVKDGYAVRAADGPGDRFIIGESQAGEQPTQTVMPGQVMRVTTGAPIPCGADAVVQVEDTELIRESDDGTEELEVRILVQARPGQDIRPIGHDIKRGECVLAKGTHMGPSEIGLLATVGVTEVEVNKFPVVAVMSTGNELLNPEDDLLPGKIRDSNRSTLLATIQEHGYPTINLGIVGDNPDDLLNALNEGISRADVIITSGGVSMGEKDYLKQVLDIDLHAQIHFGRVFMKPGLPTTFATLDIDGVRKIIFALPGNPVSAVVTCNLFVVPALRKMQGILDPRPTIIKARLSCDVKLDPRPEYHRCILTWHHQEPLPWAQSTGNQMSSRLMSMRSANGLLMLPPKTEQYVELHKGEVVDVMVIGRL

SEQ ID NO: 882357 - protein, 800 aa, Homo sapiens [sequence omitted]

SEQ ID NO: 882358 - protein, 709 aa, Homo sapiens
MATEGMILTNHDHQIRVGVLTVSDSCFRNLAEDRSGINLKDLVQDPSLLGGTISAYKIVPDEIEEIKETLIDWCDEKELNLILTTGGTGFAPRDVTPEATKEVIEREAPGMALAMLMGSLNVTPLGMLSRPVCGIRGKTLIINLPGSKKGSQECFQFILPALPHAIDLLRDAIVKVKEVHDELEDLPSPPPPLSPPPTTSPHKQTEDKGVQCEEEEEEKKDSGVASTEDSSSSHITAAAIAAKKHPFYTSPAVVMAHGEQPIPGLINYSHHSTDERIPDSIISRGVQVLPRDTASLSTTPSESPRAQATSRLSTASCPTPKVQSRCSSKENILRASHSAVDITKVARRHRMSPFPLTSMDKAFITVLEMTPVLGTEIINYRDGMGRVLAQDVYAKDNLPPFPASVKDGYAVRAADGPGDRFIIGESQAGEQPTQTVMPGQVMRVTTGAPIPCGADAVVQVEDTELIRESDDGTEELEVRILVQARPGQDIRPIGHDIKRGECVLAKGTHMGPSEIGLLATVGVTEVEVNKFPVVAVMSTGNELLNPEDDLLPGKIRDSNRSTLLATIQEHGYPTINLGIVGDNPDDLLNALNEGISRADVIITSGGVSMGEKDYLKQVLDIDLHAQIHFGRVFMKPGLPTTFATLDIDGVRKIIFALPGNPVSAVVTCNLFVVPALRKMQGILDPRPTIIKARVMLSNDQKPKWKPGNS

SEQ ID NO: 882359 - protein, 724 aa, Homo sapiens
MATEGMILTNHDHQIRVGVLTVSDSCFRNLAEDRSGINLKDLVQDPSLLGGTISAYKIVPDEIEEIKETLIDWCDEKELNLILTTGGTGFAPRDVTPEATKEVIEREAPGMALAMLMGSLNVTPLGMLSRPVCGIRGKTLIINLPGSKKGSQECFQFILPALPHAIDLLRDAIVKVKEVHDELEDLPSPPPPLSPPPTTSPHKQTEDKGVQCEEEEEEKKDSGVASTEDSSSSHITAAAIAAKKHPFYTSPAVVMAHGEQPIPGLINYSHHSTDERIPDSIISRGVQVLPRDTASLSTTPSESPRAQATSRLSTASCPTPKVQSRCSSKENILRASHSAVDITKVARRHRMSPFPLTSMDKAFITVLEMTPVLGTEIINYRDGMGRVLAQDVYAKDNLPPFPASVKDGYAVRAADGPGDRFIIGESQAGEQPTQTVMPGQVMRVTTGAPIPCGADAVVQVEDTELIRESDDGTEELEVRILVQARPGQDIRPIGHDIKRGECVLAKGTHMGPSEIGLLATVGVTEVEVNKFPVVAVMSTGNELLNPEDDLLPGKIRDSNRSTLLATIQEHGYPTINLGIVGDNPDDLLNALNEGISRADVIITSGGVSMGEKDYLKQVLDIDLHAQIHFGRVFMKPGLPTTFATLDIDGVRKIIFALPGNPVSAVVTCNLFVVPALRKMQGILDPRPTIIKARAQWHSPVIPAPQEAQAGGLHEAKCLRPAWAT

SEQ ID NO: 882360 - protein, 622 aa, Homo sapiens
MATEGMILTNHDHQIRVGVLTVSDSCFRNLAEDRSGINLKDLVQDPSLLGGTISAYKIVPDEIEEIKETLIDWCDEKELNLILTTGGTGFAPRDVTPEATKEVIEREAPGMALAMLMGSLNVTPLGMLSRPVCGIRGKTLIINLPGSKKGSQECFQFILPALPHAIDLLRDAIVKVKEVHDELEDLPSPPPPLSPPPTTSPHKQTEDKGVQCEEEEEEKKDSGVASTEDSSSSHITAAAIAAKKHPFYTSPAVVMAHGEQPIPGLINYSHHSTDERIPDSIISRGVQVLPRDTASLSTTPSESPRAQATSRLSTASCPTPKVQSRCSSKENILRASHSAVDITKVARRHRMSPFPLTSMDKAFITVLEMTPVLGTEIINYRDGMGRVLAQDVYAKDNLPPFPASVKDGYAVRAADGPGDRFIIGESQAGEQPTQTVMPGQVMRVTTGAPIPCGADAVVQVEDTELIRESDDGTEELEVRILVQARPGQDIRPIGHDIKRGECVLAKGTHMGPSEIGLLATVGVTEVEVNKFPVVAVMSTGNELLNPEDDLLPGKIRDSNRSTLLATIQEHGYPTINLGIVGDNPDDLLNALNEGISRADVIITSGGVSMGEKLANNICNFGY

SEQ ID NO: 882361 - protein, 480 aa, Homo sapiens
MATEGMILTNHDHQIRVGVLTVSDSCFRNLAEDRSGINLKDLVQDPSLLGGTISAYKIVPDEIEEIKETLIDWCDEKELNLILTTGGTGFAPRDVTPEATKEVIEREAPGMALAMLMGSLNVTPLGMLSRPVCGIRGKTLIINLPGSKKGSQECFQFILPALPHAIDLLRDAIVKVKEVHDELEDLPSPPPPLSPPPTTSPHKQTEDKGVQCEEEEEEKKDSGVASTEDSSSSHITAAAIAAKKHPFYTSPAVVMAHGEQPIPGLINYSHHSTDERIPDSIISRGVQVLPRDTASLSTTPSESPRAQATSRLSTASCPTPKVQSRCSSKENILRASHSAVDITKVARRHRMSPFPLTSMDKAFITVLEMTPVLGTEIINYRDGMGRVLAQDVYAKDNLPPFPASVKDGYAVRAADGPGDRFIIGESQAGEQPTQTVMPGQVMRVTTGAPIPCGADAVVQVEDTELIRESDDVRHHQVLLC

SEQ ID NO: 882362 - protein, 381 aa, Homo sapiens
MDGVGVPASMYGDPHAPRPIPPVHHLNHGPPLHATQHYGAHAPHPNVMPASMGSAVNDALKRDKDAIYGHPLFPLLALVFEKCELATCTPREPGVAGGDVCSSDSFNEDIAVFAKQVRAEKPLFSSNPELDNLMIQAIQVLRFHLLELEKVHELCDNFCHRYISCLKGKMPIDLVIDERDGSSKSDHEELSGSSTNLADHNPSSWRDHDDATSTHSAGTPGPSSGGHASQSGDNSSEQGDGLDNSVASPGTGDDDDPDKDKKRQKKRGIFPKVATNIMRAWLFQHLTHPYPSEEQKKQLAQDTGLTILQVNNWFINARRRIVQPMIDQSNRAVSQGAAYSPEGQPMGSFVLDGQQHMGIRPAGPMSGMGMNMGMDGQWHYM

SEQ ID NO: 882363 - protein, 307 aa, Homo sapiens
MAQRYDELPHYGGMDGVGVPASMYGDPHAPRPIPPVHHLNHGPPLHATQHYGAHAPHPNVMPASMGSAVNDALKRDKDAIYGHPLFPLLALVFEKCELATCTPREPGVAGGDVCSSDSFNEDIAVFAKQVRAEKPLFSSNPELDNLMIQAIQVLRFHLLELEKVHELCDNFCHRYISCLKGKMPIDLVIDERDGSSKSDHEELSGSSTNLADHNPSSWRDHDDATSTHSAGTPGPSSGGHASQSGDNSSEQGDGLDNSVASPGTGDDDDPDKDKKRQKKRGIFPKVATNIMRAWLFQHLTLLMPEEE

SEQ ID NO: 882364 - protein, 394 aa, Homo sapiens
MAQRYDELPHYGGMDGVGVPASMYGDPHAPRPIPPVHHLNHGPPLHATQHYGAHAPHPNVMPASMGSAVNDALKRDKDAIYGHPLFPLLALVFEKCELATCTPREPGVAGGDVCSSDSFNEDIAVFAKQVRAEKPLFSSNPELDNLMIQAIQVLRFHLLELEKVHELCDNFCHRYISCLKGKMPIDLVIDERDGSSKSDHEELSGSSTNLADHNPSSWRDHDDATSTHSAGTPGPSSGGHASQSGDNSSEQGDGLDNSVASPGTGDDDDPDKDKKRQKKRGIFPKVATNIMRAWLFQHLTHPYPSEEQKKQLAQDTGLTILQVNNWFINARRRIVQPMIDQSNRAVSQGAAYSPEGQPMGSFVLDGQQHMGIRPAGPMSGMGMNMGMDGQWHYM

SEQ ID NO: 882365 - protein, 401 aa, Homo sapiens
MAQRYDELPHYGGMDGVGVPASMYGDPHAPRPIPPVHHLNHGPPLHATQHYGAHAPHPNVMPASMGSAVNDALKRDKDAIYGHPLFPLLALVFEKCELATCTPREPGVAGGDVCSSDSFNEDIAVFAKQVRAEKPLFSSNPELDNLMIQAIQVLRFHLLELEKVHELCDNFCHRYISCLKGKMPIDLVIDERDGSSKSDHEELSGSSTNLADHNPSSWRDHDDATSTHSAGTPGPSSGGHASQSGDNSSEQGDGLDNSVASPGTGDDDDPDKDKKRQKKRGIFPKVATNIMRAWLFQHLTHPYPSEEQKKQLAQDTGLTILQVNNWFINARRRIVQPMIDQSNRAGFLLDPSVSQGAAYSPEGQPMGSFVLDGQQHMGIRPAGPMSGMGMNMGMDGQWHYM

SEQ ID NO: 882366 - protein, 477 aa, Homo sapiens
MAQRYDELPHYGGMDGVGVPASMYGDPHAPRPIPPVHHLNHGPPLHATQHYGAHAPHPNVMPASMGSAVNDALKRDKDAIYGHPLFPLLALVFEKCELATCTPREPGVAGGDVCSSDSFNEDIAVFAKQVRAEKPLFSSNPELDNLMIQAIQVLRFHLLELEKVHELCDNFCHRYISCLKGKMPIDLVIDERDGSSKSDHEELSGSSTNLADHNPSSWRDHDDATSTHSAGTPGPSSGGHASQSGDNSSEQGDGLDNSVASPGTGDDDDPDKDKKRQKKRGIFPKVATNIMRAWLFQHLTHPYPSEEQKKQLAQDTGLTILQVNNWFINARRRIVQPMIDQSNRAGFLLDPSVSQGAAYSPEGQPMGSFVLDGQQHMGIRPAGLQSMPGDYVSQGGPMGMSMAQPSYTPPQMTPHPTQLRHGPPMHSYLPSHPHHPAMMMHGGPPTHPGMTMSAQSPTMLNSVDPNVGGQVMDIHAQ

SEQ ID NO: 882367 - protein, 470 aa, Homo sapiens
MAQRYDELPHYGGMDGVGVPASMYGDPHAPRPIPPVHHLNHGPPLHATQHYGAHAPHPNVMPASMGSAVNDALKRDKDAIYGHPLFPLLALVFEKCELATCTPREPGVAGGDVCSSDSFNEDIAVFAKQVRAEKPLFSSNPELDNLMIQAIQVLRFHLLELEKVHELCDNFCHRYISCLKGKMPIDLVIDERDGSSKSDHEELSGSSTNLADHNPSSWRDHDDATSTHSAGTPGPSSGGHASQSGDNSSEQGDGLDNSVASPGTGDDDDPDKDKKRQKKRGIFPKVATNIMRAWLFQHLTHPYPSEEQKKQLAQDTGLTILQVNNWFINARRRIVQPMIDQSNRAVSQGAAYSPEGQPMGSFVLDGQQHMGIRPAGLQSMPGDYVSQGGPMGMSMAQPSYTPPQMTPHPTQLRHGPPMHSYLPSHPHHPAMMMHGGPPTHPGMTMSAQSPTMLNSVDPNVGGQVMDIHAQ

SEQ ID NO: 882368 - protein, 212 aa, Homo sapiens [sequence omitted]

SEQ ID NO: 882369 - protein, 155 aa, Homo sapiens
MFSLMYFYFFLLGDGLDNSVASPGTGDDDDPDKDKKRQKKRGIFPKVATNIMRAWLFQHLTHPYPSEEQKKQLAQDTGLTILQVNNWFINARRRIVQPMIDQSNRAVSQGAAYSPEGQPMGSFVLDGQQHMGIRPAGPMSGMGMNMGMDGQWHYM

SEQ ID NO: 882370 - protein, 314 aa, Homo sapiens [sequence omitted]

SEQ ID NO: 882371 - protein, 276 aa, Homo sapiens
MDGVGVPASMYGDPHAPRPIPPVHHLNHGPPLHATQHYGAHAPHPNVMPASMGSAVNDALKRDKDAIYGHPLFPLLALVFEKCELATCTPREPGVAGGDVCSSDSFNEDIAVFAKQVRAEKPLFSSNPELDNLMIQAIQVLRFHLLELEKVHELCDNFCHRYISCLKGKMPIDLVIDERDGSSKSDHEELSGSSTNLADHNPSSWRDHDDATSTHSAGTPGPSSGGHASQSGDNSSEQEFFRFIPIFQMKWLGLGEGQLLDCHDRKRKQKNEDKAI

SEQ ID NO: 882372 - protein, 582 aa, Homo sapiens
MLLGAEAVGLVKECNDNTMRAFTYRTRQNFKGFDDNNDDFLTMAECQFIIKHELENLRAKDEKMIPGYPQAKLYPGKSLLRRLLTSGIVIQVFPLHDSEALKKLEDTWYTRFALKYQPIDSIRGYFGETIALYFGFLEYFTFALIPMAVIGLPYYLFVWEDYDKYVIFASFNLIWSTVILELWKRGCANMTYRWGTLLMKRKFEEPRPGFHGVLGINSITGKEEPLYPSYKRQLRIYLVSLPFVCLCLYFSLYVMMIYFDMEVWALGLHENSGSEWTSVLLYVPSIIYAIVIEIMNRLYRYAAEFLTSWENHRLESAYQNHLILKVLVFNFLNCFASLFYIAFVLKDMKLLRQSLATLLITSQILNQIMESFLPYWLQRKHGVRVKRKVQALKADIDATLYEQVILEKEMGTYLGTFDDYLELFLQFGYVSLFSCVYPLAAAFAVLNNFTEVNSDALKMCRVFKRPFSEPSANIGVWQLAFETMSVISVVTNCALIGMSPQVNAVFPESKADLILIVVAVEHALLALKFILAFAIPDKPRHIQMKLARLEFESLEALKQQQMKLVTENLKEEPMESGKEKAT

SEQ ID NO: 882373 - protein, 660 aa, Homo sapiens
MKVTLSALDTSESSFTPLVVIELAQDVKEETKEWLKNRIIAKKKDGGAQLLFRPLLNKYEQETLENQNLYLVGASKIRMLLGAEAVGLVKECNDNTMRAFTYRTRQNFKGFDDNNDDFLTMAECQFIIKHELENLRAKDEKMIPGYPQAKLYPGKSLLRRLLTSGIVIQVFPLHDSEALKKLEDTWYTRFALKYQPIDSIRGYFGETIALYFGFLEYFTFALIPMAVIGLPYYLFVWEDYDKYVIFASFNLIWSTVILELWKRGCANMTYRWGTLLMKRKFEEPRPGFHGVLGINSITGKEEPLYPSYKRQLRIYLVSLPFVCLCLYFSLYVMMIYFDMEVWALGLHENSGSEWTSVLLYVPSIIYAIVIEIMNRLYRYAAEFLTSWENHRLESAYQNHLILKVLVFNFLNCFASLFYIAFVLKDMKLLRQSLATLLITSQILNQIMESFLPYWLQRKHGVRVKRKVQALKADIDATLYEQVILEKEMGTYLGTFDDYLELFLQFGYVSLFSCVYPLAAAFAVLNNFTEVNSDALKMCRVFKRPFSEPSANIGVWQLAFETMSVISVVTNCALIGMSPQVNAVFPESKADLILIVVAVEHALLALKFILAFAIPDKPRHIQMKLARLEFESLEALKQQQMKLVTENLKEEPMESGKEKAT

SEQ ID NO: 882374 - protein, 470 aa, Homo sapiens
MKVTLSALDTSESSFTPLVVIELAQDVKEETKEWLKNRIIAKKKDGGAQLLFRPLLNKYEQETLENQNLYLVGASKIRMLLGAEAVGLVKECNDNTMRAFTYRTRQNFKGFDDNNDDFLTMAECQFIIKHELENLRAKDEKMIPGYPQAKLYPGKSLLRRLLTSGIVIQVFPLHDSEALKKLEDTWYTRFALKYQPIENHRLESAYQNHLILKVLVFNFLNCFASLFYIAFVLKDMKLLRQSLATLLITSQILNQIMESFLPYWLQRKHGVRVKRKVQALKADIDATLYEQVILEKEMGTYLGTFDDYLELFLQFGYVSLFSCVYPLAAAFAVLNNFTEVNSDALKMCRVFKRPFSEPSANIGVWQLAFETMSVISVVTNCALIGMSPQVNAVFPESKADLILIVVAVEHALLALKFILAFAIPDKPRHIQMKLARLEFESLEALKQQQMKLVTENLKEEPMESGKEKAT

SEQ ID NO: 882375 - protein, 411 aa, Homo sapiens
MKVTLSALDTSESSFTPLVVIELAQDVKEETKEWLKNRIIAKKKDGGAQLLFRPLLNKYEQETLENQNLYLVGASKIRMLLGAEAVGLVKECNDNTMRAFTYRTRQNFKGFDDNNDDFLTMAECQFIIKHELENLRAKDEKMIPGYPQAKLYPGKSLFQLPQLLCLTLLYCLCLERYEAFAPELGHSPNYLPDPQPNYGIFSSLLAPKEAWCAVKRKVQALKADIDATLYEQVILEKEMGTYLGTFDDYLELFLQFGYVSLFSCVYPLAAAFAVLNNFTEVNSDALKMCRVFKRPFSEPSANIGVWQLAFETMSVISVVTNCALIGMSPQVNAVFPESKADLILIVVAVEHALLALKFILAFAIPDKPRHIQMKLARLEFESLEALKQQQMKLVTENLKEEPMESGKEKAT

SEQ ID NO: 882376 - protein, 491 aa, Homo sapiens
MKVTLSALDTSESSFTPLVVIELAQDVKEETKEWLKNRIIAKKKDGGAQLLFRPLLNKYEQETLENQNLYLVGASKIRMLLGAEAVGLVKECNDNTMRAFTYRTRQNFKGFDDNNDDFLTMAECQFIIKHELENLRAKDEKMIPGYPQAKLYPGKSLLRRLLTSGIVIQVFPLHDSEALKKLEDTWYTRFALKYQPIDSIRGYFGETIALYFGFLEYFTFALIPMAVIGLPYYLFVWEDYDKYVIFASFNLIWSTVILELWKRGCANMTYRWGTLLMKRKFEEPRPGFHGVLGINSITGKEEPLYPSYKRQLRIYLVSLPFVCLCLYFSLYVMMIYFDMEVWALGLHENSGSEWTSVLLYVPSIIYAIVIEIMNRLYRYAAEFLTSWENHRLESAYQNHLILKVLVFNFLNCFASLFYIAFVLKDMKLLRQSLATLLITSQILNQIMESFLPYWLQRKHGVRVKRKVQALKADIDATLYEQVILCREHLKD

SEQ ID NO: 882377 - protein, 314 aa, Homo sapiens
MKVTLSALDTSESSFTPLVVIELAQDVKEETKEWLKNRIIAKKKDGGAQLLFRPLLNKYEQETLENQNLYLVGASKIRMLLGAEAVGLVKECNDNTMRAFTYRTRQNFKGFDDNNDDFLTMAECQFIIKHELENLRAKDEKMIPGYPQAKLYPGKSLLRRLLTSGIVIQVFPLHDSEALKKLEDTWYTRFALKYQPIDSIRGYFGETIALYFGFLEYFTFALIPMAVIGLPYYLFVWEDYDKYVIFASFNLIWSTVILELWKRGCANMTYRWGTLLMKRKFEEPRPGFHGVLDLFPGSLLQYINRPFININNSN

SEQ ID NO: 882378 - protein, 338 aa, Homo sapiens
AIRAKCMFFKDKTMLCPMHKIKGPCEQELSSFAVFRRVYIERDEVKQIASIIQRGERLHMFRVGGLVFHAIGQLLPHQMADFHSATALYPVGYEATRIYWSLRTNNRRCCYRCSIGENNGRPEFVIKVIEQGLEDLVFTDASPQAVWNRIIEPVAAMRKEADMLRLFPEYLKGEELFGLTVHAVLRIAESLPGVESCQNYLFRYGRHPLMELPLMINPTGCARSEPKILTHYKRPHTLNSTSMSKAYQSTFTGETNTPYSKQFVHSKSSQYRRLRTEWKNNVYLARSRIQGLGLYAAKDLEKHTMVIEYIGTIIRNEVANRREKIYEEQNRGIYMFRI

SEQ ID NO: 882379 - protein, 136 aa, Homo sapiens
MSSASQGGREARAFPEPGEAGRPGLTCSGRASKGHIRPGPSPDDFSVVFCTRKTPGDRGDGSGILSLTALNELNLSFDPFADASKGDDLLPAGTEDYIHIRIQQRNGRKTLTTVQGIADDYDKKKLVKAFKKVGLQ

SEQ ID NO: 882380 - protein, 135 aa, Homo sapiens
LSRRRGFSSLPLEPPRFPTFRSPLPAFSRHRRRRLPQAVSTEEKESYRMSAIQNLHSFDPFADASKGDDLLPAGTEDYIHIRIQQRNGRKTLTTVQGIADDYDKKKLVKAFKKKFACNGTVIEHPEYGRSNSATG

SEQ ID NO: 882381 - protein, 135 aa, Homo sapiens; identical to SEQ ID NO: 882380

SEQ ID NO: 882382 - protein, 142 aa, Homo sapiens
LSRRRGFSSLPLEPPRFPTFRSPLPAFSRHRRRRLPQAVSTEEKESYRMSAIQNLHSFDPFADASKGDDLLPAGTEDYIHIRIQQRNGRKTLTTVQGIADDYDKKKLVKAFKKKFACNGTVIEHPEYGRSNSATVMSIFWSP

SEQ ID NO: 882383 - protein, 140 aa, Homo sapiens
LSRRRGFSSLPLEPPRFPTFRSPLPAFSRHRRRRLPQAVSTEEKESYRMSAIQNLHSFDPFADASKGDDLLPAGTEDYIHIRIQQRNGRKTLTTVQGIADDYDKKKLVKAFKKKFACNGTVIEHPEYGRSCATETVQAAA

SEQ ID NO: 882384 - protein, 112 aa, Homo sapiens
LSRRRGFSSLPLEPPRFPTFRSPLPAFSRHRRRRLPQAVSTEEKESYRMSAIQNLHSFDPFADASKGDDLLPAGTEDYIHIRIQQRNGRKTLTTVQGIADDYDKKKLVKAFK

SEQ ID NO: 882385 - protein, 113 aa, Homo sapiens
RLREPLCDLTASKLVLAPGGAEPCPRWSAIQNLHSFDPFADASKGDDLLPAGTEDYIHIRIQQRNGRKTLTTVQGIADDYDKKKLVKAFKKKFACNGTVIEHPEYGRSNSATG

SEQ ID NO: 882386 - protein, 154 aa, Homo sapiens
MSSASQGGREARAFPEPGEAGRPGLTCSGRASKGHIRPGPSPDDFSVVFCTRKTPGDRGDGSGILSLTALNELNLSFDPFADASKGDDLLPAGTEDYIHIRIQQRNGRKTLTTVQGIADDYDKKKLVKAFKKKFACNGTVIEHPEYGRSNSATG

SEQ ID NO: 882387 - protein, 505 aa, Homo sapiens
MTKAQESLTLEDVAVDFTWEEWQFLSPAQKDLYRDVMLENYSNLVSVGYQAGKPDALTKLEQGEPLWTLEDEIHSPAHPEIEKADDHLQQPLQNQKILKRTGQRYEHGRTLKSYLGLTNQSRRYNRKEPAEFNGDGAFLHDNHEQMPTEIEFPESRKPISTKSQFLKHQQTHNIEKAHECTDCGKAFLKKSQLTEHKRIHTGKKPHVCSLCGKAFYKKYRLTEHERAHRGEKPHGCSLCGKAFYKRYRLTEHERAHKGEKPYGCSECGKAFPRKSELTEHQRIHTGIKPHQCSECGRAFSRKSLLVVHQRTHTGEKPHTCSECGKGFIQKGNLNIHQRTHTGEKPYGCIDCGKAFSQKSCLVAHQRYHTGKTPFVCPECGQPCSQKSGLIRHQKIHSGEKPYKCSDCGKAFLTKTMLIVHHRTHTGERPYGCDECEKAYFYMSCLVKHKRIHSREKRGDSVKVENPSTASHSLSPSEHVQGKSPVNMVTVAMVAGQCEFAHILHS

SEQ ID NO: 882388 - protein, 487 aa, Homo sapiens
MTKAQESLTLEDVAVDFTWEEWQFLSPAQKDLYRDVMLENYSNLVSVGYQAGKPDALTKLEQGEPLWTLEDEIHSPAHPEIEKADDHLQQPLQNQKILKRTGQRYEHGRTLKSYLGLTNQSRRYNRKEPAEFNGDGAFLHDNHEQMPTEIEFPESRKPISTKSQFLKHQQTHNIEKAHECTDCGKAFLKKSQLTEHKRIHTGKKPHVCSLCGKAFYKKYRLTEHERAHRGEKPHGCSLCGKAFYKRYRLTEHERAHKGEKPYGCSECGKAFPRKSELTEHQRIHTGIKPHQCSECGRAFSRKSLLVVHQRTHTGEKPHTCSECGKGFIQKGNLNIHQRTHTGEKPYGCIDCGKAFSQKSCLVAHQRYHTGKTPFVCPECGQPCSQKSGLIRHQKIHSGEKPYKCSDCGKAFLTKTMLIVHHRTHTGERPYGCDECEKAYFYMSCLVKHKRIHSREKRGDSVKVENPSTASHSLSPSEHVQGKALLIW

SEQ ID NO: 882389 - protein, 166 aa, Homo sapiens
MNAAVSKTVAVASGAASTPISISTGAPTVRQVPVSTTVVSTSQAGKLPTRITVPLSVISQPMKGKSVVTAPIIKGNLGANLSGLGRNIILTTMPAGTKLIAGNKPVSFLTAQQLQQLQQQGQATQVRIQTVPASHLQQGTASGSSKAVSTVVVTTAPSPKQAPEQQ

SEQ ID NO: 882390 - protein, 98 aa, Homo sapiens
SPGLQEFGTRANLSGLGRNIILTTMPAGTKLIAGNKPVSFLTAQQLQQLQQQGQATQVRIQTVPASHLQQGTASGSSKAVSTVVVTTAPSPKQAPEQQ

SEQ ID NO: 882391 - protein, 166 aa, Homo sapiens; identical to SEQ ID NO: 882389

SEQ ID NO: 882392 - protein, 166 aa, Homo sapiens; identical to SEQ ID NO: 882389

SEQ ID NO: 882393 - protein, 198 aa, Homo sapiens
LIETGGKMHDSNNVEKDITPSELPANPGCLHSKEHSIKATLIWRLFFLIMFLTIIVCGMVAALSAIRANCHQEPSVCLQAACPESWIGFQRKCFYFSDDTKNWTSSQRFCDSQDADLAQVESFQELNFLLRYKGPSDHWIGLSREQGQPWKWINGTEWTRQFPILGAGECAYLNDKGASSARHYTERKWICSKSDIHV

SEQ ID NO: 882394 - protein, 161 aa, Homo sapiens
LIETGGKMHDSNNVEKDITPSELPANPGCLHSKEHSIKATLIWRLFFLIMFLTIIVCGMVAALSAIRANCHQEPSVCLQAACPESWIGFQRKCFYFSDDTKNWTSSQRFCDSQDADLAQVESFQELNFLLRYKGPSDHWIGLSREQGQPWKWINGTEWTRQ

SEQ ID NO: 882395 - protein, 350 aa, Homo sapiens
MGSKVMSYVVAGRGTCAQELLFIQPSDILRQEQYGAPWCDSVLRGCSLEQHSFIFVCLVSYLSVCRHPMEDSMDMDMSPLRPQNYLFSCELKADKDDHFKVDNDENETSYLLRTVSSGAGAKDELHIVEAEAMNDEGSPIKVTLATLKMSVQPTVSLGGFEITPPVDLRLKCGSGPVHISGQHLVAVKEGAESEDEEEEDVKLLSISGKQSAPGGGQKKVKLAAAADDDDDEDDDDDDDEEAEEKAPVKKSIRDTPAKNAQKSNQNGKDSKPSSTPRSKGQESFKKQEKSPKTPKGSSSVEDIKAKMQASIEKRGSLPKVETKFINYVKNFFWMTDQEAIQDLWQWRKSL

SEQ ID NO: 882396 - protein, 198 aa, Homo sapiens; identical to SEQ ID NO: 882393

SEQ ID NO: 882397 - protein, 350 aa, Homo sapiens; identical to SEQ ID NO: 882395

SEQ ID NO: 882398 - protein, 201 aa, Homo sapiens
LIETGGKMHDSNNVEKDITPSELPANPGCLHSKEHSIKATLIWRLFFLIMFLTIIVCGMVAALSAIRANCHQEPSVCLQAACPESWIGFQRKCFYFSDDTKNWTSSQRFCDSQDADLAQVESFQELNFLLRYKGPSDHWIGLSREQGQPWKWINGTEWTRQLVMKEDGANLYVAKVSQVPRMNPRPVMVSYPGSRRVCLFE

SEQ ID NO: 882399 - protein, 350 aa, Homo sapiens; identical to SEQ ID NO: 882395

SEQ ID NO: 882400 - protein, 350 aa, Homo sapiens; identical to SEQ ID NO: 882395

SEQ ID NO: 882401 - protein, 161 aa, Homo sapiens; identical to SEQ ID NO: 882394

SEQ ID NO: 882402 - protein, 350 aa, Homo sapiens; identical to SEQ ID NO: 882395

SEQ ID NO: 882403 - protein, 350 aa, Homo sapiens; identical to SEQ ID NO: 882395

SEQ ID NO: 882404 - protein, 201 aa, Homo sapiens; identical to SEQ ID NO: 882398

SEQ ID NO: 882405 - protein, 139 aa, Homo sapiens
LIETGGKMHDSNNVEKDITPSELPANPGCLHSKEHSIKATLIWRLFFLIMFLTIIVCGMVAALSAIRANCHQEPSVCLQAACPESWIGFQRKCFYFSDDTKNWTSSQRFCDSQDADLAQVESFQELVSYPGSRRVCLFE

SEQ ID NO: 882406 - protein, 103 aa, Homo sapiens
  misc_feature (14)..(14): Xaa can be any naturally occurring amino acid
  misc_feature (21)..(21): Xaa can be any naturally occurring amino acid
  misc_feature (97)..(98): Xaa can be any naturally occurring amino acid
  misc_feature (100)..(100): Xaa can be any naturally occurring amino acid
VWPEPLGEIVRRGXRAVEVLXRLGAVPARLTGHLHAQGTPPYVINLDPAVHEVPFPANIDIRDTVKYKEVMKQYGLGPNGGIVTSLNLFATRFDQVXXFXVKS

SEQ ID NO: 882407 - protein, 382 aa, Homo sapiens
GVGGARRKMAASAAAAELQASGGPRHPVCLLVLGMAGSGKTTFVQRLTGHLHAQGTPPYVINLDPAVHEVPFPANIDIRDTVKYKEVMKQYGLGPNGGIVTSLNLFATRFDQVMKFIEKAQNMSKYVLIDTPGQIEVFTWSASGTIITEALASSFPTVVIYVMDTSRSTNPVTFMSNMLYACSILYKTKLPFIVVMNKTDIIDHSFAVEWMQDFEAFQDALNQETTYVSNLTRSMSLVLDEFYSSLRVVGVSAVLGTGLDELFVQVTSAAEEYEREYRPEYERLKKSLANAESQQQREQLERLRKDMGSVALDAGTAKDSLSPVLHPSDLILTRGTLDEEDEEADSDTDDIDHRVTEESHEEPAFQNFMQESMAQYWKRNNK

SEQ ID NO: 882408 - protein, 382 aa, Homo sapiens; identical to SEQ ID NO: 882407

SEQ ID NO: 882409 - protein, 346 aa, Homo sapiens
GVGGARRKMAASAAAAELQASGGPRHPVCLLVLGMAGSGKTTFVQRLTGHLHAQGTPPYVINLDPAVHEVPFPANIDIRDTVKYKEVMKQYGLGPNGGIVTSLNLFATRFDQVMKFIEKAQNMSKYVLIDTPGQIEVFTWSASGTIITEALASSFPTVVIYVMDTSRSTNPVTFMSNMLYACSILYKTKLPFIVVMNKTDIIDHSFAVEWMQDFEAFQDALNQETTYVSNLTRSMSLVLDEFYSSLRVVGVSAVLGTGLDELFVQVTSAAEEYEREYRPEYERLKKSLANAESQQQREQLERLRKDMGSVALDAGTAKVTEESHEEPAFQNFMQESMAQYWKRNNK

SEQ ID NO: 882410 - protein, 296 aa, Homo sapiens
GVGGARRKMAASAAAAELQASGGPRHPVCLLVLGMAGSGKTTFVQRLTGHLHAQGTPPYVINLDPAVHEVPFPANIDIRDTVKYKEVMKQYGLGPNGGIVTSLNLFATRFDQVMKFIEKAQNMSKYVLIDTPGQIEVFTWSASGTIITEALASSFPTVVIYVMDTSRSTNPVTFMSNMLYACSILYKTKLPFIVVMNKTDIIDHSFAVEWMQDFEAFQDALNQETTYVSNLTRSMSLVLDEFYSSLRVVGVSAVLGTGLDELFVQVTSAAEEYERPTQRANSRENNWNAFEKIWVL

SEQ ID NO: 882411 - protein, 382 aa, Homo sapiens; identical to SEQ ID NO: 882407

SEQ ID NO: 882412 - protein, 115 aa, Homo sapiens
TVMPKNMKEYRPEYERLKKSLANAESQQQREQLERLRKDMGSVALDAGTAKDSLSPVLHPSDLILTRGTLDEEDEEADSDTDDIDHRVTEESHEEPAFQNFMQESMAQYWKRNNK

SEQ ID NO: 882413 - protein, 382 aa, Homo sapiens; identical to SEQ ID NO: 882407

SEQ ID NO: 882414 - protein, 382 aa, Homo sapiens; identical to SEQ ID NO: 882407

SEQ ID NO: 882415 - protein, 382 aa, Homo sapiens; identical to SEQ ID NO: 882407

SEQ ID NO: 882416 - protein, 197 aa, Homo sapiens
GVGGARRKMAASAAAAELQASGGPRHPVCLLVLGMAGSGKTTFVQRLTGHLHAQGTPPYVINLDPAVHEVPFPANIDIRDTVKYKEVMKQYGLGPNGGIVTSLNLFATRFDQVMKFIEKAQNMSKYVLIDTPGQIEVFTWSASGTIITEALASSFPTVVIYVMDTSRSTNPVTFMSNMLYACSIYIQYPEQQRHPPP

SEQ ID NO: 882417 - protein, 512 aa, Homo sapiens
MLFEGLDLVSALATLAACLVSVTLLLAVSQQLWQLRWAATRDKSCKLPIPKGSMGFPLIGETGHWLLQGSGFQSSRREKYGNVFKTHLLGRPLIRVTGAENVRKILMGEHHLVSTEWPRSTRMLLGPNTVSNSIGDIHRNKRKVFSKIFSHEALESYLPKIQLVIQDTLRAWSSHPEAINVYQEAQKLTFRMAIRVLLGFSIPEEDLGHLFEVYQQFVDNVFSLPVDLPFSGYRRGIQARQILQKGLEKAIREKLQCTQGKDYLDALDLLIESSKEHGKEMTMQELKDGTLELIFAAYATTASASTSLIMQLLKHPTVLEKLRDELRAHGILHSGGCPCEGTLRLDTLSGLRYLDCVIKEVMRLFTPISGGYRTVLQTFELDGFQIPKGWSVMYSIRDTHDTAPVFKDVNVFDPDRFSQARSEDKDGRFHYLPFGGGVRTCLGKHLAKLFLKVLAVELASTSRFELATRTFPRITLVPVLHPVDGLSVKFFGLDSNQNEILPETEAMLSATV

SEQ ID NO: 882418 - protein, 157 aa, Homo sapiens
MSAPFEERSGVVPCGTPWGQWYQTLEEVFIEVQVPPGTRAQDIQCGLQSRHVALSVGGREILKGKLFDSTIADEGTWTLEDRKMVRIVLTKTKRDAANCWTSLLESEYAADPWVQDQMQRKLTLERFQKENPGFDFSGAEISGNYTKGGPDFSNLEK

SEQ ID NO: 882419 - protein, 157 aa, Homo sapiens; identical to SEQ ID NO: 882418

SEQ ID NO: 882420 - protein, 114 aa, Homo sapiens
RERPRREPKRGIPRVRSAPPGAAAAGRDWIMSAPFEERSGVVPCGTPWGQWYQTLEEVFIEVQVPPGTRAQDIQCGLQSRHVALSVGGREILKVAAARGLCSVSSSQTPPAPFP

SEQ ID NO: 882421 - protein, 107 aa, Homo sapiens
MVFTCMKSLEYSLGKLFDSTIADEGTWTLEDRKMVRIVLTKTKRDAANCWTSLLESEYAADPWVQDQMQRKLTLERFQKENPGFDFSGAEISGNYTKGGPDFSNLEK

SEQ ID NO: 882422 - protein, 157 aa, Homo sapiens; identical to SEQ ID NO: 882418

SEQ ID NO: 882423 - protein, 114 aa, Homo sapiens; identical to SEQ ID NO: 882420

SEQ ID NO: 882424 - protein, 157 aa, Homo sapiens; identical to SEQ ID NO: 882418

SEQ ID NO: 882425 - protein, 409 aa, Homo sapiens
MKLKQRVVLLAILLVIFIFTKVFLIDNLDTSAANREDQRAFHRMMTGLRVELAPKLDHTLQSPWEIAAQWVVPREVYPEETPELGAVMHAMATKKIIKADVGYKGTQLKALLILEGGQKVVFKPKRYSRDHVVEGEPYAGYDRHNAEVAAFHLDRILGFHRAPLVVGRFVNLRTEIKPVATEQLLSTFLTVGNNTCFYGKCYYCRETEPACADGDIMEGSVTLWLPDVWPLQKHRHPWGRTYREGKLARWEYDESYCDAVKKTSPYDSGPRLLDIIDTAVFDYLIGNADRHHYESFQDDEGASMLILLDNAKSFGNPSLDERSILAPLYQCCIIRVSTWNRLNYLKNGVLKSALKSAMAHDPISPVLSDPHLDAVDQRLLSVLATVKQCTDQFGMDTVLVEDRMPLSHL

SEQ ID NO: 882426 - protein, 193 aa, Homo sapiens
MEGSVTLWLPDVWPLQKHRHPWGRTYREGKLARWEYDESYCDAVKKTSPYDSGPRLLDIIDTAVFDYLIGNADRHHYESFQDDEGASMLILLDNAKSFGNPSLDERSILAPLYQCCIIRVSTWNRLNYLKNGVLKSALKSAMAHDPISPVLSDPHLDAVDQRLLSVLATVKQCTDQFGMDTVLVEDRMPLSHL

SEQ ID NO: 882427 - protein, 409 aa, Homo sapiens; identical to SEQ ID NO: 882425

SEQ ID NO: 882428 - protein, 211 aa, Homo sapiens
MEGSVTLWLPDVWPLQKHRHPWGRTYREGKLARWEYDESYCDAVKKTSPYDSGPRLLDIIDTAVFDYLIGNADRHHYESFQDDEGASMLILLDNAKSFGNPSLDERSILAPLYQCCMKLCTANTCACIAFFSRLSIRVSTWNRLNYLKNGVLKSALKSAMAHDPISPVLSDPHLDAVDQRLLSVLATVKQCTDQFGMDTVLVEDRMPLSHL

SEQ ID NO: 882429 - protein, 409 aa, Homo sapiens; identical to SEQ ID NO: 882425

SEQ ID NO: 882430 - protein, 409 aa, Homo sapiens; identical to SEQ ID NO: 882425

SEQ ID NO: 882431 - protein, 544 aa, Homo sapiens
MEAWRCVRKGYGHCVVGRGRYPMFPHHSRSLGRDWTTPWENLQRCCWNRHISSCMRWPGHYSRAPYPYFSSRHFSLNWRPPCLFESRTQFQYCNWRPDNLSQTSLIHLSSYVMNAEGDEPSSKRRKHQGVIKRNWEYICSHDKEKTKILGDKNVDPKCEDSENKFDFSVMSYNILSQDLLEDNSHLYRHCRRPVLHWSFRFPNILKEIKHFDADVLCLQEVQEDHYGAEIRPSLESLGYHCEYKMRTGRKPDGCAICFKHSKFSLLSVNPVEFFRPDISLLDRDNVGLVLLLQPKIPYAACPAICVANTHLLYNPRRGDIKLTQLAMLLAEISSVAHQKDGSFCPIVMCGDFNSVPGSPLYSFIKEGKLNYEGLPIGKVSGQEQSSRGQRILSIPIWPPNLGISQNCVYEVQQVPKVEKTDSDLTQTQLKQTEVLVTAEKLSSNLQHHFSLSSVYSHYFPDTGIPEVTTCHSRSAITVDYIFYSAEKEDVAGHPGAEVALVGGLKLLARLSLLTEQDLWTVNGLPNENNSSDHLPLLAKFRLEL

SEQ ID NO: 882432 - protein, 490 aa, Homo sapiens [sequence omitted]

SEQ ID NO: 882433 - protein, 544 aa, Homo sapiens; identical to SEQ ID NO: 882431

SEQ ID NO: 882434 - protein, 435 aa, Homo sapiens
MEAWRCVRKGYGTVWWEEAGVIKRNWEYICSHDKEKTKILGDKNVDPKCEDSENKFDFSVMSYNILSQDLLEDNSHLYRHCRRPVLHWSFRFPNILKEIKHFDADVLCLQEVQEDHYGAEIRPSLESLGYHCEYKMRTGRKPDGCAICFKHSKFSLLSVNPVEFFRPDISLLDRDNVGLVLLLQPKIPYAACPAICVANTHLLYNPRRGDIKLTQLAMLLAEISSVAHQKDGSFCPIVMCGDFNSVPGSPLYSFIKEGKLNYEGLPIGKVSGQEQSSRGQRILSIPIWPPNLGISQNCVYEVQQVPKVEKTDSDLTQTQLKQTEVLVTAEKLSSNLQHHFSLSSVYSHYFPDTGIPEVTTCHSRSAITVDYIFYSAEKEDVAGHPGAEVALVGGLKLLARLSLLTEQDLWTVNGLPNENNSSDHLPLLAKFRLEL

SEQ ID NO: 882435 - protein, 300 aa, Homo sapiens [sequence omitted]

SEQ ID NO: 882436 - protein, 125 aa, Homo sapiens
EEGLGDGASGTSLQRPSGIGKPAAQLAGRWANEVWGLGAEFMGRRPGLCQWLWIPGLLPPTQPPDQRWPAPHTPQHRPGNRASAGRPPLRNTPCFPITRGVWAETGLHRGRICKGVAGTDIFLVV

SEQ ID NO: 882437 - protein, 125 aa, Homo sapiens; identical to SEQ ID NO: 882436

SEQ ID NO: 882438 - protein, 166 aa, Homo sapiens
MRWPGHYSRAPYPYFSSRHFSLNWRPPCLFESRTQFQYCNWRPDNLSQTSLIHLSSYVMNAEGDEPSSKRRKHQGVIKRNWEYICSHDKEKTKILGDKNVDPKCEDSENKFDFSVMSYNILSQDLLEDNSHLYRHCRRPVLHWSFRFPNILKEIKHFDADVSAKYY

SEQ ID NO: 882439 - protein, 205 aa, Homo sapiens
DYFRAVLQHDERSERAFKLTRDAIELNAANYTVWHFRRVLLKSLQKDLHEEMNYITAIIEEQPKNYQVWHHRRVLVEWLRDPSQELEFIADILNQDAKNYHAWQHRQWVIQEFKLWDNELQYVDQLLKEDVRNNSVWNQRYFVISNTTGYNDRAVLEREVQLVISFTCSFVTNMFACLPYLRHWGYSRSRSYPMELKEDRVLSGT

SEQ ID NO: 882440 - protein, 279 aa, Homo sapiens
DYFRAVLQHDERSERAFKLTRDAIELNAANYTVWHFRRVLLKSLQKDLHEEMNYITAIIEEQPKNYQVWHHRRVLVEWLRDPSQELEFIADILNQDAKNYHAWQHRQWVIQEFKLWDNELQYVDQLLKEDVRNNSVWNQRYFVISNTTGYNDRAVLEREVQYTLEMIKLVPHNESAWNYLKGILQDRGLSKYPNLLNQLLDLQPSHSSPYLIAFLVDIYEDMLENQCDNKEDILNKALELCEILAKEKDTIRKEYWRYIGRSLQSKHSTENDSPTNVQQ

SEQ ID NO: 882441 - protein, 379 aa, Homo sapiens
GGSDARRCRCVGVRGSVWWKGQRTKSMDWKLEGSTQKVESPVLQGQEGILEETGEDGLPEGFQLLQIDAEGECQEGEILATGSTAWCSKNVQRKQRHWEKIVAAKKSKRKQEKERRKANRAENPGICPQHSKRFLRALTKDKLLEAKHSGPRLCIDLSMTHYMSKKVEHPLSLEFLLAMREAQKGTAFRRNGQLQLLGFLSKLELSRLAGQIRRLYGSNKKADRPFWICLTGFTTDSPLYEECVRMNDGFSSYLLDITEEDCFSLFPLETLVYLTPDSEHALEDVDLNKVYILGGLVDESIQKKVTFQKAREYSVKTARLPIQEYMVRNQNGKNYHSEILAINQVFDILSTYLETHNWPEALKKGVSSGKGYILRNSVE

SEQ ID NO: 882442 - protein, 375 aa, Homo sapiens
MTSLYGSIHPADSVYLSTRTHGAVFNLEYSPDGSVLTVACEQTEVLLFDPISSKHIKTLSEAHEDCVNNIRFLDNRLFATCSDDTTIALWDLRKLNTKVCTLHGHTSWVKNIEYDTNTRLLVTSGFDGNVIIWDTNRYTEDGCPHKKFFHTRFLMRMRLTPDCSKMLISTSSGYLLILHDLDLTKSLEVGSYPILRARRTTSSSGVSPRNSLEVVTPEVLGESDHGNCITSLQLHPKGWATLLRCSSNSDDEECTCVYEFQEGAPVRPVSPRCSLRLTHYIEEANVGRGYIKELCFSPDGRMISSPHGYGIRLLGFDKQCSELVDCLPKEASPLRVIRSLYSHNDVVLTTKFSPTHCQIASGCLSGRVSLYQPKF

SEQ ID NO: 882443 - protein, 342 aa, Homo sapiens
GGSDARRCRCVGVRGSVWWKGQRTKSMDWKLEGSTQKVESPVLQGQEGILEETGEDGLPEGFQLLQIDAEGECQEGEILATGSTAWCSKNVQRKQRHWEKIVAAKKSKRKQEKERRKANRAENPGICPQHSKRFLRALTKDKLLEAKHSGPRLCIDLSMTHYMSKKELSRLAGQIRRLYGSNKKADRPFWICLTGFTTDSPLYEECVRMNDGFSSYLLDITEEDCFSLFPLETLVYLTPDSEHALEDVDLNKVYILGGLVDESIQKKVTFQKAREYSVKTARLPIQEYMVRNQNGKNYHSEILAINQVFDILSTYLETHNWPEALKKGVSSGKGYILRNSVE

SEQ ID NO: 882444 - protein, 184 aa, Homo sapiens
MTHYMSKKELSRLAGQIRRLYGSNKKADRPFWICLTGFTTDSPLYEECVRMNDGFSSYLLDITEEDCFSLFPLETLVYLTPDSEHALEDVDLNKVYILGGLVDESIQKKVTFQKAREYSVKTARLPIQEYMVRNQNGKNYHSEILAINQVFDILSTYLETHNWPEALKKGVSSGKGYILRNSVE

SEQ ID NO: 882445 - protein, 134 aa, Homo sapiens
MNDGFSSYLLDITEEDCFSLFPLETLVYLTPDSEHALEDVDLNKVYILGGLVDESIQKKVTFQKAREYSVKTARLPIQEYMVRNQNGKNYHSEILAINQVFDILSTYLETHNWPEALKKGVSSGKGYILRNSVE

SEQ ID NO: 882446 - protein, 134 aa, Homo sapiens; identical to SEQ ID NO: 882445

SEQ ID NO: 882447 - protein, 349 aa, Homo sapiens
MLSRSHRSVLTVACEQTEVLLFDPISSKHIKTLSEAHEDCVNNIRFLDNRLFATCSDDTTIALWDLRKLNTKVCTLHGHTSWVKNIEYDTNTRLLVTSGFDGNVIIWDTNRYTEDGCPHKKFFHTRFLMRMRLTPDCSKMLISTSSGYLLILHDLDLTKSLEVGSYPILRARRTTSSSGVSPRNSLEVVTPEVLGESDHGNCITSLQLHPKGWATLLRCSSNSDDEECTCVYEFQEGAPVRPVSPRCSLRLTHYIEEANVGRGYIKELCFSPDGRMISSPHGYGIRLLGFDKQCSELVDCLPKEASPLRVIRSLYSHNDVVLTTKFSPTHCQIASGCLSGRVSLYQPKF

SEQ ID NO: 882448 - protein, 379 aa, Homo sapiens; identical to SEQ ID NO: 882441

SEQ ID NO: 882449 - protein, 309 aa, Homo sapiens
MTSLYGSIHPADSVYLSTRTHGAVFNLEYSPDGSVLTVACEQTEVLLFDPISSKHIKTLSEAHEDCVNNIRYTEDGCPHKKFFHTRFLMRMRLTPDCSKMLISTSSGYLLILHDLDLTKSLEVGSYPILRARRTTSSSGVSPRNSLEVVTPEVLGESDHGNCITSLQLHPKGWATLLRCSSNSDDEECTCVYEFQEGAPVRPVSPRCSLRLTHYIEEANVGRGYIKELCFSPDGRMISSPHGYGIRLLGFDKQCSELVDCLPKEASPLRVIRSLYSHNDVVLTTKFSPTHCQIASGCLSGRVSLYQPKF

SEQ ID NO: 882450 - protein, 379 aa, Homo sapiens; identical to SEQ ID NO: 882441

SEQ ID NO: 882451 - protein, 379 aa, Homo sapiens; identical to SEQ ID NO: 882441

SEQ ID NO: 882452 - protein, 379 aa, Homo sapiens; identical to SEQ ID NO: 882441

SEQ ID NO: 882453 - protein, 379 aa, Homo sapiens; identical to SEQ ID NO: 882441

SEQ ID NO: 882454 - protein, 379 aa, Homo sapiens; identical to SEQ ID NO: 882441

SEQ ID NO: 882455 - protein, 157 aa, Homo sapiens
  misc_feature (8)..(9): Xaa can be any naturally occurring amino acid
IPIYRTKXXLKTLSHLEKKKMSETQNSTSQKAMDEDNKAASQTMPNTQDKNYEDELTQVALALVEDVINYAVKIVEEERNPLKNIKWMTHGEFTVEKGLKQIDEYFSDAPIVVSYVGDHQALVHRPGMVRFRENWQKNLTDAKYSFMESFPFLFNRV

SEQ ID NO: 882456 - protein, 197 aa, Homo sapiens
MSETQNSTSQKAMDEDNKAASQTMPNTQDKNYEDELTQVALALVEDVINYAVKIVEEERNPLKNIKWMTHGEFTVEKGLKQIDEYFSKCVSKKCWAHGVEFVERKDLIHSFLYIYYVHWSISTADLPVARISAGTYFTMKVSKTKPPDAPIVVSYVGDHQALVHRPGMVRFRENWQKNLTDAKYSFMESFPFLFNRV

SEQ ID NO: 882457 - protein, 641 aa, Homo sapiens
MAKAAAIGIDLGTTYSCVGVFQHGKVEIIANDQGNRTTPSYVAFTDTERLIGDAAKNQVALNPQNTVFDAKRLIGRKFGDPVVQSDMKHWPFQVINDGDKPKVQVSYKGETKAFYPEEISSMVLTKMKEIAEAYLGYPVTNAVITVPAYFNDSQRQATKDAGVIAGLNVLRIINEPTAAAIAYGLDRTGKGERNVLIFDLGGGTFDVSILTIDDGIFEVKATAGDTHLGGEDFDNRLVNHFVEEFKRKHKKDISQNKRAVRRLRTACERAKRTLSSSTQASLEIDSLFEGIDFYTSITRARFEELCSDLFRSTLEPVEKALRDAKLDKAQIHDLVLVGGSTRIPKVQKLLQDFFNGRDLNKSINPDEAVAYGAAVQAAILMGDKSENVQDLLLLDVAPLSLGLETAGGVMTALIKRNSTIPTKQTQIFTTYSDNQPGVLIQVYEGERAMTKDNNLLGRFELSGIPPAPRGVPQIEVTFDIDANGILNVTATDKSTGKANKITITNDKGRLSKEEIERMVQEAEKYKAEDEVQRERVSAKNALESYAFNMKSAVEDEGLKGKISEADKKKVLDKCQEVISWLDANTLAEKDEFEHKRKELEQVCNPIISGLYQGAGGPGPGGFGAQGPKGGSGSGPTIEEVD

SEQ ID NO: 882458 - protein, 66 aa, Homo sapiens
EMTVRLTTIRLQLYKEVKQQRKELEQVCNPIISGLYQGAGGPGPGGFGAQGPKGGSGSGPTIEEVD

SEQ ID NO: 882459 - protein, 196 aa, Homo sapiens
  misc_feature (4)..(5): Xaa can be any naturally occurring amino acid
  misc_feature (8)..(8): Xaa can be any naturally occurring amino acid
MLVXXAVXGYRRPGLRSITRLTLFEEFEKNGIYCCGLLRARKSDCTGLPLSMLTNPATPPARGQYQIKMKGNMSLICWYNKGHFRFLTNAYSPVQQGVIIKRKSGEIPCPLAVEAFAAHLSYICRYDDKYSKYFISHKPNKTWQQVFWFAISIAINNAYILYKMSDAYHVKRYSRAQFGERLVRELLGLEDASPTH

SEQ ID NO: 882460 - protein, 333 aa, Homo sapiens
GFFSNRSLALVMSQARFEKILKYFHVVAFRSSQTTHGLYKVQPFLDSLQNSFDSAFRPSQTQVLHEPLIDEDPVFIATCTERELRKRKKRKFSLWVRQCSSTGFIIQIYVHLKEGGGPDGLDALKNKPQLHSMVARSLCRNAAGKNYIIFTGPSITSLTLFEEFEKQGIYCCGLLRARKSDCTGLPLSMLTNPATPPARGQYQIKMKGNMSLICWYNKGHFRFLTNAYSPVQQGVIIKRKSGEIPCPLAVEAFAAHLSYICRYDDKYSKYFISHKPNKTWQQVFWFAISIAINNAYILYKMSDAYHVKRYSRAQFGERLVRELLGLEDASPTH

SEQ ID NO: 882461 - protein, 124 aa, Homo sapiens
MSLICWYNKGHFRFLTNAYSPVQQGVIIKRKSGEIPCPLAVEAFAAHLSYICRYDDKYSKYFISHKPNKTWQQVFWFAISIAINNAYILYKMSDAYHVKRYSRAQFGERLVRELLGLEDASPTH

SEQ ID NO: 882462 - protein, 196 aa, Homo sapiens; identical to SEQ ID NO: 882459
  misc_feature (4)..(5): Xaa can be any naturally occurring amino acid
  misc_feature (8)..(8): Xaa can be any naturally occurring amino acid

SEQ ID NO: 882463 - protein, 196 aa, Homo sapiens; identical to SEQ ID NO: 882459
  misc_feature (4)..(5): Xaa can be any naturally occurring amino acid
  misc_feature (8)..(8): Xaa can be any naturally occurring amino acid

SEQ ID NO: 882464 - protein, 196 aa, Homo sapiens; identical to SEQ ID NO: 882459
  misc_feature (4)..(5): Xaa can be any naturally occurring amino acid
  misc_feature (8)..(8): Xaa can be any naturally occurring amino acid

SEQ ID NO: 882465 - protein, 196 aa, Homo sapiens; identical to SEQ ID NO: 882459
  misc_feature (4)..(5): Xaa can be any naturally occurring amino acid
  misc_feature (8)..(8): Xaa can be any naturally occurring amino acid

SEQ ID NO: 882466 - protein, 333 aa, Homo sapiens; identical to SEQ ID NO: 882460

SEQ ID NO: 882467 - protein, 143 aa, Homo sapiens
DLSAKSASVPDELGACGHSRTSSYASQQSKVSGYSTCHSRSSSFSELCHRRNTSVGSTSTGVESILEPCDEIEQKIAEPNLDTADKEDTASEKLSRCPVKQDSVESSAEAELMTPRVDADDIVEKILQSQDFSPRFPVRKKKD

SEQ ID NO: 882468 - protein, 111 aa, Homo sapiens
DLSAKSASVPDELGACGHSRTSSYASQQSKVSGYSTCHSRSSSFSELCHRRNTSVGSTSTGVESILEPCDEIEQKIAEPNLDTADKEDTASEKLSRCPVKQDSVESQLKPS

SEQ ID NO: 882469 - protein, 540 aa, Homo sapiens
MTDTRRRVKVYTLNEDRQWDDRGTGHVSSGYVERLKGMSLLVRAESDGSLLLESKINPNTAYQKQQDTLIVWSEAENYDLALSFQEKAGCDEIWEKICQVQGKDPSVDITQDLVDESEEERFDDMSSPGLELPSCELSRLEEIAELVASSLPSPLRREKLALALENEGYIKKLLELFHVCEDLENIEGLHHLYEIIKGIFLLNRTALFEVMFSEECIMDVIGCLEYDPALSQPRKHREFLTKTAKFKEVIPISDPELKQKIHQTYRVQYIQDMVLPTPSVFEENMLSTLHSFIFFNKVEIVGMLQEDEKFLTDLFAQLTDEATDEEKRQELVNFLKEFCAFSQTLQPQNRDAFFKTLSNMGILPALEVILGMDDTQVRSAATDIFSYLVEYNPSMVREFVMQEAQQNDDDILLINLIIEHMICDTDPELGGAVQLMGLLRTLVDPENMLATANKTEKTEFLGFFYKHCMHVLTAPLLANTTEDKPSKDDFQTAQLLALVLELLTFCVEHHTYHIKNYIINKDILRRVLVLMASKHAFLAL

SEQ ID NO: 882470 - protein, 540 aa, Homo sapiens; identical to SEQ ID NO: 882469

SEQ ID NO: 882471 - protein, 820 aa, Homo sapiens
MTDTRRRVKVYTLNEDRQWDDRGTGHVSSGYVERLKGMSLLVRAESDGSLLLESKINPNTAYQKQQDTLIVWSEAENYDLALSFQEKAGCDEIWEKICQVQGKDPSVDITQDLVDESEEERFDDMSSPGLELPSCELSRLEEIAELVASSLPSPLRREKLALALENEGYIKKLLELFHVCEDLENIEGLHHLYEIIKGIFLLNRTALFEVMFSEECIMDVIGCLEYDPALSQPRKHREFLTKTAKFKEVIPISDPELKQKIHQTYRVQYIQDMVLPTPSVFEENMLSTLHSFIFFNKVEIVGMLQEDEKFLTDLFAQLTDEATDEEKRQELVNFLKEFCAFSQTLQPQNRDAFFKTLSNMGILPALEVILGMDDTQVRSAATDIFSYLVEYNPSMVREFVMQEAQQNDDDILLINLIIEHMICDTDPELGGAVQLMGLLRTLVDPENMLATANKTEKTEFLGFFYKHCMHVLTAPLLANTTEDKPSKDDFQTAQLLALVLELLTFCVEHHTYHIKNYIINKDILRRVLVLMASKHAFLALCALRFKRKIIGLKDEFYNRYIMKSFLFEPVVKAFLNNGSRYNLMNSAIIEMFEFIRVEDIKSLTAHVIENYWKALEDVDYVQTFKGLKLRFEQQRERQDNPKLDSMRSILRNHRYRRDARTLEDEEEMWFNTDEDDMEDGEAVVSPSDKTKNDDDIMDPISKFMERKKLKESEEKEVLLKTNLSGRQSPSFKLSLSSGTKTNLTSQSSTTNLPGSPGSPGSPGSPGSPGSVPKNTSQTAAITTKGGLVGLVDYPDDDEDDDEDEDKEDTLPLSKKAKFDS

SEQ ID NO: 882472 - protein, 540 aa, Homo sapiens; identical to SEQ ID NO: 882469

SEQ ID NO: 882473 - protein, 540 aa, Homo sapiens; identical to SEQ ID NO: 882469

SEQ ID NO: 882474 - protein, 833 aa, Homo sapiens
MTDTRRRVKVYTLNEDRQWDDRGTGHVSSGYVERLKGMSLLVRAESDGSLLLESKINPNTAYQKQQDTLIVWSEAENYDLALSFQEKAGCDEIWEKICQVQGKDPSVDITQDLVDESEEERFDDMSSPGLELPSCELSRLEEIAELVASSLPSPLRREKLALALENEGYIKKLLELFHVCEDLENIEGLHHLYEIIKGIFLLNRTALFEVMFSEECIMDVIGCLEYDPALSQPRKHREFLTKTAKFKEVIPISDPELKQKIHQTYRVQYIQDMVLPTPSVFEENMLSTLHSFIFFNKVEIVGMLQEDEKFLTDLFAQLTDEATDEEKRQELVNFLKEFCAFSQTLQPQNRDAFFKTLSNMGILPALEVILGMDDTQVRSAATDIFSYLVEYNPSMVREFVMQEAQQNDDVSKKLTEQKITSKDILLINLIIEHMICDTDPELGGAVQLMGLLRTLVDPENMLATANKTEKTEFLGFFYKHCMHVLTAPLLANTTEDKPSKDDFQTAQLLALVLELLTFCVEHHTYHIKNYIINKDILRRVLVLMASKHAFLALCALRFKRKIIGLKDEFYNRYIMKSFLFEPVVKAFLNNGSRYNLMNSAIIEMFEFIRVEDIKSLTAHVIENYWKALEDVDYVQTFKGLKLRFEQQRERQDNPKLDSMRSILRNHRYRRDARTLEDEEEMWFNTDEDDMEDGEAVVSPSDKTKNDDDIMDPISKFMERKKLKESEEKEVLLKTNLSGRQSPSFKLSLSSGTKTNLTSQSSTTNLPGSPGSPGSPGSPGSPGSVPKNTSQTAAITTKGGLVGLVDYPDDDEDDDEDEDKEDTLPLSKKAKFDS

SEQ ID NO: 882475 - protein, 812 aa, Homo sapiens
MTDTRRRVKVYTLNEDRQWDDRGTGHVSSGYVERLKGMSLLVRAESDGSLLLESKINPNTAYQKQQDTLIVWSEAENYDLALSFQEKAGCDEIWEKICQVQGKDPSVDITQDLVDESEEERFDDMSSPGLELPSCELSRLEEIAELVASSLPSPLRREKLALALENEGYIKKLLELFHVCEDLENIEGLHHLYEIIKGIFLLNRTALFEVMFSEECIMDVIGCLEYDPALSQPRKHREFLTKTAKFKEVIPISDPELKQKIHQTYRVQYIQDMVLPTPSVFEENMLSTLHSFIFFNKVEIVGMLQEDEKFLTDLFAQLTDEATDEEKRQELKLFEFCAFSPLQPLEVILGMDDTQVRSAATDIFSYLVEYNPSMVREFVMQEAQQNDDVSKKLTEQKITSKDILLINLIIEHMICDTDPELGGAVQLMGLLRTLVDPENMLATANKTEKTEFLGFFYKHCMHVLTAPLLANTTEDKPSKDDFQTAQLLALVLELLTFCVEHHTYHIKNYIINKDILRRVLVLMASKHAFLALCALRFKRKIIGLKDEFYNRYIMKSFLFEPVVKAFLNNGSRYNLMNSAIIEMFEFIRVEDIKSLTAHVIENYWKALEDVDYVQTFKGLKLRFEQQRERQDNPKLDSMRSILRNHRYRRDARTLEDEEEMWFNTDEDDMEDGEAVVSPSDKTKNDDDIMDPISKFMERKKLKESEEKEVLLKTNLSGRQSPSFKLSLSSGTKTNLTSQSSTTNLPGSPGSPGSPGSPGSPGSVPKNTSQTAAITTKGGLVGLVDYPDDDEDDDEDEDKEDTLPLSKKAKFDS

SEQ ID NO: 882476 - protein, 478 aa, Homo sapiens
MTDTRRRVKVYTLNEDRQWDDRGTGHVSSGYVERLKGMSLLVRAESDGSLLLESKINPNTAYQKQQDTLIVWSEAENYDLALSFQEKAGCDEIWEKICQVQGKDPSVDITQDLVDESEEERFDDMSSPGLELPSCELSRLEEIAELVASSLPSPLRREKLALALENEGYIKKLLELFHVCEDLENIEGLHHLYEIIKGIFLLNRTALFEVMFSEECIMDVIGCLEYDPALSQPRKHREFLTKTAKFKEVIPISDPELKQKIHQTYRVQYIQDMVLPTPSVFEENMLSTLHSFIFFNKVEIVGMLQEDEKFLTDLFAQLTDEATDEEKRQELVNFLKEFCAFSQTLQPQNRDAFFKTLSNMGILPALEVILGMDDTQVRSAATDIFSYLVEYNPSMVREFVMQEAQQNDDVSKKLTEQKITSKDILLINLIIEHMICDTDPELGGAVQLMGLLRTLVDPENMLATANCSFTSKYNRRQT

SEQ ID NO: 882477 - protein, 540 aa, Homo sapiens; identical to SEQ ID NO: 882469

SEQ ID NO: 882478 - protein, 540 aa, Homo sapiens; identical to SEQ ID NO: 882469

SEQ ID NO: 882479 - protein, 540 aa, Homo sapiens; identical to SEQ ID NO: 882469

SEQ ID NO: 882480 - protein, 713 aa, Homo sapiens
MTDTRRRVKVYTLNEDRQWDDRGTGHVSSGYVERLKGMSLLVRAESDGSLLLESKINPNTAYQKQQDTLIVWSEAENYDLALSFQEKAGCDEIWEKICQVQGKDPSVDITQDLVDESEEERFDDMSSPGLELPSCELSRLEEIAELVASSLPSPLRREKLALALENEGYIKKLLELFHVCEDLENIEGLHHLYEIIKGIFLLNRTALFEVMFSEECIMDVIGCLEYDPALSQPRKHREFLTKTAKFKEVIPISDPELKQKIHQTYRVQYIQDMVLPTPSVFEENMLSTLHSFIFFNKVEIVGMLQEDEKFLTDLFAQLTDEATDEEKRQELVNFLKEFCAFSQTLQPQNRDAFFKTLSNMGILPALEVILGMDDTQVRSAATDIFSYLVEYNPSMVREFVMQEAQQNDDDILLINLIIEHMICDTDPELGGAVQLMGLLRTLVDPENMLATANKTEKTEFLGFFYKHCMHVLTAPLLANTTEDKPSKDDFQTAQLLALVLELLTFCVEHHTYHIKNYIINKDILRRVLVLMASKHAFLALCALRFKRKIIGLKDEFYNRYIMKSFLFEPVVKAFLNNGSRYNLMNSAIIEMFEFIRVEDIKSLTAHVIENYWKALEDVDYVQTFKGLKLRFEQQRERQDNPKLDSMRSILRNHRYRRDARTLEDEEEMWFNTDEDDMEDGEAVVSPSDKTKNDDEDEDKEDTLPLSKKAKFDS

SEQ ID NO: 882481 - protein, 456 aa, Homo sapiens
MTDTRRRVKVYTLNEDRQWDDRGTGHVSSGYVERLKGMSLLVRAESDGSLLLESKINPNTAYQKQQDTLIVWSEAENYDLALSFQEKAGCDEIWEKICQVQGKDPSVDITQDLVDESEEERFDDMSSPGLELPSCELSRLEEIAELVASSLPSPLRREKLALALENEGYIKKLLELFHVCEDLENIEGLHHLYEIIKGIFLLNRTALFEVMFSEECIMDVIGCLEYDPALSQPRKHREFLTKTAKFKEVIPISDPELKQKIHQTYRVQYIQDMVLPTPSVFEENMLSTLHSFIFFNKVEIVGMLQEDEKFLTDLFAQLTDEATDEEKRQELVNFLKEFCAFSQTLQPQNRDAFFKTLSNMGILPALEVILGMDDTQVRSAATDIFSYLVEYNPSMVREFVMQEAQQNDDVSKKLTEQKITSKVNIICTNSKYLYIGSYNCFYYSLLRFNCCCLGKV

SEQ ID NO: 882482 - protein, 591 aa, Homo sapiens
MTDTRRRVKVYTLNEDRQWDDRGTGHVSSGYVERLKGMSLLVRAESDGSLLLESKINPNTAYQKQQDTLIVWSEAENYDLALSFQEKAGCDEIWEKICQVQGKDPSVDITQDLVDESEEERFDDMSSPGLELPSCELSRLEEIAELVASSLPSPLRREKLALALENEGYIKKLLELFHVCEDLENIEGLHHLYEIIKGIFLLNRTALFEVMFSEECIMDVIGCLEYDPALSQPRKHREFLTKTAKFKEVIPISDPELKQKIHQTYRVQYIQDMVLPTPSVFEENMLSTLHSFIFFNKVEIVGMLQEDEKFLTDLFAQLTDEATDEEKRQELKLFEFCAFSPLQPLEVILGMDDTQVRSAATDIFSYLVEYNPSMVREFVMQEAQQNDDDILLINLIIEHMICDTDPELGGAVQLMGLLRTLVDPENMLATANKTEKTEFLGFFYKHCMHVLTAPLLANTTEDKPSKDDFQTAQLLALVLELLTFCVEHHTYHIKNYIINKDILRRVLVLMASKHAFLALCALRFKRKIIGLKDEFYNRYIMKSFLFEPVVKAFLNNGSRYNLMNSAIIEMFEFIRVEILIFTVSMNSESGE

SEQ ID NO: 882483 - protein, 67 aa, Homo sapiens
  misc_feature (23)..(23): Xaa can be any naturally occurring amino acid
KGIKIKVLANMSQNPFSLGLKKXQISRAEFGTRRKKREEPLVMPVWWRRRRLRARSWALRGARKPLR

SEQ ID NO: 882484 - protein, 91 aa, Homo sapiens
REEPLVMPVWWRRRRLRARSWALRGESDRGLRSNSSTCRVPPPYGCPARPLSLPRAQRSGRLLRRPKGYAPGAPKAHELSPQAICAVAFCE

SEQ ID NO: 882485 - protein, 90 aa, Homo sapiens
PLTLLVQKLALHSGMDYAIMTGGDVAPMGREGVTAMHKLFDWANTSRRGLLLFMDEADAFLRKRATEEISKDLRATLNAFLYHMGQHSNK

SEQ ID NO: 882486 - protein, 602 aa, Homo sapiens
MQLEALNLLHTLVWARSLCRAGAVQTQERLSGSASPEQVPAGECCALQEYEAAVEQLKSEQIRAQAEERRKTLSEETRQHQARAQYQDKLARQRYEDQLKQQQLLNEENLRKQEESVQKQEAMRRATVEREMELRHKNEMLRVETEARARAKAERENADIIREQIRLKASEHRQTVLESIRTAGTLFGEGFRAFVTDRDKVTATVAGLTLLAVGVYSAKNATAVTGRFIEARLGKPSLVRETSRITVLEALRHPIQVSRRLLSRPQDVLEGVVLSPSLEARVRDIAIATRNTKKNRGLYRHILLYGPPGTGKTLFAKKLALHSGMDYAIMTGGDVAPMGREGVTAMHKLFDWANTSRRGLLLFMDEADAFLRKRATEEISKDLRATLNAFLYHMGQHSNKFMLVLASNLPEQFDCAINSRIDVMVHFDLPQQEERERLVRLHFDNCVLKPATEGKRRLKLAQFDYGRKCSEVARLTEGMSGREIAQLAVSWQATAYASKDGVLTEAMMDACVQDAVQQYRQKMRWLKAEGPGRGVEHPLSGVQGETLTSWSLATDPSYPCLAGPCTFRICSWMGTGLCPGPLSPRMSCGGGRPFCPPGHPLL

SEQ ID NO: 882487 - protein, 648 aa, Homo sapiens
MSWLFGINKGPKGEGAGPPPPLPPAQPGAEGGGDRGLGDRPAPKDKWSNFDPTGLERAAKAARELEHSRYAKDALNLAQMQEQTLQLEQQSKLKEYEAAVEQLKSEQIRAQAEERRKTLSEETRQHQARAQYQDKLARQRYEDQLKQQQLLNEENLRKQEESVQKQEAMRRATVEREMELRHKNEMLRVETEARARAKAERENADIIREQIRLKASEHRQTVLESIRTAGTLFGEGFRAFVTDRDKVTATVAGLTLLAVGVYSAKNATAVTGRFIEARLGKPSLVRETSRITVLEALRHPIQVSRRLLSRPQDVLEGVVLSPSLEARVRDIAIATRNTKKNRGLYRHILLYGPPGTGKTLFAKKLALHSGMDYAIMTGGDVAPMGREGVTAMHKLFDWANTSRRGLLLFMDEADAFLRKRATEEISKDLRATLNAFLYHMGQHSNKFMLVLASNLPEQFDCAINSRIDVMVHFDLPQQEERERLVRLHFDNCVLKPATEGKRRLKLAQFDYGRKCSEVARLTEGMSGREIAQLAVSWQATAYASKDGVLTEAMMDACVQDAVQQYRQKMRWLKAEGPGRGVEHPLSGVQGETLTSWSLATDPSYPCLAGPCTFRICSWMGTGLCPGPLSPRMSCGGGRPFCPPGHPLL

SEQ ID NO: 882488 - protein, 201 aa, Homo sapiens
MLVLASNLPEQFDCAINSRIDVMVHFDLPQQEERERLVRLHFDNCVLKPATEGKRRLKLAQFDYGRKCSEVARLTEGMSGREIAQLAVSWQATAYASKDGVLTEAMMDACVQDAVQQYRQKMRWLKAEGPGRGVEHPLSGVQGETLTSWSLATDPSYPCLAGPCTFRICSWMGTGLCPGPLSPRMSCGGGRPFCPPGHPLL

SEQ ID NO: 882489 - protein, 366 aa, Homo sapiens
MSWAASRGAESAPGHSRSPCHRGFRGCRVSPPNPRLPRQPSLEARVRDIAIATRNTKKNRGLYRHILLYGPPGTGKTLFAKKLALHSGMDYAIMTGGDVAPMGREGVTAMHKLFDWANTSRRGLLLFMDEADAFLRKRATEEISKDLRATLNAFLYHMGQHSNKFMLVLASNLPEQFDCAINSRIDVMVHFDLPQQEERERLVRLHFDNCVLKPATEGKRRLKLAQFDYGRKCSEVARLTEGMSGREIAQLAVSWQATAYASKDGVLTEAMMDACVQDAVQQYRQKMRWLKAEGPGRGVEHPLSGVQGETLTSWSLATDPSYPCLAGPCTFRICSWMGTGLCPGPLSPRMSCGGGRPFCPPGHPLL

SEQ ID NO: 882490 - protein, 508 aa, Homo sapiens
MSWLFGINKGPKGEGAGPPPPLPPAQPGAEGGGDRGLGDRPAPKDKWSNFDPTGLERAAKAARELEHSRYAKDALNLAQMQEQTLQLEQQSKLKEYEAAVEQLKSEQIRAQAEERRKTLSEETRQHQARAQYQDKLARQRYEDQLKQQQLLNEENLRKQEESVQKQEAMRRATVEREMELRHKNEMLRVETEARARAKAERENADIIREQIRLKASEHRQTVLESIRTAGTLFGEGFRAFVTDRDKVTATVAGLTLLAVGVYSAKNATAVTGRFIEARLGKPSLVRETSRITVLEALRHPIQVSRRLLSRPQDVLEGVVLSPSLEARVRDIAIATRNTKKNRGLYRHILLYGPPGTGKTLFAKKLALHSGMDYAIMTGGDVAPMGREGVTAMHKLFDWANTSRRGLLLFMDEADAFLRKRATEEISKDLRATLNAFLYHMGQHSNKFMLVLASNLPEQFDCAINSRIGLREEVLGGRSADGGHVGPGDRSAGRVLAGHGICLQGRGPH

SEQ ID NO: 882491 - protein, 648 aa, Homo sapiens; identical to SEQ ID NO: 882487

SEQ ID NO: 882492 - protein, 648 aa, Homo sapiens; identical to SEQ ID NO: 882487

SEQ ID NO: 882493 - protein, 284 aa, Homo sapiens
MSWLFGINKGPKGEGAGPPPPLPPAQPGAEGGGDRGLGDRPAPKDKWSNFDPTGLERAAKAARELEHSRYAKDALNLAQMQEQTLQLEQQSKLKEYEAAVEQLKSEQIRAQAEERRKTLSEETRQHQARAQYQDKLARQRYEDQLKQQQLLNEENLRKQEESVQKQEAMRRATVEREMELRHKNEMLRVETEARARAKAERENADIIREQIRLKASEHRQTVLESIRTAGTLFGEGFRAFVTDRDKVTATVNIFIKQGWQVAERQHVGASWSPRSCPCRLCTAL

SEQ ID NO: 882494 - protein, 292 aa, Homo sapiens
MSWLFGINKGPKGEGAGPPPPLPPAQPGAEGGGDRGLGDRPAPKDKWSNFDPTGLERAAKAARELEHSRYAKDALNLAQMQEQTLQLEQQSKLKEYEAAVEQLKSEQIRAQAEERRKTLSEETRQHQARAQYQDKLARQRYEDQLKQQQLLNEENLRKQEESVQKQEAMRRATVEREMELRHKNEMLRVETEARARAKAERENADIIREQIRLKASEHRQTVLESIRTAGTLFGEGFRAFVTDRDKVTATVNIFIKQGWQVAERHIFGGGGGRITRSGDRDHPGKSETLSLL

SEQ ID NO: 882495 - protein, 232 aa, Homo sapiens
MEHTGHYLHLAFLMTTVFSLSPGTKANYTRLWANSTSSWDSVIQNKTGRNQNENINTNPITPEVDYKGNSTNMPETSHIVALTSKSEQELYIPSVVSNSPSTVQSIENTSKSHGEIFKKDVCAENNNNMAMLICLIIIAVLFLICTFLFLSTVVLANKVSSLRRSKQVGKRQPRSNGDFLASGLWPAESDTWKRTKQLTGPNLVMQSTGVLTATRERKDEEGTEKLTNKQIG

SEQ ID NO: 882496 - protein, 259 aa, Homo sapiens
MLLRSWFGNKDFQALPILARLPSMPTDMEHTGHYLHLAFLMTTVFSLSPGTKANYTRLWANSTSSWDSVIQNKTGRNQNENINTNPITPEVDYKGNSTNMPETSHIVALTSKSEQELYIPSVVSNSPSTVQSIENTSKSHGEIFKKDVCAENNNNMAMLICLIIIAVLFLICTFLFLSTVVLANKVSSLRRSKQVGKRQPRSNGDFLASGLWPAESDTWKRTKQLTGPNLVMQSTGVLTATRERKDEEGTEKLTNKQIG

SEQ ID NO: 882497 - protein, 214 aa, Homo sapiens
MEHTGHYLHLAFLMTTVFSLSPGTKANYTRLWANSTSSWDSVIQNKTGRNQNENINTNPITPEVDYKGNSTNMPETSHIVALTSKSEQELYIPSVVSNSPSTVQSIENTSKSHGEIFKKDVCAVLICTFLFLSTVVLANKVSSLRRSKQVGKRQPRSNGDFLASGLWPAESDTWKRTKQLTGPNLVMQSTGVLTATRERKDEEGTEKLTNKQIG

SEQ ID NO: 882498 - protein, 232 aa, Homo sapiens; identical to SEQ ID NO: 882495

SEQ ID NO: 882499 - protein, 232 aa, Homo sapiens; identical to SEQ ID NO: 882495

SEQ ID NO: 882500 - protein, 232 aa, Homo sapiens; identical to SEQ ID NO: 882495

SEQ ID NO: 882501 - protein, 517 aa, Homo sapiens
MAQGFAVGFDPLGLGDLSSGSLSSLSSRGHLGSDSGSTATRYLLRKQQRLLNGPPRGIRASSPMGRVILINSPIEANSDESDIIHSVRVEKSPAGRLGFSVRGGSEHGLGIFVSKVEEGSSAERAGLCVGDKITEVNGLSLESTTMGSAVKVLTSSSRLHMMVRRMGRVPGIKFSKEKTTWVDVVNRRLVVEKCGSTPSDTSSEDGVRRIVHLYTTSDDFCLGFNIRGGKEFGLGIYVSKVDHGGLAEENGIKVGDQVLAANGVRFDDISHSQAVEVLKGQTHIMLTIKETGRYPAYKEMVSEYCWLDRLSNGVLQQLSPASESSSSVSSCASSAPYSSGSLPSDRMDICLGQEEPGSRGPGWGRADTAMQTEPDAGGRVETWCSVRPTVILRDTAIRSDGPHPGRRLDSALSESPKTALLLALSRPRPPITRSQSYLTLWEEKQQRKKEKSGSPGEKGALQRSKTLMNLFFKGGRQGRLARDGRREAWTLDSGSLAKTYPRLDIEKEMGVSPCCPG

SEQ ID NO: 882502 - protein, 1151 aa, Homo sapiens
MAQGFAVGFDPLGLGDLSSGSLSSLSSRGHLGSDSGSTATRYLLRKQQRLLNGPPRGIRASSPMGRVILINSPIEANSDESDIIHSVRVEKSPAGRLGFSVRGGSEHGLGIFVSKVEEGSSAGKQNPQAEVHAEDVTPISVNGRGCCCQGQTEESPALEGLIDGETGPTLKSEWFKGQIPRHWEHSAPALTILTLIEKLQFDPRELHLMGEAQPHPGDPCQPLPSCGAERAGLCVGDKITEVNGLSLESTTMGSAVKVLTSSSRLHMMVRRMGRVPGIKFSKEKTTWVDVVNRRLVVEKCGSTPSDTSSEDGVRRIVHLYTTSDDFCLGFNIRGGKEFGLGIYVSKLRAEAGSVFVVELRMGSGVGPRLGCGDGQQVRPGQPPVSVRAWEGAGGPSRRVKDLELVQSCVQEKGVWSGVTEGRPGAYQTERLSGLRVDHGGLAEENGIKVGDQVLAANGVRFDDISHSQAVEVLKGQTHIMLTIKETGRYPAYKEMVSEYCWLDRLSNGVLQQLSPASESSSSVSSCASSAPYSSGSLPSDRMDICLGQEEPGSRGPGWGRADTAMQTEPDAGGRVETWCSVRPTVILRDTAIRSDGPHPGRRLDSALSESPKTALLLALSRPRPPITRSQSYLTLWEEKQQRKKEKSGSPGEKGALQRSKTLMNLFFKGGRQGRLARDGRREAWTLDSGSLAKTYPRLDIEKVCARGRHRGPGEAPAGHPRQAGEAATAAGHQECGGPHRPGPLRQHGDACGAGGFGGPQEQGSPASCFETSPAGHATQASPYHPRACRGGFYLLPVNGFPEEEDNGELRERLGALKVSPSASAPRHPHKGIPPLQDVPVDAFTPLRIACTPPPQLPPVAPRPLRPNWLLTEPLSREHPPQSQIRGRAQSRSRSRSRSRSRSSRGQGKSPGRRSPSPVPTPAPSMTNGRYHKPRKARPPLPRPLDGEAAKVGAKQGPSESGTEGTAKEAAMKNPSGELKTVTLSKMKQSLGISISGGIESKVQPMVKIEKIFPGGAAFLSGALQAGFELVAVDGENLEQVTHQRAVDTIRRAYRNKAREPMELVVRVPGPSPRPSPSDSSALTDGGLPADHLPAHQPLDAAPVPAHWLPEPPTNPQTPPTDARLLQPTPSPAPSPALQTPDSKPAPSPRIP

SEQ ID NO: 882503 - protein, 610 aa, Homo sapiens
MAQGFAVGFDPLGLGDLSSGSLSSLSSRGHLGSDSGSTATRYLLRKQQRLLNGPPRGIRASSPMGRVILINSPIEANSDESDIIHSVRVEKSPAGRLGFSVRGGSEHGLGIFVSKVEEGSSAERAGLCVGDKITEVNGLSLESTTMGSAVKVLTSSSRLHMMVRRMGRVPGIKFSKEKTTWVDVVNRRLVVEKCGSTPSDTSSEDGVRRIVHLYTTSDDFCLGFNIRGGKEFGLGIYVSKLRAEAGSVFVVELRMGSGVGPRLGCGDGQQVRPGQPPVSVRAWEGAGGPSRRVKDLELVQSCVQEKGVWSGVTEGRPGAYQTERLSGLRVDHGGLAEENGIKVGDQVLAANGVRFDDISHSQAVEVLKGQTHIMLTIKETGRYPAYKEMVSEYCWLDRLSNGVLQQLSPASESSSSVSSCASSAPYSSGSLPSDRMDICLGQEEPGSRGPGWGRADTAMQTEPDAGGRVETWCSVRPTVILRDTAIRSDGPHPGRRLDSALSESPKTALLLALSRPRPPITRSQSYLTLWEEKQQRKKEKSGSPGEKGALQRSKTLMNLFFKGGRQGRLARDGRREAWTLDSGSLAKTYPRLDIEKAGGVGPVQKFVTWR

SEQ ID NO: 882504 - protein, 240 aa, Homo sapiens [sequence omitted]

SEQ ID NO: 882505 - protein, 236 aa, Homo sapiens
MLKSAVLFSHRKIQFHIFTEDSLKPEFDKQLRQWPDSYTKKFEHRIYPITFSVGNPQEWKKLFKPCAAQRLFLPVILKDVDSLLYVDTDVLFLRPVDDIWKLLRLFNSTQLAAMAPEHEIPKIGWYSRFARHPFYGSAGVNSGVMLMNLTRIRSTQFKNSMIPTGLAWEDMLYPLYQKYKNAITWGDQDLLNIIFYFNPEGFYVFPGPVDYRAITGVRKHWGGAWVLAAGGGYPTL

SEQ ID NO: 882506 - protein, 495 aa, Homo sapiens
MCQAPCWRAGGSGLGRCSLCRSCSLARFPRLPSFPPPGRLRAGVCAREGEGVGGVGGGVPVPKRPAEGGGGCEGLREAMDVERLQEALKDFEKRGKKEVCPVLDQFLCHVAKTGETMIQWSQFKGYFIFKLEKVMDDFRTSAPEPRGPPNPNVEYIPFDEMKERILKIVTGFNGIPFTIQRLCELLTDPRRNYTGTDKFLRGVEKNVMVVSCVYPSSEKNNSNSLNRMNGVMFPGNSPSYTERSNINGPGTPRPLNRPKVSLSAPMTTNGLPESTDSKEANLQQNEEKNHSDSSTSESEVSSVSPLKNKHPDEDAVEAEGHEVKRLRFDKEGEVRETASQTTSSEISSVMVGETEASSSSQDKDKDSRCTRQHCTEEDEEEDEEEEEESFMTSREMIPERKNQEKESDDALTVNEETSEENNQMEESDVSQAEKDLLHSEGSENEGPVSSSSSDCRETEELVGSNSSKTGEILSESSMENDDEATEVTDEPMEQD

SEQ ID NO: 882507 - protein, 557 aa, Homo sapiens
MLKSAVLFSHRKIQFHIFTEDSLKPEFDKQLRQWPDSYTKKFEHRIYPITFSVGNPQEWKKLFKPCAAQRLFLPVILKDVDSLLYVDTDVLFLRPVDDIWKLLRLFNSTQLAAMAPEHEIPKIGWYSRFARHPFYGSAGVNSGVMLMNLTRIRSTQFKNSMIPTGLAWEDMLYPLYQKYKNAITWGDQDLLNIIFYFNPECLYVFPCQWNYRPDHCMYGSNCREAEHEGVSVLHGNRGVYHDDKQPTFRALYEAIRDILRRGGKRKFVLSWMQFLCHVAKTGETMIQWSQFKGYFIFKLEKVMDDFRTSAPEPRGPPNPNVEYIPFDEMKERILKIVTGFNGIPFTIQRLCELLTDPRRNYTGTDKFLRGVEKNVMVVSCVYPSSEKNNSNSLNRMNGVMFPGNSPSYTERSNINGPGTPRPLNRPKVSLSAPMTTNGLPESTDSKEANLQQNEEKNHSDSSTSESEVSSVSPLKNKHPDEDAVEAEGHEVKRLRFDKEGEVRETASQTTSSEISSVMVGETEASSSSQDKDKDSRCTRQHCTEEDEEEDEEEEEGI

SEQ ID NO: 882508 - protein, 277 aa, Homo sapiens [sequence omitted]

SEQ ID NO: 882509 - protein, 495 aa, Homo sapiens; identical to SEQ ID NO: 882506

SEQ ID NO: 882510 - protein, 317 aa, Homo sapiens
MLKSAVLFSHRKIQFHIFTEDSLKPEFDKQLRQWPDSYTKKFEHRIYPITFSVGNPQEWKKLFKPCAAQRLFLPVILKDVDSLLYVDTDVLFLRPVDDIWKLLRLFNSTQLAAMAPEHEIPKIGWYSRFARHPFYGSAGVNSGVMLMNLTRIRSTQFKNSMIPTGLAWEDMLYPLYQKYKNAITWGDQDLLNIIFYFNPECLYVFPCQWNYRPDHCMYGSNCREAEHEGVSVLHGNRGVYHDDKQPTFRALYEAIRDFPFQDNLFQSMYYPLQLKFLETVHTLCGRIPQVFLKQIEKTMKRAYEKHVIIHVGPNQMH

SEQ ID NO: 882511 - protein, 185 aa, Homo sapiens
MCQAPCWRAGGSGLGRCSLCRSCSLARFPRLPSFPPPGRLRAGVCAREGEGVGGVGGGVPVPKRPAEGGGGCEGLREAMDVERLQEALKDFEKRGKKEVCPVLDQFLCHVAKTGETIIPFTIQRLCELLTDPRRNYTGTDKFLRGVEKNVMVVSCVYPSSEKTISIGFKSNELVVCFLEIHQPFL

SEQ ID NO: 882512 - protein, 495 aa, Homo sapiens; identical to SEQ ID NO: 882506

SEQ ID NO: 882513 - protein, 663 aa, Homo sapiens
MLKSAVLFSHRKIQFHIFTEDSLKPEFDKQLRQWPDSYTKKFEHRIYPITFSVGNPQEWKKLFKPCAAQRLFLPVILKDVDSLLYVDTDVLFLRPVDDIWKLLRLFNSTQLAAMAPEHEIPKIGWYSRFARHPFYGSAGVNSGVMLMNLTRIRSTQFKNSMIPTGLAWEDMLYPLYQKYKNAITWGDQDLLNIIFYFNPECLYVFPCQWNYRPDHCMYGSNCREAEHEGVSVLHGNRGVYHDDKQPTFRALYEAIRDILRRGGKRKFVLSWMQFLCHVAKTGETMIQWSQFKGYFIFKLEKVMDDFRTSAPEPRGPPNPNVEYIPFDEMKERILKIVTGFNGIPFTIQRLCELLTDPRRNYTGTDKFLRGVEKNVMVVSCVYPSSEKNNSNSLNRMNGVMFPGNSPSYTERSNINGPGTPRPLNRPKVSLSAPMTTNGLPESTDSKEANLQQNEEKNHSDSSTSESEVSSVSPLKNKHPDEDAVEAEGHEVKRLRFDKEGEVRETASQTTSSEISSVMVGETEASSSSQDKDKDSRCTRQHCTEEDEEEDEEEEEESFMTSREMIPERKNQEKESDDALTVNEETSEENNQMEESDVSQAEKDLLHSEGSENEGPVSSSSSDCRETEELVGSNSSKTGEILSESSMENDDEATEVTDEPMEQD

SEQ ID NO: 882514 - protein, 470 aa, Homo sapiens
MCQAPCWRAGGSGLGRCSLCRSCSLARFPRLPSFPPPGRLRAGVCAREGEGVGGVGGGVPVPKRPAEGGGGCEGLREAMDVERLQEALKDFEKRGKKEVCPVLDQFLCHVAKTGETMIQWSQFKGYFIFKLEKVMDDFRTSAPEPRGPPNPNVEYIPFDEMKERILKIVTGFNGIPFTIQRLCELLTDPRRNYTGTDKFLRGVEKNVMVVSCVYPSSESNINGPGTPRPLNRPKVSLSAPMTTNGLPESTDSKEANLQQNEEKNHSDSSTSESEVSSVSPLKNKHPDEDAVEAEGHEVKRLRFDKEGEVRETASQTTSSEISSVMVGETEASSSSQDKDKDSRCTRQHCTEEDEEEDEEEEEESFMTSREMIPERKNQEKESDDALTVNEETSEENNQMEESDVSQAEKDLLHSEGSENEGPVSSSSSDCRETEELVGSNSSKTGEILSESSMENDDEATEVTDEPMEQD

SEQ ID NO: 882515 - protein, 495 aa, Homo sapiens; identical to SEQ ID NO: 882506

SEQ ID NO: 882516 - protein, 251 aa, Homo sapiens
MCQAPCWRAGGSGLGRCSLCRSCSLARFPRLPSFPPPGRLRAGVCAREGEGVGGVGGGVPVPKRPAEGGGGCEGLREAMDVERLQEALKDFEKRGKKEVCPVLDQFLCHVAKTGETMIQWSQFKGYFIFKLEKVMDDFRTSAPEPRGPPNPNVEYIPFDEMKERILKIVTGFNGIPFTIQRLCELLTDPRRNYTGTDKFLRGVEKNVMVVSWCYSFFKEKQFPLVLNRMNWWYVSWKFTSLSYRPKYNGPW

SEQ ID NO: 882517 - protein, 142 aa, Homo sapiens
MSPHPEAITDCVTLNTVGQLAEGGYPLRFSTLFQEQQKMNISQASVSFKDVTIEFTQEEWQQMAPVQKNLYRDVMLENYSNLVSVGYCCFKPEVIFKLEQGEEPWFSEEEFSNQSHPSELLSSSRHNSAGVVRLQVTLGVNT

SEQ ID NO: 882518 - protein, 119 aa, Homo sapiens
LFSTSSNSEPFRLNRNVLLQASVSFKDVTIEFTQEEWQQMAPVQKNLYRDVMLENYSNLVSVGYCCFKPEVIFKLEQGEEPWFSEEEFSNQSHPSELLSSSRHNSAGVVRLQVTLGVNT

SEQ ID NO: 882519 - protein, 683 aa, Homo sapiens
MSPHPEAITDCVTLNTVGQLAEGGYPLRFSTLFQEQQKMNISQASVSFKDVTIEFTQEEWQQMAPVQKNLYRDVMLENYSNLVSVGYCCFKPEVIFKLEQGEEPWFSEEEFSNQSHPKDYRGDDLIKQNKKIKDKHLEQAICINNKTLTTEEEKVLGKPFTLHVAAVASTKMSCKCNSWEVNLQSISEFIINNRNYSTKKIGCGNVCENSPFKINFEKTQTGEKFYEHNKNMKALNYNENLPKHPKFQTLEQAFECNKIGKAFNDKANCVKHNSSHTGETSSKDDEFRKNCDKKTLFDHRRTGTGKKHLHLNQCGKSFEKSTVEEYNKLNMGIKHYELNPSGNNFNRKAHLTDPQTAVIEENPLVSNDRTQTWVKSSEYHENKKSYQTSVHRVRRRSHSMMKPYKCNECGKSFCQKGHLIQHQRTHTGEKPFECSECGKTFSQKSHLSTHQRIHTAEKPYKCNECGKTFVQKSTLRGHQRIHTGEKPYECSECGKTFVQKSTLRDHHRIHTGEKSFQCNQCGKTFGQKSNLRIHQRTHTGEKTYQCNECEKSFWRKDHLIQHQKTHTGEKPFKCNECGKTFARTSTLRVHQRIHTGEKPFKCNECGKKFVRKAILSDHQRIHTGEKPFQCNKCGKTFGQKSNLRIHQRTHSGEKSYECNEYGKLCKKSTLSLYQKIQGEGNPY

SEQ ID NO: 882520 - protein, 683 aa, Homo sapiens; identical to SEQ ID NO: 882519

SEQ ID NO: 882521 - protein, 621 aa, Homo sapiens
MAPVQKNLYRDVMLENYSNLVSVGYCCFKPEVIFKLEQGEEPWFSEEEFSNQSHPKDYRGDDLIKQNKKIKDKHLEQAICINNKTLTTEEEKVLGKPFTLHVAAVASTKMSCKCNSWEVNLQSISEFIINNRNYSTKKIGCGNVCENSPFKINFEKTQTGEKFYEHNKNMKALNYNENLPKHPKFQTLEQAFECNKIGKAFNDKANCVKHNSSHTGETSSKDDEFRKNCDKKTLFDHRRTGTGKKHLHLNQCGKSFEKSTVEEYNKLNMGIKHYELNPSGNNFNRKAHLTDPQTAVIEENPLVSNDRTQTWVKSSEYHENKKSYQTSVHRVRRRSHSMMKPYKCNECGKSFCQKGHLIQHQRTHTGEKPFECSECGKTFSQKSHLSTHQRIHTAEKPYKCNECGKTFVQKSTLRGHQRIHTGEKPYECSECGKTFVQKSTLRDHHRIHTGEKSFQCNQCGKTFGQKSNLRIHQRTHTGEKTYQCNECEKSFWRKDHLIQHQKTHTGEKPFKCNECGKTFARTSTLRVHQRIHTGEKPFKCNECGKKFVRKAILSDHQRIHTGEKPFQCNKCGKTFGQKSNLRIHQRTHSGEKSYECNEYGKLCKKSTLSLYQKIQGEGNPY

SEQ ID NO: 882522 - protein, 683 aa, Homo sapiens; identical to SEQ ID NO: 882519

SEQ ID NO: 882523 - protein, 683 aa, Homo sapiens; identical to SEQ ID NO: 882519

SEQ ID NO: 882524 - protein, 142 aa, Homo sapiens; identical to SEQ ID NO: 882517

SEQ ID NO: 882525 - protein, 97 aa, Homo sapiens
TDMRVFVCACAVNPTFRLLPVSVCWCRGFAAQVRAPGLHADCGPAGRDVLVSRGRERDVPGTPPKQAVAPCASAGPGPQPEKGRWGRAPGALGGAES

SEQ ID NO: 882526 - protein, 543 aa, Homo sapiens
MSSFSYEPYYSTSYKRRYVETPRVHISSVRSGYSTARSAYSSYSAPVSSSLSVRRSYSSSSGSLMPSLENLDLSQVAAISNDLKSIRTQEKAQLQDLNDRFASFIERVHELEQQNKVLEAELLVLRQKHSEPSRFRALYEQEIRDLRLAAEDATNEKQALQGEREGLEETLRNLQARYEEEVLSREDAEGRLMEARKGADEAALARAELEKRIDSLMDEISFLKKVHEEEIAELQAQIQYAQISVEMDVTKPDLSAALKDIRAQYEKLAAKNMQNAEEWFKSRFTVLTESAAKNTDAVRAAKDEVSESRRLLKAKTLEIEACRGMNEALEKQLQELEDKQNADISAMQDTINKLENELRTTKSEMARYLKEYQDLLNVKMALDIEIAAYRKLLEGEETRLSFTSVGSITSGYSQSSQVFGRSAYGGLQTSSYLMSTRSFPSYYTSHVQEEQIEVEETIEAAKAEEAKDEPPSEGEAEEEEKDKEEAEEEEAAEEEEAAKEESEEAKEEEEGGEGEEGEETKEAEEEEKKVEGAGEEQAAKKKD

SEQ ID NO: 882527 - protein, 543 aa, Homo sapiens; identical to SEQ ID NO: 882526

SEQ ID NO: 882528 - protein, 450 aa, Homo sapiens
MSSFSYEPYYSTSYKRRYVETPRVHISSVRSGYSTARSAYSSYSAPVSSSLSVRRSYSSSSGSLMPSLENLDLSQVAAISNDLKSIRTQEKAQLQDLNDRFASFIERVHELEQQNKVLEAELLVLRQKHSEPSRFRALYEQEIRDLRLAAEDATNEKQALQGEREGLEETLRNLQARYEEEVLSREDAEGRLMEARKGAKNTDAVRAAKDEVSESRRLLKAKTLEIEACRGMNEALEKQLQELEDKQNADISAMQDTINKLENELRTTKSEMARYLKEYQDLLNVKMALDIEIAAYRKLLEGEETRLSFTSVGSITSGYSQSSQVFGRSAYGGLQTSSYLMSTRSFPSYYTSHVQEEQIEVEETIEAAKAEEAKDEPPSEGEAEEEEKDKEEAEEEEAAEEEEAAKEESEEAKEEEEGGEGEEGEETKEAEEEEKKVEGAGEEQAAKKKD

SEQ ID NO: 882529 - protein, 214 aa, Homo sapiens
MSAFCLSSSSCSCFSSAMQDTINKLENELRTTKSEMARYLKEYQDLLNVKMALDIEIAAYRKLLEGEETRLSFTSVGSITSGYSQSSQVFGRSAYGGLQTSSYLMSTRSFPSYYTSHVQEEQIEVEETIEAAKAEEAKDEPPSEGEAEEEEKDKEEAEEEEAAEEEEAAKEESEEAKEEEEGGEGEEGEETKEAEEEEKKVEGAGEEQAAKKKD

SEQ ID NO: 882530 - protein, 543 aa, Homo sapiens; identical to SEQ ID NO: 882526

SEQ ID NO: 882531 - protein, 527 aa, Homo sapiens
MSSFSYEPYYSTSYKRRYVETPRVHISSVRSGYSTARSAYSSYSAPVSSSLSVRRSYSSSSGSLMPSLENLDLSQVAAISNDLKSIRTQEKAQLQDLNDRFASFIERVHELEQQNKVLEAELLVLRQKHSEPSRFRALYEQEIRDLRLAAEDATNEKQALQGEREGLEETLRNLQARYEEEVLSREDAEGRLMEARKGADEAALARLKKVHEEEIAELQAQIQYAQISVEMDVTKPDLSAALKDIRAQYEKLAAKNMQNAEEWFKSRFTVLTESAAKNTDAVRAAKDEVSESRRLLKAKTLEIEACRGMNEALEKQLQELEDKQNADISAMQDTINKLENELRTTKSEMARYLKEYQDLLNVKMALDIEIAAYRKLLEGEETRLSFTSVGSITSGYSQSSQVFGRSAYGGLQTSSYLMSTRSFPSYYTSHVQEEQIEVEETIEAAKAEEAKDEPPSEGEAEEEEKDKEEAEEEEAAEEEEAAKEESEEAKEEEEGGEGEEGEETKEAEEEEKKVEGAGEEQAAKKKD

SEQ ID NO: 882532 - protein, 327 aa, Homo sapiens
MDEISFLKKVHEEEIAELQAQIQYAQISVEMDVTKPDLSAALKDIRAQYEKLAAKNMQNAEEWFKSRFTVLTESAAKNTDAVRAAKDEVSESRRLLKAKTLEIEACRGMNEALEKQLQELEDKQNADISAMQDTINKLENELRTTKSEMARYLKEYQDLLNVKMALDIEIAAYRKLLEGEETRLSFTSVGSITSGYSQSSQVFGRSAYGGLQTSSYLMSTRSFPSYYTSHVQEEQIEVEETIEAAKAEEAKDEPPSEGEAEEEEKDKEEAEEEEAAEEEEAAKEESEEAKEEEEGGEGEEGEETKEAEEEEKKVEGAGEEQAAKKKD

SEQ ID NO: 882533 - protein, 426 aa, Homo sapiens
MSSFSYEPYYSTSYKRRYVETPRVHISSVRSGYSTARSAYSSYSAPVSSSLSVRRSYSSSSGSLMPSLENLDLSQVAAISNDLKSIRTQEKAQLQDLNDRFASFIERVHELEQQNKVLEAELLVLRQKHSEPSRFRALYEQEIRDLRLAAEDATNEKQALQGEREGLEETLRNLQARYEEEVLSREDAEGRLMEARKGADEAALARAELEKRIDSLMDEISFLKKVHEEEIAELQAQIQYAQISVEMDVTKPDLSAALKDIRAQYEKLAAKNMQNAEEWFKSRFTVLTESAAKNTDAVRAAKDEVSESRRLLKAKTLEIEACRGMNEALEKQLQELEDKQNADISAMQDTINKLENELRTTKSEMARYLKEYQDLLNVKMALDIEIAAYRKLLEGEETRLSFTSVGSITSGYSQSSQYARSPDAGR

SEQ ID NO: 882534 - protein, 522 aa, Homo sapiens
GFLPATKNLLNEKNHGVLHTSVVLLTEMCERSPDMLAHFRENEKLVPQLVRILKNLIMSGYSPGHDVSGISDPFLQVRILRLLRILGRNDDDSSEAMNDILAQVATNTETSKNVGNAILYETVLTIMDIKSESGLRVLAINILGRFLLNNDKNIRYVALTSLLKTVQTDHNAVQRHRSTIVDCLKDLDVSIKRRAMELSFALVNGNNIRGMMKELLYFLDSCEPEFKADCASGIFLAAEKYAPSKRWHIDTIMRVLTTAGSYVRDDAVPNLIQLITNSVEMHAYTVQRLYKAILGDYSQQPLVQVAAWCIGEYGDLLVSGQCEEEEPIQVTEDEVLDILESVLISNMSTSVTRGYALTAIMKLSTRFTCTVNRIKKVVSIYGSSIDVELQRRAVEYNALFKKYDHMRSALLERMPVMEKVTTNGPTEIVQTNGETEPAPLETKPPPSGPQPTSQANDLLDLLGGNDITPVIPTAPTSKPSSAGGELLDLLGDINLTGSHSVSQAGVQWDYLGSLQPLPPAFR

SEQ ID NO: 882535 - protein, 522 aa, Homo sapiens; identical to SEQ ID NO: 882534

SEQ ID NO: 882536 - protein, 522 aa, Homo sapiens; identical to SEQ ID NO: 882534

SEQ ID NO: 882537 - protein, 98 aa, Homo sapiens
SPLLLLLSTAQEVSLFMKRETYWEVQDSGISPLLLLLSTALDCSPEAETRQSPGGRKMLQEPTLSMSLQILTGFLWVQLWNWETFLRIRTHSTDASCP

SEQ ID NO: 882538 - protein, 452 aa, Homo sapiens
MLCGRPRSSSDNRNFLRERAGLSSAAVQTRIGNSAASRRSPAARPPVPAPPALPRGRPGTEGSTSLSAPAVLVVAVAVVVVVVSAVAWAMANYIHVPPGSPEVPKLNVTVQDQEEHRCREGALSLLQHLRPHWDPQEVTLQLFTDGITNKLIGCYVGNTMEDVVLVRIYGNKTELLVDRDEEVKSFRVLQAHGCAPQLYCTFNNGLCYEFIQGEALDPKHVCNPAIFRLIARQLAKIHAIHAHNGWIPKSNLWLKMGKYFSLIPTGFADEDINKRFLSDIPSSQILQEEMTWMKEILSNLGSPVVLCHNDLLCKNIIYNEKQGDVQFIDYEYSGYNYLAYDIGNHFNEFAGVSDVDYSLYPDRELQSQWLRAYLEAYKEFKGFGTEVTEKEVEILFIQVNQFALASHFFWGLWALIQAKYSTIEFDFLGYAIVRFNQYFKMKPEVTALKVPE

SEQ ID NO: 882539 - protein, 434 aa, Homo sapiens
MLCGRPRSSSDNRNFLRERAGLSSAAVQTRIGNSAASRRSPAARPPVPAPPALPRGRPGTEGSTSLSAPAVLVVAVAVVVVVVSAVAWAMANYIHVPPGSPEVPKLNVTVQDQEEHRCREGALSLLQHLRPHWDPQEVTLQLFTDGITNKLIGCYVGNTMEDVVLVRIYGNKTELLVDRDEEVKSFRVLQAHGCAPQLYCTFNNGLCYEFIQGEALDPKHVCNPAIFRLIARQLAKIHAIHAHNGWIPKSNLWLKMGKYFSLIPTGFADEDINKRFLSDIPSSQILQEEMTWMKEILSNLGSPVVLCHNDLLCKNIIYNEKQGDVQFIDYEYSGYNYLAYDIGNHFNEFAGVSDVDYSLYPDRELQSQWLRAYLEAYKEFKGFGTEVTEKEVEILFIQVNQFALGENLNFIIGNKYCQLFSLKWLLISFGDCGL

SEQ ID NO: 882540 - protein, 258 aa, Homo sapiens
MLCGRPRSSSDNRNFLRERAGLSSAAVQTRIGNSAASRRSPAARPPVPAPPALPRGRPGTEGSTSLSAPAVLVVAVAVVVVVVSAVAWAMANYIHVPPGSPEVPKLNVTVQDQEEHRCREGALSLLQHLRPHWDPQEVTLQLFTDGITNKLIGCYVGNTMEDVVLVRIYGNKTELLVDRDEEVKSFRVLQAHGCAPQLYCTFNNGLCYEFIQGEALDPKHVCNPAIFSLSSLTLCKGKTTRCFGLTGCRGSRLLLSFF

SEQ ID NO: 882541 - protein, 192 aa, Homo sapiens
MLCGRPRSSSDNRNFLRERAGLSSAAVQTRIGNSAASRRSPAARPPVPAPPALPRGRPGTEGSTSLSAPAVLVVAVAVVVVVVSAVAWAMANYIHVPPGSPEVPKLNVTVQDQEEHRCREGALSLLQHLRPHWDPQEVTLQEFPFFTLTAFPPGFLVHVGVSVSARSVKLLDRIHNPVKRSAFYLHLAQRLY

SEQ ID NO: 882542 - protein, 452 aa, Homo sapiens; identical to SEQ ID NO: 882538

SEQ ID NO: 882543 - protein, 452 aa, Homo sapiens; identical to SEQ ID NO: 882538

SEQ ID NO: 882544 - protein, 373 aa, Homo sapiens
KLAAAEEGLRELQRSRRLCHEDVEALAAIYEEKEAWYREESDSLSLLQHLRPHWDPQEVTLQLFTDGITNKLIGCYVGNTMEDVVLVRIYGNKTELLVDRDEEVKSFRVLQAHGCAPQLYCTFNNGLCYEFIQGEALDPKHVCNPAIFRLIARQLAKIHAIHAHNGWIPKSNLWLKMGKYFSLIPTGFADEDINKRFLSDIPSSQILQEEMTWMKEILSNLGSPVVLCHNDLLCKNIIYNEKQGDVQFIDYEYSGYNYLAYDIGNHFNEFAGVSDVDYSLYPDRELQSQWLRAYLEAYKEFKGFGTEVTEKEVEILFIQVNQFALASHFFWGLWALIQAKYSTIEFDFLGYAIVRFNQYFKMKPEVTALKVPE

SEQ ID NO: 882545 - protein, 452 aa, Homo sapiens; identical to SEQ ID NO: 882538

SEQ ID NO: 882546 - protein, 275 aa, Homo sapiens
MLCGRPRSSSDNRNFLRERAGLSSAAVQTRIGNSAASRRSPAARPPVPAPPALPRGRPGTEGSTSLSAPAVLVVAVAVVVVVVSAVAWAMANYIHVPPGSPEVPKLNVTVQDQEEHRCREGALSLLQHLRPHWDPQEVTLQLFTDGITNKLIGCYVGNTMEDVVLVRIYGNKTELLVDRDEEVKSFRVLQAHGCAPQLYCTFNNGLCYEFIQGEALDPKHVCNPAIFRLIARQLAKIHAIHAHNGWIPKSNLWLKMGKYFSLIPTGFADEDINKR

SEQ ID NO: 882547 - protein, 330 aa, Homo sapiens
MLCGRPRSSSDNRNFLRERAGLSSAAVQTRIGNSAASRRSPAARPPVPAPPALPRGRPGTEGSTSLSAPAVLVVAVAVVVVVVSAVAWAMANYIHVPPGSPEVPKLNVTVQDQEEHRCREGALSLLQHLRPHWDPQEVTLQLFTDGITNKLIGCYVGNTMEDVVLVRIYGNKTELLVDRDEEVKSFRVLQAHGCAPQLYCTFNNGLCYEFIQGEALDPKHVCNPAIFRLIARQLAKIHAIHAHNGWIPKSNLWLKMGKYFSLIPTGFADEDINKRFLSDIPSSQILQEEMTWMKEILSNLGSPVVLCHNDLLCKNIIYNEKQGRYLTLAV

SEQ ID NO: 882548 - protein, 140 aa, Homo sapiens
LSSAAVQTRIGNSAASRRSPAARPPVPAPPALPRGRPGTEGSTSLSAPAVLVVAVAVVVVVVSAVAWAMANYIHVPPGSPEVPKLNVTVQDQEEHRCREGALSLLQHLRPHWDPQEVTLQVTPTPQLWVSYAPHAALGVL

SEQ ID NO: 882549 - protein, 254 aa, Homo sapiens; identical to SEQ ID NO: 796286

SEQ ID NO: 882550 - protein, 135 aa, Homo sapiens
MPIKPVGWICGQVLKNFSGRIEGIQKAIMDLVDEFKDEFPTILRLSQSNQKREPAQKTSKIRMAIALAKINRATLIRGLNSISRSSKSVAKLLHPQLACRLLELRDISGRLLREVNAPRQPLYNIQEKKMGLQLS

SEQ ID NO: 882551 - protein, 254 aa, Homo sapiens; identical to SEQ ID NO: 796286

SEQ ID NO: 882552 - protein, 182 aa, Homo sapiens
MPIKPVGWICGQVLKNFSGRIEGIQKAIMDLVDEFKDEFPTILRLSQSNQKREPAQKTSKIRMAIALAKINRATLIRGLNSISRSSKSVAKLLHPQLACRLLELRDISGRLLREVNAPRQPLYNIQVRKGSLFEIISFPAKTALTSIIYASYAALIYLEEILSQAWWCVPIIPATQEADGGG

SEQ ID NO: 882553 - protein, 157 aa, Homo sapiens
MNLDGSAQDPEKREYSSVCVGREDDIKKSERMTAVVHDREVVIFYHKGEYHAMDIRCYHSGGPLHLGDIEDFDGRPCIVCPWHKYKITLATGEGLYQSINPKDPSAKPKWCSKGIKQRIHTVTVDNGNIYVTLSNEPFKCDSDFYATGDFKVIKSSS

SEQ ID NO: 882554 - protein, 210 aa, Homo sapiens; identical to SEQ ID NO: 779430

SEQ ID NO: 882555 - protein, 553 aa, Homo sapiens
GGAEGQARGKRFVPRVVPAPGGARERRESECRARPGDLHGRAGWNRRKRSSRVPARPAPPAAEAASARAQRSRWEPEAPRHKGRRDAGAGKGKAKAARPAGDWVKAPRSFPDAGCTRTSWSSLARRSHGHRSLATEYVFSDFLLKEPTEPKFKGLRLELAVDKMVTCIAVGLPLLLISLAFAQEISIGTQISCFSPSSFSWRQAAFVDSYCWAAVQQKNSLQSESGNLPLWLHKFFPYILLLFAILLYLPPLFWRFAAAPHICSDLKFIMEELDKVYNRAIKAAKSARDLDMRDGACSVPGVTENLGQSLWEVSESHFKYPIVEQYLKTKKNSNNLIIKYISCRLLTLIIILLACIYLGYYFSLSSLSDEFVCSIKSGILRNDSTVPDQFQCKLIAVGIFQLLSVINLVVYVLLAPVVVYTLFVPFRQKTDVLKVYEILPTFDVLHFKSEGYNDLSLYNLFLEENISEVKSYKCLKVLENIKSSGQGIDPMLLLTNLGMIKMDVVDGKTPMSAEMREEQGNQTAELQGMNIDSETKANNGEKNARQRLLDSSC

SEQ ID NO: 882556 - protein, 534 aa, Homo sapiens
GGAEGQARGKRFVPRVVPAPGGARERRESECRARPGDLHGRAGWNRRKRSSRVPARPAPPAAEAASARAQRSRWEPEAPRHKGRRDAGAGKGKAKAARPAGDWVKAPRSFPDAGCTRTSWSSLARRSHGHRSLATEYVFSDFLLKEPTEPKFKGLRLELAVDKMVTCIAVGLPLLLISLAFAQEISIGTQISCFSPSSFSWRQAAFVDSYCWAAVQQKNSLQSESGNLPLWLHKFFPYILLLFAILLYLPPLFWRFAAAPHICSDLKFIMEELDKVYNRAIKAAKSARDLDMRDGACSVPGVTENLGQSLWEVSESHFKYPIVEQYLKTKKNSNNLIIKYISCRLLTLIIILLACIYLGYYFSLSSLSDEFVCSIKSGILRNDSTVPDQFQCKLIAVGIFQLLSVINLVVYVLLAPVVVYTLFVPFRQKTDVLKVYEILPTFDVLHFKSEGYNDLSLYNLFLEENISEVKSYKCLKVLENIKSSGQGIDPMLLLTNLGMIKMDVVDGKSMNIDSETKANNGEKNARQRLLDSSC

SEQ ID NO: 882557 - protein, 553 aa, Homo sapiens; identical to SEQ ID NO: 882555

SEQ ID NO: 882558 - protein, 553 aa, Homo sapiens; identical to SEQ ID NO: 882555

SEQ ID NO: 882559 - protein, 101 aa, Homo sapiens
GRLLLLNWRPRRPSPRCWCTVRPGMSGSACRSTAWPGRSTAGVCLTASCPTSTEAAPPPQVGACAHSSTSTPRTRSLDTLGTQGLAPHPALRMNNLREEVV

SEQ ID NO: 882560 - protein, 418 aa, Homo sapiens
MAPTQGPRAPLEFGGPLGAAALLLLLPATMFHLLLAARSGPARLLGPPASLPGLEVLWSPRALLLWLAWLGLQAALYLLPARKVAEGQELKDKSRLRYPINGFQALVLTALLVGLGMSAGLPLGALPEMLLPLAFVATLTAFIFSLFLYMKAQVAPVSALAPGGNSGNPIYDFFLGRELNPRICFFDFKYFCELRPGLIGWVLINLALLMKEAELRGSPSLAMWLVNGFQLLYVGDALWHEEAVLTTMDITHDGFGFMLAFGDMAWVPFTYSLQAQFLLHHPQPLGLPMASVICLINATGYYIFRGANSQKNTFRKNPSDPRVAGLETISTATGRKLLVSGWWGMVRHPNYLGDLIMALAWSLPCGVSHLLPYFYLLYFTALLVHREARDERQCLQKYGLAWQEYCRRVPYRIMPYIY

SEQ ID NO: 882561 - protein, 439 aa, Homo sapiens
MALPAGAAALLLLLPATMFHLLLAARSGPARLLGPPASLPGLEVLWSPRALLLWLAWLGLQAALYLLPARKVRAPLADARGREANGLGEGKDAPGLIRAPLDPQVAEGQELKDKSRLRYPINGFQALVLTALLVGLGMSAGLPLGALPEMLLPLAFVATLTAFIFSLFLYMKAQVAPVSALAPGGNSGNPIYDFFLGRELNPRICFFDFKYFCELRPGLIGWVLINLALLMKEAELRGSPSLAMWLVNGFQLLYVGDALWHEEAVLTTMDITHDGFGFMLAFGDMAWVPFTYSLQAQFLLHHPQPLGLPMASVICLINATGYYIFRGANSQKNTFRKNPSDPRVAGLETISTATGRKLLVSGWWGMVRHPNYLGDLIMALAWSLPCGVSHLLPYFYLLYFTALLVHREARDERQCLQKYGLAWQEYCRRVPYRIMPYIY

SEQ ID NO: 882562 - protein, 418 aa, Homo sapiens; identical to SEQ ID NO: 882560

SEQ ID NO: 882563 - protein, 418 aa, Homo sapiens; identical to SEQ ID NO: 882560

SEQ ID NO: 882564 - protein, 523 aa, Homo sapiens
MAPTQGPRAPLEFGGPLGAAALLLLLPATMFHLLLAARSGPARLLGPPASLPGLEVLWSPRALLLWLAWLGLQAALYLLPARKVAEGQELKDKSRLRYPINGFQALVLTALLVGLGMSAGLPLGALPEMLLPLAFVATLTAFIFSLFLYMKAQVAPVSALAPGGNSGNPIYDFFLGRELNPRICFFDFKYFCELRPGLIGWVLINLALLMKEAELRGSPSLAMWLVNGFQLLYVGDALWHEEAVLTTMDITHDGFGFMLAFGDMAWVPFTYSLQAQFLLHHPQPLGLPMASVICLINGQSGRGSRLGPSSPYPFDSCSVYTHHHIGANPQGSLKPGQGPGGPGRVWAADKLEQMFGVRQEAATLDLDHRFTLSHQLLVTTSSVGRIPRKTLSERILLTPEWLVSWFSRAMGEVGQLGFLGTLHPAVFSPGLETISTATGRKLLVSGWWGMVRHPNYLGDLIMALAWSLPCGVSHLLPYFYLLYFTALLVHREARDERQCLQKYGLAWQEYCRRVPYRIMPYIY

SEQ ID NO: 882565 - protein, 302 aa, Homo sapiens
MSAGLPLGALPEMLLPLAFVATLTAFIFSLFLYMKAQVAPVSALAPGGNSGNPIYDFFLGRELNPRICFFDFKYFCELRPGLIGWVLINLALLMKEAELRGSPSLAMWLVNGFQLLYVGDALWHEEAVLTTMDITHDGFGFMLAFGDMAWVPFTYSLQAQFLLHHPQPLGLPMASVICLINATGYYIFRGANSQKNTFRKNPSDPRVAGLETISTATGRKLLVSGWWGMVRHPNYLGDLIMALAWSLPCGVSHLLPYFYLLYFTALLVHREARDERQCLQKYGLAWQEYCRRVPYRIMPYIY

SEQ ID NO: 882566 - protein, 290 aa, Homo sapiens [sequence omitted]

SEQ ID NO: 882567 - protein, 407 aa, Homo sapiens
MAPTQGPRAPLEFGGPLGAAALLLLLPATMFHLLLAARSGPARLLGPPASLPGLEVLWSPRALLLWLAWLGLQAALYLLPARKVAEGQELKDKSRLRYPINGFQALVLTALLVGLGMSAGLPLGALPEMLLPLAFVATLTAFIFSLFLYMKAQVAPVSALAPGGNSELNPRICFFDFKYFCELRPGLIGWVLINLALLMKEAELRGSPSLAMWLVNGFQLLYVGDALWHEEAVLTTMDITHDGFGFMLAFGDMAWVPFTYSLQAQFLLHHPQPLGLPMASVICLINATGYYIFRGANSQKNTFRKNPSDPRVAGLETISTATGRKLLVSGWWGMVRHPNYLGDLIMALAWSLPCGVSHLLPYFYLLYFTALLVHREARDERQCLQKYGLAWQEYCRRVPYRIMPYIY

SEQ ID NO: 882568 - protein, 355 aa, Homo sapiens
MAPTQGPRAPLEFGGPLGAAALLLLLPATMFHLLLAARSGPARLLGPPASLPGLEVLWSPRALLLWLAWLGLQAALYLLPARKVAEGQELKDKSRLRYPINGFQALVLTALLVGLGMSAGLPLGALPEMLLPLAFVATLTAFIFSLFLYMKAQVAPVSALAPGGNSGNPIYDFFLGRELNPRICFFDFKYFCELRPGLIGWVLINLALLMKEAELRGSPSLAMWLVNGFQLLYVGDALWHEEAVLTTMDITHDGFGFMLAFGDMAWVPFTYSLQAQFLLHHPQPLGLPMASVICLINVWYYIFVGRIPENIRKIFEPSGGEPFKHGELWAGAMPPHWPMAVRRVTAITQPVHDEG

SEQ ID NO: 882569 - protein, 359 aa, Homo sapiens
MWRRAAPGLTVRCGSGFQALVLTALLVGLGMSAGLPLGALPEMLLPLAFVATLTAFIFSLFLYMKAQVAPVSALAPGGNSGNPIYDFFLGRELNPRICFFDFKYFCELRPGLIGWVLINLALLMKEAELRGSPSLAMWLVNGFQLLYVGDALWHEVRLELDEGGCLRAAEGLSQCVWVLSLQEAVLTTMDITHDGFGFMLAFGDMAWVPFTYSLQAQFLLHHPQPLGLPMASVICLINATGYYIFRGANSQKNTFRKNPSDPRVAGLETISTATGRKLLVSGWWGMVRHPNYLGDLIMALAWSLPCGVSHLLPYFYLLYFTALLVHREARDERQCLQKYGLAWQEYCRRVPYRIMPYIY

SEQ ID NO: 882570 - protein, 418 aa, Homo sapiens; identical to SEQ ID NO: 882560

SEQ ID NO: 882571 - protein, 495 aa, Homo sapiens
MAPTQGPRAPLEFGGPLGAAALLLLLPATMFHLLLAARSGPARLLGPPASLPGLEVLWSPRALLLWLAWLGLQAALYLLPARKVAEGQELKDKSRLRYPINGFQALVLTALLVGLGMSAGLPLGALPEMLLPLAFVATLTAFIFSLFLYMKAQVAPVSALAPGGNSGNPIYDFFLGRELNPRICFFDFKYFCELRPGLIGWVLINLALLMKEAELRGSPSLAMWLVNGFQLLYVGDALWHEEAVLTTMDITHDGFGFMLAFGDMAWVPFTYSLQAQFLLHHPQPLGLPMASVICLINGQSGRGSRLGPSSPYPFDSCSVYTHHHIGANPQGSLKPGQGPGGPGRVWAADKLGRCSGSGRRLQPLTLTTGSHSLTTTGYYIFRGANSQKNTFRKNPSDPRVAGLETISTATGRKLLVSGWWGMVRHPNYLGDLIMALAWSLPCGVSHLLPYFYLLYFTALLVHREARDERQCLQKYGLAWQEYCRRVPYRIMPYIY

SEQ ID NO: 882572 - protein, 418 aa, Homo sapiens; identical to SEQ ID NO: 882560

SEQ ID NO: 882573 - protein, 332 aa, Homo sapiens [sequence omitted]

SEQ ID NO: 882574 - protein, 332 aa, Homo sapiens [sequence omitted]

SEQ ID NO: 882575 - protein, 209 aa, Homo sapiens [sequence omitted]

SEQ ID NO: 882576 - protein, 281 aa, Homo sapiens
RPPTTTKFGAASTKAQVAPVSALAPGGNSGNPIYDFFLGRELNPRICFFDFKYFCELRPGLIGWVLINLALLMKEAELRGSPSLAMWLVNGFQLLYVGDALWHEEAVLTTMDITHDGFGFMLAFGDMAWVPFTYSLQAQFLLHHPQPLGLPMASVICLINATGYYIFRGANSQKNTFRKNPSDPRVAGLETISTATGRKLLVSGWWGMVRHPNYLGDLIMALAWSLPCGVSHLLPYFYLLYFTALLVHREARDERQCLQKYGLAWQEYCRRVPYRIMPYIY

SEQ ID NO: 882577 - protein, 379 aa, Homo sapiens
ASCRFGTRVQAGAGAAGPDPPRGRVHLLGNGADSVSLTDYCAAALLLLLPATMFHLLLAARSGPARLLGPPASLPGLEVLWSPRALLLWLAWLGLQAALYLLPARKVAEGQELKDKSRLRYPINGFQALVLTALLVGLGMSAGLPLGALPEMLLPLAFVATLTAFIFSLFLYMKAQVAPVSALAPGGNSGNPIYDFFLGRELNPRICFFDFKYFCELRPGLIGWVLINLALLMKEAELRGSPSLAMWLVNGFQLLYVGDALWHEEAVLTTMDITHDGFGFMLAFGDMAWVPFTYSLQAQFLLHHPQPLGLPMASVICLINVWYYIFGGANSKKPSENLWNQVVVEPFKHGELWAGAMPPHWPMAVRRVTAITQPVHDEG

SEQ ID NO: 882578 - protein, 154 aa, Homo sapiens
MLVQEQFQAVLPEGAQSSSTEMSSWNQNHWLSLAACFLLSLHMRSQPSILLDARSNCTHGKSELPLSLSLSLVVIRIHQNPCLDLSLAEAALFPTEFLCPLVRTISLLLWAFPRAYFSSAGCLFFFFFLHFVTCFNIYIFYVSKEVINFNFQNS

SEQ ID NO: 882579 - protein, 958 aa, Homo sapiens
METQELRGALALLLLCFFTSASQDLQVIDLLTVGESRQMVAVAEKIRTALLTAGDIYLLSTFRLPPKQGGVLFGLYSRQDNTRWLEASVVGKINKVLVRYQREDGKVHAVNLQQAGLADGRTHTVLLRLRGPSRPSPALHLYVDCKLGDQHAGLPALAPIPPAEVDGLEIRTGQKAYLRMQGFVESMKIILGGSMARVGALSECPFQGDESIHSAVTNALHSILGEQTKALVTQLTLFNQILVELRDDIRDQVKEMSLIRNTIMECQVCGFHEQRSHCSPNPCFRGVDCMEVYEYPGYRCGPCPPGLQGNGTHCSDINECAHADPCFPGSSCINTMPGFHCEACPRGYKGTQVSGVGIDYARASKQVCNDIDECNDGNNGGCDPNSICTNTVGSFKCGPCRLGFLGNQSQGCLPARTCHSPAHSPCHIHAHCLFERNGAVSCQCNVGWAGNGNVCGTDTDIDGYPDQALPCMDNNKHCKQDNCLLTPNSGQEDADNDGVGDQCDDDADGDGIKNVEDNCRLFPNKDQQNSDTDSFGDACDNCPNVPNNDQKDTDGNGEGDACDNDVDGDGIPNGLDNCPKVPNPLQTDRDEDGVGDACDSCPEMSNPTQTDADSDLVGDVCDTNEDSDYDGDGHQDTKDNCPQLPNSSQLDSDNDGLGDECDGDDDNDGIPDYVPPGPDNCRLVPNPNQKDSDGNGVGDVCEDDFDNDAVVDPLDVCPESAEVTLTDFRAYQTVVLDPEGDAQIDPNWVVLNQGMEIVQTMNSDPGLAVGYTAFNGVDFEGTFHVNTVTDDDYAGFLFSYQDSGRFYVVMWKQTEQTYWQATPFRAVAQPGLQLKAVTSVSGPGEHLRNALWHTGHTPDQVRLLWTDPRNVGWRDKTSYRWQLLHRPQVGYIRVKLYEGPQLVADSGVIIDTSMRGGRLGVFCFSQENIIWSNLQYRCNDTVPEDFEPFRRQLLQGRV

SEQ ID NO: 882580 - protein, 137 aa, Homo sapiens [sequence omitted]

SEQ ID NO: 882581 - protein, 401 aa, Homo sapiens
VLVTTLCYPCLLGIPNGLDNCPKVPNPLQTDRDEDGVGDACDSCPEMSNPTQTDADSDLVGDVCDTNEDSDYDGDGHQDTKDNCPQLPNSSQLDSDNDGLGDECDGDDDNDGIPDYVPPGPDNCRLVPNPNQKDSDGNGVGDVCEDDFDNDAVVDPLDVCPESAEVTLTDFRAYQTVVLDPEGDAQIDPNWVVLNQGMEIVQTMNSDPGLAVGYTAFNGVDFEGTFHVNTVTDDDYAGFLFSYQDSGRFYVVMWKQTEQTYWQATPFRAVAQPGLQLKAVTSVSGPGEHLRNALWHTGHTPDQVRLLWTDPRNVGWRDKTSYRWQLLHRPQVGYIRVKLYEGPQLVADSGVIIDTSMRGGRLGVFCFSQENIIWSNLQYRCNDTVPEDFEPFRRQLLQGRV

SEQ ID NO: 882582 - protein, 409 aa, Homo sapiens
RTHDCMAKEISFYNLVVLANGIPNGLDNCPKVPNPLQTDRDEDGVGDACDSCPEMSNPTQTDADSDLVGDVCDTNEDSDYDGDGHQDTKDNCPQLPNSSQLDSDNDGLGDECDGDDDNDGIPDYVPPGPDNCRLVPNPNQKDSDGNGVGDVCEDDFDNDAVVDPLDVCPESAEVTLTDFRAYQTVVLDPEGDAQIDPNWVVLNQGMEIVQTMNSDPGLAVGYTAFNGVDFEGTFHVNTVTDDDYAGFLFSYQDSGRFYVVMWKQTEQTYWQATPFRAVAQPGLQLKAVTSVSGPGEHLRNALWHTGHTPDQVRLLWTDPRNVGWRDKTSYRWQLLHRPQVGYIRVKLYEGPQLVADSGVIIDTSMRGGRLGVFCFSQENIIWSNLQYRCNDTVPEDFEPFRRQLLQGRV

SEQ ID NO: 882583 - protein, 294 aa, Homo sapiens [sequence omitted]

SEQ ID NO: 882584 - protein, 294 aa, Homo sapiens [sequence omitted]

SEQ ID NO: 882585 - protein, 564 aa, Homo sapiens
METQELRGALALLLLCFFTSASQDLQVIDLLTVGESRQMVAVAEKIRTALLTAGDIYLLSTFRLPPKQGGVLFGLYSRQDNTRWLEASVVGKINKVLVRYQREDGKVHAVNLQQAGLADGRTHTVLLRLRGPSRPSPALHLYVDCKLGDQHAGLPALAPIPPAEVDGLEIRTGQKAYLRMQGFVESMKIILGGSMARVGALSECPFQGDESIHSAVTNALHSILGEQTKALVTQLTLFNQILVELRDDIRDQSLGGLAKGGTDSGVGWQMSSADSSSILLQVKEMSLIRNTIMECQVCGFHEQRSHCSPNPCFRGVDCMEVYEYPGYRCGPCPPGLQGNGTHCSDINECAHADPCFPGSSCINTMPGFHCEACPRGYKGTQVSGVGIDYARASKQVCNDIDECNDGNNGGCDPNSICTNTVGSFKCGPCRLGFLGNQSQGCAVTSVSGPGEHLRNALWHTGHTPDQVRLLWTDPRNVGWRDKTSYRWQLLHRPQVGYIRVKLYEGPQLVADSGVIIDTSMRGGRLGVFCFSQENIIWSNLQYRCNDTVPEDFEPFRRQLLQGRV

SEQ ID NO: 882586 - protein, 265 aa, Homo sapiens
METQELRGALALLLLCFFTSASQDLQVIDLLTVGESRQMVAVAEKIRTALLTAGDIYLLSTFRLPPKQGGVLFGLYSRQDNTRWLEASVVGKINKVLVRYQREDGKVHAVNLQQAGLADGRTHTVLLRLRGPSRPSPALHLYVDCKLGDQHAGLPALAPIPPAEVDGLEIRTGQKAYLRMQGFVESMKIILGGSMARVGALSECPFQGDESIHSAVTNALHSILGEQTKALVTQLTLFNQILVELRDDIRDQVWVGWRRVALILG

SEQ ID NO: 882587 - protein, 106 aa, Homo sapiens [sequence omitted]

SEQ ID NO: 882588 - protein, 135 aa, Homo sapiens
LGPALECGFAGLVLAPFSQAHVLLLFQGVLGCFSCRGAAALPGCPRDNTPLAARLPALLRARAGKSFLVSPGSCPSPAPGAGCRRPLQLSQCSSSPTFSAHRCVLAIGGPLAHGATGASPTDTSFWERSEQFIES

SEQ ID NO: 882589 - protein, 198 aa, Homo sapiens
LGPALECGFAGLVLAPFSQAHVLLLFQGVLGCFSCRGAAALPGCPRDNTPLAARLPALLRARAGKSFLVSPGSCPSPAPGAGCRRPLQLSQCSSSPTFSAHRCVLAIGGPLAHGATGASPTDTSFWERSCTGGMAGEASENLQSWQKVKGKPAHLHMMAGTLYVIEVSPKNEIVSFAKTWMELEAFILSELTQEQKAK

SEQ ID NO: 882590 - protein, 922 aa, Homo sapiens
MDKKSFEMVLDEIRKVVDLLRYFSWAEPQLKAMKALQHKMVAVQPTEVVNILNCFTFSKDKLVALELLASNIIDAQNSRPIEDLFRVNMSEKKRCKRILEQAFKGGCKAPHAMISSCGTIPGNPYPKGRPSRINGIFPGTPLKKDGEECTNEGKGIAARILGPSKPPPSTYNPHKPVPYPIPPCRPHATIAPSAYNNAGLVPLANVIAPPPPPYTPNPVGTENEDLSNPSKPIQNQTFSTPASQLFSPHGSNPSTPAATPVPTASPVKAINHPSASAAATVSGMNLLNTVLPVFPGQVSSAVHTPQPSIPNPTVIRTPSLPTAPVTSIHSTTTTPVPSIFSGLVSLPGPSATPTAATPTPGPTPRSTLGSSEAFASTSAPFTSLPFSTSSSAASTSNPNSASLSSVFAGLPLPLPPTSQGLSNPTPVIAGGSTPSVAGPLGVNSPLLSALKGFLTSNDTNLINSSALSSAVTSGLASLSSLTLQNSDSSASAPNKCYAPSAIPTPQRTSTPGLALFPGLPSPVANSTSTPLTLPVQSPLATAASASTSVPVSCGSSASLLRGPHPGTSDLHISSTPAATTLPVMIKTEPTSPTPSAFKGPSHSGNPSHGTLGLSGTLGRAYTSTSVPISLSACLNPALSGLSSLSTPLNGSNPLSSISLPPHGSSTPIAPVFTALPSFTSLTNNFPLTGNPSLNPSVSLPGSLIATSSTAATSTSLPHPSSTAAVLSGLSASAPVSAAPFPLNLSTAVPSLFSVTQGPLSSSNPSYPGFSVSNTPSVTPALPSFPGLQAPSTVAAVTPLPVAATAPSPAPVLPGFASAFSSNFNSALVAQAGLSSGLQAAGSSVFPGLLSLPGIPGFPQNPSQSSLQELQHNAAAQSALLQQVHSASALESYPAQPDGFPSYPSAPGTPFSLQPSLSQSGWQ

SEQ ID NO: 882591 - protein, 944 aa, Homo sapiens
MDKKSFEMVLDEIRKAVLTEYKLKAIEYVHGYFSSEQVVDLLRYFSWAEPQLKAMKALQHKMVAVQPTEVVNILNCFTFSKDKLVALELLASNIIDAQNSRPIEDLFRVNMSEKKRCKRILEQAFKGGCKAPHAMISSCGTIPGNPYPKGRPSRINGIFPGTPLKKDGEECTNEGKGIAARILGPSKPPPSTYNPHKPVPYPIPPCRPHATIAPSAYNNAGLVPLANVIAPPPPPYTPNPVGTENEDLSNPSKPIQNQTFSTPASQLFSPHGSNPSTPAATPVPTASPVKAINHPSASAAATVSGMNLLNTVLPVFPGQVSSAVHTPQPSIPNPTVIRTPSLPTAPVTSIHSTTTTPVPSIFSGLVSLPGPSATPTAATPTPGPTPRSTLGSSEAFASTSAPFTSLPFSTSSSAASTSNPNSASLSSVFAGLPLPLPPTSQGLSNPTPVIAGGSTPSVAGPLGVNSPLLSALKGFLTSNDTNLINSSALSSAVTSGLASLSSLTLQNSDSSASAPNKCYAPSAIPTPQRTSTPGLALFPGLPSPVANSTSTPLTLPVQSPLATAASASTSVPVSCGSSASLLRGPHPGTSDLHISSTPAATTLPVMIKTEPTSPTPSAFKGPSHSGNPSHGTLGLSGTLGRAYTSTSVPISLSACLNPALSGLSSLSTPLNGSNPLSSISLPPHGSSTPIAPVFTALPSFTSLTNNFPLTGNPSLNPSVSLPGSLIATSSTAATSTSLPHPSSTAAVLSGLSASAPVSAAPFPLNLSTAVPSLFSVTQGPLSSSNPSYPGFSVSNTPSVTPALPSFPGLQAPSTVAAVTPLPVAATAPSPAPVLPGFASAFSSNFNSALVAQAGLSSGLQAAGSSVFPGLLSLPGIPGFPQNPSQSSLQELQHNAAAQSALLQQVHSASALESYPAQPDGFPSYPSAPGTPFSLQPSLSQSGWQ

SEQ ID NO: 882592 - protein, 919 aa, Homo sapiens
MLSLELLVLCFQVVDLLRYFSWAEPQLKAMKALQHKMVAVQPTEVVNILNCFTFSKDKLVALELLASNIIDAQNSRPIEDLFRVNMSEKKRCKRILEQAFKGGCKAPHAMISSCGTIPGNPYPKGRPSRINGIFPGTPLKKDGEECTNEGKGIAARILGPSKPPPSTYNPHKPVPYPIPPCRPHATIAPSAYNNAGLVPLANVIAPPPPPYTPNPVGTENEDLSNPSKPIQNQTFSTPASQLFSPHGSNPSTPAATPVPTASPVKAINHPSASAAATVSGMNLLNTVLPVFPGQVSSAVHTPQPSIPNPTVIRTPSLPTAPVTSIHSTTTTPVPSIFSGLVSLPGPSATPTAATPTPGPTPRSTLGSSEAFASTSAPFTSLPFSTSSSAASTSNPNSASLSSVFAGLPLPLPPTSQGLSNPTPVIAGGSTPSVAGPLGVNSPLLSALKGFLTSNDTNLINSSALSSAVTSGLASLSSLTLQNSDSSASAPNKCYAPSAIPTPQRTSTPGLALFPGLPSPVANSTSTPLTLPVQSPLATAASASTSVPVSCGSSASLLRGPHPGTSDLHISSTPAATTLPVMIKTEPTSPTPSAFKGPSHSGNPSHGTLGLSGTLGRAYTSTSVPISLSACLNPALSGLSSLSTPLNGSNPLSSISLPPHGSSTPIAPVFTALPSFTSLTNNFPLTGNPSLNPSVSLPGSLIATSSTAATSTSLPHPSSTAAVLSGLSASAPVSAAPFPLNLSTAVPSLFSVTQGPLSSSNPSYPGFSVSNTPSVTPALPSFPGLQAPSTVAAVTPLPVAATAPSPAPVLPGFASAFSSNFNSALVAQAGLSSGLQAAGSSVFPGLLSLPGIPGFPQNPSQSSLQELQHNAAAQSALLQQVHSASALESYPAQPDGFPSYPSAPGTPFSLQPSLSQSGWQ

SEQ ID NO: 882593 - protein, 922 aa, Homo sapiens; identical to SEQ ID NO: 882590

SEQ ID NO: 882594 - protein, 852 aa, Homo sapiens
YERHYTVDTPHGIFAASTLYEQSVWITDEEVAFKGGCKAPHAMISSCGTIPGNPYPKGRPSRINGIFPGTPLKKDGEECTNEGKGIAARILGPSKPPPSTYNPHKPVPYPIPPCRPHATIAPSAYNNAGLVPLANVIAPPPPPYTPNPVGTENEDLSNPSKPIQNQTFSTPASQLFSPHGSNPSTPAATPVPTASPVKAINHPSASAAATVSGMNLLNTVLPVFPGQVSSAVHTPQPSIPNPTVIRTPSLPTAPVTSIHSTTTTPVPSIFSGLVSLPGPSATPTAATPTPGPTPRSTLGSSEAFASTSAPFTSLPFSTSSSAASTSNPNSASLSSVFAGLPLPLPPTSQGLSNPTPVIAGGSTPSVAGPLGVNSPLLSALKGFLTSNDTNLINSSALSSAVTSGLASLSSLTLQNSDSSASAPNKCYAPSAIPTPQRTSTPGLALFPGLPSPVANSTSTPLTLPVQSPLATAASASTSVPVSCGSSASLLRGPHPGTSDLHISSTPAATTLPVMIKTEPTSPTPSAFKGPSHSGNPSHGTLGLSGTLGRAYTSTSVPISLSACLNPALSGLSSLSTPLNGSNPLSSISLPPHGSSTPIAPVFTALPSFTSLTNNFPLTGNPSLNPSVSLPGSLIATSSTAATSTSLPHPSSTAAVLSGLSASAPVSAAPFPLNLSTAVPSLFSVTQGPLSSSNPSYPGFSVSNTPSVTPALPSFPGLQAPSTVAAVTPLPVAATAPSPAPVLPGFASAFSSNFNSALVAQAGLSSGLQAAGSSVFPGLLSLPGIPGFPQNPSQSSLQELQHNAAAQSALLQQVHSASALESYPAQPDGFPSYPSAPGTPFSLQPSLSQSGWQ

SEQ ID NO: 882595 - protein, 810 aa, Homo sapiens
MISSCGTIPGNPYPKGRPSRINGIFPGTPLKKDGEECTNEGKGIAARILGPSKPPPSTYNPHKPVPYPIPPCRPHATIAPSAYNNAGLVPLANVIAPPPPPYTPNPVGTENEDLSNPSKPIQNQTFSTPASQLFSPHGSNPSTPAATPVPTASPVKAINHPSASAAATVSGMNLLNTVLPVFPGQVSSAVHTPQPSIPNPTVIRTPSLPTAPVTSIHSTTTTPVPSIFSGLVSLPGPSATPTAATPTPGPTPRSTLGSSEAFASTSAPFTSLPFSTSSSAASTSNPNSASLSSVFAGLPLPLPPTSQGLSNPTPVIAGGSTPSVAGPLGVNSPLLSALKGFLTSNDTNLINSSALSSAVTSGLASLSSLTLQNSDSSASAPNKCYAPSAIPTPQRTSTPGLALFPGLPSPVANSTSTPLTLPVQSPLATAASASTSVPVSCGSSASLLRGPHPGTSDLHISSTPAATTLPVMIKTEPTSPTPSAFKGPSHSGNPSHGTLGLSGTLGRAYTSTSVPISLSACLNPALSGLSSLSTPLNGSNPLSSISLPPHGSSTPIAPVFTALPSFTSLTNNFPLTGNPSLNPSVSLPGSLIATSSTAATSTSLPHPSSTAAVLSGLSASAPVSAAPFPLNLSTAVPSLFSVTQGPLSSSNPSYPGFSVSNTPSVTPALPSFPGLQAPSTVAAVTPLPVAATAPSPAPVLPGFASAFSSNFNSALVAQAGLSSGLQAAGSSVFPGLLSLPGIPGFPQNPSQSSLQELQHNAAAQSALLQQVHSASALESYPAQPDGFPSYPSAPGTPFSLQPSLSQSGWQ

SEQ ID NO: 882596 - protein, 922 aa, Homo sapiens; identical to SEQ ID NO: 882590

SEQ ID NO: 882597 - protein, 922 aa, Homo sapiens; identical to SEQ ID NO: 882590

SEQ ID NO: 882598 - protein, 922 aa, Homo sapiens; identical to SEQ ID NO: 882590

SEQ ID NO: 882599 - protein, 888 aa, Homo sapiens
MDKKSFEMVLDEIRKVVDLLRYFSWAEPQLKAMKALQHKMVAVQPTEVVNILNCFTFSKDKLVALELLASNIIDAQNSRPIEDLFRVNMSEKKRCKRILEQAFKGGCKAPHAMISSCGTIPGNPYPKGRPSRINGIFPGTPLKKDGEECTNEGKGIAARILGPSKPPPSTYNPHKPVPYPIPPCRPHATIAPSAYNNAGLVPLANVIAPPPPPYTPNPVGTENEDLSNPSKPIQNQTFSTPASQLFSPHGSNPSTPAATPVPTASPVKAINHPSASAAATVSGMNLLNTVLPVFPGQVSSAVHTPQPSIPNPTVIRTPSLPTAPVTSIHSTTTTPVPSIFSGLVSLPGPSATPTAATPTPGPTPRSTLGSSEAFASTSAPFTSLPFSTSSSAASTSNPNSASLSSVFAGLPLPLPPTSQGLSNPTPVIAGGSTPSVAGPLGVNSPLLSALKGFLTSNDTNLINSSALSSAVTSGLASLSSLTLQNSDSSASAPNKCYAPSAIPTPQRTSTPGLALFPGLPSPVANSTSTPLTLPVQSPLATAASASTSVPVSCGSSASLLRGPHPGTSDLHISSTPAATTLPVMIKTEPTSPTPSAFKGPSHSGNPSHGTLGLSGTLGRAYTSTSVPISLSACLNPALSGLSSLSTPLNGSNPLSSISLPPHGSSTPIAPVFTALPSFTSLTNNFPLTGNPSLNPSVSLPGSLIATSSTAATSTSLPHPSSTAAVLSGLSASAPVSAAPFPLNLSTAVPSLFSVTQGPLSSSNPSYPGFSVSNTPSVTPALPSFPGLQAPSTVAAVTPLPVAATAPSPAPVLPGFASAFSSNFNSALVAQAGLSSGLQAAGSSVFPGLLSLPGIPGFPQNPSQSSLQELQHNAAAQSALLQQSNIRIA

SEQ ID NO: 882600 - protein, 922 aa, Homo sapiens; identical to SEQ ID NO: 882590

SEQ ID NO: 882601 - protein, 581 aa, Homo sapiens
MDKKSFEMVLDEIRKVVDLLRYFSWAEPQLKAMKALQHKMVAVQPTEVVNILNCFTFSKDKLVALELLASNIIDAQNSRPIEDLFRVNMSEKKRCKRILEQAFKGGCKAPHAMISSCGTIPGNPYPKGRPSRINGIFPGTPLKKDGEECTNEGKGIAARILGPSKPPPSTYNPHKPVPYPIPPCRPHATIAPSAYNNAGLVPLANVIAPPPPPYTPNPVGTENEDLSNPSKPIQNQTFSTPASQLFSPHGSNPSTPAATPVPTASPVKAINHPSASAAATVSGMNLLNTVLPVFPGQVSSAVHTPQPSIPNPTVIRTPSLPTAPVTSIHSTTTTPVPSIFSGLVSLPGPSATPTAATPTPGPTPRSTLGSSEAFASTSAPFTSLPFSTSSSAASTSNPNSASLSSVFAGLPLPLPPTSQGLSNPTPVIAGGSTPSVAGPLGVNSPLLSALKGFLTSNDTNLINSSALSSAVTSGLASLSSLTLQNSDSSASAPNKCYAPSAIPTPQRTSTPGLALFPGLPSPVANSTSTPLTLLFPSFPPRTAPQTSSCAQPPPAPNTLSLVHCFPIILSPFNLRLERSSR

SEQ ID NO: 882602 - protein, 247 aa, Homo sapiens
MQVVKEQVMRALTTKPSSLDQFKSKLQNLSYTEILKIRQSERMNQEDFQSRPILELKEKIQPEILELIKQQRLNRLVEGTCFRKLNARRRQDKFWYCRLSPNHKVLHYGDLEESPQGEVPHDSLQDKLPVADIKAVVTGKDCPHMKEKGALKQNKEVLELAFSILYDSNCQLNFIAPDKHEYCIWTDGLNALLGKDMMSDLTRNDLDTLLSMEIKLRLLDLENIQIPDAPPPIPKEPSNYDFVYDCN

SEQ ID NO: 882603 - protein, 727 aa, Homo sapiens
MPPPADIVKVAIEWPGAYPKLMEIDQKKPLSAIIKEVCDGWSLANHEYFALQHADSSNFYITEKNRNEIKNGTILRLTTSPAQNAQQLHERIQSSSMDAKLEALKDLASLSRDVTFAQEFINLDGISLLTQMVESGTERYQKLQKIMKPCFGDMLSFTLTAFVELMDHGIVSWDTFSVAFIKKIASFVNKSAIDISILQRSLAILESMVLNSHDLYQKVAQEITIGQLIPHLQGSDQEIQTYTIAVINALFLKAPDERRQEMANILAQKQLRSIILTHVIRAQRAINNEMAHQLYVLQVLTFNLLEDRMMTKMDPQDQAQRDIIFELRRIAFDAESEPNNSSGSMEKRKSMYTRDYKKLGFINHVNPAMDFTQTPPGMLALDNMLYFAKHHQDAYIRIVLENSSREDKHECPFGRSSIELTKMLCEILKVGELPSETCNDFHPMFFTHDRSFEEFFCICIQLLNKTWKEMRATSEDFNKVMQVVKEQVMRALTTKPSSLDQFKSKLQNLSYTEILKIRQSERMNQEDFQSRPILELKEKIQPEILELIKQQRLNRLVEGTCFRKLNARRRQDKFWYCRLSPNHKVLHYGDLEESPQGEVPHDSLQDKLPVADIKAVVTGKDCPHMKEKGALKQNKEVLELAFSILYDSNCQLNFIAPDKHEYCIWTDGLNALLGKDMMSDLTRNDLDTLLSMEIKLRLLDLENIQIPDAPPPIPKEPSNYDFVYDCN

SEQ ID NO: 882604 - protein, 70 aa, Homo sapiens
SACAGASGSGRGWAQDRGRATHAAAAPRWATEPPVPLQWWRVAGALIAGNPCRCCPATPSRYRHVWPFTL

SEQ ID NO: 882605 - protein, 133 aa, Homo sapiens
MQVVKEQVMRALTTKPSSLDQFKSKLQNLSYTEILKIRQSERMNQEDFQSRPILELKEKIQPEILELIKQQRLNRLVEGTCFRKLNARRRQDQVLVFVGFFPKITKVPAFSGDFIKRGPSWGKRPPPISLAGT

SEQ ID NO: 882606 - protein, 70 aa, Homo sapiens; identical to SEQ ID NO: 882604

SEQ ID NO: 882607 - protein, 727 aa, Homo sapiens; identical to SEQ ID NO: 882603

SEQ ID NO: 882608 - protein, 727 aa, Homo sapiens; identical to SEQ ID NO: 882603

SEQ ID NO: 882609 - protein, 725 aa, Homo sapiens
  misc_feature (257)..(257): Xaa can be any naturally occurring amino acid
MPPPADIVKVAIEWPGAYPKLMEIDQKKPLSAIIKEVCDGWSLANHEYFALQHADSSNFYITEKNRNEIKNGTILRLTTSPAQNAQQLHERIQSSSMDAKLEALKDLASLSRDVTFAQEFINLDGISLLTQMVESGTERYQKLQKIMKPCFGDMLSFTLTAFVELMDHGIVSWDTFSVAFIKKIASFVNKSAIDISILQRSLAILESMVLNSHDLYQKVAQEITIGQLIPHLQGRSRNPNLYIAVIHALFLKALMRXGEMANILAQKQLRSIILTHVIRAQRAINNEMAHQLYVLQVLTFNLLEDRMMTKMDPQDQAQRDIIFELRRIAFDAESEPNNSSGSMEKRKSMYTRDYKKLGFINHVNPAMDFTQTPPGMLALDNMLYFAKHHQDAYIRIVLENSSREDKHECPFGRSSIELTKMLCEILKVGELPSETCNDFHPMFFTHDRSFEEFFCICIQLLNKTWKEMRATSEDFNKVMQVVKEQVMRALTTKPSSLDQFKSKLQNLSYTEILKIRQSERMNQEDFQSRPILELKEKIQPEILELIKQQRLNRLVEGTCFRKLNARRRQDKFWYCRLSPNHKVLHYGDLEESPQGEVPHDSLQDKLPVADIKAVVTGKDCPHMKEKGALKQNKEVLELAFSILYDSNCQLNFIAPDKHEYCIWTDGLNALLGKDMMSDLTRNDLDTLLSMEIKLRLLDLENIQIPDAPPPIPKEPSNYDFVYDCN

SEQ ID NO: 882610 - protein, 247 aa, Homo sapiens; identical to SEQ ID NO: 882602

SEQ ID NO: 882611 - protein, 98 aa, Homo sapiens
KKRMEVLKAGSSSYGNEYKGQDEVQYAPDKHEYCIWTDGLNALLGKDMMSDLTRNDLDTLLSMEIKLRLLDLENIQIPDAPPPIPKEPSNYDFVYDCN

SEQ ID NO: 882612 - protein, 383 aa, Homo sapiens
MPPPADIVKVAIEWPGAYPKLMEIDQKKPLSAIIKEVCDGWSLANHEYFALQHADSSNFYITEKNRNEIKNGTILRLTTSPAQNAQQLHERIQSSSMDAKLEALKDLASLSRDVTFAQEFINLDGISLLTQMVESGTERYQKLQKIMKPCFGDMLSFTLTAFVELMDHGIVSWDTFSVAFIKKIASFVNKSAIDISILQRSLAILESMVLNSHDLYQKVAQEITIGQLIPHLQGSDQEIQTYTIAVINALFLKAPDERRQEMANILAQKQLRSIILTHVIRAQRAINNEMAHQLYVLQVLTFNLLEDRMMTKMDPQDQAQRDIIFELRRIAFDAESEPNNSSGSMEKRKSMYTRDYKKLGFIVSKLSPVCALPPASPGLTSAT

SEQ ID NO: 882613 - protein, 411 aa, Homo sapiens
  misc_feature (257)..(257): Xaa can be any naturally occurring amino acid
MPPPADIVKVAIEWPGAYPKLMEIDQKKPLSAIIKEVCDGWSLANHEYFALQHADSSNFYITEKNRNEIKNGTILRLTTSPAQNAQQLHERIQSSSMDAKLEALKDLASLSRDVTFAQEFINLDGISLLTQMVESGTERYQKLQKIMKPCFGDMLSFTLTAFVELMDHGIVSWDTFSVAFIKKIASFVNKSAIDISILQRSLAILESMVLNSHDLYQKVAQEITIGQLIPHLQGRSRNPNLYIAVIHALFLKALMRXGEMANILAQKQLRSIILTHVIRAQRAINNEMAHQLYVLQVLTFNLLEDRMMTKMDPQDQAQRDIIFELRRIAFDAESEPNNSSGSMEKRKSMYTRDYKKLGFINHVNPAMDFTQTPPGMLALDNMLYFAKHHQDAYIRVSKKPLFRYCVFPTQC

SEQ ID NO: 882614 - protein, 575 aa, Homo sapiens
MSSDEEKYSLPVVQNDSSRGSSVSSNLQEEYEELLHYAIVTPNIEPCASQSSHPKGELVPDVRISTIHDILHSQGNNSEVRETAIEVGKGCDFHISSHSKTDESSPVLSPRKPSHPVMDFFSSHLLADSSSPATNSSHTDAHEILVSDFLVSDENLQKMENVLDLWSSGLKTNIISELSKWRLNFIDWHRMEMRKEKEKHAAHLKQLCNQINELKELQKTFEISIGRKDEVISSLSHAIGKQKEKIELMRTFFHWRIGHVRARQDVYEGKLADQYYQRTLLKKVWKVWRSVVQKQWKDVVERACQARAEEVCIQISNDYEAKVAMLSGALENAKAEIQRMQHEKEHFEDSMKKAFMRGVCALNLEAMTIFQNRNDAGIDSTNNKKEEYGPGVQGKEHSAHLDPSAPPMPLPVTSPLLPSPPAAVGGASATAVPSAASMTSTRAASASSVHVPVSALGAGSAATAASEEMYVPRVVTSAQQKAGRTITARITGRCDFASKNRISSSLAIMGVSPPMSSVVVEKHHPVTVQTIPQATAAKYPRTIHPESSTSASRSLGTRSAHTQSLTSVHSIKVVD

SEQ ID NO: 882615 - protein, 560 aa, Homo sapiens
MSSDEEKYSLPVVQNDSSRGSSVSSNLQEEYEELLHYAIVTPNIEPCASQSSHPKGELVPDVRISTIHDILHSQGNNSEVRETAIEVGKGCDFHISSHSKTDESSPVLSPRKPSHPVMDFFSSHLLADSSSPATNSSHTDAHEILVSDFLVSDENLQKMENVLDLWSSGLKTNIISELSKWRLNFIDWHRMEMRKEKEKHAAHLKQLCNQINELKELQKTFEISIGRKDEVISSLSHAIGKQKEKIELMRTFFHWRIGHVRARQDVYEGKLADQYYQRTLLKKVWKVWRSVVQKQWKDVVERACQARAEEVCIQISNDYEAKVAMLSGALENAKAEIQRMQHEKEHFEDSMKKAFMRGVCALNLEAMTIFQNRNDAGIDSTNNKKEEYGPGVQGLPVTSPLLPSPPAAVGGASATAVPSAASMTSTRAASASSVHVPVSALGAGSAATAASEEMYVPRVVTSAQQKAGRTITARITGRCDFASKNRISSSLAIMGVSPPMSSVVVEKHHPVTVQTIPQATAAKYPRTIHPESSTSASRSLGTRSAHTQSLTSVHSIKVVD

SEQ ID NO: 882616 - protein, 458 aa, Homo sapiens
MDFFSSHLLADSSSPATNSSHTDAHEILVSDFLVSDENLQKMENVLDLWSSGLKTNIISELSKWRLNFIDWHRMEMRKEKEKHAAHLKQLCNQINELKELQKTFEISIGRKDEVISSLSHAIGKQKEKIELMRTFFHWRIGHVRARQDVYEGKLADQYYQRTLLKKVWKVWRSVVQKQWKDVVERACQARAEEVCIQISNDYEAKVAMLSGALENAKAEIQRMQHEKEHFEDSMKKAFMRGVCALNLEAMTIFQNRNDAGIDSTNNKKEEYGPGVQGKEHSAHLDPSAPPMPLPVTSPLLPSPPAAVGGASATAVPSAASMTSTRAASASSVHVPVSALGAGSAATAASEEMYVPRVVTSAQQKAGRTITARITGRCDFASKNRISSSLAIMGVSPPMSSVVVEKHHPVTVQTIPQATAAKYPRTIHPESSTSASRSLGTRSAHTQSLTSVHSIKVVD

SEQ ID NO: 882617 - protein, 458 aa, Homo sapiens; identical to SEQ ID NO: 882616

SEQ ID NO: 882618 - protein, 501 aa, Homo sapiens
MSSDEEKYSLPVVQNDSSRGSSVSSNLQEEYEELLHYAIVTPNIEPCASQSSHPKGELVPDVRISTIHDILHSQGNNSEVRETAIEVGKGCDFHISSHSKTDESSPVLSPRKPSHPVMDFFSSHLLADSSSPATNSSHTDAHEILVSDFLVSDENLQKMENVLDLWSSGLKTNIISELSKWRLNFIDWHRMEMRKEKEKHAAHLKQLCNQINELKELQKTFEISIGRKDEVISSLSHAIGKQKEKIELMRTFFHWRIGHVRARQDVYEGKLADQYYQRTLLKKVWKVWRSVVQKQWKDVVERACQARAEEVCIQISNDYEAKVAMLSGALENAKAEIQRMQHEKEHFEDSMKKAFMRGVCALNLEAMTIFQNRNDAGIDSTNNKKEEYGPGVQGLPVTSPLLPSPPAAVGGASATAVPSAASMTSTRAASASSVHVPVSALGAGSAATAASEEMQTIPQATAAKYPRTIHPESSTSASRSLGTRSAHTQSLTSVHSIKVVD

SEQ ID NO: 882619 - protein, 575 aa, Homo sapiens; identical to SEQ ID NO: 882614

SEQ ID NO: 882620 - protein, 415 aa, Homo sapiens
MSSDEEKYSLPVVQNDSSRGSSVSSNLQEEYEELLHYAIVTPNIEPCASQSSHPKGELVPDVRISTIHDILHSQGNNSEVRETAIEVGKGCDFHISSHSKTDESSPVLSPRKPSHPVMDFFSSHLLADSSSPATNSSHTDAHEILVSDFLVSDENLQKMENVLDLWSSGLKTNIISELSKWRLNFIDWHRMEMRKEKEKHAAHLKQLCNQINELKELQKTFEISIGRKDEVISSLSHAIGKQKEKIELMRTFFHWRIGHVRARQDVYEGKLADQYYQRTLLKKVWKVWRSVVQKQWKDVVERACQARAEEVCIQISNDYEAKVAMLSGALENAKAEIQRMQHEKEHFEDSMKKAFMRGVCALNLEAMTIFQNRNDAGQARSLTPVIPALWEAEVSGSRGQEIETILANMVKSRLY

SEQ ID NO: 882621 - protein, 458 aa, Homo sapiens; identical to SEQ ID NO: 882616

SEQ ID NO: 882622 - protein, 458 aa, Homo sapiens; identical to SEQ ID NO: 882616

SEQ ID NO: 882623 - protein, 481 aa, Homo sapiens
MLQLFFYSESSPVLSPRKPSHPVMDFFSSHLLADSSSPATNSSHTDAHEILVSDFLVSDENLQKMENVLDLWSSGLKTNIISELSKWRLNFIDWHRMEMRKEKEKHAAHLKQLCNQINELKELQKTFEISIGRKDEVISSLSHAIGKQKEKIELMRTFFHWRIGHVRARQDVYEGKLADQYYQRTLLKKVWKVWRSVVQKQWKDVVERACQARAEEVCIQISNDYEAKVAMLSGALENAKAEIQRMQHEKEHFEDSMKKAFMRGVCALNLEAMTIFQNRNDAGIDSTNNKKEEYGPGVQGKEHSAHLDPSAPPMPLPVTSPLLPSPPAAVGGASATAVPSAASMTSTRAASASSVHVPVSALGAGSAATAASEEMYVPRVVTSAQQKAGRTITARITGRCDFASKNRISSSLAIMGVSPPMSSVVVEKHHPVTVQTIPQATAAKYPRTIHPESSTSASRSLGTRSAHTQSLTSVHSIKVVD

SEQ ID NO: 882624 - protein, 167 aa, Homo sapiens
MSSDEEKYSLPVVQNDSSRGSSVSSNLQEEYEELLHYAIVTPNIEPCASQSSHPKGELVPDVRISTIHDILHSQGNNSEVRETAIEVGKGCDFHISSHSKTDESSPVLSPRKPSHPVMDFFSSHLLADSSSPATNSSHTYQLHHHCCHPHQPPSEEPARLPFPQLLR

SEQ ID NO: 882625 - protein, 385 aa, Homo sapiens
MEMRKEKEKHAAHLKQLCNQINELKELQKTFEISIGRKDEVISSLSHAIGKQKEKIELMRTFFHWRIGHVRARQDVYEGKLADQYYQRTLLKKVWKVWRSVVQKQWKDVVERACQARAEEVCIQISNDYEAKVAMLSGALENAKAEIQRMQHEKEHFEDSMKKAFMRGVCALNLEAMTIFQNRNDAGIDSTNNKKEEYGPGVQGKEHSAHLDPSAPPMPLPVTSPLLPSPPAAVGGASATAVPSAASMTSTRAASASSVHVPVSALGAGSAATAASEEMYVPRVVTSAQQKAGRTITARITGRCDFASKNRISSSLAIMGVSPPMSSVVVEKHHPVTVQTIPQATAAKYPRTIHPESSTSASRSLGTRSAHTQSLTSVHSIKVVD

SEQ ID NO: 882626 - protein, 127 aa, Homo sapiens
MSSDEEKYSLPVVQNDSSRGSSVSSNLQEEYEELLHYAIVTPNIEPCASQSSHPKGELVPDVRISTIHDILHSQGNNSEVRETAIEVGKGCDFHISSHSKTDESSPVLSPRKPSHPVMDFYIKLTQS

SEQ ID NO: 882627 - protein, 102 aa, Homo sapiens
MSSDEEKYSLPVVQNDSSRGSSVSSNLQEEYEELLHYAIVTPNIEPCASQSSHPKGELVPDVRISTIHDILHSQGNNSEVRETAIEVGKGKPERHIGFSPII

SEQ ID NO: 882628 - protein, 198 aa, Homo sapiens
MGPLEFRDVAIEFSLEEWHCLDTAQQNLYRDVMLENYRHLVFLGIVVTKPDLITCLEQGKKPFTVKRHEMIAKSPVMCFHFAQDLCPEQSLKDSFQKVIVTRYEKREYGNLELKKGCESVDEGKVHKRGYNGLNQCLTATQSKVFQCDTYVKVSHIFSNSNRHKIRDTGKKPFKCIECGKAFNQSSILATHKKIHIWY

SEQ ID NO: 882629 - protein, 146 aa, Homo sapiens [sequence omitted]

SEQ ID NO: 882630 - protein, 276 aa, Homo sapiens
MGPLEFRDVAIEFSLEEWHCLDTAQQNLYRDVMLENYRHLVFLGIVVTKPDLITCLEQGKKPFTVKRHEMIAKSPDGVHFLIQAGVQQRNLCVIIATFTSQVQAILLPQSPKKQGLQRRAVRFSESTLAAMPSKGPLQSVQVFGRKKTATAVAHCRRGNGLIKVNGQPLEMTEPRMLQYELLEPVLLLGKERFAGVDIRVRVKGGAHVAQIYAIRQSTSKALVAYYQKYVDEASKKEIKDILIQYDRTLLVADPRRCKSKKFGGPGARACYQKSYR

SEQ ID NO: 882631 - protein, 118 aa, Homo sapiens
GRTEKQVHERVCGGDGVSLQQTGHAGTQPHTRSWKRVPSPSCRTCWPREASCRGTRPTATEQNQSLPLGLRTKGGSTMSFCGTLPAPGLQPSPVDPLGKPGPGEKQGQEIPQFDVLKK

SEQ ID NO: 882632 - protein, 906 aa, Homo sapiens
AGVICRSDRLGACLSPAPLSLNSFLQVWALEASRAASRGAVSVPHASRLRPPPPPGLAGGTVRRRSLGRGVVAAEDATERACGLTMDPECAQLLPALCAVLVDPRQPVADDTCLEKLLDWFKTVTEGESSVVLLQEHPCLVELLSHVLKVQDLSSGVLSFSLRLAGTFAAQENCFQYLQQGELLPGLFGEPGPLGRATWAVPTVRSGWIQGLRSLAQHPSALRFLADHGAVDTIFSLQGDSSLFVASAASQLLVHVLALSMRGGAEGQPCLPGGDWPACAQKIMDHVEESLCSAATPKVTQALNVLTTTFGRCQSPWTEALWVRLSPRVACLLERDPIPAAHSFVDLLLCVARSPVFSSSDGSLWETVARALSCLGPTHMGPLALGILKLEHCPQALRTQAFQVLLQPLACVLKATVQAPGPPGLLDGTADDATTVDTLLASKSSCAGLLCRTLAHLEELQPLPQRPSPWPQASLLGATVTVLRLCDGSAAPASSVGGHLCGTLAGCVRVQRAALDFLGTLSQGTGPQELVTQALAVLLECLESPGSSPTVLKKAFQATLRWLLSSPKTPGCSDLGPLIPQFLRELFPVLQKRLCHPCWEVRDSALEFLTQLSRHWGGQADFRCALLASEVPQLALQLLQDPESYVRASAVTAMGQLSSQGLHAPTSPEHAEARQSLFLELLHILSVDSEGFPRRAVMQVFTEWLRDGHADAAQDTEQFVATVLQAASRDLDWEVRAQGLELALVFLGQTLGPPRTHCPYAVALPEVAPAQPLTEALRALCHVGLFDFAFCALFDCDRPVAQKSCDLLLFLRDKIASYSSLREARGSPNTASAEATLPRWRAGEQAQPPGDQEPEAVLAMLRSLDLEGLRSTLAESSDHVEKSPQSLLQDMLATGGFLQGDEADCY

SEQ ID NO: 882633 - protein, 980 aa, Homo sapiens
AGVICRSDRLGACLSPAPLSLNSFLQVWALEASRAASRGAVSVPHASRLRPPPPPGLAGGTVRRRSLGRGVVAAEDATERACGLTMDPECAQLLPALCAVLVDPRQPVADDTCLEKLLDWFKTVTEGESSVVLLQEHPCLVELLSHVLKVQDLSSGVLSFSLRLAGTFAAQENCFQYLQQGELLPGLFGEPGPLGRATWAVPTVRSGWIQGLRSLAQHPSALRFLADHGAVDTIFSLQGDSSLFVASAASQLLVHVLALSMRGGAEGQPCLPGGDWPACAQKIMDHVEESLCSAATPKVTQALNVLTTTFGRCQSPWTEALWVRLSPRVACLLERDPIPAAHSFVDLLLCVARSGPRDAAGEAWVGNCFPRITPRDVPLAAGDSLRTWPAVKRHRGDPGTLMGKGLSWAGRLQCRSHGSLSQASEWGFEGGGVIFLSGVSLSPVFSSSDGSLWETVARALSCLGPTHMGPLALGILKLEHWYGLGCISFRGGCWELGQAGRLRAQPSWQGSSGHQGQSGGRAGCDWVVRGLRAAASEEFFSNRIIVSDQSSARSPEVRRMRELLCSEQGGPADALRSAALPPVPHRSFGWGFRSSPAHTPCGWGAWGRCNGRAWGQDRWEGRGWPASVPGGLTIGVEVTSGPAAHRAQGYHEGPALSSGVSECLGESRPGEDGGTGPALQECIVGTLPPPRPRREGRSLPQSGRCTHLGTPGRLGAPHPCPPERALPLSLGAWPGPPGGPSVSAPKDIRSVRPISLVRPVLPATLSHGIPWPVACRECFSGGVPTPWLICPRLAGDIRSTANLSRSQGRGTHLAFVSSPQALRTQAFQVLLQPLACVLKATVQAPGPPGLLDGTADDATTVDTLLASKSSCAGLLCRTLAHLEELQPLPQRPSPWPQASLLGATVTVLRLCDGSAAPASSVGGHLCGTLAGCVRVQRAALDFLGTLSQGTGPQELVTQALAVLLECLESPGSSPTVRWWG

SEQ ID NO: 882634 - protein, 510 aa, Homo sapiens
MPLRLPWPCSPPYLLQVLKKAFQATLRWLLSSPKTPGCSDLGPLIPQFLRELFPVLQKRLCHPCWEVRDSALEFLTQLSRHWGGQADFRCALLASEVPQLALQLLQDPESYVRASAVTAMGQLSSQGLHAPTSPEHAEARQVGGGRFLSQQLPPGHRVCSFACGWSSGQHAAWEQLLLWAAPAAVTAEALGLCWVWDLCASPSVSPAPLHLDMVTSIGQMGKLRIGGPCAHCAAWEGVRAGCGPRLHVRGQPPSCTGVLLWEPRSCHPTNHPHLLPVPQSLFLELLHILSVDSEGFPRRAVMQVFTEWLRDGHADAAQDTEQFVATVLQAASRDLDWEVRAQGLELALVFLGQTLGPPRTHCPYAVALPEVAPAQPLTEALRALCHVGLFDFAFCALFDCDRPVAQKSCDLLLFLRDKIASYSSLREARGSPNTASAEATLPRWRAGEQAQPPGDQEPEAVLAMLRSLDLEGLRSTLAESSDHVEKSPQSLLQDMLATGGFLQGDEADCY

SEQ ID NO: 882635 - protein, 646 aa, Homo sapiens
MRGGAEGQPCLPGGDWPACAQKIMDHVEESLCSAATPKVTQALNVLTTTFGRCQSPWTEALWVRLSPRVACLLERDPIPAAHSFVDLLLCVARSPVFSSSDGSLWETVARALSCLGPTHMGPLALGILKLEHCPQALRTQAFQVLLQPLACVLKATVQAPGPPGLLDGTADDATTVDTLLASKSSCAGLLCRTLAHLEELQPLPQRPSPWPQASLLGATVTVLRLCDGSAAPASSVGGHLCGTLAGCVRVQRAALDFLGTLSQGTGPQELVTQALAVLLECLESPGSSPTVLKKAFQATLRWLLSSPKTPGCSDLGPLIPQFLRELFPVLQKRLCHPCWEVRDSALEFLTQLSRHWGGQADFRCALLASEVPQLALQLLQDPESYVRASAVTAMGQLSSQGLHAPTSPEHAEARQSLFLELLHILSVDSEGFPRRAVMQVFTEWLRDGHADAAQDTEQFVATVLQAASRDLDWEVRAQGLELALVFLGQTLGPPRTHCPYAVALPEVAPAQPLTEALRALCHVGLFDFAFCALFDCDRPVAQKSCDLLLFLRDKIASYSSLREARGSPNTASAEATLPRWRAGEQAQPPGDQEPEAVLAMLRSLDLEGLRSTLAESSDHVEKSPQSLLQDMLATGGFLQGDEADCY

SEQ ID NO: 882636 - protein, 555 aa, Homo sapiens
AGVICRSDRLGACLSPAPLSLNSFLQVWALEASRAASRGAVSVPHASRLRPPPPPGLAGGTVRRRSLGRGVVAAEDATERACGLTMDPECAQLLPALCAVLVDPRQPVADDTCLEKLLDWFKTVTEGESSVVLLQEHPCLVELLSHVLKVQDLSSGVLSFSLRLAGTFAAQENCFQYLQQGELLPGLFGEPGPLGRATWAVPTVRSGWIQGLRSLAQHPSALRFLADHGAVDTIFSLQGDSSLFVASAASQLLVHVLALSMRGGAEGQPCLPGGDWPACAQKIMDHVEESLCSAATPKVTQALNVLTTTFGRCQSPWTEALWVRLSPRVACLLERDPIPAAHSFVDLLLCVARSPVFSSSDGSLWETVARALSCLGPTHMGPLALGILKLEHCPQALRTQAFQVLLQPLACVLKATVQAPGPPGLLDGTADDATTVDTLLASKSSCAGLLCRTLAHLEELQPLPQRPSPWPQASLLGATVTVLRLCDGSAAPASSVGGHLCGTLAGCVRVQRAALDFLGTLSQGTGPQELVTQALAVLLECLESPGSSPTVRWWG

SEQ ID NO: 882637 - protein, 906 aa, Homo sapiens; identical to SEQ ID NO: 882632

SEQ ID NO: 882638 - protein, 966 aa, Homo sapiens
AGVICRSDRLGACLSPAPLSLNSFLQVWALEASRAASRGAVSVPHASRLRPPPPPGLAGGTVRRRSLGRGVVAAEDATERACGLTMDPECAQLLPALCAVLVDPRQPVADDTCLEKLLDWFKTVTEGESSVVLLQEHPCLVELLSHVLKVQDLSSGVLSFSLRLAGTFAAQENCFQYLQQGELLPGLFGEPGPLGRATWAVPTVRSGWIQGLRSLAQHPSALRFLADHGAVDTIFSLQGDSSLFVASAASQLLVHVLALSMRGGAEGQPCLPGGDWPACAQKIMDHVEESLCSAATPKVTQALNVLTTTFGRCQSPWTEALWVRLSPRVACLLERDPIPAAHSFVDLLLCVARSPVFSSSDGSLWETVARALSCLGPTHMGPLALGILKLEHCPQALRTQAFQVLLQPLACVLKATVQAPGPPGLLDGTADDATTVDTLLASKSSCAGLLCRTLAHLEELQPLPQRPSPWPQASLLGATVTVLRLCDGSAAPASSVGGHLCGTLAGCVRVQRAALDFLGTLSQGTGPQELVTQALAVLLECLESPGSSPTVLKKAFQATLRWLLSSPKTPGCSDLGPLIPQFLRELFPVLQKRLCHPCWEVRDSALEFLTQLSRHWGGQADFRCALLASEVPQLALQLLQDPESYVRASAVTAMGQLSSQGLHAPTSPEHAEARQMGKLRIGGPCAHCAAWEGVRAGCGPRLHVRGQPPSCTGVLLWEPRSCHPTNHPHLLPVPQSLFLELLHILSVDSEGFPRRAVMQVFTEWLRDGHADAAQDTEQFVATVLQAASRDLDWEVRAQGLELALVFLGQTLGPPRTHCPYAVALPEVAPAQPLTEALRALCHVGLFDFAFCALFDCDRPVAQKSCDLLLFLRDKIASYSSLREARGSPNTASAEATLPRWRAGEQAQPPGDQEPEAVLAMLRSLDLEGLRSTLAESSDHVEKSPQSLLQDMLATGGFLQGDEADCY

SEQ ID NO: 882639 - protein, 527 aa, Homo sapiens
MGPLALGILKLEHCPQALRTQAFQVLLQPLACVLKATVQAPGPPGLLDGTADDATTVDTLLASKSSCAGLLCRTLAHLEELQPLPQRPSPWPQASLLGATVTVLRLCDGSAAPASSVGGHLCGTLAGCVRVQRAALDFLGTLSQGTGPQELVTQALAVLLECLESPGSSPTVLKKAFQATLRWLLSSPKTPGCSDLGPLIPQFLRELFPVLQKRLCHPCWEVRDSALEFLTQLSRHWGGQADFRCALLASEVPQLALQLLQDPESYVRASAVTAMGQLSSQGLHAPTSPEHAEARQSLFLELLHILSVDSEGFPRRAVMQVFTEWLRDGHADAAQDTEQFVATVLQAASRDLDWEVRAQGLELALVFLGQTLGPPRTHCPYAVALPEVAPAQPLTEALRALCHVGLFDFAFCALFDCDRPVAQKSCDLLLFLRDKIASYSSLREARGSPNTASAEATLPRWRAGEQAQPPGDQEPEAVLAMLRSLDLEGLRSTLAESSDHVEKSPQSLLQDMLATGGFLQGDEADCY

SEQ ID NO: 882640 - protein, 489 aa, Homo sapiens
FLAWPPGLLDGTADDATTVDTLLASKSSCAGLLCRTLAHLEELQPLPQRPSPWPQASLLGATVTVLRLCDGSAAPASSVGGHLCGTLAGCVRVQRAALDFLGTLSQGTGPQELVTQALAVLLECLESPGSSPTVLKKAFQATLRWLLSSPKTPGCSDLGPLIPQFLRELFPVLQKRLCHPCWEVRDSALEFLTQLSRHWGGQADFRCALLASEVPQLALQLLQDPESYVRASAVTAMGQLSSQGLHAPTSPEHAEARQSLFLELLHILSVDSEGFPRRAVMQVFTEWLRDGHADAAQDTEQFVATVLQAASRDLDWEVRAQGLELALVFLGQTLGPPRTHCPYAVALPEVAPAQPLTEALRALCHVGLFDFAFCALFDCDRPVAQKSCDLLLFLRDKIASYSSLREARGSPNTASAEATLPRWRAGEQAQPPGDQEPEAVLAMLRSLDLEGLRSTLAESSDHVEKSPQSLLQDMLATGGFLQGDEADCY

SEQ ID NO: 882641 - protein, 845 aa, Homo sapiens
  misc_feature (772)..(772): Xaa can be any naturally occurring amino acid
AGVICRSDRLGACLSPAPLSLNSFLQVWALEASRAASRGAVSVPHASRLRPPPPPGLAGGTVRRRSLGRGVVAAEDATERACGLTMDPECAQLLPALCAVLVDPRQPVADDTCLEKLLDWFKTVTEGESSVVLLQEHPCLVELLSHVLKVQDLSSGVLSFSLRLAGTFAAQENCFQYLQQGELLPGLFGEPGPLGRATWAVPTVRSGWIQGLRSLAQHPSALRFLADHGAVDTIFSLQGDSSLFVASAASQLLVHVLALSMRGGAEGQPCLPGGDWPACAQKIMDHVEESLCSAATPKVTQALNVLTTTFGRCQSPWTEALWVRLSPRVACLLERDPIPAAHSFVDLLLCVARSPVFSSSDGSLWETVARALSCLGPTHMGPLALGILKLEHCPQALRTQAFQVLLQPLACVLKATVQAPGPPGLLDGTADDATTVDTLLASKSSCAGLLCRTLAHLEELQPLPQRPSPWPQASLLGATVTVLRLCDGSAAPASSVGGHLCGTLAGCVRVQRAALDFLGTLSQGTGPQELVTQALAVLLECLESPGSSPTVLKKAFQATLRWLLSSPKTPGCSDLGPLIPQFLRELFPVLQKRLCHPCWEVRDSALEFLTQLSRHWGGQADFRCALLASEVPQLALQLLQDPESYVRASAVTAMGQLSSQGLHAPTSPEHAEARQSLFLELLHILSVDSEGFPRRAVMQVFTEWLRDGHADAAQDTEQFVATVLQAASRDLDWEVRAQGLELALVFLGQTLGPPRTHCTQPCILISSGYLFXLFTCFKNKTKSILLPTKTTQTNHRTNENTKKKAKKQKKGARGRQGPHEGRGPAGAHAAGGGGPGGGGGGARRR

SEQ ID NO: 882642 - protein, 678 aa, Homo sapiens
AGVICRSDRLGACLSPAPLSLNSFLQVWALEASRAASRGAVSVPHASRLRPPPPPGLAGGTVRRRSLGRGVVAAEDATERACGLTMDPECAQLLPALCAVLVDPRQPVADDTCLEKLLDWFKTVTEGESSVVLLQEHPCLVELLSHVLKVQDLSSGVLSFSLRLAGTFAAQENCFQYLQQGELLPGLFGEPGPLGRATWAVPTVRSGWIQGLRSLAQHPSALRFLADHGAVDTIFSLQGDSSLFVASAASQLLVHVLALSMRGGAEGQPCLPGGDWPACAQKIMDHVEESLCSAATPKVTQALNVLTTTFGRCQSPWTEALWVRLSPRVACLLERDPIPAAHSFVDLLLCVARSPVFSSSDGSLWETVARALSCLGPTHMGPLALGILKLEHCPQALRTQAFQVLLQPLACVLKATVQAPGPPGLLDGTADDATTVDTLLASKSSCAGLLCRTLAHLEELQPLPQRPSPWPQASLLGATVTVLRLCDGSAAPASSVGGHLCGTLAGCVRVQRAALDFLGTLSQGTGPQELVTQALAVLLECLESPGSSPTVLKKAFQATLRWLLSSPKTPGCSDLGPLIPQFLRELFPVLQKRLCHPCWEVRDSALEFLTQLSRHWGGQADFRCALLASEVPQLASVFPGPRLWAACYHCLCGGLPRWPANHHRAWAPAMGFRSFARA

SEQ ID NO: 882643 - protein, 321 aa, Homo sapiens
  misc_feature (2)..(2): Xaa can be any naturally occurring amino acid
  misc_feature (26)..(26): Xaa can be any naturally occurring amino acid
  misc_feature (34)..(34): Xaa can be any naturally occurring amino acid
  misc_feature (38)..(40): Xaa can be any naturally occurring amino acid
  misc_feature (42)..(42): Xaa can be any naturally occurring amino acid
  misc_feature (45)..(46): Xaa can be any naturally occurring amino acid
  misc_feature (49)..(49): Xaa can be any naturally occurring amino acid
  misc_feature (72)..(72): Xaa can be any naturally occurring amino acid
  misc_feature (79)..(79): Xaa can be any naturally occurring amino acid
  misc_feature (90)..(90): Xaa can be any naturally occurring amino acid
  misc_feature (95)..(95): Xaa can be any naturally occurring amino acid
  misc_feature (102)..(102): Xaa can be any naturally occurring amino acid
  misc_feature (104)..(104): Xaa can be any naturally occurring amino acid
  misc_feature (107)..(108): Xaa can be any naturally occurring amino acid
  misc_feature (112)..(112): Xaa can be any naturally occurring amino acid
  misc_feature (124)..(124): Xaa can be any naturally occurring amino acid
  misc_feature (130)..(130): Xaa can be any naturally occurring amino acid
  misc_feature (140)..(140): Xaa can be any naturally occurring amino acid
  misc_feature (161)..(161): Xaa can be any naturally occurring amino acid
  misc_feature (178)..(178): Xaa can be any naturally occurring amino acid
  misc_feature (180)..(180): Xaa can be any naturally occurring amino acid
  misc_feature (236)..(236): Xaa can be any naturally occurring amino acid
SXDSLRQHFDEFLTGELELALALVLXKVALAPPXLVVXXXHXFHXXYPXLHVVLFTSFPRTPAPHRILEMSXSTVAGGXENEARALGPEXLLRAXKAITVGXVXLSXXREKXARGVAGATWGNXSGEEEXEEDGPAVLVXLHLIQQWSQSVPTQERYKDGXVTLGCVGVPLCGKVLAXQXAAGAEKSLISPEPRPIPETFIPTFLPPLLSSVTAQASSSHLFCLGSCRMLAGIYPXAQARGSPNTASAEATLPRWRAGEQAQPPGDQEPEAVLAMLRSLDLEGLRSTLAESSDHVEKSPQSLLQDMLATGGFLQGDEADCY

SEQ ID NO: 882644 - protein, 288 aa, Homo sapiens
AGVICRSDRLGACLSPAPLSLNSFLQVWALEASRAASRGAVSVPHASRLRPPPPPGLAGGTVRRRSLGRGVVAAEDATERACGLTMDPECAQLLPALCAVLVDPRQPVADDTCLEKLLDWFKTVTEGESSVVLLQEHPCLVELLSHVLKVQDLSSGVLSFSLRLAGTFAAQENCFQYLQQGELLPGLFGEPGPLGRATWAVPTVRSGWIQGLRSLAQHPSALRFLADHGRLLLSRTRVCHWGSGPREAAPCPSVGHCQPQGSSPARWILWGSQDQERSKVKKSHSLMY

SEQ ID NO: 882645 - protein, 62 aa, Homo sapiens
MSERQGAGPTNGKDKTSGENDGQKKVQEEFDIDMDAPETERAAVAIQSQFRKFQKKKAGSQS

SEQ ID NO: 882646 - protein, 66 aa, Homo sapiens
  misc_feature (15)..(17): Xaa can be any naturally occurring amino acid
PGAPARARQDRYFEXXXRFGDNHNHGQKKVQEEFDIDMDAPETERAAVAIQSQFRKFQKKKAGSQS

SEQ ID NO: 882647 - protein, 62 aa, Homo sapiens; identical to SEQ ID NO: 882645

SEQ ID NO: 882648 - protein, 62 aa, Homo sapiens; identical to SEQ ID NO: 882645

SEQ ID NO: 882649 - protein, 640 aa, Homo sapiens
SGGPGSGHSRGSRSRSTQSRRDEVPSESERESVLGLLRGAARGICRERSGGDNASMPVLSEDSGLHETLALLTSQLRPDSNHKEEMGFLRDVFSEKSLSYLMKIHEKLRYYERQSPTPVLHSAVALAEDVMEELQAASVHSDERELLQLLSTPHLRAVLMVHDTVAQKNFDPVLPPLPDNIDEDFDEESVKIVRLVKNKEPLGATIRRDEHSGAVVVARIMRGGAADRSGLVHVGDELREVNGIAVLHKRPDEISQILAQSQGSITLKIIPATQEEDRLKESKVFMRALFHYNPREDRAIPCQEAGLPFQRRQVLEVVSQDDPTWWQAKRVGDTNLRAGLIPSKGFQERRLSYRRAAGTLPSPQSLRKPPYDQPCDKETCDCEGYLKGHYVAGLRRSFRLGCRERLGGSQEGKMSSGAESPELLTYEEVARYQHQPGERPRLVVLIGSLGARLHELKQKVVAENPQHFGVAVPHTTRPRKSHEKEGVEYHFVSKQAFEADLHHNKFLEHGEYKENLYGTSLEAIQAVMAKNKVCLVDVEPEALKQLRTSEFKPYIIFVKPAIQEKRKTPPMSPACEDTAAPFDEQQQEMAASAAFIDRHYGHLVDAVLVKEDLQGAYSQLKVVLEKLSKDTHWVPVSWVR

SEQ ID NO: 882650 - protein, 640 aa, Homo sapiens; identical to SEQ ID NO: 882649

SEQ ID NO: 882651 - protein, 258 aa, Homo sapiens
MVSLCPSSQAGLRRSFRLGCRERLGGSQEGKMSSGAESPELLTYEEVARYQHQPGERPRLVVLIGSLGARLHELKQKVVAENPQHFGVAVPHTTRPRKSHEKEGVEYHFVSKQAFEADLHHNKFLEHGEYKENLYGTSLEAIQAVMAKNKVCLVDVEPEALKQLRTSEFKPYIIFVKPAIQEKRKTPPMSPACEDTAAPFDEQQQEMAASAAFIDRHYGHLVDAVLVKEDLQGAYSQLKVVLEKLSKDTHWVPVSWVR

SEQ ID NO: 882652 - protein, 374 aa, Homo sapiens
SGGPGSGHSRGSRSRSTQSRRDEVPSESERESVLGLLRGAARGICRERSGGDNASMPVLSEDSGLHETLALLTSQLRPDSNHKEEMGFLRDVFSEKSLSYLMKIHEKLRYYERQSPTPVLHSAVALAEDVMEELQAASVHSDERELLQLLSTPHLRAVLMVHDTVAQKNFDPVLPPLPDNIDEDFDEESVKIVRLVKNKEPLGATIRRDEHSGAVVVARIMRGGAADRSGLVHVGDELREVNGIAVLHKRPDEISQILVRATSLLGMCWVFRHPEQGTSWSQDRFWLSLAVVLRRWQAKWPYGVPLTVCPGYGVAAGGGELPFHLPLLDLLLSTAFLPSPGSLSQGPSWVLGPGCESWLCLLPAVQPWTSHQII

SEQ ID NO: 882653 - protein, 585 aa, Homo sapiens
MPVLSEDSGLHETLALLTSQLRPDSNHKEEMGFLRDVFSEKSLSYLMKIHEKLRYYERQSPTPVLHSAVALAEDVMEELQAASVHSDERELLQLLSTPHLRAVLMVHDTVAQKNFDPVLPPLPDNIDEDFDEESVKIVRLVKNKEPLGATIRRDEHSGAVVVARIMRGGAADRSGLVHVGDELREVNGIAVLHKRPDEISQILAQSQGSITLKIIPATQEEDRLKESKVFMRALFHYNPREDRAIPCQEAGLPFQRRQVLEVVSQDDPTWWQAKRVGDTNLRAGLIPSKGFQERRLSYRRAAGTLPSPQSLRKPPYDQPCDKETCDCEGYLKGHYVAGLRRSFRLGCRERLGGSQEGKMSSGAESPELLTYEEVARYQHQPGERPRLVVLIGSLGARLHELKQKVVAENPQHFGVAVPHTTRPRKSHEKEGVEYHFVSKQAFEADLHHNKFLEHGEYKENLYGTSLEAIQAVMAKNKVCLVDVEPEALKQLRTSEFKPYIIFVKPAIQEKRKTPPMSPACEDTAAPFDEQQQEMAASAAFIDRHYGHLVDAVLVKEDLQGAYSQLKVVLEKLSKDTHWVPVSWVR

SEQ ID NO: 882654 - protein, 113 aa, Homo sapiens
MAKNKVCLVDVEPEALKQLRTSEFKPYIIFVKPAIQEKRKTPPMSPACEDTAAPFDEQQQEMAASAAFIDRHYGHLVDAVLVKEDLQGAYSQLKVVLEKLSKDTHWVPVSWVR

SEQ ID NO: 882655 - protein, 260 aa, Homo sapiens
LRLREMKGLVQAGLRRSFRLGCRERLGGSQEGKMSSGAESPELLTYEEVARYQHQPGERPRLVVLIGSLGARLHELKQKVVAENPQHFGVAVPHTTRPRKSHEKEGVEYHFVSKQAFEADLHHNKFLEHGEYKENLYGTSLEAIQAVMAKNKVCLVDVEPEALKQLRTSEFKPYIIFVKPAIQEKRKTPPMSPACEDTAAPFDEQQQEMAASAAFIDRHYGHLVDAVLVKEDLQGAYSQLKVVLEKLSKDTHWVPVSWVR

SEQ ID NO: 882656 - protein, 242 aa, Homo sapiens
SGGPGSGHSRGSRSRSTQSRRDEVPSESERESVLGLLRGAARGICRERSGGDNASMPVLSEDSGLHETLALLTSQLRPDSNHKEEMGFLRDVFSEKSLSYLMKIHEKLRYYERQSPTPVLHSAVALAEDVMEELQAASVHSDERELLQLLSTPHLRAVLMVHDTVAQKNFDPVLPPLPDNIDEDFDEESVKIVRLVKNKEPLGATIRRDEHSGAVVVARIMRGGAADRSGLRLGRWKQRGKY

SEQ ID NO: 882657 - protein, 110 aa, Homo sapiens
MSMTDLLNAEDIKKAVGAFSATDSFDHKKFFQMVGLKKKSADDVKKVFHMLDKDKSGFIEEDELGFILKGFSPDARDLSAKETKMLMAAGDKDGDGKIGVDEFSTLVAES

SEQ ID NO: 882658 - protein, 110 aa, Homo sapiens; identical to SEQ ID NO: 882657

SEQ ID NO: 882659 - protein, 110 aa, Homo sapiens; identical to SEQ ID NO: 882657

SEQ ID NO: 882660 - protein, 98 aa, Homo sapiens
GLPQPSNGATDSFDHKKFFQMVGLKKKSADDVKKVFHMLDKDKSGFIEEDELGFILKGFSPDARDLSAKETKMLMAAGDKDGDGKIGVDEFSTLVAES

SEQ ID NO: 882661 - protein, 107 aa, Homo sapiens [sequence omitted]

SEQ ID NO: 882662 - protein, 107 aa, Homo sapiens [sequence omitted]

SEQ ID NO: 882663 - protein, 172 aa, Homo sapiens
MPGIVELPTLEELKVDEVKISSAVLKAAAHHYGAQCDKPNKEFMLCRWEEKDPRRCLEEGKLVNKCALDFFRQIKRHCAEPFTEYWTCIDYTGQQLFRHCRKQQAKFDECVLDKLGWVRPDLGELSKVTKVKTDRPLPENPYHSRPRPDPSPEIEGDLQPATHGSRFYFWTK

SEQ ID NO: 882664 - protein, 72 aa, Homo sapiens
DTRRRIDGYRFLHPSFQLCFCPLHPSQVTKVKTDRPLPENPYHSRPRPDPSPEIEGDLQPATHGSRFYFWTK

SEQ ID NO: 882665 - protein, 172 aa, Homo sapiens; identical to SEQ ID NO: 882663

SEQ ID NO: 882666 - protein, 172 aa, Homo sapiens; identical to SEQ ID NO: 882663

SEQ ID NO: 882667 - protein, 126 aa, Homo sapiens
MELNKDPRRCLEEGKLVNKCALDFFRQIKRHCAEPFTEYWTCIDYTGQQLFRHCRKQQAKFDECVLDKLGWVRPDLGELSKVTKVKTDRPLPENPYHSRPRPDPSPEIEGDLQPATHGSRFYFWTK

SEQ ID NO: 882668 - protein, 102 aa, Homo sapiens
MRQIKRHCAEPFTEYWTCIDYTGQQLFRHCRKQQAKFDECVLDKLGWVRPDLGELSKVTKVKTDRPLPENPYHSRPRPDPSPEIEGDLQPATHGSRFYFWTK

SEQ ID NO: 882669 - protein, 152 aa, Homo sapiens
MPGIVELPTLEELKVDEVKISSAVLKAAAHHYGAQCDKPNKEFMLCRWEEKDPRRCLEEGKLVNKCALDFFSGQQLFRHCRKQQAKFDECVLDKLGWVRPDLGELSKVTKVKTDRPLPENPYHSRPRPDPSPEIEGDLQPATHGSRFYFWTK

SEQ ID NO: 882670 - protein, 310 aa, Homo sapiens
MNGLSLSELCCLFCCPPCPGRIAAKLAFLPPEATYSLVPEPEPGPGGAGAAPLGTLRASSGAPGRWKLHLTERADFQYSQRELDTIEVFPTKSARGNRVSCMYVRCVPGARYTVLFSHGNAVDLGQMSSFYIGLGSRLHCNIFSYDYSGYGASSGRPSERNLYADIDAAWQALRTRYGISPDSIILYGQSIGTVPTVDLASRYECAAVVLHSPLTSGMRVAFPDTKKTYCFDAFPNIEKVSKITSPVLIIHGTEDEVIDFSHGLALYERCPKAVEPLWVEGAGHNDIELYSQYLERLRRFISQELPSQRA

SEQ ID NO: 882671 - protein, 265 aa, Homo sapiens
MNGLSLSELCCLFCCPPCPGRIAAKLAFLPPEATYSLVPEPEPGPGGAGAAPLGTLRASSGAPGRWKLHLTERADFQYSQRELDTIEVFPTKSARGNRVSCMYVRCVPGARYTVLFSHGNAVDLGQMSSFYIGLGSRLHCNIFSYDYSGYGASSGRPSERNLYADIDAAWQALRTSEGDPGGSSAWAHPRGDQAGGRGAGFPGRKVGGPAGGEPQWMHRAREPDRRAWVCRCRLHMAEVWPGGPPTPWPVEPGSLGTPGLRMGRG

SEQ ID NO: 882672 - protein, 265 aa, Homo sapiens; identical to SEQ ID NO: 882671

SEQ ID NO: 882673 - protein, 209 aa, Homo sapiens
MYVRCVPGARYTVLFSHGNAVDLGQMSSFYIGLGSRLHCNIFSYDYSGYGASSGRPSERNLYADIDAAWQALRTRYGISPDSIILYGQSIGTVPTVDLASRYECAAVVLHSPLTSGMRVAFPDTKKTYCFDAFPNIEKVSKITSPVLIIHGTEDEVIDFSHGLALYERCPKAVEPLWVEGAGHNDIELYSQYLERLRRFISQELPSQRA

SEQ ID NO: 882674 - protein, 337 aa, Homo sapiens
MNGLSLSELCCLFCCPPCPGRIAAKLAFLPPEATYSLVPEPEPGPGGAGAAPLGTLRASSGAPGRWKLHLTERADFQYSQRELDTIEVFPTKSARGNRVSCMYVRCVPGARYTVLFSHGNAVDLGQMSSFYIGLGSRLHCNIFSYDYSGYGASSGRPSERNLYADIDAAWQALRTRYGISPDSIILYGQSIGTVPTVDLASRYECAAVVLHSPLTSGMRVAFPDTKKTYCFDAFPKERPGRGRGRGGARAGREVSPAPRPSRSIEKVSKITSPVLIIHGTEDEVIDFSHGLALYERCPKAVEPLWVEGAGHNDIELYSQYLERLRRFISQELPSQRA

SEQ ID NO: 882675 - protein, 310 aa, Homo sapiens; identical to SEQ ID NO: 882670

SEQ ID NO: 882676 - protein, 295 aa, Homo sapiens
MNGLSLSELCCLFCCPPCPGRIAAKLAFLPPEATYSLVPEPEPGPGGAGAAPLGTLRASSGAPGRWKLHLTERADFQYSQRELDTIEVFPTKSARGNRVSCMYVRCVPGARYTVLFSHGNAVDLGQMSSFYIGLGSRLHCNIFSYDYSGYGASSGRPSERNLYADIDAAWQALRTRYGISPDSIILYGQSIGTVPTVDLASRYECAAVVLHSPLTSGALPPARDSEHPPPLPCRARPGGVVGGGPQVEARPGRRPAMTGLPLWVEGAGHNDIELYSQYLERLRRFISQELPSQRA

SEQ ID NO: 882677 - protein, 136 aa, Homo sapiens
HFRGGGENEAHFRPWGELRRWRCRRPGRGAEGPTDARAGGREPWSAALGPGGAGRGGLPTARHGDLWLRGSLGLGLDRDGAGPWPPNGAAVWGGSWGGALPPARDSEHPHPSPAGPGRAALLAGAPVEARPGRRPP

SEQ ID NO: 882678 - protein, 148 aa, Homo sapiens
MGTDRPRAHAAPWHGWMPRLPGVPSWTVAPPKDPTCHCSPAGLPTARHGDLWLRGSLGLGLDRDGAGPWPPNGAAVWGGSWGGALPPARDSEHPHPSPAGPGRAALLAGAPVEARPGRRDPAPTQGLWTMYRQQSYALLSFWKQEENT

SEQ ID NO: 882679 - protein, 543 aa, Homo sapiens
TFSNKPGSFNCQVCPRNTYSEKGAKECIRCKDDSQFSEEGSSECTERPPCTTKDYFQIHTPCDEEGKTQIMYKWIEPKICREDLTDAIRLPPSGEKKDCPPCNPGFYNNGSSSCHPCPPGTFSDGTKECRPCPAGTEPALGFEYKWWNVLPGNMKTSCFNVGNSKCDGMNGWEVAGDHIQSGAGGSDNDYLILNLHIPGFKPPTSMTGATGSELGRITFVFETLCSADCVLYFMVDINRKSTNVVESWGGTKEKQAYTHIIFKNATFTFTWAFQRTNQGQDNRRFINDMVKIYSITATNAVDGVASSCRACALGSEQSGSSCVPCPPGHYIEKETNQCKECPPDTYLSIHQVYGKEACIPCGPGSKNNQDHSVCYSDCFFYHEKENQSLHYDFSNLSSVGSLMNGPSFTSKGTKYFHFFNISLCGHEGKKMALCTNNITDFTVKEIVAGSDDYTNLVGAFVCQSTIIPSESKGFRAALSSQSIILADTFIGVTVETTLKNINIKEDMFPVPTSQIPDVHFFYKSSTATTSCINGRSTAVKMRC

SEQ ID NO: 882680 - protein, 410 aa, Homo sapiens
EFGSRLGLVSFSILDNNLNTSISAWECSRPWLGVKPAGWEVAGDHIQSGAGGSDNDYLILNLHIPGFKPPTSMTGATGSELGRITFVFETLCSADCVLYFMVDINRKSTNVVESWGGTKEKQAYTHIIFKNATFTFTWAFQRTNQGQDNRRFINDMVKIYSITATNAVDGVASSCRACALGSEQSGSSCVPCPPGHYIEKETNQCKECPPDTYLSIHQVYGKEACIPCGPGSKNNQDHSVCYSDCFFYHEKENQSLHYDFSNLSSVGSLMNGPSFTSKGTKYFHFFNISLCGHEGKKMALCTNNITDFTVKEIVAGSDDYTNLVGAFVCQSTIIPSESKGFRAALSSQSIILADTFIGVTVETTLKNINIKEDMFPVPTSQIPDVHFFYKSSTATTSCINGRSTAVKMRC

SEQ ID NO: 882681 - protein, 415 aa, Homo sapiens
TFSNKPGSFNCQVCPRNTYSEKGAKECIRCKDDSQFSEEGSSECTERPPCTTKDYFQIHTPCDEEGKTQIMYKWIEPKICREDLTDAIRLPPSGEKKDCPPCNPGFYNNGSSSCHPCPPGTFSDGTKECRPCPAGTEPALGFEYKWWNVLPGNMKTSCFNVGNSKCDGMNGWEVAGDHIQSGAGGSDNDYLILNLHIPGFKPPTSMTGATGSELGRITFVFETLCSADCVLYFMVDINRKSTNVVESWGGTKEKQAYTHIIFKNATFTFTWAFQRTNQGQDNRRFINDMVKIYSITATNAVDGVASSCRACALGSEQSGSSCVPCPPGHYIEKETNQCKECPPDTYLSIHQVYGKEACIPCGPGSKNNQDHSVCYSDCFFYHEKENQSLHYDFSNLSSVGSLMNGPSFTSKGTKY

SEQ ID NO: 882682 - protein, 207 aa, Homo sapiens
MVATCLQVVGFVTSFVGWIGVIVTTSTNDWVVTCGYTIPTCRKLDELGSKGLWADCVMATGLYHCKPLVDILILPGYVQACRALMIAASVLGLPAILLLLTVLPCIRMGQEPGVAKYRRAQLAGVLLILLALCALVATIWFPVCAHRETTIVSFGYSLYAGWIGAVLCLVGGCVILCCAGDAQAFGENRFYYTAGSSSPTHAKSAHV

SEQ ID NO: 882683 - protein, 207 aa, Homo sapiens; identical to SEQ ID NO: 882682

SEQ ID NO: 882684 - protein, 133 aa, Homo sapiens
MVATCLQVVGFVTSFVGWIGVIVTTSTNDWVVTCGYTIPTCRKLDELGSKGLWADCVMATGLYHCKPLVDILILPGYVQACRALMIAASVLGLPAILLLLTVLPCIRMGQEPGVAKYRRAQLAGVLLILLDSG

SEQ ID NO: 882685 - protein, 207 aa, Homo sapiens; identical to SEQ ID NO: 882682

SEQ ID NO: 882686 - protein, 207 aa, Homo sapiens; identical to SEQ ID NO: 882682

SEQ ID NO: 882687 - protein, 91 aa, Homo sapiens [sequence omitted]

SEQ ID NO: 882688 - protein, 351 aa, Homo sapiens
DCGPAGKGEAGRDRGREQRGAGPYPRPTRSQEARTTAPGLPRVRSPPAPSAREEDADAAAAMRMEAGEAAPPAGAGGRAAGGWGKWVRLNVGGTVFLTTRQTLCREQKSFLSRLCQGEELQSDRDETGAYLIDRDPTYFGPILNFLRHGKLVLDKDMAEEGVLEEAEFYNIGPLIRIIKDRMEEKDYTVTQVPPKHVYRVLQCQEEELTQMVSTMSDGWRFEQLVNIGSSYNYGSEDQAEFLCVVSKELHSTPNGLSSESSRKTKSTEEQLEEQQQQEEEVEEVEVEQVQVEADAQEKGSRPHPLRPEAELAVRASPRPLARPQSCHPCCYKPEAPGCEAPDHLQGLGVPI

SEQ ID NO: 882689 - protein, 454 aa, Homo sapiens
DCGPAGKGEAGRDRGREQRGAGPYPRPTRSQEARTTAPGLPRVRSPPAPSAREEDADAAAAMRMEAGEAAPPAGAGGRAAGGWGKWVRLNVGGTVFLTTRQTLCREQKSFLSRLCQGEELQSDRDETGAYLIDRDPTYFGPILNFLRHGKLVLDKDMAEEGVLEEAEFYNIGPLIRIIKDRMEEKDYTVTQVPPKHVYRVLQCQEEELTQMVSTMSDGWRFEQLVNIGSSYNYGSEDQAEFLCVVSKELHSTPNGLSSESSRKTKSTEEQLEEQQQQEEEVEEVEVEQVQVEADAQEKGAANPQEDDAKQSRSLPPTPCWSQLQNRGPRGCWGGTRVSSATCLAPHPHNHPFSHFLFAAQSSQDPANLFFIHLFFLLDLICTLPLPSLPLSGFSLCLLTPPSRVCPGPSLPCPPPRPPGPASQSVLPAASCAPSGTSCLPAWGGGAQLHLLCAH

SEQ ID NO: 882690 - protein, 478 aa, Homo sapiens
DCGPAGKGEAGRDRGREQRGAGPYPRPTRSQEARTTAPGLPRVRSPPAPSAREEDADAAAAMRMEAGEAAPPAGAGGRAAGGWGKWVRLNVGGTVFLTTRQTLCREQKSFLSRLCQGEELQSDRDETGAYLIDRDPTYFGPILNFLRHGKLVLDKDMAEEGVLEEAEFYNIGPLIRIIKDRMEEKDYTVTQVPPKHVYRVLQCQEEELTQMVSTMSDGWRFEQLVNIGSSYNYGSEDQAEFLCVVSKELHSTPNGLSSESSRKTKSTEEQLEEQQQQEEEVEEVEVEQVQVEADAQEKGAANPQEDDAKQSRSLPPTPCWSQLQNRGPRGCWGGTRVSSATCLAPHPHNHPFSHFLFAAQSSQDPANLFSLPPLPPPPLPAGGPASSSSTSSSSWISSAPCLFPLCPCPGFLSACSRLHPGSALVPASRALHPGPLALHPRASCLPPPAPLLVPPASQPGEEGRSCTSSVPTNPAGHL

SEQ ID NO: 882691 - protein, 457 aa, Homo sapiens
DCGPAGKGEAGRDRGREQRGAGPYPRPTRSQEARTTAPGLPRVRSPPAPSAREEDADAAAAMRMEAGEAAPPAGAGGRAAGGWGKWVRLNVGGTVFLTTRQTLCREQKSFLSRLCQGEELQSDRDETGAYLIDRDPTYFGPILNFLRHGKLVLDKDMAEEGVLEEAEFYNIGPLIRIIKDRMEEKDYTVTQVPPKHVYRVLQCQEEELTQMVSTMSDGWRFEQLVNIGSSYNYGSEDQAEFLCVVSKELHSTPNGLSSESSRKTKSTEEQLEEQQQQEEEVEEVEVEQVQVEADAQEKAQSSQDPANLFSLPPLLLLRFPLEVLPHLHPPLLPPGSHLHPASSLSAPVRVFSLPAHASIPGLPWSQPPVPSTQAPWPCIPERPACRLLRPFWYLLPPSLGRRGAAAPPLCPLTLPGTSETGPWLQALPPLLSSRPPPHVSSLQVPVRTLSDLRLSLQ

SEQ ID NO: 882692 - protein, 418 aa, Homo sapiens
DCGPAGKGEAGRDRGREQRGAGPYPRPTRSQEARTTAPGLPRVRSPPAPSAREEDADAAAAMRMEAGEAAPPAGAGGRAAGGWGKWVRLNVGGTVFLTTRQTLCREQKSFLSRLCQGEELQSDRDETGAYLIDRDPTYFGPILNFLRHGKLVLDKDMAEEGVLEEAEFYNIGPLIRIIKDRMEEKDYTVTQVPPKHVYRVLQCQEEELTQMVSTMSDGWRFEQLVNIGSSYNYGSEDQAEFLCVVSKELHSTPNGLSSESSRKTKSTEEQLEEQQQQEEEVEEVEVEQVQVEADAQEKGSRPHPLRPEAELAVRASPRPLARPQSCHPWFVAWRCWREGWSEEGAHLLILGLEPSFRLIISTHQSFSSDLALHHPLLTGPTSAPPILLPFPSFFSSCYKPEAPGCEAPDHLQGLGVPI

SEQ ID NO: 882693 - protein, 351 aa, Homo sapiens; identical to SEQ ID NO: 882688

SEQ ID NO: 882694 - protein, 148 aa, Homo sapiens
YSGLGVPSEILYIWYHGVGPESLRTDYTVTQVPPKHVYRVLQCQEEELTQMVSTMSDGWRFEQLVNIGSSYNYGSEDQAEFLCVVSKELHSTPNGLSSESSRKTKSTEEQLEEQQQQEEEVEEVEVEQVQVEADAQEKGAANPQEDDC

SEQ ID NO: 882695 - protein, 191 aa, Homo sapiens
DCGPAGKGEAGRDRGREQRGAGPYPRPTRSQEARTTAPGLPRVRSPPAPSAREEDADAAAAMRMEAGEAAPPAGAGGRAAGGWGKWVRLNVGGTVFLTTRQTLCREQKSFLSRLCQGEELQSDRLPLSGFSLCLLTPPSRVCPGPSLPCPPPRPPGPASQSVLPAASCAPSGTSCLPAWGGGAQLHLLCAH

SEQ ID NO: 882696 - protein, 322 aa, Homo sapiens
DCGPAGKGEAGRDRGREQRGAGPYPRPTRSQEARTTAPGLPRVRSPPAPSAREEDADAAAAMRMEAGEAAPPAGAGGRAAGGWGKWVRLNVGGTVFLTTRQTLCREQKSFLSRLCQGEELQSDRDETGAYLIDRDPTYFGPILNFLRHGKLVLDKDMAEEGVLEEAEFYNIGPLIRIIKDRMEEKDYTVTQVPPKHVYRVLQCQEEELTQMVSTMSDGWRFEQLVNIGSSYNYGSEDQAEFLCVVSKELHSTPNGLSSESSRKTKSTEEQLEEQQQQEEEVEEVEVEQVQVEADAQEKGAANPQEVLEVSKLIRSVHAHSLV

SEQ ID NO: 882697 - protein, 264 aa, Homo sapiens
RRRGCGSRISGGMGRLSWQVAAAAAVGLALTLEALPWVLRWLRSRRRRPRREALFFPSQVTCTEALLRAPGAELAELPEGCPCGLPHGESALSRLLRALLAARASLDLCLFAFSSPQLGRAVQLLHQRGVRVRVVTDCDYMALNGSQIGLLRKAGIQVRHDQDPGYMHHKFAIVDKRVLITGSLNWTTQAIQNNRENVLITEDDEYVRLFLEEFERIWEQFNPTKYTFFPPKKSHGSCAPPVSRAGGRLLSWHRTCGTSSESQT

SEQ ID NO: 882698 - protein, 264 aa, Homo sapiens; identical to SEQ ID NO: 882697

SEQ ID NO: 882699 - protein, 184 aa, Homo sapiens
MASPAASSVRPPRPKKEPQTLVIPKNAAEEQKLKLERLMKNPDKAVPIPEKMSEWAPRPPPEFVRDVMGSSAGAGSGEFHVYRHLRRREYQRQDYMDAMAEKQKLDAEFQKRLEKNKIAAEEQTAKRRKKRQKLKEKKLLAKKMKLEQKKQEGPGQPKEQGSSSSAEASGTEEEEEVPSFTMGR

SEQ ID NO: 882700 - protein, 102 aa, Homo sapiens
MNTLQGPVSFKDVAVDFTQEEWQQLDPDEKIAYGDVMLENYSHLVSVGYDYHQAKHHHGVEVKEVEQGEEPWIMEGEFPCQHSPAFTALKRSLAGGSDCFRL

SEQ ID NO: 882701 - protein, 102 aa, Homo sapiens; identical to SEQ ID NO: 882700

SEQ ID NO: 882702 - protein, 184 aa, Homo sapiens; identical to SEQ ID NO: 882699

SEQ ID NO: 882703 - protein, 200 aa, Homo sapiens
MNTLQGPVSFKDVAVDFTQEEWQQLDPDEKIAYGDVMLENYSHLVSVGYDYHQAKHHHGVEVKEVEQGEEPWIMEGEFPCQHSPGSSAGAGSGEFHVYRHLRRREYQRQDYMDAMAEKQKLDAEFQKRLEKNKIAAEEQTAKRRKKRQKLKEKKLLAKKMKLEQKKQEGPGQPKEQGSSSSAEASGTEEEEEVPSFTMGR

SEQ ID NO: 882704 - protein, 200 aa, Homo sapiens; identical to SEQ ID NO: 882703

SEQ ID NO: 882705 - protein, 200 aa, Homo sapiens; identical to SEQ ID NO: 882703

SEQ ID NO: 882706 - protein, 200 aa, Homo sapiens; identical to SEQ ID NO: 882703

SEQ ID NO: 882707 - protein, 164 aa, Homo sapiens
MLENYSHLVSVGYDYHQAKHHHGVEVKEVEQGEEPWIMEGEFPCQHSPGSSAGAGSGEFHVYRHLRRREYQRQDYMDAMAEKQKLDAEFQKRLEKNKIAAEEQTAKRRKKRQKLKEKKLLAKKMKLEQKKQEGPGQPKEQGSSSSAEASGTEEEEEVPSFTMGR

SEQ ID NO: 882708 - protein, 184 aa, Homo sapiens; identical to SEQ ID NO: 882699

SEQ ID NO: 882709 - protein, 184 aa, Homo sapiens; identical to SEQ ID NO: 882699

SEQ ID NO: 882710 - protein, 214 aa, Homo sapiens
MPPFPRGLKTHYVDLVPGSVRRWPQLWGWSMLPTHSSGKWGPRHRGSAPTAAPGALVFWEGLGVCTRRPGPGTSPGAGSQGHRVCGKRCGGRAGHRRVSRRRLQAGLSQSRRRGIPSRTGVLSPTAVISSRSGRGSKQNRLREAGLGQVGGAPPCMTATVGAFRRLTAVGASGEKRGGTAVSSCGAASNWHPGTGPVQRRHLQRAGQPGAGACA

SEQ ID NO: 882711 - protein, 184 aa, Homo sapiens; identical to SEQ ID NO: 882699

SEQ ID NO: 882712 - protein, 184 aa, Homo sapiens; identical to SEQ ID NO: 882699

SEQ ID NO: 882713 - protein, 184 aa, Homo sapiens; identical to SEQ ID NO: 882699

SEQ ID NO: 882714 - protein, 115 aa, Homo sapiens
MNTLQGPVSFKDVAVDFTQEEWQQLDPDEKIAYGDVMLENYSHLVSVGYDYHQAKHHHGVEVKEVEQGEEPWIMEGEFPCQHSPGKLVDYHMLKNTHPRPLGVTKELFICTRYPQ

SEQ ID NO: 882715 - protein, 115 aa, Homo sapiens; identical to SEQ ID NO: 882714

SEQ ID NO: 882716 - protein, 475 aa, Homo sapiens
MVDTEMPFWPTNFGISSVDLSVMEDHSHSFDIKPFTTVDFSSISTPHYEDIPFTRTDPVVADYKYDLKLQEYQSAIKVEPASPPYYSEKTQLYNKPHEEPSNSLMAIECRVCGDKASGFHYGVHACEGCKGFFRRTIRLKLIYDRCDLNCRIHKKSRNKCQYCRFQKCLAVGMSHNAIRFGRMPQAEKEKLLAEISSDIDQLNPESADLRALAKHLYDSYIKSFPLTKAKARAILTGKTTDKSPFVIYDMNSLMMGEDKIKFKHITPLQEQSKEVAIRIFQGCQFRSVEAVQEITEYAKSIPGFVNLDLNDQVTLLKYGVHEIIYTMLASLMNKDGVLISEGQGFMTREFLKSLRKPFGDFMEPKFEFAVKFNALELDDSDLAIFIAVIILSGDRPGLLNVKPIEDIQDNLLQALELQLKLNHPESSQLFAKLLQKMTDLRQIVTEHVQLLQVIKKTETDMSLHPLLQEIYKDLY

SEQ ID NO: 882717 - protein, 477 aa, Homo sapiens
MTMVDTEMPFWPTNFGISSVDLSVMEDHSHSFDIKPFTTVDFSSISTPHYEDIPFTRTDPVVADYKYDLKLQEYQSAIKVEPASPPYYSEKTQLYNKPHEEPSNSLMAIECRVCGDKASGFHYGVHACEGCKGFFRRTIRLKLIYDRCDLNCRIHKKSRNKCQYCRFQKCLAVGMSHNAIRFGRMPQAEKEKLLAEISSDIDQLNPESADLRALAKHLYDSYIKSFPLTKAKARAILTGKTTDKSPFVIYDMNSLMMGEDKIKFKHITPLQEQSKEVAIRIFQGCQFRSVEAVQEITEYAKSIPGFVNLDLNDQVTLLKYGVHEIIYTMLASLMNKDGVLISEGQGFMTREFLKSLRKPFGDFMEPKFEFAVKFNALELDDSDLAIFIAVIILSGDRPGLLNVKPIEDIQDNLLQALELQLKLNHPESSQLFAKLLQKMTDLRQIVTEHVQLLQVIKKTETDMSLHPLLQEIYKDLY

SEQ ID NO: 882718 - protein, 505 aa, Homo sapiens
MGETLGDSPIDPESDSFTDTLSANISQEMTMVDTEMPFWPTNFGISSVDLSVMEDHSHSFDIKPFTTVDFSSISTPHYEDIPFTRTDPVVADYKYDLKLQEYQSAIKVEPASPPYYSEKTQLYNKPHEEPSNSLMAIECRVCGDKASGFHYGVHACEGCKGFFRRTIRLKLIYDRCDLNCRIHKKSRNKCQYCRFQKCLAVGMSHNAIRFGRMPQAEKEKLLAEISSDIDQLNPESADLRALAKHLYDSYIKSFPLTKAKARAILTGKTTDKSPFVIYDMNSLMMGEDKIKFKHITPLQEQSKEVAIRIFQGCQFRSVEAVQEITEYAKSIPGFVNLDLNDQVTLLKYGVHEIIYTMLASLMNKDGVLISEGQGFMTREFLKSLRKPFGDFMEPKFEFAVKFNALELDDSDLAIFIAVIILSGDRPGLLNVKPIEDIQDNLLQALELQLKLNHPESSQLFAKLLQKMTDLRQIVTEHVQLLQVIKKTETDMSLHPLLQEIYKDLY

SEQ ID NO: 882719 - protein, 505 aa, Homo sapiens; identical to SEQ ID NO: 882718

SEQ ID NO: 882720 - protein, 529 aa, Homo sapiens
PRRARLGPTRLRRGQAGPSALGARARAAAAAWGAWVGLEDTGEGRHAAVAAEMTMVDTEMPFWPTNFGISSVDLSVMEDHSHSFDIKPFTTVDFSSISTPHYEDIPFTRTDPVVADYKYDLKLQEYQSAIKVEPASPPYYSEKTQLYNKPHEEPSNSLMAIECRVCGDKASGFHYGVHACEGCKGFFRRTIRLKLIYDRCDLNCRIHKKSRNKCQYCRFQKCLAVGMSHNAIRFGRMPQAEKEKLLAEISSDIDQLNPESADLRALAKHLYDSYIKSFPLTKAKARAILTGKTTDKSPFVIYDMNSLMMGEDKIKFKHITPLQEQSKEVAIRIFQGCQFRSVEAVQEITEYAKSIPGFVNLDLNDQVTLLKYGVHEIIYTMLASLMNKDGVLISEGQGFMTREFLKSLRKPFGDFMEPKFEFAVKFNALELDDSDLAIFIAVIILSGDRPGLLNVKPIEDIQDNLLQALELQLKLNHPESSQLFAKLLQKMTDLRQIVTEHVQLLQVIKKTETDMSLHPLLQEIYKDLY

SEQ ID NO: 882721 - protein, 477 aa, Homo sapiens; identical to SEQ ID NO: 882717

SEQ ID NO: 882722 - protein, 250 aa, Homo sapiens
MTMVDTEMPFWPTNFGISSVDLSVMEDHSHSFDIKPFTTVDFSSISTPHYEDIPFTRTDPVVADYKYDLKLQEYQSAIKVEPASPPYYSEKTQLYNKPHEEPSNSLMAIECRVCGDKASGFHYGVHACEGCKGFFRRTIRLKLIYDRCDLNCRIHKKSRNKCQYCRFQKCLAVGMSHNAIRFGRMPQAEKEKLLAEISSDIDQLNPESADLRALAKHLYDSYIKSFPLTKAKARAILTGKTTDKSTAQVC

SEQ ID NO: 882723 - protein, 266 aa, Homo sapiens
MTMVDTEMPFWPTNFGISSVDLSVMEDHSHSFDIKPFTTVDFSSISTPHYEDIPFTRTDPVVADYKYDLKLQEYQSAIKVEPASPPYYSEKTQLYNKPHEEPSNSLMAIECRVCGDKASGFHYGVHACEGCKGFFRRTIRLKLIYDRCDLNCRIHKKSRNKCQYCRFQKCLAVGMSHNAIRFGRMPQAEKEKLLAEISSDIDQLNPESADLRALAKHLYDSYIKSFPLTKAKARAILTGKTTDKSVSSLLLSSLGEAGSCFGFLFL

SEQ ID NO: 882724 - protein, 112 aa, Homo sapiens
ICNPLQYHIMMSKKLCIQMTTGAFIAGNLHSMIHVGLVFRLVFCGSNHINHFYCDILPLYRLSCVDPYINELVLFIFSGSVQVFTIGSVLISYLYILLTIFKMKSKEGRAKA

SEQ ID NO: 882725 - protein, 524 aa, Homo sapiens
MAGGTRGSCGRSGPAPSTASPASAAAMAEDSESAASQQSLELDDQDTCGIDGDNEEETEHAKGSPGGYLGAKKKKKKQKRKKEKPNSGGTKSDSASDSQEIKIQQPSKNPSVPMQKLQDIQRAMELLSACQGPARNIDEAAKHRYQFWDTQPVPKLDEVITSHGAIEPDKDNVRQEPYSLPQGFMWDTLDLSDAEVLKELYTLLNENYVEDDDNMFRFDYSPEFLLWALRPPGWLLQWHCGVRVSSNKKLVGFISAIPANIRIYDSVKKMVEINFLCVHKKLRSKRVAPVLIREITRRVNLEGIFQAVYTAGVVLPKPIATCRYWHRSLNPRKLVEVKFSHLSRNMTLQRTMKLYRLPDVTKTSGLRPMEPKDIKSVRELINTYLKQFHLAPVMDEEEVAHWFLPREHIIDTFVVESPNGKLTDFLSFYTLPSTVMHHPAHKSLKAAYSFYNIHTETPLLDLMSDALILAKSKGFDVFNALDLMENKTFLEKLKFGIGDGNLQYYLYNWRCPGTDSEKVGLVLQ

SEQ ID NO: 882726 - protein, 521 aa, Homo sapiens
MAGGTRGSCGRSGPAPSTASPASAAAMAEDSESAASQQSLELDDQDTCGIDGDNEEETEHAKGSPGGYLGAKKKKKKQKRKKEKPNSGGTKSDSASDSQEIKIQQPSKNPSVPMQKLQDIQRAMELLSACQGPARNIDEAAKHRYQFWDTQPVPKLDEVITSHGAIEPDKDNVRQEPYSLPQGFMWDTLDLSDAEVLKELYTLLNENYVEDDDNMFRFDYSPEFLLWALRPPGWLLQWHCGVRVSSNKKLVGFISAIPANIRIYDSVKKMVEINFLCVHKKLRSKRVAPVLIREITRRVNLEGIFQAVYTAGVVLPKPIATCRYWHRSLNPRKLVEVKFSHLSRNMTLQRTMKLYRLPDVTKTSGLRPMEPKDIKSVRELINTYLKQFHLAPVMDEEEVAHWFLPREHIIDTFVVESPNGKLTDFLSFYTLPSTVMHHPAHKSLKAAYSFYNIHTETPLLDLMSDALILAKSKGFDVFNALDLMENKTFLEKLKFGIGDGNLQYYLYNWRCPGTDSEKKVC

SEQ ID NO: 882727 - protein, 485 aa, Homo sapiens
MRRRRSTPKEVLEGIWEPKRKRRNRREKRRNQIPEAPSQTRHLIPRRLKFSSLRNTTPSGSRFQREQPWNPSVPMQKLQDIQRAMELLSACQGPARNIDEAAKHRYQFWDTQPVPKLDEVITSHGAIEPDKDNVRQEPYSLPQGFMWDTLDLSDAEVLKELYTLLNENYVEDDDNMFRFDYSPEFLLWALRPPGWLLQWHCGVRVSSNKKLVGFISAIPANIRIYDSVKKMVEINFLCVHKKLRSKRVAPVLIREITRRVNLEGIFQAVYTAGVVLPKPIATCRYWHRSLNPRKLVEVKFSHLSRNMTLQRTMKLYRLPDVTKTSGLRPMEPKDIKSVRELINTYLKQFHLAPVMDEEEVAHWFLPREHIIDTFVVESPNGKLTDFLSFYTLPSTVMHHPAHKSLKAAYSFYNIHTETPLLDLMSDALILAKSKGFDVFNALDLMENKTFLEKLKFGIGDGNLQYYLYNWRCPGTDSEKVGLVLQ

SEQ ID NO: 882728 - protein, 411 aa, Homo sapiens
MQKLQDIQRAMELLSACQGPARNIDEAAKHRYQFWDTQPVPKLDEVITSHGAIEPDKDNVRQEPYSLPQGFMWDTLDLSDAEVLKELYTLLNENYVEDDDNMFRFDYSPEFLLWALRPPGWLLQWHCGVRVSSNKKLVGFISAIPANIRIYDSVKKMVEINFLCVHKKLRSKRVAPVLIREITRRVNLEGIFQAVYTAGVVLPKPIATCRYWHRSLNPRKLVEVKFSHLSRNMTLQRTMKLYRLPDVTKTSGLRPMEPKDIKSVRELINTYLKQFHLAPVMDEEEVAHWFLPREHIIDTFVVESPNGKLTDFLSFYTLPSTVMHHPAHKSLKAAYSFYNIHTETPLLDLMSDALILAKSKGFDVFNALDLMENKTFLEKLKFGIGDGNLQYYLYNWRCPGTDSEKVGLVLQ

SEQ ID NO: 882729 - protein, 539 aa, Homo sapiens
MAGGTRGSCGRSGPAPSTASPASAAAMAEDSESAASQQSLELDDQDTCGIDGDNEEETEHAKGSPGGYLGAKKKKKKQKRKKEKPNSGGTKSDSASDSQEIKIQQPSKNPSVPMQKLQDIQRAMELLSACQGPARNIDEAAKHRYQFWDTQPVPKLDEVITSHGAIEPDKDNVRQEPYSLPQGFMWDTLDLSDAEVLKELYTLLNENYVEDDDNMFRFDYSPEFLLWALRPPGWLLQWHCGVRVSSNKKLVGFISAIPANIRIYDSVKKMVEINFLCVHKKLRSKRVAPVLIREITRRVNLEGIFQAVYTAGVVLPKPIATCRYWHRSLNPRKLVEVKFSHLSRNMTLQRTMKLYRLPDVTKTSGLRPMEPKDIKSVRELINTYLKQFHLAPVMDEEEVAHWFLPREHIIDTFVVESPNGKLTDFLSFYTLPSTVMHHPAHKSLKAAYSFYNIHTETPLLDLMSDALILAKSKGFDVFNALDLMENKTFLEKLKFGIGDGNLQYYLYNWRCPGTDSEKGSGNFVNANGKLLPDVCRRPP

SEQ ID NO: 882730 - protein, 156 aa, Homo sapiens [sequence omitted]

SEQ ID NO: 882731 - protein, 539 aa, Homo sapiens; identical to SEQ ID NO: 882729

SEQ ID NO: 882732 - protein, 539 aa, Homo sapiens; identical to SEQ ID NO: 882729

SEQ ID NO: 882733 - protein, 145 aa, Homo sapiens
CLSPLGRQPSLLIPEAELPLPAVPSENQLTAGWLTCHSDQNLWLLTSKMSVDFENGQGWSNHCLSQASLAYLSSEGLSFRQQSLLEGIPLLASFLFSLHMSSSFLSLSSNSYASSDPSDQPSAWIIAQENAETMACQAGCSGSHL

SEQ ID NO: 882734 - protein, 118 aa, Homo sapiens
MGRSRSRSSSRSKHTKSSKHNKKRSRSRSRSRDKERVRKRSKSRESKRNRRRESRSRSRSTNTAVSRRERDRERASSPPDRIDIFGRTVSKRSSLDEKQKREEEEKKAEFERQRKIRQ

SEQ ID NO: 882735 - protein, 103 aa, Homo sapiens
MAQFVRNLVEKTPALVNAAVTYSKPRLATFWYYAKVELVPPTPAEIPRAIQSLKKIVNSAQTGSFKQLTVKEAVLNGLVATEVLMWFYVGEIIGKRGIIGYDV

SEQ ID NO: 882736 - protein, 103 aa, Homo sapiens; identical to SEQ ID NO: 882735

SEQ ID NO: 882737 - protein, 103 aa, Homo sapiens; identical to SEQ ID NO: 882735

SEQ ID NO: 882738 - protein, 103 aa, Homo sapiens; identical to SEQ ID NO: 882735

SEQ ID NO: 882739 - protein, 103 aa, Homo sapiens; identical to SEQ ID NO: 882735

SEQ ID NO: 882740 - protein, 103 aa, Homo sapiens; identical to SEQ ID NO: 882735

SEQ ID NO: 882741 - protein, 103 aa, Homo sapiens; identical to SEQ ID NO: 882735

SEQ ID NO: 882742 - protein, 103 aa, Homo sapiens; identical to SEQ ID NO: 882735

SEQ ID NO: 882743 - protein, 103 aa, Homo sapiens; identical to SEQ ID NO: 882735

SEQ ID NO: 882744 - protein, 130 aa, Homo sapiens
MSRSVAVVLISCRWAGGSGRRTLHSRTMAQFVRNLVEKTPALVNAAVTYSKPRLATFWYYAKVELVPPTPAEIPRAIQSLKKIVNSAQTGSFKQLTVKEAVLNGLVATEVLMWFYVGEIIGKRGIIGYDV

SEQ ID NO: 882745 - protein, 103 aa, Homo sapiens; identical to SEQ ID NO: 882735

SEQ ID NO: 882746 - protein, 87 aa, Homo sapiens
EMLRVVSNIIANDAPWPMISPTVKPHQHLRGQQTIQHSFLNCELFEATSLSTMDYFFQALNSFRRVTFSRRFGATDSPFQNHGPICP

SEQ ID NO: 882747 - protein, 87 aa, Homo sapiens; identical to SEQ ID NO: 882746

SEQ ID NO: 882748 - protein, 103 aa, Homo sapiens; identical to SEQ ID NO: 882735

SEQ ID NO: 882749 - protein, 103 aa, Homo sapiens; identical to SEQ ID NO: 882735

SEQ ID NO: 882750 - protein, 103 aa, Homo sapiens; identical to SEQ ID NO: 882735

SEQ ID NO: 882751 - protein, 278 aa, Homo sapiens
  misc_feature (209)..(209): Xaa can be any naturally occurring amino acid
MAQFVRNLVEKTPALVNAAVTYSKPRLATFWYYAKVELVPPTPAEIPRAIQSLKKIVNSAQTGSFKQLTVKEAVLNGLVATEVLMWFYVGEIIRSQGTIAYDVRTPMFSIGPATSEQQSAVAPGGIALPGPRSISGPPPPSIFSSPATQPRPNPPPLPLPKDYRMQPPEGIGGRREHPRTGKRVPTASTALNVPPVPRSRDDFSRTRVXTIALSAPIPRISAPPPSLSLVSHARPNSVTMLGSVYCVGHKYTHERPGRSSSTPADGAARAKGPTRARG

SEQ ID NO: 882752 - protein, 125 aa, Homo sapiens
MAQFVRNLVEKTPALVNAAVTYSKPRLATFWYYAKVELVPPTPAEIPRAIQSLKKIVNSAQTGSFKQLTVKKKKQHLRILNSSLLSDDQAFLWTSLNNSATVLCWRTLGLLMQCVHLGALWRKNC

SEQ ID NO: 882753 - protein, 103 aa, Homo sapiens; identical to SEQ ID NO: 882735

SEQ ID NO: 882754 - protein, 103 aa, Homo sapiens; identical to SEQ ID NO: 882735

SEQ ID NO: 882755 - protein, 103 aa, Homo sapiens; identical to SEQ ID NO: 882735

SEQ ID NO: 882756 - protein, 103 aa, Homo sapiens; identical to SEQ ID NO: 882735

SEQ ID NO: 882757 - protein, 103 aa, Homo sapiens; identical to SEQ ID NO: 882735

SEQ ID NO: 882758 - protein, 103 aa, Homo sapiens; identical to SEQ ID NO: 882735

SEQ ID NO: 882759 - protein, 103 aa, Homo sapiens; identical to SEQ ID NO: 882735

SEQ ID NO: 882760 - protein, 103 aa, Homo sapiens; identical to SEQ ID NO: 882735

SEQ ID NO: 882761 - protein, 126 aa, Homo sapiens
  misc_feature (5)..(5): Xaa can be any naturally occurring amino acid
WPGPXGGSFLAGGSGRRTLHSRTMAQFVRNLVEKTPALVNAAVTYSKPRLATFWYYAKVELVPPTPAEIPRAIQSLKKIVNSAQTGSFKQLTVKEAVLNGLVATEVLMWFYVGEIIGKRGIIGYDV

SEQ ID NO: 882762 - protein, 103 aa, Homo sapiens; identical to SEQ ID NO: 882735

SEQ ID NO: 882763 - protein, 121 aa, Homo sapiens
MAQFVRNLVEKTPALVNGIGSSVWNYLLELCVCLKAAVTYSKPRLATFWYYAKVELVPPTPAEIPRAIQSLKKIVNSAQTGSFKQLTVKEAVLNGLVATEVLMWFYVGEIIGKRGIIGYDV

SEQ ID NO: 882764 - protein, 103 aa, Homo sapiens; identical to SEQ ID NO: 882735

SEQ ID NO: 882765 - protein, 82 aa, Homo sapiens
GSLHKVTDKWCHGSGMESPSPPAEIPRAIQSLKKIVNSAQTGSFKQLTVKEAVLNGLVATEVLMWFYVGEIIGKRGIIGYDV

SEQ ID NO: 882766 - protein, 103 aa, Homo sapiens; identical to SEQ ID NO: 882735

SEQ ID NO: 882767 - protein, 174 aa, Homo sapiens
MAQFVRNLVEKTPALVNAAVTYSKPRLATFWYYAKVELVPPTPAEIPRAIQSLKKIVNSAQTGSFKQLTVKEAVLNGLVATEVLMWFYVGEFIDRWGLIVYEVCRPTGTVGLCLTSDMARCSDISPPACIPELRTSRHPVFARHRPSRRASASGRLRDERFRPRTCGPPHVLRP

SEQ ID NO: 882768 - protein, 77 aa, Homo sapiens
MAQFVRNLVEKTPALVNAAVTYSKPRLATFWYYAKVELVPPTPAEIPRAIQSLKKIVNSAQTGSFKQLTVRSCDVVH

SEQ ID NO: 882769 - protein, 558 aa, Homo sapiens
MAQDSVDLSCDYQFWMQKLSVWDQASTLETQQDTCLHVAQFQEFLRKMYEALKEMDSNTVIERFPTIGQLLAKACWNPFILAYDESQKILIWCLCCLINKEPQNSGQSKLNSWIQGVLSHILSALRFDKEVALFTQGLGYAPIDYYPGLLKNMVLSLASELRENHLNGFNTQRRMAPERVASLSRVCVPLITLTDVDPLVEALLICHGREPQEILQPEFFEAVNEAILLKKISLPMSAVVCLWLRHLPSLEKAMLHLFEKLISSERNCLRRIECFIKDSSLPQAACHPAIFRVVDEMFRCALLETDGALEIIATIQVFTQCFVEALEKASKQLRFALKTYFPYTSPSLAMVLLQDPQDIPRGHWLQTLKHISELLREAVEDQTHGSCGGPFESWFLFIHFGGWAEMVAEQLLMSAAEPPTALLWLLAFYYGPRDGRQQRAQTMVQVKAVLGHLLAMSRSSSLSAQDLQTVAGQGTDTDLRAPAQQLIRHLLLNFLLWAPGGHTIAWDVITLMAHTAEITHEIIGFLDQTLYRWNRLGIESPRSEKLARELLKELRTQV

SEQ ID NO: 882770 - protein, 558 aa, Homo sapiens; identical to SEQ ID NO: 882769

SEQ ID NO: 882771 - protein, 115 aa, Homo sapiens
MAQDSVDLSCDYQFWMQKLSVWDQASTLETQQDTCLHVAQFQEFLRKMYEALKEMDSNTVIERFPTIGQLLAKACWNPFILAYDESQKILIWCLCCLINKEPQNSGQSKLNSWIQ

SEQ ID NO: 882772 - protein, 253 aa, Homo sapiens
SHFCLKFCLFLSERKKISLPMSAVVCLWLRHLPSLEKAMLHLFEKLISSERNCLRRIECFIKDSSLPQAACHPAIFRVVDEMFRCALLETDGALEIIATIQVFTQCFVEALEKASKQLRFALKTYFPYTSPSLAMVLLQDPQDIPRGHWLQTLKHISELLREAVEDQTHGSCGGPFESWFLFIHFGGWAEMVAEQLLMSAAEPPTALLWLLAFYYGPRDGRQQRAQTMAQLNQLVAYPRIVCWAWRHCLCGCP

SEQ ID NO: 882773 - protein, 558 aa, Homo sapiens; identical to SEQ ID NO: 882769

SEQ ID NO: 882774 - protein, 558 aa, Homo sapiens; identical to SEQ ID NO: 882769

SEQ ID NO: 882775 - protein, 262 aa, Homo sapiens [sequence omitted]

SEQ ID NO: 882776 - protein, 558 aa, Homo sapiens; identical to SEQ ID NO: 882769

SEQ ID NO: 882777 - protein, 411 aa, Homo sapiens
MAQDSVDLSCDYQFWMQKLSVWDQASTLETQQDTCLHVAQFQEFLRKMYEALKEMDSNTVIERFPTIGQLLAKACWNPFILAYDESQKILIWCLCCLINKEPQNSGQSKLNSWIQGVLSHILSALRFDKEVALFTQGLGYAPIDYYPGLLKNMVLSLASELRENHLNGFNTQRRMAPERVASLSRVCVPLITLTDVDPLVEALLICHGREPQEILQPEFFEAVNEAILLKKISLPMSAVVCLWLRHLPSLEKAMLHLFEKLISSERNCLRRIECFIKDSSLPQAACHPAIFRVVDEMFRCALLETDGALEIIATIQVFTQCFVEALEKASKQLRFALKTYFPYTSPSLAMVLLQDPQDIPRGHWLQTLKHISELLREAVEDQTHGSCGGPFESWFLFIHPAKRRPFFPKVI

SEQ ID NO: 882778 - protein, 245 aa, Homo sapiens
MAQDSVDLSCDYQFWMQKLSVWDQASTLETQQDTCLHVAQFQEFLRKMYEALKEMDSNTVIERFPTIGQLLAKACWNPFILAYDESQKILIWCLCCLINKEPQNSGQSKLNSWIQGVLSHILSALRFDKEVALFTQGLGYAPIDYYPGLLKNMVLSLASELRENHLNGFNTQRRMAPERVASLSRVCVPLITLTDVDPLVEALLICHGREPQEILQPEFFEAVNEAILLCREDTQCCWGKTPVSI

SEQ ID NO: 882779 - protein, 131 aa, Homo sapiens
MAQDSVDLSCDYQFWMQKLSVWDQASTLETQQDTCLHVAQFQEFLRKMYEALKEMDSNTVIERFPTIGQLLAKACWNPFILAYDESQKILIWCLCCLINKEPQNSGQSKLNSWIQTETSPLPGSKACWPSD

SEQ ID NO: 882780 - protein, 180 aa, Homo sapiens
MAAAEEEDGGPEGPNRERGGAGATFECNICLETAREAVVSVCGHLYCWPCLHQWLETRPERQECPVCKAGISREKVVPLYGRGSQKPQDPRLKTPPRPQGQRPAPESRGGFQPFGDTGGFHFSFGVGAFPFGFFTTVFNAHEPFRRGTGVDLGQGHPASSWQDSLFLFLAIFFFFWLLSI

SEQ ID NO: 882781 - protein, 180 aa, Homo sapiens; identical to SEQ ID NO: 882780

SEQ ID NO: 882782 - protein, 180 aa, Homo sapiens; identical to SEQ ID NO: 882780

SEQ ID NO: 882783 - protein, 180 aa, Homo sapiens; identical to SEQ ID NO: 882780

SEQ ID NO: 882784 - protein, 180 aa, Homo sapiens; identical to SEQ ID NO: 882780

SEQ ID NO: 882785 - protein, 180 aa, Homo sapiens; identical to SEQ ID NO: 882780

SEQ ID NO: 882786 - protein, 111 aa, Homo sapiens
LILGFSSVFFNYRERVKSSHLCETCLIICRHLCMTPSVFHCLDCTALVPPDPHPPITFSGVLNFLTNFFNVDLGLKRIVSLGSVTDTKTTNSGLTCQISERLFLTVLLPQI

SEQ ID NO: 882787 - protein, 191 aa, Homo sapiens
FFVVIGIAPIFILYELDSPLCWNEVFIGYGSALGSASFLTSFLGIWLFSYCMEDIHMAFIGIFTTMTGMAMTAFASTTLMMFLARVPFLFTIVPFSVLRSMLSKVVRSTEQGTLFACIAFLETLGGVTAVSTFNGIYSATVAWYPGFTFLLSAGLLLLPAISLCVVKCTSWNEGSYELLIQEESSEDASDR

SEQ ID NO: 882788 - protein, 193 aa, Homo sapiens
FFVVIGIAPIFILYELDSPLCWNEVFIGYGSALGSASFLTSFLGIWLFSYCMEDIHMAFIGIFTTMTGMAMTAFASTTLMMFLARVPFLFTIVPFSVLRSMLSKVVRSTEQGTLFACIAFLETLGGVTAVSTFNGIYSATVAWYPGFTFLLSAGLLLLPAISLCVVKCTSWNEGSYELLIQEESSEDASDRAC

SEQ ID NO: 882789 - protein, 234 aa, Homo sapiens
  misc_feature (14)..(14): Xaa can be any naturally occurring amino acid
ILPHTSYKYLLELXIAVTIVFQSYRFYSANQSNFSTNVSLERNWTGNATLIPGSILSFETTTLWPITTINYITVAFIFSKGKPFRKPIYTNYIFSFLLLAALGLTIFILFSDFQVIYRGMELIPTITSWRVLILVVALTQFCVAFFAEDSILQNHELWLLIKREFGFYSKSQYRTWQKKLAEDSTWPPINRTDYSGDGKNGFYINGGYESHEQIPKRKLKLGGQPTEQHFWARL

SEQ ID NO: 882790 - protein, 734 aa, Homo sapiens
MGSVTSSNTTSACCWQAAETQHGGLKSLYLCECLMKECDFPSLNDQPLKQLEGKQLEQDPMDIKRPSNNLITLPRNQCHQTPPKNGRLIQPQIRTFTPPQSPKYILMCTGRGSESSVTYPKQSQLDSGFFLRAIEARAARRNRPAWNICWDLCYLQNPDFEEHFSTFLMNTVFHKTWEPTRNSPQACPTLRPFTDEPEKVRTLGNKSHSLISPHIPSGAPDLPEMASGSGLLPGRSSTDVLLPSAPTPHPRGPMALERRRSWISSEIISRFFRAILYSPFARVSLACRSSKSFSVADQENRRLSEDYPASLKMLSEGQVQVHFLPIILLQGIFQDMTEDLITIVTAIHSPDKISHHHPQITIQVTTSEYPKTLTGGTNPIREAKMGIRHTKVPQSRHLVPSTVVLKVELASKSPWVLRLSSLDSNLRVSNSVGLEWDLVYSGLQVMLMLLVLRACCENHWPSTTEKVTEWQLQSSETTEDPTETILRSENSVKPVSPLSPYSKLAHVILCYPRKVKLRVQKNLISDEAQSYTYLELHIVLCLEFKIRPAEDRKESHQSNKYSDHNQLHKMNKRHQLPLARSSFQYLVNSLQGRDMSVMLLALETDRHQMERLGSPRAILTGGPSQDTGNPHTHILGTLQLSSCSSSVGRLFRASQVIPSSKGGLVCSPNEVGSPGDEEQLRLEKGLLKPPPLLKSTGEEREAPLLPHSTARPPLGGGLRLVLPNLVQRLELLVG

SEQ ID NO: 882791 - protein, 97 aa, Homo sapiens
PKGAQGEEYVCEWASEGTGKMSQQKEHEHPCKGVWLERQGGHGGGLEATLWNAQMYILTFGQTGATQDYDLSLYSSRSLKRLAKYNHKIYFLKQVNG

SEQ ID NO: 882792 - protein, 94 aa, Homo sapiens
PKGAQGEEYVCEWASEGTGKMSQQKEHEHPCKGVWLERQGGHGGGLEATLWNAQMYILTFGQTGATQDYDLSLYSSRSLKREMKMNCVTDAVDY

SEQ ID NO: 882793 - protein, 716 aa, Homo sapiens
MGSVTSSNTTSACCWQAAETQHGGLKSLYLCECLMKECDFPSLNDQPLKQLEGKQLEQDPMDIKRPSNNLITLPRNQCHQTPPKNGRLIQPQIRTFTPPQSPKYILMCTGRGSESSVTYPKQSQLDSGFFLRAIEARAARRNRPAWNICWDLCYLQNPDFEEHFSTFLMNTVFHKTWEPTRNSPQACPTLRPFTDEPEKVRTLGNKSHSLISPHIPSGAPDLPEMASGSGLLPGRSSTDVLLPSAPTPHPRGPMALERRRSWISSEIISRFFRAILYSPFARVSLACRSSKSFSVADQENRRLSEDYPASLKMLSEGQVQVHFLPIILLQGIFQDMTEDLITIVTAIHSPDKISHHHPQITIQVTTSEYPKTLTGGTNPIREAKMGIRHTKVPQSRHLVPSTVVLKVELASKSPWVLRLSSLDSNLRVSNSVGLEWDLVYSGLQVMLMLLVLRACCENHWPSTTEKVTEWQLQSSETTEDPTETILRSENSVKPVSPLSPYSKLAHVILCYPRKVKLRVQKNLISDEAQSYTYLELHIVLALSSDHNQLHKMNKRHQLPLARSSFQYLVNSLQGRDMSVMLLALETDRHQMERLGSPRAILTGGPSQDTGNPHTHILGTLQLSSCSSSVGRLFRASQVIPSSKGGLVCSPNEVGSPEDEEQLRLEKGLLKPPPLLKSTGEEREAPLLPHSTARPPLGGGLRLVLPNLVQRLELLVG

SEQ ID NO: 882794 - protein, 734 aa, Homo sapiens; identical to SEQ ID NO: 882790

SEQ ID NO: 882795 - protein, 712 aa, Homo sapiens
MGSVTSSNTTSACCWQAAETQHGGLKSLYLCECLMKECDFPSLNDQPLKQLEGKQLEQDPMDIKRPSNNLITLPRNQCHQTPPKNGRLIQPQIRTFTPPQSPKYILMCTGRGSESSVTYPKQSQLDSGFFLRAIEARAARRNRPAWNICWDLCYLQNPDFEEHFSTFLMNTVFHKTWEPTRNSPQACPTLRPFTDEPEKVRTLGNKSHSLISPHIPSGAPDLPEMASGSGLLPGRSSTDVLLPSAPTPHPRGPMALERRRSWISSEIISRFFRAILYSPFARVSLACRSSKSFSVADQENRRLSEDYPASLKMLSEGQVQVHFLPIILLQGIFQDMTEDLITIVTAIHSPDKISHHHPQITIQVTTSEYPKTLTGGTNPIREAKMGIRHTKVPQSRHLVPSTVVLKVELASKSPWVLRLSSLDSNLRVSNSVGLEWDLVYSGLQVMLMLLVLRACCENHWPSTTEKVTEWQLQSSETTEDPTETILRSENSVKPVSPLSPYSKLAHVILCYPRKVKLRVQKNLISDEAQSYTYLELHIVLCLEFKIRPAEDRKESHQSNKYSDHNQLHKMNKRHQLPLARSSFQYLVNSLQGRDMSVMLLALETDRHQMERLGSPRAILTGGPSQDTGNPHTHILGTLQLSSCSSSVGRLFRASQVIPSSKGGLVCSPNEVGSPGDEEQLRLEKGLLKPPPLPKSRERYTGEMALEDPLEHY

SEQ ID NO: 882796 - protein, 303 aa, Homo sapiens
MGRPLLLPLLPLLLPPAFLQPSGSTGSGPSYLYGVTQPKHLSASMGGSVEIPFSFYYPWELATAPDVRISWRRGHFHGQSFYSTRPPSIHKDYVNRLFLNWTEGQKSGFLRISNLQKQDQSVYFCRVELDTRSSGRQQWQSIEGTKLSITQAVTTTTQRPSSMTTTWRLSSTTTTTGLRVTQGKRRSDSWHISLETAVGVAVAVTVLGIMILGLICLLRWRRRKGQQRTKATTPAREPFQNTEEPYENIRNEGQNTDPKLNPKDDGIVYASLALSSSTSPRAPPSHRPLKSPQNETLYSVLKA

SEQ ID NO: 882797 - protein, 230 aa, Homo sapiens [sequence omitted]

SEQ ID NO: 882798 - protein, 336 aa, Homo sapiens
MGPGLCVGRPLHRAPLLPGRLCWSPRPLEKNKAMGRPLLLPLLPLLLPPAFLQPSGSTGSGPSYLYGVTQPKHLSASMGGSVEIPFSFYYPWELATAPDVRISWRRGHFHGQSFYSTRPPSIHKDYVNRLFLNWTEGQKSGFLRISNLQKQDQSVYFCRVELDTRSSGRQQWQSIEGTKLSITQAVTTTTQRPSSMTTTWRLSSTTTTTGLRVTQGKRRSDSWHISLETAVGVAVAVTVLGIMILGLICLLRWRRRKGQQRTKATTPAREPFQNTEEPYENIRNEGQNTDPKLNPKDDGIVYASLALSSSTSPRAPPSHRPLKSPQNETLYSVLKA

SEQ ID NO: 882799 - protein, 175 aa, Homo sapiens [sequence omitted]

SEQ ID NO: 882800 - protein, 193 aa, Homo sapiens
MGRPLLLPLLPLLLPPAFLQPSGSTGSGPSYLYGVTQPKHLSASMGGSVEIPFSFYYPWELATAPDVRISWRRGHFHGQSFYSTRPPSIHKDYVNRLFLNWTEGQKSGFLRISNLQKQDQSVYFCRVELDTRSSGRQQWQSIEGTKLSITQGTCRDGHSRCLRPGKPLHHLNHCVGFGADGKWLHNLNEARQP

SEQ ID NO: 882801 - protein, 200 aa, Homo sapiens
MREIVASRDEGQRQEERSCRREVKVGHLGDRKRIRNVDEENNRTATTTQPQARSTSRESRRGTEERELASDDARHDSGTDVRGAAVRSYTKIDTTTIRNEDTDCCMRHKPRKWYTEHESEKRRTAAMRTETFSCCFREHYEPQSDKQGTSSDADAAEPTTLAITVQRSRPQATITSPDLDASTSLYAVASTQLKTRGAKK

SEQ ID NO: 882802 - protein, 193 aa, Homo sapiens; identical to SEQ ID NO: 882800

SEQ ID NO: 882803 - protein, 73 aa, Homo sapiens
RSPAIIGTEPFQNTEEPYENIRNEGESLPPSFPSFYPWHFLFPQIPPTWVRAPVSIFFFPFLAPCPHVTLALT

SEQ ID NO: 882804 - protein, 152 aa, Homo sapiens
MGRPLLLPLLPLLLPPAFLQPSGSTGSGPSYLYGVTQPKHLSASMGGSVEIPFSFYYPWELATAPDVRISWRRGHFHGQSFYSTRPPSIHKDYVNRLFLNWTEGQKSGFLRISNLQKQDQSVYFCRVELDTRSSGRQQWQSIEGTKLSITQG

SEQ ID NO: 882805 - protein, 187 aa, Homo sapiens [sequence omitted]

SEQ ID NO: 882806 - protein, 257 aa, Homo sapiens
MYQTNDQIINGLFPLNKDLALEMAALLSQVEIGDFERPFSTPAGHVTNQCKVNQTLKQVIEKFYPKRYRDGCSEEQLRQLCQRLSTRWMALRGHSAADCVRIYLTVARKWPFFGAKLFLAKPITPSSLGSTFLWLAVHEDGLSLLEYNSMRLIVSYVYKSLMTFGGYQDDFMVVINNTHSKDKPTEKLLFAMAKPKILEITLLIASYINNFHQQKAAFHHLSAPALLSAQTRGPQARMMGSQPLLSSSRPTKGPTLL

SEQ ID NO: 882807 - protein, 257 aa, Homo sapiens; identical to SEQ ID NO: 882806

SEQ ID NO: 882808 - protein, 257 aa, Homo sapiens; identical to SEQ ID NO: 882806

SEQ ID NO: 882809 - protein, 257 aa, Homo sapiens; identical to SEQ ID NO: 882806

SEQ ID NO: 882810 - protein, 98 aa, Homo sapiens
  misc_feature (91)..(91): Xaa can be any naturally occurring amino acid
  misc_feature (98)..(98): Xaa can be any naturally occurring amino acid
MSAPLDAALHALQEEQARLKMRLWDLQQLRKELGDSPKDKVPFSVPKIPLVFRGHTQQDPEVPKSLVSNLRIHCPLLAGSALITFDDPKGXLMGSLMX

SEQ ID NO: 882811 - protein, 299 aa, Homo sapiens
MVSNDWFTRRKLGGTGRWCEPRAAGGLGLGVGPRGMWRAGSMSAELGVGCALRAVNERVQQAVARRPRDLPAIQPRLVAVSKTKPADMVIEAYGHGQRTFGENYVQELLEKASNPKILSLCPEIKWHFIGHLQKQNVNKLMAVPNLFMLETVDSVKLADKVNSSWQRKGSPERLKVMVQINTSGEESKHGLPPSETIAIVEHINAKCPNLEFVGLMTIGSFGHDLSQGPNPDFQLLLSLREELCKKLNIPADQVELSMGMSADFQHAVEVGSTNVRIGSTILESGITQRNPPRTSAQQT

SEQ ID NO: 882812 - protein, 159 aa, Homo sapiens
MAVPNLFMLETVDSVKLADKVNSSWQRKGSPERLKVMVQINTSGEESKHGLPPSETIAIVEHINAKCPNLEFVGLMTIGSFGHDLSQGPNPDFQLLLSLREELCKKLNIPADQVELSMGMSADFQHAVEVGSTNVRIGSTILESGITQRNPPRTSAQQT

SEQ ID NO: 882813 - protein, 202 aa, Homo sapiens
MVSNDWFTRRKLGGTGRWCEPRAAGGLGLGVGPRGMWRAGSMSAELGVGCALRAVNERVQQAVARRPRDLPAIQPRLVAVSKTKPADMVIEAYGHGQRTFGENYVQELLEKASNPKILSLCPEIKWHFIGHLQKQNVNKLMAVPNLFMLETVDSVKLADKVNSSWQRKGSPERLKVMVQINTSGEESKHGLPPSETIAIVEH

SEQ ID NO: 882814 - protein, 158 aa, Homo sapiens
MVSNDWFTRRKLGGTGRWCEPRAAGGLGLGVGPRGMWRAGSMSAELGVGCALRAVNERVQQAVARRPRDLPAIQPRLVAVSKTKPADMVIEAYGHGQRTFGENYVQELLEKASNPKILSLCPEIKWHFIGHLQKQNVNKLMGKSEFLIKRENIMPRTE

SEQ ID NO: 882815 - protein, 169 aa, Homo sapiens
MVSNDWFTRRKLGGTGRWCEPRAAGGLGLGVGPRGMWRAGSMSAELGVGCALRAVNERVQQAVARRPRDLPAIQPRLVAVSKTKPADMVIEAYGHGQRTFGENYVQELLEKASNPKILSLCPEIKWHFIGHLQKQNVNKLMGKIKLNMKTKLFCHCIASTTLCGRESNF

SEQ ID NO: 882816 - protein, 499 aa, Homo sapiens
MSLADELLADLEEAAEEEEGGSYGEEEEEPAIEDVQEETQLDLSGDSVKTIAKLWDSKMFAEIMMKIEEYISKQAKASEVMGPVEAAPEYRVIVDANNLTVEIENELNIIHKFIRDKYSKRFPELESLVPNALDYIRTVKELGNSLDKCKNNENLQQILTNATIMVVSVTASTTQGQQLSEEELERLEEACDMALELNASKHRIYEYVESRMSFIAPNLSIIIGASTAAKIMGVAGGLTNLSKMPACNIMLLGAQRKTLSGFSSTSVLPHTGYIYHSDIVQSLPPDLRRKAARLVAAKCTLAARVDSFHESTEGKVGYELKDEIERKFDKWQEPPPVKQVKPLPAPLDGQRKKRGGRRYRKMKERLGLTEIRKQANRMSFGEIEEDAYQEDLGFSLGHLGKSGSGRVRQTQVNEATKARISKTLQRTLQKQSVVYGGKSTIRDRSSGTASSVAFTPLQGLEIVNPQAAEKKVAEANQKYFSSMAEFLKVKGEKSGLMST

SEQ ID NO: 882817 - protein, 309 aa, Homo sapiens
MSLADELLADLEEAAEEEEGGSYGEEEEEPAIEDVQEETQLDLSGDSVKTIAKLWDSKMFAEIMMKIEEYISKQAKASEVMGPVEAAPEYRVIVDANNLTVEIENELNIIHKFIRDKYSKRFPELESLVPNALDYIRTVKELGNSLDKCKNNENLQQILTNATIMVVSVTASTTQGQQLSEEELERLEEACDMALELNASKHRIYEYVESRMSFIAPNLSIIIGASTAAKIMGVAGGLTNLSKMPACNIMLLGAQRKTLSGFSSTSVLPPGALPGALWPAPILGSPVGPQLAVGSHRGGPGQHKAGRIA

SEQ ID NO: 882818 - protein, 563 aa, Homo sapiens
MSLADELLADLEEAAEEEEGGSYGEEEEEPAIEDVQEETQLDLSGDSVKTIAKLWDSKMFAEIMMKIEEYISKQAKASEVMGPVEAAPEYRVIVDANNLTVEIENELNIIHKFIRDKYSKRFPELESLVPNALDYIRTVKELGNSLDKCKNNENLQQILTNATIMVVSVTASTTQGQQLSEEELERLEEACDMALELNASKHRIYEYVESRMSFIAPNLSIIIGASTAAKIMGVAGGLTNLSKMPACNIMLLGAQRKTLSGFSSTSVLPHTGYIYHSDIVQSLPPDLRRKAARLVAAKCTLAARVDSFHESTEGKVGYELKDEIERKFDKWQEPPPVKQVKPLPAPLDGQRKKRGGRRLRGPGGPVGMGVMEGRSRRPPPSRLPGAAHPPVPRYRKMKERLGLTEIRKQANRMSFGEIEEDAYQEDLGFSLGHLGKSGSGRVRQTQVNEATKARISKTLQVWARPKVGLGTEGHKVGGAQIAASLSSPQRTLQKQSVVYGGKSTIRDRSSGTASSVAFTPLQGLEIVNPQAAEKKVAEANQKYFSSMAEFLKVKGEKSGLMST

SEQ ID NO: 882819 - protein, 444 aa, Homo sapiens
MSLADELLADLEEAAEEEEGGSYGEEEEEPAIEDVQEETQLDLSGDSVKTIAKLWDSKMFAEIMMKIEEYISKQAKASEVMGPVEAAPEYRVIVDANNLTVEIENELNIIHKFIRDKYSKRFPELESLVPNALDYIRTVKELGNSLDKCKNNENLQQILTNATIMVVSVTASTTQGQQLSEEELERLEEACDMALELNASKHRIYEYVESRMSFIAPNLSIIIGASTAAKIMGVAGGLTNLSKMPACNIMLLGAQRKTLSGFSSTSVLPHTGYIYHSDIVQSLPPDLRRKAARLVAAKCTLAARVDSFHESTEGKVGYELKDEIERKFDKWQEPPPVKQVKPLPAPLDGQRKKRGGRRYRKMKERLGLTEIRKQANRMSFGEIGEDAYRRLDSAWAWAVGRGCAPPPVTGPGGSRRGGLNNVFGGTPRTLEAGPPAVSREKGAH

SEQ ID NO: 882820 - protein, 499 aa, Homo sapiens; identical to SEQ ID NO: 882816

SEQ ID NO: 882821 - protein, 499 aa, Homo sapiens; identical to SEQ ID NO: 882816

SEQ ID NO: 882822 - protein, 499 aa, Homo sapiens; identical to SEQ ID NO: 882816

SEQ ID NO: 882823 - protein, 524 aa, Homo sapiens
DGDHGEREAGLLGLGEEVCEEKGLGMSLADELLADLEEAAEEEEGGSYGEEEEEPAIEDVQEETQLDLSGDSVKTIAKLWDSKMFAEIMMKIEEYISKQAKASEVMGPVEAAPEYRVIVDANNLTVEIENELNIIHKFIRDKYSKRFPELESLVPNALDYIRTVKELGNSLDKCKNNENLQQILTNATIMVVSVTASTTQGQQLSEEELERLEEACDMALELNASKHRIYEYVESRMSFIAPNLSIIIGASTAAKIMGVAGGLTNLSKMPACNIMLLGAQRKTLSGFSSTSVLPHTGYIYHSDIVQSLPPDLRRKAARLVAAKCTLAARVDSFHESTEGKVGYELKDEIERKFDKWQEPPPVKQVKPLPAPLDGQRKKRGGRRYRKMKERLGLTEIRKQANRMSFGEIEEDAYQEDLGFSLGHLGKSGSGRVRQTQVNEATKARISKTLQRTLQKQSVVYGGKSTIRDRSSGTASSVAFTPLQGLEIVNPQAAEKKVAEANQKYFSSMAEFLKVKGEKSGLMST

SEQ ID NO: 882824 - protein, 508 aa, Homo sapiens
MSLADELLADLEEAAEEEEGGSYGEEEEEPAIEDVQEETQLDLSGDSVKTIAKLWDSKMFAEIMMKIEEYISKQAKASEVMGPVEAAPEYRVIVDANNLTVEIENELNIIHKFIRDKYSKRFPELESLVPNALDYIRTVKELGNSLDKCKNNENLQQILTNATIMVVSVTASTTQGQQLSEEELERLEEACDMALELNASKHRIYEYVESRMSFIAPNLSIIIGASTAAKIMGVAGGLTNLSKMPACNIMLLGAQRKTLSGFSSTSVLPHTGYIYHSDIVQSLPPIPPPFSVLQDLRRKAARLVAAKCTLAARVDSFHESTEGKVGYELKDEIERKFDKWQEPPPVKQVKPLPAPLDGQRKKRGGRRYRKMKERLGLTEIRKQANRMSFGEIEEDAYQEDLGFSLGHLGKSGSGRVRQTQVNEATKARISKTLQRTLQKQSVVYGGKSTIRDRSSGTASSVAFTPLQGLEIVNPQAAEKKVAEANQKYFSSMAEFLKVKGEKSGLMST

SEQ ID NO: 882825 - protein, 630 aa, Homo sapiens
MSLADELLADLEEAAEEEEGGSYGEEEEEPAIEDVQEETQLDLSGDSVKTIAKLWDSKMFAEIMMKIEEYISKQAKASEVMGPVEAAPEYRVIVDANNLTVEIENELSECWGAGGDSPVDVPHAPSPFPTGLSQGPAPKPKLRSRLTCCHRVAEIRRKCVLSRMSLRSLGDGVAAWLPVGPRLFPSCWSATCLTVRGDCPTSSHHLRIPTSKALLFFKNMSLQLTFYRPELIPLVTPSDIIHKFIRDKYSKRFPELESLVPNALDYIRTVKELGNSLDKCKNNENLQQILTNATIMVVSVTASTTQGQQLSEEELERLEEACDMALELNASKHRIYEYVESRMSFIAPNLSIIIGASTAAKIMGVAGGLTNLSKMPACNIMLLGAQRKTLSGFSSTSVLPHTGYIYHSDIVQSLPPDLRRKAARLVAAKCTLAARVDSFHESTEGKVGYELKDEIERKFDKWQEPPPVKQVKPLPAPLDGQRKKRGGRRYRKMKERLGLTEIRKQANRMSFGEIEEDAYQEDLGFSLGHLGKSGSGRVRQTQVNEATKARISKTLQRTLQKQSVVYGGKSTIRDRSSGTASSVAFTPLQGLEIVNPQAAEKKVAEANQKYFSSMAEFLKVKGEKSGLMST

SEQ ID NO: 882826 - protein, 309 aa, Homo sapiens; identical to SEQ ID NO: 882817

SEQ ID NO: 882827 - protein, 294 aa, Homo sapiens
MSLADELLADLEEAAEEEEGGSYGEEEEEPAIEDVQEETQLDLSGDSVKTIAKLWDSKMFAEIMMKIEEYISKQAKASEVMGPVEAAPEYRVIVDANNLTVEIENELNIIHKFIRDKYSKRFPELESLVPNALDYIRTVKELGNSLDKCKNNENLQQILTNATIMVVSVTASTTQGQQLSEEELERLEEACDMALELNASKHRIYEYVESRMSFIAPNLSIIIGASTAAKIMGCRASRLPQCCPTPATSTTVTSCSPCHRICGGKRPGWWPPSAHWQPVWTVSTRAQKGRWATN

SEQ ID NO: 882828 - protein, 477 aa, Homo sapiens
MSLADELLADLEEAAEEEEGGSYGEEEEEPAIEDVQEETQLDLSGDSVKTIAKLWDSKMFAEIMMKIEEYISKQAKASEVMGPVEAAPEYRVIVDANNLTVEIENELNIIHKFIRDKYSKRFPELESLVPNALDYIRTVKELGNSLDKCKNNENLQQILTNATIMVVSVTASTTQGQQLSEEELERLEEACDMALELNASKHRIYEYVESRMSFIAPNLSKMPACNIMLLGAQRKTLSGFSSTSVLPHTGYIYHSDIVQSLPPDLRRKAARLVAAKCTLAARVDSFHESTEGKVGYELKDEIERKFDKWQEPPPVKQVKPLPAPLDGQRKKRGGRRYRKMKERLGLTEIRKQANRMSFGEIEEDAYQEDLGFSLGHLGKSGSGRVRQTQVNEATKARISKTLQRTLQKQSVVYGGKSTIRDRSSGTASSVAFTPLQGLEIVNPQAAEKKVAEANQKYFSSMAEFLKVKGEKSGLMST

SEQ ID NO: 882829 - protein, 316 aa, Homo sapiens
MERLEEACDMALELNASKHRIYEYVESRMSFIAPNLSIIIGASTAAKIMGVAGGLTNLSKMPACNIMLLGAQRKTLSGFSSTSVLPHTGYIYHSDIVQSLPPDLRRKAARLVAAKCTLAARVDSFHESTEGKVGYELKDEIERKFDKWQEPPPVKQVKPLPAPLDGQRKKRGGRRYRKMKERLGLTEIRKQANRMSFGEIEEDAYQEDLGFSLGHLGKSGSGRVRQTQVNEATKARISKTLQRTLQKQSVVYGGKSTIRDRSSGTASSVAFTPLQGLEIVNPQAAEKKVAEANQKYFSSMAEFLKVKGEKSGLMST

SEQ ID NO: 882830 - protein, 294 aa, Homo sapiens; identical to SEQ ID NO: 882827

SEQ ID NO: 882831 - protein, 138 aa, Homo sapiens [sequence omitted]

SEQ ID NO: 882832 - protein, 185 aa, Homo sapiens
MSLADELLADLEEAAEEEEGGSYGEEEEEPAIEDVQEETQLDLSGDSVKTIAKLWDSKMFAEIMMKIEEYISKQAKASEVMGPVEAAPEYRVIVDANNLTVEIENELNIIHKFIRDKYSKRFPELESLVPNALDYIRTVKELGNSLDKCKNNENLQQILLLLSLPVPRLLHTILITAATCRQSVN

SEQ ID NO: 882833 - protein, 142 aa, Homo sapiens
MSLADELLADLEEAAEEEEGGSYGEEEEEPAIEDVQEETQLDLSGDSVKTIAKLWDSKMFAEIMMKIEEYISKQAKASEGASSHSVPLPISCLSCQAPWLPGCLWLGISPSQPFPEPSFFFVSPQPVPFSTKYILHCKAHAS

SEQ ID NO: 882834 - protein, 262 aa, Homo sapiens
MVAWRSAFLVCLAFSLATLVQRGSGDFDDFNLEDAVKETSSVKQPWDHTTTTTTNRPGTTRAPAKPPGSGLDLADALDDQDDGRRKPGIGGRERWNHVTTTTKRPVTTRAPANTLGNDFDLADALDDRNDRDDGRRKPIAGGGGFSDKDLEDIVGGGEYKPDKGKGDGRYGSNDDPGSGMVAEPGTIAGVASALAMALIGAVSSYISYQQKKFCFSIQQGLNADYVKGENLEAVVCEEPQVKYSTLHTQSAEPPPPPEPARI

SEQ ID NO: 882835 - protein, 276 aa, Homo sapiens
RLIGSGIWDSLLPAMVAWRSAFLVCLAFSLATLVQRGSGDFDDFNLEDAVKETSSVKQPWDHTTTTTTNRPGTTRAPAKPPGSGLDLADALDDQDDGRRKPGIGGRERWNHVTTTTKRPVTTRAPANTLGNDFDLADALDDRNDRDDGRRKPIAGGGGFSDKDLEDIVGGGEYKPDKGKGDGRYGSNDDPGSGMVAEPGTIAGVASALAMALIGAVSSYISYQQKKFCFSIQQGLNADYVKGENLEAVVCEEPQVKYSTLHTQSAEPPPPPEPARI

SEQ ID NO: 882836 - protein, 246 aa, Homo sapiens
LLPHERGSGDFDDFNLEDAVKETSSVKQPWDHTTTTTTNRPGTTRAPAKPPGSGLDLADALDDQDDGRRKPGIGGRERWNHVTTTTKRPVTTRAPANTLGNDFDLADALDDRNDRDDGRRKPIAGGGGFSDKDLEDIVGGGEYKPDKGKGDGRYGSNDDPGSGMVAEPGTIAGVASALAMALIGAVSSYISYQQKKFCFSIQQGLNADYVKGENLEAVVCEEPQVKYSTLHTQSAEPPPPPEPARI

SEQ ID NO: 882837 - protein, 213 aa, Homo sapiens
MVAWRSAFLVCLAFSLATLVQRGSGDFDDFNLEDAVKETSSVKQRWNHVTTTTKRPVTTRAPANTLGNDFDLADALDDRNDRDDGRRKPIAGGGGFSDKDLEDIVGGGEYKPDKGKGDGRYGSNDDPGSGMVAEPGTIAGVASALAMALIGAVSSYISYQQKKFCFSIQQGLNADYVKGENLEAVVCEEPQVKYSTLHTQSAEPPPPPEPARI

SEQ ID NO: 882838 - protein, 262 aa, Homo sapiens; identical to SEQ ID NO: 882834

SEQ ID NO: 882839 - protein, 262 aa, Homo sapiens; identical to SEQ ID NO: 882834

SEQ ID NO: 882840 - protein, 262 aa, Homo sapiens; identical to SEQ ID NO: 882834

SEQ ID NO: 882841 - protein, 194 aa, Homo sapiens
MVAWRSAFLVCLAFSLATLVQRGSGDFDDFNLEDAVKETSSVKQPWDHTTTTTTNRPGTTRAPAKPPGSGLDLADALDDQDDGRRKPGIGGRERWNHVTTTTKRPVTTRAPANTLGNDFDLADALDDRNDRDDGRRKPIAGGGGFSDKDLEDIVGGGEYKPDKGKGDGRYGSNDDPGSGGFLNPEAPVGHVKGK

SEQ ID NO: 882842 - protein, 145 aa, Homo sapiens
MVAWRSAFLVCLAFSLATLVQRGSGDFDDFNLEDAVKETSSVKPALGMYHKLDGLKQQNFILSLFWMLEVLYQGVGWATFSLKALGKNLSLTFPTSGGSRCSLVCGCITPISASVVTWCSPFCVSLLSLTKMLVSGFKAHLDNPG

SEQ ID NO: 882843 - protein, 262 aa, Homo sapiens; identical to SEQ ID NO: 882834

SEQ ID NO: 882844 - protein, 262 aa, Homo sapiens; identical to SEQ ID NO: 882834

SEQ ID NO: 882845 - protein, 1038 aa, Homo sapiens
MFPTESAWLGKRGANPAPEAAVRETVMLLLCLGVPTGRPYNVDTESALLYQGPHNTLFGYSVVLHSHGANRWLLVGAPTANWLANASVINPGAIYRCRIGKNPGQTCEQLQLGSPNGEPCGKTCLEERDNQWLGVTLSRQPGENGSIVTCGHRWKNIFYIKNENKLPTGGCYGVPPDLRTELSKRIAPCYQDYVKKFGENFASCQAGISSFYTKDLIVMGAPGSSYWTGSLFVYNITTNKYKAFLDKQNQVKFGSYLGYSVGAGHFRSQHTTEVVGGAPQHEQIGKAYIFSIDEKELNILHEMKGKKLGSYFGASVCAVDLNADGFSDLLVGAPMQSTIREEGRVFVYINSGSGAVMNAMETNLVGSDKYAARFGESIVNLGDIDNDGFEDVAIGAPQEDDLQGAIYIYNGRADGISSTFSQRIEGLQISKSLSMFGQSISGQIDADNNGYVDVAVGAFRSDSAVLLRTRPVVIVDASLSHPESVNRTKFDCVENGWPSVCIDLTLCFSYKGKEVPGYIVLFYNMSLDVNRKAESPPRFYFSSNGTSDVITGSIQVSSREANCRTHQAFMRKDVRDILTPIQIEAAYHLGPHVISKRSTEEFPPLQPILQQKKEKDIMKKTINFARFCAHENCSADLQVSAKIGFLKPHENKTYLAVGSMKTLMLNVSLFNAGDDAYETTLHVKLPVGLYFIKILELEEKQINCEVTDNSGVVQLDCSIGYIYVDHLSRIDISFLLDVSSLSRAEEDLSITVHATCENEEEMDNLKHSRVTVAIPLKYEVKLTVHGFVNPTSFVYGSNDENEPETCMVEKMNLTFHVINTGNSMAPNVSVEIMVPNSFSPQTDKLFNILDVQTTTGECHFENYQRVCALEQQKSAMQTLKGIVRFLSKTDKRLLYCIKADPHCLNFLCNFGKMESGKEASVHIQLEGRPSILEMDETSALKFEIRATGFPEPNPRVIELNKDENVAHVLLEGLHHQRPKRYFTIVIISSSLLLGLIVLLLISYVMWKAGFFKRQYKSILQEENRRDSWSYINSKSNDD

SEQ ID NO: 882846 - protein, 165 aa, Homo sapiens
MFPTESAWLGKRGANPAPEAAVRETVMLLLCLGVPTGRPYNVDTESALLYQGPHNTLFGYSVVLHSHGANRWLLVGAPTANWLANASVINPGAIYRCRIGKNPGQTCEQLQLGELGMGPGVSDLPTPHVDPTIGQVLERFTLPVTSGLKSIKFSVSTPSHLASLI

SEQ ID NO: 882847 - protein, 1017 aa, Homo sapiens
MFPTESAWLGKRGANPAPEAAVRETVMLLLCLGVPTGRPYNVDTESALLYQGPHNTLFGYSVVLHSHGANRWLLVGAPTANWLANASVINPGAIYRCRIGKNPGQTCEQLQLGSPNGEPCGKTCLEERDNQWLGVTLSRQPGENGSIVVGIGTGPQIHREISYPGCSFHIIVVYFYFIQTCGHRWKNIFYIKNENKLPTGGCYGVPPDLRTELSKRIAPCYQDYVKKFGENFASCQAGISSFYTKDLIVMGAPGSSYWTGSLFVYNITTNKYKAFLDKQNQVKFGSYLGYSVGAGHFRSQHTTEVVGGAPQHEQIGKAYIFSIDEKELNILHEMKGKKLGSYFGASVCAVDLNADGFSDLLVGAPMQSTIREEGRVFVYINSGSGAVMNAMETNLVGSDKYAARFGESIVNLGDIDNDGFEDVAIGAPQEDDLQGAIYIYNGRADGISSTFSQRIEGLQISKSLSMFGQSISGQIDADNNGYVDVAVGAFRSDSAVLLSFVLYMSLDVNRKAESPPRFYFSSNGTSDVITGSIQVSSREANCRTHQAFMRKDVRDILTPIQIEAAYHLGPHVISKRSTEEFPPLQPILQQKKEKDIMKKTINFARFCAHENCSADLQVSAKIGFLKPHENKTYLAVGSMKTLMLNVSLFNAGDDAYETTLHVKLPVGLYFIKILELEEKQINCEVTDNSGVVQLDCSIGYIYVDHLSRIDISFLLDVSSLSRAEEDLSITVHATCENEEEMDNLKHSRVTVAIPLKYEVKLTVHGFVNPTSFVYGSNDENEPETCMVEKMNLTFHVINTGNSMAPNVSVEIMVPNSFSPQTDKLFNILDVQTTTGECHFENYQRVCALEQQKSAMQTLKGIVRFLSKTDKRLLYCIKADPHCLNFLCNFGKMESGKEASVHIQLEGRPSILEMDETSALKFEIRATGFPEPNPRVIELNKDENVAHVLLEGLHHQRPKRYFTIVIISSSLLLGLIVLLLISYVMWKAGFFKRQYKSILQEENRRDSWSYINSKSNDD

SEQ ID NO: 882848 - protein, 820 aa, Homo sapiens
MGAPGSSYWTGSLFVYNITTNKYKAFLDKQNQVKFGSYLGYSVGAGHFRSQHTTEVVGGAPQHEQIGKAYIFSIDEKELNILHEMKGKKLGSYFGASVCAVDLNADGFSDLLVGAPMQSTIREEGRVFVYINSGSGAVMNAMETNLVGSDKYAARFGESIVNLGDIDNDGFEDVAIGAPQEDDLQGAIYIYNGRADGISSTFSQRIEGLQISKSLSMFGQSISGQIDADNNGYVDVAVGAFRSDSAVLLRTRPVVIVDASLSHPESVNRTKFDCVENGWPSVCIDLTLCFSYKGKEVPGYIVLFYNMSLDVNRKAESPPRFYFSSNGTSDVITGSIQVSSREANCRTHQAFMRKDVRDILTPIQIEAAYHLGPHVISKRSTEEFPPLQPILQQKKEKDIMKKTINFARFCAHENCSADLQVSAKIGFLKPHENKTYLAVGSMKTLMLNVSLFNAGDDAYETTLHVKLPVGLYFIKILELEEKQINCEVTDNSGVVQLDCSIGYIYVDHLSRIDISFLLDVSSLSRAEEDLSITVHATCENEEEMDNLKHSRVTVAIPLKYEVKLTVHGFVNPTSFVYGSNDENEPETCMVEKMNLTFHVINTGNSMAPNVSVEIMVPNSFSPQTDKLFNILDVQTTTGECHFENYQRVCALEQQKSAMQTLKGIVRFLSKTDKRLLYCIKADPHCLNFLCNFGKMESGKEASVHIQLEGRPSILEMDETSALKFEIRATGFPEPNPRVIELNKDENVAHVLLEGLHHQRPKRYFTIVIISSSLLLGLIVLLLISYVMWKAGFFKRQYKSILQEENRRDSWSYINSKSNDD

SEQ ID NO: 882849 - protein, 1069 aa, Homo sapiens
MFPTESAWLGKRGANPAPEAAVRETVMLLLCLGVPTGRPYNVDTESALLYQGPHNTLFGYSVVLHSHGANRWLLVGAPTANWLANASVINPGAIYRCRIGKNPGQTCEQLQLGSPNGEPCGKTCLEERDNQWLGVTLSRQPGENGSIVVGIGTGPQIHREISYPGCSFHIIVVYFYFIQTCGHRWKNIFYIKNENKLPTGGCYGVPPDLRTELSKRIAPCYQDYVKKFGENFASCQAGISSFYTKDLIVMGAPGSSYWTGSLFVYNITTNKYKAFLDKQNQVKFGSYLGYSVGAGHFRSQHTTEVVGGAPQHEQIGKAYIFSIDEKELNILHEMKGKKLGSYFGASVCAVDLNADGFSDLLVGAPMQSTIREEGRVFVYINSGSGAVMNAMETNLVGSDKYAARFGESIVNLGDIDNDGFEDVAIGAPQEDDLQGAIYIYNGRADGISSTFSQRIEGLQISKSLSMFGQSISGQIDADNNGYVDVAVGAFRSDSAVLLRTRPVVIVDASLSHPESVNRTKFDCVENGWPSVCIDLTLCFSYKGKEVPGYIVLFYNMSLDVNRKAESPPRFYFSSNGTSDVITGSIQVSSREANCRTHQAFMRKDVRDILTPIQIEAAYHLGPHVISKRSTEEFPPLQPILQQKKEKDIMKKTINFARFCAHENCSADLQVSAKIGFLKPHENKTYLAVGSMKTLMLNVSLFNAGDDAYETTLHVKLPVGLYFIKILELEEKQINCEVTDNSGVVQLDCSIGYIYVDHLSRIDISFLLDVSSLSRAEEDLSITVHATCENEEEMDNLKHSRVTVAIPLKYEVKLTVHGFVNPTSFVYGSNDENEPETCMVEKMNLTFHVINTGNSMAPNVSVEIMVPNSFSPQTDKLFNILDVQTTTGECHFENYQRVCALEQQKSAMQTLKGIVRFLSKTDKRLLYCIKADPHCLNFLCNFGKMESGKEASVHIQLEGRPSILEMDETSALKFEIRATGFPEPNPRVIELNKDENVAHVLLEGLHHQRPKRYFTIVIISSSLLLGLIVLLLISYVMWKAGFFKRQYKSILQEENRRDSWSYINSKSNDD

SEQ ID NO: 882850 - protein, 820 aa, Homo sapiens; identical to SEQ ID NO: 882848

SEQ ID NO: 882851 - protein, 423 aa, Homo sapiens
MFPTESAWLGKRGANPAPEAAVRETVMLLLCLGVPTGRPYNVDTESALLYQGPHNTLFGYSVVLHSHGANRWLLVGAPTANWLANASVINPGAIYRCRIGKNPGQTCEQLQLGSPNGEPCGKTCLEERDNQWLGVTLSRQPGENGSIVVGIGTGPQIHREISYPGCSFHIIVVYFYFIQTCGHRWKNIFYIKNENKLPTGGCYGVPPDLRTELSKRIAPCYQDYVKKFGENFASCQAGISSFYTKDLIVMGAPGSSYWTGSLFVYNITTNKYKAFLDKQNQVKFGSYLGYSVGAGHFRSQHTTEVVGGAPQHEQIGKAYIFSIDEKELNILHEMKGKKLGSYFGASVCAVDLNADGFSDLLVGAPMQSTIREEGRVFVYINSGSGAVMNAMETNLVGSDKYAARFGESIVNLGDIDNDGFEGN

SEQ ID NO: 882852 - protein, 509 aa, Homo sapiens
MPSGFQQIGSEDGEPPQQRVTGTLVLAVFSAVLGSLQFGYNIGVINAPQKVIEQSYNETWLGRQGPEGPSSIPPGTLTTLWALSVAIFSVGGMISSFLIGIISQWLGRKRAMLVNNVLAVLGGSLMGLANAAASYEMLILGRFLIGAYSGLTSGLVPMYVGEIAPTHLRGALGTLNQLAIVIGILIAQVLGLESLLGTASLWPLLLGLTVLPALLQLVLLPFCPESPRYLYIIQNLEGPARKSLKRLTGWADVSGVLAELKDEKRKLERERPLSLLQLLGSRTHRQPLIIAVVLQLSQQLSGINAVFYYSTSIFETAGVGQPAYATIGAGVVNTVFTLVSVLLVERAGRRTLHLLGLAGMCGCAILMTVALLLLERVPAMSYVSIVAIFGFVAFFEIGPGPIPWFIVAELFSQGPRPAAMAVAGFSNWTSNFIIGMGFQYVAEAMGPYVFLLFAVLLLGFFIFTFLRVPETRGRTFDQISAAFHRTPSLLEQEVKPSTELEYLGPDEND

SEQ ID NO: 882853 - protein, 369 aa, Homo sapiens
MISSFLIGIISQWLGRKRAMLVNNVLAVLGGSLMGLANAAASYEMLILGRFLIGAYSGLTSGLVPMYVGEIAPTHLRGALGTLNQLAIVIGILIAQVLGLESLLGTASLWPLLLGLTVLPALLQLVLLPFCPESPRYLYIIQNLEGPARKSLKRLTGWADVSGVLAELKDEKRKLERERPLSLLQLLGSRTHRQPLIIAVVLQLSQQLSGINAVFYYSTSIFETAGVGQPAYATIGAGVVNTVFTLVSVLLVERAGRRTLHLLGLAGMCGCAILMTVALLLLERVPAMSYVSIVAIFGFVAFFEIGPGPIPWFIVAELFSQGPRPAAMAVAGFSNWTSNFIIGMGFQYVAVGPPAPASHTVGQRWASHS

SEQ ID NO: 882854 - protein, 63 aa, Homo sapiens
MSYVSIVAIFGFVAFFEIGPGPIPWFIVAELFSQGPRPAAMAVAGFSNWTSNFIIGMGFQYVA

SEQ ID NO: 882855 - protein, 461 aa, Homo sapiens
MPSGFQQIGSEDGEPPQQRVTGTLVLAVFSAVLGSLQFGYNIGVINAPQKVIEQSYNETWLGRQGPEGPSSIPPGTLTTLWALSVAIFSVGGMISSFLIGIISQWLGRKRAMLVNNVLAVLGGSLMGLANAAASYEMLILGRFLIGAYSGLTSGLVPMYVGEIAPTHLRGALGTLNQLAIVIGILIAQVLGLESLLGTASLWPLLLGLTVLPALLQLVLLPFCPESPRYLYIIQNLEGPARKSLKRLTGWADVSGVLAELKDEKRKLERERPLSLLQLLGSRTHRQPLIIAVVLQLSQQLSGINAVFYYSTSIFETAGVGQPAYATIGAGVVNTVFTLVSVLLVERAGRRTLHLLGLAGMCGCAILMTVALLLLERVPAMSYVSIVAIFGFVAFFEIGPGPIPWFIVAELFSQGPRPAAMAVAGFSNWTSNFIIGMGFQYVAVGPPAPASHTVGQRWASHS

SEQ ID NO: 882856 - protein, 1069 aa, Homo sapiens
MLVACWPMGECARAADPQARHAAQPGPARAGRATPALGSDGVRVTMESALTARDRVGVQDFVLLENFTSEAAFIENLRRRFRENLIYTYIGPVLVSVNPYRDLQIYSRQHMERYRGVSFYEVPPHLFAVADTVYRALRTERRDQAVMISGESGAGKTEATKRLLQFYAETCPAPERGGAVRDRLLQSNPVLEAFGNAKTLRNDNSSRFGKYMDVQFDFKGAPVGGHILSYLLEKSRVVHQNHGERNFHIFYQLLEGGEEETLRRLGLERNPQSYLYLVKGQCAKVSSINDKSDWKVVRKALTVIDFTEDEVEDLLSIVASVLHLGNIHFAANEESNAQVTTENQLKYLTRLLSVEGSTLREALTHRKIIAKGEELLSPLNLEQAAYARDALAKAVYSRTFTWLVGKINRSLASKDVESPSWRSTTVLGLLDIYGFEVFQHNSFEQFCINYCNEKLQQLFIELTLKSEQEEYEAEGIAWEPVQYFNNKIICDLVEEKFKGIISILDEECLRPGEATDLTFLEKLEDTVKHHPHFLTHKLADQRTRKSLGRGEFRLLHYAGEVTYSVTGFLDKNNDLLFRNLKETMCSSKNPIMSQCFDRSELSDKKRPETVATQFKMSLLQLVEILQSKEPAYVRCIKPNDAKQPGRFDEVLIRHQVKYLGLLENLRVRRAGFAYRRKYEAFLQRYKSLCPETWPTWAGRPQDGVAVLVRHLGYKPEEYKMGRTKIFIRFPKTLFATEDALEVRRQSLATKIQAAWRGFHWRQKFLRVKRSAICIQSWWRGTLGRRKAAKRKWAAQTIRRLIRGFILRHAPRCPENAFFLDHVRTSFLLNLRRQLPRNVLDTSWPTPPPALREASELLRELCIKNMVWKYCRSISPEWKQQLQQKAVASEIFKGKKDNYPQSVPRLFISTRLGTDEISPRVLQALGSEPIQYAVPVVKYDRKGYKPRSRQLLLTPNAVVIVEDAKVKQRIDYANLTGISVSSLSDSLFVLHVQRADNKQKGDVVLQSDHVIETLTKTALSANRVNSININQGSITFAGGPGRMAPLTSHPARSCSSPRPRTGTWLWSPPG

SEQ ID NO: 882857 - protein, 1041 aa, Homo sapiens
MLVACWPMGECARAADPQARHAAQPGPARAGRATPALGSDGVRVTMESALTARDRVGVQDFVLLENFTSEAAFIENLRRRFRENLIYTYIGPVLVSVNPYRDLQIYSRQHMERYRGVSFYEVPPHLFAVADTVYRALRTERRDQAVMISGESGAGKTEATKRLLQFYAETCPAPERGGAVRDRLLQSNPVLEAFGNAKTLRNDNSSRFGKYMDVQFDFKGAPVGGHILSYLLEKSRVVHQNHGERNFHIFYQLLEGGEEETLRRLGLERNPQSYLYLVKGQCAKVSSINDKSDWKVVRKALTVIDFTEDEVEDLLSIVASVLHLGNIHFAANEESNAQVTTENQLKYLTRLLSVEGSTLREALTHRKIIAKGEELLSPLNLEQAAYARDALAKAVYSRTFTWLVGKINRSLASKDVESPSWRSTTVLGLLDIYGFEVFQHNSFEQFCINYCNEKLQQLFIELTLKSEQEEYEAEGIAWEPVQYFNNKIICDLVEEKFKGIISILDEECLRPGEATDLTFLEKLEDTVKHHPHFLTHKLADQRTRKSLGRGEFRLLHYAGEVTYSVTGFLDKNNDLLFRNLKETMCSSKNPIMSQCFDRSELSDKKRPETVATQFKMSLLQLVEILQSKEPAYVRCIKPNDAKQPGRFDEVLIRHQVKYLGLLENLRVRRAGFAYRRKYEAFLQRYKSLCPETWPTWAGRPQDGVAVLVRHLGYKPEEYKMGRTKIFIRFPKTLFATEDALEVRRQSLATKIQAAWRGFHWRQKFLRVKRSAICIQSWWRGTLGRRKAAKRKWAAQTIRRLIRGFILRHAPRCPENAFFLDHVRTSFLLNLRRQLPRNVLDTSWPTPPPALREASELLRELCIKNMVWKYCRSISPEWKQQLQQKAVASEIFKGKKDNYPQSVPRLFISTRLGTDEISPRVLQALGSEPIQYAVPVVKYDRKGYKPRSRQLLLTPNAVVIVEDAKVKQRIDYANLTGISVSSLSDSLFVLHVQRADNKQKGDVVLQSDHVIETLTKTALSANRVNSININQGRILSNPGNTV

SEQ ID NO: 882858 - protein, 771 aa, Homo sapiens
  misc_feature (1)..(1): Xaa can be any naturally occurring amino acid
XYKISVGPGWTNVQDLLSIVASVLHLGNIHFAANEESNAQVTTENQLKYLTRLLSVEGSTLREALTHRKIIAKGEELLSPLNLEQAAYARDALAKAVYSRTFTWLVGKINRSLASKDVESPSWRSTTVLGLLDIYGFEVFQHNSFEQFCINYCNEKLQQLFIELTLKSEQEEYEAEGIAWEPVQYFNNKIICDLVEEKFKGIISILDEECLRPGEATDLTFLEKLEDTVKHHPHFLTHKLADQRTRKSLGRGEFRLLHYAGEVTYSVTGFLDKNNDLLFRNLKETMCSSKNPIMSQCFDRSELSDKKRPETVATQFKMSLLQLVEILQSKEPAYVRCIKPNDAKQPGRFDEVLIRHQVKYLGLLENLRVRRAGFAYRRKYEAFLQRYKSLCPETWPTWAGRPQDGVAVLVRHLGYKPEEYKMGRTKIFIRFPKTLFATEDALEVRRQSLATKIQAAWRGFHWRQKFLRVKRSAICIQSWWRGTLGRRKAAKRKWAAQTIRRLIRGFILRHAPRCPENAFFLDHVRTSFLLNLRRQLPRNVLDTSWPTPPPALREASELLRELCIKNMVWKYCRSISPEWKQQLQQKAVASEIFKGKKDNYPQSVPRLFISTRLGTDEISPRVLQALGSEPIQYAVPVVKYDRKGYKPRSRQLLLTPNAVVIVEDAKVKQRIDYANLTGISVSSLSDSLFVLHVQRADNKQKGDVVLQSDHVIETLTKTALSANRVNSININQGSITFAGGPGRMAPLTSHPARSCSSPRPRTGTWLWSPPG

SEQ ID NO: 882859 - protein, 643 aa, Homo sapiens
RFSHNCLFAASILHSNYLLYCVSWELASSNAAAQSTKIGSRMRYEAGRASQWEPVQYFNNKIICDLVEEKFKGIISILDEECLRPGEATDLTFLEKLEDTVKHHPHFLTHKLADQRTRKSLGRGEFRLLHYAGEVTYSVTGFLDKNNDLLFRNLKETMCSSKNPIMSQCFDRSELSDKKRPETVATQFKMSLLQLVEILQSKEPAYVRCIKPNDAKQPGRFDEVLIRHQVKYLGLLENLRVRRAGFAYRRKYEAFLQRYKSLCPETWPTWAGRPQDGVAVLVRHLGYKPEEYKMGRTKIFIRFPKTLFATEDALEVRRQSLATKIQAAWRGFHWRQKFLRVKRSAICIQSWWRGTLGRRKAAKRKWAAQTIRRLIRGFILRHAPRCPENAFFLDHVRTSFLLNLRRQLPRNVLDTSWPTPPPALREASELLRELCIKNMVWKYCRSISPEWKQQLQQKAVASEIFKGKKDNYPQSVPRLFISTRLGTDEISPRVLQALGSEPIQYAVPVVKYDRKGYKPRSRQLLLTPNAVVIVEDAKVKQRIDYANLTGISVSSLSDSLFVLHVQRADNKQKGDVVLQSDHVIETLTKTALSANRVNSININQGSITFAGGPGRMAPLTSHPARSCSSPRPRTGTWLWSPPG

SEQ ID NO: 882860 - protein, 1100 aa, Homo sapiens
MLVACWPMGECARAADPQARHAAQPGPARAGRATPALGSDGVRVTMESALTARDRVGVQDFVLLENFTSEAAFIENLRRRFRENLIYTYIGPVLVSVNPYRDLQIYSRQHMERYRGVSFYEVPPHLFAVADTVYRALRTERRDQAVMISGESGAGKTEATKRLLQFYAETCPAPERGGAVRDRLLQSNPVLEAFGNAKTLRNDNSSRFGKYMDVQFDFKGAPVGGHILSYLLEKSRVVHQNHGERNFHIFYQLLEGGEEETLRRLGLERNPQSYLYLVKGQCAKVSSINDKSDWKVVRKALTVIDFTEDEVEDLLSIVASVLHLGNIHFAANEESNAQVTTENQLKYLTRLLSVEGSTLREALTHRKIIAKGEELLSPLNLEQAAYARDALAKAVYSRTFTWLVGKINRSLASKDVESPSWRSTTVLGLLDIYGFEVFQHNSFEQFCINYCNEKLQQLFIELTLKSEQEEYEAEGIAWEPVQYFNNKIICDLVEEKFKGIISILDEECLRPGEATDLTFLEKLEDTVKHHPHFLTHKLADQRTRKSLGRGEFRLLHYAGEVTYSVTGFLDKNNDLLFRNLKETMCSSKNPIMSQCFDRSELSDKKRPETVATQFKMSLLQLVEILQSKEPAYVRCIKPNDAKQPGRFDEVLIRHQVKYLGLLENLRVRRAGFAYRRKYEAFLQRYKSLCPETWPTWAGRPQDGVAVLVRHLGYKPEEYKMGRTKIFIRFPKTLFATEDALEVRRQSLATKIQAAWRGFHWRQKFLRVKRSAICIQSWWRGTLGRRKAAKRKWAAQTIRRLIRGFILRHAPRCPENAFFLDHVRTSFLLNLRRQLPRNVLDTSWPTPPPALREASELLRELCIKNMVWKYCRSISPEWKQQLQQKAVASEIFKGKKDNYPQSVPRLFISTRLGEPLTFQHSDLSSPSWSPIASTDFPPRHLSAGTDEISPRVLQALGSEPIQYAVPVVKYDRKGYKPRSRQLLLTPNAVVIVEDAKVKQRIDYANLTGISVSSLSDSLFVLHVQRADNKQKGDVVLQSDHVIETLTKTALSANRVNSININQGSITFAGGPGRMAPLTSHPARSCSSPRPRTGTWLWSPPG

SEQ ID NO: 882861 - protein, 515 aa, Homo sapiens
TCEPPCVTYMVTGFLDKNNDLLFRNLKETMCSSKNPIMSQCFDRSELSDKKRPETVATQFKMSLLQLVEILQSKEPAYVRCIKPNDAKQPGRFDEVLIRHQVKYLGLLENLRVRRAGFAYRRKYEAFLQRYKSLCPETWPTWAGRPQDGVAVLVRHLGYKPEEYKMGRTKIFIRFPKTLFATEDALEVRRQSLATKIQAAWRGFHWRQKFLRVKRSAICIQSWWRGTLGRRKAAKRKWAAQTIRRLIRGFILRHAPRCPENAFFLDHVRTSFLLNLRRQLPRNVLDTSWPTPPPALREASELLRELCIKNMVWKYCRSISPEWKQQLQQKAVASEIFKGKKDNYPQSVPRLFISTRLGTDEISPRVLQALGSEPIQYAVPVVKYDRKGYKPRSRQLLLTPNAVVIVEDAKVKQRIDYANLTGISVSSLSDSLFVLHVQRADNKQKGDVVLQSDHVIETLTKTALSANRVNSININQGSITFAGGPGRMAPLTSHPARSCSSPRPRTGTWLWSPPG

SEQ ID NO: 882862 - protein, 1102 aa, Homo sapiens
MLVACWPMGECARAADPQARHAAQPGPARAGRATPALGSDGVRVTMESALTARDRVGVQDFVLLENFTSEAAFIENLRRRFRENLIYTYIGPVLVSVNPYRDLQIYSRQHMERYRGVSFYEVPPHLFAVADTVYRALRTERRDQAVMISGESGAGKTEATKRLLQFYAETCPAPERGGAVRDRLLQSNPVLEAFGNAKTLRNDNSSRFGKYMDVQFDFKGAPVGGHILSYLLEKSRVVHQNHGERNFHIFYQLLEGGEEETLRRLGLERNPQSYLYLVKGQCAKVSSINDKSDWKVVRKALTVIDFTEDEVEDLLSIVASVLHLGNIHFAANEESNAQVTTENQLKYLTRLLSVEGSTLREALTHRKIIAKGEELLSPLNLEQAAYARDALAKAVYSRTFTWLVGKINRSLASKDVESPSWRSTTVLGLLDIYGFEVFQHNSFEQFCINYCNEKLQQLFIELTLKSEQEEYEAEGIAWEPVQYFNNKIICDLVEEKFKGIISILDEECLRPGEATDLTFLEKLEDTVKHHPHFLTHKLADQRTRKSLGRGEFRLLHYAGEVTYSVTGFLDKNNDLLFRNLKETMCSSKNPIMSQCFDRSELSDKKRPETVATQFKMSLLQLVEILQSKEPAYVRCIKPNDAKQPGRFDEVLIRHQVKYLGLLENLRVRRAGFAYRRKYEAFLQRYKSLCPETWPTWAGRPQDGVAVLVRHLGYKPEEYKMGRTKIFIRFPKTLFATEDALEVRRQSLATLPFMPLVELHTAPGSQLAPRALANCLSFPTAATKIQAAWRGFHWRQKFLRVKRSAICIQSWWRGTLGRRKAAKRKWAAQTIRRLIRGFILRHAPRCPENAFFLDHVRTSFLLNLRRQLPRNVLDTSWPTPPPALREASELLRELCIKNMVWKYCRSISPEWKQQLQQKAVASEIFKGKKDNYPQSVPRLFISTRLGTDEISPRVLQALGSEPIQYAVPVVKYDRKGYKPRSRQLLLTPNAVVIVEDAKVKQRIDYANLTGISVSSLSDSLFVLHVQRADNKQKGDVVLQSDHVIETLTKTALSANRVNSININQGSITFAGGPGRMAPLTSHPARSCSSPRPRTGTWLWSPPG

SEQ ID NO: 882863 - protein, 388 aa, Homo sapiens
MQRYKSLCPETWPTWAGRPQDGVAVLVRHLGYKPEEYKMGRTKIFIRFPKTLFATEDALEVRRQSLATKIQAAWRGFHWRQKFLRVKRSAICIQSWWRGTLGRRKAAKRKWAAQTIRRLIRGFILRHAPRCPENAFFLDHVRTSFLLNLRRQLPRNVLDTSWPTPPPALREASELLRELCIKNMVWKYCRSISPEWKQQLQQKAVASEIFKGKKDNYPQSVPRLFISTRLGTDEISPRVLQALGSEPIQYAVPVVKYDRKGYKPRSRQLLLTPNAVVIVEDAKVKQRIDYANLTGISVSSLSDSLFVLHVQRADNKQKGDVVLQSDHVIETLTKTALSANRVNSININQGSITFAGGPGRMAPLTSHPARSCSSPRPRTGTWLWSPPG

SEQ ID NO: 882864 - protein, 535 aa, Homo sapiens
MLVACWPMGECARAADPQARHAAQPGPARAGRATPALGSDGVRVTMESALTARDRVGVQDFVLLENFTSEAAFIENLRRRFRENLIYTYIGPVLVSVNPYRDLQIYSRQHMERYRGVSFYEVPPHLFAVADTVYRALRTERRDQAVMISGESGAGKTEATKRLLQFYAETCPAPERGGAVRDRLLQSNPVLEAFGNAKTLRNDNSSRFGKYMDVQFDFKGAPVGGHILSYLLEKSRVVHQNHGERNFHIFYQLLEGGEEETLRRLGLERNPQSYLYLVKGQCAKVSSINDKSDWKVVRKALTVIDFTEDEVEDLLSIVASVLHLGNIHFAANEESNAQVTTENQLKYLTRLLSVEGSTLREALTHRKIIAKGEELLSPLNLEQAAYARDALAKAVYSRTFTWLVGKINRSLASKDVESPSWRSTTVLGLLDIYGFEVFQHNSFEQFCINYCNEKLQQLFIELTLKSEQEEYEAEGIAWEPVQYFNNKIICDLVEEKFKGIISILDEECLRPGEATDLTFLEKLEDTVKHHPHFLT

SEQ ID NO: 882865 - protein, 558 aa, Homo sapiens
MLVACWPMGECARAADPQARHAAQPGPARAGRATPALGSDGVRVTMESALTARDRVGVQDFVLLENFTSEAAFIENLRRRFRENLIYTYIGPVLVSVNPYRDLQIYSRQHMERYRGVSFYEVPPHLFAVADTVYRALRTERRDQAVMISGESGAGKTEATKRLLQFYAETCPAPERGGAVRDRLLQSNPVLEAFGNAKTLRNDNSSRFGKYMDVQFDFKGAPVGGHILSYLLEKSRVVHQNHGERNFHIFYQLLEGGEEETLRRLGLERNPQSYLYLVKGQCAKVSSINDKSDWKVVRKALTVIDFTEDEVEDLLSIVASVLHLGNIHFAANEESNAQVTTENQLKYLTRLLSVEGSTLREALTHRKIIAKGEELLSPLNLEQAAYARDALAKAVYSRTFTWLVGKINRSLASKDVESPSWRSTTVLGLLDIYGFEVFQHNSFEQFCINYCNEKLQQLFIELTLKSEQEEYEAEGIAWEPVQALGGQTACPHTRAPLKDVGPFLAPDPSLAWERGDGAGLGRSGRGITSFCCFSLLLPSRAWGLPSCLYALLGVSAHC

SEQ ID NO: 882866 - protein, 681 aa, Homo sapiens
GRFADGVGERVSRLSATSGGSWAPPGSDVQLLEYEASAAGLIRSFSERFPEDGPELEEILTQLATADARFWKGPSEAPLAKLEEDVWPCPQFHQTKAASGPPFVNEANSKWLDAHYDPMANIHTFSACLALADLHGDGEYKLVVGDLGPGGQQPRLKVLKGPLVMTESPLPALPAAAATFLMEQHEPRTPALALASGPCVYVYKNLRPYFKFSLPQLPPNPLEQDLWNQAKEDRIDPLTLKEMLESIRETAEEPLSIQSLRFLQLELSEMEAFVNQHKSNSIKRQTVITTMTTLKKNLADEDAVSCLVLGTENKELLVLDPEAFTILAKMSLPSVPVFLEVSGQFDVEFRLAAACRNGNIYILRRDSKHPKYCIELSAQPVGLIRVHKVLVVGSTQDSLHGFTHKGKKLWTVQMPAAILTMNLLEQHSRGLQAVMAGLANGEVRIYRDKALLNVIHTPDAVTSLCFGRYGREDNTLIMTTRGGGLIIKILKRTAVFVEGGSEVGPPPAQAMKLNVPRKTRLYVDQTLREREAGTAMHRAFQTDLYLLRLRAARAYLQALESSLSPLSTTAREPLKLHAVVQGLGPTFKLTLHLQNTSTTRPVLGLLVCFLYNEALYSLPRAFFKVPLLVPGLNYPLETFVESLSNKGISDIIKVLVLREGQSAPLLSAHVNMPGSEGLAAA

SEQ ID NO: 882867 - protein, 290 aa, Homo sapiens
SGLAATTPAKMAAASSSDSDACGAESNEANSKWLDAHYDPMANIHTFSACLALADLHGDGEYKLVVGDLGPGGQQPRLKVLKGPLVMTESPLPALPAAAATFLMEQHEPRTPALALASGPCVYVYKNLRPYFKFSLPQLPPNPLEQDLWNQAKEDRIDPLTLKEMLESIRETAEEPLSIQSLRFLQLELSEMEAFVNQHKSNSIKRQTVITTMTTLKKNLADEDAVSCLVLGTENKELLVLDPEAFTILAKDAVTSLCFGRYGREDKTSSGPLEVWLISGPERTAGLKRT

SEQ ID NO: 882868 - protein, 315 aa, Homo sapiens
SGLAATTPAKMAAASSSDSDACGAESNEANSKWLDAHYDPMANIHTFSACLALADLHGDGEYKLVVGDLGPGGQQPRLKVLKGPLVMTESPLPALPAAAATFLMEQHEPRTPALALASGPCVYVYKNLRPYFKFSLPQLPPNPLEQDLWNQAKEGETAEEPLSIQSLRFLQLELSEMEAFVNQHKSNSIKRQTVITTMTTLKKNLADEDAVSCLVLGTENKELLVLDPEAFTILAKMSLPSVPVFLEVSGQFDVEFRLAAACRNGNIYILRRDSKAPKVLHRAERPACGTYPGTPGPKWWGSNPRKAAGFTHKGT

SEQ ID NO: 882869 - protein, 229 aa, Homo sapiens
MTESPLPALPAAAATFLMEQHEPRTPALALASGPCVYVYKNLRPYFKFSLPQLPPNPLEQDLWNQAKEGETAEEPLSIQSLRFLQLELSEMEAFVNQHKSNSIKRQTVITTMTTLKKNLADEDAVSCLVLGTENKELLVLDPEAFTILAKMSLPSVPVFLEVSGQFDVEFRLAAACRNGNIYILRRDSKAPKVLHRAERPACGTYPGTPGPKWWGSNPRKAAGFTHKGT

SEQ ID NO: 882870 - protein, 603 aa, Homo sapiens
SGLAATTPAKMAAASSSDSDACGAESNEANSKWLDAHYDPMANIHTFSACLALADLHGDGEYKLVVGDLGPGGQQPRLKVLKGPLVMTESPLPALPAAAATFLMEQHEPRTPALALASGPCVYVYKNLRPYFKFSLPQLPPNPLEQDLWNQAKEDRIDPLTLKEMLESIRETAEEPLSIQSLRFLQLELSEMEAFVNQHKSNSIKRQTVITTMTTLKKNLADEDAVSCLVLGTENKELLVLDPEAFTILAKMSLPSVPVFLEVSGQFDVEFRLAAACRNGNIYILRRDSKHPKYCIELSAQPVGLIRVHKVLVVGSTQDSLHGFTHKGKKLWTVQMPAAILTMNLLEQHSRGLQAVMAGLANGEVRIYRDKALLNVIHTPDAVTSLCFGRYGREDNTLIMTTRGGGLIIKILKRTAVFVEGGSEVGPPPAQAMKLNVPRKTRLYVDQTLREREAGTAMHRAFQTDLYLLRLRAARAYLQALESSLSPLSTTAREPLKLHAVVQGLGPTFKLTLHLQNTSTTRPVLGLLVCFLYNEALYSLPRAFFKVPLLVPGLNYPLETFVESLSNKGISDIIKVLVLREGQSAPLLSAHVNMPGSEGLAAA

SEQ ID NO: 882871 - protein, 667 aa, Homo sapiens
SGLAATTPAKMAAASSSDSDACGAESNEANSKWLDAHYDPMANIHTFSACLALADLHGDGEYKLVVGDLGPGGQQPRLKVLKGPLVMTESPLPALPAAAATFLMEQHEPRTPALALASGPCVYVYKNLRPYFKFSLPQLPPNPLEQDLWNQAKEDRIDPLTLKEMLESIRETAEEPLSIQSLRFLQLELSEMEAFVNQHKSNSIKRQTVITTMTTLKKNLADEDAVSCLVLGTENKELLVLDPEAFTILAKMSLPSVPVFLEVSGQFDVEFRLAAACRNGNIYILRMIIQATIVKVGGRQDTIVKVGGRQDTIVKVGGRHTVMFSKATHLLRWQKWNNPRVICFGASVPPRDSKHPKYCIELSAQPVGLIRVHKVLVVGSTQDSLHGFTHKGKKLWTVQMPAAILTMNLLEQHSRGLQAVMAGLANGEVRIYRDKALLNVIHTPDAVTSLCFGRYGREDNTLIMTTRGGGLIIKILKRTAVFVEGGSEVGPPPAQAMKLNVPRKTRLYVDQTLREREAGTAMHRAFQTDLYLLRLRAARAYLQALESSLSPLSTTAREPLKLHAVVQGLGPTFKLTLHLQNTSTTRPVLGLLVCFLYNEALYSLPRAFFKVPLLVPGLNYPLETFVESLSNKGISDIIKVLVLREGQSAPLLSAHVNMPGSEGLAAA

SEQ ID NO: 882872 - protein, 517 aa, Homo sapiens [sequence omitted]

SEQ ID NO: 882873 - protein, 639 aa, Homo sapiens
SGLAATTPAKMAAASSSDSDACGAESNEANSKWLDAHYDPMANIHTFSACLALADLHGDGEYKLVVGDLGPGGQQPRLKVLKGPLVMTESPLPALPAAAATFLMEQHEPRTPALALASGPCVYVYKNLRPYFKFSLPQLPPNPLEQDLWNQAKEDRIDPLTLKEMLESILVRGCLPLHTPLTPSSHLSPRAPFFHSAAMLAPFPCRETAEEPLSIQSLRFLQLELSEMEAFVNQHKSNSIKRQTVITTMTTLKKNLADEDAVSCLVLGTENKELLVLDPEAFTILAKMSLPSVPVFLEVSGQFDVEFRLAAACRNGNIYILRRDSKHPKYCIELSAQPVGLIRVHKVLVVGSTQDSLHGFTHKGKKLWTVQMPAAILTMNLLEQHSRGLQAVMAGLANGEVRIYRDKALLNVIHTPDAVTSLCFGRYGREDNTLIMTTRGGGLIIKILKRTAVFVEGGSEVGPPPAQAMKLNVPRKTRLYVDQTLREREAGTAMHRAFQTDLYLLRLRAARAYLQALESSLSPLSTTAREPLKLHAVVQGLGPTFKLTLHLQNTSTTRPVLGLLVCFLYNEALYSLPRAFFKVPLLVPGLNYPLETFVESLSNKGISDIIKVLVLREGQSAPLLSAHVNMPGSEGLAAA

SEQ ID NO: 882874 - protein, 400 aa, Homo sapiens
RPPETWAAVKAPAQSARENWAGLVAPGPLLMQQCAGATARLPSLKHPLPHHPHCWAYSSRLVSTYGGSTPPTAPTQTVCCLFHRDSKHPKYCIELSAQPVGLIRVHKVLVVGSTQDSLHGFTHKGKKLWTVQMPAAILTMNLLEQHSRGLQAVMAGLANGEVRIYRDKALLNVIHTPDAVTSLCFGRYGREDNTLIMTTRGGGLIIKILKRTAVFVEGGSEVGPPPAQAMKLNVPRKTRLYVDQTLREREAGTAMHRAFQTDLYLLRLRAARAYLQALESSLSPLSTTAREPLKLHAVVQGLGPTFKLTLHLQNTSTTRPVLGLLVCFLYNEALYSLPRAFFKVPLLVPGLNYPLETFVESLSNKGISDIIKVLVLREGQSAPLLSAHVNMPGSEGLAAA

SEQ ID NO: 882875 - protein, 603 aa, Homo sapiens; identical to SEQ ID NO: 882870

SEQ ID NO: 882876 - protein, 585 aa, Homo sapiens
SGLAATTPAKMAAASSSDSDACGAESNEANSKWLDAHYDPMANIHTFSACLALADLHGDGEYKLVVGDLGPGGQQPRLKVLKGPLVMTESPLPALPAAAATFLMEQHEPRTPALALASGPCVYVYKNLRPYFKFSLPQLPPNPLEQDLWNQAKEDRIDPLTLKEMLESIRETAEEPLSIQSLRFLQLELSEMEAFVNQHKSNSIKRQTVITTMTTLKKNLADEDAVSCLVLGTENKELLVLDPEAFTILAKMSLPSVPVFLEVSGQFDVEFRLAAACRNGNIYILRRDSKHPKYCIELSAQPVGLIRVHKVLVVGSTQDSLHGFTHKGKKLWTVQMPAAILTMNLLEQHSRGLQAVMAGLANGEVRIYRDKALLNVIHTPDAVTSLCFGRYGREDNTLIMTTRGGGLIIKILKRTAVFVEGGSEVGPPPAQAMKLNVPRKTRLYVDQTLREREAGTAMHRAFQTDLYLLRLRAARAYLQALESSLSPLSTTAREPLKLHAVVQGLGPTFKLTLHLQNTSTTRPVLGLLVCFLYNEALYSLPRAFFKVPLLVPGLNYPLETFVESLSNKGISDIIKVGPALVPRGR

SEQ ID NO: 882877 - protein, 495 aa, Homo sapiens
SGLAATTPAKMAAASSSDSDACGAESNEANSKWLDAHYDPMANIHTFSACLALADLHGDGEYKLVVGDLGPGGQQPRLKVLKGPLVMTESPLPALPAAAATFLMEQHEPRTPALALASGPCVYVYKNLRPYFKFSLPQLPPNPLEQDLWNQAKEDRIDPLTLKEMLESIRETAEEPLSIQSLRFLQLELSEMEAFVNQHKSNSIKRQTVITTMTTLKKNLADEDAVSCLVLGTENKELLVLDPEAFTILAKMSLPSVPVFLEVSGQFDVEFRLAAACRNGNIYILRRDSKHPKYCIELSAQPVGLIRVHKVLVVGSTQDSLHGFTHKGKKLWTVQMPAAILTMNLLEQHSRGLQAVMAGLANGEVRIYRDKALLNVIHTPDAVTSLCFGRYGREDNTLIMTTRGGGLIIKILKRTAVFVEGGSEVGPPPAQAMKLNVPRKTRLYVDQTLREREAGTGEPQTGSFPFFLLHCSYTAKLGECCPASLCTGRRSRPTR

SEQ ID NO: 882878 - protein, 287 aa, Homo sapiens
SGLAATTPAKMAAASSSDSDACGAESNEANSKWLDAHYDPMANIHTFSACLALADLHGDGEYKLVVGDLGPGGQQPRLKVLKGPLVMTESPLPALPAAAATFLMEQHEPRTPALALASGPCVYVYKNLRPYFKFSLPQLPPNPLEQDLWNQAKEDRIDPLTLKEMLESIRETAEEPLSIQSLRFLQLELSEMEAFVNQHKSNSIKRQTVITTMTTLKKNLADEDAVSCLVLGTENKELLVLDPEAFTILAKMSLPSVPVFLEVSGQFDVEFRLAAACRNGNIYILRR

SEQ ID NO: 882879 - protein, 217 aa, Homo sapiens
SGLAATTPAKMAAASSSDSDACGAESNEANSKWLDAHYDPMANIHTFSACLALADLHGDGEYKLVVGDLGPGGQQPRLKVLKGPLVMTESPLPALPAAAATFLMEQHEPRTPALALASGPCVYVYKNLRPYFKFSLPQLPPNPLEQDLWNQAKEDRIDPLTLKEMLESIRETAEEPLSIQSLRFLQLELSEMEAFVNQHKSNSIKRQVIPPSLFISL

SEQ ID NO: 882880 - protein, 262 aa, Homo sapiens
SGLAATTPAKMAAASSSDSDACGAESNEANSKWLDAHYDPMANIHTFSACLALADLHGDGEYKLVVGDLGPGGQQPRLKVLKGPLVMTESPLPALPAAAATFLMEQHEPRTPALALASGPCVYVYKNLRPYFKFSLPQLPPNPLEQDLWNQAKEGETAEEPLSIQSLRFLQLELSEMEAFVNQHKSNSIKRQTVITTMTTLKKNLADEDAVSCLVLGTENKELLVLDPEAFTILAKVSVRSGPGPAGGPGCILSPCSTVSSG

SEQ ID NO: 882881 - protein, 259 aa, Homo sapiens
MGLIPNCLSPTSSNEANSKWLDAHYDPMANIHTFSACLALADLHGDGEYKLVVGDLGPGGQQPRLKVLKGPLVMTESPLPALPAAAATFLMEQHEPRTPALALASGPCVYVYKNLRPYFKFSLPQLPPNPLEQDLWNQAKEGETAEEPLSIQSLRFLQLELSEMEAFVNQHKSNSIKRQTVITTMTTLKKNLADEDAVSCLVLGTENKELLVLDPEAFTILAKMSLPSVPVFLEVSGQFDVEFRLAAACRNGNIYILRR

SEQ ID NO: 882882 - protein, 272 aa, Homo sapiens
MTESPLPALPAAAATFLMEQHEPRTPALALASGPCVYVYKNLRPYFKFSLPQLPPNPLEQDLWNQAKEGETAEEPLSIQSLRKDPVEGQGLGGSRERKQPPECARMMEEGSEAGACRCQFSVVSRFLQLELSEMEAFVNQHKSNSIKRQTVITTMTTLKKNLADEDAVSCLVLGTENKELLVLDPEAFTILAKMSLPSVPVFLEVSGQFDVEFRLAAACRNGNIYILRRDSKAPKVLHRAERPACGTYPGTPGPKWWGSNPRKAAGFTHKGT

SEQ ID NO: 882883 - protein, 900 aa, Homo sapiens
SGQTPGLAPRVAPSRAEPSGAGGASGITRVAVPEQLQSIEGWRGAHTVHGAGGQGGQGAVVMAQFDTEYQRLEASYSDSPPGEEDLLVHVAEGSKSPWHHIENLDLFFSRVYNLHQKNGFTCMLIGEIFELMQFLFVVAFTTFLVSCVDYDILFANKMVNHSLHPTEPVKVTLPDAFLPAQVCSARIQENGSLITILVIAGVFWIHRLIKFIYNICCYWEIHSFYLHALRIPMSALPYCTWQEVQARIVQTQKEHQICIHKRELTELDIYHRILRFQNYMVALVNKSLLPLRFRLPGLGEAVFFTRGLKYNFELILFWGPGSLFLNEWSLKAEYKRGGQRLELAQRLSNRILWIGIANFLLCPLILIWQILYAFFSYAEVLKREPGALGARCWSLYGRCYLRHFNELEHELQSRLNRGYKPASKYMNCFLSPLLTLLAKNGAFFAGSILAVLIALTIYDEDVLAVEHVLTTVTLLGVTVTVCRSFIPDQHMVFCPEQLLRVILAHIHYMPDHWQGNAHRSQTRDEFAQLFQYKAVFILEELLSPIVTPLILIFCLRPRALEIIDFFRNFTVEVVGVGDTCSFAQMDVRQHGHPQWLSAGQTEASVYQQAEDGKTELSLMHFAITNPGWQPPRESTAFLGFLKEQVQRDGAAASLAQGGLLPENALFTSIQSLQSESEPLSLIANVVAGSSCRGPPLPRDLQGSRHRAEVASALRSFSPLQPGQAPTGRAHSTMTGSGVDARTASSGSSVWEGQLQSLVLSEYASTEMSLHALYMHQLHKQQAQAEPERHVWHRRESDESGESAPDEGGEGARAPQSIPRSASYPCAAPRPGAPETTALHGGFQRRYGGITDPGTVPRVPSHFSRLPLGGWAEDGQSASRHPEPVPEEGSEDELPPQVHKV

SEQ ID NO: 882884 - protein, 839 aa, Homo sapiens
MAQFDTEYQRLEASYSDSPPGEEDLLVHVAEGSKSPWHHIENLDLFFSRVYNLHQKNGFTCMLIGEIFELMQFLFVVAFTTFLVSCVDYDILFANKMVNHSLHPTEPVKVTLPDAFLPAQVCSARIQENGSLITILVIAGVFWIHRLIKFIYNICCYWEIHSFYLHALRIPMSALPYCTWQEVQARIVQTQKEHQICIHKRELTELDIYHRILRFQNYMVALVNKSLLPLRFRLPGLGEAVFFTRGLKYNFELILFWGPGSLFLNEWSLKAEYKRGGQRLELAQRLSNRILWIGIANFLLCPLILIWQILYAFFSYAEVLKREPGALGARCWSLYGRCYLRHFNELEHELQSRLNRGYKPASKYMNCFLSPLLTLLAKNGAFFAGSILAVLIALTIYDEDVLAVEHVLTTVTLLGVTVTVCRSFIPDQHMVFCPEQLLRVILAHIHYMPDHWQGNAHRSQTRDEFAQLFQYKAVFILEELLSPIVTPLILIFCLRPRALEIIDFFRNFTVEVVGVGDTCSFAQMDVRQHGHPQWLSAGQTEASVYQQAEDGKTELSLMHFAITNPGWQPPRESTAFLGFLKEQVQRDGAAASLAQGGLLPENALFTSIQSLQSESEPLSLIANVVAGSSCRGPPLPRDLQGSRHRAEVASALRSFSPLQPGQAPTGRAHSTMTGSGVDARTASSGSSVWEGQLQSLVLSEYASTEMSLHALYMHQLHKQQAQAEPERHVWHRRESDESGESAPDEGGEGARAPQSIPRSASYPCAAPRPGAPETTALHGGFQRRYGGITDPGTVPRVPSHFSRLPLGGWAEDGQSASRHPEPVPEEGSEDELPPQVHKV

SEQ ID NO: 882885 - protein, 839 aa, Homo sapiens; identical to SEQ ID NO: 882884

SEQ ID NO: 882886 - protein, 839 aa, Homo sapiens; identical to SEQ ID NO: 882884

SEQ ID NO: 882887 - protein, 883 aa, Homo sapiens
MRAGAKGIRAGALGYSCKVLREFSAGAKGIRDGAGGQGGQGAVVMAQFDTEYQRLEASYSDSPPGEEDLLVHVAEGSKSPWHHIENLDLFFSRVYNLHQKNGFTCMLIGEIFELMQFLFVVAFTTFLVSCVDYDILFANKMVNHSLHPTEPVKVTLPDAFLPAQVCSARIQENGSLITILVIAGVFWIHRLIKFIYNICCYWEIHSFYLHALRIPMSALPYCTWQEVQARIVQTQKEHQICIHKRELTELDIYHRILRFQNYMVALVNKSLLPLRFRLPGLGEAVFFTRGLKYNFELILFWGPGSLFLNEWSLKAEYKRGGQRLELAQRLSNRILWIGIANFLLCPLILIWQILYAFFSYAEVLKREPGALGARCWSLYGRCYLRHFNELEHELQSRLNRGYKPASKYMNCFLSPLLTLLAKNGAFFAGSILAVLIALTIYDEDVLAVEHVLTTVTLLGVTVTVCRSFIPDQHMVFCPEQLLRVILAHIHYMPDHWQGNAHRSQTRDEFAQLFQYKAVFILEELLSPIVTPLILIFCLRPRALEIIDFFRNFTVEVVGVGDTCSFAQMDVRQHGHPQWLSAGQTEASVYQQAEDGKTELSLMHFAITNPGWQPPRESTAFLGFLKEQVQRDGAAASLAQGGLLPENALFTSIQSLQSESEPLSLIANVVAGSSCRGPPLPRDLQGSRHRAEVASALRSFSPLQPGQAPTGRAHSTMTGSGVDARTASSGSSVWEGQLQSLVLSEYASTEMSLHALYMHQLHKQQAQAEPERHVWHRRESDESGESAPDEGGEGARAPQSIPRSASYPCAAPRPGAPETTALHGGFQRRYGGITDPGTVPRVPSHFSRLPLGGWAEDGQSASRHPEPVPEEGSEDELPPQVHKV

SEQ ID NO: 882888 - protein, 427 aa, Homo sapiens
MAIRSTTPRRSFIPDQHMVFCPEQLLRVILAHIHYMPDHWQGNAHRSQTRDEFAQLFQYKAVFILEELLSPIVTPLILIFCLRPRALEIIDFFRNFTVEVVGVGDTCSFAQMDVRQHGHPQWLSAGQTEASVYQQAEDGKTELSLMHFAITNPGWQPPRESTAFLGFLKEQVQRDGAAASLAQGGLLPENALFTSIQSLQSESEPLSLIANVVAGSSCRGPPLPRDLQGSRHRAEVASALRSFSPLQPGQAPTGRAHSTMTGSGVDARTASSGSSVWEGQLQSLVLSEYASTEMSLHALYMHQLHKQQAQAEPERHVWHRRESDESGESAPDEGGEGARAPQSIPRSASYPCAAPRPGAPETTALHGGFQRRYGGITDPGTVPRVPSHFSRLPLGGWAEDGQSASRHPEPVPEEGSEDELPPQVHKV

SEQ ID NO: 882889 - protein, 419 aa, Homo sapiens
PSQAGGNRTMVFCPEQLLRVILAHIHYMPDHWQGNAHRSQTRDEFAQLFQYKAVFILEELLSPIVTPLILIFCLRPRALEIIDFFRNFTVEVVGVGDTCSFAQMDVRQHGHPQWLSAGQTEASVYQQAEDGKTELSLMHFAITNPGWQPPRESTAFLGFLKEQVQRDGAAASLAQGGLLPENALFTSIQSLQSESEPLSLIANVVAGSSCRGPPLPRDLQGSRHRAEVASALRSFSPLQPGQAPTGRAHSTMTGSGVDARTASSGSSVWEGQLQSLVLSEYASTEMSLHALYMHQLHKQQAQAEPERHVWHRRESDESGESAPDEGGEGARAPQSIPRSASYPCAAPRPGAPETTALHGGFQRRYGGITDPGTVPRVPSHFSRLPLGGWAEDGQSASRHPEPVPEEGSEDELPPQVHKV

SEQ ID NO: 882890 - protein, 900 aa, Homo sapiens; identical to SEQ ID NO: 882883

SEQ ID NO: 882891 - protein, 828 aa, Homo sapiens
SGQTPGLAPRVAPSRAEPSGAGGASGITRVAVPEQLQSIEGWRGAHTVHGAGGQGGQGAVVMAQFDTEYQRLEASYSDSPPGEEDLLVHVAEGSKSPWHHIENLDLFFSRVYNLHQKNGFTCMLIGEIFELMQFLFVVAFTTFLVSCVDYDILFANKMVNHSLHPTEPVKVTLPDAFLPAQVCSARIQENGSLITILVIAGVFWIHRLIKFIYNICCYWEIHSFYLHALRIPMSALPYCTWQEVQARIVQTQKEHQICIHKRELTELDIYHRILRFQNYMVALVNKSLLPLRFRLPGLGEAVFFTRGLKYNFELILFWGPGSLFLNEWSLKAEYKRGGQRLELAQRLSNRILWIGIANFLLCPLILIWQILYAFFSYAEVLKREPGALGARCWSLYGRCYLRHFNELEHELQSRLNRGYKPASKYMNCFLSPLLTLLAKNGAFFAGSILAVLIALTIYDEDVLAVEHVLTTVTLLGVTVTVCRSFIPDQHMVFCPEQLLRVILAHIHYMPDHWQGNAHRSQTRDEFAQLFQYKAVFILEELLSPIVTPLILIFCLRPRALEIIDFFRNFTVEVVGVGDTCSFAQMDVRQHGHPQWLSAGQTEASVYQQAEDGKTELSLMHFAITNPGWQPPRESTAFLGFLKEQVQRDGAAASLAQGGLLPENAGVDARTASSGSSVWEGQLQSLVLSEYASTEMSLHALYMHQLHKQQAQAEPERHVWHRRESDESGESAPDEGGEGARAPQSIPRSASYPCAAPRPGAPETTALHGGFQRRYGGITDPGTVPRVPSHFSRLPLGGWAEDGQSASRHPEPVPEEGSEDELPPQVHKV

SEQ ID NO: 882892 - protein, 190 aa, Homo sapiens
EGTAALSSLCGSQRSSQLLSVSVGRDRVDARTASSGSSVWEGQLQSLVLSEYASTEMSLHALYMHQLHKQQAQAEPERHVWHRRESDESGESAPDEGGEGARAPQSIPRSASYPCAAPRPGAPETTALHGGFQRRYGGITDPGTVPRVPSHFSRLPLGGWAEDGQSASRHPEPVPEEGSEDELPPQVHKV

SEQ ID NO: 882893 - protein, 115 aa, Homo sapiens
MYGTAGRVMRVEKAPLMKGERAPGPPSLSLALLAIPVQHPGLELLRPPPCMGASRGATVASQILAQCPGFPLISLGCLLEGGQKMGSRHQGTLSPCPKRARRMSYPLRCTRYRQG

SEQ ID NO: 882894 - protein, 900 aa, Homo sapiens; identical to SEQ ID NO: 882883

SEQ ID NO: 882895 - protein, 900 aa, Homo sapiens; identical to SEQ ID NO: 882883

SEQ ID NO: 882896 - protein, 531 aa, Homo sapiens
SGQTPGLAPRVAPSRAEPSGAGGASGITRVAVPEQLQSIEGWRGAHTVHGAGGQGGQGAVVMAQFDTEYQRLEASYSDSPPGEEDLLVHVAEGSKSPWHHIENLDLFFSRVYNLHQKNGFTCMLIGEIFELMQFLFVVAFTTFLVSCVDYDILFANKMVNHSLHPTEPVKVTLPDAFLPAQVCSARIQENGSLITILVIAGVFWIHRLIKFIYNICCYWEIHSFYLHALRIPMSALPYCTWQEVQARIVQTQKEHQICIHKRELTELDIYHRILRFQNYMVALVNKSLLPLRFRLPGLGEAVFFTRGLKYNFELILFWGPGSLFLNEWSLKAEYKRGGQRLELAQRLSNRILWIGIANFLLCPLILIWQILYAFFSYAEVLKREPGALGARCWSLYGRCYLRHFNELEHELQSRLNRGYKPASKYMNCFLSPLLTLLAKNGAFFAGSILAVLIALTIYDEDVLAVEHVLTTVTLLGVTVTVCRSFIPDQHMVFCPEQLLRVILAHIHYMPDHWQGNPSLRLSSPYNLSLSP

SEQ ID NO: 882897 - protein, 625 aa, Homo sapiens
SGQTPGLAPRVAPSRAEPSGAGGASGITRVAVPEQLQSIEGWRGAHTVHGAGGQGGQGAVVMAQFDTEYQRLEASYSDSPPGEEDLLVHVAEGSKSPWHHIENLDLFFSRVYNLHQKNGFTCMLIGEIFELMQFLFVVAFTTFLVSCVDYDILFANKMVNHSLHPTEPVKVTLPDAFLPAQVCSARIQENGSLITILVIAGVFWIHRLIKFIYNICCYWEIHSFYLHALRIPMSALPYCTWQEVQARIVQTQKEHQICIHKRELTELDIYHRILRFQNYMVALVNKSLLPLRFRLPGLGEAVFFTRGLKYNFELILFWGPGSLFLNEWSLKAEYKRGGQRLELAQRLSNRILWIGIANFLLCPLILIWQILYAFFSYAEVLKREPGALGARCWSLYGRCYLRHFNELEHELQSRLNRGYKPASKYMNCFLSPLLTLLAKNGAFFAGSILAVLIALTIYDEDVLAVEHVLTTVTLLGVTVTVCRSFIPDQHMVFCPEQLLRVILAHIHYMPDHWQGNAHRSQTRDEFAQLFQYKAVFILEELLSPIVTPLILIFCLRPRALEIIDFFRNFTVEVVGVGDTCSFAQMDVRQHGHPQVLGEEGARWPGMMLEHTVSLGKPQKDTSPES

SEQ ID NO: 882898 - protein, 551 aa, Homo sapiens
SGQTPGLAPRVAPSRAEPSGAGGASGITRVAVPEQLQSIEGWRGAHTVHGAGGQGGQGAVVMAQFDTEYQRLEASYSDSPPGEEDLLVHVAEGSKSPWHHIENLDLFFSRVYNLHQKNGFTCMLIGEIFELMQFLFVVAFTTFLVSCVDYDILFANKMVNHSLHPTEPVKVTLPDAFLPAQVCSARIQENGSLITILVIAGVFWIHRLIKFIYNICCYWEIHSFYLHALRIPMSALPYCTWQEVQARIVQTQKEHQICIHKRELTELDIYHRILRFQNYMVALVNKSLLPLRFRLPGLGEAVFFTRGLKYNFELILFWGPGSLFLNEWSLKAEYKRGGQRLELAQRLSNRILWIGIANFLLCPLILIWQILYAFFSYAEVLKREPGALGARCWSLYGRCYLRHFNELEHELQSRLNRGYKPASKYMNCFLSPLLTLLAKNGAFFAGSILAVLIALTIYDEDVLAVEHVLTTVTLLGVTVTVCRSFIPDQHMVFCPEQLLRVILAHIHYMPDHWQGNAHRSQTRDEFAQLFQYKAVFILEELLSPIVTPLIP

SEQ ID NO: 882899 - protein, 263 aa, Homo sapiens
QNYMVALVNKSLLPLRFRLPGLGEAVFFTRGLKYNFELILFWGPGSLFLNEWSLKAEYKRGGQRLELAQRLSNRILWIGIANFLLCPLILIWQILYAFFSYAEVLKREPGALGARCWSLYGRCYLRHFNELEHELQSRLNRGYKPASKYMNCFLSPLLTLLAKNGAFFAGSILAVLIALTIYDEDVLAVEHVLTTVTLLGVTVTVCRWARPQAGASRLAFLGKAYIYHDPDPTRSFIPDQHMVFCPEQLLRVILAHIHYMPDH

SEQ ID NO: 882900 - protein, 239 aa, Homo sapiens
MPKSKRDKKVSLTKTAKKGLELKQNLIEELRKCVDTYKYLFIFSVANMRNSKLKDIRNAWKHSRMFFGKNKVMMVALGRSPSDEYKDNLHQVSKRLRGEVGLLFTNRTKEEVNEWFTKYTEMDYARAGNKAAFTVSLDPGPLEQFPHSMEPQLRQLGLPTALKRGVVTLLSDYEVCKEGDVLTPEQARVLKLFGYEMAEFKVTIKYMWDSQSGRFQQMGDDLPESASESTEESDSEDDD

SEQ ID NO: 882901 - protein, 239 aa, Homo sapiens; identical to SEQ ID NO: 882900

SEQ ID NO: 882902 - protein, 239 aa, Homo sapiens; identical to SEQ ID NO: 882900

SEQ ID NO: 882903 - protein, 241 aa, Homo sapiens
MRVSKSKRDKKVSLTKTAKKGLELKQNLIEELRKCVDTYKYLFIFSVANMRNSKLKDIRNAWKHSRMFFGKNKVMMVALGRSPSDEYKDNLHQVSKRLRGEVGLLFTNRTKEEVNEWFTKYTEMDYARAGNKAAFTVSLDPGPLEQFPHSMEPQLRQLGLPTALKRGVVTLLSDYEVCKEGDVLTPEQARVLKLFGYEMAEFKVTIKYMWDSQSGRFQQMGDDLPESASESTEESDSEDDD

SEQ ID NO: 882904 - protein, 267 aa, Homo sapiens
ASAGPQSWDSARGPRSDGTLGIQGLPRHTGSCPTGAGESAGGGLAGRGRLQCTLGQAHARGSPRGPSQSPPRRRGPNGVHRLPPHVDSARCPNPSATRKVMMVALGRSPSDEYKDNLHQVSKRLRGEVGLLFTNRTKEEVNEWFTKYTEMDYARAGNKAAFTVSLDPGPLEQFPHSMEPQLRQLGLPTALKRGVVTLLSDYEVCKEGDVLTPEQARVLKLFGYEMAEFKVTIKYMWDSQSGRFQQMGDDLPESASESTEESDSEDDD

SEQ ID NO: 882905 - protein, 168 aa, Homo sapiens
PPLASHHTAAVIRLGTAWVWVSKRLRGEVGLLFTNRTKEEVNEWFTKYTEMDYARAGNKAAFTVSLDPGPLEQFPHSMEPQLRQLGLPTALKRGVVTLLSDYEVCKEGDVLTPEQARVLKLFGYEMAEFKVTIKYMWDSQSGRFQQMGDDLPESASESTEESDSEDDD

SEQ ID NO: 882906 - protein, 267 aa, Homo sapiens; identical to SEQ ID NO: 882904

SEQ ID NO: 882907 - protein, 134 aa, Homo sapiens
MNTKTTCTRWFTKYTEMDYARAGNKAAFTVSLDPGPLEQFPHSMEPQLRQLGLPTALKRGVVTLLSDYEVCKEGDVLTPEQARVLKLFGYEMAEFKVTIKYMWDSQSGRFQQMGDDLPESASESTEESDSEDDD

SEQ ID NO: 882908 - protein, 144 aa, Homo sapiens [sequence omitted]

SEQ ID NO: 882909 - protein, 114 aa, Homo sapiens
VLGVAQLDSVIIASPPIEDGVNLSLEHLQPYWEELENLVQSKKIVAIGTSDLDKGKHGVSLCLLQKLFGYEMAEFKVTIKYMWDSQSGRFQQMGDDLPESASESTEESDSEDDD

SEQ ID NO: 882910 - protein, 102 aa, Homo sapiens
MRVSKSKRDKKVSLTKTAKKGLELKQNLIEELRKCVDTYKYLFIFSVANMRNSKLKDIRNAWKHSRMFFGKNKVMMVALGRSPSDEYKDNLHQKSLALTGWS

SEQ ID NO: 882911 - protein, 227 aa, Homo sapiens
GPRSDGTLGIQGLPRHTGSCPTGAGESAGGGLAGRGRLQCTLGQAHARGSPRGPSQSPPRRRGPNGVHRLPPHVDSARCPNPSATRKRWAKGESGPWGELRGLATQPAVRASGRRGRRLERQDILEVFRCLAASWNGGFGAVKPPEVADARSGLGSGDSFCLVSGALARQLGREAAPEHRPRLCLLPFRPTFPNFGPFSSSCAPATLAAFPFFQHRFVPVSGVVCLR

SEQ ID NO: 882912 - protein, 200 aa, Homo sapiens
MERLSAAPVKGQTGPERPSPFSQLVYTNNDSYVIHHGDLRKIHKAASRGQAWKLERMMKKTTMDLNIRDAKKRTALYWACANGHAEVVTLLVDRKCQLDVLDGENRTILMKALQCQREACANILIDSGADPNIVDVYGNTAVHYAVNSENLSVVAKLLSCGTDIKVKNKAGHTPLLLAIRKRSEQIVEFLLTKKCKCKWS

SEQ ID NO: 882913 - protein, 68 aa, Homo sapiens
LLVDLISKCLHLKASIHQQLLEYKQKISKNSQNSNPEGTSEGTPDEAAPLAERTPDTAESLVERTPDE

SEQ ID NO: 882914 - protein, 180 aa, Homo sapiens
MERLSAAPVKGQTGPERPSPFSQLVYTNNDSYVIHHGDLRKIHKAASRGQAWKLERMMKKTTMDLNIRDAKKRTALYWACANGHAEVVTLLVDRKCQLDVLDGENRTILMKALQCQREACANILIDSGADPNIVDVYGNTAVHYAVNSENLSVVAKLLSCGTDIKVKNKVDINQCYFQNI

SEQ ID NO: 882915 - protein, 117 aa, Homo sapiens
AGVTVLLSCLKVLLRCLTVLLSCLTVLRSHFLPGEVGVSKSLARLRFLVLSGRMQGLKKGEGERRGLGKGEQREARALSSRWLQPWRGSLPPLSRARRAQSARAPSVSWSTPTTTLT

SEQ ID NO: 882916 - protein, 135 aa, Homo sapiens
MLARLYQKYKISWAWWRAPERETPSPKKKKKVKRSKLSKRTLRWTSGQACLRAAHLSHPQNRPPAAYPTLQYPLPRSLRSGRLQEAPESSRGLQSRARAPGSQGIRNLPIPREGPARLGRSLPAARPATTLRRGR

SEQ ID NO: 882917 - protein, 390 aa, Homo sapiens
MAAQKDLWDAIVIGAGIQGCFTAYHLAKHRKRILLLEQFFLPHSRGSSHGQSRIIRKAYLEDFYTRMMHECYQIWAQLEHEAGTQLHRQTGLLLLGMKENQELKTIQANLSRQRVEHQCLSSEELKQRFPNIRLPRGEVGLLDNSGGVIYAYKALRALQDAIRQLGGIVRDGEKVVEINPGLLVTVKTTSRSYQAKSLVITAGPWTNQLLRPLGIEMPLQTLRINVCYWREMVPGSYGVSQAFPCFLWLGLCPHHIYGLPTGEYPGLMKVSYHHGNHADPEERDCPTARTDIGDVQILSSFVRDHLPDLKPEPAVIESCMYTNTPDEQFILDRHPKYDNIVIGAGFSGHGFKLAPVVGKILYELSMKLTPSYDLAPFRISRFPSLGKAHL

SEQ ID NO: 882918 - protein, 390 aa, Homo sapiens; identical to SEQ ID NO: 882917

SEQ ID NO: 882919 - protein, 436 aa, Homo sapiens
MAAQKDLWDAIVIGAGIQGCFTAYHLAKHRKRILLLEQFFLPHSRGSSHGQSRIIRKAYLEDFYTRMMHECYQIWAQLEHEAGTQLHRQTGLLLLGMKENQELKTIQANLSRQRVEHQCLSSEELKQRFPNIRLPRGEVGLLDNSGGVIYAYKALRALQDAIRQLGGIVRDGEKVVEINPGLLVTVKTTSRSYQAKSLVITAGPWTNQLLRPLGIEMPLQTLRINVCYWREMVPGSYGVSQAFPCFLWLGLCPHHIYGLPTGEYPGLMKVSYHHGNHADPEERDCPTARTDIGDVQILSSFVRDHLPDLKPEPAVIESCMYTNTPDEQFILDRHPKYDNIVIGAGFSGHGFKLAPVVGKILYELSMKLTPSYDFCVYCQQFCMVYFHIADFFPMLFEQKRSPEMFLRISQLPGLPGRRKQSQHQSSRRENEEGTIS

SEQ ID NO: 882920 - protein, 249 aa, Homo sapiens
MAAQKDLWDAIVIGAGIQGCFTAYHLAKHRKRILLLEQFFLPHSRGSSHGQSRIIRKAYLEDFYTRMMHECYQIWAQLEHEAGTQLHRQTGLLLLGMKENQELKTIQANLSRQRVEHQCLSSEELKQRFPNIRLPRGEVGLLDNSGGVIYAYKALRALQDAIRQLGGIVRDGEKVVEINPGLLVTVLGPTSSSVPWALRCLSRPCGSTCVTGERWFLGAMVCPRPFRASCGWACVPTTSTDCPQESTQG

SEQ ID NO: 882921 - protein, 323 aa, Homo sapiens [sequence omitted]

SEQ ID NO: 882922 - protein, 294 aa, Homo sapiens
MKENQELKTIQANLSRQRVEHQCLSSEELKQRFPNIRLPRGEVGLLDNSGGVIYAYKALRALQDAIRQLGGIVRDGEKVVEINPGLLVTVKTTSRSYQAKSLVITAGPWTNQLLRPLGIEMPLQTLRINVCYWREMVPGSYGVSQAFPCFLWLGLCPHHIYGLPTGEYPGLMKVSYHHGNHADPEERDCPTARTDIGDVQILSSFVRDHLPDLKPEPAVIESCMYTNTPDEQFILDRHPKYDNIVIGAGFSGHGFKLAPVVGKILYELSMKLTPSYDLAPFRISRFPSLGKAHL

SEQ ID NO: 882923 - protein, 174 aa, Homo sapiens
MPLQTLRINVCYWREMVPGSYGVSQAFPCFLWLGLCPHHIYGLPTGEYPGLMKVSYHHGNHADPEERDCPTARTDIGDVQILSSFVRDHLPDLKPEPAVIESCMYTNTPDEQFILDRHPKYDNIVIGAGFSGHGFKLAPVVGKILYELSMKLTPSYDLAPFRISRFPSLGKAHL

SEQ ID NO: 882924 - protein, 323 aa, Homo sapiens [sequence omitted]

SEQ ID NO: 882925 - protein, 443 aa, Homo sapiens
VGTVVPCACDALYGPSCAAVLTWRHYGTGGPEYLRWGEARVSSSSDDQGEGCTSLIGFFTPAGAEGSGVEVEEKPVGSSIKDSRCWPSNSLFFLPHSRGSSHGQSRIIRKAYLEDFYTRMMHECYQIWAQLEHEAGTQLHRQTGLLLLGMKENQELKTIQANLSRQRVEHQCLSSEELKQRFPNIRLPRGEVGLLDNSGGVIYAYKALRALQDAIRQLGGIVRDGEKVVEINPGLLVTVKTTSRSYQAKSLVITAGPWTNQLLRPLGIEMPLQTLRINVCYWREMVPGSYGVSQAFPCFLWLGLCPHHIYGLPTGEYPGLMKVSYHHGNHADPEERDCPTARTDIGDVQILSSFVRDHLPDLKPEPAVIESCMYTNTPDEQFILDRHPKYDNIVIGAGFSGHGFKLAPVVGKILYELSMKLTPSYDLAPFRISRFPSLGKAHL

SEQ ID NO: 882926 - protein, 323 aa, Homo sapiens [sequence omitted]

SEQ ID NO: 882927 - protein, 321 aa, Homo sapiens
GTISCSTGTLQRRNLGPERQTGLLLLGMKENQELKTIQANLSRQRVEHQCLSSEELKQRFPNIRLPRGEVGLLDNSGGVIYAYKALRALQDAIRQLGGIVRDGEKVVEINPGLLVTVKTTSRSYQAKSLVITAGPWTNQLLRPLGIEMPLQTLRINVCYWREMVPGSYGVSQAFPCFLWLGLCPHHIYGLPTGEYPGLMKVSYHHGNHADPEERDCPTARTDIGDVQILSSFVRDHLPDLKPEPAVIESCMYTNTPDEQFILDRHPKYDNIVIGAGFSGHGFKLAPVVGKILYELSMKLTPSYDLAPFRISRFPSLGKAHL

SEQ ID NO: 882928 - protein, 1143 aa, Homo sapiens
MEKRETFVQAVSKELVGEFLQFVQLDKEASDPFSLNELLDELSRKQKEELWQRLKNLLTDVLLESPVDGWQVVEAQGEDNMETEHGSKMRKSIEIIYAITSVILASVSVINESENYEALLECVIILNGILYALPESERKLQSSIQDLCVTWWEKGLPAKEDTGKTAFVMLLRRSLETKTGADVCRLWRIHQALYCFDYDLEESGEIKDMLLECFININYIKKEEGRRFLSCLFNWNINFIKMIHGTIKNQLQGLQKSLMVYIAEIYFRAWKKASGKILEAIENDCIQDFMFHGIHLPRRSPVHSKVREVLSYFHHQKKVRQGVEEMLYRLYKPILWRGLKARNSEVRSNAALLFVEAFPIRDPNLHAIEMDSEIQKQFEELYSLLEDPYPMVRSTGILGVCKITSKYWEMMPPTILIDLLKKVTGELAFDTSSADVRCSVFKCLPMILDNKLSHPLLEQLLPALRYSLHDNSEKVRVAFVDMLLKIKAVRAAKFWKICPMEHILVRLETDSRPVSRRLVSLIFNSFLPVNQPEEVWCERCVTLVQMNHAAARRFYQYAHEHTACTNIAKLIHVIRHCLNACIQRAVREPPEDEEEEDGREKENVTVLDKTLSVNDVACMAGLLEIIVILWKSIDRSMENNKEAKLYTINKFASVLPEYLKVFKDDRCKIPLFMLMSFMPASAVPPFSCGVISTLRSREEGAVDKSYCTLLDCLCSWGQVGHILELVDNWLPTEHAQAKSNTASKGRVQIHDTRPVKPELALVYIEYLLTHPKNRECLLSAPRKKLNHLLKALETSKADLESLLQTPGGKPRGFSEAAAPRAFGLHCRLSIHLQHKFCSEGKVYLSMLEDTGFWLESKILSFIQDQEEDYLKLHRVIYQQIIQTYLTVCKDVVMVGLGDHQFQMQLLQRSLGIMQTVKGFFYVSLLLDILKEITGSSLIQKTDSDEEVAMLLDTVQKVFQKMLECIARSFRKQPEEGLRLLYSVQRPLHEFITAVQSRHTDTPVHRGVLSTLIAGPVVEISHQLRKVSDVEELTPPEHLSDLPPFSRCLIGIIIKSSNVVRSFLDELKACVASNDIEGIVCLTAAVHIILVINAGKHKSSKVREVAATVHRKLKTFMEITLEEDSIERFLYESSSRTLGELLNS

SEQ ID NO: 882929 - protein, 1143 aa, Homo sapiens; identical to SEQ ID NO: 882928

SEQ ID NO: 882930 - protein, 1063 aa, Homo sapiens
METEHGSKMRKSIEIIYAITSVILASVSVINESENYEALLECVIILNGILYALPESERKLQSSIQDLCVTWWEKGLPAKEDTGKTAFVMLLRRSLETKTGADVCRLWRIHQALYCFDYDLEESGEIKDMLLECFININYIKKEEGRRFLSCLFNWNINFIKMIHGTIKNQLQGLQKSLMVYIAEIYFRAWKKASGKILEAIENDCIQDFMFHGIHLPRRSPVHSKVREVLSYFHHQKKVRQGVEEMLYRLYKPILWRGLKARNSEVRSNAALLFVEAFPIRDPNLHAIEMDSEIQKQFEELYSLLEDPYPMVRSTGILGVCKITSKYWEMMPPTILIDLLKKVTGELAFDTSSADVRCSVFKCLPMILDNKLSHPLLEQLLPALRYSLHDNSEKVRVAFVDMLLKIKAVRAAKFWKICPMEHILVRLETDSRPVSRRLVSLIFNSFLPVNQPEEVWCERCVTLVQMNHAAARRFYQYAHEHTACTNIAKLIHVIRHCLNACIQRAVREPPEDEEEEDGREKENVTVLDKTLSVNDVACMAGLLEIIVILWKSIDRSMENNKEAKLYTINKFASVLPEYLKVFKDDRCKIPLFMLMSFMPASAVPPFSCGVISTLRSREEGAVDKSYCTLLDCLCSWGQVGHILELVDNWLPTEHAQAKSNTASKGRVQIHDTRPVKPELALVYIEYLLTHPKNRECLLSAPRKKLNHLLKALETSKADLESLLQTPGGKPRGFSEAAAPRAFGLHCRLSIHLQHKFCSEGKVYLSMLEDTGFWLESKILSFIQDQEEDYLKLHRVIYQQIIQTYLTVCKDVVMVGLGDHQFQMQLLQRSLGIMQTVKGFFYVSLLLDILKEITGSSLIQKTDSDEEVAMLLDTVQKVFQKMLECIARSFRKQPEEGLRLLYSVQRPLHEFITAVQSRHTDTPVHRGVLSTLIAGPVVEISHQLRKVSDVEELTPPEHLSDLPPFSRCLIGIIIKSSNVVRSFLDELKACVASNDIEGIVCLTAAVHIILVINAGKHKSSKVREVAATVHRKLKTFMEITLEEDSIERFLYESSSRTLGELLNS

SEQ ID NO: 882931 - protein, 1096 aa, Homo sapiens
MEKRETFVQAVSKELVGEFLQFVQLDKEASDPFSLNELLDELSRKQKEELWQRLKNLLTDVLLESPVDGWQVVEAQGEDNMETEHGSKMRKSIEIIYAITSVILASVSVINESENYEALLECVIILNGILYALPESERKLQSSIQDLCVTWWEKGLPAKEDTGKTAFVMLLRRSLETKTGADVCRLWRIHQALYCFDYDLEESGEIKDMLLECFININYIKKEEGRRFLSCLFNWNINFIKMIHGTIKNQLQGLQKSLMVYIAEIYFRAWKKASGKILEAIENDCIQDFMFHGIHLPRRSPVHSKVREVLSYFHHQKKVRQGVEEMLYRLYKPILWRGLKARNSEVRSNAALLFVEAFPIRDPNLHAIEMDSEIQKQFEELYSLLEDPYPMVRSTGILGVCKITSKYWEMMPPTILIDLLKKVTGELAFDTSSADVRCSVFKCLPMILDNKLSHPLLEQLLPALRYSLHDNSEKVRVAFVDMLLKIKAVRAAKFWKICPMEHILVRLETDSRPVSRRLVSLIFNSFLPVNQPEEVWCERCVTLVQMNHAAARRFYQYAHEHTACTNIAKLIHVIRHCLNACIQRAVREPPEDEEEEDGREKENVTVLDKTLSVNDVACMAGLLEIIVILWKSIDRSMENNKEAKLYTINKFASVLPEYLKVFKDDRCKIPLFMLMSFMPASAVPPFSCGVISTLRSREEGAVDKSYCTLLDCLCSWGQVGHILELVDNWLPTEHAQAKSNTASKGRVQIHDTRPVKPELALVYIEYLLTHPKNRECLLSAPRKKLNHLLKALETSKADLESLLQTPGGKPRGFSEAAAPRAFGLHCRLSIHLQHKFCSEGKVYLSMLEDTGFWLESKILSFIQDQEEDYLKLHRVIYQQIIQTYLTVCKDVVMVGLGDHQFQMQLLQRSLGIMQTVKGFFYVSLLLDILKEITGSSLIQKTDSDEEVAMLLDTVQKVFQKMLECIARSFRKQPEEGLRVSDVEELTPPEHLSDLPPFSRCLIGIIIKSSNVVRSFLDELKACVASNDIEGIVCLTAAVHIILVINAGKHKSSKVREVAATVHRKLKTFMEITLEEDSIERFLYESSSRTLGELLNS

SEQ ID NO: 882932 - protein, 1085 aa, Homo sapiens
MEKRETFVQAVSKELVGEFLQFVQLDKEASDPFSLNELLDELSRKQKEELWQRLKNLLTDVLLESPVDGWQVVEAQGEDNMETEHGSKMRKSIEIIYAITSVILASVSVINESENYEALLECVIILNGILYALPESERKLQSSIQDLCVTWWEKGLPAKEDTGKTAFVMLLRRSLETKTGADVCRLWRIHQALYCFDYDLEESGEIKDMLLECFININYIKKEEGRRFLSCLFNWNINFIKMIHGTIKNQLQGLQKSLMVYIAEIYFRAWKKASGKILEAIENDCIQDFMFHGIHLPRRSPVHSKVREVLSYFHHQKKVRQGVEEMLYRLYKPILWRGLKARNSEVRSNAALLFVEAFPIRDPNLHAIEMDSEIQKQFEELYSLLEDPYPMVRSTGILGVCKITSKYWEMMPPTILIDLLKKVTGELAFDTSSADVRCSVFKCLPMILDNKLSHPLLEQLLPALRYSLHDNSEKVRVAFVDMLLKIKAVRAAKFWKICPMEHILVRLETDSRPVSRRLVSLIFNSFLPVNQPEEVWCERCVTLVQMNHAAARRFYQYAHEHTACTNIAKLIHVIRHCLNACIQRAVREPPEDEEEEDGREKENVTDDRCKIPLFMLMSFMPASAVPPFSCGVISTLRSREEGAVDKSYCTLLDCLCSWGQVGHILELVDNWLPTEHAQAKSNTASKGRVQIHDTRPVKPELALVYIEYLLTHPKNRECLLSAPRKKLNHLLKALETSKADLESLLQTPGGKPRGFSEAAAPRAFGLHCRLSIHLQHKFCSEGKVYLSMLEDTGFWLESKILSFIQDQEEDYLKLHRVIYQQIIQTYLTVCKDVVMVGLGDHQFQMQLLQRSLGIMQTVKGFFYVSLLLDILKEITGSSLIQKTDSDEEVAMLLDTVQKVFQKMLECIARSFRKQPEEGLRLLYSVQRPLHEFITAVQSRHTDTPVHRGVLSTLIAGPVVEISHQLRKVSDVEELTPPEHLSDLPPFSRCLIGIIIKSSNVVRSFLDELKACVASNDIEGIVCLTAAVHIILVINAGKHKSSKVREVAATVHRKLKTFMEITLEEDSIERFLYESSSRTLGELLNS

SEQ ID NO: 882933 - protein, 625 aa, Homo sapiens
GRTRPGGESAEDQPEEVWCERCVTLVQMNHAAARRFYQYAHEHTACTNIAKLIHVIRHCLNACIQRAVREPPEDEEEEDGREKENVTVLDKTLSVNDVACMAGLLEIIVILWKSIDRSMENNKEAKLYTINKFASVLPEYLKVFKDDRCKIPLFMLMSFMPASAVPPFSCGVISTLRSREEGAVDKSYCTLLDCLCSWGQVGHILELVDNWLPTEHAQAKSNTASKGRVQIHDTRPVKPELALVYIEYLLTHPKNRECLLSAPRKKLNHLLKALETSKADLESLLQTPGGKPRGFSEAAAPRAFGLHCRLSIHLQHKFCSEGKVYLSMLEDTGFWLESKILSFIQDQEEDYLKLHRVIYQQIIQTYLTVCKDVVMVGLGDHQFQMQLLQRSLGIMQTVKGFFYVSLLLDILKEITGSSLIQKTDSDEEVAMLLDTVQKVFQKMLECIARSFRKQPEEGLRLLYSVQRPLHEFITAVQSRHTDTPVHRGVLSTLIAGPVVEISHQLRKVSDVEELTPPEHLSDLPPFSRCLIGIIIKSSNVVRSFLDELKACVASNDIEGIVCLTAAVHIILVINAGKHKSSKVREVAATVHRKLKTFMEITLEEDSIERFLYESSSRTLGELLNS

SEQ ID NO: 882934 - protein, 644 aa, Homo sapiens
MEHILVRLETDSRPVSRRLVSLIFNSFLPVNQPEEVWCERCVTLVQMNHAAARRFYQYAHEHTACTNIAKLIHVIRHCLNACIQRAVREPPEDEEEEDGREKENVTVLDKTLSVNDVACMAGLLEIIVILWKSIDRSMENNKEAKLYTINKFASVLPEYLKVFKDDRCKIPLFMLMSFMPASAVPPFSCGVISTLRSREEGAVDKSYCTLLDCLCSWGQVGHILELVDNWLPTEHAQAKSNTASKGRVQIHDTRPVKPELALVYIEYLLTHPKNRECLLSAPRKKLNHLLKALETSKADLESLLQTPGGKPRGFSEAAAPRAFGLHCRLSIHLQHKFCSEGKVYLSMLEDTGFWLESKILSFIQDQEEDYLKLHRVIYQQIIQTYLTVCKDVVMVGLGDHQFQMQLLQRSLGIMQTVKGFFYVSLLLDILKEITGSSLIQKTDSDEEVAMLLDTVQKVFQKMLECIARSFRKQPEEGLRLLYSVQRPLHEFITAVQSRHTDTPVHRGVLSTLIAGPVVEISHQLRKVSDVEELTPPEHLSDLPPFSRCLIGIIIKSSNVVRSFLDELKACVASNDIEGIVCLTAAVHIILVINAGKHKSSKVREVAATVHRKLKTFMEITLEEDSIERFLYESSSRTLGELLNS

SEQ ID NO: 882935 - protein, 1128 aa, Homo sapiens
MEKRETFVQAVSKELVGEFLQFVQLDKEASDPFSLNELLDELSRKQKEELWQRLKNLLTDVLLESPVDGWQVVEAQGEDNMETEHGSKMRKSIEIIYAITSVILASVSVINESENYEALLECVIILNGILYALPESERKLQSSIQDLCVTWWEKGLPAKEDTGKTAFVMLLRRSLETKTGADVCRLWRIHQALYCFDYDLEESGEIKDMLLECFININYIKKEEGRRFLSCLFNWNINFIKMIHGTIKNQLQGLQKSLMVYIAEIYFRAWKKASGKILEAIENDCIQDFMFHGIHLPRRSPVHSKVREVLSYFHHQKKVRQGVEEMLYRLYKPILWRGLKARNSEVRSNAALLFVEAFPIRDPNLHAIEMDSEIQKQFEELYSLLEDPYPMVRSTGILGVCKITSKYWEMMPPTILIDLLKKVTGELAFDTSSADVRCSVFKCLPMILDNKLSHPLLEQLLPALRYSLHDNSEKVRVAFVDMLLKIKAVRAAKFWKICPMEHILVRLETDSRPVSRRLVSLIFNSFLPVNQPEEVWCERCVTLVQMNHAAARRFYQYAHEHTACTNIAKLIHVIRHCLNACIQRAVREPPEDEEEEDGREKENVTVLDKTLSVNDVACMAGLLEIIVILWKSIDRSMENNKEAKLYTINKFASVLPEYLKVFKDDRCKIPLFMLMSFMPASAVPPFSCGVISTLRSREEGAVDKSYCTLLDCLCSWGQVGHILELVDNWLPTEHAQAKSNTASKGRVQIHDTRPVKPELALVYIEYLLTHPKNRECLLSAPRKKLNHLLKALETSKADLESLLQTPGGKPRGFSEAAAPRAFGLHCRLSIHLQHKFCSEGKVYLSMLEDTGFWLESKILSFIQDQEEDYLKLHRVIYQQIIQTYLTVCKDVVMVGLGDHQFQMQLLQRSLGIMQTVKGFFYVSLLLDILKEITGSSLIQKTDSDEEVAMLLDTVQKVFQKMLECIARSFRKQPEEGLRLLYSVQRPLHEFITAVQSRHTDTPVHRGVLSTLIAGPVVEISHQLRKVSDVEELTPPEHLSDLPPFSRCLIGIIIKSSNVVRSFLDELKACVASNDIEGIVCLTAAVHIILVINAGKHKSSKVREVAATVHRKLKTFMEITLEEDSIERI

SEQ ID NO: 882936 - protein, 1123 aa, Homo sapiens
MEKRETFVQAVSKELVGEFLQFVQLDKEASDPFSLNELLDELSRKQKEELWQRLKNLLTDVLLESPVDGWQVVEAQGEDNMETEHGSKMRKSIEIIYAITSVILASVSVINESENYEALLECVIILNGILYALPESERKLQSSIQDLCVTWWEKGLPAKEDTGKTAFVMLLRRSLETKTGADVCRLWRIHQALYCFDYDLEESGEIKDMLLECFININYIKKEEGRRFLSCLFNWNINFIKMIHGTIKNQLQGLQKSLMVYIAEIYFRAWKKASGKILEAIENDCIQDFMFHGIHLPRRSPVHSKVREVLSYFHHQKKVRQGVEEMLYRLYKPILWRGLKARNSEVRSNAALLFVEAFPIRDPNLHAIEMDSEIQKQFEELYSLLEDPYPMVRSTGILGVCKITSKYWEMMPPTILIDLLKKVTGELAFDTSSADVRCSVFKCLPMILDNKLSHPLLEQLLPALRYSLHDNSEKVRVAFVDMLLKIKAVRAAKFWKICPMEHILVRLETDSRPVSRRLVSLIFNSFLPVNQPEEVWCERCVTLVQMNHAAARRFYQYAHEHTACTNIAKLIHVIRHCLNACIQRAVREPPEDEEEEDGREKENVTVLDKTLSVNDVACMAGLLEIIVILWKSIDRSMENNKEAKLYTINKFASVLPEYLKVFKDDRCKIPLFMLMSFMPASAVPPFSCGVISTLRSREEGAVDKSYCTLLDCLCSWGQVGHILELVDNWLPTEHAQAKSNTASKGRVQIHDTRPVKPELALVYIEYLLTHPKNRECLLSAPRKKLNHLLKALETSKADLESLLQTPGGKPRGFSEAAAPRAFGLHCRLSIHLQHKVCLLLALYEDDDTVLFLLLIYLLVFGQFCSEGKVYLSMLEDTGFWLESKILSFIQDQEEDYLKLHRVIYQQIIQTYLTVCKDVVMVGLGDHQFQMQLLQRSLGIMQTVKGFFYVSLLLDILKEITGSSLIQKTDSDEEVAMLLDTVQKVFQKMLECIARSFRKQPEEGLRVSDVEELTPPEHLSDLPPFSRCLIGIIIKSSNVVRSFLDELKACVASNDIEGIVCLTAAVHIILVINAGKHKSSKVREVAATVHRKLKTFMEITLEEDSIERFLYESSSRTLGELLNS

SEQ ID NO: 882937 - protein, 267 aa, Homo sapiens
MGSLFPLSLLFFLAAAYPGVGSALGRRTKRAQSPKGSPLAPSGTSVPFWVRMSPEFVAVQPGKSVQLNCSNSCPQPQNSSLRTPLRQGKTLRGPGWVSYQLLDVRAWSSLAHCLVTCAGKTRWATSRITAYKPPHSVILEPPVLKGRKYTLRCHVTQVFPVGYLVVTLRHGSRVIYSESLERFTGLDLANVTLTYEFAAGPRDFWQPVICHARLNLDGLVVRNSSAPITLMLAWSPAPTALASGSILPGRLSWEDPLSPESRGCSEP

SEQ ID NO: 882938 - protein, 237 aa, Homo sapiens
MGSLFPLSLLFFLAAAYPGVGSALGRRTKRAQSPKGSPLAPSGTSVPFWVRMSPEFVAVQPGKSVQLNCSNSCPQPQNSSLRTPLRQGKTLRGPGWVSYQLLDVRAWSSLAHCLVTCAGKTRWATSRITAYKPPHSVILEPPVLKGRKYTLRCHVTQVFPVGYLVVTLRHGSRVIYSESLERFTGLDLANVTLTYEFAAGPRDFWQPVICHARLNLDGLVVRNSSAPITLMLGEAPL

SEQ ID NO: 882939 - protein, 271 aa, Homo sapiens
MGSLFPLSLLFFLAAAYPGVGSALGRRTKRAQSPKGSPLAPSGTSVPFWVRMSPEFVAVQPGKSVQLNCSNSCPQPQNSSLRTPLRQGKTLRGPGWVSYQLLDVRAWSSLAHCLVTCAGKTRWATSRITAYKPPHSVILEPPVLKGRKYTLRCHVTQVFPVGYLVVTLRHGSRVIYSESLERFTGLDLANVTLTYEFAAGPRDFWQPVICHARLNLDGLVVRNSSAPITLMLAWSPAPTALASGSIAALVGILLTVGAAYLCKCLAMKSQA

SEQ ID NO: 882940 - protein, 272 aa, Homo sapiens
MGSLFPLSLLFFLAAAYPGVGSALGRRTKRAQSPKGSPLAPSGTSVPFWVRMSPEFVAVQPGKSVQLNCSNSCPQPQNSSLRTPLRQGKTLRGPGWVSYQLLDVRAWSSLAHCLVTCAGKTRWATSRITAYSVPGGLLGGDPEAWKPGHLFRKPGALHRPGSGQRDLDLRVCCWTPRLLAARDLPRAPQSRRPGGPQQLGTHYTDARLEPRAHSFGLRFHRCPCRDPPHCGRCVPMQVPSYEVPGVKGDVLCRLSEKKRNMKQSGEMAIHGG

SEQ ID NO: 882941 - protein, 217 aa, Homo sapiens
MNGYQRGPHCCILLSLPATPLGNVEECYRYFTSVLFCHGVRRPPFSIDLFKEEQLLALEDYVVNTYFRHFKLYKYVFTPQVRLDLSLTYMGLQPPKLWPESETGKGECQGRAGLGQPGATVSSCFWFAEKEESKEMEEQAVTPQKEELETVAPPEPEPSHIHVLRAYIKTQVNKELEQLQGLVEERLKASEERLSSKLTALERPFQLPPGKGKSKTK

SEQ ID NO: 882942 - protein, 331 aa, Homo sapiens
MLNRKTSHFLGMRVQSELEHLSELRREAGKDRSSVHGSAARTRASVRTQWTTAAAAKADEDPGANLFPPPLPRPRICMWKYLDVHSMHQLEKTTNAEMREVLAELLELGCPEQSLRDAITLDLFCHALIFCRQQGFSLEQTSAACALLQDLHKACIATPLGNVEECYRYFTSVLFCHGVRRPPFSIDLFKEEQLLALEDYVVNTYFRHFKLYKYVFTPQVRLDLSLTYMGLQPPKLWPESETEKEESKEMEEQAVTPQKEELETVAPPEPEPSHIHVLRAYIKTQVNKELEQLQGLVEERLKASEERLSSKLTALERPFQLPPGKGKSKTK

SEQ ID NO: 882943 - protein, 264 aa, Homo sapiens [sequence omitted]

SEQ ID NO: 882944 - protein, 215 aa, Homo sapiens
MEAQLSLTPLSLPRVLAELLELGCPEQSLRDAITLDLFCHALIFCRQQGFSLEQTSAACALLQDLHKACIATPLGNVEECYRYFTSVLFCHGVRRPPFSIDLFKEEQLLALEDYVVNTYFRHFKLYKYVFTPQVRLDLSLTYMGLQPPKLWPESETGHIHVLRAYIKTQVNKELEQLQGLVEERLKASEERLSSKLTALERPFQLPPGKGKSKTK

SEQ ID NO: 882945 - protein, 112 aa, Homo sapiens
MLNRKTSHFLGMRVQSELEHLSELRREAGKDRSSVHGSAARTRASVRTQWTTAAAAKADEDPGANLFPVRAGQSGLLVNIYKPAPPQAPPVIMLTNVRDVSRAAWARRGRGV

SEQ ID NO: 882946 - protein, 285 aa, Homo sapiens
  misc_feature (160)..(160): Xaa can be any naturally occurring amino acid
MLNRKTSHFLGMRVQSELEHLSELRREAGKDRSSVHGSAARTRASVRTQWTTAAAAKADEDPGANLFPPPLPRPRICMWKYLDVHSMHQLEKTTNAEMREVLAELLELGCPEQSLRDAITLDLFCHALIFLARPGKGPFLPTWRQGTFKLGLGWPLGFPXGNSFNEGPLVILAKATLLEGQTVGKGSWLNPAELFKPKVGSLLYFGAPYAGESPRAGDTIPLYAQKAESRDAPLLSSTKEQRGNTKRLVAWGGTYVAHKRNTYKGEWDLRSAQRFNTVPAGPELV

SEQ ID NO: 882947 - protein, 301 aa, Homo sapiens
MLNRKTSHFLGMRVQSELEHLSELRREAGKDRSSVHGSAARTRASVRTQWTTAAAAKADEDPGANLFPPPLPRPRICMWKYLDVHSMHQLEKTTNAEMREVLAELLELGCPEQSLRDAITLDLFCHALIFCRQQGFSLEQTSAACALLQDLHKACIATPLGNVEECYRYFTSVLFCHGVRRPPFSIDLFKEEQLLALEDYVVNTYFRHFKLYKYVFTPQVRLDLSLTYMGLQPPKLWPESETGHIHVLRAYIKTQVNKELEQLQGLVEERLKASEERLSSKLTALERPFQLPPGKGKSKTK

SEQ ID NO: 882948 - protein, 264 aa, Homo sapiens [sequence omitted]

SEQ ID NO: 882949 - protein, 157 aa, Homo sapiens [sequence omitted]

SEQ ID NO: 882950 - protein, 1303 aa, Homo sapiens
RGDCGKRSDGASGCWRKEVGAGSANGVEMVQGPVQTPALTIHRRKRRRSCPPNRASYLPKAESLASLGSHLPALLSRARVPRPPAGRRERERRRRPVAKAPARLRGEYETGVKMTSRFGKTYSRKGGNGSSKFDEVFSNKRTTLSTKWGETTFMAKLGQKRPNFKPDIQEIPKKPKVEEESTGDPFGFDSDDESLPVSSKNLAQVKCSSYSESSEAAQLEEVTSVLEANSKISHVVVEDTVVSDKCFPLEDTLLGKEKSTNRIVEDDASISSCNKLITSDKVENFHEEHEKNSHHIHKNADDSTKKPNAETTVASEIKETNDTWNSQFGKRPESPSEISPIKGSVRTGLFEWDNDFEDIRSEDCILSLDSDPLLEMKDDDFKNRLENLNEAIEEDIVQSVLRPTNCRTYCRANKTKSSQGASNFDKLMDGTSQALAKANSESSKDGLNQAKKGGVSCGTSFRGTVGRTRDYTVLHPSCLSVCNVTIQDTMERSMDEFTASTPADLGEAGRLRKKADIATSKTTTRFRPSNTKSKKDVKLEFFGFEDHETGGDEGGSGSSNYKIKYFGFDDLSESEDDEDDDCQVERKTSKKRTKTAPSPSLQPPPESNDNSQDSQSGTNNAENLDFTEDLPGVPESVKKPINKQGDKSKENTRKIFSGPKRSPTKAVYNARHWNHPDSEELPGPPVVKPQSVTVRLSSKEPNQKDDGVFKAPAPPSKVIKTVTIPTQPYQDIVTALKCRREDKELYTVVQHVKHFNDVVEFGENQEFTDDIEYLLSGLKSTQPLNTRCLSVISLATKCAMPSFRMHLRAHGMVAMVFKTLDDSQHHQNLSLCTAALMYILSRDRLNMDLDRASLDLMIRLLELEQDASSAKLLNEKDMNKIKEKIRRLCETVHNKHLDLENITTGHLAMETLLSLTSKRAGDWFKEELRLLGGLDHIVDKVKECVDHLSRDEDEEKLVASLWGAERCLRVLESVTVHNPENQSYLIAYKDSQLIVSSAKALQHCEELIQQYNRAEDSICLADSKPLPHQNVTNHVGKAVEDCMRAIIGVLLNLTNDNEWGSTKTGEQDGLIGTALNCVLQVPKYLPQEQRFDIRVLGLGLLINLVEYSARNRHCLVNMETSCSFDSSICSGEGDDSLRIGGQVHAVQALVQLFLERERAAQLAESKTDELIKDAPTTQHDKSGEWQETSGEIQWVSTEKTDGTEEKHKKEEEDEELDLNKALQHAGKHMEDCIVASYTALLLGCLCQESPINVTTVREYLPEGDFSIMTEMLKKFLSFMNLTCAVGTTGQKSISRVIEYLEHC

SEQ ID NO: 882951 - protein, 427 aa, Homo sapiens
DSQHHQNLSLCTAALMYILSRDRLNMDLDRASLDLMIRLLELEQDASSAKLLNEKDMNKIKEKIRRLCETVHNKHLDLENITTGHLAMETLLSLTSKRAGDWFKEELRLLGGLDHIVDKVKECVDHLSRDEDEEKLVASLWGAERCLRVLESVTVHNPENQSYLIAYKDSQLIVSSAKALQHCEELIQQYNRAEDSICLADSKPLPHQNVTNHVGKAVEDCMRAIIGVLLNLTNDNEWGSTKTGEQDGLIGTALNCVLQVPKYLPQEQRFDIRVLLFLERERAAQLAESKTDELIKDAPTTQHDKSGEWQETSGEIQWVSTEKTDGTEEKHKKEEEDEELDLNKALQHAGKHMEDCIVASYTALLLGCLCQESPINVTTVREYLPEGDFSIMTEMLKKFLSFMNLTCAVGTTGQKSISRVIEYLEHC

SEQ ID NO: 882952 - protein, 1190 aa, Homo sapiens
MTSRFGKTYSRKGGNGSSKFDEVFSNKRTTLSTKWGETTFMAKLGQKRPNFKPDIQEIPKKPKVEEESTGDPFGFDSDDESLPVSSKNLAQVKCSSYSESSEAAQLEEVTSVLEANSKISHVVVEDTVVSDKCFPLEDTLLGKEKSTNRIVEDDASISSCNKLITSDKVENFHEEHEKNSHHIHKNADDSTKKPNAETTVASEIKETNDTWNSQFGKRPESPSEISPIKGSVRTGLFEWDNDFEDIRSEDCILSLDSDPLLEMKDDDFKNRLENLNEAIEEDIVQSVLRPTNCRTYCRANKTKSSQGASNFDKLMDGTSQALAKANSESSKDGLNQAKKGGVSCGTSFRGTVGRTRDYTVLHPSCLSVCNVTIQDTMERSMDEFTASTPADLGEAGRLRKKADIATSKTTTRFRPSNTKSKKDVKLEFFGFEDHETGGDEGGSGSSNYKIKYFGFDDLSESEDDEDDDCQVERKTSKKRTKTAPSPSLQPPPESNDNSQDSQSGTNNAENLDFTEDLPGVPESVKKPINKQGDKSKENTRKIFSGPKRSPTKAVYNARHWNHPDSEELPGPPVVKPQSVTVRLSSKEPNQKDDGVFKAPAPPSKVIKTVTIPTQPYQDIVTALKCRREDKELYTVVQHVKHFNDVVEFGENQEFTDDIEYLLSGLKSTQPLNTRCLSVISLATKCAMPSFRMHLRAHGMVAMVFKTLDDSQHHQNLSLCTAALMYILSRDRLNMDLDRASLDLMIRLLELEQDASSAKLLNEKDMNKIKEKIRRLCETVHNKHLDLENITTGHLAMETLLSLTSKRAGDWFKEELRLLGGLDHIVDKVKECVDHLSRDEDEEKLVASLWGAERCLRVLESVTVHNPENQSYLIAYKDSQLIVSSAKALQHCEELIQQYNRAEDSICLADSKPLPHQNVTNHVGKAVEDCMRAIIGVLLNLTNDNEWGSTKTGEQDGLIGTALNCVLQVPKYLPQEQRFDIRVLGLGLLINLVEYSARNRHCLVNMETSCSFDSSICSGEGDDSLRIGGQVHAVQALVQLFLERERAAQLAESKTDELIKDAPTTQHDKSGEWQETSGEIQWVSTEKTDGTEEKHKKEEEDEELDLNKALQHAGKHMEDCIVASYTALLLGCLCQESPINVTTVREYLPEGDFSIMTEMLKKFLSFMNLTCAVGTTGQKSISRVIEYLEHC

SEQ ID NO: 882953 - protein, 1184 aa, Homo sapiens
MTSRFGKTYSRKGGNGSSKFDEVFSNKRTTLSTKWGETTFMAKLGQKRPNFKPDIQEIPKKPKVEEESTGDPFGFDSDDESLPVSSKNLAQVKCSSYSESSEAAQLEEVTSVLEANSKISHVVVEDTVVSDKCFPLEDTLLGKEKSTNRIVEDDASISSCNKLITSDKVENFHEEHEKNSHHIHKNADDSTKKPNAETTVASEIKETNDTWNSQFGKRPESPSEISPIKGSVRTGLFEWDNDFEDIRSEDCILSLDSDPLLEMKDDDFKNRLENLNEAIEEDIVQSVLRPTNCRTYCRANKTKSSQGASNFDKLMDGTSQALAKANSESSKDGLNQAKKGGVSCGTSFRGTVGRTRDYTVLHPSCLSVCNVTIQDTMERSMDEFTASTPADLGEAGRLRKKADIATSKTTTRFRPSNTKSKKDVKLEFFGFEDHETGGDEGGSGSSNYKIKYFGFDDLSESEDDEDDDCQVERKTSKKRTKTAPSPSLQPPPESNDNSQDSQSGTNNAEDLPGVPESVKKPINKQGDKSKENTRKIFSGPKRSPTKAVYNARHWNHPDSEELPGPPVVKPQSVTVRLSSKEPNQKDDGVFKAPAPPSKVIKTVTIPTQPYQDIVTALKCRREDKELYTVVQHVKHFNDVVEFGENQEFTDDIEYLLSGLKSTQPLNTRCLSVISLATKCAMPSFRMHLRAHGMVAMVFKTLDDSQHHQNLSLCTAALMYILSRDRLNMDLDRASLDLMIRLLELEQDASSAKLLNEKDMNKIKEKIRRLCETVHNKHLDLENITTGHLAMETLLSLTSKRAGDWFKEELRLLGGLDHIVDKVKECVDHLSRDEDEEKLVASLWGAERCLRVLESVTVHNPENQSYLIAYKDSQLIVSSAKALQHCEELIQQYNRAEDSICLADSKPLPHQNVTNHVGKAVEDCMRAIIGVLLNLTNDNEWGSTKTGEQDGLIGTALNCVLQVPKYLPQEQRFDIRVLGLGLLINLVEYSARNRHCLVNMETSCSFDSSICSGEGDDSLRIGGQVHAVQALVQLFLERERAAQLAESKTDELIKDAPTTQHDKSGEWQETSGEIQWVSTEKTDGTEEKHKKEEEDEELDLNKALQHAGKHMEDCIVASYTALLLGCLCQESPINVTTVREYLPEGDFSIMTEMLKKFLSFMNLTCAVGTTGQKSISRVIEYLEHC

SEQ ID NO: 882954 - protein, 779 aa, Homo sapiens
MTSRFGKTYSRKGGNGSSKFDEVFSNKRTTLSTKWGETTFMAKLGQKRPNFKPDIQEIPKKPKVEEESTGDPFGFDSDDESLPVSSKNLAQVKCSSYSESSEAAQLEEVTSVLEANSKISHVVVEDTVVSDKCFPLEDTLLGKEKSTNRIVEDDASISSCNKLITSDKVENFHEEHEKNSHHIHKNADDSTKKPNAETTVASEIKETNDTWNSQFGKRPESPSEISPIKGSVRTGLFEWDNDFEDIRSEDCILSLDSDPLLEMKDDDFKNRLENLNEAIEEDIVQSVLRPTNCRTYCRANKTKSSQGASNFDKLMDGTSQALAKANSESSKDGLNQAKKGGVSCGTSFRGTVGRTRDYTVLHPSCLSVCNVTIQDTMERSMDEFTASTPADLGEAGRLRKKADIATSKTTTRFRPSNTKSKKDVKLEFFGFEDHETGGDEGGSGSSNYKIKYFGFDDLSESEDDEDDDCQVERKTSKKRTKTAPSPSLQPPPESNDNSQDSQSGTNNAENLDFTEDLPGVPESVKKPINKQGDKSKENTRKIFSGPKRSPTKAVYNARHWNHPDSEELPGPPVVKPQSVTVRLSSKEPNQKDDGVFKAPAPPSKVIKTVTIPTQPYQDIVTALKCRREDKELYTVVQHVKHFNDVVEFGENQEFTDDIEYLLSGLKSTQPLNTRCLSVISLATKCAMPSFRMHLRAHGMVAMVFKTLDDSQHHQNLSLCTAALMYILSRDRLNMDLDRASLDLMIRLLELEQDASSAKLLNEKDMNKIKEKIRRLCETW

SEQ ID NO: 882955 - protein, 1190 aa, Homo sapiens; identical to SEQ ID NO: 882952

SEQ ID NO: 882956 - protein, 261 aa, Homo sapiens [sequence omitted]

SEQ ID NO: 882957 - protein, 1190 aa, Homo sapiens; identical to SEQ ID NO: 882952

SEQ ID NO: 882958 - protein, 1190 aa, Homo sapiens; identical to SEQ ID NO: 882952

SEQ ID NO: 882959 - protein, 821 aa, Homo sapiens
MTSRFGKTYSRKGGNGSSKFDEVFSNKRTTLSTKWGETTFMAKLGQKRPNFKPDIQEIPKKPKVEEESTGDPFGFDSDDESLPVSSKNLAQVKCSSYSESSEAAQLEEVTSVLEANSKISHVVVEDTVVSDKCFPLEDTLLGKEKSTNRIVEDDASISSCNKLITSDKVENFHEEHEKNSHHIHKNADDSTKKPNAETTVASEIKETNDTWNSQFGKRPESPSEISPIKGSVRTGLFEWDNDFEDIRSEDCILSLDSDPLLEMKDDDFKNRLENLNEAIEEDIVQSVLRPTNCRTYCRANKTKSSQGASNFDKLMDGTSQALAKANSESSKDGLNQAKKGGVSCGTSFRGTVGRTRDYTVLHPSCLSVCNVTIQDTMERSMDEFTASTPADLGEAGRLRKKADIATSKTTTRFRPSNTKSKKDVKLEFFGFEDHETGGDEGGSGSSNYKIKYFGFDDLSESEDDEDDDCQVERKTSKKRTKTAPSPSLQPPPESNDNSQDSQSGTNNAENLDFTEDLPGVPESVKKPINKQGDKSKENTRKIFSGPKRSPTKAVYNARHWNHPDSEELPGPPVVKPQSVTVRLSSKEPNQKDDGVFKAPAPPSKVIKTVTIPTQPYQDIVTALKCRREDKELYTVVQHVKHFNDVVEFGENQEFTDDIEYLLSGLKSTQPLNTRCLSVISLATKCAMPSFRMHLRAHGMVAMVFKTLDDSQHHQNLSLCTAALMYILSRDRLNMDLDRASLDLMIRLLELEQDASSAKLLNEKDMNKIKEKIRRLCETVHNKHLDLENITVGSFFLPSKMRITFRKSLVSCSSCVTVGKLF

SEQ ID NO: 882960 - protein, 148 aa, Homo sapiens
MSQTRDLQGGKAFRLLKAQQEERLDEINKQFLDDPKYSSDEDLPSKLEGFKAEKYMEFDLNGNGDIDIMSLKRMLEKLGVPKTHLELKKLIGEVSSGSGETFSYPDFLRMMLGKRSAILKMILMYEEKAREKEKPTGPPAKKAISELP

SEQ ID NO: 882961 - protein, 148 aa, Homo sapiens; identical to SEQ ID NO: 882960

SEQ ID NO: 882962 - protein, 93 aa, Homo sapiens
MEFDLNGNGDIDIMSLKRMLEKLGVPKTHLELKKLIGEVSSGSGETFSYPDFLRMMLGKRSAILKMILMYEEKAREKEKPTGPPAKKAISELP

SEQ ID NO: 882963 - protein, 159 aa, Homo sapiens
MEFDLNGNGDIGEKRVICGGRVVCRPKKTEVSPTCSIPHDLGGGPPTTVGGRRMGMRKWERRERVSPPSPHPHPLPPDIMSLKRMLEKLGVPKTHLELKKLIGEVSSGSGETFSYPDFLRMMLGKRSAILKMILMYEEKAREKEKPTGPPAKKAISELP

SEQ ID NO: 882964 - protein, 132 aa, Homo sapiens; identical to SEQ ID NO: 745510

SEQ ID NO: 882965 - protein, 168 aa, Homo sapiens
RGKGKFGRKASEKTGGREGEPADRGLQLGGKAFRLLKAQQEERLDEINKQFLDDPKYSSDEDLPSKLEGFKAEKYMEFDLNGNGDIDIMSLKRMLEKLGVPKTHLELKKLIGEVSSGSGETFSYPDFLRMMLGKRSAILKMILMYEEKAREKEKPTGPPAKKAISELP

SEQ ID NO: 882966 - protein, 118 aa, Homo sapiens
MGRAYPGSYFPLHEQFLDDPKYSSDEDLPSKLEGFKDIMSLKRMLEKLGVPKTHLELKKLIGEVSSGSGETFSYPDFLRMMLGKRSAILKMILMYEEKAREKEKPTGPPAKKAISELP

SEQ ID NO: 882967 - protein, 93 aa, Homo sapiens; identical to SEQ ID NO: 882962

SEQ ID NO: 882968 - protein, 328 aa, Homo sapiens
MTGSNEFKLNQPPEDGISSVKFSPNTSQFLLVSSWDTSVRLYDVPANSMRLKYQHTGAVLDCAFYDPTHAWSGGLDHQLKMHDLNTDQENLVGTHDAPIRCVEYCPEVNVMVTGSWDQTVKLWDPRTPCNAGTFSQPEKVYTLSVSGDRLIVGTAGRRVLVWDLRNMGYVQQRRESSLKYQTRCIRAFPNKQGYVLSSIEGRVAVEYLDPSPEVQKKKYAFKCHRLKENNIEQIYPVNAISFHNIHNTFATGGSDGFVNIWDPFNKKRLCQFHRYPTSIASLAFSNDGTTLAIASSYMYEMDDTEHPEDGIFIRQVTDAETKPKSPCT

SEQ ID NO: 882969 - protein, 328 aa, Homo sapiens; identical to SEQ ID NO: 882968

SEQ ID NO: 882970 - protein, 328 aa, Homo sapiens; identical to SEQ ID NO: 882968

SEQ ID NO: 882971 - protein, 328 aa, Homo sapiens; identical to SEQ ID NO: 882968

SEQ ID NO: 882972 - protein, 326 aa, Homo sapiens
MTGSNEFKLNQPPEDGISSVKFSPNTSQFLLVSSWDTSVRLYDVPANSMRLKYQHTGAVLDCAFYDPTHAWSGGLDHQLKMHDLNTDQENLVGTHDAPIRCVEYCPEVNVMVTGSWDQTVKLWDPRTPCNAGTFSQPEKVYTLSVSGDRLIVGTAGRRVLVWDLRNMGYVQQRRESSLKYQTRCIRAFPNKQGYVLSSIEGRVAVEYLDPSPEVQKKKYAFKCHRLKENNIEQIYPVNAISFHNIHNTFATGGSDGFVNIWDPFNKKRLCQFHRYPTSIASLAFSNDGTTLAIASSYMYEMDDTEHPEDGIFIRQVTDAETKPKST

SEQ ID NO: 882973 - protein, 328 aa, Homo sapiens; identical to SEQ ID NO: 882968

SEQ ID NO: 882974 - protein, 328 aa, Homo sapiens; identical to SEQ ID NO: 882968

SEQ ID NO: 882975 - protein, 328 aa, Homo sapiens; identical to SEQ ID NO: 882968

SEQ ID NO: 882976 - protein, 326 aa, Homo sapiens; identical to SEQ ID NO: 882972

SEQ ID NO: 882977 - protein, 335 aa, Homo sapiens
MTGSNEFKLNQPPEDGISSVKFSPNTSQFLLVSSWDTSVRLYDVPANSMRLKYQHTGAVLDCAFYDPTHAWSGGLDHQLKMHDLNTDQENLVGTHDAPIRCVEYCPEVNVMVTGSWDQTVKLWDPRTPCNAGTFSQPEKVYTLSVSGDRLIVGTAGRRVLVWDLRNMGYVQQRRESSLKYQTRCIRAFPNKQGYVLSSIEGRVAVEYLDPSPEVQKKKYAFKCHRLKENNIEQIYPVNAISFHNIHNTFATGGSDGFVNIWDPFNKKRLCQFHRYPTSIASLAFSNDGTTLAIASSYMYEMDDTEHPEDGIFIRQVTDAETKPKLAPFKAIKVEI

SEQ ID NO: 882978 - protein, 349 aa, Homo sapiens
RLSVRSPSPRDPWGLWAPVLQMTGSNEFKLNQPPEDGISSVKFSPNTSQFLLVSSWDTSVRLYDVPANSMRLKYQHTGAVLDCAFYDPTHAWSGGLDHQLKMHDLNTDQENLVGTHDAPIRCVEYCPEVNVMVTGSWDQTVKLWDPRTPCNAGTFSQPEKVYTLSVSGDRLIVGTAGRRVLVWDLRNMGYVQQRRESSLKYQTRCIRAFPNKQGYVLSSIEGRVAVEYLDPSPEVQKKKYAFKCHRLKENNIEQIYPVNAISFHNIHNTFATGGSDGFVNIWDPFNKKRLCQFHRYPTSIASLAFSNDGTTLAIASSYMYEMDDTEHPEDGIFIRQVTDAETKPKSPCT

SEQ ID NO: 882979 - protein, 328 aa, Homo sapiens; identical to SEQ ID NO: 882968

SEQ ID NO: 882980 - protein, 280 aa, Homo sapiens
MRLKYQHTGAVLDCAFYDPTHAWSGGLDHQLKMHDLNTDQENLVGTHDAPIRCVEYCPEVNVMVTGSWDQTVKLWDPRTPCNAGTFSQPEKVYTLSVSGDRLIVGTAGRRVLVWDLRNMGYVQQRRESSLKYQTRCIRAFPNKQGYVLSSIEGRVAVEYLDPSPEVQKKKYAFKCHRLKENNIEQIYPVNAISFHNIHNTFATGGSDGFVNIWDPFNKKRLCQFHRYPTSIASLAFSNDGTTLAIASSYMYEMDDTEHPEDGIFIRQVTDAETKPKSPCT

SEQ ID NO: 882981 - protein, 162 aa, Homo sapiens
MTGSNEFKLNQPPEDGISSVKFSPNTSQFLLVSSWDTSVRLYDVPANSMRLKYQHTGAVLDCAFYDPTHAWSGGLDHQLKMHDLNTDQENLVGTHDAPIRCVEYCPEVNVMVTGSWDQTVKLWDPRTPCNAGTFSQPEKQAAECWCGTYGTWVTCSSAGSPA

SEQ ID NO: 882982 - protein, 306 aa, Homo sapiens
MPTTSQFLLVSSWDTSVRLYDVPANSMRLKYQHTGAVLDCAFYDPTHAWSGGLDHQLKMHDLNTDQENLVGTHDAPIRCVEYCPEVNVMVTGSWDQTVKLWDPRTPCNAGTFSQPEKVYTLSVSGDRLIVGTAGRRVLVWDLRNMGYVQQRRESSLKYQTRCIRAFPNKQGYVLSSIEGRVAVEYLDPSPEVQKKKYAFKCHRLKENNIEQIYPVNAISFHNIHNTFATGGSDGFVNIWDPFNKKRLCQFHRYPTSIASLAFSNDGTTLAIASSYMYEMDDTEHPEDGIFIRQVTDAETKPKSPCT

SEQ ID NO: 882983 - protein, 298 aa, Homo sapiens
AYPESVLMESKDAVVENEVVSTENVDYEVQAKGSNDHVTGSGRTRSIMMKLPDLYLSQENLVGTHDAPIRCVEYCPEVNVMVTGSWDQTVKLWDPRTPCNAGTFSQPEKVYTLSVSGDRLIVGTAGRRVLVWDLRNMGYVQQRRESSLKYQTRCIRAFPNKQGYVLSSIEGRVAVEYLDPSPEVQKKKYAFKCHRLKENNIEQIYPVNAISFHNIHNTFATGGSDGFVNIWDPFNKKRLCQFHRYPTSIASLAFSNDGTTLAIASSYMYEMDDTEHPEDGIFIRQVTDAETKPKSPCT

SEQ ID NO: 882984 - protein, 103 aa, Homo sapiens
MTGSNEFKLNQPPEDGISSVKFSPNTSQFLLVSSWDTSVRLYDVPANSMRLKYQHTGAVLDCAFYDPTHAWSGGLDHQLKMHDLNTDQEILLGPMSPYQMCGR

SEQ ID NO: 882985 - protein, 545 aa, Homo sapiens
CLRASRVTKTSLRRILRLTSRTELQGDHRARHLYYCHLKERVLRSQCAHREEAYFLLAACALQADLGEHRESAHAGRYFEPHSYFPQWIITKRGIDYILRHMPTLHRERQGLSPKEAMLCFIQEACRLEDVPVHFFRLHKDKKEGRPTVILGLALRGVHIYQEVDRAPQLLYDLPWPHVGKLAFLGKKLEIQLDGLPAAQKLVYYTGCTWRSRHLLHLLRASHQLHLRVRPTLQQLRQREEAEEKQHYRESYISDELELDLASRSFPGSGVSSQHCPHCLSRHSADSHGSSYTSGIKANSWLRESREMSVDVPLEVHGLHEKEPSSSPRTSRSHPSTRGDSQATRQEPCTQVRTRGQSAEAVHQIQEMTAGVSEEQHSHGLDDMQLHQLALHPAPTSLSHTFHRALDCRLAGPCETRATLPSKRSSNCLALDLFGEAHHRSLWCRHHPPSSTVRTARLSPCPPHFHMALVPSCPPDAACTSAASTLHRFTCKRCGAGSDINLGGNKQVPHLMPVCHTPGSSFPQGLREPVQGLAVKCPESHGVGP

SEQ ID NO: 882986 - protein, 242 aa, Homo sapiens
MPGPWLLLALALTLNLTGVPGGRAQPEAAQQEAVTAAEHPGLDDFLRQVERLLFLRENIQRLQGDQGEHSASQIFQSDWLSKRQHPGKREEEEEEGVEEEEEEEGGAVGPHKRQHPGRREDEASWSVDVTQHKRQHPGRRSPWLAYAVPKRQHPGRRLADPKAQRSWEEEEEEEEREEDLMPEKRQHPGKRALGGPCGPQGAYGQAGLLLGLLDDLSRSQGAEEKRQHPGRRAAWVREPLEE

SEQ ID NO: 882987 - protein, 103 aa, Homo sapiens
MPGPWLLLALALTLNLTGVPGGRAQPEAAQQEAVTAAEHPGLDDFLRQVERLLFLRENIQRLQGDQGEHSASQIFQSDWLSKRQHPGKREEEEEEGVFSLKCS

SEQ ID NO: 882988 - protein, 759 aa, Homo sapiens
IPAGMEADLSQLSEEERRQIAAVMSRAQGLPKGSVPPAAAESPSMHRKQELDSSHPPKQSGRPPDPGRPAQPGLSKSRTTDTFRSEQKLPGRSPSTISLKESKSRTDLKEEHKSSMMPGFLSEVNALSAVSSVVNKFNPFDLISDSEASQEETTKKQKVVQKEQGKPEGIIKPPLQQQPPKPIPKQQGPGRDPLQQDGTPKSISSQQPEKIKSQPPGTGKPIQGPTQTPQTDHAKLPLQRDASRPQTKQADIVRGESVKPSLPSPSKPPIQQPTPGKPPAQQPGHEKSQPGPAKPPAQPSGLTKPLAQQPGTVKPPVQPPGTTKPPAQPLGPAKPPAQQTGSEKPSSEQPGPKALAQPPGVGKTPAQQPGPAKPPTQQVGTPKPLAQQPGLQSPAKAPGPTKTPAQTKPPSQQPGSTKPPPQQPGPAKPSPQQPGSTKPPSQQPGSAKPSAQQPSPAKPSAQQFTKPVSQTGFGKPLQPPTVSPSAKQPPSQGLPKTICPLCNTTELLLHVPEKANFNTCTECQTTVCSLCGFNPNPHLTEVKEWLCLNCQMKRALGGDLAPVPSSPQPKLKTAPVTTTSAVSKSSPQPQQTSPKKDAAPKQDLSKAPEPKKPPPLVKQPTLHGSPSAKAKQPPEADSLSKPAPPKEPSVPSEQDKAPVADDKPKQPKMVKPTTDLVSSSSATTKPDIPSSKVQSQAEEKTTPPLKTDSAKPSQSFPPTGEKVTPFDSKAIPRPASDSKIISHPGPSSESKGQKQVDPV

SEQ ID NO: 882989 - protein, 293 aa, Homo sapiens
RAQPQSAAASPARPGTAHLPASPPVRSPARWGSMAGSPLLWGPRAGGVGLLVLLLLGLFRPPPALCARPVKEPRGLSAASPPLAETGAPRRFRRSVPRGEAAGAVQELARALAHLLEAERQERARAEAQEAEDQQARVLAQLLRVWGAPRNSDPALGLDDDPDAPAAQLARALLRARLDPAALAAQLVPAPVPAAALRPRPPVYDDGPAGPDAEEAGDETPDVDPELLRYLLGRILAGSADSEGVAAPRRLRRAADHDVGSELPPEGVLGALLRVKRLETPAPQVPARRLLPP

SEQ ID NO: 882990 - protein, 293 aa, Homo sapiens; identical to SEQ ID NO: 882989

SEQ ID NO: 882991 - protein, 293 aa, Homo sapiens; identical to SEQ ID NO: 882989

SEQ ID NO: 882992 - protein, 172 aa, Homo sapiens
ACAAAERRSLASSPRHCALASQSARPEPGSLGQHGGVAAALGAAGRGRRPFGAAAARPVSAAPRALRAAGKAAAALRPRPPVYDDGPAGPDAEEAGDETPDVDPELLRYLLGRILAGSADSEGVAAPRRLRRAADHDVGSELPPEGVLGALLRVKRLETPAPQVPARRLLPP

SEQ ID NO: 882993 - protein, 254 aa, Homo sapiens
RAQPQSAAASPARPGTAHLPASPPVRSPARWGSMAGSPLLWGPRAGGVGLLVLLLLGLFRPPPALCARPVKEPRGLSAASPPLAETGAPRRFRRSVPRGEAAGAVQELARALAHLLEAERQERARAEAQEAEDQQARVLAQLLRVWGAPRNSDPALGLDDDPDAPAAQLARALLRARLDPAALAAQLVPAPVPAAALRPRPPVYDDGPAGPDAEEAGDETPDVDPELLRYLLGRILAGSADSEGVAAPRRLLPP

SEQ ID NO: 882994 - protein, 257 aa, Homo sapiens
RAQPQSAAASPARPGTAHLPASPPVRSPARWGSMAGSPLLWGPRAGGVGLLVLLLLGLFRPPPALCARPVKEPRGLSAASPPLAETGAPRRFRRSVPRGEAAGAVQELARALAHLLEAERQERARAEAQEAEDQQARVLAQLLRVWGAPRNSDPALGLDDDPDAPAAQLARALLRARLDPAALAAQLVPAPVPAAALRPRPPVYDDGPAGPDAEEAGDETPDVDPELLSEGVLGALLRVKRLETPAPQVPARRLLPP

SEQ ID NO: 882995 - protein, 84 aa, Homo sapiens
ACAAAERRSLASSPRHCALASQSARPEPGSLGQHGGVAAALGAAGRGRRPFGAAAARPVSAAPRALRAAGKGAPRPKRSVSALG

SEQ ID NO: 882996 - protein, 162 aa, Homo sapiens
RAQPQSAAASPARPGTAHLPASPPVRSPARWGSMAGSPLLWGPRAGGVGLLVLLLLGLFRPPPALCARPVKEPRGLSAASPPLAETGAPRRFRRSVPRGEAAGAVQELARALAHLLEAERQERARAEAQEAEDQQARVLAQLLRVWGAPRNSDPALGLDDDP

SEQ ID NO: 882997 - protein, 96 aa, Homo sapiens
RAQPQSAAASPARPGTAHLPASPPVRSPARWGSMAGSPLLWGPRAGGVGLLVLLLLGLFRPPPALCARPVKEPRGLSAASPPLAETGAPRRPRCGL

SEQ ID NO: 882998 - protein, 174 aa, Homo sapiens
EKPFECKECGKAFSIRKDLIRHFNIHTGEKPYECLQCGKAFTRMSGLTRHQWIHTGEKPYVCIQCGKAFCRTTNLIRHFSIHTGEKPYECVECGKAFNRRSPLTRHQRIHTAEKSHEPIQSGNVSCESTDLIQHSIIHTESSPVSAVNMETPSIAAHSSSLDINGFIVEETLPL

SEQ ID NO: 882999 - protein, 83 aa, Homo sapiens
GIAELVGTKETEAIGCKTTDSSEAGTTDGGGQVTIDPISGMDDPGVTTTRNTDKNLTIPSNMDIMVTTSGLLTVTTDRNVGSF

SEQ ID NO: 883000 - protein, 75 aa, Homo sapiens
NSRAGGNQRNRGNRLQDNRQFRGRDNRWGWPSDNRSNQWHGRSWGNNYPQHRQEPYYPQQYGHYGYNQRPPYGYY

SEQ ID NO: 883001 - protein, 97 aa, Homo sapiens
ERRLLGGGWANGDLRLGVSRCPGWVPPAGGGARPHSPVPVAPLSRGAQHSASSSQSAQSADVPMVPAWMVPPPPPPPPFAPHDKLPALPKGGRRLQA

SEQ ID NO: 883002 - protein, 251 aa, Homo sapiens
LSWEAGRIIGWGKPTRGRGRGGSLSTRGRGSEVPDSAHLAPTPLFSESGCCGLRSRFLTDCKMEEGGNLGGLIKMVHLLVLSGAWGMQMWVTFVSGFLLFRSLPRHTFGLVQSKLFPFYFHISMGCAFINLCILASQHAWAQLTFWEASQLYLLFLSLTLATVNARWLEPRTTAAMWALQTVEKERGLGGEVPGSHQGPDPYRQLREKDPKYSALRQNFFRYHGLSSLCNLGCVLSNGLCLAGLALEIRSL

SEQ ID NO: 883003 - protein, 189 aa, Homo sapiens
MEEGGNLGGLIKMVHLLVLSGAWGMQMWVTFVSGFLLFRSLPRHTFGLVQSKLFPFYFHISMGCAFINLCILASQHAWAQLTFWEASQLYLLFLSLTLATVNARWLEPRTTAAMWALQTVEKERGLGGEVPGSHQGPDPYRQLREKDPKYSALRQNFFRYHGLSSLCNLGCVLSNGLCLAGLALEIRSL

SEQ ID NO: 883004 - protein, 189 aa, Homo sapiens; identical to SEQ ID NO: 883003

SEQ ID NO: 883005 - protein, 189 aa, Homo sapiens; identical to SEQ ID NO: 883003

SEQ ID NO: 883006 - protein, 251 aa, Homo sapiens; identical to SEQ ID NO: 883002

SEQ ID NO: 883007 - protein, 172 aa, Homo sapiens
MEEGGNLGGLIKMVHLLVLSGAWGMQMWVTFVSGFLLFRSLPRHTFGLVQSKLFPFYFHISMGCAFINLCILASQHAWAQLTFWEASQLYLLFLSLTLATVNARWLEPRTTAAMWALQTVEKERGLGGEVPGSHQGPDPYRQLREKDPKYRGPGIFRNKGGPLGRGARPGPS

SEQ ID NO: 883008 - protein, 221 aa, Homo sapiens
LSWEAGRIIGWGKPTRGRGRGGSLSTRGRGSEVPDSAHLAPTPLFSESGCCGLRSRFLTDCKMEEGGNLGGLIKMVHLLVLSGAWGMQMWVTFVSGFLLFRSLPRHTFGLVQSKLFPFYFHISMGCAFINLCILASQHAWAQLTFWEASQLYLLFLSLTLATVNARWLEPRTTAAMWALQTVEKERGLGGEVPGHPHPGGCGNPPTPPSFVKKKGNPPISQ

SEQ ID NO: 883009 - protein, 184 aa, Homo sapiens
MSWVPGVGMEIRGEPGSALTPLWSPYPAGFLLFRSLPRHTFGLVQSKLFPFYFHISMGCAFINLCILASQHAWAQLTFWEASQLYLLFLSLTLATVNARWLEPRTTAAMWALQTVEKERGLGGEVPGSHQGPDPYRQLREKDPKYSALRQNFFRYHGLSSLCNLGCVLSNGLCLAGLALEIRSL

SEQ ID NO: 883010 - protein, 251 aa, Homo sapiens; identical to SEQ ID NO: 883002

SEQ ID NO: 883011 - protein, 151 aa, Homo sapiens
MEEGGNLGGLIKMVHLLVLSGAWGMQMWVTFVSGFLLFRSLPRHTFGLVQSKLFPFYFHISMGCAFINLCILASQHAWAQLTFWEASQLYLLFLSLTLATVNARWVGRYQAATRVPIPTASCERRTPSTVLSARISSATMGCPLFAIWAAS

SEQ ID NO: 883012 - protein, 337 aa, Homo sapiens
QSPGARGRQAGVALPWEGLHPHTQVSGLLTPQLQEPDVWSPSRGQPVSLHLREKGAPEVKEMAWWKAWIEQEGVTVKSSSHFNPDPDAETLYKAMKGIGVGSQLLSHQAAAFAFPSSALTSVSPWGQQGHLCCNPAGTNEQAIIDVLTKRSNTQRQQIAKSFKAQFGKDLTETLKSELSGKFERLIVALMYPPYRYEAKELHDAMKGSRDDVSSFVDPALALQDAQDLYAAGEKIRGTDEMKFITILCTRSATHLLRVKCTQNLHSYFAERLYYAMKGAGTRDGTLIRNIVSRSEIDLNLIKCHFKKMYGKTLSSMIMEDTSGDYKNALLSLVGSDP

SEQ ID NO: 883013 - protein, 364 aa, Homo sapiens [sequence omitted]

SEQ ID NO: 883014 - protein, 270 aa, Homo sapiens
MASRGVVGIFFLSAVPLVCLELRRGIPDIGIKDFLLLCGRILLLLALLTLIISVTTSWLNSFKSPQVYLKEEEEKNEKRQKLVRKKQQEAQGEKASRYIENVLKPHQEMKLRKLEERFYQMTGEAWKLSSGHKLGGDEGTSQTSFETSNREAAKSQNLPKPLTEFPSPAEQPTCKEIPDLPEEPSQTAEEVVTVALRCPSGNVLRRRFLKSYSSQVLFDWMTRIGYHISLYSLSTSFPRRPLAVEGGQSLEDIGITVDTVLILEEKEQTN

SEQ ID NO: 883015 - protein, 162 aa, Homo sapiens
MKLRKLEERFYQMTGEAWKLSSGHKLGGDEGTSQTSFETSNREAAKSQNLPKPLTEFPSPAEQPTCKEIPDLPEEPSQTAEEVVTVALRCPSGNVLRRRFLKSYSSQVLFDWMTRIGYHISLYSLSTSFPRRPLAVEGGQSLEDIGITVDTVLILEEKEQTN

SEQ ID NO: 883016 - protein, 238 aa, Homo sapiens
PPAPGASATMASRGVVGIFFLSAVPLVCLELRRGIPDIGIKDFLLLCGRILLLLALLTLIISVTTSWLNSFKSPQVYLKEEEEKNEKRQKLVRKKQQEAQGEKGDEGTSQTSFETSNREAAKSQNLPKPLTEFPSPAEQPTCKEIPDLPEEPSQTAEEVVTVALRCPSGNVLRRRFLKSYSSQVLFDWMTRIGYHISLYSLSTSFPRRPLAVEGGQSLEDIGITVDTVLILEEKEQTN

SEQ ID NO: 883017 - protein, 238 aa, Homo sapiens
PPAPGASATMASRGVVGIFFLSAVPLVCLELRRGIPDIEEEEKNEKRQKLVRKKQQEAQGEKASRYIENVLKPHQEMKLRKLEERFYQMTGEAWKLSSGHKLGGDEGTSQTSFETSNREAAKSQNLPKPLTEFPSPAEQPTCKEIPDLPEEPSQTAEEVVTVALRCPSGNVLRRRFLKSYSSQVLFDWMTRIGYHISLYSLSTSFPRRPLAVEGGQSLEDIGITVDTVLILEEKEQTN

SEQ ID NO: 883018 - protein, 162 aa, Homo sapiens; identical to SEQ ID NO: 883015

SEQ ID NO: 883019 - protein, 162 aa, Homo sapiens; identical to SEQ ID NO: 883015

SEQ ID NO: 883020 - protein, 162 aa, Homo sapiens; identical to SEQ ID NO: 883015

SEQ ID NO: 883021 - protein, 241 aa, Homo sapiens [sequence omitted]

SEQ ID NO: 883022 - protein, 304 aa, Homo sapiens
LELHLLLGGRTWRAARAADGCEALGTGVLMANFKGHALPGSFFLIIGLCWSVKYPLKYFSHTRKNSPLHYYQRLEIVEAAIRTLFSVTGILAEQFVPDGPHLHLYHENHWIKLMNWQHSTMYLFFAVSGIVDMLTYLVSHVPLGVDRLVMAVAVFMEGFLFYYHVHNRPPLDQHIHSLLLYALFGGCVSISLEVIFRDHIVLELFRTSLIILQGTWFWQIGFVLFPPFGTPEWDQKDDANLMFITMCFCWHYLAALSIVAVNYSLVYCLLTRMKRHGRGEIIGIQKLNSDDTYQTALLSGSDEE

SEQ ID NO: 883023 - protein, 304 aa, Homo sapiens; identical to SEQ ID NO: 883022

SEQ ID NO: 883024 - protein, 275 aa, Homo sapiens
MANFKGHALPGSFFLIIGLCWSVKYPLKYFSHTRKNSPLHYYQRLEIVEAAIRTLFSVTGILAEQFVPDGPHLHLYHENHWIKLMNWQHSTMYLFFAVSGIVDMLTYLVSHVPLGVDRLVMAVAVFMEGFLFYYHVHNRPPLDQHIHSLLLYALFGGCVSISLEVIFRDHIVLELFRTSLIILQGTWFWQIGFVLFPPFGTPEWDQKDDANLMFITMCFCWHYLAALSIVAVNYSLVYCLLTRMKRHGRGEIIGIQKLNSDDTYQTALLSGSDEE

SEQ ID NO: 883025 - protein, 304 aa, Homo sapiens; identical to SEQ ID NO: 883022

SEQ ID NO: 883026 - protein, 266 aa, Homo sapiens
MANFKGHALPGSFFLIIGLCWSVKYPLKYFSHTRKNSPLHYYQRLEIVEAAIRTLFSVTGILAEQFVPDGPHLHLYHENHWIKLMNWQHSTMYLFFAVSGIVDMLTYLVSHVPLGVDRLVMAVAVFMEGFLFYYHVHNRPPLDQHIHSLLLYALFGGCVSISLEVIFRDHIVLELFRTSLIILQGTWFWQIGFVLFPPFGTPEWDQKDDANLMFITMCFCWHYLAALSIVAVNYSLVYCFLTSDEETRKVGHSSLFHLSWFEFRGC

SEQ ID NO: 883027 - protein, 66 aa, Homo sapiens
TLTQQHSLGNPGDRAQPWGHGSSRVFLRGLPISLLSPLPGGACSSCLLEGSLEGLLGALKPFPSTL

SEQ ID NO: 883028 - protein, 241 aa, Homo sapiens
MFARGLKRKCVGHEEDVEGALAGLKTVSSYSLQRQSLLDMSLVKLQLCHMLVEPNLCRSVLIANTVRQIQEEMTQDGTWRTVAPQAAERAPLDRLVSTEILCRAAWGQEGAHPAPGLGDGHTQGPVSDLCPVTSAQAPRHLQSSAWEMDGPRENRGSFHKSLDQIFETLETKNPSCMEELFSDVDSPYYDLDTVLTGMMGGARPGPCEGLEGLAPATPGPSSSCKSDLGELDHVVEILVET

SEQ ID NO: 883029 - protein, 241 aa, Homo sapiens; identical to SEQ ID NO: 883028

SEQ ID NO: 883030 - protein, 241 aa, Homo sapiens; identical to SEQ ID NO: 883028

SEQ ID NO: 883031 - protein, 241 aa, Homo sapiens; identical to SEQ ID NO: 883028

SEQ ID NO: 883032 - protein, 260 aa, Homo sapiens
ARTAGRGARLATQAGPWDTMFARGLKRKCVGHEEDVEGALAGLKTVSSYSLQRQSLLDMSLVKLQLCHMLVEPNLCRSVLIANTVRQIQEEMTQDGTWRTVAPQAAERAPLDRLVSTEILCRAAWGQEGAHPAPGLGDGHTQGPVSDLCPVTSAQAPRHLQSSAWEMDGPRENRGSFHKSLDQIFETLETKNPSCMEELFSDVDSPYYDLDTVLTGMMGGARPGPCEGLEGLAPATPGPSSSCKSDLGELDHVVEILVET

SEQ ID NO: 883033 - protein, 254 aa, Homo sapiens
NLRLQYRPGGNDTMFARGLKRKCVGHEEDVEGALAGLKTVSSYSLQRQSLLDMSLVKLQLCHMLVEPNLCRSVLIANTVRQIQEEMTQDGTWRTVAPQAAERAPLDRLVSTEILCRAAWGQEGAHPAPGLGDGHTQGPVSDLCPVTSAQAPRHLQSSAWEMDGPRENRGSFHKSLDQIFETLETKNPSCMEELFSDVDSPYYDLDTVLTGMMGGARPGPCEGLEGLAPATPGPSSSCKSDLGELDHVVEILVET

SEQ ID NO: 883034 - protein, 213 aa, Homo sapiens
  misc_feature (7)..(7): Xaa can be any naturally occurring amino acid
HPAPGLXDGGRLAGSGHNVCTRTEEEMCWPRGRRGGSPGRLEDSVLIQPAAAVAPGHVSGEVAALPHACGAQSVPLSPHCQHGPADPGLGDGHTQGPVSDLCPVTSAQAPRHLQSSAWEMDGPRENRGSFHKSLDQIFETLETKNPSCMEELFSDVDSPYYDLDTVLTGMMGGARPGPCEGLEGLAPATPGPSSSCKSDLGELDHVVEILVET

SEQ ID NO: 883035 - protein, 77 aa, Homo sapiens
IAARLQMSERSILSRLASKGTEPHPTEESVDALSVGGARPGPCEGLEGLAPATPGPSSSCKSDLGELDHVVEILVET

SEQ ID NO: 883036 - protein, 81 aa, Homo sapiens
HLVSKMKIKRENMILQKLRWLPGDHLLLKAQFWTTDPGLPALPGGAQGSDPHPLQGAFLGGAAPAPSLRPPPNLLPCVLLL

SEQ ID NO: 883037 - protein, 181 aa, Homo sapiens
GGVCVCARTPAIKAAGLRGCSLLVFTGGGPVGTHGRESGSHVVRSPLCSGDPRRSCSTAQKPLPTGSGPPDTDPTGRPGSQRTQAGAPHHLTVSRTQAVCPGATSHQLWSVQGERGGLLGAWRGEGLLQSRERGCSLGDVGGHGCGGGRRRTLRGVVGGGGSRVREQVESLEGQDQDAAGL

SEQ ID NO: 883038 - protein, 181 aa, Homo sapiens; identical to SEQ ID NO: 883037

SEQ ID NO: 883039 - protein, 206 aa, Homo sapiens
GGVCVCARTPAIKAAGLRGCSLLVFTGGGPVGTHGRESGSHVVRSPLCSGDPRRSCSTAQKPLPTGSGPPDTDPTGRPGSQRTQAGAPHHLTFDTVNLSEQSRGHGHRWELGAKRRPGLPAVPLHLPTDCTRQLGPAGQAAAGGRFCPVLGFLVSTSCGPWASTCPWPAVLCWRRDSLVPRVDGAAVTAQSWAGEARCVLLFFSDC

SEQ ID NO: 883040 - protein, 181 aa, Homo sapiens; identical to SEQ ID NO: 883037

SEQ ID NO: 883041 - protein, 181 aa, Homo sapiens; identical to SEQ ID NO: 883037

SEQ ID NO: 883042 - protein, 583 aa, Homo sapiens [sequence omitted]

SEQ ID NO: 883043 - protein, 583 aa, Homo sapiens [sequence omitted]

SEQ ID NO: 883044 - protein, 583 aa, Homo sapiens [sequence omitted]

SEQ ID NO: 883045 - protein, 614 aa, Homo sapiens
MEVAANCSLRVKRPLLDPRFEGYKLSLEPLPCYQLELDAAVAEVKLRDDQYTLEHMHAFGMYNYLHCDSWYQDSVYYIDTLGRIMNLTVMLILKYLNHSIGYCTHLSDVIIRLLATSVMYNQDTALGKPREVFRLPTDLTACDNRLCASIHFSSSTWVTLSDGTGRLYVIGTGERGNSASEKWEIMFNEELGDPFIIIHSISLLNAEEHSIATLLLRIEKEELDMKGSGFYVSLEWVTISKKNQDNKKYEIIKRDILRGKSVPHYAAIEPDGNGLMIVSYKSFTFVQAGQDLEENMDEDISEKIKEPLYYWQQTEDDLTVTIRLPEDSTKEDIQIQFLPDHINIVLKDHQFLEGKLYSSIDHESSTWIIKESNSLEISLIKKNEGLTWPELVIGDKQGELIRDSAQCAAIAERLMHLTSEELNPNPDKEKPPCNAQELEECDIFFEESSSLCRFDGNTLKTTHVVNLGSNQYLFSVIVDPKEMPCFCLRHDVDALLWQPHSSKQDDMWEHIATFNALGYVQASKRDKKFFACAPNYSYAALCECLRRVFIYRQPAPMSTVLYNRKEGRQVGQVAKQQVASLETNDPILGFQATNERLFVLTTKNLFLIKVNTEN

SEQ ID NO: 883046 - protein, 583 aa, Homo sapiens [sequence omitted]

SEQ ID NO: 883047 - protein, 236 aa, Homo sapiens
MILLVIGLQFIFNYCCNLKIFKDEETHSLVYLFYLFTYFIFWTKNPNPDKEKPPCNAQELEECDIFFEESSSLCRFDGNTLKTTHVVNLGSNQYLFSVIVDPKEMPCFCLRHDVDALLWQPHSSKQDDMWEHIATFNALGYVQASKRDKKFFACAPNYSYAALCECLRRVFIYRQPAPMSTVLYNRKEGRQVGQVAKQQVASLETNDPILGFQATNERLFVLTTKNLFLIKVNTEN

SEQ ID NO: 883048 - protein, 471 aa, Homo sapiens
  misc_feature (468)..(468): Xaa can be any naturally occurring amino acid
MEVAANCSLRVKRPLLDPRFEGYKLSLEPLPCYQLELDAAVAEVKLRDDQYTLEHMHAFGMYNYLHCDSWYQDSVYYIDTLGRIMNLTVMLDTALGKPREVFRLPTDLTACDNRLCASIHFSSSTWVTLSDGTGRLYVIGTGERGNSASEKWEIMFNEELGDPFIIIHSISLLNAEEHSIATLLLRIEKEELDMKGSGFYVSLEWVTISKKNQDNKKYEIIKRDILRGKSVPHYAAIEPDGNGLMIVSYKSFTFVQAGQDLEENMDEDISEKIKEPLYYWQQTEDDLTVTIRLPEDSTKEDIQIQFLPDHINIVLKDHQFLEGKLYSSIDHESSTWIIKESNSLEISLIKKNEGLTWPELVIGDKQGELIRDSAQCAAIAERLMHLTSEELNPNPDKEKPPCNAQELEECDIFFEESSSLCRFDGNTLKTTHVVNLGSNQYFFILFMISSCFSLASSYLSAKRSAISXGGF

SEQ ID NO: 883049 - protein, 164 aa, Homo sapiens
MEVAANCSLRVKRPLLDPRFEGYKLSLEPLPCYQLELDAAVAEVKLRDDQYTLEHMHAFGMYNYLHCDSWYQDSVYYIDTLGRIMNLTVMLDTALGKPREVFRLPTDLTACETNLVFLVAISLIFPPPKNFFLFPPFSPKIFFSPPFFFFPPFKPLGLPCQMEL

SEQ ID NO: 883050 - protein, 620 aa, Homo sapiens
RCESPLLGRRRAPAPLGRLARLARPGLAGREQLGGPRAPRRTMRPALGHPRSVSSASGSFPPPPAAARLQPLFLRGGSFRGRRGSGDSSTSTSTSRGGGGGRRGGGGGSPSSSTGAEREDDDESLSVSKPLVPNAALLGPPAQVGAPAGPAPVAFSSSAATSSSTSTPTSSCSMTAADFGGGAAAGAVGGPGSRSAGGAGGTGTGSGASCCPCCCCCGCPDRPGRRGRRRGCAPSPRCRWGYQALSVVLLLAQGGLLDLYLIAVTDLYWCSWIATDLVVVVGWAIFFAKNSRGRRGGAASGAHNHHLHHHHAAPPLHLPAPSAATAGAKARGARGGAGGAGGGLGAAAAAGEFAFAYLAWLIYSIAFTPKVVLILGTSILDLIELRAPFGTTGFRLTMALSVPLLYSLVRAISEAGAPPGSAGPLLLQPQRHRAAGCFLGTCLDLLDSFTLVELMLEGRVPLPAHLRYLLIAVYFLTLASPVLWLYELNAAAAAAASWGQASGPGSCSRLLRLLGGCLVDVPLLALRCLLVVSYQQPLSIFMLKNLFFLGCRGLEALEGCWDRGNRASPSRARGGYGAPPSAPPPPPPPPQGGSQLGHCISENEGGAHGYVNTLAVASQN

SEQ ID NO: 883051 - protein, 214 aa, Homo sapiens
MASHEVDNAELGSASAHGTPGSEAGPEELNTSVYQPIDGSPDYQKAKLQVLGAIQILNAAMILALGVFLGSLQYPYHFQKHFFFFTFYTGYPIWGAVFFCSSGTLSVVAGIKPTRTWIQNSFGMNIASATIALVGTAFLSLNIAVNIQSLRSCHSSSESPDLCNYMGSISNGMVSLLLILTLLELCVTISTIAMWCNANCCNSREEISSPPNSV

SEQ ID NO: 883052 - protein, 167 aa, Homo sapiens
SKVLHKAKITLSLWRLPLSGKDAVVIFSECLLLATRWTWEESRLPKPEASKFCSSGTLSVVAGIKPTRTWIQNSFGMNIASATIALVGTAFLSLNIAVNIQSLRSCHSSSESPDLCNYMGSISNGMVSLLLILTLLELCVTISTIAMWCNANCCNSREEISSPPNSV

SEQ ID NO: 883053 - protein, 168 aa, Homo sapiens
MASHEVDNAELGSASAHGTPGSEAGPEELNTSVYQPIDGSPDYQKAKLQVLGFCSSGTLSVVAGIKPTRTWIQNSFGMNIASATIALVGTAFLSLNIAVNIQSLRSCHSSSESPDLCNYMGSISNGMVSLLLILTLLELCVTISTIAMWCNANCCNSREEISSPPNSV

SEQ ID NO: 883054 - protein, 149 aa, Homo sapiens
MASHEVDNAELGSASAHGTPGSEAGPEELNTSVYQPIDGSPDYQKAKLQVLGIQNSFGMNIASATIALVGTAFLSLNIAVNIQSLRSCHSSSESPDLCNYMGSISNGMVSLLLILTLLELCVTISTIAMWCNANCCNSREEISSPPNSV

SEQ ID NO: 883055 - protein, 165 aa, Homo sapiens
MASHEVDNAELGSASAHGTPGSEAGPEELNTSVYQPIDGSPDYQKAKLQVLGAIQILNAAMILALGVFLGSLQYPYHFQKHFFFFTFYTGYPIWGAVFFCSSGTLSVVAGIKPTRTWIQNSFGMNIASATIALVGRHGVSTADSHLAGIMRNHLYHSHVVQCKLL

SEQ ID NO: 883056 - protein, 119 aa, Homo sapiens
MASHEVDNAELGSASAHGTPGSEAGPEELNTSVYQPIDGSPDYQKAKLQVLGAIQILNAAMILALGVFLGSLQYPYHFQKHFFFFTFYTGYPIWGAVFVSIRTPLAICYFLDTTAGDVF

SEQ ID NO: 883057 - protein, 133 aa, Homo sapiens
MQRHKNDTMDFGDSGGKFCSSGTLSVVAGIKPTRTWIQNSFGMNIASATIALVGTAFLSLNIAVNIQSLRSCHSSSESPDLCNYMGSISNGMVSLLLILTLLELCVTISTIAMWCNANCCNSREEISSPPNSV

SEQ ID NO: 883058 - protein, 213 aa, Homo sapiens
SKVLHKAKITLSLWRLPLSGKDAVVIFSECLLLATRWTWEESRLPKPEASKAIQILNAAMILALGVFLGSLQYPYHFQKHFFFFTFYTGYPIWGAVFFCSSGTLSVVAGIKPTRTWIQNSFGMNIASATIALVGTAFLSLNIAVNIQSLRSCHSSSESPDLCNYMGSISNGMVSLLLILTLLELCVTISTIAMWCNANCCNSREEISSPPNSV

SEQ ID NO: 883059 - protein, 133 aa, Homo sapiens
SKVLHKAKITLSLWRLPLSGKDAVVIFSECLLLATRWTWEESRLPKPEASKFCSSGTLSVVAGIKPTRTWIQNSFGMNIASATIALVGTAFLSLNIAVNIQSLRSCHSSSESPDLCNYMGSISNEISSPPNSV

SEQ ID NO: 883060 - protein, 151 aa, Homo sapiens
MFSTKALLLAGLISTALAGPWANICAGKSSNEIRTCDRHGCGQYSAQRSQRPHQGVDVLCSAGSTVYAPFTGMIVGQEKPYQNKNAINNGVRISGRGFCVKMFYIKPIKYKGPIKKGEKLGTLLPLQKVYPGIQSHVHIENCDSSDPTAYL

SEQ ID NO: 883061 - protein, 192 aa, Homo sapiens
ESGNKILEGRSSHKYIKSRENYSENRIVRINCVTDKANGDRKCLRPGALLSLFSFLALAGPWANICAGKSSNEIRTCDRHGCGQYSAQRSQRPHQGVDVLCSAGSTVYAPFTGMIVGQEKPYQNKNAINNGVRISGRGFCVKMFYIKPIKYKGPIKKGEKLGTLLPLQKVYPGIQSHVHIENCDSSDPTAYL

SEQ ID NO: 883062 - protein, 181 aa, Homo sapiens
ESGNKILEGRSSHKYIKSRENYSENRIVRINCVTDKANGDRKCLRPGALLSLFSFLALAGPWANICAGKSSNEIRTCDRHGCGQYSAQRSQRPHQGVDVLCSAGSTVYAPFTGMIVGQEKPYQNKNAINNGVRISGRALKNVTHHQMKHEDSYSSLGVLECHYYWPQESSMKDHPLVYLQF

SEQ ID NO: 883063 - protein, 473 aa, Homo sapiens
MAQLEGYYFSAALSCTFLVSCLLFSAFSRALREPYMDEIFHLPQAQRYCEGHFSLSQWDPMITTLPGLYLVSIGVIKPAIWIFGWSEHVVCSIGMLRFVNLLFSVGNFYLLYLLFCKVQPRNKAASSIQRVLSTLTLAVFPTLYFFNFLYYTEAGSMFFTLFAYLMCLYGNHKTSAFLGFCGFMFRQTNIIWAVFCAGNVIAQKLTEAWKTELQKKEDRLPPIKGPFAEFRKILQFLLAYSMSFKNLSMLLLLTWPYILLGFLFCAFVVVNGGIVIGDRSSHEACLHFPQLFYFFSFTLFFSFPHLLSPSKIKTFLSLVWKRRILFFVVTLVSVFLVWKFTYAHKYLLADNRHYTFYVWKRVFQRYETVKYLLVPAYIFAGWSIADSLKSKSIFWNLMFFICLFTVIVPQKLLEFRYFILPYVIYRLNIPLPPTSRLICELSCYAVVNFITFFIFLNKTFQWPNSQDIQRFMW

SEQ ID NO: 883064 - protein, 473 aa, Homo sapiens; identical to SEQ ID NO: 883063

SEQ ID NO: 883065 - protein, 538 aa, Homo sapiens
LLPGAEPAAHCYCGHQFGQFAGQLGDGAAMYLGEVCTANGERWELQLKGAGPTPFSRQADGRKVLRSSIREFLCSEAMFHLGVPTTRAGACVTSESTVVRDVFYDGNPKYEQCTVVLRVASTFIRFGSFEIFKSADEHTGRAGPSVGRNDIRVQLLDYVISSFYPEIQAAHASDSVQRNAAFFREVTRRTARMVAEWQCVGFCHGVLNTDNMSILGLTIDYGPFGFLDRYDPDHVCNASDNTGRYAYSKQPEVCRWNLRKLAEALQPELPLELGEAILAEEFDAEFQRHYLQKMRRKLGLVQVELEEDGALVSKLLETMHLTGADFTNTFYLLSSFPVELESPGLAEFLARLMEQCASLEELRLAFRPQMDPRQLSMMLMLAQSNPQLFALMGTRAGIARELERVEQQSRLEQLSAAELQSRNQGHWADWLQAYRARLDKDLEGAGDAAAWQAEHVRVMHANNPKYVLRNYIAQNAIEAAERGDFSEVRRVLKLLETPYHCEAGAATDAEATEADGADGRQRSYSSKPPLWAAELCVT

SEQ ID NO: 883066 - protein, 483 aa, Homo sapiens [sequence omitted]

SEQ ID NO: 883067 - protein, 346 aa, Homo sapiens [sequence omitted]

SEQ ID NO: 883068 - protein, 375 aa, Homo sapiens [sequence omitted]

SEQ ID NO: 883069 - protein, 160 aa, Homo sapiens
LLPGAEPAAHCYCGHQFGQFAGQLGDGAAMYLGEVCTANGERWELQLKGAGPTPFSRKKMLICYNTDEPGGRGAVKKLVTERQILGDPTYMRQADGRKVLRSSIREFLCSEAMFHLGVPTTRAGACVTSESTVVRDVFYDGNPKYEQCTVVLRVASTFIR

SEQ ID NO: 883070 - protein, 499 aa, Homo sapiens
MRQADGRKVLRSSIREFLCSEAMFHLGVPTTRAGACVTSESTVVRDVFYDGNPKYEQCTVVLRVASTFIRGWGQVWPVDASGLPSRFGSFEIFKSADEHTGRAGPSVGRNDIRVQLLDYVISSFYPEIQAAHASDSVQRNAAFFREVTRRTARMVAEWQCVGFCHGVLNTDNMSILGLTIDYGPFGFLDRYDPDHVCNASDNTGRYAYSKQPEVCRWNLRKLAEALQPELPLELGEAILAEEFDAEFQRHYLQKMRRKLGLVQVELEEDGALVSKLLETMHLTGADFTNTFYLLSSFPVELESPGLAEFLARLMEQCASLEELRLAFRPQMDPRQLSMMLMLAQSNPQLFALMGTRAGIARELERVEQQSRLEQLSAAELQSRNQGHWADWLQAYRARLDKDLEGAGDAAAWQAEHVRVMHANNPKYVLRNYIAQNAIEAAERGDFSEVRRVLKLLETPYHCEAGAATDAEATEADGADGRQRSYSSKPPLWAAELCVT

SEQ ID NO: 883071 - protein, 610 aa, Homo sapiens
LLPGAEPAAHCYCGHQFGQFAGQLGDGAAMYLGEVCTANGERWELQLKGAGPTPFSRQADGRKVLRSSIREFLCSEAMFHLGVPTTRAGACVTSESTVVRDVFYDGNPKYEQCTVVLRVASTFIRFGSFEIFKSADEHTGRAGPSVGRNDIRVQLLDYVISSFYPEIQAAHASDSVQRNAAFFREVTRRTARMVAEWQCVGFCHGVLNTDNMSILGLTIDYGPFGFLDRYDPDHVCNASDNTGRYAYSKQPEVCRWNLRKLAEALQPELPLELGEAILAEEFDAEFQRHYLQKMRRKLGLVQVELEEDGALVSKLLETMHLTGTQHGSILLNCGGHRTSQLTQEQCCTAEPWSLFTSATQTLCEPVTSSPFPSLQPLVATTPLRVCEPDCSKPFSADFTNTFYLLSSFPVELESPGLAEFLARLMEQCASLEELRLAFRPQMDPRQLSMMLMLAQSNPQLFALMGTRAGIARELERVEQQSRLEQLSAAELQSRNQGHWADWLQAYRARLDKDLEGAGDAAAWQAEHVRVMHANNPKYVLRNYIAQNAIEAAERGDFSEVRRVLKLLETPYHCEAGAATDAEATEADGADGRQRSYSSKPPLWAAELCVT

SEQ ID NO: 883072 - protein, 642 aa, Homo sapiens
LLPGAEPAAHCYCGHQFGQFAGQLGDGAAMYLGEVCTANGERWELQLKGAGPTPFSRQADGRKVLRSSIREFLCSEAMFHLGVPTTRAGACVTSESTVVRDVFYDGNPKYEQCTVVLRVASTFIRFGSFEIFKSADEHTGRAGPSVGRNDIRVQLLDYVISSFYPEIQAAHASDSVQRNAAFFREVTRRTARMVAEWQCVGFCHGVLNTDNMSILGLTIDYGPFGFLDRYDPDHVCNASDNTGRYAYSKQPEVCRWNLRKLAEALQPELPLELGEAILAEEFDAEFQRHYLQKMRRKLGLVQVELEEDGALVSKLLETMHLTGTQHGSILLNCGGHRTSQLTQEQCCTAEPWSLFTSATQTLCEPVTSSPFPSLQPLVATTPLRVCEPDCSKPFSADFTNTFYLLSSFPVELESPGLAEFLARLMEQCASLEELRLAFRPQMDPRQLSMMLMLAQSNPQLFALMGTRAGIARELERVEQQSRLEQLSAAELQSRNQGHWADWLQAYSVSPASMVTGGRRVACWKKSSPAVTPEPGCHSRARLDKDLEGAGDAAAWQAEHVRVMHANNPKYVLRNYIAQNAIEAAERGDFSEVRRVLKLLETPYHCEAGAATDAEATEADGADGRQRSYSSKPPLWAAELCVT

SEQ ID NO: 883073 - protein, 75 aa, Homo sapiens
NSVFGFRQADGRKVLRSSIREFLCSEAMFHLGVPTTRAGACVTSESTVVRDVFYDGNPKYEQCTVVLRVASTFIR

SEQ ID NO: 883074 - protein, 89 aa, Homo sapiens
VLDSPSSLFPTPIRPRVCNKTNDDTIDFDYTVLLHELSTQEIIPCRIHLVWYPGKPLKVKYHCQELQTPEEASGTEEGSAVVPTELSNF

SEQ ID NO: 883075 - protein, 240 aa, Homo sapiens
PRPGCRANFPASMQPRRQRLPAPWSGPRGPRPTAPLLALLLLLAPVAAPAGSGDPDDPGQPQDAGVPRRLLQQAARAALHFFNFRSGSPSALRVLAEVQEGRAWINPKEGCKVHVVFSTERYNPESLLQEGEGRLGKCSARVFFKNQKPRPTINVTCTRLIEKKKRQQEDYLLYKQMKQLKNPLEIVSIPDNHGHIDPSLRLIWDLAFLGSSYVMWEMTTQVSHYYLAQLTSVRQWVRKT

SEQ ID NO: 883076 - protein, 306 aa, Homo sapiens
PRPGCRANFPASMQPRRQRLPAPWSGPRGPRPTAPLLALLLLLAPVAAPAGSGDPDDPGQPQDAGVPRRLLQQAARAALHFFNFRSGSPSALRVLAEVQEGRAWINPKEGCKVHVVFSTERYNPESLLQEGEGRLGKCSARVFFKNQKPRPTINVTCTRLIEKKKRQQEDYLLYKQMKQLKNPLEIVSIPDNHGHIDPSLRLIWDLAFLGSSYVMWEMTTQVSHYYLAQLTSVRQWKTNDDTIDFDYTVLLHELSTQEIIPCRIHLVWYPGKPLKVKYHCQELQTPEEASGTEEGSAVVPTELSNF

SEQ ID NO: 883077 - protein, 198 aa, Homo sapiens
MTHRNLFINLVIETLGMVYFWPFQMKANYFCWVLWTGFDDPSIGINVTCTRLIEKKKRQQEDYLLYKQMKQLKNPLEIVSIPDNHGHIDPSLRLIWDLAFLGSSYVMWEMTTQVSHYYLAQLTSVRQWKTNDDTIDFDYTVLLHELSTQEIIPCRIHLVWYPGKPLKVKYHCQELQTPEEASGTEEGSAVVPTELSNF

SEQ ID NO: 883078 - protein, 88 aa, Homo sapiens
NVVLTYIERDATIRIIMNKTNDDTIDFDYTVLLHELSTQEIIPCRIHLVWYPGKPLKVKYHCQELQTPEEASGTEEGSAVVPTELSNF

SEQ ID NO: 883079 - protein, 87 aa, Homo sapiens
MGAEGLGTTARGRLNCSKTNDDTIDFDYTVLLHELSTQEIIPCRIHLVWYPGKPLKVKYHCQELQTPEEASGTEEGSAVVPTELSNF

SEQ ID NO: 883080 - protein, 260 aa, Homo sapiens
PRPGCRANFPASMQPRRQRLPAPWSGPRGPRPTAPLLALLLLLAPVAAPAGSGDPDDPGQPQDAGVPRRLLQQAARAALHFFNFRSGSPSALRVLAEVQEGRAWINPKEGCKVHVVFSTERYNPESLLQEGEGRLGKCSARVFFKNQKPRPTINVTCTRLIEKKKRQQEDYLLYKQMKQLKNPLEIVSIPDNHGHIDPSLRLIWDLAFLGSSYVMWEMTTQVSHYYLAQLTSVRQWTLVSIRKSDRHSTRLSYNSVTRQK

SEQ ID NO: 883081 - protein, 33 aa, Homo sapiens
  misc_feature (28)..(28): Xaa can be any naturally occurring amino acid
MWEMTTQVSHYYLAQLTSVRQWNLPIPXMTLGE

SEQ ID NO: 883082 - protein, 306 aa, Homo sapiens; identical to SEQ ID NO: 883076

SEQ ID NO: 883083 - protein, 190 aa, Homo sapiens
EDPHRGHVKTASRTFFQVEDVHRNRYKQITYMAQGLAVREMTGMTKFKPYFISATSEILSQKCINTNVLFLSLSDNHGHIDPSLRLIWDLAFLGSSYVMWEMTTQVSHYYLAQLTSVRQWKTNDDTIDFDYTVLLHELSTQEIIPCRIHLVWYPGKPLKVKYHCQELQTPEEASGTEEGSAVVPTELSNF

SEQ ID NO: 883084 - protein, 306 aa, Homo sapiens; identical to SEQ ID NO: 883076

SEQ ID NO: 883085 - protein, 249 aa, Homo sapiens
PRPGCRANFPASMQPRRQRLPAPWSGPRGPRPTAPLLALLLLLAPVAAPAGSGDPDDPGQPQDAGVPRRLLQQAARAALHFFNFRSGSPSALRVLAEVQEGRAWINPKEGCKVHVVFSTERYNPESLLQEGEGRLGKCSARVFFKNQKPRPTINVTCTRLIEKKKRQQEDYLLYKQMKQLKNPLEIVSIPGMNQHLEFLYSGMYVITKSLKERSFKFLSLKWHFHSTKYCGIPHNLNKTQRYHLSVLHL

SEQ ID NO: 883086 - protein, 242 aa, Homo sapiens
SPVYWDIETLGGVFDHNLLIGIPSYSNQEEPGILYCRLMVKRKGKIKVCQGEYERWLDDNKLLGQFTLIGIPPAPRGVPQIEVTFDIDANGIVHVSAKDKGTGREQQIVIQSSGGLSKDDIENMVKNAEKYAEEDRRKKERVEAVNMAEGIIHDTETKMEEFKDQLPADECNKLKEEISKMRELLARKDSETGENIRQAASSLQQASLKLFEMAYKKMASEREGSGSSGTGEQKEDQKEEKQ

SEQ ID NO: 883087 - protein, 129 aa, Homo sapiens
QAPYVLRNEVLHISRGERATITTQMLDIRDDDNPQDVVIEIIDPPLHGQLLQTLQSPATPIYQFQLDELSRGLLHYAHDGSDSTSDVAVLQANDGHSFHNILFQVKTVPQVGVIPRVTVSLHLDVNFYG

SEQ ID NO: 883088 - protein, 78 aa, Homo sapiens
VCPGLETQLADSSSVGGSQTCSWLSWYDSKPGILTSRTGVLLIVHISQQMCEPRPQATQMAGVIRSHVYWFSSAIPGS

SEQ ID NO: 883089 - protein, 102 aa, Homo sapiens
  misc_feature (2)..(3): Xaa can be any naturally occurring amino acid
NXXLAGGSRAGLGLGSMSLRVGARAKRNPWASGDPGGPDQCSLVVGADAWAHCGRLCFQCPLGVSKSNKKRINLWFHRSLQSSNLQCMKAQIPERMASNDQE

SEQ ID NO: 883090 - protein, 95 aa, Homo sapiens
  misc_feature (2)..(3): Xaa can be any naturally occurring amino acid
NXXLAGGSRAGLGLGSMSLRVGARAKRNPWASGDPGGPDQCSLVVGADAWAHCGRAGPEVQLCFQCPLGVSKSNKKRINLWLHKGSEHKVHLTTK

SEQ ID NO: 883091 - protein, 618 aa, Homo sapiens
APHQDPPEAVRNILHPGPLYLFIIVYFVFCIQNQEPEDDPGALAMAVFIILSLFSVLVTGMGEGGAGSEKGGERECKLNQLPHCPSVSPSAQPWTHPGQSQLFADLSREELTAVMRFLTQQLGPGLVDAAQAQPSDNCVFSVELQLPPKAAALAHLDRGSPPPAREALAIVFFGRQPQPNVSELVVGPLPHPSYMRDVTVERHGGPLPYHRRPMLFQEYLDIDQMIFDRELPQASGLLHHCCFYKRRGRNLVTMTTAPRGLQSGDRATYFGLYYNISGAGFFLHHVGLELLVNHKALDPARWTIQKVFYQGRYYDSLAQLEAQFEAGLVNVVLIPDNGTGGSWSLKSPVPPGPAPPLQFHPQGPRFSVQGSRVASSLWTFSFGLGAFSGPRIFDVPFQGERVAYEVSVQAALAIYGGNSPSALRSRYIDSGFGLGHFSTPLTHGVDCPYLATYVDWHFLFESQAAKTIRDAFCIFEQNQGLPLRRHHSDLYSHYFGGLAETVLVIRSVSTMLNYDYVWDMVFHPNGAIEIRLHTTGYISSAFPFGAAQRYGNKVSEHTLGTVHTHSAHFKVDLDVAGKASWQRQKCWRGELKSPCLALKVFVGLGAVAYACKPNTLGD

SEQ ID NO: 883092 - protein, 667 aa, Homo sapiens
APHQDPPEAVRNILHPGPLYLFIIVYFVFCIQNQEPEDDPGALAMAVFIILSLFSVLVTGMGEGGAGSEKGGERECKLNQLPHCPSVSPSAQPWTHPGQSQLFADLSREELTAVMRFLTQQLGPGLVDAAQAQPSDNCVFSVELQLPPKAAALAHLDRGSPPPAREALAIVFFGRQPQPNVSELVVGPLPHPSYMRDVTVERHGGPLPYHRRPMLFQEYLDIDQMIFDRELPQASGLLHHCCFYKRRGRNLVTMTTAPRGLQSGDRATYFGLYYNISGAGFFLHHVGLELLVNHKALDPARWTIQKVFYQGRYYDSLAQLEAQFEAGLVNVVLIPDNGTGGSWSLKSPVPPGPAPPLQFHPQGPRFSVQGSRVASSLWTFSFGLGAFSGPRIFDVPFQGERVAYEVSVQAALAIYGGNSPSALRSRYIDSGFGLGHFSTPLTHGVDCPYLATYVDWHFLFESQAAKTIRDAFCIFEQNQGLPLRRHHSDLYSHYFGGLAETVLVIRSVSTMLNYDYVWDMVFHPNGAIEIRLHTTGYISSAFPFGAAQRYGNKVSEHTLGTVHTHSAHFKVDLDVAGLVAWVTAGFLHIPHAEDIPNTVTVGNSVGFFLRPYNFFDEDPSFYSADSIYFRGDQDAGACEVNPLACLPQAAACAPDLPAFSHGGFSHN

SEQ ID NO: 883093 - protein, 480 aa, Homo sapiens
APHQDPPEAVRNILHPGPLYLFIIVYFVFCIQNQEPEDDPGALAMAVFIILSLFSVLVTGMGEGGAGSEKGGERECKLNQLPHCPSVSPSAQPWTHPGQSQLFADLSREELTAVMRFLTQQLGPGLVDAAQAQPSDNCVFSVELQLPPKAAALAHLDRGSPPPAREALAIVFFGRQPQPNVSELVVGPLPHPSYMRDVTVERHGGPLPYHRRPMLFQEYLDIDQMIFDRELPQASGLLHHCCFYKRRGRNLVTMTTAPRGLQSGDRATYFGLYYNISGAGFFLHHVGLELLVNHKALDPARWTIQKVFYQGRYYDSLAQLEAQFEAGLVNVVLIPDNGTEPGPPLRRHHSDLYSHYFGGLAETVLVIRSVSTMLNYDYVWDMVFHPNGAIEIRLHTTGYISSAFPFGAAQRYGNKVSEHTLGTVHTHSAHFKVDLDVAGKASWQRQKCWRGELKSPCLALKVFVGLGAVAYACKPNTLGD

SEQ ID NO: 883094 - protein, 310 aa, Homo sapiens
ASGKRSRNSDARSPSSSTSPRAAAVAVATDGIVAAVAIFPATTSLPFRTTRGADSELRTGRNRHISGLYAFSSGRLAFPCGRPDYWALARRTIGTGLERKALGLPGSSERPTSVSSYQGTRIRCSNPGGKMRPLTEEETRVMFEKIAKYIGENLQLLVDRPDGTYCFRLHNDRVYYVSEKIMKLAANISGDKLVSLGTCFGKFTKTHKFRLHVTALDYLAPYAKYKVWIKPGAEQSFLYGNHVLKSGLGRITENTSQYQGVVVYSMADIPLGFGVAAKSTQDCRKVDPMAIVVFHQADIGEYVRHEETLT

SEQ ID NO: 883095 - protein, 310 aa, Homo sapiens; identical to SEQ ID NO: 883094

SEQ ID NO: 883096 - protein, 263 aa, Homo sapiens
ASGKRSRNSDARSPSSSTSPRAAAVAVATDGIVAAVAIFPATTSLPFRTTRGADSELRTGRNRHISGLYAFSSGRLAFPCGRPDYWALARRTIGTGLERKALGLPGSSERPTSVSSYQGTRIRCSNPGGKMRPLTEEETRVMFEKIAKYIGENLQLLVDRPDGTYCFRLHNDRVYYVSEKIMKLAANISGDKLVSLGTCFGKFTKTHKFRLHVTALDYLAPYAKGFGVAAKSTQDCRKVDPMAIVVFHQADIGEYVRHEETLT

SEQ ID NO: 883097 - protein, 327 aa, Homo sapiens
ASGKRSRNSDARSPSSSTSPRAAAVAVATDGIVAAVAIFPATTSLPFRTTRGADSELRTGRNRHISGLYAFSSGRLAFPCGRPDYWALARRTIGTGLERKALGLPGSSERPTSVSSYQGTRIRCSNPGGKMRPLTEEETRVMFEKIAKYIGENLQLLVDRPDGTYCFRLHNDRVYYVRLRRGRAGSMDPGERGPGSHEPPSSATLLPLYPFSEKIMKLAANISGDKLVSLGTCFGKFTKTHKFRLHVTALDYLAPYAKYKVWIKPGAEQSFLYGNHVLKSGLGRITENTSQYQGVVVYSMADIPLVSRDGSCYRTQVLLFKKGMSSI

SEQ ID NO: 883098 - protein, 240 aa, Homo sapiens
ASGKRSRNSDARSPSSSTSPRAAAVAVATDGIVAAVAIFPATTSLPFRTTRGADSELRTGRNRHISGLYAFSSGRLAFPCGRPDYWALARRTIGTGLERKALGLPGSSERPTSVSSYQGTRIRCSNPGGKMRPLTEEETRVMFEKIAKYIGENLQLLVDRPDGTYCFRLHNDRVYYVSEKIMKLAANISGDKLVSLGTCFGKFTKTHKFRLHVTALDYLAPYAKVCGAVSNSATGDEVKD

SEQ ID NO: 883099 - protein, 310 aa, Homo sapiens; identical to SEQ ID NO: 883094

SEQ ID NO: 883100 - protein, 275 aa, Homo sapiens
ASGKRSRNSDARSPSSSTSPRAAAVAVATDGIVAAVAIFPATTSLPFRTTRGADSELRTGRNRHISGLYAFSSGRLAFPCGRPDYWALARRTIGTGLERKALGLPGSSERPTSVSSYQGTRIRCSNPGGKMRPLTEEETRVMFEKIAKYIGENLQLLVDRPDGTYCFRLHNDRVYYVSEKIMKLAANISGDKLVSLGTCFGKFTKTHKFRLHVTALDYLAPYAKYKVWIKPGAEQSFLYGNHVLKSGLGRITENTSQYQGVVVYSMADIPLCLFF

SEQ ID NO: 883101 - protein, 699 aa, Homo sapiens
MGIRGLMSFVEDHSNEFFTDLKLRDTKIVIDGYALFHRLCFSSNLDLRYGGDYDSFADVVQKFFESLFACNICPYVVLDGGCDISDKKLTTLKDRAREKIQMAHSLSVGGSGYVCPLLIREVFIQVLIKLRVCFVQCFSEADRDIMTLANHWNCPVLSSDSDFCIFDLKTGFCPLNSFQWRNMNTIKGTQNYIPAKCFSLDAFCHHFSNMNKALLPLFAVLCGNDHVNLPIMETFLSKARLPLGATSSKGRRHHRILGLLNWLSHFANPTEALDNVLKYLPKKDRENVKELLCCSMEEYQQSQVKLQDFFQCGTYVCPDALNLGLPEWVLVALAKGQLSPFISDALVLRRTILPTQVENMQQPNAHRISQPIRQIIYGLLLNASPHLDKTSWNALPPQPLAFSEVERINKNIRTSIIDAVELAKDHSDLSRLTELSLRRRQMLLLETLKVKQTILEPIPTSLKLPIAVSCYWLQHTETKAKLHHLQSLLLTMLVGPLIAIINSPGNVDPVPRQAQCLAPRKLVKGKEELQEDGAKMLYAEFQRVKAQTRLGTRLDLDTAHIFCQWQSCLQMGMYLNQLLSTPLPEPDLTRLYSGSLVHGLCQQLLASTSVESLLSICPEAKQLYEYLFNATRSYAPAEIFLPKGRSNSKKKRQKKQNTSCSKNRGRTTAHTKCWYEGNNRFGLLMVENLEEHSEASNIE

SEQ ID NO: 883102 - protein, 541 aa, Homo sapiens
MGIRGLMSFVEDHSNEFFTDLKLRDTKIVIDGYALFHRLCFSSNLDLRYGGDYDSFADVVQKFFESLFACNICPYVVLDGGCDISDKKLTTLKDRAREKIQMAHSLSVGGSGYVCPLLIREVFIQVLIKLRVCFVQCFSEADRDIMTLANHWNCPVLSSDSDFCIFDLKTGFCPLNSFQWRNMNTIKGTQNYIPAKCFSLDAFCHHFSNMNKALLPLFAVLCGNDHVNLPIMETFLSKARLPLGATSSKGRRHHRILGLLNWLSHFANPTEALDNVLKYLPKKDRENVKELLCCSMEEYQQSQMLLLETLKVKQTILEPIPTSLKLPIAVSCYWLQHTETKAKLHHLQSLLLTMLVGPLIAIINSPGKEELQEDGAKMLYAEFQRVKAQTRLGTRLDLDTAHIFCQWQSCLQMGMYLNQLLSTPLPEPDLTRLYSGSLVHGLCQQLLASTSVESLLSICPEAKQLYEYLFNATRSYAPAEIFLPKGRSNSKKKRQKKQNTSCSKNRGRTTAHTKCWYEGNNRFGLLMVENLEEHSEASNIE

SEQ ID NO: 883103 - protein, 679 aa, Homo sapiens
MGIRGLMSFVEDHSNEFFTDLKLRDTKIVIDGYALFHRLCFSSNLDLRYGGDYDSFADVVQKFFESLFACNICPYVVLDGGCDISDKKLTTLKDRAREKIQMAHSLSVGGSGYVCPLLIREVFIQVLIKLRVCFVQCFSEADRDIMTLANHWNCPVLSSDSDFCIFDLKTGFCPLNSFQWRNMNTIKGTQNYIPAKCFSLDAFCHHFSNMNKALLPLFAVLCGNDHVNLPIMETFLSKARLPLGATSSKGRRHHRILGLLNWLSHFANPTEALDNVLKYLPKKDRENVKELLCCSMEEYQQSQVKLQDFFQCGTYVCPDALNLGLPEWVLVALAKGQLSPFISDALVLRRTILPTQVENMQQPNAHRISQPIRQIIYGLLLNASPHLDKTSWNALPPQPLAFSEVERINKNIRTSIIDAVELAKDHSDLSRLTELSLRRRQMLLLETLKVKQTILEPIPTSLKLPIAVSCYWLQHTETKAKLHHLQSLLLTMLVGPLIAIINSPGKEELQEDGAKMLYAEFQRVKAQTRLGTRLDLDTAHIFCQWQSCLQMGMYLNQLLSTPLPEPDLTRLYSGSLVHGLCQQLLASTSVESLLSICPEAKQLYEYLFNATRSYAPAEIFLPKGRSNSKKKRQKKQNTSCSKNRGRTTAHTKCWYEGNNRFGLLMVENLEEHSEASNIE

SEQ ID NO: 883104 - protein, 570 aa, Homo sapiens [sequence omitted]

SEQ ID NO: 883105 - protein, 87 aa, Homo sapiens
LVLNSQPQVICPPRTPKVLGLQATTSGLPNPSKTRVKKLLKRKEKQQRSFSALKQVDRCGELNLKLVLGKTEKKPNLHPHTCLGLKS

SEQ ID NO: 883106 - protein, 450 aa, Homo sapiens
MCQNFFIDSCAAHGPPTFVKDSAVDKGHPNRSALSLPPGLRIGPSGIPQAGLGVWNEASDLPLGLHFGPYEGRITEDEEAANSGYSWLITKGRNCYEYVDGKDKSSANWMRYVNCARDDEEQNLVAFQYHRQIFYRTCRVIRPGCELLVWYGDEYGQELGIKWGSKWKKELMAGREPKPEIHPCPSCCLAFSSQKFLSQHVERNHSSQNFPGPSARKLLQPENPCPGDQNQERQYSDPRCCNDKTKGQEIKERSKLLNKRTWQREISRAFSSPPKGQMGSSRVGERMMEEESRTGQKVNPGNTGKLFVGVGISRIAKVKYGECGQGFSDKSDVITHQRTHTGGKPYVCRECGRALAGSQTSSVTRGHTQGRSLMSAESVSGALAGSQSSSFTRGHTGEKPQSAGRMSKSLVIKPYLNSHKKTNVITTHLHTPALRWLQRKSANPLHSPRV

SEQ ID NO: 883107 - protein, 159 aa, Homo sapiens
SSKIAGGRSRSRTKGHPNRSALSLPPGLRIGPSGIPQAGLGVWNEASDLPLGLHFGPYEGRITEDEEAANSGYSWLITKGRNCYEYVDGKDKSSANWMRTKARDPSMSLMLSGLFKSKISQSTCGTQSLLSELPRTICKKTSPTRESLPRGSESGAAIF

SEQ ID NO: 883108 - protein, 171 aa, Homo sapiens
MCQNFFIDSCAAHGPPTFVKDSAVDKGHPNRSALSLPPGLRIGPSGIPQAGLGVWNEASDLPLGLHFGPYEGRITEDEEAANSGYSWLITKGRNCYEYVDGKDKSSANWMRTKARDPSMSLMLSGLFKSKISQSTCGTQSLLSELPRTICKKTSPTRESLPRGSESGAAIF

SEQ ID NO: 883109 - protein, 438 aa, Homo sapiens
SSKIAGGRSRSRTKGHPNRSALSLPPGLRIGPSGIPQAGLGVWNEASDLPLGLHFGPYEGRITEDEEAANSGYSWLITKGRNCYEYVDGKDKSSANWMRYVNCARDDEEQNLVAFQYHRQIFYRTCRVIRPGCELLVWYGDEYGQELGIKWGSKWKKELMAGREPKPEIHPCPSCCLAFSSQKFLSQHVERNHSSQNFPGPSARKLLQPENPCPGDQNQERQYSDPRCCNDKTKGQEIKERSKLLNKRTWQREISRAFSSPPKGQMGSSRVGERMMEEESRTGQKVNPGNTGKLFVGVGISRIAKVKYGECGQGFSDKSDVITHQRTHTGGKPYVCRECGRALAGSQTSSVTRGHTQGRSLMSAESVSGALAGSQSSSFTRGHTGEKPQSAGRMSKSLVIKPYLNSHKKTNVITTHLHTPALRWLQRKSANPLHSPRV

SEQ ID NO: 883110 - protein, 563 aa, Homo sapiens
MLLPAPALRRALLSRPWTGAGLRWKHTSSLKVANEPVLAFTQGSPERDALQKALKDLKGRMEAIPCVVGDEEVWTSDVQYQVSPFNHGHKVAKFCYADKSLLNKAIEAALAARKEWDLKPIADRAQIFLKAADMLSGPRRAEILAKTMVGQGKTVIQAEIDAAAELIDFFRFNAKYAVELEGQQPISVPPSTNSTVYRGLEGFVAAISPFNFTAIGGNLAGAPALMGNVVLWKPSDTAMLASYAVYRILREAGLPPNIIQFVPADGPLFGDTVTSSEHLCGINFTGSVPTFKHLWKQVAQNLDRFHTFPRLAGECGGKNFHFVHRSADVESVVSGTLRSAFEYGGQKCSACSRLYVPHSLWPQIKGRLLEEHSRIKVGDPAEDFGTFFSAVIDAKSFARIKKWLEHARSSPSLTILAGGKCDDSVGYFVEPCIVESKDPQEPIMKEEIFGPVLSVYVYPDDKYKETLQLVDSTTSYGLTGAVFSQDKDVVQEATKVLRNAAGNFYINDKSTGSIVGQQPFGGARASGTNDKPGGPHYILRWTSPQVIKETHKPLGDWSYAYMQ

SEQ ID NO: 883111 - protein, 563 aa, Homo sapiens; identical to SEQ ID NO: 883110

SEQ ID NO: 883112 - protein, 254 aa, Homo sapiens
MLLPAPALRRALLSRPWTGAGLRWKHTSSLKVANEPVLAFTQGSPERDALQKALKDLKGRMEAIPCVVGDEEVWTSDVQYQVSPFNHGHKVAKFCYADKSLLNKAIEAALAARKEWDLKPIADRAQIFLKAADMLSGPRRAEILAKTMVGQGKTVIQAEIDAAAELIDFFRFNAKYAVELEGQQPISVPPSTNSTVYRGLEGFVAAISPFNFTAIGGNLAGAPALMASRGSCDSASLPDDKTETHSRDLLGKTE

SEQ ID NO: 883113 - protein, 98 aa, Homo sapiens
EPQASAWLSAHGGMTEIVTGSLYRPRGPGFPSEAEGAVGGEWWEVNRQVLWETQTRGQNSRERPARENHVWPCFFSNPVWFPASQLMGRFGPKDILTL

SEQ ID NO: 883114 - protein, 612 aa, Homo sapiens
MSHPSWLPPKSTGEPLGHVPARMETTHSFGNPSISVSTQQPPKKFAPVVAPKPKYNPYKQPGGEGDFLPPPPPPLDDSSALPSISGNFPPPPPLDEEAFKVQGNPGGKTLEERRSSLDAEIDSLTSILADLECSSPYKPRPPQSSTGSTASPPVSTPVTGHKRMVIPNQPPLTATKKSTLKPQPAPQAGPIPVAPIGTLKPQPQPVPASYTTASTSSRPTFNVQVKSAQPSPHYMAAPSSGQIYGSGPQGYNTQPVPVSGQCPPPSTRGGMDYAYIPPPGLQPEPGYGYAPNQGRYYEGYYAAGPGYGGRNDSDPTYGQQGHPNTWKREPGYTPPGAGNQNPPGMYPVTGPKKTYITDPVSAPCAPPLQPKGGHSGQLGPSSVAPSFRPEDELEHLTKKMLYDMENPPADEYFGRCARCGENVVGEGTGCTAMDQVFHVDCFTCIICNNKLRGQPFYAVEKKAYCEPCYINTLEQCNVCSKPIMERILRATGKAYHPHCFTCVMCHRSLDGIPFTVDAGGLIHCIEDFHKKFAPRCSVCKEPIMPAPGQEETVRIVALDRDFHVHCYRCEDCGGLLSEGDNQGCYPLDGHILCKTCNSARIRVLTAKASTDL

SEQ ID NO: 883115 - protein, 449 aa, Homo sapiens
MVIPNQPPLTATKKSTLKPQPAPQAGPIPVAPIGTLKPQPQPVPASYTTASTSSRPTFNVQVKSAQPSPHYMAAPSSGQIYGSGPQGYNTQPVPVSGQCPPPSTRGGMDYAYIPPPGLQPEPGYGYAPNQGRYYEGYYAAGPGYGGRNDSDPTYGQQGHPNTWKREPGYTPPGAGNQNPPGMYPVTGPKKTYITDPVSAPCAPPLQPKGGHSGQLGPSSVAPSFRPEDELEHLTKKMLYDMENPPADEYFGRCARCGENVVGEGTGCTAMDQVFHVDCFTCIICNNKLRGQPFYAVEKKAYCEPCYINTLEQCNVCSKPIMERILRATGKAYHPHCFTCVMCHRSLDGIPFTVDAGGLIHCIEDFHKKFAPRCSVCKEPIMPAPGQEETVRIVALDRDFHVHCYRCEDCGGLLSEGDNQGCYPLDGHILCKTCNSARIRVLTAKASTDL

SEQ ID NO: 883116 - protein, 252 aa, Homo sapiens
MVIPNQPPLTATKKSTLKPQPAPQAGPIPVAPIGTLKPQPQPVPASYTTASTSSRPTFNVQVKSAQPSPHYMAAPSSGQIYGSGPQGYNTQPVPVSGQCPPPSTRGGMDYAYIPPPGLQPEPGYGYAPNQGRYYEGYYAAGPGYGGRNDSDPTYGQQGHPNTWKREPGYTPPGAGNQNPPGMYPVTGPKKTYITDPVSAPCAPPLQPKGGHSGQLGPSSVAPSFRPEDELEHLTKKMLYDMENPPADEYFEC

SEQ ID NO: 883117 - protein, 178 aa, Homo sapiens
MDTSVTWDDGETAGPFRGSHLKIPTMSHPSWLPPKSTGEPLGHVPARMETTHSFGNPSISVSTQQPPKKFAPVVAPKPKYNPYKQPGGEGDFLPPPPPPLDDSSALPSISGNFPPPPPLDEEAFKVQGNPGGKTLEERRSSLDAEIDSLTSILADLECSSPYKPRPPQRKAAKQDVGW

SEQ ID NO: 883118 - protein, 139 aa, Homo sapiens
MDTSVTWDDGETAGPFRGSHLKIPTMSHPSWLPPKSTGEPLGHVPARMETTHSFGNPSISVSTQQPPKKFAPVVAPKPKYNPYKQPGGEGDFLPPPPPPLDDSSALPSISGNFPPPPPLDEEAFKVQVRAEVKVMLGKS

SEQ ID NO: 883119 - protein, 449 aa, Homo sapiens; identical to SEQ ID NO: 883115

SEQ ID NO: 883120 - protein, 449 aa, Homo sapiens; identical to SEQ ID NO: 883115

SEQ ID NO: 883121 - protein, 288 aa, Homo sapiens
MVIPNQPPLTATKKSTLKPQPAPQAGPIPVAPIGTLKPQPQPVPASYTTASTSSRPTFNVQVKSAQPSPHYMAAPSSGQIYGSGPQGYNTQPVPVSGQCPPPSTRGGMDYAYIPPPGLQPEPGYGYAPNQGRYYEGYYAAGPGYGGRNDSDPTYGQQGHPNTWKREPGYTPPGAGNQNPPGMYPVTGPKKTYITDPVSAPCAPPLQPKLLLSLLITMLAHLPSWARHQHLQPDTPQFLKQYLEMMKLQGNLEKLFFIVAQQDLGFNIVGGEDGEGILFPYLSKELTEL

SEQ ID NO: 883122 - protein, 322 aa, Homo sapiens
MARCFSLVLLLTSIWTTRLLVQGSLRAEELSIQVSCRIMGITLVSKKANQQLNFTEAKEACRLLGLSLAGKDQVETALKASFETCSYGWVGDGFVVISRISPNPKCGKNGVGVLIWKVPVSRQFAAYCYNSSDTWTNSCIPEIITTKDPIFNTQTATQTTEFIVSDSTYSVASPYSTIPAPTTTPPAPASTSIPRRKKLICVTEVFMETSTMSTETEPFVENKAAFKNEAAGFGGVPTALLVLALLFFGAAAGLGFCYVKRYVKAFPFTNKNQQKEMIETKVVKEEKANDSNPNEESKKTDKNPEESKSPSKTTVRCLEAEV

SEQ ID NO: 883123 - protein, 110 aa, Homo sapiens
MARCFSLVLLLTSIWTTRLLVQGSLRAEELSIQVSCRIMGITLVSKKANQQLNFTEAKEFCKVQGPKTSHQYPVVKRPPGCLRLGGLKAKESLRPRLSLLIPQLRPFLQL

SEQ ID NO: 883124 - protein, 322 aa, Homo sapiens; identical to SEQ ID NO: 883122

SEQ ID NO: 883125 - protein, 289 aa, Homo sapiens
MARLCRRVPCTLLLGLAVVLLKARLVPAAARAELSRSDLSLIQQQQQQQQQQQQQQQKQLEEAEEERTEVPGATSTLTVPVSVFMLKVQVNDIISRQYLSQAVVEVFVNYTKTNSTVTKSNGAVLIKVPYKLGLSLTIIAYKDGYVLTPLPWKTRRMPIYSSVTLSLFPQSQANIWLFEDTVLITGKLADAKSQPSVQFSKALIKLPDNHHISNVTGYLTVLQQFLKVDNFLHTTGITLNKPGFENIELTPLAAICVKIYSGGKELKVNGSIQVSLPLLRLNDISAGDR

SEQ ID NO: 883126 - protein, 217 aa, Homo sapiens
CVRCSRGSRVAHLTDAIHKLMAHSYQSTIHQTSSSSLALEGCIELFSKLDYSGIALLIMGSFVPWLYYSFYCNPQPCFIYLIVICVLGIAAIIVSQWDMFATPQYRGVRAGVFLGLGLSGIIPTLHYVISEGFLKAATIGQIGWLMLMASLYITGAALYAARIPERFFPGKCDIWFHSHQLFHIFVVAGAFVHFHGVSNLQEFRFMIGGGCSEEDAL

SEQ ID NO: 883127 - protein, 148 aa, Homo sapiens
MHSEKACSCGWQVRTSCWQETTNPCHVDLSTGLLEYPRSMATGFSRANNSREGKVEASLSFLFLRWSLTVSPRLECSGVILAHCNLRLPGSIIFLPCPCNLQQKVGSRKKESSVEVEKNLNVLVLDKVTVLGARWTEQKTQWMNWCSA

SEQ ID NO: 883128 - protein, 385 aa, Homo sapiens
MNEPTENRLGCSRTPEPDIRLRKGHQLDGTRRGDNDSHQGDLEPILEASVLSSHHKSSEEHEYSDEAPQEDEGFMGMSPLLQAHHAMEKMEEFVCKVWEGRWRVIPHDVLPDWLKDNDFLLHGHRPPMPSFRACFKSIFRIHTETGNIWTHLLGCVSFLCLGIFYMFRPNISFVAPLQEKVVFGLFFLGAILCLSFSWLFHTVYCHSEGVSRLFSKLDYSGIALLIMGSFVPWLYYSFYCNPQPCFIYLIVICVLGIAAIIVSQWDMFATPQYRGVRAGVFLGLGLSGIIPTLHYVISEGFLKAATIGQIGWLMLMASLYITGAALYAARIPERFFPGKCDIWFHSHQLFHIFVVAGAFVHFHGVSNLQEFRFMIGGGCSEEDAL

SEQ ID NO: 883129 - protein, 385 aa, Homo sapiens; identical to SEQ ID NO: 883128

SEQ ID NO: 883130 - protein, 155 aa, Homo sapiens
MNEPTENRLGCSRTPEPDIRLRKGHQLDGTRRGDNDSHQGDLEPILEASVLSSHHKSSEEHEYSDEAPQEDEGFMGMSPLLQAHHAMEKMEEFVCKVWEGRWRVIPHDVLPDWLKDNDFLLHGHRPPMPSFRACFKSIFRIHTETGNIWTHLLGM

SEQ ID NO: 883131 - protein, 368 aa, Homo sapiens [sequence omitted]

SEQ ID NO: 883132 - protein, 368 aa, Homo sapiens [sequence omitted]

SEQ ID NO: 883133 - protein, 222 aa, Homo sapiens [sequence omitted]

SEQ ID NO: 883134 - protein, 368 aa, Homo sapiens [sequence omitted]

SEQ ID NO: 883135 - protein, 368 aa, Homo sapiens [sequence omitted]

SEQ ID NO: 883136 - protein, 368 aa, Homo sapiens [sequence omitted]

SEQ ID NO: 883137 - protein, 368 aa, Homo sapiens [sequence omitted]

SEQ ID NO: 883138 - protein, 368 aa, Homo sapiens [sequence omitted]

SEQ ID NO: 883139 - protein, 368 aa, Homo sapiens [sequence omitted]

SEQ ID NO: 883140 - protein, 368 aa, Homo sapiens [sequence omitted]

SEQ ID NO: 883141 - protein, 89 aa, Homo sapiens
SARRWTKGGGGGRRGLGRPPLTCLPANCNQSSSPPAEPPQPAGLAGGLPHASPMAGTAGPARRVPAHLAQAAPPDRLPRQKPSSLPRNH

SEQ ID NO: 883142 - protein, 181 aa, Homo sapiens
MLVVFLAPGCGSYKLRKLLRLLRLDDCFSRSGGFSKFQAEFSLHCETNLDGSCSSSSPPLPVLGLGGLRISSDSSSDIESDLDRDPNSATDSDGSPLSNSQPSFPVEILPFLYLGCAKDSTNLDVLEEFGIKYILNVTPNLPNLFENAGEFKYKQIPISDHWSQNLSQFFPEAISFIGETN

SEQ ID NO: 883143 - protein, 491 aa, Homo sapiens
MELSVLLFLALLTGLLLLLVQRHPNTHDRLPPGPRPLPLLGNLLQMDRRGLLKSFLRFREKYGDVFTVHLGPRPVVMLCGVEAIREALVDKAEAFSGRGKIAMVDPFFRGYGVIFANGNRWKVLRRFSVTTMRDFGMGKRSVEERIQEEAQCLIEELRKSKGALMDPTFLFQSITANIICSIVFGKRFHYQDQEFLKMLNLFYQTFSLISSVFGQLFELFSGFLKYFPGAHRQVYKNLQEINAYIGHSVEKHRETLDPSAPKDLIDTYLLHMEKEKSNAHSEFSHQNLNLNTLSLFFAGTETTSTTLRYGFLLMLKYPHVAERVYREIEQVIGPHRPPELHDRAKMPYTEAVIYEIQRFSDLLPMGVPHIVTQHTSFRGYIIPKDTEVFLILSTALHDPHYFEKPDAFNPDHFLDANGALKKTEAFIPFSLGKRICLGEGIARAELFLFFTTILQNFSMASPVAPEDIDLTPQECGVGKIPPTYQIRFLPR

SEQ ID NO: 883144 - protein, 491 aa, Homo sapiens; identical to SEQ ID NO: 883143

SEQ ID NO: 883145 - protein, 491 aa, Homo sapiens; identical to SEQ ID NO: 883143

SEQ ID NO: 883146 - protein, 491 aa, Homo sapiens; identical to SEQ ID NO: 883143

SEQ ID NO: 883147 - protein, 171 aa, Homo sapiens
MGVYTARLQPPLTLLLPSLLWTQEKSNAHSEFSHQNLNLNTLSLFFAGTETTSTTLRYGFLLMLKYPHVAERVYREIEQVIGPHRPPELHDRAKMPYTEAVIYEIQRFSDLLPMGVPHIVTQHTSFRGYIIPKGSGFVLVKASPVRNCSSSSPPSSRTSPWPAPWPQKTSI

SEQ ID NO: 883148 - protein, 125 aa, Homo sapiens
MAGPSLACCLLGLLALTSACYIQNCPLGGKRAAPDLDVRKCLPCGPGGKGRCFGPNICCAEELGCFVGTAEALRCQEENYLPSPCQSGQKACGSGGRCAVLGLCCSPDGCHADPACDAEATFSQR

SEQ ID NO: 883149 - protein, 998 aa, Homo sapiens
AGSSRRRRRRRSASPGASRTRCARRAVPGPGVRPYEERDPAARAASASPTARGPRASRARPRPRPRSLPALRAMNAPERQPQPDGGDAPGHEPGGSPQDELDFSILFDYEYLNPNEEEPNAHKVASPPSGPAYPDDVMDYGLKPYSPLASLSGEPPGRFGEPDRVGPQKFLSAAKPAGASGLSPRIEITPSHELIQAVGPLRMRDAGLLVEQPPLAGVAASPRFTLPVPGFEGYREPLCLSPASSGSSASFISDTFSPYTSPCVSPNNGGPDDLCPQFQNIPAHYSPRTSPIMSPRTSLAEDSCLGRHSPVPRPASRSSSPGAKRRHSCAEALVALPPGASPQRSRSPSPQPSSHVAPQDHGSPAGYPPVAGSAVIMDALNSLATDSPCGIPPKMWKTSPDPSPVSAAPSKAGLPRHIYPAVEFLGPCEQGERRNSAPESILLVPPTWPKPLVPAIPICSIPVTASLPPLEWPLSSQSGSYELRIEVQPKPHHRAHYETEGSRGAVKAPTGGHPVVQLHGYMENKPLGLQIFIGTADERILKPHAFYQVHRITGKTVTTTSYEKIVGNTKVLEIPLEPKNNMRATIDCAGILKLRNADIELRKGETDIGRKNTRVRLVFRVHIPESSGRIVSLQTASNPIECSQRSAHELPMVERQDTDSCLVYGGQQMILTGQNFTSESKVVFTEKTTDGQQIWEMEATVDKDKSQPNMLFVEIPEYRNKHIRTPVKVNFYVINGKRKRSQPQHFTYHPVPAIKTEPTDEYDPTLICSPTHGGLGSQPYYPQHPMVAESPSCLVATMAPCQQFRTGLSSPDARYQQQNPAAVLYQRSKSLSPSLLGYQQPALMAAPLSLADAHRSVLVHAGSQGQSSALLHPSPTNQQASPVIHYSPTNQQLRCGSHQEFQHIMYCENFAPGTTRPGPPPVSQGQRLSPGSYPTVIQQQNATSQRAAKNGPPVSDQKEVLPAGVTIKQEQNLDQTYLDDVNEIIRKEFSGPPARNQT

SEQ ID NO: 883150 - protein, 81 aa, Homo sapiens
MRQKAAEGLSKLQLEATLWFRYGLECSSFCVWCLSLRDSLLLTHCLLLVKVRYVSQPLTPLRNEKYEIKLALEANPATHKP

SEQ ID NO: 883151 - protein, 994 aa, Homo sapiens
AGSSRRRRRRRSASPGASRTRCARRAVPGPGVRPYEERDPAARAASASPTARGPRASRARPRPRPRSLPALRAMNAPERQPQPDGGDAPGHEPGGSPQDELDFSILFDYEYLNPNEEEPNAHKVASPPSGPAYPDDVMDYGLKPYSPLASLSGEPPGRFGEPDRVGPQKFLSAAKPAGASGLSPRIEITPSHELIQAVGPLRMRDAGLLVEQPPLAGVAASPRFTLPVPGFEGYREPLCLSPASSGSSASFISDTFSPYTSPCVSPNNGGPDDLCPQFQNIPAHYSPRTSPIMSPRTSLAEDSCLGRHSPVPRPASRSSSPGAKRRHSCAEALVALPPGASPQRSRSPSPQPSSHVAPQDHGSPAGYPPVAGSAVIMDALNSLATDSPCGIPPKMWKTSPDPSPVSAAPSKAGLPRHIYPAVEFLGPCEQGERRNSAPESILLVPPTWPKPLVPAIPICSIPVTASLPPLEWPLSSQSGSYELRIEVQPKPHHRAHYETEGSRGAVKAPTGGHPVVQLHGYMENKPLGLQIFIGTADERILKPHAFYQVHRITGKTVTTTSYEKIVGNTKVLEIPLEPKNNMRATIDCAGILKLRNADIELRKGETDIGRKNTRVRLVFRVHIPESSGRIVSLQTASNPIECSQRSAHELPMVERQDTDSCLVYGGQQMILTGQNFTSESKVVFTEKTTDGQQIWEMEATVDKDKSQPNMLFVEIPEYRNKHIRTPVKVNFYVINGKRKRSQPQHFTYHPVPAIKTEPTDEYDPTLICSPTHGGLGSQPYYPQHPMVAESPSCLVATMAPCQQFRTGLSSPDARYQQQNPAAVLYQRSKSLSPSLLGYQQPALMAAPLSLADAHRSVLVHAGSQGQSSALLHPSPTNQQASPVIHYSPTNQQLRCGSHQEFQHIMYCENFAPGTTRPGPPPVSQGQRLSPGSYPTVIQQQNATSQRAAKNGPPVSDQKEVLPAGVTIKQEQNLDQTYLDDELIDTHLSWIQNIL

SEQ ID NO: 883152 - protein, 180 aa, Homo sapiens; identical to SEQ ID NO: 875166

SEQ ID NO: 883153 - protein, 395 aa, Homo sapiens
MLPAVGSVDEEEDPAEEDCPELVPIETTQSEEEEKSGLGAKIPVTIITGYLGAGKTTLLNYILTEQHSKRVAVILNESGEGSALEKSLAVSQGGELYEEWLELRNGCLCCSVKDNGLRAIENLMQKKGKFDDILLETTGLADPGAVASMFWVDAELGSDIYLDGIITIVDSKYGLKHLTEEKPDGLINEATRQVALADIILINKTDLVPEEDVKKLRTTIRSINGLGQILETQRSRVDLSNVLDLHAFDSLSGISLQKKLQHVPGTQPHLDQSIVTITFEVPGNAKEEHLNMFIQNLLWEKNVRNKDNHCMEVIRLKGLVSIKDKSQQVIVQGVHELYDLEETPVSWKDDTERTNRLVLIGRNLDKDILKQLFIATVTETEKQWTTHFKEDQVCT

SEQ ID NO: 883154 - protein, 180 aa, Homo sapiens; identical to SEQ ID NO: 875166

SEQ ID NO: 883155 - protein, 372 aa, Homo sapiens
MLPAVGSVDEEEDPAEEDCPELVPIETTQSEEEEKSGLGAKIPVTIITGYLGAGKTTLLNYILTEQHSKRVAVILNESGEGSALEKSLAVSQGGELYEEWLELRNGCLCCSVKDNGLRAIENLMQKKGKFDDILLETTGLADPGAVASMFWVDAELGSDIYLDGIITIVDSKYGLKHLTEEKPDGLINEATRQVALADIILINKTDLVPEEDVKKLRTTIRSINGLGQILETQRSRVDLSNVLDLHAFDSLSGISLQKKLQHVPGTQPHLDQSIVTITFEVPGNAKEEHLNMFIQNLLWEKNVRNKDNHCMEVIRLKGLVSIKDKSQQVIVQGVHELYDLEETPVSWKDDTERTNRLVLIGKSQRIHSFKTK

SEQ ID NO: 883156 - protein, 347 aa, Homo sapiens
MLPAVGSVDEEEDPAEEDCPELVPIETTQSEEEEKSGLGAKIPVTIITGYLGAGKTTLLNYILTEQHSKRVAVILNESGEGSALEKSLAVSQGGELYEEWLELRNGCLCCSVKDNGLRAIENLMQKKGKFDDILLETTGLADPGAVASMFWVDAELGSDIYLDGIITIVDSKYGLKHLTEEKPDGLINEATRSINGLGQILETQRSSLQKKLQHVPGTQPHLDQSIVTITFEVPGNAKEEHLNMFIQNLLWEKNVRNKDNHCMEVIRLKGLVSIKDKSQQVIVQGVHELYDLEETPVSWKDDTERTNRLVLIGRNLDKDILKQLFIATVTETEKQWTTHFKEDQVCT

SEQ ID NO: 883157 - protein, 342 aa, Homo sapiens
MLPAVGSVDEEEDPAEEDCPELVPIETTQSEEEEKSGLGAKIPVTIITGYLGAGKTTLLNYILTEQHSKRVAVILNESGEGSALEKSLAVSQGGELYEEWLELRNGCLCCSVKDNGLRAIENLMQKKGKFDDILLETTGLADPGAVASMFWVDAELGSDIYLDGIITIVDSKYGLKHLTEEKPDGLINEATRQVALADIILINKTDLVPEEDVKKLRTTIRSINGLGQILETQRSRVDLSNVLDLHAFDSLSGISLQKKLQHVPGTQPHLDQSIVTITFEVPGNAKEEHLNMFIQNLLWEKNVRNKDNHCMEVIRLKFELRLINVQSILLWDWCQSKTNHNK

SEQ ID NO: 883158 - protein, 334 aa, Homo sapiens
MLPAVGSVDEEEDPAEEDCPELVPIETTQSEEEEKSGLGAKIPVTIITGYLGAGKTTLLNYILTEQHSKRVAVILNESGEGSALEKSLAVSQGGELYEEWLELRNGCLCCSVKDNGLRAIENLMQKKGKFDDILLETTGLADPGAVASMFWVDAELGSDIYLDGIITIVDSKYGLKHLTEEKPDGLINEATRQVALADIILINKTDLVPEEDVKKLRTTIRSINGLGQILETQRSRVDLSNVLDLHAFDSLSGISLQKKLQHVPGTQPHLDQSIVTITFEVPGNAKEEHLNMFIQNLLWEKNVRNKDNHCMEVIRLKVQFTVADFWTKSFSWLL

SEQ ID NO: 883159 - protein, 180 aa, Homo sapiens; identical to SEQ ID NO: 875166

SEQ ID NO: 883160 - protein, 376 aa, Homo sapiens
MLPAVGSVDEEEDPAEEDCPELVPIETTQSEEEEKSGLGAKIPVTIITGYLGAGKTTLLNYILTEQHSKRVAVILNESGEGSALEKSLAVSQGGELYEEWLELRNGCLCCSVKDNGLRAIENLMQKKGKFDDILLETTGLADPGAVASMFWVDAELGSDIYLDGIITIVDSKYGLKHLTEEKPDGLINEATRQVALADIILINKTDLVPEEDVKKLRTTIRSINGLGQILETQRSSLQKKLQHVPGTQPHLDQSIVTITFEVPGNAKEEHLNMFIQNLLWEKNVRNKDNHCMEVIRLKGLVSIKDKSQQVIVQGVHELYDLEETPVSWKDDTERTNRLVLIGRNLDKDILKQLFIATVTETEKQWTTHFKEDQVCT

SEQ ID NO: 883161 - protein, 395 aa, Homo sapiens; identical to SEQ ID NO: 883153

SEQ ID NO: 883162 - protein, 372 aa, Homo sapiens; identical to SEQ ID NO: 883155

SEQ ID NO: 883163 - protein, 176 aa, Homo sapiens
MYFTEFPTAHVSFLPFRVDLSNVLDLHAFDSLSGISLQKKLQHVPGTQPHLDQSIVTITFEVPGNAKEEHLNMFIQNLLWEKNVRNKDNHCMEVIRLKGLVSIKDKSQQVIVQGVHELYDLEETPVSWKDDTERTNRLVLIGRNLDKDILKQLFIATVTETEKQWTTHFKEDQVCT

SEQ ID NO: 883164 - protein, 320 aa, Homo sapiens
MLPAVGSVDEEEDPAEEDCPELVPIETTQSEEEEKSGLGAKIPVTIITGYLGAGKTTLLNYILTEQHSKRVAVILNESGEGSALEKSLAVSQGGELYEEWLELRNGCLCCSVKDNGLRAIENLMQKKGKFDDILLETTGLADPGAVASMFWVDAELGSDIYLDGIITIVDSKYGLKHLTEEKPDGLINEATRQVALADIILINKTDLVPEEDVKKLRTTIRSINGLGQILETQRSRVDLSNVLDLHAFDSLSGISLQKKLQHVPGTQPHLDQSIVTITFEVPGNAKEEHLNMFIQNLLWEKNVRNKDNHCMEVIRLKAEI

SEQ ID NO: 883165 - protein, 152 aa, Homo sapiens
RSISVTIAVQRGKEENLAATTLLIFPPLHSIVTITFEVPGNAKEEHLNMFIQNLLWEKNVRNKDNHCMEVIRLKGLVSIKDKSQQVIVQGVHELYDLEETPVSWKDDTERTNRLVLIGRNLDKDILKQLFIATVTETEKQWTTHFKEDQVCT

SEQ ID NO: 883166 - protein, 180 aa, Homo sapiens; identical to SEQ ID NO: 875166

SEQ ID NO: 883167 - protein, 908 aa, Homo sapiens [sequence omitted]

SEQ ID NO: 883168 - protein, 440 aa, Homo sapiens
MKSSVAQIKPSSGHDRRENLNSYQRNSSPEDRYEEQERSPRDRDYFDYSRSDYEHSRRGRSYDSSMESRNRDREKRRERERDTDRKRSRKSPSPGRRNPETSVTQSSSAQDEPATKKKKDELDPLLTRTGGAYIPPAKLRMMQEQITDKNSLAYQRMSWEALKKSINGLINKVNISNISIIIQELLQENIVRGRGLLSRSVLQAQSASPIFTHVYAALVAIINSKFPQIGELILKRLILNFRKGYRRNDKQLCLTASKFVAHLINQNVAHEVLCLEMLTLLLERPTDDSVEVAIGFLKECGLKLTQVSPRGINAIFERLRNILHESEIDKRVQYMIEVMFAVRKDGFKDHPIILEGLDLVEEDDQFTHMLPLEDDYNPEDVLNVFKMDPNFMENEEKYKAIKKEILDEGDTDSNTDQDAGSMKRATLHPSVVIALPQLMM

SEQ ID NO: 883169 - protein, 220 aa, Homo sapiens
  misc_feature (201)..(201): Xaa can be any naturally occurring amino acid
MKSSVAQIKPSSGHDRRENLNSYQRNSSPEDRYEEQERSPRDRDYFDYSRSDYEHSRRGRSYDSSMESRNRDREKRRERERDTDRKRSRKSPSPGRRNPETSVTQSSSAQDEPATKKKKDELDPLLTRTGGAYIPPAKLRMMQEQITDKNSLAYQRMSWEALKKSINGLINKVNISNISIIIQELLQENIVRGRRDCCPRXWFLARAQEVAFFPILLTPW

SEQ ID NO: 883170 - protein, 908 aa, Homo sapiens [sequence omitted]

SEQ ID NO: 883171 - protein, 68 aa, Homo sapiens
AAAYYYYYCSEFKLLTMYGDMDRSGVKVVLIMYLLIDPHKKKCEVFFYYLFIYQAETFVGRRFGRTHF

SEQ ID NO: 883172 - protein, 137 aa, Homo sapiens
FDAAERYQQAGLPLIVLAGKEYGAGSSRDWAAKGPFLLGIKAVLAESYERIHRSNLVGMGVIPLEYLPGENADALGLTGQERYTIIIPENLKPQMKVQVKLDTGKTFQAVMRFDTDVELTYFLNGGILNYMIRKMAK

SEQ ID NO: 883173 - protein, 251 aa, Homo sapiens
KAGRFRWKGAVAGLAGIMAENHCELLSPARGGIGAGLGGGLCRRCSAGLGALAQRPGSVSKWVRLNVGGTYFLTTRQTLCRDPKSFLYRLCQADPDLDSDKDETGAYLIDRDPTYFGPVLNYLRHGKLVINKDLAEEGVLEEAEFYNITSLIKLVKDKIRERDSKTSQVPVKHVYRVLQCQEEELTQMVSTMSDGWKFEQLVSIGSSYNYGNEDQAEFLCVVSKELHNTPYGTASEPSEKAKILQERGSRM

SEQ ID NO: 883174 - protein, 263 aa, Homo sapiens
KAGRFRWKGAVAGLAGIMAENHCELLSPARGGIGAGLGGGLCRRCSAGLGALAQRPGSVSKWVRLNVGGTYFLTTRQTLCRDPKSFLYRLCQADPDLDSDKDETGAYLIDRDPTYFGPVLNYLRHGKLVINKDLAEEGACEACVPCAAVPGGGAHADGVHHVRRLEVRAVGQHRLLLQLWERRPSRVPLCGVQGAAQHPVRYGQRAQREGQDFARTRLKDVRDTVLTAEEMIYVFPRCNELPCPGSLAVRRNLLLIIFLEIWV

SEQ ID NO: 883175 - protein, 251 aa, Homo sapiens; identical to SEQ ID NO: 883173

SEQ ID NO: 883176 - protein, 251 aa, Homo sapiens; identical to SEQ ID NO: 883173

SEQ ID NO: 883177 - protein, 251 aa, Homo sapiens; identical to SEQ ID NO: 883173

SEQ ID NO: 883178 - protein, 251 aa, Homo sapiens; identical to SEQ ID NO: 883173

SEQ ID NO: 883179 - protein, 155 aa, Homo sapiens
MTVAVDETGAYLIDRDPTYFGPVLNYLRHGKLVINKDLAEEGVLEEAEFYNITSLIKLVKDKIRERDSKTSQVPVKHVYRVLQCQEEELTQMVSTMSDGWKFEQLVSIGSSYNYGNEDQAEFLCVVSKELHNTPYGTASEPSEKAKILQERGSRM

SEQ ID NO: 883180 - protein, 127 aa, Homo sapiens
KAGRFRWKGAVAGLAGIMAENHCELLSPARGGIGAGLGGGLCRRCSAGLGALAQRPGSVSKWVRLNVGGTYFLTTRQTLCRDPKSFLYRLCQADPDLDSDKDETGAYLIDRDPTYFGPILQERGSRM

SEQ ID NO: 883181 - protein, 152 aa, Homo sapiens
QCGTCPGRHCIHQRRDPRQTLRRPGGSARALVPTWGEDLGYCLLGLARGLGGSWGHCTSLSREHGVRRGRAAARGWRLEGGLGCLWWVKLGAETVALGVSEPFEGGGAQHTAVPGTLNWLSMEWKSGPRCLEGPESWGPLQTSSAAPSTVGP

SEQ ID NO: 883182 - protein, 319 aa, Homo sapiens
RIHTGEKPYKCNECEKTFSHRSSLLSHQRIHTGEKPYKCNECEKAFSNSSTLIKHLRVHTGEKPYRCRECGKAFSQCSTLTVHQRIHTGEKLYKCGECEKAFNCRAKLHRHQRIHTGEKPYKCSECGKGYSQFTSLAEHHRFHTGEQLYTCLECGRTFTRIVTLIEHQRIHTGQKPYQCTECEKAFNQYSSFNEHRKIHTGEKLYTCEECGKAFGCKSNLYRHQRIHTGEKPYQCNQCGKAFSQYSFLTEHERIHTGEKLYKCMECGKAYSYRSNLCRHKKVHTKEKLYKWKEYGKPFICSSSLTQYQRFFKGDKAYEV

SEQ ID NO: 883183 - protein, 1836 aa, Homo sapiens
MARPSLCTLARLGPECLRPFTRESLAAIEQRAVEEEARLQRNKQMEIEEPERKPRSDLEAGKNLPMIYGDPPPEVIGIPLEDLDPYYSNKKTFIVLNKGKAIFRFSATPALYLLSPFSVVRRGAIKVLIHALFSMFIMITILTNCVFMTMSDPPPWSKNVEYTFTGIYTFESLIKILARGFCVDDFTFLRDPWNWLDFSVIMMAYLTEFVDLGNISALRTFRVLRALKTITVIPGLKTIVGALIQSVKKLSDVMILTVFCLSVFALVGLQLFMGNLRQKCVRWPPPFNDTNTTWYSNDTWYGNDTWYGNEMWYGNDSWYANDTWNSHASWATNDTFDWDAYISDEGNFYFLEGSNDALLCGNSSDAGHCPKGYECIKTGRNPNYGYTSYDTFSWAFLALFRLMTQDYWENLFQLTLRAAGKTYMIFFVVIIFLGSFYLINLILAVVAMAYAEQNEATLAEDKEKEEEFQQMLEKFKKHQEELEKAKAAQALEGGEADGDPAHGKDCNGSLDTSQGEKGAPRQSGSGDSGISDAMEELEEAHQKCPPWWYKCAHKVLIWDCCAPWLKFKNIIHLIVMDPFVDLGITICIVLNTLFMAMEHYPMTEHFDNVLTVGNLVFTGIFTAEMVLKLIAMDPYEYFQQGWNIFDSIIVTLSLVELGLANVQGLSVLRSFRLLRVFKLAKSWPTLNMLIKIIGNSVGALGNLTLVLAIIVFIFAVVGMQLFGKSYKECVCKIALDCNLPRWHMHDFFHSFLIVFRILCGEWIETMWDCMEVAGQAMCLTVFLMVMVIGNLVVLNLFLALLLSSFSADSLAASDEDGEMNNLQIAIGRIKLGIGFAKAFLLGLLHGKILSPKDIMLSLGEADGAGEAGEAGETAPEDEKKEPPEEDLKKDNHILNHMGLADGPPSSLELDHLNFINNPYLTIQVPIASEESDLEMPTEEETDTFSEPEDSKKPPQPLYDGNSSVCSTADYKPPEEDPEEQAEENPEGEQPEECFTEACVQRWPCLYVDISQGRGKKWWTLRRACFKIVEHNWFETFIVFMILLSSGALAFEDIYIEQRRVIRTILEYADKVFTYIFIMEMLLKWVAYGFKVYFTNAWCWLDFLIVDVSIISLVANWLGYSELGPIKSLRTLRALRPLRALSRFEGMRVVVNALLGAIPSIMNVLLVCLIFWLIFSIMGVNLFAGKFYYCINTTTSERFDISEVNNKSECESLMHTGQVRWLNVKVNYDNVGLGYLSLLQVATFKGWMDIMYAAVDSREKEEQPQYEVNLYMYLYFVIFIIFGSFFTLNLFIGVIIDNFNQQKKKLGGKDIFMTEEQKKYYNAMKKLGSKKPQKPIPRPQNKIQGMVYDLVTKQAFDITIMILICLNMVTMMVETDDQSQLKVDILYNINMIFIIIFTGECVLKMLALRQYYFTVGWNIFDFVVVILSIVGLALSDLIQKYFVSPTLFRVIRLARIGRVLRLIRGAKGIRTLLFALMMSLPALFNIGLLLFLVMFIYSIFGMSNFAYVKKESGIDDMFNFETFGNSIICLFEITTSAGWDGLLNPILNSGPPDCDPNLENPGTSVKGDCGNPSIGICFFCSYIIISFLIVVNMYIAIILENFNVATEESSEPLGEDDFEMFYETWEKFDPDATQFIAYSRLSDFVDTLQEPLRIAKPNKIKLITLDLPMVPGDKIHCLDILFALTKEVLGDSGEMDALKQTMEEKFMAANPSKVSYEPITTTLKRKHEEVCAIKIQRAYRRHLLQRSMKQASYMYRHSHDGSGDDAPEKEGLLANTMSKMYGHENGNSSSPSPEEKGEAGDAGPTMGLMPISPSDTAWPPAPPPGQTVRPGVKESLV

SEQ ID NO: 883184 - protein, 465 aa, Homo sapiens
MFRQEQPLAEGSFAPMGSLQPDAGNASWNGTEAPGGGARATPYSLQVTLTLVCLAGLLMLLTVFGNVLVIIAVFTSRALKAPQNLFLVSLASADILVATLVIPFSLANEVMGYWYFGKAWCEIYLALDVLFCTSSIVHLCAISLDRYWSITQAIEYNLKRTPRRIKAIIITVWVISAVISFPPLISIEKKGGGGGPQPAEPRCEINDQKWYVISSCIGSFFAPCLIMILVYVRIYQIAKRRTRVPPSRRGPDAVAAPPGGTERRPNGLGPERSAGPGGAEAEPLPTQLNGAPGEPAPAGPRDTDALDLEESSSSDHAERPPGPRRPERGPRGKGKARASQVKPGDSLPRRGPGATGIGTPAAGPGEERVGAAKASRWRGRQNREKRFTFVLAVVIGVFVVCWFPFFFTYTLTAVGCSVPRTLFKFFFWFGYCNSSLNPVIYTIFNHDFRRAFKKILCRGDRKRIV

SEQ ID NO: 883185 - protein, 465 aa, Homo sapiens; identical to SEQ ID NO: 883184

SEQ ID NO: 883186 - protein, 465 aa, Homo sapiens; identical to SEQ ID NO: 883184

SEQ ID NO: 883187 - protein, 618 aa, Homo sapiens
MHKTASQRLFPGPSYQNIKSIMEDSTILSDWTNSNKQKMKYDFSCELYRMSTYSTFPAGVPVSERSLARAGFYYTGVNDKVKCFCCGLMLDNWKLGDSPIQKHKQLYPSCSFIQNLVSASLGSTSKNTSPMRNSFAHSLSPTLEHSSLFSGSYSSLSPNPLNSRAVEDISSSRTNPYSYAMSTEEARFLTYHMWPLTFLSPSELARAGFYYIGPGDRVACFACGGKLSNWEPKDDAMSEHRRHFPNCPFLENSLETLRFSISNLSMQTHAARMRTFMYWPSSVPVQPEQLASAGFYYVGRNDDVKCFCCDGGLRCWESGDDPWVEHAKWFPRCEFLIRMKGQEFVDEIQGRYPHLLEQLLSTSDTTGEENADPPIIHFGPGESSSEDAVMMNTPVVKSALEMGFNRDLVKQTVQSKILTTGENYKTVNDIVSALLNAEDEKREEEKEKQAEEMASDDLSLIRKNRMALFQQLTCVLPILDNLLKANVINKQEHDIIKQKTQIPLQARELIDTILVKGNAAANIFKNCLKEIDSTLYKNLFVDKNMKYIPTEDVSGLSLEEQLRRLQEERTCKVCMDKEVSVVFIPCGHLVVCQECAPSLRKCPICRGIIKGTVRTFLS

SEQ ID NO: 883188 - protein, 618 aa, Homo sapiens; identical to SEQ ID NO: 883187

SEQ ID NO: 883189 - protein, 618 aa, Homo sapiens; identical to SEQ ID NO: 883187

SEQ ID NO: 883190 - protein, 600 aa, Homo sapiens
MHKTASQRLFPGPSYQNIKSIMEDSTILSDWTNSNKQKMKYDFSCELYRMSTYSTFPAGVPVSERSLARAGFYYTGVNDKVKCFCCGLMLDNWKLGDSPIPSLGSTSKNTSPMRNSFAHSLSPTLEHSSLFSGSYSSLSPNPLNSRAVEDISSSRTNPYSYAMSTEEARFLTYHMWPLTFLSPSELARAGFYYIGPGDRVACFACGGKLSNWEPKDDAMSEHRRHFPNCPFLENSLETLRFSISNLSMQTHAARMRTFMYWPSSVPVQPEQLASAGFYYVGRNDDVKCFCCDGGLRCWESGDDPWVEHAKWFPRCEFLIRMKGQEFVDEIQGRYPHLLEQLLSTSDTTGEENADPPIIHFGPGESSSEDAVMMNTPVVKSALEMGFNRDLVKQTVQSKILTTGENYKTVNDIVSALLNAEDEKREEEKEKQAEEMASDDLSLIRKNRMALFQQLTCVLPILDNLLKANVINKQEHDIIKQKTQIPLQARELIDTILVKGNAAANIFKNCLKEIDSTLYKNLFVDKNMKYIPTEDVSGLSLEEQLRRLQEERTCKVCMDKEVSVVFIPCGHLVVCQECAPSLRKCPICRGIIKGTVRTFLS

SEQ ID NO: 883191 - protein, 70 aa, Homo sapiens
SVVRVSPDGAAGFGSARADPSRAGRISLSAPLIPGSAEASRQPRSFRVCCARTAIYNPEESPYPYFVPLQ

SEQ ID NO: 883192 - protein, 280 aa, Homo sapiens [sequence omitted]

SEQ ID NO: 883193 - protein, 280 aa, Homo sapiens [sequence omitted]

SEQ ID NO: 883194 - protein, 618 aa, Homo sapiens; identical to SEQ ID NO: 883187

SEQ ID NO: 883195 - protein, 79 aa, Homo sapiens
SVVRVSPDGAAGFGSARADPSRAGRISLSAPLIPGSAEASRQPRSFRVCCARTAVSAAPSGLGRRGAGGDARARGGPLP

SEQ ID NO: 883196 - protein, 530 aa, Homo sapiens [sequence omitted]

SEQ ID NO: 883197 - protein, 600 aa, Homo sapiens
MHKTASQRLFPGPSYQNIKSIMEDSTILSDWTNSNKQKMKYDFSCELYRMSTYSTFPAGVPVSERSLARAGFYYTGVNDKVKCFCCGLMLDNWKLGDSPIQKHKQLYPSCSFIQNLVSASLGSTSKNTSPMSGSYSSLSPNPLNSRAVEDISSSRTNPYSYAMSTEEARFLTYHMWPLTFLSPSELARAGFYYIGPGDRVACFACGGKLSNWEPKDDAMSEHRRHFPNCPFLENSLETLRFSISNLSMQTHAARMRTFMYWPSSVPVQPEQLASAGFYYVGRNDDVKCFCCDGGLRCWESGDDPWVEHAKWFPRCEFLIRMKGQEFVDEIQGRYPHLLEQLLSTSDTTGEENADPPIIHFGPGESSSEDAVMMNTPVVKSALEMGFNRDLVKQTVQSKILTTGENYKTVNDIVSALLNAEDEKREEEKEKQAEEMASDDLSLIRKNRMALFQQLTCVLPILDNLLKANVINKQEHDIIKQKTQIPLQARELIDTILVKGNAAANIFKNCLKEIDSTLYKNLFVDKNMKYIPTEDVSGLSLEEQLRRLQEERTCKVCMDKEVSVVFIPCGHLVVCQECAPSLRKCPICRGIIKGTVRTFLS

SEQ ID NO: 883198 - protein, 600 aa, Homo sapiens
MHKTASQRLFPGPSYQNIKSIMEDSTILSDWTNSNKQKMKYDFSCELYRMSTYSTFPAGVPVSERSLARAGFYYTGVNDKVKCFCCGLMLDNWKLGDSPIQKHKQLYPSCSFIQNLVSASLGSTSKNTSPMRNSFAHSLSPTLEHSSLFSGSYSSLSPNPLNSRAVEDISSSRTNPYSYAMSTEEARFLTYHMWPLTFLSPSELARAGFYYIGPGDRVACFACGGKLSNWEPKDDAMSEHRRHFPNCPFLENSLETLRFSISNLSMQTHAARMRTFMYWPSSVPVQPEQLASAGFYYVGRNDDVKCFCCDGGLRCWESGDDPWVEHAKWFPRCEFLIRMKGQEFVDEIQGRYPHLLEQLLSTSDTTGEENADPPIIHFGPGESSSEDAVMMNTPVVKSALEMGFNRDLVKQTVQTLLNAEDEKREEEKEKQAEEMASDDLSLIRKNRMALFQQLTCVLPILDNLLKANVINKQEHDIIKQKTQIPLQARELIDTILVKGNAAANIFKNCLKEIDSTLYKNLFVDKNMKYIPTEDVSGLSLEEQLRRLQEERTCKVCMDKEVSVVFIPCGHLVVCQECAPSLRKCPICRGIIKGTVRTFLS

SEQ ID NO: 883199 - protein, 280 aa, Homo sapiens [sequence omitted]

SEQ ID NO: 883200 - protein, 70 aa, Homo sapiens; identical to SEQ ID NO: 883191

SEQ ID NO: 883201 - protein, 202 aa, Homo sapiens
MSDIEEVVEEYEEEEQEEAAVEEQEEAAEEDAEAEAETEETRAEEDEEEEEAKEAEDGPMEESKPKPRSFMPNLVPPKIPDGERVDFDDIHRKRMEKDLNELQALIEAHFENRKKEEEELVSLKDRIERRRAERAEQQRIRNEREKERQNRLAEERARREEEENRRKAEDEARKKKALSNMMHFGGYIQRSPDRAEKWEEAD

SEQ ID NO: 883202 - protein, 202 aa, Homo sapiens; identical to SEQ ID NO: 883201

SEQ ID NO: 883203 - protein, 143 aa, Homo sapiens
MEESKPKPRSFMPNLVPPKIPDGERVDFDDIHRKRMEKDLNELQALIEAHFENRKKEEEELVSLKDRIERRRAERAEQQRIRNEREKERQNRLAEERARREEEENRRKAEDEARKKKALSNMMHFGGYIQRSPDRAEKWEEAD

SEQ ID NO: 883204 - protein, 143 aa, Homo sapiens; identical to SEQ ID NO: 883203

SEQ ID NO: 883205 - protein, 195 aa, Homo sapiens
MSDIEEVVEEYEEEEEQEEAAEEDAEAEAETEETRAEEDEEEEEAKEAEDGPMEESKPKPRSFMPNLVPPKIPDGERVDFDDIHRKRMEKDLNELQALIEAHFENRKKEEEELVSLKDRIERRRAERAEQQRIRNEREKERQNRLAEERARREEEENRRKAEDEARKKKALSNMMHFGGYIQRSPDRAEKWEEAD

SEQ ID NO: 883206 - protein, 104 aa, Homo sapiens
MEESKPKPRSFMPNLVPPKIPDGERVDFDERRRAERAEQQRIRNEREKERQNRLAEERARREEEENRRKAEDEARKKKALSNMMHFGGYIQRSPDRAEKWEEAD

SEQ ID NO: 883207 - protein, 143 aa, Homo sapiens; identical to SEQ ID NO: 883203

SEQ ID NO: 883208 - protein, 143 aa, Homo sapiens; identical to SEQ ID NO: 883203

SEQ ID NO: 883209 - protein, 189 aa, Homo sapiens
PQHSHLVLLLEHLIVGGLATVDRREEGLDSVIHGVQLKTKEAEDGPMEESKPKPRSFMPNLVPPKIPDGERVDFDDIHRKRMEKDLNELQALIEAHFENRKKEEEELVSLKDRIERRRAERAEQQRIRNEREKERQNRLAEERARREEEENRRKAEDEARKKKALSNMMHFGGYIQRSPDRAEKWEEAD

SEQ ID NO: 883210 - protein, 115 aa, Homo sapiens
VLDRARRRSSLLSKTGSRDVGQSGPSSSASGMSGRRSGRTAWLLRGNRRPRSSLPVQLLKAFPEQQEERARREEEENRRKAEDEARKKKALSNMMHFGGYIQRSPDRAEKWEEAD

SEQ ID NO: 883211 - protein, 135 aa, Homo sapiens
MEESKPKPRSFMPNLVPPKIPDGERVDFDDIHRKRMEKDLNELQALIEAHFENRKKEEEELVSLKDRIERRRAERAEQQRIRNEREKERQNRLAEERARREEEENRRKAEDEARKKKALSNMMHFGGYIQRRDSG

SEQ ID NO: 883212 - protein, 143 aa, Homo sapiens; identical to SEQ ID NO: 883203

SEQ ID NO: 883213 - protein, 143 aa, Homo sapiens; identical to SEQ ID NO: 883203

SEQ ID NO: 883214 - protein, 143 aa, Homo sapiens; identical to SEQ ID NO: 883203

SEQ ID NO: 883215 - protein, 213 aa, Homo sapiens
MSDIEEVVEEYEEEEQEEAAVEEQEEAAEEDAEAEAETEETRAEEDEEEEEAKEAEDGPMEESKPKPRSFMPNLVPPKIPDGERVDFDDIHRKRMEKDLNELQALIEAHFENRKKEEEELVSLKDRIERRRAERAEQQRIRNEREKERQNRLARKAPRKRERQEKLGEARRELFPHDAFGLQPEAANKPKSGGATYRKEEKFCLRRSPAIPPY

SEQ ID NO: 883216 - protein, 86 aa, Homo sapiens
IRAGAKGKILAERRKVLAIDHLNEDQLREKAKELWQSIYNLEAEKFDLQEKFKQQKYEINVLRNRINDNQKVSKTRGKAKVTGRWK

SEQ ID NO: 883217 - protein, 140 aa, Homo sapiens
MSDIEEVVEEYEEEEQEEAAVEEEEDWREDEDESRRRQRKRMLKQRLRPRRPGQKKMKKKRKQRRLKMAQWRSPNQSPGEWGGTWVEPGAEAQGERMMMEQGAVWCSGHGLGVWWAQSTTVQLYKLCTAQASLPKGVSEG

SEQ ID NO: 883218 - protein, 130 aa, Homo sapiens
MAPKVKKEAPGPPKAEAKAKALKAKKVVLKGVHGHKKKKIRMSPTFQRPKTLRLWRPPRYPRKTTPRRNKLDHYAIIKFPLTTEFAMKKIKDNNTLVFTVDVKANKHQIKQAVKKLCDIDGAKVNTLMER

SEQ ID NO: 883219 - protein, 735 aa, Homo sapiens
DKTIKLWKISERDKRAEGYNLKDEDGRLRDPFRITALTDDLRINLWHLEITDRSFNIVDIKPANMEELTEVITAAEFHPHQCNVFVYSSSKGTIRLCDMRSSALCDRHSKFFEEPEDPSSRSFFSEIISSISDVKFSHSGRYMMTRDYLSVKVWDLNMESRPVETHQVHEYLRSKLCSLYENDCIFDKFECCWNGSDSAIMTGSYNNFFRMFDRDTRRDVTLEASRESSKPRASLKPLEENNGRWIEYDRTETAINNLNPAFSKKFVLDYHFEEVQKLKFALFDQDKSSMRLDEHDFLGQFSCSLGTIVSSKKITRPLLLLNDKPAGKGLITIAAQELSDNRVITLSLAGRRLDKKDLFGKSDPFLEFYKPGDDGKWMLVHRTEVIKYTLDPVWKPFTVPLVSLCDGDMEKPIQVMCYDYDNDGGHDFIGEFQTSVSQMCEARDSVPLEFECINPKKQRKKKNYKNSGIIILRSCKINRDYSFLDYILGGCQLMFTVGIDFTASNGNPLDPSSLHYINPMGTNEYLSAIWAVGQIIQDYDSDKMFPALGFGAQLPPDWKVSHEFAINFNPTNPFCSGVDGIAQAYSACLPHIRFYGPTNFSPIVNHVARFAAQATQQRTATQYFILLIITDGVISDMEETRHAVVQASKLPMSIIIVGVGNADFAAMEFLDGDSRMLRSHTGEEAARDIVQFVPFREFRNAAKETLAKAVLAELPQQVVQYFKHKNLPPTNSEPA

SEQ ID NO: 883220 - protein, 243 aa, Homo sapiens
GLQFLPVRKDKRNKAYFTKRLPPVNDIIINLVLYPHPPDRGQIIQDYDSDKMFPALGFGAQLPPDWKVSHEFAINFNPTNPFCSGVDGIAQAYSACLPHIRFYGPTNFSPIVNHVARFAAQATQQRTATQYFILLIITDGVISDMEETRHAVVQASKLPMSIIIVGVGNADFAAMEFLDGDSRMLRSHTGEEAARDIVQFVPFREFRNAAKETLAKAVLAELPQQVVQYFKHKNLPPTNSEPA

SEQ ID NO: 883221 - protein, 601 aa, Homo sapiens
QGPVRLAAAGLAQRDPLFPPPAPTPDIMCSPFRGSRSFQPEDCQELLPPPPAPMAHIPSGGAPAAGAAPMGPQYCVCKVELSVSGQNLLDRDVTSKSDPFCVLFTENNGRWIEYDRTETAINNLNPAFSKKFVLDYHFEEVQKLKFALFDQDKSSMRLDEHDFLGQFSCSLGTIVSSKKITRPLLLLNDKPAGKGLITIAAQELSDNRVITLSLAGRRLDKKDLFGKSDPFLEFYKPGDDGKWMLVHRTEVIKYTLDPVWKPFTVPLVSLCDGDMEKPIQVMCYDYDNDGGHDFIGEFQTSVSQMCEARDSVPLEFECINPKKQRKKKNYKNSGIIILRSCKINRDYSFLDYILGGCQLMFTVGIDFTASNGNPLDPSSLHYINPMGTNEYLSAIWAVGQIIQDYDSDKMFPALGFGAQLPPDWKVSHEFAINFNPTNPFCSGVDGIAQAYSACLPHIRFYGPTNFSPIVNHVARFAAQATQQRTATQYFILLIITDGVISDMEETRHAVVQASKLPMSIIIVGVGNADFAAMEFLDGDSRMLRSHTGEEAARDIVQFVPFREFRNAAKETLAKAVLAELPQQVVQYFKHKNLPPTNSEPA

SEQ ID NO: 883222 - protein, 713 aa, Homo sapiens
QGLSGLGLLDLPPARAGGGPDPERLGAHASGPWPRGQRPEPVPRPRARPSRSSSRGCPGGSERGQRQPCGEGGGARGTCDCQELLPPPPAPMAHIPSGGAPAAGAAPMGPQYCVCKVELSVSGQNLLDRDVTSKSDPFCVLFTENNGRWIEYDRTETAINNLNPAFSKKFVLDYHFEEVQKLKFALFDQDKSSMRLDEHDFLGQFSCSLGTIVSSKKITRPLLLLNDKPAGKGLITIAAQELSDNRVITLSLAGRRLDKKDLFGKSDPFLEFYKPGDDGKWMLVHRTEVIKYTLDPVWKPFTVPLVSLCDGDMEKPIQVMCYDYDNDGGHDFIGEFQTSVSQMCEARDSVPLEFECINPKKQRKKKNYKNSGIIILRSCKINRDYSFLDYILGGCQLMFTVGIDFTASNGNPLDPSSLHYINPMGTNEYLSAIWAVGQIIQDYDSDKMFPALGFGAQLPPDWKVSHEFAINFNPTNPFCSGVDGIAQAYSACLPHIRFYGPTNFSPIVNHVARFAAQATQQRTATQYFILLIITDGVISDMEETRHAVVQASKLPMSIIIVGVGNADFAAMEFLDGDSRMLRSHTGEEAARDIVQFVPFREFRNAAKETLAKAELQCPAAACQLSLLPSPRNMHAHSASLWVAFFYRSPFLFFTTGPPPPTSSSPAGLPLLESTVDASRPNWLPLLLSPPLPFLSIECTLYNFSGIVIENKIF

SEQ ID NO: 883223 - protein, 468 aa, Homo sapiens
QGLSGLGLLDLPPARAGGGPDPERLGAHASGPWPRGQRPEPVPRPRARPSRSSSRGCPGGSERGQRQPCGEGGGARGTCDCQELLPPPPAPMAHIPSGGAPAAGAAPMGPQYCVCKVELSVSGQNLLDRDVTSKSDPFCVLFTENNGRWIEYDRTETAINNLNPAFSKKFVLDYHFEEVQKLKFALFDQDKSSMRLDEHDFLGQFSCSLGTIVSSKKITRPLLLLNDKPAGKGLITIAAQELSDNRVITLSLAGRRLDKKDLFGKSDPFLEFYKPGDDGKWMLVHRTEVIKYTLDPVWKPFTVPLVSLCDGDMEKPIQVMCYDYDNDGGHDFIGEFQTSVSQMCEARDSVPLEFECINPKKQRKKKNYKNSGIIILRSCKINRDYSFLDYILGGCQLMFTVGIDFQLQGIPRPSSLGIEPLGRTISRGNGVWGRPPGLHGLDVPLVGAVPDGGPGWLFPTFVVGCRVC

SEQ ID NO: 883224 - protein, 389 aa, Homo sapiens
QGLSGLGLLDLPPARAGGGPDPERLGAHASGPWPRGQRPEPVPRPRARPSRSSSRGCPGGSERGQRQPCGEGGGARGTCDCQELLPPPPAPMAHIPSGGAPAAGAAPMGPQYCVCKVELSVSGQNLLDRDVTSKSDPFCVLFTENNGRWIEYDRTETAINNLNPAFSKKFVLDYHFEEVQKLKFALFDQDKSSMRLDEHDFLGQFSCSLGTIVSSKKITRPLLLLNDKPAGKGLITIAAQELSDNRVITLSLAGRRLDKKDLFGKSDPFLEFYKPGDDGKWMLVHRTEVIKYTLDPVWKPFTVPLVSLCDGDMEKPIQVMCYDYDNDGGHDFIGEFQTSVSQMCEARDSVPLEFECINPKKQRKGRGDSLLEAVKSIPTVNMSWQPPRM

SEQ ID NO: 883225 - protein, 639 aa, Homo sapiens
QGLSGLGLLDLPPARAGGGPDPERLGAHASGPWPRGQRPEPVPRPRARPSRSSSRGCPGGSERGQRQPCGEGGGARGTCDCQELLPPPPAPMAHIPSGGAPAAGAAPMGPQYCVCKVELSVSGQNLLDRDVTSKSDPFCVLFTENNGRWIEYDRTETAINNLNPAFSKKFVLDYHFEEVQKLKFALFDQDKSSMRLDEHDFLGQFSCSLGTIVSSKKITRPLLLLNDKPAGKGLITIAAQELSDNRVITLSLAGRRLDKKDLFGKSDPFLEFYKPGDDGKWMLVHRTEVIKYTLDPVWKPFTVPLVSLCDGDMEKPIQVMCYDYDNDGGHDFIGEFQTSVSQMCEARDSVPLEFECINPKKQRKKKNYKNSGIIILRSCKINRDYSFLDYILGGCQLMFTVGIDFTASNGNPLDPSSLHYINPMGTNEYLSAIWAVGQIIQDYDSDKMFPALGFGAQLPPDWKVSHEFAINFNPTNPFCSGVDGIAQAYSACLPHIRFYGPTNFSPIVNHVARFAAQATQQRTATQYFILLIITDGVISDMEETRHAVVQASKLPMSIIIVGVGNADFAAMEFLDGDSRMLRSHTGEEAARDIVQFVPFREFRNAAKETLAKAVLAELPQQVVQYFKHKNLPPTNSEPA

SEQ ID NO: 883226 - protein, 542 aa, Homo sapiens
LRSCKINRDYSFLDYILGGCQLMFTVGIDFTASKGIPSDPFCVLFTENNGRWIEYDRTETAINNLNPAFSKKFVLDYHFEEVQKLKFALFDQDKSSMRLDEHDFLGQFSCSLGTIVSSKKITRPLLLLNDKPAGKGLITIAAQELSDNRVITLSLAGRRLDKKDLFGKSDPFLEFYKPGDDGKWMLVHRTEVIKYTLDPVWKPFTVPLVSLCDGDMEKPIQVMCYDYDNDGGHDFIGEFQTSVSQMCEARDSVPLEFECINPKKQRKKKNYKNSGIIILRSCKINRDYSFLDYILGGCQLMFTVGIDFTASNGNPLDPSSLHYINPMGTNEYLSAIWAVGQIIQDYDSDKMFPALGFGAQLPPDWKVSHEFAINFNPTNPFCSGVDGIAQAYSACLPHIRFYGPTNFSPIVNHVARFAAQATQQRTATQYFILLIITDGVISDMEETRHAVVQASKLPMSIIIVGVGNADFAAMEFLDGDSRMLRSHTGEEAARDIVQFVPFREFRNAAKETLAKAVLAELPQQVVQYFKHKNLPPTNSEPA

SEQ ID NO: 883227 - protein, 243 aa, Homo sapiens; identical to SEQ ID NO: 883220

SEQ ID NO: 883228 - protein, 814 aa, Homo sapiens
MHLEGRDGRRYPGAPAVELLQTSVPSGLAELVAGKRRLPRGAGGADPSHSCPRGAAGQSSWAPAGQEFASFLTKGRSHSSLPQMSSSRSKDSCFTENTPLLRNSLQEKGSRCIPVYHPEFITAEESWEDSSADWERRYLLSREVSGLSASASSEKGDLLDSPHIRLRLSKLRRCVQWLKVMGLFAFVVLCSILFSLYPDQGKLWQLLALSPLENYSVNLSSHVDSTLLQVDLAGALVASGPSRPGREEHIVVELTQADALGSRWRRPQQVTHNWTVYLNPRRSEHSVMSRTFEVLTRETVSISIRASLQQTQAVPLLMAHQYLRGSVETQVTIATAILAGVYALIIFERPSLTHVVEWIDFETLALLFGMMILVAIFSETGFFDYCAVKAYRLSRGRVWAMIIMLCLIAAVLSAFLDNVTTMLLFTPVTIRLCEVLNLDPRQVLIAEVIFTNIGGAATAIGDPPNVIIVSNQELRKMGLDFAGFTAHMFIGICLVLLVCFPLLRLLYWNRKLYNKEPSEIVELKHEIHVWRLTAQRISPASREETAVRRLLLGKVLALEHLLARRLHTFHRQISQEDKNWETNIQELQKKHRISDGILLAKCLTVLGFVIFMFFLNSFVPGIHLDLGWIAILGAIWLLILADIHDFEIILHRVEWATLLFFAALFVLMEALAHLHLIEYVGEQTALLIKMVPEEQRLIAAIVLVVWVSALASSLIDNIPFTATMIPVLLNLSHDPEVGLPAPPLMYALAFGACLGGNGTLIGASANVVCAGIAEQHGYGFSFMEFFRLGFPMMVVSCTVGMCYLLVAHVVVGWN

SEQ ID NO: 883229 - protein, 760 aa, Homo sapiens
MHLEGRDGRRYPGAPAVELLQTSVPSGLAELVAGKRRLPRGAGGADPSHSCPRGAAGQSSWAPAGQEFASFLTKGRSHSSLPQMSSSRSKDSCFTENTPLLRNSLQEKGSRCIPVYHPEFITAEESWEDSSADWERRYLLSREVSGLSASASSEKGDLLDSPHIRLRLSKLRRCVQWLKVMGLFAFVVLCSVTHNWTVYLNPRRSEHSVMSRTFEVLTRETVSISIRASLQQTQAVPLLMAHQYLRGSVETQVTIATAILAGVYALIIFEIVHRTLAAMLGSLAALAALAVIGDRPSLTHVVEWIDFETLALLFGMMILVAIFSETGFFDYCAVKAYRLSRGRVWAMIIMLCLIAAVLSAFLDNVTTMLLFTPVTIRLCEVLNLDPRQVLIAEVIFTNIGGAATAIGDPPNVIIVSNQELRKMGLDFAGFTAHMFIGICLVLLVCFPLLRLLYWNRKLYNKEPSEIVELKHEIHVWRLTAQRISPASREETAVRRLLLGKVLALEHLLARRLHTFHRQISQEDKNWETNIQELQKKHRISDGILLAKCLTVLGFVIFMFFLNSFVPGIHLDLGWIAILGAIWLLILADIHDFEIILHRVEWATLLFFAALFVLMEALAHLHLIEYVGEQTALLIKMVPEEQRLIAAIVLVVWVSALASSLIDNIPFTATMIPVLLNLSHDPEVGLPAPPLMYALAFGACLGGNGTLIGASANVVCAGIAEQHGYGFSFMEFFRLGFPMMVVSCTVGMCYLLVAHVVVGWN

SEQ ID NO: 883230 - protein, 813 aa, Homo sapiens
MHLEGRDGRRYPGAPAVELLQTSVPSGLAELVAGKRRLPRGAGGADPSHSCPRGAAGQSSWAPAGQEFASFLTKGRSHSSLPQMSSSRSKDSCFTENTPLLRNSLQEKGSRCIPVYHPEFITAEESWEDSSADWERRYLLSREVSGLSASASSEKGDLLDSPHIRLRLSKLRRCVQWLKVMGLFAFVVLCSILFSLYPDQGKLWQLLALSPLENYSVNLSSHVDSTLLQVDLAGALVASGPSRPGREEHIVVELTQADALGSRWRRPQQVTHNWTVYLNPRRSEHSVMSRTFEVLTRETVSISIRASLQQTQAVPLLMAHQYLRGSVETQVTIATAILAGVYALIIFEIVHRTLAAMLGSLAALAALAVIGDRPSLTHVVEWIDFETLALLFGMMILVAIFSETGFFDYCAVKAYRLSRGRVWAMIIMLCLIAAVLSAFLDNVTTMLLFTPVTIRLCEVLNLDPRQVLIAEVIFTNIGGAATAIGDPPNVIIVSNQELRKMGLDFAGFTAHMFIGICLVLLVCFPLLRLLYWNRKLYNKEPSEIVELKHEIHVWRLTAQRISPASREETAVRRLLLGKVLALEHLLARRLHTFHRQISQEDKNWETNIQELQKKHRISDGILLAKCLTVLGFVIFMFFLNSFVPGIHLDLGWIAILGAIWLLILADIHDFEIILHRVEWATLLFFAALFVLMEALAHLHLIEYVGEQTALLIKMVPEEQRLIAAIVLVVWVSALASSLIDNIPFTATMIPVLLNLSHDPEVGLPAPPLMYALAFGACLGGNGTLIGASANVVCAGIAEQHGYGFSFMEFFSQD

SEQ ID NO: 883231 - protein, 346 aa, Homo sapiens
MHLEGRDGRRYPGAPAVELLQTSVPSGLAELVAGKRRLPRGAGGADPSHSCPRGAAGQSSWAPAGQEFASFLTKGRSHSSLPQMSSSRSKDSCFTENTPLLRNSLQEKGSRCIPVYHPEFITAEESWEDSSADWERRYLLSREVSGLSASASSEKGDLLDSPHIRLRLSKLRRCVQWLKVMGLFAFVVLCSILFSLYPDQGKLWQLLALSPLENYSVNLSSHVDSTLLQVDLAGALVASGPSRPGREEHIVVELTQADALGSRWRRPQQVTHNWTVYLNPRRSEHSVMSRTFEVLTRETVSISIRASLAALAALAVIGDGPAWFHLHIPLPIPDLHTHGLSDSPSL

SEQ ID NO: 883232 - protein, 838 aa, Homo sapiens
MHLEGRDGRRYPGAPAVELLQTSVPSGLAELVAGKRRLPRGAGGADPSHSCPRGAAGQSSWAPAGQEFASFLTKGRSHSSLPQMSSSRSKDSCFTENTPLLRNSLQEKGSRCIPVYHPEFITAEESWEDSSADWERRYLLSREVSGLSASASSEKGDLLDSPHIRLRLSKLRRCVQWLKVMGLFAFVVLCSILFSLYPDQGKLWQLLALSPLENYSVNLSSHVDSTLLQVDLAGALVASGPSRPGREEHIVVELTQADALGSRWRRPQQVTHNWTVYLNPRRSEHSVMSRTFEVLTRETVSISIRASLQQTQAVPLLMAHQYLRGSVETQVTIATAILAGVYALIIFEIVHRTLAAMLGSLAALAALAVIGDRPSLTHVVEWIDFETLALLFGMMILVAIFSETGFFDYCAVKAYRLSRGRVWAMIIMLCLIAAVLSAFLDNVTTMLLFTPVTIRLCEVLNLDPRQVLIAEVIFTNIGGAATAIGDPPNVIIVSNQELRKMGLDFAGFTAHMFIGICLVLLVCFPLLRLLYWNRKLYNKEPSEIVELKHEIHVWRLTAQRISPASREETAVRRLLLGKVLALEHLLARRLHTFHRQISQEDKNWETNIQELQKKHRISDGILLAKCLTVLGFVIFMFFLNSFVPGIHLDLGWIAILGAIWLLILADIHDFEIILHRVEWATLLFFAALFVLMEALAHLHLIEYVGEQTALLIKMVPEEQRLIAAIVLVVWVSALASSLIDNIPFTATMIPVLLNLSHDPEVGLPAPPLMYALAFGACLGGNGTLIGASANVVCAGIAEQHGYGFSFMEFFRLGFPMMVVSCTVGMCYLLVAHVVVGWN

SEQ ID NO: 883233 - protein, 795 aa, Homo sapiens
SELLTSKAVLRSPSRAEVRTLNSLLEKDLQVRRSHSSLPQMSSSRSKDSCFTENTPLLRNSLQEKGSRCIPVYHPEFITAEESWEDSSADWERRYLLSREVSGLSASASSEKGDLLDSPHIRLRLSKLRRCVQWLKVMGLFAFVVLCSILFSLYPDQGKLWQLLALSPLENYSVNLSSHVDSTLLQVDLAGALVASGPSRPGREEHIVVELTQADALGSRWRRPQQVTHNWTVYLNPRRSEHSVMSRTFEVLTRETVSISIRASLQQTQAVPLLMAHQYLRGSVETQVTIATAILAGVYALIIFEIVHRTLAAMLGSLAALAALAVIGDRPSLTHVVEWIDFETLALLFGMMILVAIFSETGFFDYCAVKAYRLSRGRVWAMIIMLCLIAAVLSAFLDNVTTMLLFTPVTIRLCEVLNLDPRQVLIAEVIFTNIGGAATAIGDPPNVIIVSNQELRKMGLDFAGFTAHMFIGICLVLLVCFPLLRLLYWNRKLYNKEPSEIVELKHEIHVWRLTAQRISPASREETAVRRLLLGKVLALEHLLARRLHTFHRQISQEDKNWETNIQELQKKHRISDGILLAKCLTVLGFVIFMFFLNSFVPGIHLDLGWIAILGAIWLLILADIHDFEIILHRVEWATLLFFAALFVLMEALAHLHLIEYVGEQTALLIKMVPEEQRLIAAIVLVVWVSALASSLIDNIPFTATMIPVLLNLSHDPEVGLPAPPLMYALAFGACLGGNGTLIGASANVVCAGIAEQHGYGFSFMEFFRLGFPMMVVSCTVGMCYLLVAHVVVGWN

SEQ ID NO: 883234 - protein, 251 aa, Homo sapiens
NNYSVESAVADALGAAGVTMYRDAILAQWNDGLHPDPIYSASFTTPTKPFRLQCSGAFFLGLTIICILPSLPFQTPLEVQMAQPNYGLELVTGSAKNGTYFRIHINKYKMVETITCLSREPFPASNYIRLFGQHEQLLNNLCARYDENLITDLYSYFTEPWCLALFHDRFIDLRKELRQILASKEEEDLPSIEQLAHQIEDEEINPTEKPRQYLKRVFEESIYKTLVERSTLDYLHYNRYHLPMYAWPGIV

SEQ ID NO: 883235 - protein, 82 aa, Homo sapiens
SGVIFDEGRAHVALKTKPRGGQALSFLPSLLGGSTTVATCRGPENTTLPRSPGPEPNPSLTPQPRRPATPHRYHGRRRRHAQ

SEQ ID NO: 883236 - protein, 82 aa, Homo sapiens; identical to SEQ ID NO: 883235

SEQ ID NO: 883237 - protein, 102 aa, Homo sapiens
SGVIFDEGRAHVALKTKPRGGQALSFLPSLLGGSTTVATCRGPENTTLPRSPGLCRPLSSLGLRQHFLTVTLGPEPNPSLTPQPRRPATPHRYHGRRRRHAQ

SEQ ID NO: 883238 - protein, 109 aa, Homo sapiens
MAEDADMRNELEEMQRRADQLADESLESTRRMLQLVEESKDAGIRTLVMLDEQGEQLDRVEEGMNHINQDMKEAEKNLKDLGKCCGLFICLVTSRYWVPALICGVQFSF

SEQ ID NO: 883239 - protein, 303 aa, Homo sapiens
MAEDADMRNELEEMQRRADQLADESLESTLVCCNLVDPRRTHDAGTHRTSALLLGLTPRDEQPRPRCRTRTALTPNYSYRNATLHTRKRLTDTHTSTPTTLHRDTLPAERLSPPPAPFAYTHTDLSPSHLHCPLTPPPQPLARPPSPPRTRTLPCAHALPLASACSPCALHHAAHAPTRGPPPPAPAPFPSLPPPHTQQLDSPPRTQNNWTNLGTSNTHPLTTPTRWHPAPNTNIRRDTPLPPTPNTMAPPHAAFMGAQTARTHGLTNQQHFRLHMHFRTRATSTGYQSGSRQPPTQPNTPVN

SEQ ID NO: 883240 - protein, 82 aa, Homo sapiens; identical to SEQ ID NO: 883235

SEQ ID NO: 883241 - protein, 82 aa, Homo sapiens; identical to SEQ ID NO: 883235

SEQ ID NO: 883242 - protein, 82 aa, Homo sapiens; identical to SEQ ID NO: 883235

SEQ ID NO: 883243 - protein, 82 aa, Homo sapiens; identical to SEQ ID NO: 883235

SEQ ID NO: 883244 - protein, 82 aa, Homo sapiens; identical to SEQ ID NO: 883235

SEQ ID NO: 883245 - protein, 110 aa, Homo sapiens
SGVIFDEGRAHVALKTKPRGGQALSFLPSLLGGSTTVATCRGPENTTLPRSPGPEPNPSLTPQPRRPATPHRYHGRRSKDAGIRTLVMLDEQGEQLERIEEGMDQINSRT

SEQ ID NO: 883246 - protein, 82 aa, Homo sapiens; identical to SEQ ID NO: 883235

SEQ ID NO: 883247 - protein, 69 aa, Homo sapiens
SPGLQNSARGENRQIDRIMEKADSNKTRIDEANQRATKMLGKWLSVPTRVLLQMLSGKIAPSCFSHGII

SEQ ID NO: 883248 - protein, 82 aa, Homo sapiens; identical to SEQ ID NO: 883235

SEQ ID NO: 883249 - protein, 82 aa, Homo sapiens; identical to SEQ ID NO: 883235

SEQ ID NO: 883250 - protein, 82 aa, Homo sapiens; identical to SEQ ID NO: 883235

SEQ ID NO: 883251 - protein, 124 aa, Homo sapiens
SGVIFDEGRAHVALKTKPRGGQALSFLPSLLGGSTTVATCRGPENTTLPRSPGPEPNPSLTPQPRRPATPHRYHGRRSLESTRRMLQLVEESKDAGIRTLVMLDEQGEQLERIEEGMDQINSRT

SEQ ID NO: 883252 - protein, 82 aa, Homo sapiens; identical to SEQ ID NO: 883235

SEQ ID NO: 883253 - protein, 101 aa, Homo sapiens
SGVIFDEGRAHVALKTKPRGGQALSFLPSLLGGSTTVATCRGPENTTLPRSPGPEPNPSLTPQPRRPATPHRYHGRRNNWNALRKGWTKSTQGHERSRERI

SEQ ID NO: 883254 - protein, 425 aa, Homo sapiens
MGEEANDDKKPTTKFELERETELRFEVEASQSVQLELLTGMAEIFGTELTRNKKFTFDAGAKVAVFTWHGCSVQLSGRTEVAYVSKDTPMLLYLNTHTALEQMRRQAEKEEERGPRVMVVGPTDVGKSTVCRLLLNYAVRLGRRPTYVELDVGQGSVSIPGTMGALYIERPADVEEGFSIQAPLVYHFGSTTPGTNIKLYNKITSRLADVFNQRCEVNRRASVSGCVINTCGWVKGSGYQALVHAASAFEVDVVVVLDQERLYNELKRDLPHFVRTVLLPKSGGVVERSKDFRRECRDERIREYFYGFRGCFYPHAFNVKFSDVKIYKVGAPTIPDSCLPLGMSQEDNQLKLVPVTPGRDMVHHLLSVSTAEGTEENLSETSVAGFIVVTSVDLEHQVFTVLSPAPRPLPKNFLLIMDIRFMDLK

SEQ ID NO: 883255 - protein, 425 aa, Homo sapiens; identical to SEQ ID NO: 883254

SEQ ID NO: 883256 - protein, 361 aa, Homo sapiens
MGEEANDDKKPTTKFELERETELRFEVEASQSVQLELLTGMAEIFGTELTRNKKFTFDAGAKVAVFTWHGCSVQLSGRTEVAYVSKDTPMLLYLNTHTALEQMRRQAEKEEERGPRVMVVGPTDVGKSTVCRLLLNYAITSRLADVFNQRCEVNRRASVSGCVINTCGWVKGSGYQALVHAASAFEVDVVVVLDQERLYNELKRDLPHFVRTVLLPKSGGVVERSKDFRRECRDERIREYFYGFRGCFYPHAFNVKFSDVKIYKVGAPTIPDSCLPLGMSQEDNQLKLVPVTPGRDMVHHLLSVSTAEGTEENLSETSVAGFIVVTSVDLEHQVFTVLSPAPRPLPKNFLLIMDIRFMDLK

SEQ ID NO: 883257 - protein, 100 aa, Homo sapiens
GHVQPVRCTNCARCVPKDKAIKKFVIRNIVEAVAVRDISEASVFDAYVLPKLYVKLHYCVSCAIHSKVVRNRSREARKDRTPPPRFRPAGAAPRPPPKPM

SEQ ID NO: 883258 - protein, 749 aa, Homo sapiens
MEAETGSSVETGKKANRGTRIALVVFVGGTLVLGTILFLVSQGLLSLQAKQEYCLKPECIEAAAAILSKVNLSVDPCDNFFRFACDGWISNNPIPEDMPSYGVYPWLRHNVDLKLKELLEKSISRRRDTEAIQKAKILYSSCMNEKAIEKADAKPLLHILRHSPFRWPVLESNIGPEGVWSERKFSLLQTLATFRGQYSNSVFIRLYVSPDDKASNEHILKLDQATLSLAVREDYLDNSTEAKSYRDALYKFMVDTAVLLGANSSRAEHDMKSVLRLEIKIAEIMIPHENRTSEAMYNKMNISELSAMIPQFDWLGYIKKVIDTRLYPHLKDISPSENVVVRVPQYFKDLFRILGSERKKTIANYLVWRMVYSRIPNLSRRFQYRWLEFSRVIQGTTTLLPQWDKCVNFIESALPYVVGKMFVDVYFQEDKKEMMEELVEGVRWAFIDMLEKENEWMDAGTKRKAKEKARAVLAKVGYPEFIMNDTHVNEDLKAIKFSEADYFGNVLQTRKYLAQSDFFWLRKAVPKTEWFTNPTTVNAFYSASTNQIRFPAGELQKPFFWGTEYPRSLSYGAIGVIVGHEFTHGFDNNGRKYDKNGNLDPWWSTESEEKFKEKTKCMINQYSNYYWKKAGLNVKGKRTLGENIADNGGLREAFRAYRKWINDRRQGLEEPLLPGITFTNNQLFFLSYAHVRCNSYRPEAAREQVQIGAHSPPQFRVNGAISNFEEFQKAFNCPPNSTMNRGMDSCRLW

SEQ ID NO: 883259 - protein, 749 aa, Homo sapiens; identical to SEQ ID NO: 883258

SEQ ID NO: 883260 - protein, 203 aa, Homo sapiens
MNDTHVNEDLKAIKFSEADYFGNVLQTRKYLAQSDFFWLRKAVPKTEWFTNPTTVNAFYSASTNQIRFPAGELQKPFFWGTEYPRSLSYGAIGVIVGHEFTHGFDNNGRKYDKNGNLDPWWSTESEEKFKEKTKCMINQYSNYYWKKAGLNVKGKRTLGENIADNGGLREAFRLQEMLMTKPGWEPLYRVIPNLLRFLLGASQ

SEQ ID NO: 883261 - protein, 729 aa, Homo sapiens
MEAETGSSVETGKKANRGTRIALVVFVGGTLVLGTILFLVSQGLLSLQAKQEYCLKPECIEAAAAILSKVNLSVDPCDNFFRFACDGWISNNPIPEDMPSYGVYPWLRHNVDLKLKELLEKSISRRRDTEAIQKAKILYSSCMNEKAIEKADAKPLLHILRHSPFRWPVLESNIGPEGVWSERKFSLLQTLATFRGQYSNSVFIRLYVSPDDKASNEHILKLDQATLSLAVREDYLDNSTEAKSYRDALYKFMVDTAVLLGANSSRAEHDMKSVLRLEIKIAEIMIPHENRTSEAMYNKMNISELSAMIPQFDWLGYIKKVIDTRLYPHLKDISPSENVVVRVPQYFKDLFRILGSERKKTIANYLVWRMVYSRIPNLSRRFQYRWLEFSRVIQGTTTLLPQWDKCVNFIESALPYVVGKMFVDVYFQEDKKEMMEELVEGVRWAFIDMLEKENEWMDAGTKRKAKEKARAVLAKVGYPEFIMNDTHVNEDLKAIKFSEADYFGNVLQTRKYLAQSDFFWLRKAVPKTEWFTNPTTVNAFYSASTNQIRFPAGELQKPFFWGTEYPRSLSYGAIGVIVGHEFTHGFDNNGRKYDKNGNLDPWWSTESEEKFKEKTKCMINQYSNYYWKKAGLNVKGKRTLGENIADNGGLREAFRAYRKWINDRRQGLEEPLLPGITFTNNQLFFLSYAHVRCNSYRPEAAREQVQIGAHSPPQFRISSRRAPEAFLMG

SEQ ID NO: 883262 - protein, 323 aa, Homo sapiens
MGSRVSREDFEWVYTDQPHADRRREILAKYPEIKSLMKPDPNLIWIIIMMVLTQLGAFYIVKDLDWKWVIFGAYAFGSCINHSMTLAIHEIAHNAAFGNCKAMWNRWFGMFANLPIGIPYSISFKRYHMDHHRYLGADGVDVDIPTDFEGWFFCTAFRKFIWVILQPLFYAFRPLFINPKPITYLEVINTVAQVTFDILIYYFLGIKSLVYMLAASLLGLGLHPISGHFIAEHYMFLKGHETYSYYGPLNLLTFNVGYHNEHHDFPNIPGKSLPLVRKIAAEYYDNLPHYNSWIKVLYDFVMDDTISPYSRMKRHQKGEMVLE

SEQ ID NO: 883263 - protein, 137 aa, Homo sapiens
PPDGVGPWLHLNCHLESGWKVEELGLISFSPCSLGSVLLQTPLPHPNHPAHPVGWSRWFGMFANLPIGIPYSISFKRYHMDHHRYLGADGVDVDIPTDFEGWFFCTAFRKFIWVILQPLFYAFRPLFINRRIERAEL

SEQ ID NO: 883264 - protein, 323 aa, Homo sapiens; identical to SEQ ID NO: 883262

SEQ ID NO: 883265 - protein, 323 aa, Homo sapiens; identical to SEQ ID NO: 883262

SEQ ID NO: 883266 - protein, 288 aa, Homo sapiens
MGSRVSREDFEWVYTDQPHADRRREILAKYPEIKSLMKPDPNLIWIIIMMVLTQLGAFYIVKDLDWKWVIFGAYAFGSCINHSMTLAIHEIAHNAAFGNCKAMWNRWFGMFANLPIGIPYSISFKRYHMDHHRYLGADGVDVDIPTDFEGWFFCTAFRKFIWVILQPLFYAFRPLFINPKPITYLEVINTVAQVTFDILIYYFLGIKSLVYMLAASLLGLGLHPISGHFIAEHYMFLKGHETYSYYGPLNLLTFNVGYHNEHHDFPNIPGKSLPLSWSFLDGCSGSHL

SEQ ID NO: 883267 - protein, 323 aa, Homo sapiens; identical to SEQ ID NO: 883262

SEQ ID NO: 883268 - protein, 302 aa, Homo sapiens [sequence omitted]

SEQ ID NO: 883269 - protein, 323 aa, Homo sapiens; identical to SEQ ID NO: 883262

SEQ ID NO: 883270 - protein, 288 aa, Homo sapiens; identical to SEQ ID NO: 883266

SEQ ID NO: 883271 - protein, 368 aa, Homo sapiens
MGSRVSREDFEWVYTDQPHADRRREILAKYPEIKSLMKPDPNLIWIIIMMVLTQLGAFYIVKDLDWKWVIFGAYAFGSCINHSMTLAIHEIAHNAAFGNCKAMWNRWFGMFANLPIGIPYSISFKRYHMDHHRYLGADGVDVDIPTDFEGWFFCTAFRKFIWVILQPLFYAFRPLFINPKPITYLEVINTVAQVTFDILIYYFLGIKSLVYMLAASLLGLGLHPISGHFIAEHYMFLKGHETYSYYGPLNLLTFNVGYHNEHHDFPNIPGKSLPLVSKGFDTYSNFVFSFVCFLRRCLTQSPRLAGSGTISAHCNLHLPGSNDSHASVSQVVGITGACYHAQLIFVFLVEMGFCHVGQASILSVQAVH

SEQ ID NO: 883272 - protein, 327 aa, Homo sapiens
MGSRVSREDFEWVYTDQPHADRRREILAKYPEIKSLMKPDPNLIWIIIMMVLTQLGAFYIVKDLDWKWVIFGAYAFGSCINHSMTLAIHEIAHNAAFGNCKAMWNRWFGMFANLPIGIPYSISFKRYHMDHHRYLGADGVDVDIPTDFEGWFFCTAFRKFIWVILQPLFYAFRPLFINPKPITYLEVINTVAQVTFDILIYYFLGIKSLVYMLAASLLGLGLHPISGHFIAEHYMFLKGHETYSYYGPLNLLTFNVGYHNEHHDFPNIPGKSLPLTGSWWRIPVLVARTCHPSYSGGLKCKNRLNPGGRGCSEQRLRHNYIPAWETE

SEQ ID NO: 883273 - protein, 121 aa, Homo sapiens
  misc_feature (11)..(11): Xaa can be any naturally occurring amino acid
DTIEKLEKKQXGTVRNSRGAAAAAATSEQPAGSESRQLVCKPPLSPWGAASRGKTSSGSTPTSRTPTGAGRSWVRKIAAEYYDNLPHYNSWIKVLYDFVMDDTISPYSRMKRHQKGEMVLE

SEQ ID NO: 883274 - protein, 157 aa, Homo sapiens [sequence omitted]

SEQ ID NO: 883275 - protein, 323 aa, Homo sapiens; identical to SEQ ID NO: 883262

SEQ ID NO: 883276 - protein, 323 aa, Homo sapiens; identical to SEQ ID NO: 883262

SEQ ID NO: 883277 - protein, 323 aa, Homo sapiens; identical to SEQ ID NO: 883262

SEQ ID NO: 883278 - protein, 287 aa, Homo sapiens
MKPDPNLIWIIIMMVLTQLGAFYIVKDLDWKWVIFGAYAFGSCINHSMTLAIHEIAHNAAFGNCKAMWNRWFGMFANLPIGIPYSISFKRYHMDHHRYLGADGVDVDIPTDFEGWFFCTAFRKFIWVILQPLFYAFRPLFINPKPITYLEVINTVAQVTFDILIYYFLGIKSLVYMLAASLLGLGLHPISGHFIAEHYMFLKGHETYSYYGPLNLLTFNVGYHNEHHDFPNIPGKSLPLVRKIAAEYYDNLPHYNSWIKVLYDFVMDDTISPYSRMKRHQKGEMVLE

SEQ ID NO: 883279 - protein, 112 aa, Homo sapiens [sequence omitted]

SEQ ID NO: 883280 - protein, 327 aa, Homo sapiens; identical to SEQ ID NO: 883272

SEQ ID NO: 883281 - protein, 121 aa, Homo sapiens; identical to SEQ ID NO: 883273
  misc_feature (11)..(11): Xaa can be any naturally occurring amino acid

SEQ ID NO: 883282 - protein, 89 aa, Homo sapiens
LSMSGVTHIRHEARMALEKKLNQAVLDRHALGYARTDPHLCDFLETHFLDEQVQLIKKMGDYLTNLHRMGGPEAGLGEYLFERLTLKHD

SEQ ID NO: 883283 - protein, 1193 aa, Homo sapiens
MLCKQTNKQKTTLALRNKNKKQEASCTARNFSKIRGQASQFGPANMWVLLHLGKPLKMSLTCGDLTERTFRSSDCTLMPWFRKAVLYTFCPWKLLILSVISRYQKEKLFRIGNVKSIEGTTNNNSRNNSVNKVPFHLFFFGLQHQPVDFQFFLNEELQTLLSRVCEVALNAFLWLFVKTYFPSLSTVNSFSTIEDLRQKRSLGLLSQGLNLFFKVKNISLEVFALLVKAYFAELPKVKGKLNFSNFAPGFLEPHCLLIRVFPPVNYFAFDQVVLESRAASVSSQPRLWPLRRGWGDRQECEGEWVTLSVTLNVGRHGLLSLGLKPLFWSKEYWENWITFSIFLETGSSLKCIWGSFLGSKGQFLYPVLQVSVSCGMREKTMAAQEGSGESLSTRRSKSVAPAKDEDLERTPLWGCEEDLFPLLLACRSRTEPDVMPSLVDILQIDTLSPAFKGVFCFKEFLVLPQQLKSQNRIKGLERLLKYRITKTPGSVRKRLCLESDFNVKPMPYIYTALCSLQIGVFSAPSRCPSSEMIVDYYSEVPGPEPPVMKQELESQDSQRLSAHFLLSSPPPRFTCYLVKLLLAHSPLGNKKFDWERVFHCTGLSIRLALVAVWLNSPFETYRALSVLEHSLLLVACLNLLAGCLWIGVSPNHAVFPFFSFCTLDYLGGAVCSLDEKHIFKEMESVYFVCFLRHVLSNVRDQTSVIRGWSFDLLLLIAFHVIMIIYSGSTPVTNNVTEMKQIQRKNIFKSFEKKCYSNLRQFKFIGTLSLSKKYFFFSFFRQSLALLPRLECSGTILAHCNLCLPGSSDSPASASRVSWDYARLIFIFLVETGVYHVAQAGFKLLTSGDLPASASQSAGITGVSHHTWPKDSILNSHIHDLMSNVKYRKAAIIHIVLGGISSSVYQEYDIQLWFSNLFLFQFLFVYLTGEIESSELGDDCPAQGFVIHNLKIKVPETKCLQPVRNGLWKGDNFSPHRKPLVSLNEALSRHTFLCVVGQEAIPLPLQHISVLSHMTPEPHEKTLKIMDSSLYLNFFFLTFSPKGSVPRGKSKCRKIETRSFNRHDILMCLHDGNVTFSTAWCLGARYYCGNLSLSFTVLSSCVSYPSKLKKRHGSFLSCFMFLRLTCKIKIKIRKKYIKANDMKKKLKILLVFIFVLQCCFLKEINMWLEVFNGCVLIVYNKVTVPSGGSHQNRF

SEQ ID NO: 883284 - protein, 1101 aa, Homo sapiens
MQIPEGKLFRIGNVKSIEGTTNNNSRNNSVNKVPFHLFFFGLQHQPVDFQFFLNEELQTLLSRVCEVALNAFLWLFVKTYFPSLSTVNSFSTIEDLRQKRSLGLLSQGLNLFFKVKNISLEVFALLVKAYFAELPKVKGKLNFSNFAPGFLEPHCLLIRVFPPVNYFAFDQVVLESRAASVSSQPRLWPLRRGWGDRQECEGEWVTLSVTLNVGRHGLLSLGLKPLFWSKEYWENWITFSIFLETGSSLKCIWGSFLGSKGQFLYPVLQVSVSCGMREKTMAAQEGSGESLSTRRSKSVAPAKDEDLERTPLWGCEEDLFPLLLACRSRTEPDVMPSLVDILQIDTLSPAFKGVFCFKEFLVLPQQLKSQNRIKGLERLLKYRITKTPGSVRKRLCLESDFNVKPMPYIYTALCSLQIGVFSAPSRCPMPEMIVDYYSEVPGPEPPVMKQELESQDSQRLSAHFLLSSPPPRFTCYLVKLLLAHSPLGNQEVDWERVFHCTGLSIRLALVAVWLNSPFETYRALSVLEHSLLLVACLNLLAGCLWIGVSPNHAVFPFFSFCTLDYLGGAVCSLDEKHIFKEMESVYFVCFLRHVLSNVRDQTSVIRGWSFDLLLLIAFHVIMIIYSGSTPVTNNVTEMKQIQRKNIFKSFEKKCYFKFKTCLKFIGTLSLSKKYFFFSFFRQSLALLPRLECSGTILAHCNLCLPGGSDSPASASRVSWDYARLIFIFLVETGVYHVAQAGFKLLTSGDLPASASQSAGITGVSHHTWPKDSILIYHIHDLMSNVKYRKAAIIHIVLGGISSSVYQEYDIQLWFSNLFLFQFLFVYLTGEIDILELGDDCPAQGFVIHNLKIKVPETKCLQPVRNGLWKGDNFSPHRKPLVSLNEALSRHTFLCVVGQEAIPLPLQHISVLSHMTPEPHKKTLKIMDSSLYLNFFFLTFSPKGSVPRGKSKCRKIETRSFNRHDILMCLHDGNVTFSTAWCLGARYECGNLSLSFTVLSSCVSYPSKLKKRHGSFLSCFMFLRLTCKIKIKIRKKYIKANDMKKKLKYTTGVHFCPAVLLSQRNKHVAGSVYWLRFDRLQQGYSALWWQSSKSLLDIVFIF

SEQ ID NO: 883285 - protein, 319 aa, Homo sapiens
LWSTFAFYLNFRWLNKLGSAVIHQESTTKDEECYSESEQEDPEIAAETPPPPHASQTQSLTAQQASSSSPSLSGTSYSFSSLENTVKTPSSFPSSLSKERQSLPDTVNSLSAAEDEGQPITFAVQVHSPVPSEAGIHKALENSFVTSESGFLNSLSSDDTSSLSSNHDHLTVPDKPAGSKIMDKEETKVSEDDEMEKLYKSLEQASLSPLGDRRPSTKKELRKSFVKRCKNPSINEKLHKIRTLNSTLKCKEHDLAMINQLLDDPKLTARKYREWKVMNTLLIQDIYQQQRASPAPDDTDDTPQELKKSPSSPSVENSI

SEQ ID NO: 883286 - protein, 1264 aa, Homo sapiens
TSPAGPKTPKAQAGPAATVSKAPAASKAPAAPKVPVTPRVSRAPKTPAAQKVPTDAGPTLDVARLLSEVQPTSRASVSLLKGQGQAGRQGPQSSGTLALSSKHQFQMEGLLGAWEGAPRQPPRHLQANSTVTSFQRYHEALNTPFELNLSGEPGNQGLRRVVIDGSSVAMVHGLQHFFSCRGIAMAVQFFWNRGHREVTVFVPTWQLKKNRRVRESHFLTKLHSLKMLSITPSQLENGKKITTYDYRFMVKLAEETDGIIVTNEQIHILMNSSKKLMVKDRLLPFTFAGNLFMVPDDPLGRDGPTLDEFLKKPNRLDTDIGNFLKVWKTLPPSSASVTELSDDADSGPLESLPNMEEVREEKEERQDEEQRQGQGTQKAAEEDDLDSSLASVFRVECPSLSEEILRCLSLHDPPDGALDIDLLPGAASPYLGIPWDGKAPCQQVLAHLAQLTIPSNFTALSFFMGFMDSHRDAIPDYEALVGPLHSLLKQKPDWQWDQEHEEAFLALKRALVSALCLMAPNSQLPFRLEVTVSHVALTAILHQEHSGRKHPIAYTSKPLLPDEESQGPQSGGDSPYAVAWALKHFSRCIGDTPVVLDLSYASRTTADPEVREGRRVSKAWLIRWSLLVQDKGKRALELALLQGLLGENRLLTPAASMPRFFQVLPPFSDLSTFVCIHMSGYCFYREDEWCAGFGLYVLSPTSPPVSLSFSCSPYTPTYAHLAAVACGLERFGQSPLPVVFLTHCNWIFSLLWELLPLWRARGFLSSDGAPLPHPSLLSYIISLTSGLSSLPFIYRTSYRGSLFAVTVDTLAKQGAQGGGQWWSLPKDVPAPTVSPHAMGKGPNLLALQLSDSTLADIIARLQAGQKLSGSSPFSSAFNSLSLDKESGLLMFKGDKKPRVWVVPTQLRRDLIFSVHDIPLGAHQRPEETYKKLRLLGWWPGMQEHVKDYCRSCLFCIPRNLIGSELKVIESPWPLRSTAPWSNLQIEVVGPVTISEEGHKHVLIVADPNTRWVEAFPLKPYTHTAVAQVLLQHVFARWGVPVRLEAAQGPQFARHVLVSCGLALGAQVASLSRDLQFPCLTSSGAYWEFKRALKEFIFLHGKKWAASLPLLHLAFRASSTDATPFKVLTGGESRLTEPLWWEMSSANIEGLKMDVFLLQLVGELLELHWRVADKASEKAENRRFKRESQEKEWNVGDQVLLLSLPRNGSSAKWVGPFYIGDRLSLSLYRIWGFPTPEKLGCIYPSSLMKAFAKSGTPLSFKVLEQ

SEQ ID NO: 883287 - protein, 128 aa, Homo sapiens
PPQQQKEAPAMVSVGESPGPFVDMGTLQNRGPENSKRLSSLGATGSLITAQSTPQEAANQLVRVGSNNQDGMDSAQEEGTVQATSSQDSTNHTQALLKQRQVQPHSPSLVLYAFPLLATFVITYPSFK

SEQ ID NO: 883288 - protein, 461 aa, Homo sapiens
CYNPGQEELVAVAAVEGDQAPEGGRPSRAGSGRGSHAPVWGRSFSCSPYTPTYAHLAAVACGLERFGQSPLPVVFLTHCNWIFSLLWELLPLWRARGFLSSDGAPLPHPSLLSYIISLTSGLSSLPFIYRTSYRGSLFAVTVDTLAKQGAQGGGQWWSLPKDVPAPTVSPHAMGKGPNLLALQLSDSTLADIIARLQAGQKLSGSSPFSSAFNSLSLDKESGLLMFKGDKKPRVWVVPTQLRRDLIFSVHDIPLGAHQRPEETYKKLRLLGWWPGMQEHVKDYCRSCLFCIPRNLIGSELKVIEGPGLCFKGAGRLQQEWHTVKCWHGSTSQPLPTPSQSLQSSAPSTSTVSCIPDPTDCVIASSVSPPESCGPAFCVEQNPGSLTAILCRDHPCSECEFLPGVCAYTHPLNCCRCQGSGLQVKASATSLWLAFLVVSFLRKLSQSPGLAQVARTLGIAEC

SEQ ID NO: 883289 - protein, 1235 aa, Homo sapiens
TSPAGPKTPKAQAGPAATVSKAPAASKAPAAPKVPVTPRVSRAPKTPAAQKVPTDAGPTLDVARLLSEVQPTSRASVSLLKGQGQAGRQGPQSSGTLALSSKHQFQMEGLLGAWEGAPRQPPRHLQANSTVTSFQRYHEALNTPFELNLSGEPGNQGLRRVVIDGSSVAMVHGLQHFFSCRGIAMAVQFFWNRGHREVTVFVPTWQLKKNRRVRESHFLTKLHSLKMLSITPSQLENGKKITTYDYRFMVKLAEETDGIIVTNEQIHILMNSSKKLMVKDRLLPFTFAGNLFMVPDDPLGRDGPTLDEFLKKPNRLDTDIGNFLKVWKTLPPSSASVTELSDDADSGPLESLPNMEEVREEKEERQDEEQRQGQGTQKAAEEDDLDSSLAIDLLPGAASPYLGIPWDGKAPCQQVLAHLAQLTIPSNFTALSFFMGFMDSHRDAIPDYEALVGPLHSLLKQKPDWQWDQEHEEAFLALKRALVSALCLMAPNSQLPFRLEVTVSHVALTAILHQEHSGRKHPIAYTSKPLLPDEESQGPQSGGDSPYAVAWALKHFSRCIGDTPVVLDLSYASRTTADPEVREGRRVSKAWLIRWSLLVQDKGKRALELALLQGLLGENRLLTPAASMPRFFQVLPPFSDLSTFVCIHMSGYCFYREDEWCAGFGLYVLSPTSPPVSLSFSCSPYTPTYAHLAAVACGLERFGQSPLPVVFLTHCNWIFSLLWELLPLWRARGFLSSDGAPLPHPSLLSYIISLTSGLSSLPFIYRTSYRGSLFAVTVDTLAKQGAQGGGQWWSLPKDVPAPTVSPHAMGKGPNLLALQLSDSTLADIIARLQAGQKLSGSSPFSSAFNSLSLDKESGLLMFKGDKKPRVWVVPTQLRRDLIFSVHDIPLGAHQRPEETYKKLRLLGWWPGMQEHVKDYCRSCLFCIPRNLIGSELKVIESPWPLRSTAPWSNLQIEVVGPVTISEEGHKHVLIVADPNTRWVEAFPLKPYTHTAVAQVLLQHVFARWGVPVRLEAAQGPQFARHVLVSCGLALGAQVASLSRDLQFPCLTSSGAYWEFKRALKEFIFLHGKKWAASLPLLHLAFRASSTDATPFKVLTGGESRLTEPLWWEMSSANIEGLKMDVFLLQLVGELLELHWRVADKASEKAENRRFKRESQEKEWNVGDQVLLLSLPRNGSSAKWVGPFYIGDRLSLSLYRIWGFPTPEKLGCIYPSSLMKAFAKSGTPLSFKVLEQ

SEQ ID NO: 883290 - protein, 217 aa, Homo sapiens
METIWIYQFRLIVIGDSTVGKSCLLHRFTQGRFPGLRSPACDPTVGVDFFSRLLEIEPGKRIKLQLWDTAGQERFRSITRSYYRNSVGGFLVFDITNRRSFEHVKDWLEEAKMYVQPFRIVFLLVGHKCDLASQRQVTREEAEKLSADCGMKYIETSAKDATNVEESFTILTRDIYELIKKGEICIQDGWEGVKSGFVPNTVHSSEEAVKPRKECFC

SEQ ID NO: 883291 - protein, 137 aa, Homo sapiens [sequence omitted]

SEQ ID NO: 883292 - protein, 137 aa, Homo sapiens [sequence omitted]

SEQ ID NO: 883293 - protein, 137 aa, Homo sapiens [sequence omitted]

SEQ ID NO: 883294 - protein, 137 aa, Homo sapiens [sequence omitted]

SEQ ID NO: 883295 - protein, 137 aa, Homo sapiens [sequence omitted]

SEQ ID NO: 883296 - protein, 137 aa, Homo sapiens [sequence omitted]

SEQ ID NO: 883297 - protein, 95 aa, Homo sapiens
MTAPCWAQPGSLAKCLLEAVPARGLQQGDSLPSGHYQYCLYLEVGKRSPLRQQDNGQFREGEGSKRFRGHRSQRTPPRPTAGSAWKIHLLGTFWQ

SEQ ID NO: 883298 - protein, 358 aa, Homo sapiens
MAGCGEIDHSINMLPTNRKANESCSNTAPSLTVPECAICLQTCVHPVSLPCKHVFCYLCVKGASWLGKRCALCRQEIPEDFLDKPTLLSPEELKAASRGNGEYAWYYEGRNGWWQYDERTSRELEDAFSKGKKNTEMLIAGFLYVADLENMVQYRRNEHGRRRKIKRDIIDIPKKGVAGLRLDCDANTVNLARESSADGADSVSAQSGASVQPLVSSVRPLTSVDGQLTSPATPSPDASTSLEDSFAHLQLSGDNTAERSHRGEGEEDHESPSSGRVPAPDTSIEETESDASSDSEDVSAVVAQHSLTQQRLLVSNANQTVPDRSDRSGTDRSVAGGGTVSVSVRSRRPDGQCTVTEV

SEQ ID NO: 883299 - protein, 358 aa, Homo sapiens; identical to SEQ ID NO: 883298

SEQ ID NO: 883300 - protein, 358 aa, Homo sapiens; identical to SEQ ID NO: 883298

SEQ ID NO: 883301 - protein, 358 aa, Homo sapiens; identical to SEQ ID NO: 883298

SEQ ID NO: 883302 - protein, 358 aa, Homo sapiens; identical to SEQ ID NO: 883298

SEQ ID NO: 883303 - protein, 358 aa, Homo sapiens; identical to SEQ ID NO: 883298

SEQ ID NO: 883304 - protein, 340 aa, Homo sapiens
MAGCGEIDHSINMLPTNRKANESCSNTAPSLTVPECAICLQTCVHPVSLPCKHVFCYLCVKGASWLGKRCALCRQEIPEDFLDKPTLLSPEELKAASRGNGEYAWYYEGRNGWWQYDERTSRELEDAFSKGKKNTEMLIAGFLYVADLGDIIDIPKKGVAGLRLDCDANTVNLARESSADGADSVSAQSGASVQPLVSSVRPLTSVDGQLTSPATPSPDASTSLEDSFAHLQLSGDNTAERSHRGEGEEDHESPSSGRVPAPDTSIEETESDASSDSEDVSAVVAQHSLTQQRLLVSNANQTVPDRSDRSGTDRSVAGGGTVSVSVRSRRPDGQCTVTEV

SEQ ID NO: 883305 - protein, 79 aa, Homo sapiens
FCWNCTLSEPLGPNTKQAHSKEARRMQAAKSPLPTGKRVPADSGARQGQNDEAPELARRCGCGCAARRGPSSATRRVVT

SEQ ID NO: 883306 - protein, 358 aa, Homo sapiens; identical to SEQ ID NO: 883298

SEQ ID NO: 883307 - protein, 358 aa, Homo sapiens; identical to SEQ ID NO: 883298

SEQ ID NO: 883308 - protein, 358 aa, Homo sapiens; identical to SEQ ID NO: 883298

SEQ ID NO: 883309 - protein, 358 aa, Homo sapiens; identical to SEQ ID NO: 883298

SEQ ID NO: 883310 - protein, 358 aa, Homo sapiens; identical to SEQ ID NO: 883298

SEQ ID NO: 883311 - protein, 82 aa, Homo sapiens
NACLSIGPELGTRTEGLNVRRYTGLEAYTSMWSVELADSREFINATIHISSRAGVTCGYGVIDSIIPDRLFAQFALSGILIK

SEQ ID NO: 883312 - protein, 1352 aa, Homo sapiens [sequence omitted]

SEQ ID NO: 883313 - protein, 1176 aa, Homo sapiens
METRRRLEQERATMQMTPGEFRRPRLASFGGMGTTSSLPSFVGSGNHNPAKHQLQNGYQGNGDYGSYAPAAPTTSSMGSSIRHSPLSSGISTPVTNVSPMHLQHIREQMAIALKRLKELEEQVRTIPVLQVKISVLQEEKRQLVSQLKNQRAASQINVCGVRKRSYSAGNASQLEQLSRARRSGGELYIDYEEEEMETVEQSTQRIKEFRQLTADMQALEQKIQDSSCEASSELRENGECRSVAVGAEENMNDIVVYHRGSRSCKDAAVGTLVEMRNCGVSVTEAMLGVMTEADKEIELQQQTIEALKEKIYRLEVQLRETTHDREMTKLKQELQAAGSRKKVDKATMAQPLVFSKVVEAVVQTRDQMVGSHMDLVDTCVGTSVETNSVGISCQPECKNKVVGPELPMNWWIVKERVEMHDRCAGRSVEMCDKSVSVEVSVCETGSNTEESVNDLTLLKTNLNLKEVRSIGCGDCSVDVTVCSPKECASRGVNTEAVSQVEAAVMAVPRTADQDTSTDLEQVHQFTNTETATLIESCTNTCLSTLDKQTSTQTVETRTVAVGEGRVKDINSSTKTRSIGVGTLLSGHSGFDRPSAVKTKESGVGQININDNYLVGLKMRTIACGPPQLTVGLTASRRSVGVGDDPVGESLENPQPQAPLGMMTGLDHYIERIQKLLAEQQTLLAENYSELAEAFGEPHSQMGSLNSQLISTLSSINSVMKSASTEELRNPDFQKTSLGKITGNYLGYTCKCGGLQSGSPLSSQTSQPEQEVGTSEGKPISSLDAFPTQEGTLSPVNLTDDQIAAGLYACTNNESTLKSIMKKKDGNKDSNGAKKNLQFVGINGGYETTSSDDSSSDESSSSESDDECDVIEYPLEEEEEEEDEDTRGMAEGHHAVNIEGLKSARVEDEMQVQECEPEKVEIRERYELSEKMLSACNLLKNTINDPKALTSKDMRFCLNTLQHEWFRVSSQKSAIPAMVGDYIAAFEAISPDVLRYVINLADGNGNTALHYSVSHSNFEIVKLLLDADVCNVDHQNKAGYTPIMLAALAAVEAEKDMRIVEELFGCGDVNAKASQAGQTALMLAVSHGRIDMVKGLLACGADVNIQDDEGSTALMCASEHGHVEIVKLLLAQPGCNGHLEDNDGSTALSIALEAGHKDIAVLLYAHVNFPTHRGSFD

SEQ ID NO: 883314 - protein, 1194 aa, Homo sapiens
METRRRLEQERATMQMTPGEFRRPRLASFGGMGTTSSLPSFVGSGNHNPAKHQLQNGYQGNGDYGSYAPAAPTTSSMGSSIRHSPLSSGISTPVTNVSPMHLQHIREQMAIALKRLKELEEQVRTIPVLQVKISVLQEEKRQLVSQLKNQRAASQINVCGVRKRSYSAGNASQLEQLSRARRSGGELYIDYEEEEMETVEQSTQRIKEFRQLTADMQALEQKIQDSSCEASSELRENGECRSVAVGAEENMNDIVVYHRGSRSCKDAAVGTLVEMRNCGVSVTEAMLGVMTEADKEIELQQQTIEALKEKIYRLEVQLRETTHDREMTKLKQELQAAGSRKKVDKATMAQPLVFSKVVEAVVQTRDQMVGSHMDLVDTCVGTSVETNSVGISCQPECKNKVVGPELPMNWWIVKERVEMHDRCAGRSVEMCDKSVSVEVSVCETGSNTEESVNDLTLLKTNLNLKEVRSIGCGDCSVDVTVCSPKECASRGVNTEAVSQVEAAVMAVPRTADQDTSTDLEQVHQFTNTETATLIESCTNTCLSTLDKQTSTQTVETRTVAVGEGRVKDINSSTKTRSIGVGTLLSGHSGFDRPSAVKTKESGVGQININDNYLVGLKMRTIACGPPQLTVGLTASRRSVGVGDDPVGESLENPQPQAPLGMMTGLDHYIERIQKLLAEQQTLLAENYSELAEAFGEPHSQMGSLNSQLISTLSSINSVMKSASTEELRNPDFQKTSLGKITGNYLGYTCKCGGLQSGSPLSSQTSQPEQEVGTSEGKPISSLDAFPTQEGTLSPVNLTDDQIAAGLYACTNNESTLKSIMKKKDGNKDSNGAKKNLQFVGINGGYETTSSDDSSSDESSSSESDDECDVIEYPLEEEEEEEDEDTRGMAEGHHAVNIEGLKSARVEDEMQVQECEPEKVEIRERYELSEKMLSACNLLKNTINDPKALTSKDMRFCLNTLQHEWFRVSSQKSAIPAMVGDYIAAFEAISPDVLRYVINLADGNGNTALHYSVSHSNFEIVKLLLDADVCNVDHQNKAGYTPIMLAALAAVEAEKDMRIVEELFGCGDVNAKASQAGQTALMLAVSHGRIDMVKGLLACGADVNIQDDEGSTALMCASEHGHVEIVKLLLAQPGCNGHLEDNDGSTALSIALEAGHKDIAVLLYAHVNFAKAQSPGTPRLGRKTSPGPTHRGSFD

SEQ ID NO: 883315 - protein, 1206 aa, Homo sapiens
METRRRLEQERATMQMTPGEFRRPRLASFGGMGTTSSLPSFVGSGNHNPAKHQLQNGYQGNGDYGSYAPAAPTTSSMGSSIRHSPLSSGISTPVTNVSPMHLQHIREQMAIALKRLKELEEQVRTIPVLQVKISVLQEEKRQLVSQLKNQRAASQINVCGVRKRSYSAGNASQLEQLSRARRSGGELYIDYEEEEMETVEQSTQRIKEFRQLTADMQALEQKIQDSSCEASSELRENGECRSVAVGAEENMNDIVVYHRGSRSCKDAAVGTLVEMRNCGVSVTEAMLGVMTEADKEIELQQQTIEALKEKIYRLEVQLRETTHDREMTKLKQELQAAGSRKKVDKATMAQPLVFSKVVEAVVQTRDQMVGSHMDLVDTCVGTSVETNSVGISCQPECKNKVVGPELPMNWWIVKERVEMHDRCAGRSVEMCDKSVSVEVSVCETGSNTEESVNDLTLLKTNLNLKEVRSIGCGDCSVDVTVCSPKECASRGVNTEAVSQVEAAVMAVPRTADQDTSTDLEQVHQFTNTETATLIESCTNTCLSTLDKQTSTQTVETRTVAVGEGRVKDINSSTKTRSIGVGTLLSGHSGFDRPSAVKTKESGVGQININDNYLVGLKMRTIACGPPQLTVGLTASRRSVGVGDDPVGESLENPQPQAPLGMMTGLDHYIERIQKLLAEQQTLLAENYSELAEAFGEPHSQMGSLNSQLISTLSSINSVMKSASTEELRNPDFQKTSLGKITGNYLGYTCKCGGLQSGSPLSSQTSQPEQEVGTSEGKPISSLDAFPTQEGTLSPVNLTDDQIAAGLYACTNNESTLKSIMKKKDGNKDSNGAKKNLQFVGINGGYETTSSDDSSSDESSSSESDDECDVIEYPLEEEEEEEDEDTRGMAEGHHAVNIEGLKSARVEDEMQVQECEPEKVEIRERYELSEKMLSACNLLKNTINDPKALTSKDMRFCLNTLQHEWFRVSSQKSAIPAMVGDYIAAFEAISPDVLRYVINLADGNGNTALHYSVSHSNFEIVKLLLDADVCNVDHQNKAGYTPIMLAALAAVEAEKDMRIVEELFGCGDVNAKASQAGQTALMLAVSHGRIDMVKGLLACGADVNIQDDEGSTALMCASEHGHVEIVKLLLAQPGCNGHLEDNDGSTALSIALEAGHKDIAVLLYAHVNFAKAQSPVSVVHLAFVNRLKSTRLVDPLPPGIDGRQILC

SEQ ID NO: 883316 - protein, 196 aa, Homo sapiens
TDYGGLICNSYILPPIIPRTRRRWIKSADVCNVDHQNKAGYTPIMLAALAAVEAEKDMRIVEELFGCGDVNAKASQAGQTALMLAVSHGRIDMVKGLLACGADVNIQDDEGSTALMCASEHGHVEIVKLLLAQPGCNGHLEDNDGSTALSIALEAGHKDIAVLLYAHVNFAKAQSPGTPRLGRKTSPGPTHRGSFD

SEQ ID NO: 883317 - protein, 689 aa, Homo sapiens
GNRLVSDKPACRSSADTRPSGQAWPTVGLRAAAGAFRTGSPLALGPETPQVACLPGHPPVRPQVSGGPGAMPDPAAHLPFFYGSISRAEAEEHLKLAGMADGLFLVRQCLRSLGGYVLSLVHDVRFHHFPIERQLNGTYAIAGGKAHCGPAELCEFYSRDPDGLPCNLRKPCIPPSGLEPQPGVFDCLRDAMVRDYVRQTWKLEGEALEQAIISQAPQVEKLIATTAHERMPWYHSSLTREEAERKLYSGAQTDGKFLLRPRKEQGTYALSLIYGKTVYHYLISQDKAGKYCIPEGTKFDTLWQLVEYLKLKADGLIYCLKEACPNSSASNASGAAAPTLPAHPSTLTHPQRRIDTLNSDGYTPEPARITSPDKPRPMPMDTSVYESPYSDPEELKDKKLFLKRDNLLIADIELGCGNFGSVRQGVYRMRKKQIDVAIKVLKQGTEKADTEEMMREAQIMHQLDNPYIVRLIGVCQAEALMLVMEMAGGGPLHKFLVGKREEIPVSNVAELLHQVSMGMKYLEEKNFVHRDLAARNVLLVNRHYAKISDFGLSKALGADDSYYTARSAGKWPLKWYAPECINFRKFSSRSDVWSYGVTMWEALSYGQKPYKKMKGPEVMAFIEQGKRMECPPECPPELYALMSDCWIYKWEDRPDFLTVEQRMRACYYSLASKVEGPPGSTQKAEAACA

SEQ ID NO: 883318 - protein, 469 aa, Homo sapiens
MLWCSTMPDGKVFKLEMRLGPRWKGEALEQAIISQAPQVEKLIATTAHERMPWYHSSLTREEAERKLYSGAQTDGKFLLRPRKEQGTYALSLIYGKTVYHYLISQDKAGKYCIPEGTKFDTLWQLVEYLKLKADGLIYCLKEACPNSSASNASGAAAPTLPAHPSTLTHPQRRIDTLNSDGYTPEPARITSPDKPRPMPMDTSVYESPYSDPEELKDKKLFLKRDNLLIADIELGCGNFGSVRQGVYRMRKKQIDVAIKVLKQGTEKADTEEMMREAQIMHQLDNPYIVRLIGVCQAEALMLVMEMAGGGPLHKFLVGKREEIPVSNVAELLHQVSMGMKYLEEKNFVHRDLAARNVLLVNRHYAKISDFGLSKALGADDSYYTARSAGKWPLKWYAPECINFRKFSSRSDVWSYGVTMWEALSYGQKPYKKMKGPEVMAFIEQGKRMECPPECPPELYALMSDCWIYK

SEQ ID NO: 883319 - protein, 509 aa, Homo sapiens
MLWCSTMPDGKVFKLEMRLGPRWKGEALEQAIISQAPQVEKLIATTAHERMPWYHSSLTREEAERKLYSGAQTDGKFLLRPRKEQGTYALSLIYGKTVYHYLISQDKAGKYCIPEGTKFDTLWQLVEYLKLKADGLIYCLKEACPNSSASNASGAAAPTLPAHPSTLTHPQRRIDTLNSDGYTPEPARITSPDKPRPMPMDTSVYESPYSDPEELKDKKLFLKRDNLLIADIELGCGNFGSVRQGVYRMRKKQIDVAIKVLKQGTEKADTEEMMREAQIMHQLDNPYIVRLIGVCQAEALMLVMEMAGGGPLHKFLVGKREEIPVSNVAELLHQVSMGMKYLEEKNFVHRDLAARNVLLVNRHYAKISDFGLSKALGADDSYYTARSAGKWPLKWYAPECINFRKFSSRSDVWSYGVTMWEALSYGQKPYKKMKGPEVMAFIEQGKRMECPPECPPELYALMSDCWIYKWEDRPDFLTVEQRMRACYYSLASKVEGPPGSTQKAEAACA

SEQ ID NO: 883320 - protein, 509 aa, Homo sapiens; identical to SEQ ID NO: 883319

SEQ ID NO: 883321 - protein, 213 aa, Homo sapiens
MVQSCSAYGCKNRYDKDKPVSFHKFPLTRPSLCKEWEAAVRRKNFKPTKYSSICSEHFTPDCFKRECNNKLLKENAVPTIFLCTEPHDKKEDLLEPQEQLPPPPLPPPVSQVDAAIGLLMPPLQTPVNLSVFCDHNYTVEDTMHQRKRIHQLEQQVEKLRKKLKTAQQRCRRQERQLEKLKEVVHFQKEKDDVSERGYVILPNDYFEIVEVPA

SEQ ID NO: 883322 - protein, 213 aa, Homo sapiens; identical to SEQ ID NO: 883321

SEQ ID NO: 883323 - protein, 73 aa, Homo sapiens
EVRLKLPPPSWRWETGDGCGPSANANNKTGTLVTPEGGHHHCNCWPKLQKKRGNPTERSDTENSFPCLLRRQK

SEQ ID NO: 883324 - protein, 547 aa, Homo sapiens
MAGTKNKTRAQAKTEKKAAIQAKAGAEREATGVVRPVAKTRAKAKAKTGSKTDAVAEMKAVSKNKVVAETKEGALSEPKTLGKAMGDFTPKAGNESTSSTCKNEAGTDAWFWAGEEATINSWFWNGEEAGNSFSTKNDKPEIGAQVCAEELEPAAGADCKPRSGAEEEEEENVIGNWFWEGDDTSFDPNPKPVSRIVKPQPVYEINEKNRPKDWSEVTIWPNAPAVTPAVLGFRSQAPSEASPPSYIVLASAEENACSLPVATACRPSRNTRSCSQPIPECRFDSDPCIQTIDEIRRQIRIREVNGIKPFACPCKMECYMDSEEFEKLVSLLKSTTDPLIHKIARIAMGVHNVHPFAQEFINEVGVVTLIESLLSFPSPEMRKKTVITLNPPSGDERQRKIELHVKHMCKETMSFPLNSPGQQSGLKILGQLTTDFVHHYIVANYFSELFHLLSSGNCKTRNLVLKLLLNMSENPTAARDMINMKALAALKLIFNQKEAKANLVSGVAIFINIKEHIRKGSIVVVDHLSYNTLMAIFREVKEIIETM

SEQ ID NO: 883325 - protein, 547 aa, Homo sapiens; identical to SEQ ID NO: 883324

SEQ ID NO: 883326 - protein, 547 aa, Homo sapiens; identical to SEQ ID NO: 883324

SEQ ID NO: 883327 - protein, 347 aa, Homo sapiens
SLWGVPAWRGGSGSGGWESGRRGFFVALPERSGVCQVVSIMFSFNMFDHPIPRVFQNRFSTQYRCFSVSMLAGPNDRSDVEKGGKIIMPPSALDQLSRLNITYPMLFKLTNKNSDRMTHCGVLEFVADEGICYLPHWMMQNLLLEEGGLVQVESVNLQVATYSKFQPQSPDFLDITNPKAVLENALRNFACLTTGDVIAINYNEKIYELRVMETKPDKAVSIIECDMNVDFDAPLGYKEPERQVQHEESTEGEADHSGYAGELGFRAFSGSGNRLDGKKKGVEPSPSPIKPGDIKRGIPNYEFKLGKITFIRNSRPLVKKVEEDEAGGRFVAFSGEGQSLRKKGRKP

SEQ ID NO: 883328 - protein, 382 aa, Homo sapiens
SLWGVPAWRGGSGSGGWESGRRGFFVALPERSGVCQVVSIMFSFNMFDHPIPRVFQNRFSTQYRCFSVSMLAGPNDRSDVEKGGKIIMPPSALDQLSRLNITYPMLFKLTNKNSDRMTHCGVLEFVADEGICYLPHWCRTYSWKKAAWSRWRASTFKWPPTPRVKFCYLPHWMMQNLLLEEGGLVQVESVNLQVATYSKFQPQSPDFLDITNPKAVLENALRNFACLTTGDVIAINYNEKIYELRVMETKPDKAVSIIECDMNVDFDAPLGYKEPERQVQHEESTEGEADHSGYAGELGFRAFSGSGNRLDGKKKGVEPSPSPIKPGDIKRGIPNYEFKLGKITFIRNSRPLVKKVEEDEAGGRFVAFSGEGQSLRKKGRKP

SEQ ID NO: 883329 - protein, 306 aa, Homo sapiens
SLWGVPAWRGGSGSGGWESGRRGFFVALPERSGVCQVVSIMFSFNMFDHPIPRVFQNRFSTQYRCFSVSMLAGPNDRSDVEKGGKIIMPPSALDQLSRLNITYPMLFKLTNKNSDRMTHCGVLEFVADEGICYLPHWMMQNLLLEEGGLVQVESVNLQVATYSKFQPQSPDFLDITNPKAVLENALRNFACLTTGDVIAINYNEKIYELRVMETKPDKAVSIIECDMNVDFDAPLGYKEPERQVQHEESTEGEADHSGYAGELGFRAFSGSGNRLDGKKKGVEPSPSPIKPGDIKRGIPNYEFKLG

SEQ ID NO: 883330 - protein, 306 aa, Homo sapiens; identical to SEQ ID NO: 883329

SEQ ID NO: 883331 - protein, 355 aa, Homo sapiens
SLWGVPAWRGGSGSGGWESGRRGFFVALPERSGVCQVVSIMFSFNMFDHPIPRVFQNRFSTQYRCFSVSMLAGPNDRSDVEKGGKIIMPPSALDQLSRLNITYPMLFKLTNKNSDRMTHCGVLEFVADEGICYLPHWMMQNLLLEEGGLVQVESVNLQVATYSKFQPQSPDFLDITNPKAVLENALRNFACLTTGDVIAINYNEKIYELRVMETKPDKAVSIIECDMNVDFDAPLGYKEPERQVQHEESTEGEADHSGYAGELGFRAFSGSGNRLDGKKKGVEPSPSPIKPGDIKRGIPNYEFKLGKITFIRNSRPLVKKVEEVSVFPCISLVGNEEIYLLVMTEVLGILSRGVH

SEQ ID NO: 883332 - protein, 302 aa, Homo sapiens
MFDHPIPRVFQNRFSTQYRCFSVSMLAGPNDRSDVEKGGKIIMPPSALDQLSRLNITYPMLFKLTNKNSDRMTHCGVLEFVADEGICYLPHWMMQNLLLEEGGLVQVESVNLQVATYSKFQPQSPDFLDITNPKAVLENALRNFACLTTGDVIAINYNEKIYELRVMETKPDKAVSIIECDMNVDFDAPLGYKEPERQVQHEESTEGEADHSGYAGELGFRAFSGSGNRLDGKKKGVEPSPSPIKPGDIKRGIPNYEFKLGKITFIRNSRPLVKKVEEDEAGGRFVAFSGEGQSLRKKGRKP

SEQ ID NO: 883333 - protein, 260 aa, Homo sapiens
MPPSALDQLSRLNITYPMLFKLTNKNSDRMTHCGVLEFVADEGICYLPHWMMQNLLLEEGGLVQVESVNLQVATYSKFQPQSPDFLDITNPKAVLENALRNFACLTTGDVIAINYNEKIYELRVMETKPDKAVSIIECDMNVDFDAPLGYKEPERQVQHEESTEGEADHSGYAGELGFRAFSGSGNRLDGKKKGVEPSPSPIKPGDIKRGIPNYEFKLGKITFIRNSRPLVKKVEEDEAGGRFVAFSGEGQSLRKKGRKP

SEQ ID NO: 883334 - protein, 260 aa, Homo sapiens; identical to SEQ ID NO: 883333

SEQ ID NO: 883335 - protein, 243 aa, Homo sapiens
MLFKLTNKNSDRMTHCGVLEFVADEGICYLPHWMMQNLLLEEGGLVQVESVNLQVATYSKFQPQSPDFLDITNPKAVLENALRNFACLTTGDVIAINYNEKIYELRVMETKPDKAVSIIECDMNVDFDAPLGYKEPERQVQHEESTEGEADHSGYAGELGFRAFSGSGNRLDGKKKGVEPSPSPIKPGDIKRGIPNYEFKLGKITFIRNSRPLVKKVEEDEAGGRFVAFSGEGQSLRKKGRKP

SEQ ID NO: 883336 - protein, 180 aa, Homo sapiens
SLWGVPAWRGGSGSGGWESGRRGFFVALPERSGVCQVVSIMFSFNMFDHPIPRVFQNRFSTQYRCFSVSMLAGPNDRSDVEKGGKITYATPRPWNRTSSRLNITYPMLFKLTNKNSDRMTHCGVLEFVADEGICYLPHWCRTYSWKKAAWSRWRASNRIAHVGRYPLHSQIVAQPLQEAP

SEQ ID NO: 883337 - protein, 347 aa, Homo sapiens; identical to SEQ ID NO: 883327

SEQ ID NO: 883338 - protein, 347 aa, Homo sapiens; identical to SEQ ID NO: 883327

SEQ ID NO: 883339 - protein, 377 aa, Homo sapiens
MAEEVVVVAKFDYVAQQEQELDIKKNERLWLLDDSKSWWRVRNSMNKTGFVPSNYVERKNSARKASIVKNLKDTLGIGKVKRKPSVPDSASPADDSFVDPGERLYDLNMPAYVKFNYMAEREDELSLIKGTKVIVMEKCSDGWWRGSYNGQVGWFPSNYVTEEGDSPLGDHVGSLSEKLAAVVNNLNTGQVLHVVQALYPFSSSNDEELNFEKGDVMDVIEKPENDPEWWKCRKINGMVGLVPKNYVTVMQNNPLTSGLEPSPPQCDYIRPSLTGKFAGNPWYYGKVTRHQAEMALNERGHEGDFLIRDSESSPNDFSVSLKAQGKNKHFKVQLKETVYCIGQRKFSTMEELVEHYKKAPIFTSEQGEKLYLVKHLS

SEQ ID NO: 883340 - protein, 377 aa, Homo sapiens; identical to SEQ ID NO: 883339

SEQ ID NO: 883341 - protein, 377 aa, Homo sapiens; identical to SEQ ID NO: 883339

SEQ ID NO: 883342 - protein, 244 aa, Homo sapiens
MAEEVVVVAKFDYVAQQEQELDIKKNERLWLLDDSKSWWRVRNSMNKTGFVPSNYVERKNSARKASIVKNLKDTLGIGKVKRKPSVPDSASPADDSFVDPGERLYDLNMPAYVKFNYMAEREDELSLIKGTKCDYIRPSLTGKFAGNPWYYGKVTRHQAEMALNERGHEGDFLIRDSESSPNDFSVSLKAQGKNKHFKVQLKETVYCIGQRKFSTMEELVEHYKKAPIFTSEQGEKLYLVKHLS

SEQ ID NO: 883343 - protein, 244 aa, Homo sapiens; identical to SEQ ID NO: 883342

SEQ ID NO: 883344 - protein, 315 aa, Homo sapiens
MAEEVVVVAKFDYVAQQEQELDIKKNERLWLLDDSKSWWRVRNSMNKTGFVPSNYVERKNSARKASIVKNLKDTLGIGKVKRKPSVPDSASPADDSFVDPGERLYDLNMPAYVKFNYMAEREDELSLIKGTKVIVMEKCSDGWWRGSYNGQVGWFPSNYVTEEGDSPLGDHVGSLSEKLAAVVNNLNTGQVLHVVQALYPFSSSNDEELNFEKGDVMDVIEKPENDPEWWKCRKINGMVGLVPKNYVTVMQNNPLTSGLEPSPPQCDYIRPSLTGKFAGNPWYYGKVTRHQAEMALNERGHEGDFLIRDSESSVS

SEQ ID NO: 883345 - protein, 694 aa, Homo sapiens
MAEEVVVVAKFDYVAQQEQELDIKKNERLWLLDDSKSWWRVRNSMNKTGFVPSNYVERKNSARKASIVKNLKDTLGIGKVKRKPSVPDSASPADDSFVDPGERLYDLNMPAYVKFNYMAEREDELSLIKGTKVIVMEKCSDGWWRGSYNGQVGWFPSNYVTEEGDSPLGDHVGSLSEKLAAVVNNLNTGQVLHVVQALYPFSSSNDEELNFEKGDVMDVIEKPENDPEWWKCRKINGMVGLVPKNYVTVMQNNPLTSGLEPSPPQCDYIRPSLTGKFAGNPWYYGKVTRHQAEMALNERGHEGDFLIRDSESSATALLMQHLGLGRKEGASEPALSELSWAGSRTIQASLRLRPQLQHMHSEERWLRWTECFILERNNVLGQTEIYQMQTFTMVLEEIWTSLFMWFFYALIPCLLTDEVAILPAPQNLSVLSTNMKHLLMWSPVIAPGETVYYSVEYQGEYESLYTSHIWIPSSWCSLTEGPECDVTDDITATVPYNLRVRATLGSQTSAWSILKHPFNRNSTILTRPGMEITKDGFHLVIELEDLGPQFEFLVAYWRREPGAEEHVKMVRSGGIPVHLETMEPGAAYCVKAQTFVKAIGRYSAFSQTECVEVQGEAIPLVLALFAFVGFMLILVVVPLFVWKMGRLLQYSCCPVVVLPDTKITNSPQKLISCRREEVDACATAVMSFRGRKPS

SEQ ID NO: 883346 - protein, 588 aa, Homo sapiens
MAEEVVVVAKFDYVAQQEQELDIKKNERLWLLDDSKSWWRVRNSMNKTGFVPSNYVERKNSARKASIVKNLKDTLGIGKVKRKPSVPDSASPADDSFVDPGERLYDLNMPAYVKFNYMAEREDELSLIKGTKVIVMEKCSDGWWRGSYNGQVGWFPSNYVTEEGDSPLGDHVGSLSEKLAAVVNNLNTGQVLHVVQALYPFSSSNDEELNFEKGDVMDVIEKPENDPEWWKCRKINGMVGLVPKNYVTVMQNNPLTSGLEPSPPQCDYIRPSLTGKFAGNPWYYGKVTRHQAEMALNERGHEGDFLIRDSESSATALLMQHLGLGRKEGASEPALSELSWAGSRTIQASLRLRPQLQHMHSEERWLRWTECFILERNNVLGQTEIYQMQTFTMVLEEIWTSLFMWFFYALIPCLLTAILTRPGMEITKDGFHLVIELEDLGPQFEFLVAYWRREPGAEEHVKMVRSGGIPVHLETMEPGAAYCVKAQTFVKAIGRYSAFSQTECVEVQGEAIPLVLALFAFVGFMLILVVVPLFVWKMGRLLQYSCCPVVVLPDTKITNSPQKLISCRREEVDACATAVMSFRGRKPS

SEQ ID NO: 883347 - protein, 317 aa, Homo sapiens [sequence omitted]

SEQ ID NO: 883348 - protein, 698 aa, Homo sapiens
MAEEVVVVAKFDYVAQQEQELDIKKNERLWLLDDSKSWWRVRNSMNKTGFVPSNYVERKNSARKASIVKNLKDTLGIGKVKRKPSVPDSASPADDSFVDPGERLYDLNMPAYVKFNYMAEREDELSLIKGTKVIVMEKCSDGWWRGSYNGQVGWFPSNYVTEEGDSPLGDHVGSLSEKLAAVVNNLNTGQVLHVVQALYPFSSSNDEELNFEKGDVMDVIEKPENDPEWWKCRKINGMVGLVPKNYVTVMQNNPLTSGLEPSPPQCDYIRPSLTGKFAGNPWYYGKVTRHQAEMALNERGHEGDFLIRDSESSATALLMQHLGLGRKEGASEPALSELSWAGSRTIQASLRLRPQLQHMHSEERWLRWTECFILERNNVLGQTEIYQMQTFTMVLEEIWTSLFMWFFYALIPCLLTDEVAILPAPQNLSVLSTNMKHLLMWSPVIAPGETVYYSVEYQGEYESLYTSHIWIPSSWCSLTEGPECDVTDDITATVPYNLRVRATLGSQTSAWSILKHPFNRNSRTAFLLSVHLCPELVGFDLTDFKNEAADPRAILTRPGMEITKDGFHLVIELEDLGPQFEFLVAYWRREPGAEEHVKMVRSGGIPVHLETMEPGAAYCVKAQTFVKAIGRYSAFSQTECVEVQGEAIPLVLALFAFVGFMLILVVVPLFVWKMGRLLQYSCCPVVVLPDTLGNRVVL

SEQ ID NO: 883349 - protein, 327 aa, Homo sapiens
MAEEVVVVAKFDYVAQQEQELDIKKNERLWLLDDSKSWWRVRNSMNKTGFVPSNYVERKNSARKASIVKNLKDTLGIGKVKRKPSVPDSASPADDSFVDPGERLYDLNMPAYVKFNYMAEREDELSLIKGTKVIVMEKCSDGWWRGSYNGQVGWFPSNYVTEEGDSPLGDHVGSLSEKLAAVVNNLNTGQVLHVVQALYPFSSSNDEELNFEKGDVMDVIEKPENDPEWWKCRKINGMVGLVPKNYVTVMQNNPLTSGLEPSPPQCDYIRPSLTGKFAGNPWYYGKVTRHQAEMALNERGHEGDFLIRDSESSILLRILEFDDTHFP

SEQ ID NO: 883350 - protein, 199 aa, Homo sapiens
RAAYIAAAAVAAATPGGGHVEGPGPRLLPLLPAAPCGERPRPPEPTRPGPTPGPAAQTRHRTRTPTLRTRAQPQLKMARGSALLLASLLLAAALSASAGLWSPAKEKRGWTLNSAGYLLGPHAVGNHRSFSDKNGLTSKRELRPEDDMKPGSFDRSIPENNIMRTIIEFLSFLHLKEAGALDRLLDLPAAASSEDIERS

SEQ ID NO: 883351 - protein, 106 aa, Homo sapiens
MCRGCNSLMCILRSCCSDVALPFAEAGALDRLLDLPAEPPQKTSSGPESLLGTFAVCCNLKSNLKIMDNLRPIYAESAIPGLFALMLGWYHLRFFFGNNFEWQNKE

SEQ ID NO: 883352 - protein, 199 aa, Homo sapiens; identical to SEQ ID NO: 883350

SEQ ID NO: 883353 - protein, 123 aa, Homo sapiens
MARGSALLLASLLLAAALSASAGLWSPAKEKRGWTLNSAGYLLGPHAVGNHRSFSDKNGLTSKRELRPEDDMKPGSFDRSIPENNIMRTIIEFLSFLHLKEAGALDRLLDLPAAASSEDIERS

SEQ ID NO: 883354 - protein, 106 aa, Homo sapiens; identical to SEQ ID NO: 883351

SEQ ID NO: 883355 - protein, 492 aa, Homo sapiens
AGAPPPASLPTCSLISDCCASNQRDSVGVGPSEPGVGYSLVVRRFLSRSEKRNIRVGVTRFPVTADEWNSNHTIEIEINQTLEIPCFQNSSSKISSEFTYAWSVEDNGTQETLISQNHLISNSTLLKDRVKLGTDYRLHLSPVQIFDDGRKFSCHIRVGPNKILRSSTTVKVFAKPEIPVIVENNSTDVLVERRFTCLLKNVFPKANITWFIDGSFLHDEKEGIYITNEERKGKDGFLELKSVLTRVHSNKPAQSDNLTIWCMALSPVPGNKVWNISSEKITFLLGSEISSTDPPLSVTESTLDTQPSPASSVSPARYPATSSVTLVDVSALRPNTTPQPSNSSMTTRGFNYPWTSSGTDTKKSVSRIPSETYSSSPSGAGSTLHDNVFTSTARAFSEVPTTANGSTKTNHVHITGIVVNKPKDGMSWPVIVAALLFCCMILFGLGVRKWCQYQKEIMERPPPFKPPPPPIKYTCIQEPNESDLPYHEMETL

SEQ ID NO: 883356 - protein, 569 aa, Homo sapiens
MEKKWKYCAVYYIIQIHFVKGVWEKTVNTEENVYATLGSDVNLTCQTQTVGFFVQMQWSKVTNKIDLIAVYHPQYGFYCAYGRPCESLVTFTETPENGSKWTLHLRNMSCSVSGRYECMLVLYPEGIQTKIYNLLIQTHVTADEWNSNHTIEIEINQTLEIPCFQNSSSKISSEFTYAWSVEDNGTQETLISQNHLISNSTLLKDRVKLGTDYRLHLSPVQIFDDGRKFSCHIRVGPNKILRSSTTVKVFAKPEIPVIVENNSTDVLVERRFTCLLKNVFPKANITWFIDGSFLHDEKEGIYITNEERKGKDGFLELKSVLTRVHSNKPAQSDNLTIWCMALSPVPGNKVWNISSEKITFLLGSEISSTDPPLSVTESTLDTQPSPASSVSPARYPATSSVTLVDVSALRPNTTPQPSNSSMTTRGFNYPWTSSGTDTKKSVSRIPSETYSSSPSGAGSTLHDNVFTSTARAFSEVPTTANGSTKTNHVHITGIVVNKPKDGMSWPVIVAALLFCCMILFGLGVRKWCQYQKEIMERPPPFKPPPPPIKYTCIQEPNESDLPYHEMETL

SEQ ID NO: 883357 - protein, 474 aa, Homo sapiens
AGAPPPASLPTCSLISDCCASNQRDSVGVGPSEPGVGYSLVVRRFLSRSEKRNIRVGVTRFPVTADEWNSNHTIEIEINQTLEIPCFQNSSSKISSEFTYAWSVEDNGTQETLISQDYRLHLSPVQIFDDGRKFSCHIRVGPNKILRSSTTVKVFAKPEIPVIVENNSTDVLVERRFTCLLKNVFPKANITWFIDGSFLHDEKEGIYITNEERKGKDGFLELKSVLTRVHSNKPAQSDNLTIWCMALSPVPGNKVWNISSEKITFLLGSEISSTDPPLSVTESTLDTQPSPASSVSPARYPATSSVTLVDVSALRPNTTPQPSNSSMTTRGFNYPWTSSGTDTKKSVSRIPSETYSSSPSGAGSTLHDNVFTSTARAFSEVPTTANGSTKTNHVHITGIVVNKPKDGMSWPVIVAALLFCCMILFGLGVRKWCQYQKEIMERPPPFKPPPPPIKYTCIQEPNESDLPYHEMETL

SEQ ID NO: 883358 - protein, 78 aa, Homo sapiens
GSGTNQLWEMGPYLQNEVDLRGLHGPHTAQGRHLCFSMEAYIHRSLSGRGKSPPRHGNGKTKCFQNYWLPWETSTQMS

SEQ ID NO: 883359 - protein, 1210 aa, Homo sapiens
MTLSGSRGQEEPPPSRVPRAVRVASLLSEGEELSGDDQGDEEEDDHAYEGVPNGGWHTSSLSLSLPSTIAAPHPMDGPPGGSTPVTPVIKAGWLDKNPPQGSYIYQKRWVRLDTDHLRYFDSNKDAYSKRFISVACISHVAAIGDQKFEVITNNRTFAFRAESDVERKEWMQALQQAMAEQRARARLSSAYLLGVPGSEQPDRAGSLELRGFKNKLYVAVVGDKVQLYKNLEEYHLGIGITFIDMSVGNVKEVDRRSFDLTTPYRIFSFSADSELEKEQWLEAMQGAIAEALSTSEVAERIWAAAPNRFCADCGAPQPDWASINLCVVICKRCAGEHRGLGAGVSKVRSLKMDRKVWTETLIELFLQLGNGAGNRFWAANVPPSEALQPSSSPSTRRCHLEAKYREGKYRRYHPLFGNQEELDKALCAAVTTTDLAETQALLGCGAGINCFSGDPEAPTPLALAEQAGQTLQMEFLRNNRTTEVPRLDSMKPLEKHYSVVLPTVSHSGFLYKTASAGKLLQDRRAREEFSRRWCVLGDGVLSYFENERAVTPNGEIRASEIVCLAVPPPDTHGFEHTFEVYTEGERLYLFGLESAEQAHEWVKCIAKAFVPPLAEDLLARDFERLGRLPYKAGLSLQRAQEGWFSLSGSELRAVFPEGPCEEPLQLRKLQELSIQGDSENQVLVLVERRRTLYIQGERRLDFMGWLGAIQKAAASMGDTLSEQQLGDSDIPVIVYRCVDYITQCGLTSEGIYRKCGQTSKTQRLLESLRQDARSVHLKEGEQHVDDVSSALKRFLRDLPDGLFTRAQRLTWLEASEIEDEEEKVSRYRELLVRLPPVNRATVKALISHLYCVQCFSDTNQMNVHNLAIVFGPTLFQTDGQDYKAGRVVEDLINHYVVVFSVDEEELRKQREEITAIVKMRVAGTASGTQHAGDFICTVYLEEKKAETEQHIKVPASMTAEELTLEILDRRNVGIREKDYWTCFEVNEREEAERPLHFAEKVLPILHGLGTDSHLVVKKHQAMEAMLLYLASRVGDTKHGMMKFREDRSLLGLGLPSGGFHDRYFILNSSCLRLYKEVRSQRPWSGAPETSHRPEKEWPIKSLKVYLGVKKKLRPPTCWGFTVVHETEKHEKQQWYLCCDTQMELREWFATFLFVQHDGLVWPSEPSRVSRAVPEVRLGSVSLIPLRGSENEMRRSVAAFTADPLSLLRNV

SEQ ID NO: 883360 - protein, 72 aa, Homo sapiens
ESSWYHLDKLCMHALSYRMSYASRATLLPHSVHMQVFSQPRLHLTPSTFCTYMPYTHPNPTHHCTLSSPGSR

SEQ ID NO: 883361 - protein, 1162 aa, Homo sapiens
MCYFESDFSHSCCKVHLLASGHLGFFLPRTWLILTLSVASEGWGGPGTCPPTPGHLLVVPLPLRSYIYQKRWVRLDTDHLRYFDSNKDAYSKRFISVACISHVAAIGDQKFEVITNNRTFAFRAESDVERKEWMQALQQAMAEQRARARLSSAYLLGVPGSEQPDRAGSLELRGFKNKLYVAVVGDKVQLYKNLEEYHLGIGITFIDMSVGNVKEVDRRSFDLTTPYRIFSFSADSELEKEQWLEAMQGAIAEALSTSEVAERIWAAAPNRFCADCGAPQPDWASINLCVVICKRCAGEHRGLGAGVSKVRSLKMDRKVWTETLIELFLQLGNGAGNRFWAANVPPSEALQPSSSPSTRRCHLEAKYREGKYRRYHPLFGNQEELDKALCAAVTTTDLAETQALLGCGAGINCFSGDPEAPTPLALAEQAGQTLQMEFLRNNRTTEVPRLDSMKPLEKHYSVVLPTVSHSGFLYKTASAGKLLQDRRAREEFSRRWCVLGDGVLSYFENERAVTPNGEIRASEIVCLAVPPPDTHGFEHTFEVYTEGERLYLFGLESAEQAHEWVKCIAKAFVPPLAEDLLARDFERLGRLPYKAGLSLQRAQEGWFSLSGSELRAVFPEGPCEEPLQLRKLQELSIQGDSENQVLVLVERRRTLYIQGERRLDFMGWLGAIQKAAASMGDTLSEQQLGDSDIPVIVYRCVDYITQCGLTSEGIYRKCGQTSKTQRLLESLRQDARSVHLKEGEQHVDDVSSALKRFLRDLPDGLFTRAQRLTWLEASEIEDEEEKVSRYRELLVRLPPVNRATVKALISHLYCVQCFSDTNQMNVHNLAIVFGPTLFQTDGQDYKAGRVVEDLINHYVVVFSVDEEELRKQREEITAIVKMRVAGTASGTQHAGDFICTVYLEEKKAETEQHIKVPASMTAEELTLEILDRRNVGIREKDYWTCFEVNEREEAERPLHFAEKVLPILHGLGTDSHLVVKKHQAMEAMLLYLASRVGDTKHGMMKFREDRSLLGLGLPSGGFHDRYFILNSSCLRLYKEVRSHRPEKEWPIKSLKVYLGVKKKLRPPTCWGFTVVHETEKHEKQQWYLCCDTQMELREWFATFLFVQHDGLVWPSEPSRVSRAVPEVRLGSVSLIPLRGSENEMRRSVAAFTADPLSLLRNV

SEQ ID NO: 883362 - protein, 955 aa, Homo sapiens [sequence omitted]

SEQ ID NO: 883363 - protein, 955 aa, Homo sapiens [sequence omitted]

SEQ ID NO: 883364 - protein, 1101 aa, Homo sapiens
MCYFESDFSHSCCKVHLLASGHLGFFLPRTWLILTLSVASEGWGGPGTCPPTPGHLLVVPLPLRSYIYQKRWVRLDTDHLRYFDSNKDAYSKRFISVACISHVAAIGDQKFEVITNNRTFAFRAESDVERKEWMQALQQAMAEQRARARLSSAYLLGVPGSEQPDRAGSLELRGFKNKLYVAVVGDKVQLYKNLEEYHLGIGITFIDMSVGNVKEVDRRSFDLTTPYRIFSFSADSELEKEQWLEAMQGAIAEALSTSEVAERIWAAAPNRFCADCGAPQPDWASINLCVVICKRCAGEHRGLGAGVSKVRSLKMDRKVWTETLIEALCAAVTTTDLAETQALLGCGAGINCFSGDPEAPTPLALAEQAGQTLQMEFLRNNRTTEVPRLDSMKPLEKHYSVVLPTVSHSGFLYKTASAGKLLQDRRAREEFSRRWCVLGDGVLSYFENERAVTPNGEIRASEIVCLAVPPPDTHGFEHTFEVYTEGERLYLFGLESAEQAHEWVKCIAKAFVPPLAEDLLARDFERLGRLPYKAGLSLQRAQEGWFSLSGSELRAVFPEGPCEEPLQLRKLQELSIQGDSENQVLVLVERRRTLYIQGERRLDFMGWLGAIQKAAASMGDTLSEQQLGDSDIPVIVYRCVDYITQCGLTSEGIYRKCGQTSKTQRLLESLRQDARSVHLKEGEQHVDDVSSALKRFLRDLPDGLFTRAQRLTWLEASEIEDEEEKVSRYRELLVRLPPVNRATVKALISHLYCVQCFSDTNQMNVHNLAIVFGPTLFQTDGQDYKAGRVVEDLINHYVVVFSVDEEELRKQREEITAIVKMRVAGTASGTQHAGDFICTVYLEEKKAETEQHIKVPASMTAEELTLEILDRRNVGIREKDYWTCFEVNEREEAERPLHFAEKVLPILHGLGTDSHLVVKKHQAMEAMLLYLASRVGDTKHGMMKFREDRSLLGLGLPSGGFHDRYFILNSSCLRLYKEVRSHRPEKEWPIKSLKVYLGVKKKLRPPTCWGFTVVHETEKHEKQQWYLCCDTQMELREWFATFLFVQHDGLVWPSEPSRVSRAVPEVRLGSVSLIPLRGSENEMRRSVAAFTADPLSLLRNV

SEQ ID NO: 883365 - protein, 783 aa, Homo sapiens
EDGLLQAWALCAAVTTTDLAETQALLGCGAGINCFSGDPEAPTPLALAEQAGQTLQMEFLRNNRTTEVPRLDSMKPLEKHYSVVLPTVSHSGFLYKTASAGKLLQDRRAREEFSRRWCVLGDGVLSYFENERAVTPNGEIRASEIVCLAVPPPDTHGFEHTFEVYTEGERLYLFGLESAEQAHEWVKCIAKAFVPPLAEDLLARDFERLGRLPYKAGLSLQRAQEGWFSLSGSELRAVFPEGPCEEPLQLRKLQELSIQGDSENQVLVLVERRRTLYIQGERRLDFMGWLGAIQKAAASMGDTLSEQQLGDSDIPVIVYRCVDYITQCGLTSEGIYRKCGQTSKTQRLLESLRQDARSVHLKEGEQHVDDVSSALKRFLRDLPDGLFTRAQRLTWLEASEIEDEEEKVSRYRELLVRLPPVNRATVKALISHLYCVQCFSDTNQMNVHNLAIVFGPTLFQTDGQDYKAGRVVEDLINHYVVVFSVDEEELRKQREEITAIVKMRVAGTASGTQHAGDFICTVYLEEKKAETEQHIKVPASMTAEELTLEILDRRNVGIREKDYWTCFEVNEREEAERPLHFAEKVLPILHGLGTDSHLVVKKHQAMEAMLLYLASRVGDTKHGMMKFREDRSLLGLGLPSGGFHDRYFILNSSCLRLYKEVRSHRPEKEWPIKSLKVYLGVKKKLRPPTCWGFTVVHETEKHEKQQWYLCCDTQMELREWFATFLFVQHDGLVWPSEPSRVSRAVPEVRLGSVSLIPLRGSENEMRRSVAAFTADPLSLLRNV

SEQ ID NO: 883366 - protein, 590 aa, Homo sapiens
RGRAVFPEGPCEEPLRENQPSWARCEAQASFVGWFSLSGSELRAVFPEGPCEEPLQLRKLQELSIQGDSENQVLVLVERRRTLYIQGERRLDFMGWLGAIQKAAASMGDTLSEQQLGDSDIPVIVYRCVDYITQCGLTSEGIYRKCGQTSKTQRLLESLRQDARSVHLKEGEQHVDDVSSALKRFLRDLPDGLFTRAQRLTWLEASEIEDEEEKVSRYRELLVRLPPVNRATVKALISHLYCVQCFSDTNQMNVHNLAIVFGPTLFQTDGQDYKAGRVVEDLINHYVVVFSVDEEELRKQREEITAIVKMRVAGTASGTQHAGDFICTVYLEEKKAETEQHIKVPASMTAEELTLEILDRRNVGIREKDYWTCFEVNEREEAERPLHFAEKVLPILHGLGTDSHLVVKKHQAMEAMLLYLASRVGDTKHGMMKFREDRSLLGLGLPSGGFHDRYFILNSSCLRLYKEVRSHRPEKEWPIKSLKVYLGVKKKLRPPTCWGFTVVHETEKHEKQQWYLCCDTQMELREWFATFLFVQHDGLVWPSEPSRVSRAVPEVRLGSVSLIPLRGSENEMRRSVAAFTADPLSLLRNV

SEQ ID NO: 883367 - protein, 1192 aa, Homo sapiens
MCYFESDFSHSCCKVHLLASGHLGFFLPRTWLILTLSVASEGWGGPGTCPPTPGHLLVVPLPLRSYIYQKRWVRLDTDHLRYFDSNKDAYSKRFISVACISHVAAIGDQKFEVITNNRTFAFRAESDVERKEWMQALQQAMAEQRARARLSSAYLLGVPGSEQPDRAGSLELRGFKNKLYVAVVGDKVQLYKNLEEYHLGIGITFIDMSVGNVKEVDRRSFDLTTPYRIFSFSADSELEKEQWLEAMQGAIAEALSTSEVAERIWAAAPNRFCADCGAPQPDWASINLCVVICKRCAGEHRGLGAGVSKVRSLKMDRKVWTETLIELFLQLGNGAGNRFWAANVPPSEALQPSSSPSTRRCHLEAKYREGKYRRYHPLFGNQEELDKALCAAVTTTDLAETQALLGCGAGINCFSGDPEAPTPLALAEQAGQTLQMEFLRNNRTTEVPRLDSMKPLEKHYSVVLPTVSHSGFLYKTASAGKLLQDRRAREEFSRRWCVLGDGVLSYFENERAVTPNGEIRASEIVCLAVPPPDTHGFEHTFEVYTEGERLYLFGLESAEQAHEWVKCIAKAFVPPLAEDLLARDFERLGRLPYKAGLSLQRAQEGWFSLSGSELRAVFPEGPCEEPLQLRKLQELSIQGDSENQVLVLVERRRTLYIQGERRLDFMGWLGAIQKAAASMGDTLSEQQLGDSDIPVIVYRCVDYITQCGLTSEGIYRKCGQTSKTQRLLESLRQDARSVHLKEGEQHVDDVSSALKRFLRDLPDGLFTRAQRLTWLEASEIEDEEEKVSRYRELLVRLPPVNRATVKALISHLYCVQCFSDTNQMNVHNLAIVFGPTLFQTDGQDYKAGRVVEDLINHYVVVFSVLSLASGQWRAGVILADDGDHLSLPLAPSQVDEEELRKQREEITAIVKMRVAGTASGTQHAGDFICTVYLEEKKAETEQHIKVPASMTAEELTLEILDRRNVGIREKDYWTCFEVNEREEAERPLHFAEKVLPILHGLGTDSHLVVKKHQAMEAMLLYLASRVGDTKHGMMKFREDRSLLGLGLPSGGFHDRYFILNSSCLRLYKEVRSHRPEKEWPIKSLKVYLGVKKKLRPPTCWGFTVVHETEKHEKQQWYLCCDTQMELREWFATFLFVQHDGLVWPSEPSRVSRAVPEVRLGSVSLIPLRGSENEMRRSVAAFTADPLSLLRNV

SEQ ID NO: 883368 - protein, 1210 aa, Homo sapiens; identical to SEQ ID NO: 883359

SEQ ID NO: 883369 - protein, 493 aa, Homo sapiens
MPCKTCNRCMGDTLSEQQLGDSDIPVIVYRCVDYITQCGLTSEGIYRKCGQTSKTQRLLESLRQDARSVHLKEGEQHVDDVSSALKRFLRDLPDGLFTRAQRLTWLEASEIEDEEEKVSRYRELLVRLPPVNRATVKALISHLYCVQCFSDTNQMNVHNLAIVFGPTLFQTDGQDYKAGRVVEDLINHYVVVFSVDEEELRKQREEITAIVKMRVAGTASGTQHAGDFICTVYLEEKKAETEQHIKVPASMTAEELTLEILDRRNVGIREKDYWTCFEVNEREEAERPLHFAEKVLPILHGLGTDSHLVVKKHQAMEAMLLYLASRVGDTKHGMMKFREDRSLLGLGLPSGGFHDRYFILNSSCLRLYKEVRSHRPEKEWPIKSLKVYLGVKKKLRPPTCWGFTVVHETEKHEKQQWYLCCDTQMELREWFATFLFVQHDGLVWPSEPSRVSRAVPEVRLGSVSLIPLRGSENEMRRSVAAFTADPLSLLRNV

SEQ ID NO: 883370 - protein, 1210 aa, Homo sapiens; identical to SEQ ID NO: 883359

SEQ ID NO: 883371 - protein, 1086 aa, Homo sapiens
MCYFESDFSHSCCKVHLLASGHLGFFLPRTWLILTLSVASEGWGGPGTCPPTPGHLLVVPLPLRSYIYQKRWVRLDTDHLRYFDSNKDAYSKRFISVACISHVAAIGDQKFEVITNNRTFAFRAESDVERKEWMQALQQAMAEQRARARLSSAYLLGVPGSEQPDRAGSLELRGFKNKLYVAVVGDKVQLYKNLEEYHLGIGITFIDMSVGNVKEVDRRSFDLTTPYRIFSFSADSELEKEQWLEAMQGAIAEALSTSEVAERIWAAAPNRFCADCGAPQPDWASINLCVVICKRCAGEHRGLGAGVSKVRSLKMDRKVWTETLIELFLQLGNGAGNRFWAANVPPSEALQPSSSPSTRRCHLEAKYREGKYRRYHPLFGNQEELDKALCAAVTTTDLAETQALLGCGAGINCFSGDPEAPTPLALAEQAGQTLQMEFLRNNRTTEVPRLDSMKPLEKHYSVVLPTVSHSGFLYKTASAGKLLQDRRAREEFSRRWCVLGDGVLSYFENERAVTPNGEIRASEIVCLAVPPPDTHGFEHTFEVYTEGERLYLFGLESAEQAHEWVKCIAKAFVPPLAEDLLARDFERLGRLPYKAGLSLQRAQEGWFSLSGSELRAVFPEGPCEEPLQLRKLQELSIQGDSENQVLVLVERRRTLYIQGERRLDFMGWLGAIQKAAASMGDTLSEQQLGDSDIPVIVYRCVDYITQCGLTSEGIYRKCGQTSKTQRLLESLRQDARSVHLKEGEQHVDDVSSALKRFLRDLPDGLFTRAQRLTWLEASEIEDEEEKVSRYRELLVRLPPVNRATVKALISHLYCVQCFSDTNQMNVHNLAIVFGPTLFQTDGQDYKAGRVVEDLINHYVVVFSVDEEELRKQREEITAIVKMRVAGTASGTQHAGDFICTVYLEEKKAETEQHIKVPASMTAEELTLEILDRRNVGIREKDYWTCFEVNEREEAERPLHFAEKVLPILHGLGTDSHLVVKKHQAMEAMLLYLASRVGDTKHGMMKFREDRSLLGLGLPSGGFHDRYFILNSSCLRLYKEVRSHRPEKEWPIKSLKVYLGVKKKLRPPTCWGFTVVHETEKHEKQQW

SEQ ID NO: 883372 - protein, 411 aa, Homo sapiens
PYPFQHLISLGGVIVTGVSDLIYLSHPEIEDEEEKVSRYRELLVRLPPVNRATVKALISHLYCVQCFSDTNQMNVHNLAIVFGPTLFQTDGQDYKAGRVVEDLINHYVVVFSVDEEELRKQREEITAIVKMRVAGTASGTQHAGDFICTVYLEEKKAETEQHIKVPASMTAEELTLEILDRRNVGIREKDYWTCFEVNEREEAERPLHFAEKVLPILHGLGTDSHLVVKKHQAMEAMLLYLASRVGDTKHGMMKFREDRSLLGLGLPSGGFHDRYFILNSSCLRLYKEVRSHRPEKEWPIKSLKVYLGVKKKLRPPTCWGFTVVHETEKHEKQQWYLCCDTQMELREWFATFLFVQHDGLVWPSEPSRVSRAVPEVRLGSVSLIPLRGSENEMRRSVAAFTADPLSLLRNV

SEQ ID NO: 883373 - protein, 1210 aa, Homo sapiens; identical to SEQ ID NO: 883359

SEQ ID NO: 883374 - protein, 1153 aa, Homo sapiens
MCYFESDFSHSCCKVHLLASGHLGFFLPRTWLILTLSVASEGWGGPGTCPPTPGHLLVVPLPLRSYIYQKRWVRLDTDHLRYFDSNKDAYSKRFISVACISHVAAIGDQKFEVITNNRTFAFRAESDVERKEWMQALQQAMAEQRARARLSSAYLLGVPGSEQPDRAGSLELRGFKNKLYVAVVGDKVQLYKNLEEYHLGIGITFIDMSVGNVKEVDRRSFDLTTPYRIFSFSADSELEKEQWLEAMQGAIAEALSTSEVAERIWAAAPNRFCADCGAPQPDWASINLCVVICKRCAGEHRGLGAGVSKVRSLKMDRKVWTETLIELFLQLGNGAGNRFWAANVPPSEALQPSSSPSTRRCHLEAKYREGKYRRYHPLFGNQEELDKALCAAVTTTDLAETQALLGCGAGINCFSGDPEAPTPLALAEQAGQTLQMEFLRNNRTTEVPRLDSMKPLEKHYSVVLPTVSHSGFLYKTASAGKLLQDRRAREEFSRRWCVLGDGVLSYFENERAVTPNGEIRASEIVCLAVPPPDTHGFEHTFEVYTEGERLYLFGLESAEQAHEWVKCIAKAFVPPLAEDLLARDFERLGRLPYKAGLSLQRAQEGWFSLSGSELRAVFPEGPCEEPLQLRKLQELSIQGDSENQVLVLVERRRTLYIQGERRLDFMGWLGAIQKAAASMGDTLSEQQLGDSDIPVIVYRCVDYITQCGLTSEGIYRKCGQTSKTQRLLESLRQDARSVHLKEGEQHVDDVSSALKRFLRDLPDGLFTRAQRLTWLEASEIEDEEEKVSRYRELLVRLPPVNRATVKALISHLYCVQCFSDTNQMNVHNLAIVFGPTLFQTDGQDYKAGRVVEDLINHYVVVFSVDEEELRKQREEITAIVKMRVAGTASGTQHAGDFICTVYLEEKKAETEQHIKVPASMTAEELTLEILDRRNVGIREKDYWTCFEVNEREEAERPLHFAEKVLPILHGLGTDSHLVVKKHQAMEAMLLYLASRVGDTKHGMMKFREDRSLLGLGLPSGGFHDRYFILNSSCLRLYKEVRSHRPEKEWPIKSLKVYLGVKKKLRPPTCWGFTVVHETEKHEKQQWYLCCDTQMELREWFATFLFVQHDGLVWPSEPSRVSRAVPEVRLGSVSLIPLRGTSAQRLSTGAHPWL

SEQ ID NO: 883375 - protein, 345 aa, Homo sapiens
LYRTEVTASGTLAIVFGPTLFQTDGQDYKAGRVVEDLINHYVVVFSVDEEELRKQREEITAIVKMRVAGTASGTQHAGDFICTVYLEEKKAETEQHIKVPASMTAEELTLEILDRRNVGIREKDYWTCFEVNEREEAERPLHFAEKVLPILHGLGTDSHLVVKKHQAMEAMLLYLASRVGDTKHGMMKFREDRSLLGLGLPSGGFHDRYFILNSSCLRLYKEVRSHRPEKEWPIKSLKVYLGVKKKLRPPTCWGFTVVHETEKHEKQQWYLCCDTQMELREWFATFLFVQHDGLVWPSEPSRVSRAVPEVRLGSVSLIPLRGSENEMRRSVAAFTADPLSLLRNV

SEQ ID NO: 883376 - protein, 245 aa, Homo sapiens
MYSSPSTYNLIQGDTSSPPVCRASGWCWDSLLQMSQLGRLPRRLRVDCLILLQGDRPWGPRAGRLVGLDCEQGGLYQEGFLEEAPCAGMQRGLGSWKRELPSRESGPSALSADYKCPLLLALPQSHRPEKEWPIKSLKVYLGVKKKLRPPTCWGFTVVHETEKHEKQQWYLCCDTQMELREWFATFLFVQHDGLVWPSEPSRVSRAVPEVRLGSVSLIPLRGSENEMRRSVAAFTADPLSLLRNV

SEQ ID NO: 883377 - protein, 245 aa, Homo sapiens; identical to SEQ ID NO: 883376

SEQ ID NO: 883378 - protein, 1023 aa, Homo sapiens
MCYFESDFSHSCCKVHLLASGHLGFFLPRTWLILTLSVASEGWGGPGTCPPTPGHLLVVPLPLRSYIYQKRWVRLDTDHLRYFDSNKDAYSKRFISVACISHVAAIGDQKFEVITNNRTFAFRAESDVERKEWMQALQQAMAEQRARARLSSAYLLGVPGSEQPDRAGSLELRGFKNKLYVAVVGDKVQLYKNLEEYHLGIGITFIDMSVGNVKEVDRRSFDLTTPYRIFSFSADSELEKEQWLEAMQGAIAEALSTSEVAERIWAAAPNRFCADCGAPQPDWASINLCVVICKRCAGEHRGLGAGVSKVRSLKMDRKVWTETLIELFLQLGNGAGNRFWAANVPPSEALQPSSSPSTRRCHLEAKYREGKYRRYHPLFGNQEELDKALCAAVTTTDLAETQALLGCGAGINCFSGDPEAPTPLALAEQAGQTLQMEFLRNNRTTEVPRLDSMKPLEKHYSVVLPTVSHSGFLYKTASAGKLLQDRRAREEFSRRWCVLGDGVLSYFENERAVTPNGEIRASEIVCLAVPPPDTHGFEHTFEVYTEGERLYLFGLESAEQAHEWVKCIAKAFVPPLAEDLLARDFERLGRLPYKAGLSLQRAQEGWFSLSGSELRAVFPEGPCEEPLQLRKLQELSIQGDSENQVLVLVERRRTLYIQGERRLDFMGWLGAIQKAAASMGDTLSEQQLGDSDIPVIVYRCVDYITQCGLTSEGIYRKCGQTSKTQRLLESLRQDARSVHLKEGEQHVDDVSSALKRFLRDLPDGLFTRAQRLTWLEASEIEDEEEKVSRYRELLVRLPPVNRATVKALISHLYCVQCFSDTNQMNVHNLAIVFGPTLFQTDGQDYKAGRVVEDLINHYVVVFSVDEEELRKQREEITAIVKMRVAGTASGTQHAGDFICTVYLEEKKAETEQHIKVPASMTAEELTLEILDRRNVGIREKDYWTCFEVNEREEAERPLHFAEKVLPILLTPPGSLSLWGWRDGHKSGTWEDHHPFRGVRPWGPAGREPPAPPNKLQNSRKRVL

SEQ ID NO: 883379 - protein, 1067 aa, Homo sapiens
MCYFESDFSHSCCKVHLLASGHLGFFLPRTWLILTLSVASEGWGGPGTCPPTPGHLLVVPLPLRSYIYQKRWVRLDTDHLRYFDSNKDAYSKRFISVACISHVAAIGDQKFEVITNNRTFAFRAESDVERKEWMQALQQAMAEQRARARLSSAYLLGVPGSEQPDRAGSLELRGFKNKLYVAVVGDKVQLYKNLEEYHLGIGITFIDMSVGNVKEVDRRSFDLTTPYRIFSFSADSELEKEQWLEAMQGAIAEALSTSEVAERIWAAAPNRFCADCGAPQPDWASINLCVVICKRCAGEHRGLGAGVSKVRSLKMDRKVWTETLIELFLQLGNGAGNRFWAANVPPSEALQPSSSPSTRRCHLEAKYREGKYRRYHPLFGNQEELDKALCAAVTTTDLAETQALLGCGAGINCFSGDPEAPTPLALAEQAGQTLQMEFLRNNRTTEVPRLDSMKPLEKHYSVVLPTVSHSGFLYKTASAGKLLQDRRAREEFSRRWCVLGDGVLSYFENERAVTPNGEIRASEIVCLAVPPPDTHGFEHTFEVYTEGERLYLFGLESAEQAHEWVKCIAKAFVPPLAEDLLARDFERLGRLPYKAGLSLQRAQEGWFSLSGSELRAVFPEGPCEEPLQLRKLQELSIQGDSENQVLVLVERRRTLYIQGERRLDFMGWLGAIQKAAASMGDTLSEQQLGDSDIPVIVYRCVDYITQCGLTSEGIYRKCGQTSKTQRLLESLRQDARSVHLKEGEQHVDDVSSALKRFLRDLPDGLFTRAQRLTWLEASEIEDEEEKVSRYRELLVRLPPVNRATVKALISHLYCVQCFSDTNQMNVHNLAIVFGPTLFQTDGQDYKAGRVVEDLINHYVVVFSVDEEELRKQREEITAIVKMRVAGTASGTQHAGDFICTVYLEEKKAETEQHIKVPASMTAEELTLEILDRRNVGIREKDYWTCFEVNEREEAERPLHFAEKVLPILHGLGTDSHLVVKKHQAMEAMLLYLASRVGDTKHGMMKFREDRSLLGLGLPSGGFHDRYFILNSSCLRLYKEVRALRMAQQWGRTVDSQDPSCCGPGRPL

SEQ ID NO: 883380 - protein, 956 aa, Homo sapiens
MCYFESDFSHSCCKVHLLASGHLGFFLPRTWLILTLSVASEGWGGPGTCPPTPGHLLVVPLPLRSYIYQKRWVRLDTDHLRYFDSNKDAYSKRFISVACISHVAAIGDQKFEVITNNRTFAFRAESDVERKEWMQALQQAMAEQRARARLSSAYLLGVPGSEQPDRAGSLELRGFKNKLYVAVVGDKVQLYKNLEEYHLGIGITFIDMSVGNVKEVDRRSFDLTTPYRIFSFSADSELEKEQWLEAMQGAIAEALSTSEVAERIWAAAPNRFCADCGAPQPDWASINLCVVICKRCAGEHRGLGAGVSKVRSLKMDRKVWTETLIELFLQLGNGAGNRFWAANVPPSEALQPSSSPSTRRCHLEAKYREGKYRRYHPLFGNQEELDKALCAAVTTTDLAETQALLGCGAGINCFSGDPEAPTPLALAEQAGQTLQMEFLRNNRTTEVPRLDSMKPLEKHYSVVLPTVSHSGFLYKTASAGKLLQDRRAREEFSRRWCVLGDGVLSYFENERAVTPNGEIRASEIVCLAVPPPDTHGFEHTFEVYTEGERLYLFGLESAEQAHEWVKCIAKAFVPPLAEDLLARDFERLGRLPYKAGLSLQRAQEGWFSLSGSELRAVFPEGPCEEPLQLRKLQELSIQGDSENQVLVLVERRRTLYIQGERRLDFMGWLGAIQKAAASMGDTLSEQQLGDSDIPVIVYRCVDYITQCGLTSEGIYRKCGQTSKTQRLLESLRQDARSVHLKEGEQHVDDVSSALKRFLRDLPDGLFTRAQRLTWLEASEIEDEEEKVSRYRELLVRLPPVNRATVKALISHLYCVQCFSDTNQMNVHNLAIVFGPTLFQTDGQDYKAGRVVEDLINHYVVVFSVDEEELRKQREEITAIVKMRVAGTASGTQHAGDFICTVYLEEKKAETEQHIKVPASMTAEELTLEILDRRNVGIREKDYWTCFEVNEREEAGG

SEQ ID NO: 883381 - protein, 394 aa, Homo sapiens
MCYFESDFSHSCCKVHLLASGHLGFFLPRTWLILTLSVASEGWGGPGTCPPTPGHLLVVPLPLRSYIYQKRWVRLDTDHLRYFDSNKDAYSKRFISVACISHVAAIGDQKFEVITNNRTFAFRAESDVERKEWMQALQQAMAEQRARARLSSAYLLGVPGSEQPDRAGSLELRGFKNKLYVAVVGDKVQLYKNLEEYHLGIGITFIDMSVGNVKEVDRRSFDLTTPYRIFSFSADSELEKEQWLEAMQGAIAEALSTSEVAERIWAAAPNRFCADCGAPQPDWASINLCVVICKRCAGEHRGLGAGVSKVRSLKMDRKVWTETLIEVGMPLLATDTWGLPHSTAVWVSQPPPYLSDHSTLELEETLCDNLVGGDFGKAIFGKVSKLASELRMFL

SEQ ID NO: 883382 - protein, 432 aa, Homo sapiens
  misc_feature (390)..(390): Xaa can be any naturally occurring amino acid
  misc_feature (399)..(399): Xaa can be any naturally occurring amino acid
MCYFESDFSHSCCKVHLLASGHLGFFLPRTWLILTLSVASEGWGGPGTCPPTPGHLLVVPLPLRSYIYQKRWVRLDTDHLRYFDSNKDAYSKRFISVACISHVAAIGDQKFEVITNNRTFAFRAESDVERKEWMQALQQAMAEQRARARLSSAYLLGVPGSEQPDRAGSLELRGFKNKLYVAVVGDKVQLYKNLEEYHLGIGITFIDMSVGNVKEVDRRSFDLTTPYRIFSFSADSELEKEQWLEAMQGAIAEALSTSEVAERIWAAAPNRFCADCGAPQPDWASINLCVVICKRCAGEHRGLGAGVSKVRSLKMDRKVWTETLIELFLQLGNGAGNRFWAANVPPSEALQPSSSPSTRRCHLEAKYREGKYRRYHPLFGNQEELDKPCXLPSVIMGLXPILGKDNTIEHLLPLFLAQLKDECPEVRLNIIS

SEQ ID NO: 883383 - protein, 187 aa, Homo sapiens
APGRGWCSLCPLQSHPPASRVGDTKHGMMKFREDRSLLGLGLPSGGFHDRYFILNSSCLRLYKEVRSHRPEKEWPIKSLKVYLGVKKKLRPPTCWGFTVVHETEKHEKQQWYLCCDTQMELREWFATFLFVQHDGLVWPSEPSRVSRAVPEVRLGSVSLIPLRGSENEMRRSVAAFTADPLSLLRNV

SEQ ID NO: 883384 - protein, 1237 aa, Homo sapiens
MCYFESDFSHSCCKVHLLASGHLGFFLPRTWLILTLSVASEGWGGPGTCPPTPGHLLVVPLPLRSYIYQKRWVRLDTDHLRYFDSNKDAYSKRFISVACISHVAAIGDQKFEVITNNRTFAFRAESDVERKEWMQALQQAMAEQRARARLSSAYLLGVPGSEQPDRAGSLELRGFKNKLYVAVVGDKVQLYKNLEEYHLGIGITFIDMSVGNVKEVDRRSFDLTTPYRIFSFSADSELEKEQWLEAMQGAIAEALSTSEVAERIWAAAPNRFCADCGAPQPDWASINLCVVICKRCAGEHRGLGAGVSKVRSLKMDRKVWTETLIELFLQLGNGAGNRFWAANVPPSEALQPSSSPSTRRCHLEAKYREGKYRRYHPLFGNQEELDKALCAAVTTTDLAETQALLGCGAGINCFSGDPEAPTPLALAEQAGQTLQMEFLRNNRTTEVPRLDSMKPLEKHYSVVLPTVSHSGFLYKTASAGKLLQDRRAREEFSRRWCVLGDGVLSYFENERAVTPNGEIRASEIVCLAVPPPDTHGFEHTFEVYTEGERLYLFGLESAEQAHEWVKCIAKAFVPPLAEDLLARDFERLGRLPYKAGLSLQRAQEGWFSLSGSELRAVFPEGPCEEPLQLRKLQELSIQGDSENQVLVLVERRRTLYIQGERRLDFMGWLGAIQKAAASMGDTLSEQQLGDSDIPVIVYRCVDYITQCGLTSEGIYRKCGQTSKTQRLLESLRQDARSVHLKEGEQHVDDVSSALKRFLRDLPDGLFTRAQRLTWLEASEIEDEEEKVSRYRELLVRLPPVNRATVKALISHLYCVQCFSDTNQMNVHNLAIVFGPTLFQTDGQDYKAGRVVEDLINHYVVVFSVDEEELRKQREEITAIVKMRVAGTASGTQHAGDFICTVYLEEKKAETEQHIKVPASMTAEELTLEILDRRNVGIREKDYWTCFEVNEREEAERPLHFAEKVLPILHGLGTDSHLVVKKHQAMEAMLLYLASRVGDTKHGMMKFREDRSLLGLGLPSGGFHDRYFILNSSCLRLYKEVRSHRPEKEWPIKSLKVYLGVKKKLRPPTCWGFTVVHETEKHEKQQWYLCCDTQMELREWFATFLFVQHDGLVWPSEPSRVSRAVPEVRLGSVSLIPLRGSENEMRRSVAAFTADPLSVSGSPCLWAGGWGPGWVPAFYSTVDDCPDCPPRLPSGPLPPALVGALIGLFGSHHSKEPLLPGPGSWESPLPGPGSWEPG

SEQ ID NO: 883385 - protein, 1086 aa, Homo sapiens
MCYFESDFSHSCCKVHLLASGHLGFFLPRTWLILTLSVASEGWGGPGTCPPTPGHLLVVPLPLRSYIYQKRWVRLDTDHLRYFDSNKDAYSKRFISVACISHVAAIGDQKFEVITNNRTFAFRAESDVERKEWMQALQQAMAEQRARARLSSAYLLGVPGSEQPDRAGSLELRGFKNKLYVAVVGDKVQLYKNLEEYHLGIGITFIDMSVGNVKEVDRRSFDLTTPYRIFSFSADSELEKEQWLEAMQGAIAEALSTSEVAERIWAAAPNRFCADCGAPQPDWASINLCVVICKRCAGEHRGLGAGVSKVRSLKMDRKVWTETLIELFLQLGNGAGNRFWAANVPPSEALQPSSSPSTRRCHLEAKYREGKYRRYHPLFGNQEELDKALCAAVTTTDLAETQALLGCGAGINCFSGDPEAPTPLALAEQAGQTLQMEFLRNNRTTEVPRLDSMKPLEKHYSVVLPTVSHSGFLYKTASAGKLLQDRRAREEFSRRWCVLGDGVLSYFENERAVTPNGEIRASEIVCLAVPPPDTHGFEHTFEVYTEGERLYLFGLESAEQAHEWVKCIAKAFVPPLAEDLLARDFERLGRLPYKAGLSLQRAQEGWFSLSGSELRAVFPEGPCEEPLQLRKLQELSIQGDSENQVLVLVERRRTLYIQGERRLDFMGWLGAIQKAAASMGDTLSEQQLGDSDIPVIVYRCVDYITQCGLTSEGIYRKCGQTSKTQRLLESLRQDARSVHLKEGEQHVDDVSSALKRFLRDLPDGLFTRAQRLTWLEASEIEDEEEKVSRYRELLVRLPPVNRATVKALISHLYCVQCFSDTNQMNVHNLAIVFGPTLFQTDGQDYKAGRVVEDLINHYVVVFSVDEEELRKQREEITAIVKMRVAGTASGTQHAGDFICTVYLEEKKAETEQHIKVPASMTAEELTLEILDRRNVGIREKDYWTCFEVNEREEAERPLHFAEKVLPILHGLGTDSHLVVKKHQAMEAMLLYLASRVGDTKHGMMKFREDRSLLGLGLPSGGFHDRYFILNSSCLRLYKEVRVSGPAGFCPRVGTCTPECAQRFPLVCKWKYSRYRLSGWHSSGGEL

SEQ ID NO: 883386 - protein, 999 aa, Homo sapiens
MCYFESDFSHSCCKVHLLASGHLGFFLPRTWLILTLSVASEGWGGPGTCPPTPGHLLVVPLPLRSYIYQKRWVRLDTDHLRYFDSNKDAYSKRFISVACISHVAAIGDQKFEVITNNRTFAFRAESDVERKEWMQALQQAMAEQRARARLSSAYLLGVPGSEQPDRAGSLELRGFKNKLYVAVVGDKVQLYKNLEEYHLGIGITFIDMSVGNVKEVDRRSFDLTTPYRIFSFSADSELEKEQWLEAMQGAIAEALSTSEVAERIWAAAPNRFCADCGAPQPDWASINLCVVICKRCAGEHRGLGAGVSKVRSLKMDRKVWTETLIELFLQLGNGAGNRFWAANVPPSEALQPSSSPSTRRCHLEAKYREGKYRRYHPLFGNQEELDKALCAAVTTTDLAETQALLGCGAGINCFSGDPEAPTPLALAEQAGQTLQMEFLRNNRTTEVPRLDSMKPLEKHYSVVLPTVSHSGFLYKTASAGKLLQDRRAREEFSRRWCVLGDGVLSYFENERAVTPNGEIRASEIVCLAVPPPDTHGFEHTFEVYTEGERLYLFGLESAEQAHEWVKCIAKAFVPPLAEDLLARDFERLGRLPYKAGLSLQRAQEGWFSLSGSELRAVFPEGPCEEPLQLRKLQELSIQGDSENQVLVLVERRRTLYIQGERRLDFMGWLGAIQKAAASMGDTLSEQQLGDSDIPVIVYRCVDYITQCGLTSEGIYRKCGQTSKTQRLLESLRQDARSVHLKEGEQHVDDVSSALKRFLRDLPDGLFTRAQRLTWLEASEIEDEEEKVSRYRELLVRLPPVNRATVKALISHLYCVQCFSDTNQMNVHNLAIVFGPTLFQTDGQDYKAGRVVEDLINHYVVVFSVDEEELRKQREEITAIVKMRVAGTASGTQHAGDFICTVYLEEKKAETEQHIKVPASMTAEELTLEILDRRNVGIREKDYWTCFEVNEREEAERPLHFAEKVLPILHGLGTDSHLVVKKHQAMEAMLLYLGRWCLQG

SEQ ID NO: 883387 - protein, 191 aa, Homo sapiens
MCYFESDFSHSCCKVHLLASGHLGFFLPRTWLILTLSVASEGWGGPGTCPPTPGHLLVVPLPLRSYIYQKRWVRLDTDHLRYFDSNKDAYSKRFISVACISHVAAIGDQKFEVITNNRTFAFRAESDVERKEWMQALQQAMAEQRARARLSSAYLLGVPGSEQPDRAGSLELRGFKNKLSTTWALASPSST

SEQ ID NO: 883388 - protein, 135 aa, Homo sapiens [sequence omitted]

SEQ ID NO: 883389 - protein, 135 aa, Homo sapiens [sequence omitted]

SEQ ID NO: 883390 - protein, 237 aa, Homo sapiens
MVGVLARGRHPPQSSPICSFPRSSAHREALGREGAEPCQAGAQRAGGFRIKPGARHCLAGPSPAQRSRRSPTTPAGARRRTLPRRLRWLVSDPVLSTRRPANMGRVRTKTVKKAARVIIEKYYTRLGNDFHTNKRVCEEIAIIPSKKLRNKIAGYVTHLMKRIQRGPVRGISIKLQEEERERRDNYVPEVSALDQEIIEVDPDTKEMLKLLDFGSLSNLQVTQPTVGMNFKTPRGPV

SEQ ID NO: 883391 - protein, 135 aa, Homo sapiens [sequence omitted]

SEQ ID NO: 883392 - protein, 135 aa, Homo sapiens [sequence omitted]

SEQ ID NO: 883393 - protein, 202 aa, Homo sapiens
  misc_feature (193)..(193): Xaa can be any naturally occurring amino acid
MVGVLARGRHPPQSSPICSFPRSSAHREALGREGAEPCQAGAQRAGGFRIKPGARHCLAGPSPAQRSRRSPTTPAGARRRTLPRRLRWLVSDPVLSTRRPANMGRVRTKTVKKAARVIIEKYYTRLGNDFHTNKRVCEEIAIIRGPVRGISIKLQEEERERRDNYVPEVSALDQEIIEVDPDTKEMLKLLVLXALGLRSLSP

SEQ ID NO: 883394 - protein, 268 aa, Homo sapiens
MEAGKPEKEGYTTARKRAHTKTQHTRTPTETHQRAHKGDNTHGRDTHKTTRDKTTRQRKKDKEHTREHTKKKRTKENSKATTTHRRKRNRAKDQHATGPPNKAERGSRQSGRSRPPRRTRDEGEKKQTKEEDTNADSTGSQRPTKRPKGEKQKRGRKEEATSEGKNGRRTEEKGGEQGRKRGDGQGGRDGSRRGRRTTQATKPENKQRKQRTTEAHRSNETERNRDKKGKTGDKGEREQKQRIKGERGGKRRERRKEGKKTEEERIRK

SEQ ID NO: 883395 - protein, 137 aa, Homo sapiens
MGRVRTKTVKKAARVIIEKYYTRLGNDFHTNKRVCEEIAIIPSKKLRNKIAGYVTHLMKRIQRGPVRGISIKLQEEERERRDNYVPEVSALDQEIIEVDPDTKEMLKLLVVSVCWIPKVVFSWSKTISRSYYPRSPS

SEQ ID NO: 883396 - protein, 135 aa, Homo sapiens [sequence omitted]

SEQ ID NO: 883397 - protein, 268 aa, Homo sapiens; identical to SEQ ID NO: 883394

SEQ ID NO: 883398 - protein, 135 aa, Homo sapiens [sequence omitted]

SEQ ID NO: 883399 - protein, 135 aa, Homo sapiens [sequence omitted]

SEQ ID NO: 883400 - protein, 135 aa, Homo sapiens [sequence omitted]

SEQ ID NO: 883401 - protein, 424 aa, Homo sapiens
MTQAGRRGPGTPEPRPRTQPMASPRLGTFCCPTRDAATQLVLSFQPRAFHALCLGSGGLRLALGLLQLLPGRRPAGPGSPATSPPASVRILRAAAACDLLGCLGMVIRSTVWLGFPNFVDSVSDMNHTEIWPAAFCVGSAMWIQLLYSACFWWLFCYAVDAYLVIRRSAGLSTILLYHIMAWGLATLLCVEGAAMLYYPSVSRCERGLDHAIPHYVTMYLPLLLVLVANPILFQKTVTAVASLLKGRQGIYTENERRMGAVIKIRFFKIMLVLIICWLSNIINESLLFYLEMQTDINGGSLKPVRTAAKTTWFIMGILNPAQGFLLSLAFYGWTGCSLGFQSPRKEIQWESLTTSAAEGAHPSPLMPHENPASGKVSQVGGQTSDEALSMLSEGSDASTIEIHTASESCNKNEGDPALPTHGDL

SEQ ID NO: 883402 - protein, 424 aa, Homo sapiens; identical to SEQ ID NO: 883401

SEQ ID NO: 883403 - protein, 238 aa, Homo sapiens
MTQAGRRGPGTPEPRPRTQPMASPRLGTFCCPTRDAATQLVLSFQPRAFHALCLGSGGLRLALGLLQLLPGRRPAGPGSPATSPPASVRILRAAAACDLLGCLGMVIRSTVWLGFPNFVDSVSDMNHTEIWPAAFCVGSAMWIQLLYSACFWWLFCYAVDAYLVIRRSAGLSTILLYHIMAWGLATLLCVEGAAMLYYPSVSRGRCGRWNCLKHFLKFTFLSMQPSVAKPRSFQGYIL

SEQ ID NO: 883404 - protein, 241 aa, Homo sapiens
GLLELGGWWQEQALSDPMELYETSPYFYQEPRFYDGENYLPVHLQGFEPPGYERTELTLSPEAPGPLEDKGLGTPEHCPGQCLPWACKVCKRKSVSVDRRRAATLREKRRLKKVNEAFEALKRSTLLNPNQRLPKVEILRSAIQYIERLQALLSSLNQEERDLRYRGGGGPQPGVPSECSSHSASCSPEWGSALEFSANPGDHLLTADPTDAHNLHSLTSIVDSITVEDVSVAFPDETMPN

SEQ ID NO: 883405 - protein, 210 aa, Homo sapiens
MGKILPGFASSLPRGFEPPGYERTELTLSPEAPGPLEDKGLGTPEHCPGQCLPWACKVCKRKSVSVDRRRAATLREKRRLKKVNEAFEALKRSTLLNPNQRLPKVEILRSAIQYIERLQALLSSLNQEERDLRYRGGGGPQPGVPSECSSHSASCSPEWGSALEFSANPGDHLLTADPTDAHNLHSLTSIVDSITVEDVSVAFPDETMPN

SEQ ID NO: 883406 - protein, 291 aa, Homo sapiens
MSCQAFTSADTFIPLNSDASATLPLIMHHSAAECLPVSNHATNVMSTATGLHYSVPSCHYGNQPSTYGVMAGSLTPCLYKFPDHTLSHGFPPIHQPLLAEDPTAADFKQELRRKSKLVEEPIDMDSPEIRELEKFANEFKVRRIKLGYTQTNVGEALAAVHGSEFSQTTICRFENLQLSFKNACKLKAILSKWLEEAEQVGALYNEKVGANERKRKRRTTISIAAKDALERHFGEQNKPSSQEIMRMAEELNLEKEVVRVWFCNRRQREKRVKTSLNQSLFSISKEHLECR

SEQ ID NO: 883407 - protein, 220 aa, Homo sapiens
LPVPSILSLIQTPKCLCTHFSVTTLGNTATGLHYSVPSCHYGNQPSTYGVMAGSLTPCLYKFPDHTLSHGFPPIHQPLLAEDPTAADFKQELRRKSKLVEEPIDMDSPEIRELEKFANEFKVRRIKLGYTQTNVGEALAAVHGSEFSQTTICRFENLQLSFKNACKLKAILSKWLEEAEQVGALYNEKVGANERKRKRRTTISIAAKRLLWTTTPLDNPN

SEQ ID NO: 883408 - protein, 272 aa, Homo sapiens
LPVPSILSLIQTPKCLCTHFSVTTLGNTATGLHYSVPSCHYGNQPSTYGVMAGSLTPCLYKFPDHTLSHGFPPIHQPLLAEDPTAADFKQELRRKSKLVEEPIDMDSPEIRELEKFANEFKVRRIKLGYTQTNVGEALAAVHGSEFSQTTICRFENLQLSFKNACKLKAILSKWLEEAEQVGALYNEKVGANERKRKRRTTISIAAKDALERHFGEQNKPSSQEIMRMAEELNLEKEVVRVWFCNRRQREKRVKTSLNQSLFSISKEHLECR

SEQ ID NO: 883409 - protein, 703 aa, Homo sapiens
MRLPDLRPWTSLLLVDAALLWLLQGPLGTLLPQGLPGLWLEGTLRLGGLWGLLKLRGLLGFVGTLLLPLCLATPLTVSLRALVAGASRAPPARVASAPWSWLLVGYGAAGLSWSLWAVLSPPGAQEKEQDQVNNKVLMWRLLKLSRPDLPLLVAAFFFLVLAVLGETLIPHYSGRVIDILGGDFDPHAFASAIFFMCLFSFGSSLSAGCRGGCFTYTMSRINLRIREQLFSSLLRQDLGFFQETKTGELNSRLSSDTTLMSNWLPLNANVLLRSLVKVVGLYGFMLSISPRLTLLSLLHMPFTIAAEKVYNTRHQEVLREIQDAVARAGQVVREAVGGLQTVRSFGAEEHEVCRYKEALEQCRQLYWRRDLERALYLLVRRVLHLGVQMLMLSCGLQQMQDGELTQGSLLSFMIYQESVGSYVQTLVYIYGDMLSNVGAAEKVFSYMDRQPNLPSPGTLAPTTLQGVVKFQDVSFAYPNRPDRPVLKGLTFTLRPGEVTALVGPNGSGKSTVAALLQNLYQPTGGQVLLDEKPISQYEHCYLHSQVVSVGQEPVLFSGSVRNNIAYGLQSCEDDKVMAAAQAAHADDFIQEMEHGIYTDVGEKGSQLAAGQKQRLAIARALVRDPRVLILDEATSALDVQCEQALQDWNSRGDRTVLVIAHRLQAVQRAHQILVLQEGKLQKLAQLQEGQDLYSRLVQQRLMD

SEQ ID NO: 883410 - protein, 300 aa, Homo sapiens
SALVNYRSDRLGSSARDLPIGGGARLPFLPIPLAAVQVHRLPLSRMDVMDGCQFSPSEYFYDGSCIPSPEGEFGDEFVPRVAAFGAHKAELQGSDEDEHVRAPTGHHQAGHCLMWACKACKRKSTTMDRRKAATMRERRRLKKVNQAFETLKRCTTTNPNQRLPKVEILRNAIRYIESLQELLREQVENYYSLPGQSCSEPTSPTSNCSDGMPECNSPVWSRKSSTFDSIYCPDVSNVYATDKNSLSSLDCLSNIVDRITSSEQPGLPLQDLASLSPVASTDSQPGTPGASSSRLIYHVL

SEQ ID NO: 883411 - protein, 184 aa, Homo sapiens
GVCAAASAFKPGLALSDRAFAAWEPSGAAVSRSPLSPPSRPFASREPAGFRAALADPPGMPRYELALILKAMQRPETAATLKRTIEALMDRGAIVRDLENLGERALPYRISAHSQQHNRGGYFLVDFYAPTAAVESMVEHLSRDIDVIRGNIVKHPLTQELKECEGIVPVPLAEKLYSTKKRKK

SEQ ID NO: 883412 - protein, 184 aa, Homo sapiens; identical to SEQ ID NO: 883411

SEQ ID NO: 883413 - protein, 805 aa, Homo sapiens
MRAVLDTADIAIVALYFILVMCIGFFAMWKSNRSTVSGYFLAGRSMTWVTIGASLFVSNIGSEHFIGLAGSGAASGFAVGAWEFNALLLLQLLGWVFIPIYIRSGVYTMPEYLSKRFGGHRIQVYFAALSLILYIFTKLSVDLYSGALFIQESLGWNLYVSVILLIGMTALLTVTGGLVAVIYTDTLQALLMIIGALTLMIISIMEIGGFEEVKRRYMLASPDVTSILLTYNLSNTNSCNVSPKKEALKMLRNPTDEDVPWPGFILGQTPASVWYWCADQVIVQRVLAAKNIAHAKGSTLMAGFLKLLPMFIIVVPGMISRILFTDDIACINPEHCMLVCGSRAGCSNIAYPRLVMKLVPVGLRGLMMAVMIAALMSDLDSIFNSASTIFTLDVYKLIRKSASSRELMIVGRIFVAFMVVISIAWVPIIVEMQGGQMYLYIQEVADYLTPPVAALFLLAIFWKRCNEQGAFYGGMAGFVLGAVRLILAFAYRAPECDQPDNRPGFIKDIHYMYVATGLFWVTGLITVIVSLLTPPPTKEQIRTTTFWSKKNLVVKENCSPKEEPYQMQEKSILRCSENNETINHIIPNGKSEDSIKGLQPEDVNLLVTCREEGNPVASLGHSEAETPVDAYSNGQAALMGEKERKKETDDGGRYWKFIDWFCGFKSKSLSKRSLRDLMEEEAVCLQMLEETRQVKPETAATLKRTIEALMDRGAIVRDLENLGERALPYRISAHSQQHNRGGYFLVDFYAPTAAVESMVEHLSRDIDVIRGNIVKHPLTQELKECEGIVPVPLAEKLYSTKKRKK

SEQ ID NO: 883414 - protein, 184 aa, Homo sapiens; identical to SEQ ID NO: 883411

SEQ ID NO: 883415 - protein, 718 aa, Homo sapiens
MRAVLDTADIAIVALYFILVMCIGFFAMWKSNRSTVSGYFLAGRSMTWVTIGASLFVSNIGSEHFIGLAGSGAASGFAVGAWEFNALLLLQLLGWVFIPIYIRSGVYTMPEYLSKRFGGHRIQVYFAALSLILYIFTKLSVDLYSGALFIQESLGWNLYVSVILLIGMTALLTVTGGLVAVIYTDTLQALLMIIGALTLMIISIMEIGGFEEVKRRYMLASPDVTSILLTYNLSNTNSCNVSPKKEALKMLRNPTDEDVPWPGFILGQTPASVWYWCADQVIVQRVLAAKNIAHAKGSTLMAGFLKLLPMFIIVVPGMISRILFTDDIACINPEHCMLVCGSRAGCSNIAYPRLVMKLVPVGLRGLMMAVMIAALMSDLDSIFNSASTIFTLDVYKLIRKSASSRELMIVGRIFVAFMVVISIAWVPIIVEMQGGQMYLYIQEVADYLTPPVAALFLLAIFWKRCNEQGAFYGGMAGFVLGAVRLILAFAYRAPECDQPDNRPGFIKDIHYMYVATGLFWVTGLITVIVSLLTPPPTKEQIRTTTFWSKKNLVVKENCSPKEEPYQMQEKSILRCSENNETINHIIPNGKSEDSIKGLQPEDVNLLVTCREEGNPVASLGHSEAETPVDAYSNGQAALMGEKERKKETDDGGRYWKFIDWFCGFKSKSLSKRSLRDLMEEEAVCLQMLEETRQVKVILNIGLFAVCSLGIFMFVYFSL

SEQ ID NO: 883416 - protein, 184 aa, Homo sapiens; identical to SEQ ID NO: 883411

SEQ ID NO: 883417 - protein, 99 aa, Homo sapiens
GVCAAASAFKPGLALSDRAFAAWEPSGAAVSRSPLSPPSRPFASREPAGFRAALADPPGMPRYELALILKAMQRVVYIQSSINKRNTYYSEFDNRTSWQ

SEQ ID NO: 883418 - protein, 249 aa, Homo sapiens
MVDRLANSEANTRRISIVENCFGAAGQPLTIPGRVLIGEGVLTKLCRKKPKARQFFLFNDILVYGNIVIQKKKYNKQHIIPLENVTIDSIKDEGDLRNGWLIKTPTKSFAVYAATATEKSEWMNHINKCVTDLLSKSGKTPSNEHAAVWVPDSEATVCMRCQKAKFTPVNRRHHCRKCGFVVCGPCSEKRFLLPSQSSKPVRICDFCYDLLSAGDMATCQPARSDSYSQSLKSPLNDMSDDDDDDDSSD

SEQ ID NO: 883419 - protein, 249 aa, Homo sapiens; identical to SEQ ID NO: 883418

SEQ ID NO: 883420 - protein, 249 aa, Homo sapiens; identical to SEQ ID NO: 883418

SEQ ID NO: 883421 - protein, 249 aa, Homo sapiens; identical to SEQ ID NO: 883418

SEQ ID NO: 883422 - protein, 249 aa, Homo sapiens; identical to SEQ ID NO: 883418

SEQ ID NO: 883423 - protein, 249 aa, Homo sapiens; identical to SEQ ID NO: 883418

SEQ ID NO: 883424 - protein, 71 aa, Homo sapiens
MHGACQGSQQGDLRAVDGPGQRLWTGLRPPGCSCNKRDTALPQGLCTGCALCLEHLPADPVIAGPVQLAQP

SEQ ID NO: 883425 - protein, 263 aa, Homo sapiens
MTTYSDKGAKPERGRFLHFHSVTFWVGNAKQAASFYCSKMGFEPLAYRGLETGSREVVSHVIKQGKIVFVLSSALNPWNKEMGDHLVKHGDGVKDIAFEVEDCDYIVQKARERGAKIMREPWVEQDKFGKVKFAVLQTYGDTTHTLVEKMNYIGQFLPGYEAPAFMDPLLPKLPKCSLEMIDHIVGNQPDQEMVSASEWCTRNIALCDPLWWPTMKSPSRCPSMSQRLARRSPRSRNMWTITGALGSSTSLSRPKTSSQRFAT

SEQ ID NO: 883426 - protein, 263 aa, Homo sapiens; identical to SEQ ID NO: 883425

SEQ ID NO: 883427 - protein, 393 aa, Homo sapiens
MTTYSDKGAKPERGRFLHFHSVTFWVGNAKQAASFYCSKMGFEPLAYRGLETGSREVVSHVIKQGKIVFVLSSALNPWNKEMGDHLVKHGDGVKDIAFEVEDCDYIVQKARERGAKIMREPWVEQDKFGKVKFAVLQTYGDTTHTLVEKMNYIGQFLPGYEAPAFMDPLLPKLPKCSLEMIDHIVGNQPDQEMVSASEWYLKNLQFHRFWSVDDTQVHTEYSSLRSIVVANYEESIKMPINEPAPGKKKSQIQEYVDYNGGAGVQHIALKTEDIITAIRHLRERGLEFLSVPSTYYKQLREKLKTAKIKVKENIDALEELKILVDYDEKGYLLQIFTKPVQDRPTLFLEVIQRHNHQGFGAGNFNSLFKAFEEEQNLRGNLTNMETNGVVPGM

SEQ ID NO: 883428 - protein, 37 aa, Homo sapiens
TPNSTIIRPYFKASETEKNRHISYTLKVGSLKPGYDR

SEQ ID NO: 883429 - protein, 590 aa, Homo sapiens
TRNTSKYKTFNSKRSSSETSFRIVSWIFLYVLQSSLHKELQTRSLFCTLISSRMSAPKLLSLGCIFFPLLLFQQARAQFPRQCATVEALRSGMCCPDLSPVSGPGTDRCGSSSGRGRCEAVTADSRPHSPQYPHDGRDDREVWPLRFFNRTCHCNGNFSGHNCGTCRPGWRGAACDQRVLIVRRNLLDLSKEEKNHFVRALDMAKRTTHPLFVIATRRSEEILGPDGNTPQFENISIYNYFVWTHYYSVKKTFLGVGQESFGEVDFSHEGPAFLTWHRYHLLRLEKDMQEMLQEPSFSLPYWNFATGKNVCDICTDDLMGSRSNFDSTLISPNSVFSQWRVVCDSLEDYDTLGTLCNSTEDGPIRRNPAGNVARPMVQRLPEPQDVAQCLEVGLFDTPPFYSNSTNSFRNTVEGYSDPTGKYDPAVRSLHNLAHLFLNGTGGQTHLSPNDPIFVLLHTFTDAVFDEWLRRYNADISTFPLENAPIGHNRQYNMVPFWPPVTNTEMFVTAPDNLGYTYEIQWPSREFSVPEIIAIAVVGALLLVALIFGTASYLIRARRSMDEANQPLLTDQYQCYAEEYEKLQNPNQSVV

SEQ ID NO: 883430 - protein, 590 aa, Homo sapiens; identical to SEQ ID NO: 883429

SEQ ID NO: 883431 - protein, 248 aa, Homo sapiens
TRNTSKYKTFNSKRSSSETSFRIVSWIFLYVLQSSLHKELQTRSLFCTLISSRMSAPKLLSLGCIFFPLLLFQQARAQFPRQCATVEALRSGMCCPDLSPVSGPGTDRCGSSSGRGRCEAVTADSRPHSPQYPHDGRDDREVWPLRFFNRTCHCNGNFSGHNCGTCRPGWRGAACDQRVLIVRRNLLDLSKEEKNHFVRALDMAKRTTHPLFVIATRRSEEILGPDGNTPQFENISIYNYFVWTHYWT

SEQ ID NO: 883432 - protein, 590 aa, Homo sapiens; identical to SEQ ID NO: 883429

SEQ ID NO: 883433 - protein, 368 aa, Homo sapiens
TRNTSKYKTFNSKRSSSETSFRIVSWIFLYVLQSSLHKELQTRSLFCTLISSRMSAPKLLSLGCIFFPLLLFQQARAQFPRQCATVEALRSGMCCPDLSPVSGPGTDRCGSSSGRGRCEAVTADSRPHSPQYPHDGRDDREVWPLRFFNRTCHCNGNFSGHNCGTCRPGWRGAACDQRVLIVRRNLLDLSKEEKNHFVRALDMAKRTTHPLFVIATRRSEEILGPDGNTPQFENISIYNYFVWTHYYSVKKTFLGVGQESFGEVDFSHEGPAFLTWHRYHLLRLEKDMQAPRMGQLGEIQLEMWPDQWCNVFLNHRMSLSAWKLVYLTRLLFIPTLQTVSETQWKVTVTPRESMTLLFEVFTIWLIYS

SEQ ID NO: 883434 - protein, 541 aa, Homo sapiens
TRNTSKYKTFNSKRSSSETSFRIVSWIFLYVLQSSLHKELQTRSLFCTLISSRMSAPKLLSLGCIFFPLLLFQQARAQFPRQCATVEALRSGMCCPDLSPVSGPGTDRCGSSSGRGRCEAVTADSRPHSPQYPHDGRDDREVWPLRFFNRTCHCNGNFSGHNCGTCRPGWRGAACDQRVLIVRRNLLDLSKEEKNHFVRALDMAKRTTHPLFVIATRRSEEILGPDGNTPQFENISIYNYFVWTHYYSVKKTFLGVGQESFGEVDFSHEGPAFLTWHRYHLLRLEKDMQEMLQEPSFSLPYWNFATGKNVCDICTDDLMGSRSNFDSTLISPNSVFSQWRVVCDSLEDYDTLGTLCNSTEDGPIRRNPAGNVARPMVQRLPEPQDVAQCLEVGLFDTPPFYSNSTNSFRNTVEGYSDPTGKYDPAVRSLHNLAHLFLNGTGGQTHLSPNDPIFVLLHTFTDAVFDEWLRRYNAGREFSVPEIIAIAVVGALLLVALIFGTASYLIRARRSMDEANQPLLTDQYQCYAEEYEKLQNPNQSVV

SEQ ID NO: 883435 - protein, 240 aa, Homo sapiens [sequence omitted]

SEQ ID NO: 883436 - protein, 379 aa, Homo sapiens
TRNTSKYKTFNSKRSSSETSFRIVSWIFLYVLQSSLHKELQTRSLFCTLISSRMSAPKLLSLGCIFFPLLLFQQARAQFPRQCATVEALRSGMCCPDLSPVSGPGTDRCGSSSGRGRCEAVTADSRPHSPQYPHDGRDDREVWPLRFFNRTCHCNGNFSGHNCGTCRPGWRGAACDQRVLIVRRNLLDLSKEEKNHFVRALDMAKRTTHPLFVIATRRSEEILGPDGNTPQFENISIYNYFVWTHYYSVKKTFLGVGQESFGEVDFSHEGPAFLTWHRYHLLRLEKDMQEMLQEPSFSLPYWNFATGKNVCDICTDDLMGSRSNFDSTLISPNSVFSQWRVVCDSLEDYDTLGTLCNSKFQMIAWSQNFFLDKEIKYVA

SEQ ID NO: 883437 - protein, 1117 aa, Homo sapiens
HEGGVESGIRGWRVLAVAVAAAAGPGDAGGRGRRRSLLVSPAMAALGRPFSGLPLSGGSDFLQPPQPAFPGRAFPPGADGAELAPRPGPRAVPSSPAGSAARGRVSVHCKKKHKREEEEDDDCPVRKKRITEAELCAGPNDWILCAHQDVEGHGVNPSVSGLSIPGILDVICEEMDQTTGEPQCEVARRKLQEIEDRIIDEDEEVEADRNVNHLPSLVLSDTMKTGLKREFDEVFTKKMIESMSRPSMELVLWKPLPELLSDKPKPSSNTKNYTGESQAKHVAAGTAFPQRTELFSEPRPTGMSLYNSLETATSTEEEMELKKPISTLKLSNVRRILCSVMRLFALYRDLKVFETGVIISPPVIWGWDSYFGEPFIDFTFLPRTFVSREKQFSVGLIKGMLVYIVFKDKYRSCMCKGDLNQYVTLSKLFRHLENILLELKKMIKKDAPTTVSCQLSHSLMCRYELFTVVTIYNWGEEGKRAAELKPVAKKFNFLATCNLVINSNSSVDEIADSIVALLFDYENIEKVFSLRLFCLVPLLLLGFPCVIDKPSYSVMFTNELTLIVKRLGGNPSAICLWEKHPLVHLKEVLYQLNPTLITLVIFLKGLSSPPPPPPPPPSRFPFSGAPGARDRSGPLGSEPQRNPGARPRTLEATVTPPGSVGAMSSSGLNSEKVAALIQKLNSDPQFVLAQNVGTTHDLLDICLKRATVQRAQHVFQHAVPQEGKPITNQKSSGRCWIFSCLNVMRLPFMKKLNIEEFEFSQSYLFFWDKVERCYFFLSAFVDTAQRKEPEDGRLVQFLLMNPANDGGQWDMLVNIVEKYGVIPKKCFPESYTTEATRRMNDILNHKMREFCIRLRNLVHSGATKGEISATQDVMMEEIFRVVCICLGNPPETFTWEYRDKDKNYQKIGPITPLEFYREHVKPLFNMEDKICLVNDPRPQHKYNKLYTVEYLSNMVGGRKTLYNNQPIDFLKKMVAASIKDGEAVWFGCDVGKHFNSKLGLSDMNLYDHELVFGVSLKNMNKAERLTFGESLMTHAMTFTAVSEKDDQDGAFTKWRVENSWGEDHGHKGYLCMTDEWFSEYVYEVVVDRKHVPEEVLAVLEQEPIILPAWDPMGALAE

SEQ ID NO: 883438 - protein, 534 aa, Homo sapiens
SPDGADSATRGGSFVPPRTPFRLSSPPPPPPPPPSRFPFSGAPGARDRSGPLGSEPQRNPGARPRTLEATVTPPGSVGAMSSSGLNSEKVAALIQKLNSDPQFVLAQNVGTTHDLLDICLKRATVQRAQHVFQHAVPQEGKPITNQKSSGRCWIFSCLNVMRLPFMKKLNIEEFEFSQSYLFFWDKVERCYFFLSAFVDTAQRKEPEDGRLVQFLLMNPANDGGQWDMLVNIVEKYGVIPKKCFPESYTTEATRRMNDILNHKMREFCIRLRNLVHSGATKGEISATQDVMMEEIFRVVCICLGNPPETFTWEYRDKDKNYQKIGPITPLEFYREHVKPLFNMEDKICLVNDPRPQHKYNKLYTVEYLSNMVGGRKTLYNNQPIDFLKKMVAASIKDGEAVWFGCDVGKHFNSKLGLSDMNLYDHELVFGVSLKNMNKAERLTFGESLMTHAMTFTAVSEKDDQDGAFTKWRVENSWGEDHGHKGYLCMTDEWFSEYVYEVVVDRKHVPEEVLAVLEQEPIILPAWDPMGALAE

SEQ ID NO: 883439 - protein, 1101 aa, Homo sapiens
HEGGVESGIRGWRVLAVAVAAAAGPGDAGGRGRRRSLLVSPAMAALGRPFSGLPLSGGSDFLQPPQPAFPGRAFPPGADGAELAPRPGPRAVPSSPAGSAARGRVSVHCKKKHKREEEEDDDCPVRKKRITEAELCAGPNDWILCAHQDVEGHGVNPSVSGLSIPGILDVICEEMDQTTGEPQCEVARRKLQEIEDRIIDEDEEVEADRNVNHLPSLVLSDTMKTGLKREFDEVFTKKMIESMSRPSMELVLWKPLPELLSDKPKPSSNTKNYTGESQAKHVAAGTAFPQRTELFSEPRPTGMSLYNSLETATSTEEEMELKKPISTLKLSNVRRILCSVMRLFALYRDLKVFETGVIISPPVIWGWDSYFGEPFIDFTFLPRTFVSREKQFSVGLIKGMLVYIVFKDKYRSCMCKGDLNQYVTLSKLFRHLENILLELKKMIKKDAPTTVSCQLSHSLMCRYELFTVVTIYNWGEEGKRAAELKPVAKKFNFLATCNLVINSNSSVDEIADSIVALLFDYENIEKVFSLRLFCLVPLLLLGFPCVIDKPSYSVMFTNELTLIVKRLGGNPSAICLWEKHPLVHLKEVLYQLNPTLITLVIFLKRPQLPAAAAAAAAEPVSFFRRSGCERQVGPPRQRAAAQSRRSPKDPGSYRYPAGQRGRHEQLGTEFGEGSCSDTETEFRPPVRTCPECRDHPRPAGHLSEAGHGAARAACVPARRAPGGQANHQPEELRAMLDLFLSECYEASIHEKVKVERCYFFLSAFVDTAQRKEPEDGRLVQFLLMNPANDGGQWDMLVNIVEKYGVIPKKCFPESYTTEATRRMNDILNHKMREFCIRLRNLVHSGATKGEISATQDVMMEEIFRVVCICLGNPPETFTWEYRDKDKNYQKIGPITPLEFYREHVKPLFNMEDKICLVNDPRPQHKYNKLYTVEYLSNMVGGRKTLYNNQPIDFLKKMVAASIKDGEAVWFGCDVGKHFNSKLGLSDMNLYDHELVFGVSLKNMNKAERLTFGESLMTHAMTFTAVSEKDDQDGAFTKWRVENSWGEDHGHKGYLCMTDEWFSEYVYEVVVDRKHVPEEVLAVLEQEPIILPAWDPMGALAE

SEQ ID NO: 883440 - protein, 321 aa, Homo sapiens
HEGGVESGIRGWRVLAVAVAAAAGPGDAGGRGRRRSLLVSPAMAALGRPFSGLPLSGGSDFLQPPQPAFPGRAFPPGADGAELAPRPGPRAVPSSPAGSAARGRVSVHCKKKHKREEEEDDDCPVRKKRITEAELCAGPNDWILCAHQDVEGHGVNPSVSGLSIPGILDVICEEMDQTTGEPQCEVARRKLQEIEDRIIDEDEEVEADRNVNHLPSLVLSDTMKTGLKREFDEVFTKKMIESMSRPSMELVLWKPLPELLSDKPKPSSNTKNYTGESQAKHVAAGTAFPQRTELFSEPRPTGMSLYNSLETATSTEEEMEL

SEQ ID NO: 883441 - protein, 271 aa, Homo sapiens [sequence omitted]

SEQ ID NO: 883442 - protein, 164 aa, Homo sapiens
MVGGRKTLYNNQPIDFLKKMVAASIKDGEAVWFGCDVGKHFNSKLGLSDMNLYDHELVFGVSLKNMNKAERLTFGESLMTHAMTFTAVSEKDDQDGAFTKWRVENSWGEDHGHKGYLCMTDEWFSEYVYEVVVDRKHVPEEVLAVLEQEPIILPAWDPMGALAE

SEQ ID NO: 883443 - protein, 321 aa, Homo sapiens; identical to SEQ ID NO: 883440

SEQ ID NO: 883444 - protein, 321 aa, Homo sapiens; identical to SEQ ID NO: 883440

SEQ ID NO: 883445 - protein, 359 aa, Homo sapiens
MVRGRGLNRPRVERCYFFLSAFVDTAQRKEPEDGRLVQFLLMNPANDGGQWDMLVNIVEKYGVIPKKCFPESYTTEATRRMNDILNHKMREFCIRLRNLVHSGATKGEISATQDVMMEEIFRVVCICLGNPPETFTWEYRDKDKNYQKIGPITPLEFYREHVKPLFNMEDKICLVNDPRPQHKYNKLYTVEYLSNMVGGRKTLYNNQPIDFLKKMVAASIKDGEAVWFGCDVGKHFNSKLGLSDMNLYDHELVFGVSLKNMNKAERLTFGESLMTHAMTFTAVSEKDDQDGAFTKWRVENSWGEDHGHKGYLCMTDEWFSEYVYEVVVDRKHVPEEVLAVLEQEPIILPAWDPMGALAE

SEQ ID NO: 883446 - protein, 271 aa, Homo sapiens [sequence omitted]

SEQ ID NO: 883447 - protein, 321 aa, Homo sapiens; identical to SEQ ID NO: 883440

SEQ ID NO: 883448 - protein, 321 aa, Homo sapiens; identical to SEQ ID NO: 883440

SEQ ID NO: 883449 - protein, 321 aa, Homo sapiens; identical to SEQ ID NO: 883440

SEQ ID NO: 883450 - protein, 346 aa, Homo sapiens
MQNKARLELADYEAENLARLQRAFARKWEFIFMQAEAQVKIDRKKDKTERKILDSQERAFWDVHRPVPGCVNTTEMDIRKCRRLKNPQKVKKSVYGVTEESQAQSPVHVLSQPIRKTTKEDIRKQITFLNAQIDRHCLKMSKVAESLIAYTEQYVEYDPLITPAEPSNPWISDDVALWDIEMSKEPSQQRVKRWGFSFDEILKDQVGRDQFLRFLESEFSSENLRFWLAVQDLKKQPLQDVAKRVEEIWQEFLAPGAPSAINLDSHSYEITSQNVKDGGRYTFEDAQEHIYKLMKSDSYARFLRSNAYQDLLLAKKKPESEQGRRTSLEKFTRSVLYSNTPLAKRP

SEQ ID NO: 883451 - protein, 443 aa, Homo sapiens
SGRHDLHLLAFCHDCEASPATWNCTDIVQWLMKNLSIEDPVEAIHLGSLIAAQGYIFPISDHVLTMKDDGTFYRFQAPYFWPSNCWEPENTDYEEEDIEEEKAIYLCKRTMQNKARLELADYEAENLARLQRAFARKWEFIFMQAEAQVKIDRKKDKTERKILDSQERAFWDVHRPVPGCVNTTEMDIRKCRRLKNPQKVKKSVYGVTEESQAQSPVHVLSQPIRKTTKEDIRKQITFLNAQIDRHCLKMSKVAESLIAYTEQYVEYDPLITPAEPSNPWISDDVALWDIEMSKEPSQQRVKRWGFSFDEILKDQVGRDQFLRFLESEFSSENLRFWLAVQDLKKQPLQDVAKRVEEIWQEFLAPGAPSAINLDSHSYEITSQNVKDGGRYTFEDAQEHIYKLMKSDSYARFLRSNAYQDLLLAKKKGKSLAGKRLTGLMQSS

SEQ ID NO: 883452 - protein, 446 aa, Homo sapiens
SGRHDLHLLAFCHDCEASPATWNCTDIVQWLMKNLSIEDPVEAIHLGSLIAAQGYIFPISDHVLTMKDDGTFYRFQAPYFWPSNCWEPENTDYEEEDIEEEKAIYLCKRTMQNKARLELADYEAENLARLQRAFARKWEFIFMQAEAQVKIDRKKDKTERKILDSQERAFWDVHRPVPGCVNTTEMDIRKCRRLKNPQKVKKSVYGVTEESQAQSPVHVLSQPIRKTTKEDIRKQITFLNAQIDRHCLKMSKVAESLIAYTEQYVEYDPLITPAEPSNPWISDDVALWDIEMSKEPSQQRVKRWGFSFDEILKDQVGRDQFLRFLESEFSSENLRFWLAVQDLKKQPLQDVAKRVEEIWQEFLAPGAPSAINLDSHSYEITSQNVKDGGRYTFEDAQEHIYKLMKSDSYARFLRSNAYQDLLLAKKKPESEQGRRTSLEKFTRSVG

SEQ ID NO: 883453 - protein, 493 aa, Homo sapiens
SGRHDLHLLAFCHDCEASPATWNCTDIVQWLMKNLSIEDPVEAIHLGSLIAAQGYIFPISDHVLTMKDDGTFYRFQAPYFWPSNCWEPENTDYEEEDIEEEKAIYLCKRTMQNKARLELADYEAENLARLQRAFARKWEFIFMQAEAQVKIDRKKDKTERKILDSQERAFWDVHRPVPGCVNTTEMDIRKCRRLKNPQKVKKSVYGVTEESQAQSPVHVLSQPIRKTTKEDIRKQITFLNAQIDRHCLKMSKVAESLIAYTEQYVEYDPLITPAEPSNPWISDDVALWDIEMSKEPSQQRVKRWGFSFDEILKDQVGRDQFLRFLESEFSSENLRFWLAVQDLKKQPLQDVAKRVEEIWQEFLAPGAPSAINLDSHSYEITSQNVKDGGRYTFEDAQEHIYKLMKSDSYARFLRSNAYQDLLLAKKKPESEQGRRTSLEKFTRSVVSSVGFLPSAFLLVLVFSFFFFFFFFPLVVVSFGVGGSPVLSPSTQPF

SEQ ID NO: 883454 - protein, 472 aa, Homo sapiens
MAQGSGDQRAVGVADPEESSPNMIVYCKIEDIITKMQDDKTGGVPIRTVKSFLSKIPSVVTGTDIVQWLMKNLSIEDPVEAIHLGSLIAAQGYIFPISDHVLTMKDDGTFYRFQAPYFWPSNCWEPENTDYAIYLCKRTMQNKARLELADYEAENLARLQRAFARKWEFIFMQAEAQVKIDRKKDKTERKILDSQERAFWDVHRPVPGCVNTTEMDIRKCRRLKNPQKVKKSVYGVTEESQAQSPVHVLSQPIRKTTKEDIRKQITFLNAQIDRHCLKMSKVAESLIAYTEQYVEYDPLITPAEPSNPWISDDVALWDIEMSKEPSQQRVKRWGFSFDEILKDQVGRDQFLRFLESEFSSENLRFWLAVQDLKKQPLQDVAKRVEEIWQEFLAPGAPSAINLDSHSYEITSQNVKDGGRYTFEDAQEHIYKLMKSDSYARFLRSNAYQDLLLAKKKGKSLAGKRLTGLMQSS

SEQ ID NO: 883455 - protein, 162 aa, Homo sapiens
SGRHDLHLLAFCHDCEASPATWNCTDIVQWLMKNLSIEDPVEAIHLGSLIAAQGYIFPISDHVLTMKDDGTFYRFQAPYFWPSNCWEPENTDYAIYLCKRTMQNKARLELADYEALPTGRGVLRNPAFGFAPGDTSRWQRLVNSPITTDNFPDFQQPLKQVL

SEQ ID NO: 883456 - protein, 490 aa, Homo sapiens
MAQGSGDQRAVGVADPEESSPNMIVYCKIEDIITKMQDDKTGGVPIRTVKSFLSKIPSVVTGTDIVQWLMKNLSIEDPVEAIHLGSLIAAQGYIFPISDHVLTMKDDGTFYRFQAPYFWPSNCWEPENTDYAIYLCKRTMQNKARLELADYEAENLARLQRAFARKWEFIFMQAEAQVKIDRKKDKTERKILDSQERAFWDVHRPVPGCVNTTEMDIRKCRRLKNPQKVKKSVYGVTEESQAQSPVHVLSQPIRKTTKEDIRKQITFLNAQIDRHCLKMSKVAESLIAYTEQYVEYDPLITPAEPSNPWISDDVALWDIEMSKEPSQQRVKRWGFSFDEILKDQVGRDQFLRFLESEFSSENLRFWLAVQDLKKQPLQDVAKRVEEIWQEFLAPGAPSAINLDSHSYEITSQNVKDGGRYTFEDAQEHIYKLMKSDSYARFLRSNAYQDLLLAKKKPESEQGRRTSLEKFTRSVGKSLAGKRLTGLMQSS

SEQ ID NO: 883457 - protein, 279 aa, Homo sapiens
SGRHDLHLLAFCHDCEASPATWNCTDIVQWLMKNLSIEDPVEAIHLGSLIAAQGYIFPISDHVLTMKDDGTFYRFQAPYFWPSNCWEPENTDYEEEDIEEEKAIYLCKRTMQNKARLELADYEAENLARLQRAFARKWEFIFMQAEAQVKIDRKKDKTERKILDSQERAFWDVHRPVPGCVNTTEMDIRKCRRLKNPQKVKKSVYGVTEESQAQSPVHVLSQPIRKTTKEDIRKQVNELTACTLRRRRGQFKNPFKCSTLKIEQALSSWKPQWNPAVGD

SEQ ID NO: 883458 - protein, 148 aa, Homo sapiens
DPGARILAGAWAGCPAVRECGTSLGAGKGVGAGRGWVRGRARGCGRARGRVWVRGWVQAVGGRGAGAGGAGRRLLQGGLVDSGPGRTKRVLLFKKTALPFPSSTLASCPGSPAHVAFLPATVHLAQNGLTPTLCFHRARRLCNAERVL

SEQ ID NO: 883459 - protein, 404 aa, Homo sapiens
TVVAKCSALREPAHSTARKASEPSQPSQPSQPGGHLIARLRTMDLHLFDYSEPGNFSDISWPCNSSDCIVVDTVMCPNMPNKSVLLYTLSFIYIFIFVIGMIANSVVVWVNIQAKTTGYDTHCYILNLAIADLWVVLTIPVWVVSLVQHNQWPMGELTCKVTHLIFSINLFGSIFFLTCMSVDRYLSITYFTNTPSSRKKMVRRVVCILVWLLAFCVSLPDTYYLKTVTSASNNETYCRSFYPEHSIKEWLIGMELVSVVLGFAVPFSIIAVFYFLLARAISASSDQEKHSSRKIIFSYVVVFLVCWLPYHVAVLLDIFSILHYIPFTCRLEHALFTALHVTQCLSLVHCCVNPVLYSFINRNYRYELMKAFIFKYSAKTGLTKLIDASRVSETEYSALEQSTK

SEQ ID NO: 883460 - protein, 362 aa, Homo sapiens
MDLHLFDYSEPGNFSDISWPCNSSDCIVVDTVMCPNMPNKSVLLYTLSFIYIFIFVIGMIANSVVVWVNIQAKTTGYDTHCYILNLAIADLWVVLTIPVWVVSLVQHNQWPMGELTCKVTHLIFSINLFGSIFFLTCMSVDRYLSITYFTNTPSSRKKMVRRVVCILVWLLAFCVSLPDTYYLKTVTSASNNETYCRSFYPEHSIKEWLIGMELVSVVLGFAVPFSIIAVFYFLLARAISASSDQEKHSSRKIIFSYVVVFLVCWLPYHVAVLLDIFSILHYIPFTCRLEHALFTALHVTQCLSLVHCCVNPVLYSFINRNYRYELMKAFIFKYSAKTGLTKLIDASRVSETEYSALEQSTK

SEQ ID NO: 883461 - protein, 386 aa, Homo sapiens
TVVAKCSALREPAHSTARKASEPSQPSQPSQPGGHLIARLRTMDLHLFDYSEPGNFSDISWPCNSSDCIVVDTVMCPNMPNGMIANSVVVWVNIQAKTTGYDTHCYILNLAIADLWVVLTIPVWVVSLVQHNQWPMGELTCKVTHLIFSINLFGSIFFLTCMSVDRYLSITYFTNTPSSRKKMVRRVVCILVWLLAFCVSLPDTYYLKTVTSASNNETYCRSFYPEHSIKEWLIGMELVSVVLGFAVPFSIIAVFYFLLARAISASSDQEKHSSRKIIFSYVVVFLVCWLPYHVAVLLDIFSILHYIPFTCRLEHALFTALHVTQCLSLVHCCVNPVLYSFINRNYRYELMKAFIFKYSAKTGLTKLIDASRVSETEYSALEQSTK

SEQ ID NO: 883462 - protein, 388 aa, Homo sapiens
DPGARILAGAWAGCPAVRHLIARLRTMDLHLFDYSEPGNFSDISWPCNSSDCIVVDTVMCPNMPNKSVLLYTLSFIYIFIFVIGMIANSVVVWVNIQAKTTGYDTHCYILNLAIADLWVVLTIPVWVVSLVQHNQWPMGELTCKVTHLIFSINLFGSIFFLTCMSVDRYLSITYFTNTPSSRKKMVRRVVCILVWLLAFCVSLPDTYYLKTVTSASNNETYCRSFYPEHSIKEWLIGMELVSVVLGFAVPFSIIAVFYFLLARAISASSDQEKHSSRKIIFSYVVVFLVCWLPYHVAVLLDIFSILHYIPFTCRLEHALFTALHVTQCLSLVHCCVNPVLYSFINRNYRYELMKAFIFKYSAKTGLTKLIDASRVSETEYSALEQSTK

SEQ ID NO: 883463 - protein, 362 aa, Homo sapiens; identical to SEQ ID NO: 883460

SEQ ID NO: 883464 - protein, 90 aa, Homo sapiens
VCLCVFVLRFKKTWKLRALKEGKTSMHPPYSLGQLVPERPRPTPVLVPLISPPVSPSSLGSDNTSSHNRPDARDPRSPYDISNTDYFFPR

SEQ ID NO: 883465 - protein, 142 aa, Homo sapiens
CNQLGVSLQDAVSWRASGMADEEEDPTFEEENEEIGGGAEGGQGKRKRLFSKELRCMMYGFGDDQNPYTESVDILEDLVIEFITEMTHKAMSIGRQGRVQVEDIVFLIRKDPRKFARVKDLLTMNEELKRARKAFDEANYGS

SEQ ID NO: 883466 - protein, 142 aa, Homo sapiens; identical to SEQ ID NO: 883465

SEQ ID NO: 883467 - protein, 142 aa, Homo sapiens; identical to SEQ ID NO: 883465

SEQ ID NO: 883468 - protein, 142 aa, Homo sapiens; identical to SEQ ID NO: 883465

SEQ ID NO: 883469 - protein, 117 aa, Homo sapiens
MCRCSLVLLSVDHEVPFSSFFIGWRTEGRAWRAGRPDMADGSGWQPPRPCEAYRAEWKLCRSARHFLHHYYVHGERPACEQWQRDLASCRDWEERRNAEAQVLSVVAHTCNLSYLGG

SEQ ID NO: 883470 - protein, 142 aa, Homo sapiens
MCRCSLVLLSVDHEVPFSSFFIGWRTEGRAWRAGRPDMADGSGWQPPRPCEAYRAEWKLCRSARHFLHHYYVHGERPACEQWQRDLASCRDWEERRNAEAQQSLCESERARVRAARKHILVWAPRQSPPPDWHLPLPQEKDE

SEQ ID NO: 883471 - protein, 117 aa, Homo sapiens; identical to SEQ ID NO: 883469

SEQ ID NO: 883472 - protein, 120 aa, Homo sapiens
MADGSGWQVSVLGSEPGTTGVFRREGTGLARGVGRGRRAPLRRRLSPQPPRPCEAYRAEWKLCRSARHFLHHYYVHGERPACEQWQRDLASCRDWEERRNAEAQVLSVVAHTCNLSYLGG

SEQ ID NO: 883473 - protein, 145 aa, Homo sapiens
MADGSGWQVSVLGSEPGTTGVFRREGTGLARGVGRGRRAPLRRRLSPQPPRPCEAYRAEWKLCRSARHFLHHYYVHGERPACEQWQRDLASCRDWEERRNAEAQQSLCESERARVRAARKHILVWAPRQSPPPDWHLPLPQEKDE

SEQ ID NO: 883474 - protein, 109 aa, Homo sapiens
RTSGSPFLQEFGTRRGHGPAVGNLVSESAGRSAGQGSPGPDAMSRNLRTALIFGGFISLIGAAFYPIYFRPLMRLEEYKKEQAINRAGIVQEDVQPPGLKVWSDPFGRK

SEQ ID NO: 883475 - protein, 104 aa, Homo sapiens
SESLSTSSERGHGPAVGNLVSESAGRSAGQGSPGPDAMSRNLRTALIFGGFISLIGAAFYPIYFRPLMRLEEYKKEQAINRAGIVQEDVQPPGLKVWSDPFGRK

SEQ ID NO: 883476 - protein, 104 aa, Homo sapiens; identical to SEQ ID NO: 883475

SEQ ID NO: 883477 - protein, 104 aa, Homo sapiens; identical to SEQ ID NO: 883475

SEQ ID NO: 883478 - protein, 104 aa, Homo sapiens; identical to SEQ ID NO: 883475

SEQ ID NO: 883479 - protein, 255 aa, Homo sapiens
MGNSCYNIVATLLLVLNFERTRSLQDPCSNCPAGTFCDNNRNQICSPCPPNSFSSAGGQRTCDICRQCKGVFRTRKECSSTSNAECDCTPGFHCLGAGCSMCEQDCKQGQELTKKGCKDCCFGTFNDQKRGICRPWTNCSLDGKSVLVNGTKERDVVCGPSPADLSPGASSVTPPAPAREPGHSPQIISFFLALTSTALLFLLFFLTLRFSVVKRGRKKLLYIFKQPFMRPVQTTQEEDGCSCRFPEEEEGGCEL

SEQ ID NO: 883480 - protein, 153 aa, Homo sapiens
MGNSCYNIVATLLLVLNFERTRSLQDPCSNCPAGTFCDNNRNQICSPCPPNSFSSAGGQRTCDICRQCKGVFRTRKECSSTSNAECDCTPGFHCLGAGCSMCEQDCKQGQELTKKGCKDCCFGTFNDQKRGICRPWTNIRVADEWNHDSQEKY

SEQ ID NO: 883481 - protein, 239 aa, Homo sapiens
MGNSCYNIVATLLLVLNFERTRSLQDPCSNCPAGTFCDNNRNQICSPCPPNSFSSAGGQRTCDICRQCKGVFRTRKECSSTSNAECDCTPGFHCLGAGCSMCEQDCKQGQELTKKGCKDCCFGTFNDQKRGICRPWTNCSLDGKSVLVNGTKERDVVCGPSPADLSPGASSVTPPAPAREPGHSPQIISFFLALTSTALLFLLFFLTLRFSVVKRGRKKLLYIFKQHGSSGDTFTILES

SEQ ID NO: 883482 - protein, 126 aa, Homo sapiens
QVPALPCCPHIIFLMLDSHQCFLLYFLSQATFSSLSSVASGAESPRFSPSDQIQSRAGLSVNYEEYRFLRNNSRALTANSTEFVLLEMGQQREVGSPSVLVCKIYSLGSLLAWLNFLVPESSHTLA

SEQ ID NO: 883483 - protein, 623 aa, Homo sapiens
MSTQDERQINTEYAVSLLEQLKLFYEQQLFTDIVLIVEGTEFPCHKMVLATCSSYFRAMFMSGLSESKQTHVHLRNVDAATLQIIITYAYTGNLAMNDSTVEQLYETACFLQVEDVLQRCREYLIKKINAENCVRLLSFADLFSCEELKQSAKRMVEHKFTAVYHQDAFMQLSHDLLIDILSSDNLNVEKEETVREAAMLWLEYNTESRSQYLSSVLSQIRIDALSEVTQRAWFQGLPPNDKSVVVQGLYKSMPKFFKPRLGMTKEEMMIFIEASSENPCSLYSSVCYSPQAEKVYKLCSPPADLHKVGTVVTPDNDIYIAGGQVPLKNTKTNHSKTSKLQTAFRTVNCFYWFDAQQNTWFPKTPMLFVRIKPSLVCCEGYIYAIGGDSVGGELNRRTVERYDTEKDEWTMVSPLPCAWQWSAAVVVHDCIYVMTLNLMYCYFPRSDSWVEMAMRQTSRSFASAAAFGDKIFYIGGLHIATNSGIRLPSGTVDGSSVTVEIYDVNKNEWKMAANIPAKRYSDPCVRAVVISNSLCVFMRETHLNERAKYVTYQYDLELDRWSLRQHISERVLWDLGRDFRCTVGKLYPSCLEESPWKPPTYLFSTDGTEEFELDGEMVALPPV

SEQ ID NO: 883484 - protein, 623 aa, Homo sapiens; identical to SEQ ID NO: 883483

SEQ ID NO: 883485 - protein, 623 aa, Homo sapiens; identical to SEQ ID NO: 883483

SEQ ID NO: 883486 - protein, 623 aa, Homo sapiens; identical to SEQ ID NO: 883483

SEQ ID NO: 883487 - protein, 129 aa, Homo sapiens
GRALRSVRRRPQRTLLSALDGPSEGGCEGKPEGRGGGASLPRPEAEARPQARPRREGHAPAAAPEGPSVDGATGWSGSHTSGPRDAVTPQDPLNIGCCHKIYLVYFSLSLMSCTIADLSTMSADCVEKL

SEQ ID NO: 883488 - protein, 623 aa, Homo sapiens; identical to SEQ ID NO: 883483

SEQ ID NO: 883489 - protein, 454 aa, Homo sapiens [sequence omitted]

SEQ ID NO: 883490 - protein, 623 aa, Homo sapiens; identical to SEQ ID NO: 883483

SEQ ID NO: 883491 - protein, 623 aa, Homo sapiens; identical to SEQ ID NO: 883483

SEQ ID NO: 883492 - protein, 129 aa, Homo sapiens; identical to SEQ ID NO: 883487

SEQ ID NO: 883493 - protein, 122 aa, Homo sapiens
RPAPSPPMPLAEIGPSLLREPPGPRDPQLLQPLHPRFLDRLLQARLTSSTVPYSRHAPGDLSVPLCTGTMQIPLPHRVHVPVLIKCWPQALPSQGSQHCVPDTPVGCSDSLHGDLTITRSQE

SEQ ID NO: 883494 - protein, 304 aa, Homo sapiens
MNRAFSRKKDKTWMHTPEALSKHFIPYNAKFLGSTEVEQPKGTEVVRDAVRKLKFARHIKKSEGQKIPKVELQISIYGVKILEPKTKEVQHNCQLHRISFCADDKTDKRIFTFICKDSESNKHLCYVFDSEKCAEEITLTIGQAFDLAYRKFLESGGKDVETRKQIAGLQKRIQDLETENMELKNKVQDLENQLRITQVSAPPAGSMTPKSPSTDIFDMIPFSPISHQSSMPTRNGTQPPPVPSRSTEIKRDLFGAEPFDPFNCGAADFPPDIQSKLDEMQEGFKMGLTLEGTVFCLDPLDSRC

SEQ ID NO: 883495 - protein, 304 aa, Homo sapiens; identical to SEQ ID NO: 883494

SEQ ID NO: 883496 - protein, 124 aa, Homo sapiens [sequence omitted]

SEQ ID NO: 883497 - protein, 208 aa, Homo sapiens
DKQSGKKRGFGFVYFQNHDAADKAAGSSSIRFRAIAWAEEITLTIGQAFDLAYRKFLESGGKDVETRKQIAGLQKRIQDLETENMELKNKVQDLENQLRITQVSAPPAGSMTPKSPSTDIFDMIPFSPISHQSSMPTRNGTQPPPVPSRSTEIKRDLFGAEPFDPFNCGAADFPPDIQSKLDEMQEGFKMGLTLEGTVFCLDPLDSRC

SEQ ID NO: 883498 - protein, 311 aa, Homo sapiens
MNRAFSRKKDKTWMHTPEALSKHFIPYNAKFLGSTEVEQPKGTEVVRDAVRKLKFARHIKKSEGQKIPKVELQISIYGVKILEPKTKEVQHNCQLHRISFCADDKTDKRIFTFICKDSESNKHLCYVFDSEKCAEEITLTIGQAFDLAYRKFLESGGKDVETRKQIAGLQKRIQDLETENMELKNKVQDLENQLRITQVSAPPAGSMTPKSPSTDIFDMIPFSPISHQSSMPTRNGTQPPPVPSRSTEIKRDLFGAEPFDPFNCGAADFPPDIQSKLDEMQGFIMLSRLGLNCWAQAIYPLRPPKVLGPQA

SEQ ID NO: 883499 - protein, 232 aa, Homo sapiens
DRKYKEVTISIYGVKILEPKTKEVQHNCQLHRISFCADDKTDKRIFTFICKDSESNKHLCYVFDSEKCAEEITLTIGQAFDLAYRKFLESGGKDVETRKQIAGLQKRIQDLETENMELKNKVQDLENQLRITQVSAPPAGSMTPKSPSTDIFDMIPFSPISHQSSMPTRNGTQPPPVPSRSTEIKRDLFGAEPFDPFNCGAADFPPDIQSKLDEMQFIYGRIQTDTNYMKLI

SEQ ID NO: 883500 - protein, 304 aa, Homo sapiens; identical to SEQ ID NO: 883494

SEQ ID NO: 883501 - protein, 379 aa, Homo sapiens
MNRAFSRKKDKTWMHTPEALSKHFIPYNAKFLGSTEVEQPKGTEVVRDAVRKLKFARHIKKSEGQKIPKVELQISIYGVKILEPKTKEVQHNCQLHRISFCADDKTDKRIFTFICKDSESNKHLCYVFDSEKCAEEITLTIGQAFDLAYRKFLESGGKDVETRKQIAGLQKRIQDLETENMELKNKVQDLENQLRITQVSAPPLLHNMSDHEQHVFQRCSSSFWRSNGDSSPCLNISSISVTPINSPDSRLSLGLLIPPPSKCGFPKPVSESSIPRPHAGSMTPKSPSTDIFDMIPFSPISHQSSMPTRNGTQPPPVPSRSTEIKRDLFGAEPFDPFNCGAADFPPDIQSKLDEMQEGFKMGLTLEGTVFCLDPLDSRC

SEQ ID NO: 883502 - protein, 250 aa, Homo sapiens
MNRAFSRKKDKTWMHTPEALSKHFIPYNAKFLGSTEVEQPKGTEVVRDAVRKLKFARHIKKSEGQKIPKVELQISIYGVKILEPKTKEVQHNCQLHRISFCADDKTDKRIFTFICKDSESNKHLCYVFDSEKCAEEITLTIGQAFDLAYRKFLESGGKDVETRKQIAGLQKRIQDLETENMELKNKVQDLENQLRITQVSAPPAGSMTPKSPSTDIFDMIPFSPISHQSSMPTLSKTQNHWQAVLDRERP

SEQ ID NO: 883503 - protein, 103 aa, Homo sapiens
FGRASPIWGAPPLPGMLSEGKPIPRREGKTATTERTFAVPVWKEIGISWRGLASTAGLFKSSTSILEENNADSRKMVGRVILECVLLLFSSKVKSSSSPFNLE

SEQ ID NO: 883504 - protein, 97 aa, Homo sapiens
VHDTQEGTWPEHGGEGWTEGPGKTICSDSGEEASEALDSCSGEPQEPPSEGGTEQKPVMVEARWKAGSLTPYWPEDPLSEPLTGRVASLHPLPAPGV

SEQ ID NO: 883505 - protein, 721 aa, Homo sapiens
MAEKFESLMNIHGFDLGSRYMDLKPLGCGGNGLVFSAVDNDCDKRVAIKKIVLTDPQSVKHALREIKIIRRLDHDNIVKVFEILGPSGSQLTDDVGSLTELNSVYIVQEYMETDLANVLEQGPLLEEHARLFMYQLLRGLKYIHSANVLHRDLKPANLFINTEDLVLKIGDFGLARIMDPHYSHKGHLSEGLVTKWYRSPRLLLSPNNYTKAIDMWAAGCIFAEMLTGKTLFAGAHELEQMQLILESIPVVHEEDRQELLSVIPVYIRNDMTEPHKPLTQLLPGISREALDFLEQILTFSPMDRLTAEEALSHPYMSIYSFPMDEPISSHPFHIEDEVDDILLMDETHSHIYNWERYHDCQFSEHDWPVHNNFDIDEVQLDPRALSDVTDEEEVQVDPRKYLDGDREKYLEDPAFDTNYSTEPCWQYSDHHENKYCDLECSHTCNYKTRSSSYLDNLVWRESEVNHYYEPKLIIDLSNWKEQSKEKSDKKGKSKCERNGLVKAQIALEEASQQLAGKEREKNQGFDFDSFIAGTIQLSSQHEPTDVVDKLNDLNSSVSQLELKSLISKSVSQEKQEKGMANLAQLEALYQSSWDSQFVSGGEDCFFINQFCEVRKDEQVEKENTYTSYLDKFFSRKEDTEMLETEPVEDGKLGERGHEEGFLNNSGEFLFNKQLESIGIPQFHSPVGSPLKSIQATLTPSAMKSSPQIPHQTYSSILKHLN

SEQ ID NO: 883506 - protein, 721 aa, Homo sapiens; identical to SEQ ID NO: 883505

SEQ ID NO: 883507 - protein, 721 aa, Homo sapiens; identical to SEQ ID NO: 883505

SEQ ID NO: 883508 - protein, 721 aa, Homo sapiens; identical to SEQ ID NO: 883505

SEQ ID NO: 883509 - protein, 698 aa, Homo sapiens
MAEKFESLMNIHGFDLGSRYMDLKPLGCGGNGLVFSAVDNDCDKRVAIKKIVLTDPQSVKHALREIKIIRRLDHDNIVKVFEILGPSGSQLTDDVGSLTELNSVYIVQEYMETDLANVLEQGPLLEEHARLFMYQLLRGLKYIHSANVLHRDLKPANLFINTEDLVLKIGDFGLARIMDPHYSHKGHLSEGLVTKWYRSPRLLLSPNNYTKAIDMWAAGCIFAEMLTGKTLFAGAHELEQMQLILESIPVVHEEDRQELLSVIPVYIRNDMTEPHKPLTQLLPGISREALDFLEQILTFSPMDRLTAEEALSHPYMSIYSFPMDEPISSHPFHIEDEVDDILLMDETHSHIYNWERYHDCQFSEHDWPVHNNFDIDEVQLDPRALSDVTDEEEVQVDPRKYLDGDREKYLEDPAFDTNYSTEPCWQYSDHHENKYCDLECSHTCNYKTRSSSYLDNLVWRESEVNHYYEPKLIIDLSNWKEQSKEKSDKKGKSKCERNGLVKAQIALEEASQQLAGKEREKNQGFDFDSFIAGTIQLSSQHEPTDVVDKLNDLNSSVSQLELKSLISKSVSQEKQEKGMANLAQLEALYQSSWDSQFVSGGEDCFFINQFCEVRKDEQVEKENTYTSYLDKFFSRKEDTEMLETEPVEDGKLGERGHEEGFLNNSGEFLFNKQLESIGIPQFHSPVGSRRRGRGRRGR

SEQ ID NO: 883510 - protein, 721 aa, Homo sapiens; identical to SEQ ID NO: 883505

SEQ ID NO: 883511 - protein, 721 aa, Homo sapiens; identical to SEQ ID NO: 883505

SEQ ID NO: 883512 - protein, 199 aa, Homo sapiens
RVVVATAAAREELGEDGGPRGSSQTTRRRCPRARRVPRRQRRGLARGRAAWASASLRFPGSGPATSAGAAAEAEAPARLSPPPQPEPGEARRPGCLEGGGSAAREWEFSSLEYGDCSITRPFLCSPVVFGHHIEVLGSSGMKVIDCCPNRTTERPRVAECGKREESLDLSITPLVYEPALHCHPSLCVLGAGGVLLPPE

SEQ ID NO: 883513 - protein, 110 aa, Homo sapiens
AWSSPPQPPERSWGRTVAREARRRQRGGDVREPGECRGGSGGALRAAGRPGLRPPSGSLEAGPRPAREQQQRRRLQRVSLLPLSLSRGKSQRQAKLRSLREGETRDPEIV

SEQ ID NO: 883514 - protein, 179 aa, Homo sapiens
MGILFTRIWRLFNHQEHKVIIVGLDNAGKTTILYQFSMNEVVHTSPTIGSNVEEIVINNTRFLMWDIGGQESLRSSWNTYYTNTEFVIVVVDSTDRERISVTREELYKMLAHEDLRKAGLLIFANKQDVKECMTVAEISQFLKLTSIKDHQWHIQACCALTGEGLCQGLEWMMSRLKIR

SEQ ID NO: 883515 - protein, 179 aa, Homo sapiens; identical to SEQ ID NO: 883514

SEQ ID NO: 883516 - protein, 179 aa, Homo sapiens; identical to SEQ ID NO: 883514

SEQ ID NO: 883517 - protein, 179 aa, Homo sapiens; identical to SEQ ID NO: 883514

SEQ ID NO: 883518 - protein, 197 aa, Homo sapiens
AWSSPPQPPERSWGRTVAREARRRQRGGDVREPEHKVIIVGLDNAGKTTILYQFSMNEVVHTSPTIGSNVEEIVINNTRFLMWDIGGQESLRSSWNTYYTNTEFVIVVVDSTDRERISVTREELYKMLAHEDLRKAGLLIFANKQDVKECMTVAEISQFLKLTSIKDHQWHIQACCALTGEGLCQGLEWMMSRLKIR

SEQ ID NO: 883519 - protein, 114 aa, Homo sapiens
MGILFTRIWRLFNHQEHKVIIVGLDNAGKTTILYQFSMNEVVHTSPTIGSNVEEIVINNTRFLMWDIGGQESLRSSWNTYYTNTEFVIVVVDSTDRERISVTREELYKMLAHEK

SEQ ID NO: 883520 - protein, 179 aa, Homo sapiens; identical to SEQ ID NO: 883514

SEQ ID NO: 883521 - protein, 1620 aa, Homo sapiens [sequence omitted]

SEQ ID NO: 883522 - protein, 1874 aa, Homo sapiens
MGAIGLLWLLPLLLSTAAVGSGMGTGQRAGSPAAGPPLQPREPLSYSRLQRKSLAVDFVVPSLFRVYARDLLLPPSSSELKAGRPEARGSLALDCAPLLRLLGPAPGVSWTAGSPAPAEARTLSRVLKGGSVRKLRRAKQLVLELGEEAILEGCVGPPGEAAVGLLQFNLSELFSWWIRQGEGRLRIRLMPEKKASEVGREGRLSAAIRASQPRLLFQIFGTGHSSLESPTNMPSPSPDYFTWNLTWIMKDSFPFLSHRSRYGLECSFDFPCELEYSPPLHDLRNQSWSWRRIPSEEASQMDLLDGPGAERSKEMPRGSFLLLNTSADSKHTILSPWMRSSSEHCTLAVSVHRHLQPSGRYIAQLLPHNEAAREILLMPTPGKHGWTVLQGRIGRPDNPFRVALEYISSGNRSLSAVDFFALKNCSEGTSPGSKMALQSSFTCWNGTVLQLGQACDFHQDCAQGEDESQMCRKLPVGFYCNFEDGFCGWTQGTLSPHTPQWQVRTLKDARFQDHQDHALLLSTTDVPASESATVTSATFPAPIKSSPCELRMSWLIRGVLRGNVSLVLVENKTGKEQGRMVWHVAAYEGLSLWQWMVLPLLDVSDRFWLQMVAWWGQGSRAIVAFDNISISLDCYLTISGEDKILQNTAPKSRNLFERNPNKELKPGENSPRQTPIFDPTVHWLFTTCGASGPHGPTQAQCNNAYQNSNLSVEVGSEGPLKGIQIWKVPATDTYSISGYGAAGGKGGKNTMMRSHGVSVLGIFNLEKDDMLYILVGQQGEDACPSTNQLIQKVCIGENNVIEEEIRVNRSVHEWAGGGGGGGGATYVFKMKDGVPVPLIIAAGGGGRAYGAKTDTFHPERLENNSSVLGLNGNSGAAGGGGGWNDNTSLLWAGKSLQEGATGGHSCPQAMKKWGWETRGGFGGGGGGCSSGGGGGGYIGGNAASNNDPEMDGEDGVSFISPLGILYTPALKVMEGHGEVNIKHYLNCSHCEVDECHMDPESHKVICFCDHGTVLAEDGVSCIVSPTPEPHLPLSLILSVVTSALVAALVLAFSGIMIVYRRKHQELQAMQMELQSPEYKLSKLRTSTIMTDYNPNYCFAGKTSSISDLKEVPRKNITLIRGLGHGAFGEVYEGQVSGMPNDPSPLQVAVKTLPEVCSEQDELDFLMEALIISKFNHQNIVRCIGVSLQSLPRFILLELMAGGDLKSFLRETRPRPSQPSSLAMLDLLHVARDIACGCQYLEENHFIHRDIAARNCLLTCPGPGRVAKIGDFGMARDIYRASYYRKGGCAMLPVKWMPPEAFMEGIFTSKTDTWSFGVLLWEIFSLGYMPYPSKSNQEVLEFVTSGGRMDPPKNCPGPVYRIMTQCWQHQPEDRPNFAIILERIEYCTQDPDVINTALPIEYGPLVEEEEKVPVRPKDPEGVPPLLVSQQAKREEERSPAAPPPLPTTSSGKAAKKPTAAEVSVRVPRGPAVEGGHVNMAFSQSNPPSELHRVHGSRNKPTSLWNPTYGSWFTEKPTKKNNPIAKKEPHERGNLGLEGSCTVPPNVATGRLPGASLLLEPSSLTANMKEVPLFRLRHFPCGNVNYGYQQQGLPLEAATAPGAGHYEDTILKSKNSMNQPVALSSVAHSLLFLGIPKTVEEREAINGSFTNQRPNVTFCFVPTYFEVPPKKLYFENALERFGAWVHPILSKEENIIKMSDKYKARCGCKGFYACLLYSVRVPRGPAVEGGHVNMAFSQSNPPSELHKVHGSRNKPTSLWNPTYGSWFTEKPTKKNNPIAKKEPHDRGNLGLEGSCTVPPNVATGRLPGASLLLEPSSLTANMKEVPLFRLRHFPCGNVNYGYQQQGLPLEAATAPGAGHYEDTILKSKNSMNQPGP

SEQ ID NO: 883523 - protein, 709 aa, Homo sapiens
DSVLRGCSLEQRSFISVRLLSYLSACRHPMEDSMDMDMSPLRPQNYLFGCELKADKDYHFKVDNDENEHQLSLRTVSLGAGAKDELHIVEAEAMNYEGSPIKVTLATLKMSVQPTVSLGGFEITPPVVLRLKCGSGPVHISGQHLVVYRRKHQELQAMQMELQSPEYKLSKLRTSTIMTDYNPNYCFAGKTSSISDLKEVPRKNITLIRGLGHGAFGEVYEGQVSGMPNDPSPLQVAVKTLPEVCSEQDELDFLMEALIISKFNHQNIVRCIGVSLQSLPRFILLELMAGGDLKSFLRETRPRPSQPSSLAMLDLLHVARDIACGCQYLEENHFIHRDIAARNCLLTCPGPGRVAKIGDFGMARDIYRASYYRKGGCAMLPVKWMPPEAFMEGIFTSKTDTWSFGVLLWEIFSLGYMPYPSKSNQEVLEFVTSGGRMDPPKNCPGPVYRIMTQCWQHQPEDRPNFAIILERIEYCTQDPDVINTALPIEYGPLVEEEEKVPVRPKDPEGVPPLLVSQQAKREEERSPAAPPPLPTTSSGKAAKKPTAAEVSVRVPRGPAVEGGHVNMAFSQSNPPSELHKVHGSRNKPTSLWNPTYGSWFTEKPTKKNNPIAKKEPHDRGNLGLEGSCTVPPNVATGRLPGASLLLEPSSLTANMKEVPLFRLRHFPCGNVNYGYQQQGLPLEAATAPGAGHYEDTILKSKNSMNQPGP

SEQ ID NO: 883524 - protein, 756 aa, Homo sapiens
MNGQLDLSGKLIIKAQLGEDIRRIPIHNEDITYDELVLMMQRVFRGKLLSNDEVTIKYKDEDGDLITIFDSSDLSFAIQCSRILKLTLFVNGQPRPLESSQVKYLRRELIELRNKVNRLLDSLEPPGEPGPSTNIPENDTVDGREEKSASDSSGKQSTQVMAASMSAFDPLKNQDEINKNVMSAFGLTDDQVSVYRRKHQELQAMQMELQSPEYKLSKLRTSTIMTDYNPNYCFAGKTSSISDLKEVPRKNITLIRGLGHGAFGEVYEGQVSGMPNDPSPLQVAVKTLPEVCSEQDELDFLMEALIISKFNHQNIVRCIGVSLQSLPRFILLELMAGGDLKSFLRETRPRPSQPSSLAMLDLLHVARDIACGCQYLEENHFIHRDIAARNCLLTCPGPGRVAKIGDFGMARDIYRASYYRKGGCAMLPVKWMPPEAFMEGIFTSKTDTWSFGVLLWEIFSLGYMPYPSKSNQEVLEFVTSGGRMDPPKNCPGPVYRIMTQCWQHQPEDRPNFAIILERIEYCTQDPDVINTALPIEYGPLVEEEEKVPVRPKDPEGVPPLLVSQQAKREEERSPAAPPPLPTTSSGKAAKKPTAAEVSVRVPRGPAVEGGHVNMAFSQSNPPSELHKVHGSRNKPTSLWNPTYGSWFTEKPTKKNNPIAKKEPHDRGNLGLEGSCTVPPNVATGRLPGASLLLEPSSLTANMKEVPLFRLRHFPCGNVNYGYQQQGLPLEAATAPGAGHYEDTILKSKNSMNQPGP

SEQ ID NO: 883525 - protein, 784 aa, Homo sapiens
MAGLNSLEAVKRKIQALQQQADEAEDRAQGLQRELDGERERREKAEGDVAALNRRIQLVEEELDRAQERLATALQKLEEAEKAADESERGMKVIENRAMKDEEKMEIQEMQLKEAKHIAEEADRKYEEVARKLVILEGELERAEERAEVSELKCGDLEEELKNVTNNLKSLEAASEKYSEKEDKYEEEIKLLSDKLKEAETRAEFAERTVAKLEKTIDDLEVYRRKHQELQAMQMELQSPEYKLSKLRTSTIMTDYNPNYCFAGKTSSISDLKEVPRKNITLIRGLGHGAFGEVYEGQVSGMPNDPSPLQVAVKTLPEVCSEQDELDFLMEALIISKFNHQNIVRCIGVSLQSLPRFILLELMAGGDLKSFLRETRPRPSQPSSLAMLDLLHVARDIACGCQYLEENHFIHRDIAARNCLLTCPGPGRVAKIGDFGMARDIYRASYYRKGGCAMLPVKWMPPEAFMEGIFTSKTDTWSFGVLLWEIFSLGYMPYPSKSNQEVLEFVTSGGRMDPPKNCPGPVYRIMTQCWQHQPEDRPNFAIILERIEYCTQDPDVINTALPIEYGPLVEEEEKVPVRPKDPEGVPPLLVSQQAKREEERSPAAPPPLPTTSSGKAAKKPTAAEVSVRVPRGPAVEGGHVNMAFSQSNPPSELHKVHGSRNKPTSLWNPTYGSWFTEKPTKKNNPIAKKEPHDRGNLGLEGSCTVPPNVATGRLPGASLLLEPSSLTANMKEVPLFRLRHFPCGNVNYGYQQQGLPLEAATAPGAGHYEDTILKSKNSMNQPGP

SEQ ID NO: 883526 - protein, 675 aa, Homo sapiens
REVEGERRAREQAEAEVASLNRRIQLVEEELDRAQERAEVSELKCGDLEEELKNVTNNLKSLEAASEKYSEKEDKYEEEIKLLSDKLKEAETRAEFAERTVAKLEKTIDDLEVYRRKHQELQAMQMELQSPEYKLSKLRTSTIMTDYNPNYCFAGKTSSISDLKEVPRKNITLIRGLGHGAFGEVYEGQVSGMPNDPSPLQVAVKTLPEVCSEQDELDFLMEALIISKFNHQNIVRCIGVSLQSLPRFILLELMAGGDLKSFLRETRPRPSQPSSLAMLDLLHVARDIACGCQYLEENHFIHRDIAARNCLLTCPGPGRVAKIGDFGMARDIYRASYYRKGGCAMLPVKWMPPEAFMEGIFTSKTDTWSFGVLLWEIFSLGYMPYPSKSNQEVLEFVTSGGRMDPPKNCPGPVYRIMTQCWQHQPEDRPNFAIILERIEYCTQDPDVINTALPIEYGPLVEEEEKVPVRPKDPEGVPPLLVSQQAKREEERSPAAPPPLPTTSSGKAAKKPTAAEVSVRVPRGPAVEGGHVNMAFSQSNPPSELHKVHGSRNKPTSLWNPTYGSWFTEKPTKKNNPIAKKEPHDRGNLGLEGSCTVPPNVATGRLPGASLLLEPSSLTANMKEVPLFRLRHFPCGNVNYGYQQQGLPLEAATAPGAGHYEDTILKSKNSMNQPGP

SEQ ID NO: 883527 - protein, 701 aa, Homo sapiens
MNGQLDLSGKLIIKAQLGEDIRRIPIHNEDITYDELVLMMQRVFRGKLLSNDEVTIKYKDEDGDLITIFDSSDLSFAIQCSRILKLTLFVNGQPRPLESSQVKYLRRELIELRNKVNRLLDSLEPPGEPGPSTNIPENVYRRKHQELQAMQMELQSPEYKLSKLRTSTIMTDYNPNYCFAGKTSSISDLKEVPRKNITLIRGLGHGAFGEVYEGQVSGMPNDPSPLQVAVKTLPEVCSEQDELDFLMEALIISKFNHQNIVRCIGVSLQSLPRFILLELMAGGDLKSFLRETRPRPSQPSSLAMLDLLHVARDIACGCQYLEENHFIHRDIAARNCLLTCPGPGRVAKIGDFGMARDIYRASYYRKGGCAMLPVKWMPPEAFMEGIFTSKTDTWSFGVLLWEIFSLGYMPYPSKSNQEVLEFVTSGGRMDPPKNCPGPVYRIMTQCWQHQPEDRPNFAIILERIEYCTQDPDVINTALPIEYGPLVEEEEKVPVRPKDPEGVPPLLVSQQAKREEERSPAAPPPLPTTSSGKAAKKPTAAEVSVRVPRGPAVEGGHVNMAFSQSNPPSELHKVHGSRNKPTSLWNPTYGSWFTEKPTKKNNPIAKKEPHDRGNLGLEGSCTVPPNVATGRLPGASLLLEPSSLTANMKEVPLFRLRHFPCGNVNYGYQQQGLPLEAATAPGAGHYEDTILKSKNSMNQPGP

SEQ ID NO: 883528 - protein, 761 aa, Homo sapiens
LSARRIEGWNSNEAPPPRPTLAEGDVAALNRRIQLVEEELDRAQERLATALQKLEEAEKAADESERGMKVIENRAMKDEEKMEIQEMQLKEAKHIAEEADRKYEEVARKLVILEGELERAEERAEVSELKCGDLEEELKNVTNNLKSLEAASEKYSEKEDKYEEEIKLLSDKLKEAETRAEFAERTVAKLEKTIDDLEVYRRKHQELQAMQMELQSPEYKLSKLRTSTIMTDYNPNYCFAGKTSSISDLKEVPRKNITLIRGLGHGAFGEVYEGQVSGMPNDPSPLQVAVKTLPEVCSEQDELDFLMEALIISKFNHQNIVRCIGVSLQSLPRFILLELMAGGDLKSFLRETRPRPSQPSSLAMLDLLHVARDIACGCQYLEENHFIHRDIAARNCLLTCPGPGRVAKIGDFGMARDIYRASYYRKGGCAMLPVKWMPPEAFMEGIFTSKTDTWSFGVLLWEIFSLGYMPYPSKSNQEVLEFVTSGGRMDPPKNCPGPVYRIMTQCWQHQPEDRPNFAIILERIEYCTQDPDVINTALPIEYGPLVEEEEKVPVRPKDPEGVPPLLVSQQAKREEERSPAAPPPLPTTSSGKAAKKPTAAEVSVRVPRGPAVEGGHVNMAFSQSNPPSELHKVHGSRNKPTSLWNPTYGSWFTEKPTKKNNPIAKKEPHDRGNLGLEGSCTVPPNVATGRLPGASLLLEPSSLTANMKEVPLFRLRHFPCGNVNYGYQQQGLPLEAATAPGAGHYEDTILKSKNSMNQPGP

SEQ ID NO: 883529 - protein, 353 aa, Homo sapiens
SFWLKEPGKRRTMGELMAFLLPLIIVLMVKHSDSRTHSLRYFRLGVSDPIHGVPEFISVGYVDSHPITTYDSVTRQKEPRAPWMAENLAPDHWERYTQLLRGWQQMFKVELKRLQRHYNHSGSHTYQRMIGCELLEDGSTTGFLQYAYDGQDFLIFNKDTLSWLAVDNVAHTIKQAWEANQHELLYQKNWLEEECIAWLKRFLEYGKDTLQRTEPPLVRVNRKETFPGVTALFCKAHGFYPPEIYMTWMKNGEEIVQEIDYGDILPSGDGTYQAWASIELDPQSSNLYSCHVEHCGVHMVLQVPQESETIPLVMKAVSGSIVLVIVLAGVGVLVWRRRPREQNGAIYLPTPDR

SEQ ID NO: 883530 - protein, 308 aa, Homo sapiens
SFWLKEPGKRRTMGELMAFLLPLIIVLMVKHSDSRTHSLRYFRLGVSDPIHGVPEFISVGYVDSHPITTYDSVTRQKEPRAPWMAENLAPDHWERYTQLLRGWQQMFKVELKRLQRHYNHSDNVAHTIKQAWEANQHELLYQKNWLEEECIAWLKRFLEYGKDTLQRTEPPLVRVNRKETFPGVTALFCKAHGFYPPEIYMTWMKNGEEIVQEIDYGDILPSGDGTYQAWASIELDPQSSNLYSCHVEHCGVHMVLQVPQESETIPLVMKAVSGSIVLVIVLAGVGVLVWRRRPREQNGAIYLPTPDR

SEQ ID NO: 883531 - protein, 261 aa, Homo sapiens
SFWLKEPGKRRTMGELMAFLLPLIIVLMVKHSDSRTHSLRYFRLGVSDPIHGVPEFISVGYVDSHPITTYDSVTRQKEPRAPWMAENLAPDHWERYTQLLRGWQQMFKVELKRLQRHYNHSGSHTYQRMIGCELLEDGSTTGFLQYAYDGQDFLIFNKDTLSWLAVDNVAHTIKQAWEANQHELLYQKNWLEEECIAWLKRFLEYGKDTLQRTESETIPLVMKAVSGSIVLVIVLAGVGVLVWRRRPREQNGAIYLPTPDR

SEQ ID NO: 883532 - protein, 261 aa, Homo sapiens; identical to SEQ ID NO: 883531

SEQ ID NO: 883533 - protein, 327 aa, Homo sapiens
WQCWKEQETGRKRGTHSLRYFRLGVSDPIHGVPEFISVGYVDSHPITTYDSVTRQKEPRAPWMAENLAPDHWERYTQLLRGWQQMFKVELKRLQRHYNHSGSHTYQRMIGCELLEDGSTTGFLQYAYDGQDFLIFNKDTLSWLAVDNVAHTIKQAWEANQHELLYQKNWLEEECIAWLKRFLEYGKDTLQRTEPPLVRVNRKETFPGVTALFCKAHGFYPPEIYMTWMKNGEEIVQEIDYGDILPSGDGTYQAWASIELDPQSSNLYSCHVEHCGVHMVLQVPQGKDGDRGCLGREPGERGEQETMLAAREGRIDHCLTQCALEWVF

SEQ ID NO: 883534 - protein, 261 aa, Homo sapiens; identical to SEQ ID NO: 883531

SEQ ID NO: 883535 - protein, 232 aa, Homo sapiens
SFWLKEPGKRRTMGELMAFLLPLIIVLMVKHSDSRTHSLRYFRLGVSDPIHGVPEFISVGYVDSHPITTYDSVTRQKEPRAPWMAENLAPDHWERYTQLLRGWQQMFKVELKRLQRHYNHSGSHTYQRMIGCELLEDGSTTGFLQYAYDGQDFLIFNKDTLSWLAVDNVAHTIKQAWEANQHELLYQKNWLEEECIAWLKRFLEYGKDTLQRTGKEKEKASFPHCLNNCFYT

SEQ ID NO: 883536 - protein, 332 aa, Homo sapiens
WQCWKEQETGRKRGTHSLRYFRLGVSDPIHGVPEFISVGYVDSHPITTYDSVTRQKEPRAPWMAENLAPDHWERYTQLLRGWQQMFKVELKRLQRHYNHSGSHTYQRMIGCELLEDGSTTGFLQYAYDGQDFLIFNKDTLSWLAVDNVAHTIKQAWEANQHELLYQKNWLEEECIAWLKRFLEYGKDTLQRTEPPLVRVNRKETFPGVTALFCKAHGFYPPEIYMTWMKNGEEIVQEIDYGDILPSGDGTYQAWASIELDPQSSNLYSCHVEHCGVHMVLQVPQESETIPLVMKAVSGSIVLVIVLAGVGVLVWRRRPREQNGAIYLPTPDR

SEQ ID NO: 883537 - protein, 160 aa, Homo sapiens
SFWLKEPGKRRTMGELMAFLLPLIIVLMVKHSDSRTHSLRYFRLGVSDPIHGVPEFISVGYVDSHPITTYDSVTRQKEPRAPWMAENLAPDHWERYTQLLRGWQQMFKVELKRLQRHYNHSGVHAAETDASPIPPQPAETPGLASNKRMLNCTCCSFGKA

SEQ ID NO: 883538 - protein, 968 aa, Homo sapiens
MVNSSRVQPQQPGDAKRPPAPRAPDPGRLMAGCAAVGASLAAPGGLCEQRGLEIEMQRIRQAAARDPPAGAAASPSPPLSSCSRQAWSRDNPGFEAEEEEEEVEGEEGGMVVEMDVEWRPGSRRSAASSAVSSVGARSRGLGGYHGAGHPSGRRRRREDQGPPCPSPVGGGDPLHRHLPLEGQPPRVAWAERLVRGLRGLWGTRLMEESSTNREKYLKSVLRELVTYLLFLIVLCILTYGMMSSNVYYYTRMMSQLFLDTPVSKTEKTNFKTLSSMEDFWKFTEGSLLDGLYWKMQPSNQTEADNRSFIFYENLLLGVPRIRQLRVRNGSCSIPQDLRDEIKECYDVYSVSSEDRAPFGPRNGTAWIYTSEKDLNGSSHWGIIATYSGAGYYLDLSRTREETAAQVASLKKNVWLDRGTRATFIDFSVYNANINLFCVVRLLVEFPATGGVIPSWQFQPLKLIRYVTTFDFFLAACEIIFCFFIFYYVVEEILEIRIHKLHYFRSFWNCLDVVIVVLSVVAIGINIYRTSNVEVLLQFLEDQNTFPNFEHLAYWQIQFNNIAAVTVFFVWIKLFKFINFNRTMSQLSTTMSRCAKDLFGFAIMFFIIFLAYAQLAYLVFGTQVDDFSTFQECIFTQFRIILGDINFAEIEEANRVLGPIYFTTFVFFMFFILLNMFLAIINDTYSEVKSDLAQQKAEMELSDLIRKGYHKALVKLKLKKNTVDDISESLRQGGGKLNFDELRQDLKGKGHTDAEIEAIFTKYDQDGDQELTEHEHQQMRDDLEKEREDLDLDHSSLPRPMSSRSFPRSLDDSEEDDDEDSGHSSRRRGSISSGVSYEEFQVLVRRVDRMEHSIGSIVSKIDAVIVKLEIMERAKLKRREVLGRLLDGVAEDERLGRDSEIHREQMERLVREELERWESDDAASQISHGLGTPVGLNGQPRPRSSRPSSSQSTEGMEGAGGNGSSNVHV

SEQ ID NO: 883539 - protein, 968 aa, Homo sapiens; identical to SEQ ID NO: 883538

SEQ ID NO: 883540 - protein, 968 aa, Homo sapiens; identical to SEQ ID NO: 883538

SEQ ID NO: 883541 - protein, 459 aa, Homo sapiens
MVNSSRVQPQQPGDAKRPPAPRAPDPGRLMAGCAAVGASLAAPGGLCEQRGLEIEMQRIRQAAARDPPAGAAASPSPPLSSCSRQAWSRDNPGFEAEEEEEEVEGEEGGMVVEMDVEWRPGSRRSAASSAVSSVGARSRGLGGYHGAGHPSGRRRRREDQGPPCPSPVGGGDPLHRHLPLEGQPPRVAWAERLVRGLRGLWGTRLMEESSTNREKYLKSVLRELVTYLLFLIVLCILTYGMMSSNVYYYTRMMSQLFLDTPVSKTEKTNFKTLSSMEDFWKFTEGSLLDGLYWKMQPSNQTEADNRSFIFYENLLLGVPRIRQLRVRNGSCSIPQDLRDEIKECYDVYSVSSEDRAPFGPRNGTAWIYTSEKDLNGSSHWGIIATYSGAGYYLDLSRTREETAAQVASLKKNVWLDRGTRATFIDFSVYNANINLFCVVRQTCRYLIALFVALKRKQDH

SEQ ID NO: 883542 - protein, 386 aa, Homo sapiens
MSQLSTTMSRCAKDLFGFAIMFFIIFLAYAQLAYLVFGTQVDDFSTFQECIFTQFRIILGDINFAEIEEANRVLGPIYFTTFVFFMFFILLNMFLAIINDTYSEVKSDLAQQKAEMELSDLIRKGYHKALVKLKLKKNTVDDISESLRQGGGKLNFDELRQDLKGKGHTDAEIEAIFTKYDQDGDQELTEHEHQQMRDDLEKEREDLDLDHSSLPRPMSSRSFPRSLDDSEEDDDEDSGHSSRRRGSISSGVSYEEFQVLVRRVDRMEHSIGSIVSKIDAVIVKLEIMERAKLKRREVLGRLLDGVAEDERLGRDSEIHREQMERLVREELERWESDDAASQISHGLGTPVGLNGQPRPRSSRPSSSQSTEGMEGAGGNGSSNVHV

SEQ ID NO: 883543 - protein, 583 aa, Homo sapiens
MVNSSRVQPQQPGDAKRPPAPRAPDPGRLMAGCAAVGASLAAPGGLCEQRGLEIEMQRIRQAAARDPPAGAAASPSPPLSSCSRQAWSRDNPGFEAEEEEEEVEGEEGGMVVEMDVEWRPGSRRSAASSAVSSVGARSRGLGGYHGAGHPSGRRRRREDQGPPCPSPVGGGDPLHRHLPLEGQPPRVAWAERLVRGLRGLWGTRLMEESSTNREKYLKSVLRELVTYLLFLIVLCILTYGMMSSNVYYYTRMMSQLFLDTPVSKTEKTNFKTLSSMEDFWKFTEGSLLDGLYWKMQPSNQTEADNRSFIFYENLLLGVPRIRQLRVRNGSCSIPQDLRDEIKECYDVYSVSSEDRAPFGPRNGTAWIYTSEKDLNGSSHWGIIATYSGAGYYLDLSRTREETAAQVASLKKNVWLDRGTRATFIDFSVYNANINLFCVVRLLVEFPATGGVIPSWQFQPLKLIRYVTTFDFFLAACEIIFCFFIFYYVVEEILEIRIHKLHYFRSFWNCLDVVIVVLSVVAIGINIYRTSNVEVLLQFLEDQNTFPNFEHLAYWQIQFNNIAAVTVFFVWIKVIYKFHVLHFK

SEQ ID NO: 883544 - protein, 153 aa, Homo sapiens
LEGRPVWRRLRRVSEARLPSRTGSGSSQWPAGAEAGGGGSVRAAGLLSRGAGARAPLLLLHSALFWRLAPLRCRLLLDQASFSTSARGADPSGTLPPRLVLSPSPPRLRPWPRWLCATETPSWRMLEETLRMATTTMKELLSFWMLVLSTGKS

SEQ ID NO: 883545 - protein, 693 aa, Homo sapiens
MALCNGDSKLENAGGDLKDGHHHYEGAVVILDAGAQYGKVIDRRVRELFVQSEIFPLETPAFAIKEQGFRAIIISGGPNSVYAEDAPWFDPAIFTIGKPVLGICYGMQMMNKVFGGTVHKKSVREDGVFNISVDNTCSLFRGLQKEEVVLLTHGDSVDKVADGFKVVARSGNIVAGIANESKKLYGAQFHPEVGLTENGKVILKNFLYDIAGCSGTFTVQNRELECIREIKERVGTSKVLVLLSGGVDSTVCTALLNRALNQEQVIAVHIDNGFMRKRESQSVEEALKKLGIQVKVINAAHSFYNGTTTLPISDEDRTPRKRISKTLNMTTSPEEKRKIIGDTFVKIANEVIGEMNLKPEEVFLAQGTLRPDLIESASLVASGKAELIKTHHNDTELIRKLREEGKVIEPLKDFHKDEVRILGRELGLPEELVSRHPFPGPGLAIRVICAEEPYICKDFPETNNILKIVADFSASVKKPHTLLQRVKACTTEEDQEKLMQITSLHSLNAFLLPIKTVGVQGDCRSYSYVCGISSKDEPDWESLIFLARLIPRMCHNVNRVVYIFGPPVKEPPTDVTPTFLTTGVLSTLRQADFEAHNILRESGYAGKISQMPVILTPLHFDRDPLQKQPSCQRSVVIRTFITSDFMTGIPATPGNEIPVEVVLKMVTEIKKIPGISRIMYDLTSKPPGTTEWE

SEQ ID NO: 883546 - protein, 693 aa, Homo sapiens; identical to SEQ ID NO: 883545

SEQ ID NO: 883547 - protein, 693 aa, Homo sapiens; identical to SEQ ID NO: 883545

SEQ ID NO: 883548 - protein, 125 aa, Homo sapiens
SGRAGRFGGGCGGYLRLGCQAERALAPPSGRPGRKQEAGAACALLVFSPAALGPALRCCCSIRRFSGGWLLSAAGCSSTRPPSQPQPAAPTLPAPSRPVSYCRRHRRGSGPGPDGSVQRRLQDDE

SEQ ID NO: 883549 - protein, 144 aa, Homo sapiens
SGRAGRFGGGCGGYLRLGCQAERALAPPSGRPGRKQEAGAACALLVFSPAALGPALRCCCSIRRFSGGWLLSAAGCSSTRPPSQPQPAAPTLPAPSRPVSYCRRHRRGSGPGPDGSVQRRLQESDHDTTKRSSVGHSTKSWSDL

SEQ ID NO: 883550 - protein, 620 aa, Homo sapiens
MALCNGDSKLENAGGDLKDGHHHYEGAVVILDAGAQYGKVIDRRVRELFVQSEIFPLETPAFAIKEQGFRAIIISGGPNSVYAEDAPWFDPAIFTIGKPVLGICYGMQMMNKVFGGTVHKKSVREDGVFNISVDNTCSLFRGLQKEEVVLLTHGDSVDKVADGFKVVARSGNIVAGIANESKKLYGAQFHPEVGLTENGKVILKNFLYDIAGCSGTFTVQNRELECIREIKERVGTSKVLVLLSGGVDSTVCTALLNRALNQEQVIAVHIDNGFMRKRESQSVEEALKKLGIQVKVINAAHSFYNGTTTLPISDEDRTPRKRISKTLNMTTSPEEKRKIIGDTFVKIANEVIGEMNLKPEEVFLAQGTLRPDLIESASLVASGKAELIKTHHNDTELIRKLREEGKVIEPLKDFHKDEVRILGRELGLPEELVSRHPFPGPGLAIRVICAEEPYICKDFPETNNILKIVADFSASVKKPHTLLQRVKACTTEEDQEKLMQITSLHSLNAFLLPIKTVGVQGDCRSYSYVCGISSKDEPDWESLIFLARLIPRMCHNVNRVVYIFGPPVKEPPTDVTPTFLTTGVLSTLRQADFEAHNILRESGYAGKISQMPVILTPLYY

SEQ ID NO: 883551 - protein, 98 aa, Homo sapiens
  misc_feature (36)..(36): Xaa can be any naturally occurring amino acid
  misc_feature (82)..(82): Xaa can be any naturally occurring amino acid
  misc_feature (85)..(85): Xaa can be any naturally occurring amino acid
  misc_feature (89)..(90): Xaa can be any naturally occurring amino acid
PEQVAYSAFVAECEPGLRGGIYAEPIDEYCVQQLTXFRWESLVSVTKEGLALPEDEEEKKKMEESKAKFKNLCKLMNRHLDXKIXKVTXXNRLMSHKS

SEQ ID NO: 883552 - protein, 412 aa, Homo sapiens
MALCNGDSKLENAGGDLKDGHHHYEGAVVILDAGAQYGKVIDRRVRELFVQSEIFPLETPAFAIKEQGFRAIIISGGPNSVYAEDAPWFDPAIFTIGKPVLGICYGMQMMNKVFGGTVHKKSVREDGVFNISVDNTCSLFRGLQKEEVVLLTHGDSVDKVADGFKVVARSGNIVAGIANESKKLYGAQFHPEVGLTENGKVILKNFLYDIAGCSGTFTVQNRELECIREIKERVGTSKVLVLLSGGVDSTVCTALLNRALNQEQVIAVHIDNGFMRKRESQSVEEALKKLGIQVKVINAAHSFYNGTTTLPISDEDRTPRKRISKTLNMTTSPEEKRKIIGDTFVKIANEVIGEMNLKPEEVFLAQGTLRPDLIESASLVASGKAELIKTHHNDTELIRKLREEGETWTSGR

SEQ ID NO: 883553 - protein, 1093 aa, Homo sapiens
CNLTTVHCSCLRGEPPEPWHSSLLKLGNDPPHLKPAGAEATFDQTQALGDRWGNFPLPLLRPGTQQRNFVENELKDATQGEYLLRSHHAGLPTRARQHDKVKAEYVHLNHPLTLVTRERDLAVKEKHQLQAKLENLEQVLKHMREAAERRQQLQLEHDQALAVLSAKQQEIDLLQKPQKTNLQCPHFRKCPMLSQLTMTFVSTLGFKRQKTQTGNCFCAQSLKMWLQTWLDPGLKSAGLRPSRIQGLPDITRTWLLSALLWISFSLGFPVETPSHSSPDPPGGKVAAASPPPKPKSNRKGLPSPAAFSGRGPLPSVGPTPPRSPVAEGSDCAWHRGGPDPSQSRGSSQERSSRRWRKRPEEQACYPEDPAIQEAQVEAKKEHEGAVRLLESKVRELEEKCRTQSEQFNLLSRDLEKFRQHAGKIDLLGGSAVAPLDISTAPSKPFPQFMNGLATSLGKGQESAIGGSSAIGEYIRPLPQPGDRPEPLSAKPTFLSRSGSARCRSESDMENERNSNTSKQRYSGKVHLCVARYSYNPFDGPNENPEAELPLTAGKYLYVYGDMDEDGFYEGELLDGQRGLVPSNFVDFVQDNESRLASTLGNEQDQNFINHSGIGLEGEHILDLHSPTHIDAGITDNSAGTLDVNIDDIGEDIVPYPRKITLIKQLAKSVIVGWEPPAVPPGWGTVSSYNVLVDKETRMNLTLGSRTKALIEKLNMAACTYRISVQCVTSRGSSDELQCTLLVGKDVVVAPSHLRVDNITQISAQLSWLPTNSNYSHVIFLNEEEFDIVKAARYKYQFFNLRPNMAYKVKVLAKPHQMPWQLPLEQREKKEAFVEFSTLPAGPPAPPQDVTVQAGVTPATIRVSWRPPVLTPTGLSNGANVTGYGVYAKGQRVAEVIFPTADSTAVELVRLRSLEAKGVTVRTLSAQGESVDSAVAAVPPELLVPPTPHPRPAPQSKPLASSGVPETKDEHLGPHARMDEAWEQSRAPGPVHGHMLEPPVGPGRRSPSPSRILPQPQGTPVSTTVAKAMAREAAQRVAESSRLEKRSVFLERSSAGQYAASDEEDAYDSPDFKRRGASVDDFLKGSELGKQMVS

SEQ ID NO: 883554 - protein, 1194 aa, Homo sapiens
CNLTTVHCSCLRGEPPEPWHSSLLKLGNDPPHLKPAGAEATFDQTQALGDRWGNFPLPLLRPGTQQRNFVENELKDATQGEYLLRSHHAGLPTRARQHDKVKAEYVHLNHPLTLVTRERDLAVKEKHQLQAKLENLEQVLKHMREAAERRQQLQLEHDQALAVLSAKQQEIDLLQKSKVRELEEKCRTQSEQFNLLSRDLEKFRQHAGKIDLLGGSAVAPLDISTAPSKPFPQFMNGLATSLGKGQESAIGGSSAIGEYIRPLPQPGDRPEPLSAKPTFLSRSGSARCRSESDMENERNSNTSKQRYSGKVHLCVARYSYNPFDGPNENPEAELPLTAGKYLYVYGDMDEDGFYEGELLDGQRGLVPSNFVDFVQDNESRLASTLGNEQDQNFINHSGIGLEGEHILDLHSPTHIDAGITDNSAGTLDVNIDDIGEDIVPYPRKITLIKQLAKSVIVGWEPPAVPPGWGTVSSYNVLVDKETRMNLTLGSRTKALIEKLNMAACTYRISVQCVTSRGSSDELQCTLLVGKDVVVAPSHLRVDNITQISAQLSWLPTNSNYSHVIFLNEEEFDIVKAARYKYQFFNLRPNMAYKVKVLAKPHQMPWQLPLEQREKKEAFVEFSTLPAGPPAPPQDVTVQAGVTPATIRVSWRPPVLTPTGLSNGANVTGYGVYAKGQRVAEVIFPTADSTAVELVRLRSLEAKGVTVRTLSAQGESVDSAVAAVPPELLVPPTPHPRPAPQSKPLASSGVPETKDEHLGPHARMDEAWEQSRAPGPVHGHMLEPPVGPGRRSPSPSRILPQPQGTPVSTTVAKAMAREAAQRVAESSRLEKRSVFLERSSAGQYAASDEEDAYDSPDFKRRGASVDDFLKGSELGKQPHCCHGDEYHTESSRGSDLSDIMEEDEEELYSEMQLEDGGRRRPSGTSHNALKILGNPASAGRVDHMGRRFPRGSAGPQRSRPVTVPSIDDYGRDRLSPDFYEESETDPGAEELPARIFVALFDYDPLTMSPNPDAAEEELPFKEGQIIKVYGDKDADGFYRGETCARLGLIPCNMVSEIQADDEEMMDQLLRQGFLPLNTPVEKIERSRRSGRRHSVSTRRMVALYDYDPRESSPNVDVEAELTFCTGDIITVFGEIDEDGFYYGELNGQKGLVPSNFLEEVPDDVEVYLSDAPSHYSQDTPMRSKAKRKKSVHFTP

SEQ ID NO: 883555 - protein, 1208 aa, Homo sapiens
CNLTTVHCSCLRGEPPEPWHSSLLKLGNDPPHLKPAGAEATFDQTQALGDRWGNFPLPLLRPGTQQRNFVENELKDATQGEYLLRSHHAGLPTRARQHDKVKAEYVHLNHPLTLVTRERDLAVKEKHQLQAKLENLEQVLKHMREAAERRQQLQLEHDQALAVLSAKQQEIDLLQKAQVEAKKEHEGAVRLLESKVRELEEKCRTQSEQFNLLSRDLEKFRQHAGKIDLLGGSAVAPLDISTAPSKPFPQFMNGLATSLGKGQESAIGGSSAIGEYIRPLPQPGDRPEPLSAKPTFLSRSGSARCRSESDMENERNSNTSKQRYSGKVHLCVARYSYNPFDGPNENPEAELPLTAGKYLYVYGDMDEDGFYEGELLDGQRGLVPSNFVDFVQDNESRLASTLGNEQDQNFINHSGIGLEGEHILDLHSPTHIDAGITDNSAGTLDVNIDDIGEDIVPYPRKITLIKQLAKSVIVGWEPPAVPPGWGTVSSYNVLVDKETRMNLTLGSRTKALIEKLNMAACTYRISVQCVTSRGSSDELQCTLLVGKDVVVAPSHLRVDNITQISAQLSWLPTNSNYSHVIFLNEEEFDIVKAARYKYQFFNLRPNMAYKVKVLAKPHQMPWQLPLEQREKKEAFVEFSTLPAGPPAPPQDVTVQAGVTPATIRVSWRPPVLTPTGLSNGANVTGYGVYAKGQRVAEVIFPTADSTAVELVRLRSLEAKGVTVRTLSAQGESVDSAVAAVPPELLVPPTPHPRPAPQSKPLASSGVPETKDEHLGPHARMDEAWEQSRAPGPVHGHMLEPPVGPGRRSPSPSRILPQPQGTPVSTTVAKAMAREAAQRVAESSRLEKRSVFLERSSAGQYAASDEEDAYDSPDFKRRGASVDDFLKGSELGKQPHCCHGDEYHTESSRGSDLSDIMEEDEEELYSEMQLEDGGRRRPSGTSHNALKILGNPASAGRVDHMGRRFPRGSAGPQRSRPVTVPSIDDYGRDRLSPDFYEESETDPGAEELPARIFVALFDYDPLTMSPNPDAAEEELPFKEGQIIKVYGDKDADGFYRGETCARLGLIPCNMVSEIQADDEEMMDQLLRQGFLPLNTPVEKIERSRRSGRRHSVSTRRMVALYDYDPRESSPNVDVEAELTFCTGDIITVFGEIDEDGFYYGELNGQKGLVPSNFLEEVPDDVEVYLSDAPSHYSQDTPMRSKAKRVSKPI

SEQ ID NO: 883556 - protein, 1240 aa, Homo sapiens
CVYFFPQLGNDPPHLKPAGAEATFDQTQALGDRWGNFPLPLLRPGTQQRNFVENELKDATQGEYLLRSHHAGLPTRARQHDKVKAEYVHLNHPLTLVTRERDLAVKEKHQLQAKLENLEQVLKHMREAAERRQQLQLEHDQALAVLSAKQQEIDLLQKAQVEAKKEHEGAVRLLENTLDSMQVFQRIASSLPGVLGDAFPVSGRGHESWACSDLPLLPELQLLTQSKVRELEEKCRTQSEQFNLLSRDLEKFRQHAGKIDLLGGSAVAPLDISTAPSKPFPQFMNGLATSLGKGQESAIGGSSAIGEYIRPLPQPGDRPEPLSAKPTFLSRSGSARCRSESDMENERNSNTSKQRYSGKVHLCVARYSYNPFDGPNENPEAELPLTAGKYLYVYGDMDEDGFYEGELLDGQRGLVPSNFVDFVQDNESRLASTLGNEQDQNFINHSGIGLEGEHILDLHSPTHIDAGITDNSAGTLDVNIDDIGEDIVPYPRKITLIKQLAKSVIVGWEPPAVPPGWGTVSSYNVLVDKETRMNLTLGSRTKALIEKLNMAACTYRISVQCVTSRGSSDELQCTLLVGKDVVVAPSHLRVDNITQISAQLSWLPTNSNYSHVIFLNEEEFDIVKAARYKYQFFNLRPNMAYKVKVLAKPHQMPWQLPLEQREKKEAFVEFSTLPAGPPAPPQDVTVQAGVTPATIRVSWRPPVLTPTGLSNGANVTGYGVYAKGQRVAEVIFPTADSTAVELVRLRSLEAKGVTVRTLSAQGESVDSAVAAVPPELLVPPTPHPRPAPQSKPLASSGVPETKDEHLGPHARMDEAWEQSRAPGPVHGHMLEPPVGPGRRSPSPSRILPQPQGTPVSTTVAKAMAREAAQRVAESSRLEKRSVFLERSSAGQYAASDEEDAYDSPDFKRRGASVDDFLKGSELGKQPHCCHGDEYHTESSRGSDLSDIMEEDEEELYSEMQLEDGGRRRPSGTSHNALKILGNPASAGRVDHMGRRFPRGSAGPQRSRPVTVPSIDDYGRDRLSPDFYEESETDPGAEELPARIFVALFDYDPLTMSPNPDAAEEELPFKEGQIIKVYGDKDADGFYRGETCARLGLIPCNMVSEIQADDEEMMDQLLRQGFLPLNTPVEKIERSRRSGRRHSVSTRRMVALYDYDPRESSPNVDVEAELTFCTGDIITVFGEIDEDGFYYGELNGQKGLVPSNFLEEVPDDVEVYLSDAPSHYSQDTPMRSKAKRVSKPI

SEQ ID NO: 883557 - protein, 895 aa, Homo sapiens
CNLTTVHCSCLRGEPPEPWHSSLLKLGNDPPHLKPAGAEATFDQTQALGDRWGNFPLPLLRPGTQQRNFVENELKDATQGEYLLRSHHAGLPTRARQHDKVKAEYVHLNHPLTLVTRERDLAVKEKHQLQAKLENLEQVLKHMREAAERRQQLQLEHDQALAVLSAKQQEIDLLQKAQVEAKKEHEGAVRLLESKVRELEEKCRTQSEQFNLLSRDLEKFRQHAGKIDLLGGSAVAPLDISTAPSKPFPQFMNGLATSLGKGQESAIGGSSAIGEYIRPLPQPGDRPEPLSAKPTFLSRSGSARCRSESDMENERNSNTSKQRYSGKVHLCVARYSYNPFDGPNENPEAELPLTAGKYLYVYGDMDEDGFYEGELLDGQRGLVPSNFVDFVQDNESRLASTLGNEQDQNFINHSGIGLEGEHILDLHSPTHIDAGITDNSAGTLDVNIDDIGEDIVPYPRKITLIKQLAKSVIVGWEPPAVPPGWGTVSSYNVLVDKETRMNLTLGSRTKALIEKLNMAACTYRISVQCVTSRGSSDELQCTLLVGKDVVVAPSHLRVDNITQISAQLSWLPTNSNYSHVIFLNEEEFDIVKAARYKYQFFNLRPNMAYKVKVLAKPHQMPWQLPLEQREKKEAFVEFSTLPAGPPAPPQDVTVQAGVTPATIRVSWRPPVLTPTGLSNGANVTGYGVYAKGQRVAEVIFPTADSTAVELVRLRSLEAKGVTVRTLSAQGESVDSAVAAVPPELLVPPTPHPRPAPQSKPLASSGVPETKDEHLGPHARMDEAWEQSRAPGPVHGHMLEPPVGPGRRSPSPSRILPQPQGTPVSTTVAKAMAREAAQRVAESSRLEKRSVFLERSSAGQYAASDEEDAYDSPDFKRRGASVDDFLKGSELGKQGN

SEQ ID NO: 883558 - protein, 836 aa, Homo sapiens
CNLTTVHCSCLRGEPPEPWHSSLLKLGNDPPHLKPAGAEATFDQTQALGDRWGNFPLPLLRPGTQQRNFVENELKDATQGEYLLRSHHAGLPTRARQHDKVKAEYVHLNHPLTLVTRERDLAVKEKHQLQAKLENLEQVLKHMREAAERRQQLQLEHDQALAVLSAKQQEIDLLQKAQVEAKKEHEGAVRLLESKVRELEEKCRTQSEQFNLLSRDLEKFRQHAGKIDLLGGSAVAPLDISTAPSKPFPQFMNGLATSLGKGQESAIGGSSAIGEYIRPLPQPGDRPEPLSAKPTFLSRSGSARCRSESDMENERNSNTSKQRYSGKVHLCVARYSYNPFDGPNENPEAELPLTAGKYLYVYGDMDEDGFYEGELLDGQRGLVPSNFVDFVQDNESRLASTLGNEQDQNFINHSGIGLEGEHILDLHSPTHIDAGITDNSAGTLDVNIDDIGEDIVPYPRKITLIKQLAKSVIVGWEPPAVPPGWGTVSSYNVLVDKETRMNLTLGSRTKALIEKLNMAACTYRISVQCVTSRGSSDELQCTLLVGKDVVVAPSHLRVDNITQISAQLSWLPTNSNYSHVIFLNEEEFDIVKAARYKYQFFNLRPNMAYKVKVLAKPHQMPWQLPLEQREKKEAFVEFSTLPAGPPAPPQDVTVQAGVTPATIRVSWRPPVLTPTGLSNGANVTGYGVYAKGQRVAEVIFPTADSTAVELVRLRSLEAKGVTVRTLSAQGESVDSAVAAVPPELLVPPTPHPRPAPQSKPLASSGVPETKDEHLGPHARMDEAWEQSRAPGPVHGHMLEPPVGPASCHSHRAPRCPPPSPRPWPGRPRRGWPRAAG

SEQ ID NO: 883559 - protein, 146 aa, Homo sapiens
CNLTTVHCSCLRGEPPEPWHSSLLKLGNDPPHLKPAGAEATFDQTQALGDRWGNFPLPLLRPGTQQRNFVENELKDATQGEYLLRSHHAGLPTRARQHDKVKAEYVHLNHPLTLVTRERDLAVKEKHQLQAKLENLEQVLKDVKHS

SEQ ID NO: 883560 - protein, 835 aa, Homo sapiens
RIHTGTDTSRHTRRHTHTRARILPPACPPARRRPEPALAACFLLRKLPALEDGTLPHPDTLGMNYEGARSERENHAADDSEGGALDMCCSERLPGLPQPIVMEALDEAEGLQDSQREMPPPPPPSPPSDPAQKPPPRGAGSHSLTVRSSLCLFAASQFLLACGVLWFSGYGHIWSQNATNLVSSLLTLLKQLEPTAWLDSGTWGVPSLLLVFLSVGLVLVTTLVWHLLRTPPEPPTPLPPEDRRQSVSRQPSFTYSEWMEEKIEDDFLDLDPVPETPVFDCVMDIKPEADPTSLTVKSMGLQERRGSNVSLTLDMCTPGCNEEGFGYLMSPREESAREYLLSASRVLQAEELHEKALDPFLLQAEFFEIPMNFVDPKEYDIPGLVRKNRYKTILPNPHSRVCLTSPDPDDPLSSYINANYIRGYGGEEKVYIATQGPIVSTVADFWRMVWQEHTPIIVMITNIEEMNEKCTEYWPEEQVAYDGVEITVQKVIHTEDYRLRLISLKSGTEERGLKHYWFTSWPDQKTPDRAPPLLHLVREVEEAAQQEGPHCAPIIVHCSAGIGRTGCFIATSICLPAAAAGGCGGHPEDHVPAPSGQGRHDPDMRAVPVCAPRHEPLRKAAVPPVPRMTALLLQGSLGTAQPESRPSPRALPRVLGLLPASSPSVSSLCPLSAWPDPYPPALLFLLYILGSGGQGREGTCQARPGAPGPDPHHADPGLQFLTMVPSIPDPECFRATLCVLLQCVLSVHPSLPSVPDTVSPQPGRGNELQPLSNRTCLPRPHPHFSQKADDGELGMGSSRRSPESFQLRESSLGWSGHHSQGGLWVSDALRRVPSL

SEQ ID NO: 883561 - protein, 773 aa, Homo sapiens
SQIERQPQPPQKGGTPCLWTGRSHRRKGPSTTGLPQPIVMEALDEAEGLQDSQREMPPPPPPSPPSDPAQKPPPRGAGSHSLTVRSSLCLFAASQFLLACGVLWFSGYGHIWSQNATNLVSSLLTLLKQLEPTAWLDSGTWGVPSLLLVFLSVGLVLVTTLVWHLLRTPPEPPTPLPPEDRRQSVSRQPSFTYSEWMEEKIEDDFLDLDPVPETPVFDCVMDIKPEADPTSLTVKSMGLQERRGSNVSLTLDMCTPGCNEEGFGYLMSPREESAREYLLSASRVLQAEELHEKALDPFLLQAEFFEIPMNFVDPKEYDIPGLVRKNRYKTILPNPHSRVCLTSPDPDDPLSSYINANYIRGYGGEEKVYIATQGPIVSTVADFWRMVWQEHTPIIVMITNIEEMNEKCTEYWPEEQVAYDGVEITVQKVIHTEDYRLRLISLKSGTEERGLKHYWFTSWPDQKTPDRAPPLLHLVREVEEAAQQEGPHCAPIIVHCSAGIGRTGCFIATSICLPAAAAGGCGGHPEDHVPAPSGQGRHDPDMRAVPVCAPRHEPLRKAAVPPVPRMTALLLQGSLGTAQPESRPSPRALPRVLGLLPASSPSVSSLCPLSAWPDPYPPALLFLLYILGSGGQGREGTCQARPGAPGPDPHHADPGLQFLTMVPSIPDPECFRATLCVLLQCVLSVHPSLPSVPDTVSPQPGRGNELQPLSNRTCLPRPHPHFSQKADDGELGMGSSRRSPESFQLRESSLGWSGHHSQGGLWVSDALRRVPSL

SEQ ID NO: 883562 - protein, 806 aa, Homo sapiens
VAYTLAQTQAGTHADTRTLRAHPPASLPACSPAPGARSGRSERENHAADDSEGGALDMCCSERLPGLPQPIVMEALDEAEGLQDSQREMPPPPPPSPPSDPAQKPPPRGAGSHSLTVRSSLCLFAASQFLLACGVLWFSGYGHIWSQNATNLVSSLLTLLKQLEPTAWLDSGTWGVPSLLLVFLSVGLVLVTTLVWHLLRTPPEPPTPLPPEDRRQSVSRQPSFTYSEWMEEKIEDDFLDLDPVPETPVFDCVMDIKPEADPTSLTVKSMGLQERRGSNVSLTLDMCTPGCNEEGFGYLMSPREESAREYLLSASRVLQAEELHEKALDPFLLQAEFFEIPMNFVDPKEYDIPGLVRKNRYKTILPNPHSRVCLTSPDPDDPLSSYINANYIRGYGGEEKVYIATQGPIVSTVADFWRMVWQEHTPIIVMITNIEEMNEKCTEYWPEEQVAYDGVEITVQKVIHTEDYRLRLISLKSGTEERGLKHYWFTSWPDQKTPDRAPPLLHLVREVEEAAQQEGPHCAPIIVHCSAGIGRTGCFIATSICLPAAAAGGCGGHPEDHVPAPSGQGRHDPDMRAVPVCAPRHEPLRKAAVPPVPRMTALLLQGSLGTAQPESRPSPRALPRVLGLLPASSPSVSSLCPLSAWPDPYPPALLFLLYILGSGGQGREGTCQARPGAPGPDPHHADPGLQFLTMVPSIPDPECFRATLCVLLQCVLSVHPSLPSVPDTVSPQPGRGNELQPLSNRTCLPRPHPHFSQKADDGELGMGSSRRSPESFQLRESSLGWSGHHSQGGLWVSDALRRVPSL

SEQ ID NO: 883563 - protein, 209 aa, Homo sapiens
HLSIHPSLPLCMHLSIHPCLCVCICPSIHPHLCACICPSIPASVHASVRPSIPASVHASVRPFIPASVHASVHSSIPDSVHASVHPSILASMHAFVRPSIPASVHASIPASVHASVSLSIPDPFFVMVLSAHNSLILRRSLDPFPPLTPCCSLPSLPGQVLQPVVSTQSSLPPLLSHLSPLHSKFFPNALGLQALKRSLCPWMTKHRPM

SEQ ID NO: 883564 - protein, 209 aa, Homo sapiens; identical to SEQ ID NO: 883563

SEQ ID NO: 883565 - protein, 209 aa, Homo sapiens; identical to SEQ ID NO: 883563

SEQ ID NO: 883566 - protein, 729 aa, Homo sapiens
MTEITAEGNASTTTTVIDSKNGSVPKSPGKVLKRTVTEDIVTTFSSPAAWLLVIALIITWSAVAIVMFDLVDYKNFSASSIAKIGSDPLKLVRDAMEETTDWIYGFFSLLSDIISSEDEEDDDGDEDTDKGEIDEPPLRKKEIHKDKTEKQEKPERKIQTKVTHKEKEKGKEKVREKEKPEKKATHKEKIEKKEKPETKTVAKEQKKAKTAEKSEEKTKKEVKGGKQEKVKQTAAKVKEVQKTPSKPKEKEDKEKAAVSKHEQKDQYAFCRYMIDIFVHGDLKPGQSPAIPPPLPTEQASRPTPASPALEEKEGEKKKAEKKVTSETKKKEKEDIKKKSEKETAIDVEKKEPGKASETKQGTVKIAAQAAAKKDEKKEDSKKTKKPAEVEQPKGKKQEKKEKHVEPAKSPKKEHSVPSDKQVKAKTERAKEEIGAVSSKKAVPGKKEEKTTKTVEQEIRKEKSGKTSSILKDKEPIKGKEEKVPASLKEKEPETKKDEKMSKAGKEVKPKPPQLQGKKEEKPEPQIKKEAKPAISEKVQIHKQDIVKPEKTVSHGKPEEKVLKQVKAVTIEKTAKPKPTKKAEHREREPPSIKTDKPKPTPKGTSEVTESGKKKTEISEKESKEKADMKHLREEKVSTRKESLQLHNVTKAEKPARVSKDVEDVPASKKAKEGTEDVSPTKQKSPISFFQCVYLDGYNGYGFQFPFTPADRPGESSGQANSPGQKQQGQ

SEQ ID NO: 883567 - protein, 352 aa, Homo sapiens [sequence omitted]

SEQ ID NO: 883568 - protein, 352 aa, Homo sapiens [sequence omitted]

SEQ ID NO: 883569 - protein, 254 aa, Homo sapiens
MPAKTPIYLKAANNKKGKKFKLRDILSPDMISPPLGDFRHTIHIGKEGQHDVFGDISFLQGNYELLPGNQEKAHLGQFPGHNEFFRANSTSDSVFTETPSPVLKNAISLPTIGGSQALMLPLLSPVTFNSKQESFGPAKLPRLSCEPVMEEKAQEKSSLLENGTVHQGDTSWGSSGSASQSSQGRDSHSSSLSEQYPDWPAEDMFDHPTPCELIKGKTKSEESLSDLTGSLLSLQLDLGPSLLDEVLNVMDKNK

SEQ ID NO: 883570 - protein, 254 aa, Homo sapiens; identical to SEQ ID NO: 883569

SEQ ID NO: 883571 - protein, 254 aa, Homo sapiens; identical to SEQ ID NO: 883569

SEQ ID NO: 883572 - protein, 132 aa, Homo sapiens
MPAKTPIYLKAANNKKGKKFKLRDILSPDMISPPLGDFRHTIHIGKEGQHDVFGDISFLQGNYELLPGNQEKAHLGQFPGHNEFFRANSTSDSVFTETPSPVLKNAISLPTIGGSQALMLPLLSPVTFNSKL

SEQ ID NO: 883573 - protein, 254 aa, Homo sapiens; identical to SEQ ID NO: 883569

SEQ ID NO: 883574 - protein, 254 aa, Homo sapiens; identical to SEQ ID NO: 883569

SEQ ID NO: 883575 - protein, 254 aa, Homo sapiens; identical to SEQ ID NO: 883569

SEQ ID NO: 883576 - protein, 754 aa, Homo sapiens
EETKPLLGGDVLLSTKMGAVPAAGLFCFERDEVQMLQEGDIQVCVIRHPRTFLSKILTSKFLRRWEPHHLTLADNSLASATPTGYMENSVSYSAIEDVQLLSWENAPKYCLQLTIPGGTVLLQAANSYLRDQWFHSLQWKKKIYKYKKVLSNPSRWEVVLKEIRTLVDMALTSPLQDDSINQAPLEIVSKLLSENTNLTTQEHENIIVAIAPLLENNHPPPDLCEFFCKHCRERPRSMVVIEVFTPVVQRILKHNMDFGKCPRLRLFTQEYILALNELNAGMEVVKKFIQSMHGPTGHCPHPRVLPNLVAVCLAAIYSCYEEFINSRDNSPSLKEIRNGCQQPCDRKPTLPLRLLHPSPDLVSQEATLSEARLKSVVVASSEIHVEVERTSTAKPALTASAGNDSEPNLIDCLMVSPACSTMSIELGPQADRTLGCYVEILKLLSDYDDWRPSLASLLQPIPFPKEALAHEKFTKELKYVIQRFAEDPRQEVHSCLLSVRAGKDGWFQLYSPGGVACDDDGELFASMVHILMGSCYKTKKFLLSLAENKLGPCMLLALRGNQTMVEILCLMLEYNIIDNNDTQLQIISTLESTDVGKRMYEQLCDRQRELKELQRKGGPTRLTLPSKSTDADLARLLSSGSFGNLENLSLAFTNVTSACAEHLIKLPSLKQLNLWSTQFGDAGLRLLSEHLTMLQVLNLCETPVTDAGLLALSSMKSLCSLNMNSTKLSADTYEDLKAKLPNLKEVDVRYTEAW

SEQ ID NO: 883577 - protein, 218 aa, Homo sapiens
MSRLVLISLAENKLGPCMLLALRGNQTMVEILCLMLEYNIIDNNDTQLQIISTLESTDVGKRMYEQLCDRQRELKELQRKGGPTRLTLPSKSTDADLARLLSSGSFGNLENLSLAFTNVTSACAEHLIKLPSLKQLNLWSTQFGDAGLRLLSEHLTMLQVLNLCETPVTDAGLLALSSMKSLCSLNMNSTKLSADTYEDLKAKLPNLKEVDVRYTEAW

SEQ ID NO: 883578 - protein, 631 aa, Homo sapiens
MCLPLLTVARAMASVAQKKIYKYKKVLSNPSRWEVVLKEIRTLVDMALTSPLQDDSINQAPLEIVSKLLSENTNLTTQEHENIIVAIAPLLENNHPPPDLCEFFCKHCRERPRSMVVIEVFTPVVQRILKHNMDFGKCPRLRLFTQEYILALNELNAGMEVVKKFIQSMHGPTGHCPHPRVLPNLVAVCLAAIYSCYEEFINSRDNSPSLKEIRNGCQQPCDRKPTLPLRLLHPSPDLVSQEATLSEARLKSVVVASSEIHVEVERTSTAKPALTASAGNDSEPNLIDCLMVSPACSTMSIELGPQADRTLGCYVEILKLLSDYDDWRPSLASLLQPIPFPKEALAHEKFTKELKYVIQRFAEDPRQEVHSCLLSVRAGKDGWFQLYSPGGVACDDDGELFASMVHILMGSCYKTKKFLLSLAENKLGPCMLLALRGNQTMVEILCLMLEYNIIDNNDTQLQIISTLESTDVGKRMYEQLCDRQRELKELQRKGGPTRLTLPSKSTDADLARLLSSGSFGNLENLSLAFTNVTSACAEHLIKLPSLKQLNLWSTQFGDAGLRLLSEHLTMLQVLNLCETPVTDAGLLALSSMKSLCSLNMNSTKLSADTYEDLKAKLPNLKEVDVRYTEAW

SEQ ID NO: 883579 - protein, 137 aa, Homo sapiens
ACAVGQRELKELDADLARLLSSGSFGNLENLSLAFTNVTSACAEHLIKLPSLKQLNLWSTQFGDAGLRLLSEHLTMLQVLNLCETPVTDAGLLALSSMKSLCSLNMNSTKLSADTYEDLKAKLPNLKEVDVRYTEAW

SEQ ID NO: 883580 - protein, 754 aa, Homo sapiens; identical to SEQ ID NO: 883576

SEQ ID NO: 883581 - protein, 754 aa, Homo sapiens; identical to SEQ ID NO: 883576

SEQ ID NO: 883582 - protein, 754 aa, Homo sapiens; identical to SEQ ID NO: 883576

SEQ ID NO: 883583 - protein, 171 aa, Homo sapiens
EETKPLLGGDVLLSTKMGAVPAAGLFCFERDEVQMLQEGDIQVCVIRHPRTFLSKILTSKFLRRWEPHHLTLADNSLASATPTGYMENSVSYSAIEDVQLLSWENAPKYCLQLTIPGGTVLLQAANSYLRDQWFHSLQWKKKIYKYKKVLSNPSRWEVVLKEIRTLVDMAL

SEQ ID NO: 883584 - protein, 754 aa, Homo sapiens; identical to SEQ ID NO: 883576

SEQ ID NO: 883585 - protein, 754 aa, Homo sapiens; identical to SEQ ID NO: 883576

SEQ ID NO: 883586 - protein, 73 aa, Homo sapiens
TLVDMALTSPLQDDSINQAPLEIVSKLLSEVKPLPWTPLHCLPFPPPITGSMPSSRRRQSSVWAVLLPCCRRR

SEQ ID NO: 883587 - protein, 69 aa, Homo sapiens
SWPTKEREDLRSLVPCSLCYVKFAMLDLDILDGGDDDWFLCTALGPVSCPALRSPHGMSSAPAMLLFVH

SEQ ID NO: 883588 - protein, 144 aa, Homo sapiens
WAKASLESPTLSAPYKRQADGPEEPERLRPTQKPPPLTPKLTPSASNMKVSAALLWLLLIAAAFSPQGLAGPASVPTTCCFNLANRKIPLQRLESYRRITSGKCPQKAVIFKTKLAKDICADPKKKWVQDSMKYLDQKSPTPKP

SEQ ID NO: 883589 - protein, 129 aa, Homo sapiens
IFSSFMIYLTCGTKINQKPPPLTPKLTPSASNMKVSAALLWLLLIAAAFSPQGLAGPASVPTTCCFNLANRKIPLQRLESYRRITSGKCPQKAVIFKTKLAKDICADPKKKWVQDSMKYLDQKSPTPKP

SEQ ID NO: 883590 - protein, 144 aa, Homo sapiens; identical to SEQ ID NO: 883588

SEQ ID NO: 883591 - protein, 1162 aa, Homo sapiens
MTFGTVLLLSVLASYHGFNLDVEEPTIFQEDAGGFGQSVVQFGGSRLVVGAPLEVVAANQTGRLYDCAAATGMCQPIPLHIRPEAVNMSLGLTLAASTNGSRLLACGPTLHRVCGENSYSKGSCLLLGSRWEIIQTVPDATPECPHQEMDIVFLIDGSGSIDQNDFNQMKGFVQAVMGQFEGTDTLFALMQYSNLLKIHFTFTQFRTSPSQQSLVDPIVQLKGLTFTATGILTVVTQLFHHKNGARKSAKKILIVITDGQKYKDPLEYSDVIPQAEKAGIIRYAIGVGHAFQGPTARQELNTISSAPPQDHVFKVDNFAALGSIQKQLQEKIYAVEGTQSRASSSFQHEMSQEGFSTALTMDGLFLGAVGSFSWSGGAFLYPPNMSPTFINMSQENVDMRDSYLGYSTELALWKGVQNLVLGAPRYQHTGKAVIFTQVSRQWRKKAEVTGTQIGSYFGASLCSVDVDSDGSTDLILIGAPHYYEQTRGGQVSVCPLPRGQRVQWQCDAVLRGEQGHPWGRFGAALTVLGDVNEDKLIDVAIGAPGEQENRGAVYLFHGASESGISPSHSQRIASSQLSPRLQYFGQALSGGQDLTQDGLMDLAVGARGQVLLLRSLPVLKVGVAMRFSPVEVAKAVYRCWEEKPSALEAGDATVCLTIQKSSLDQLGDIQSSVRFDLALDPGRLTSRAIFNETKNPTLTRRKTLGLGIHCETLKLLLPDCVEDVVSPIILHLNFSLVREPIPSPQNLRPVLAVGSQDLFTASLPFEKNCGQDGLCEGDLGVTLSFSGLQTLTVGSSLELNVIVTVWNAGEDSYGTVVSLYYPAGLSHRRVSGAQKQPHQSALRLACETVPTEDEGLRSSRCSVNHPIFHEGSNGTFIVTFDVSYKATLGDRMLMRASASSENNKASSSKATFQLELPVKYAVYTMISRQEESTKYFNFATSDEKKMKEAEHRYRVNNLSQRDLAISINFWVPVLLNGVAVWDVVMEAPSQSLPCVSERKPPQHSDFLTQISRSPMLDCSIADCLQFRCDVPSFSVQEELDFTLKGNLSFGWVRETLQKKVLVVSVAEITFDTSVYSQLPGQEAFMRAQMEMVLEEDEVYNAIPIIMGSSVGALLLLALITATLYKLGFFKRHYKEMLEDKPEDTATFSGDDFSCVAPNVPLS

SEQ ID NO: 883592 - protein, 113 aa, Homo sapiens
GLTTPNPQWKQQNSPLNTYFSLPTCSLPVNRTPSPYLPTRQNLNILLDALSSPVHTFSFKPHTEKHRAGVSKCLPGLTAGVVLKLHNFGLIISLRGSPLPCPWGRKQDKSTPV

SEQ ID NO: 883593 - protein, 125 aa, Homo sapiens
GVEQLPKCSLVNRLPQSKTQVPSILASGEKMSAETTAALNACVASSCDCFGTQNRMCSSQAGSWGHGSGMEGSRNRHCCCSAPPWWGGGGSHLPAGCLQAGPDHGRPSFLPSCRGTRGPPQEAAT

SEQ ID NO: 883594 - protein, 628 aa, Homo sapiens
PGGEFGTRMSPPSPGRRREQRRPRAAATMATPLPGRAGGPATPLSPTRLSRLQEKEELRELNDRLAHYIDRVRALELENDRLLLKISEKEEVTTREVSGIKALYESELADARRVLDETARERARLQIEIGKLRAELDEVNKSAKKREGELTVAQGRVKDLESLFHRSEVELAAALSDKRGLESDVAELRAQLAKAEDGHAVAKKQLEKETLMRVDLENRCQSLQEELDFRKSVFEEEVRETRRRHERRLVEVDSSRQQEYDFKMAQALEELRSQHDEQVRLYKLELEQTYQAKLDSAKLSSDQNDKAASAAREELKEARMRLESLSYQLSGLQKQASAAEDRIRELEEAMAGERDKFRKMLDAKEQEMTEMRDVMQQQLAEYQELLDVKLALDMEINAYRKLLEGEEERLKLSPSPSSRVTVSRATSSSSGSLSATGRLGRSKRKRLEVEEPLGSGPSVLGTGTGGSGGFHLAQQASASGSVSIEEIDLEGKFVQLKNNSDKDQSLGNWRIKRQVLEGEEIAYKFTPKYILRAGQMVTVWAAGAGVAHSPPSTLVWKGQSSWGTGESFRTVLVNADGEEVAMRTVKKSSVMRENENGEEEEEEAEFGEEDLFHQQGDPRTTSRGCYVM

SEQ ID NO: 883595 - protein, 145 aa, Homo sapiens [sequence omitted]

SEQ ID NO: 883596 - protein, 339 aa, Homo sapiens
MATPLPGRAGGPATPLSPTRLSRLQEKEELRELNDRLAHYIDRVRALELENDRLLLKISEKEEVTTREVSGIKALYESELADARRVLDETARERARLQIEIGKLRAELDEVNKSAKKREGELTVAQGRVKDLESLFHRSEVELAAALSDKRGLESDVAELRAQLAKAEDGHAVAKKQLEKETLMRVDLENRCQSLQEELDFRKSVFEEEVRETRRRHERRLVEVDSSRQQEYDFKMAQALEELRSQHDEQVRLYKLELEQTYQAKLDSAKLSSDQNDKAASAAREELKEARMRLESLSYQLSSLTSLPLRRCPGDFSIPPHSSSHHLVKLEAQGQDPEV

SEQ ID NO: 883597 - protein, 145 aa, Homo sapiens [sequence omitted]

SEQ ID NO: 883598 - protein, 600 aa, Homo sapiens
MATPLPGRAGGPATPLSPTRLSRLQEKEELRELNDRLAHYIDRVRALELENDRLLLKISEKEEVTTREVSGIKALYESELADARRVLDETARERARLQIEIGKLRAELDEVNKSAKKREGELTVAQGRVKDLESLFHRSEVELAAALSDKRGLESDVAELRAQLAKAEDGHAVAKKQLEKETLMRVDLENRCQSLQEELDFRKSVFEEEVRETRRRHERRLVEVDSSRQQEYDFKMAQALEELRSQHDEQVRLYKLELEQTYQAKLDSAKLSSDQNDKAASAAREELKEARMRLESLSYQLSGLQKQASAAEDRIRELEEAMAGERDKFRKMLDAKEQEMTEMRDVMQQQLAEYQELLDVKLALDMEINAYRKLLEGEEERLKLSPSPSSRVTVSRATSSSSGSLSATGRLGRSKRKRLEVEEPLGSGPSVLGTGTGGSGGFHLAQQASASGSVSIEEIDLEGKFVQLKNNSDKDQSLGNWRIKRQVLEGEEIAYKFTPKYILRAGQMVTVWAAGAGVAHSPPSTLVWKGQSSWGTGESFRTVLVNADGEEVAMRTVKKSSVMRENENGEEEEEEAEFGEEDLFHQQGDPRTTSRGCYVM

SEQ ID NO: 883599 - protein, 600 aa, Homo sapiens; identical to SEQ ID NO: 883598

SEQ ID NO: 883600 - protein, 68 aa, Homo sapiens
MAFTAGRGRHRSPVTASRLPGDLPVAGRNGGPQPQAGKEPAADKAETPAAPRSPCSLSLLSEVPVPCR

SEQ ID NO: 883601 - protein, 68 aa, Homo sapiens; identical to SEQ ID NO: 883600

SEQ ID NO: 883602 - protein, 600 aa, Homo sapiens; identical to SEQ ID NO: 883598

SEQ ID NO: 883603 - protein, 600 aa, Homo sapiens; identical to SEQ ID NO: 883598

SEQ ID NO: 883604 - protein, 600 aa, Homo sapiens; identical to SEQ ID NO: 883598

SEQ ID NO: 883605 - protein, 600 aa, Homo sapiens; identical to SEQ ID NO: 883598

SEQ ID NO: 883606 - protein, 180 aa, Homo sapiens
LGIRAGLNVRGETIPLCKPCRVTRSLAPSLRSIRRHPALGRRVSLLLLRGVVVWLGASSERAELSLHETDRSSDYMTPLELNLWSHAPLFLRSYGRFYVLGGCGCWKPVSTLVTCYRLNIILEGALPCCAWKRYGGRPSSSDAAEDPADVKAETADCSNVSPPARLSLVVIYNSRITHLV

SEQ ID NO: 883607 - protein, 600 aa, Homo sapiens; identical to SEQ ID NO: 883598

SEQ ID NO: 883608 - protein, 600 aa, Homo sapiens; identical to SEQ ID NO: 883598

SEQ ID NO: 883609 - protein, 600 aa, Homo sapiens; identical to SEQ ID NO: 883598

SEQ ID NO: 883610 - protein, 587 aa, Homo sapiens
MATPLPGRAGGPATPLSPTRLSRLQEKEELRELNDRLAHYIDRVRALELENDRLLLKISEKEEVTTREVSGIKALYESELADARRVLDETARERARLQIEIGKLRAELDEVNKSAKKREGELTVAQGRVKDLESLFHRSEVELAAALSDKRGLESDVAELRAQLAKAEDGHAVAKKQLEKETLMRVDLENRCQSLQEELDFRKSVFEEEVRETRRRHERRLVEVDSSRQQEYDFKMAQALEELRSQHDEQVRLYKLELEQTYQAKLDSAKLSSDQNDKAASAAREELKEARMRLESLSYQLSGLQKQASAAEDRIRELEEAMAGERDKFRKMLDAKEQEMTEMRDVMQQQLAEYQELLDVKLALDMEINAYRKLLEGEEERLKLSPSPSSRVTVSRATSSSSGSLSATGRLGRSKRKRLEVEEPLGSGPSVLGTGTGGSGGFHLAQQASASGSVSIEEIDLEGKFVQLKNNSDKDQSLGNWRIKRQVLEGEEIAYKFTPKYILRAGQMVTVWAAGAGVAHSPPSTLVWKGQSSWGTGESFRTVLVNADGEEVAMRTVKKSSVMRENENGEEEEEEAEFGEEDLFHQQ

SEQ ID NO: 883611 - protein, 549 aa, Homo sapiens
MATPLPGRAGGPATPLSPTRLSRLQEKEELRELNDRLAHYIDRVRALELENDRLLLKISEKEEVTTREVSGIKALYESELADARRVLDETARERARLQIEIGKLRAELDEVNKSAKKREGELTVAQGRVKDLESLFHRSEVELAAALSDKRGLESDVAELRAQLAKAEDGHAVAKKQLEKETLMRVDLENRCQSLQEELDFRKSVFEEEVRETRRRHERRLVEVDSSRQQEYDFKMAQALEELRSQHDEQVRLYKLELEQTYQAKLDSAKLSSDQNDKAASAAREELKEARMRLESLSYQLSGLQKQASAAEDRIRELEEAMAGERDKFRKMLDAKEQEMTEMRDVMQQQLAEYQELLDVKLALDMEINAYRKLLEGEEERLKLSPSPSSRVTVSRATSSSSGSLSATGRLGRSKRKRLEVEEPLGSGPSVLGTGTGGSGGFHLAQQASASGSVSIEEIDLEGKFVQLKNNSDKDQSLGNWRIKRQVLEGEEIAYKFTPKYILRAGQMVTVWAPGAGVLYTTSFLLSWICPFTLLSTSFCKFSSPFLFI

SEQ ID NO: 883612 - protein, 68 aa, Homo sapiens
  misc_feature (27)..(27): Xaa can be any naturally occurring amino acid
PNFHHANQSKLIKRQKKTPIADTAKCXAKPAVRSAKANRRYQAVKRQITSLRSRKVIMLFKGPEAFKV

SEQ ID NO: 883613 - protein, 600 aa, Homo sapiens; identical to SEQ ID NO: 883598

SEQ ID NO: 883614 - protein, 433 aa, Homo sapiens
TVLVWGSAFHYCYQTLMRVDLENRCQSLQEELDFRKSVFEEEVRETRRRHERRLVEVDSSRQQEYDFKMAQALEELRSQHDEQVRLYKLELEQTYQAKLDSAKLSSDQNDKAASAAREELKEARMRLESLSYQLSGLQKQASAAEDRIRELEEAMAGERDKFRKMLDAKEQEMTEMRDVMQQQLAEYQELLDVKLALDMEINAYRKLLEGEEERLKLSPSPSSRVTVSRATSSSSGSLSATGRLGRSKRKRLEVEEPLGSGPSVLGTGTGGSGGFHLAQQASASGSVSIEEIDLEGKFVQLKNNSDKDQSLGNWRIKRQVLEGEEIAYKFTPKYILRAGQMVTVWAAGAGVAHSPPSTLVWKGQSSWGTGESFRTVLVNADGEEVAMRTVKKSSVMRENENGEEEEEEAEFGEEDLFHQQGDPRTTSRGCYVM

SEQ ID NO: 883615 - protein, 589 aa, Homo sapiens
MATPLPGRAGGPATPLSPTRLSRLQEKEELRELNDRLAHYIDRVRALELENDRLLLKISEKEEVTTREVSGIKALYESELADARRVLDETARERARLQIEIGKLRAELDEVNKSAKKREGELTVAQGRVKDLESLFHRSEVELAAALSDKRGLESDVAELRAQLAKAEDGHAVAKKQLEKETLMRVDLENRCQSLQEELDFRKSVFEEEVRETRRRHERRLVEVDSSRQQEYDFKMAQALEELRSQHDEQVRLYKLELEQTYQAKLDSAKLSSDQNDKAASAAREELKEARMRLESLSYQLSGLQKQASAAEDRIRELEEAMAGERDKFRKMLDAKEQEMTEMRDVMQQQLAEYQELLDVKLALDMEINAYRKLLEGEEERLKLSPSPSSRVTVSRATSSSSGSLSATGRLGRSKRKRLEVEEPLGSGPSVLGTGTGGSGGFHLAQQASASGSVSIEEIDLEGKFVQLKNNSDKDQSLGNWRIKRQVLEGEEIAYKFTPKYILRAGQMVTVWAAGAGVAHSPPSTLVWKGQSSWGTGESFRTVLVNADGERTGRVSRTVDFIWGSFPAVQFLTVQGQQGRGGEDLGKEE

SEQ ID NO: 883616 - protein, 600 aa, Homo sapiens; identical to SEQ ID NO: 883598

SEQ ID NO: 883617 - protein, 600 aa, Homo sapiens; identical to SEQ ID NO: 883598

SEQ ID NO: 883618 - protein, 245 aa, Homo sapiens
PGGEFGTRMSPPSPGRRREQRRPRAAATMATPLPGRAGGPATPLSPTRLSRLQEKEELRELNDRLAHYIDRVRALELENDRLLLKISEKEEVTTREVSGIKALYESELADARRVLDETARERARLQIEIGKLRAELDEVNKSAKKREGELTVAQGRVKDLESLFHRSEVELAAALSDKRGLESDVAELRAQLAKAEDGHAVAKKQLEKGCPCSQKSRSHVDRGGRILPKHFLLEATPLCSQSGGW

SEQ ID NO: 883619 - protein, 600 aa, Homo sapiens; identical to SEQ ID NO: 883598

SEQ ID NO: 883620 - protein, 600 aa, Homo sapiens; identical to SEQ ID NO: 883598

SEQ ID NO: 883621 - protein, 600 aa, Homo sapiens; identical to SEQ ID NO: 883598

SEQ ID NO: 883622 - protein, 600 aa, Homo sapiens; identical to SEQ ID NO: 883598

SEQ ID NO: 883623 - protein, 597 aa, Homo sapiens
MATPLPGRAGGPATPLSPTRLSRLQEKEELRELNDRLAHYIDRVRALELENDRLLLKISEKEEVTTREVSGIKALYESELADARRVLDETARERARLQIEIGKLRAELDEVNKSAKKREGELTVAQGRVKDLESLFHRSEVELAAALSDKRGLESDVAELRAQLAKAEDGHAVAKKQLEKETLMRVDLENRCQSLQEELDFRKSVFEEEVRETRRRHERRLVEVDSSRQQEYDFKMAQALEELRSQHDEQVRLYKLELEQTYQAKLDSAKLSSDQNDKAASAAREELKEARMRLESLSYQLSGLQKQASAAEDRIRELEEAMAGERDKFRKMLDAKEQEMTEMRDVMQQQLAEYQELLDVKLALDMEINAYRKLLEGEEERLKLSPSPSSRVTVSRATSSSSGSLSATGRLGRSKRKRLEVEEPLGSGPSVLGTGTGGSGGFHLAQQASASGSVSIEEIDLEGKFVQLKNNSDKDQSLGNWRIKRQVLEGEEIAYKFTPKYILRAGQMVTVWAAGAGVAHSPPSTLVWKGQSSWGTGESFRTVLVNADGEEVAMRTVKKSSVMRENENGEEEEEEAEFGEEDLFHQQVGPLCPLAAG

SEQ ID NO: 883624 - protein, 68 aa, Homo sapiens; identical to SEQ ID NO: 883600

SEQ ID NO: 883625 - protein, 70 aa, Homo sapiens
RGSGGGGKRSRDRCCQRSRDRCQCSNLPGTPPLPLWACAVSMGIPIKGPGTCASYVAAAHALTPDHMHVP

SEQ ID NO: 883626 - protein, 435 aa, Homo sapiens [sequence omitted]

SEQ ID NO: 883627 - protein, 435 aa, Homo sapiens [sequence omitted]

SEQ ID NO: 883628 - protein, 435 aa, Homo sapiens [sequence omitted]

SEQ ID NO: 883629 - protein, 376 aa, Homo sapiens [sequence omitted]

SEQ ID NO: 883630 - protein, 435 aa, Homo sapiens [sequence omitted]

SEQ ID NO: 883631 - protein, 435 aa, Homo sapiens [sequence omitted]

SEQ ID NO: 883632 - protein, 375 aa, Homo sapiens
MNTSHLLALLLPKSPQGENRSKPLGTPYNFSEHCQDSVDVMVFIVTSYSIETVVGVLGNLCLMCVTVRQKEKANVTNLLIANLAFSDFLMCLLCQPLTAVYTIMDYWIFGETLCKMSAFIQCMSVTVSILSLVLVALERHQLIINPTGWKPSISQAYLGIVLIWVIACVLSLPFLANSILENVFHKNHSKALEFLADKVVCTESWPLAHHRTIYTTFLLLFQYCLPLGFILVCYARIYRRLQRQGRVFHKGTYSLRAGHMKQVNVVLVVMVVAFAVLWLPLHVFNSLEDWHHEAIPICHGNLIFLVCHLLAMASTCVNPFIYGFLNTNFKKEIKALVLTCQQSAPLEESEHLPLSTVHTEVSKGSLRLSGRSNPI

SEQ ID NO: 883633 - protein, 284 aa, Homo sapiens
AAAAAGMAEARSQPSAGPQLNALPDHSPLLQPGLAALRRRAREAGVPLAPLPLTDSFLLRFLRARDFDLDLAWRLLKNYYKWRAECPEISADLHPRSIIGLLKAGYHGVLRSRDPTGSKVLIYRIAHWDPKVFTAYDVFRVSLITSELIVQEVETQRNGIKAIFDLEGWQFSHAFQITPSVAKKIAAVLTDSFPLKVRGIHLINEPVIFHAVFSMIKPFLTEKIKERIHMHGNNYKQSLLQHFPDILPLEYGGEEFSMEDICQEWTNFIMKSEDYLSSISESIQ

SEQ ID NO: 883634 - protein, 118 aa, Homo sapiens
MTSNKDLYKRSTEGDMRFLIPPAKIRDIITRPCVCFLLSIKMKNKSGGENTQVFELKLRVPFLIFPRFEFLLRYGDLSSFISVATAWETDFSQYQRESSPPFFLQASVCSICDASDCN

SEQ ID NO: 883635 - protein, 118 aa, Homo sapiens
MSLIILTRDDEPRIFTPDSDAASPALHSTSPLPDPASASPLHREEKILPKVCNIVSCLSFSLPASPTDSGLASPTIITREGQQFWAKCLIWKYQLYLHGLHKKSDGRRDKQISASPST

SEQ ID NO: 883636 - protein, 323 aa, Homo sapiens
MSAVCGGAARMLRTPGRHGYAAEFSPYLPGRLACATAQHYGIAGCGTLLILDPDEAGLRLFRSFDWNDGLFDVTWSENNEHVLITCSGDGSLQLWDTAKAAGPLQVYKEHAQEVYSVDWSQTRGEQLVVSGSWDQTVKLWDPTVGKSLCTFRGHESIIYSTIWSPHIPGCFASASGDQTLRIWDVKAAGVRIVIPAHQAEILSCDWCKYNENLLVTGAVDCSLRGWDLRNVRQPVFELLGHTYAIRRVKFSPFHASVLASCSYDFTVRFWNFSKPDSLLETVEHHTEFTCGLDFSLQSPTQVADCSWDETIKIYDPACLTIPA

SEQ ID NO: 883637 - protein, 122 aa, Homo sapiens
MSAVCGGAARMLRTPGRHGYAAEFSPYLPGRLACATAQHYGIAGCGTLLILDPDEAGLRLFRSFDWNDGLFDVTWSENNEHVLITCSGDGSLQLWDTAKAAGPLQVYKEHAQEYVQGSCVVK

SEQ ID NO: 883638 - protein, 199 aa, Homo sapiens
MSAVCGGAARMLRTPGRHGYAAEFSPYLPGRLACATAQHYGIAGCGTLLILDPDEAGLRLFRSFDWNDGLFDVTWSENNEHVLITCSGDGSLQLWDTAKAAGPLQVYKEHAQEVYSVDWSQTRGEQLVVSGSWDQTVKLWDPTVGKSLCTFRGHESIIYSTIWSPHIPGCFASASDSGTFQSLTLFLKQWSIIQSLLVV

SEQ ID NO: 883639 - protein, 323 aa, Homo sapiens; identical to SEQ ID NO: 883636

SEQ ID NO: 883640 - protein, 122 aa, Homo sapiens; identical to SEQ ID NO: 883637

SEQ ID NO: 883641 - protein, 187 aa, Homo sapiens
MSAVCGGAARMLRTPGRHGYAAEFSPYLPGRLACATAQHYGIAGCGTLLILDPDEAGLRLFRSFDWNDGLFDVTWSENNEHVLITCSGDGSLQLWDTAKAAGPLQVYKEHAQEFSPFHASVLASCSYDFTVRFWNFSKPDSLLETVEHHTEFTCGLDFSLQSPTQVADCSWDETIKIYDPACLTIPA

SEQ ID NO: 883642 - protein, 296 aa, Homo sapiens
MLSPKDILRKDLKLVHGYPMTCAFASNWEKIEQFHSRPDDIVIATYPKSGTTWVSEIIDMILNDGDIEKCKRGFITEKVPMLEMTLPGLRTSGIEQLEKNPSPRIVKTHLPTDLLPKSFWENNCKMIYLARNAKDVSVSYYHFDLMNNLQPFPGTWEEYLEKFLTGKVAYGSWFTHVKNWWKKKEEHPILFLYYEDMKENPKEEIKKIIRFLEKNLNDEILDRIIHHTSFEVMKDNPLVNYTHLPTTVMDHSKSPFMRKGTAGDWKNYFTVAQNEKFDAIYETEMSKTALQFRTEI

SEQ ID NO: 883643 - protein, 296 aa, Homo sapiens; identical to SEQ ID NO: 883642

SEQ ID NO: 883644 - protein, 264 aa, Homo sapiens
MTKFSSFSLFFLIVGAYMTHVCFNMEIIGGKEVSPHSRPFMASIQYGGHHVCGGVLIDPQWVLTAAHCQYRFTKGQSPTVVLGAHSLSKNEASKQTLEIKKFIPFSRVTSDPQSNDIMLVKLQTAAKLNKHVKMLHIRSKTSLRSGTKCKVTGWGATDPDSLRPSDTLREVTVTVLSRKLCNSQSYYNGDPFITKDMVCAGDAKGQKDSCKGDSGGPLICKGVFHAIVSGGHECGVATKPGIYTLLTKKYQTWIKSNLVPPHTN

SEQ ID NO: 883645 - protein, 264 aa, Homo sapiens; identical to SEQ ID NO: 883644

SEQ ID NO: 883646 - protein, 219 aa, Homo sapiens
PSRPSPLPTGGFGNHSAAFIVFAFFRFTKGQSPTVVLGAHSLSKNEASKQTLEIKKFIPFSRVTSDPQSNDIMLVKLQTAAKLNKHVKMLHIRSKTSLRSGTKCKVTGWGATDPDSLRPSDTLREVTVTVLSRKLCNSQSYYNGDPFITKDMVCAGDAKGQKDSCKGDSGGPLICKGVFHAIVSGGHECGVATKPGIYTLLTKKYQTWIKSNLVPPHTN

SEQ ID NO: 883647 - protein, 119 aa, Homo sapiens
WNTRTKRLTLLSLKDKQGSCSCNRVDRGRSTLGLKWRSQPGKTGLDPEASSREGRQGCLKISHLSAQLLDSLSPSTLPELRTYSPGAQGSHSLHTRGIMDSGLLARVTAKRASLFSQAS

SEQ ID NO: 883648 - protein, 866 aa, Homo sapiens
MEEGNNNEEVIHLNNFHCHRGQEWINLRDGPITISDSSDEERIPMLVTPAPQQHEEEDLDDDVILTEDDSEDDYGEFLDLGPPGISEFTKPSGQTEREPKPGPSHNQAANDIVNPRSEQKVIILEEGSLLYTESDPLETQNQSSEDSETELLSNLGESAALADDQAIEEDCWLDHPYFQSLNQQPREITNQVVPQERQPEAELGRLLFQHEFPGPAFPRPEPQQGGISGPSSPQPAHPLGEFEDQQLASDDEEPGPAFPMQESQEPNLENIWGQEAAEVDQELVELLVKETEARFPDVANGFIEEIIHFKNYYDLNVLCNFLLENPDYPKREDRIIINPSSSLLASQDETKLPKIDFFDYSKLTPLDQRCFIQAADLLMADFKVLSSQDIKWALHELKGHYAITRKALSDAIKKWQELSPETSGKRKKRKQMNQYSYIDFKFEQGDIKIEKRMFFLENKRRHCRSYDRRALLPAVQQEQEFYEQKIKEMAEHEDFLLALQMNEEQYQKDGQLIECRCCYGEFPFEELTQCADAHLFCKECLIRYAQEAVFGSGKLELSCMEGSCTCSFPTSELEKVLPQTILYKYYERKAEEEVAAAYADELVRCPSCSFPALLDSDVKRFSCPNPHCRKETCRKCQGLWKEHNGLTCEELAEKDDIKYRTSIEEKMTAARIRKCHKCGTGLIKSEGCNRMSCRCGAQMCYLCRVSINGYDHFCQHPRSPGAPCQECSRCSLWTDPTEDDEKLIEEIQKEAEEEQKRKNGENTFKRIGPPLEKPVEKVQRVEALPRPVPQNLPQPQMPPYAFAHPPFPLPPVRPVFNNFPLNMGPIPAPYVPPLPNVRVNYDFGPIHMPLEHNLPMHFGPQPRHRF

SEQ ID NO: 883649 - protein, 923 aa, Homo sapiens
MEEGNNNEEVIHLNNFHCHRGQEWINLRDGPITISDSSDEERIPMLVTPAPQQHEEEDLDDDVILTETNKPQRSRPNLIKPAAQWQDLKRLGEERPKKSRAAFESDKSSYFSVCNNPLFDSGAQDDSEDDYGEFLDLGPPGISEFTKPSGQTEREPKPGPSHNQAANDIVNPRSEQKVIILEEGSLLYTESDPLETQNQSSEDSETELLSNLGESAALADDQAIEEDCWLDHPYFQSLNQQPREITNQVVPQERQPEAELGRLLFQHEFPGPAFPRPEPQQGGISGPSSPQPAHPLGEFEDQQLASDDEEPGPAFPMQESQEPNLENIWGQEAAEVDQELVELLVKETEARFPDVANGFIEEIIHFKNYYDLNVLCNFLLENPDYPKREDRIIINPSSSLLASQDETKLPKIDFFDYSKLTPLDQRCFIQAADLLMADFKVLSSQDIKWALHELKGHYAITRKALSDAIKKWQELSPETSGKRKKRKQMNQYSYIDFKFEQGDIKIEKRMFFLENKRRHCRSYDRRALLPAVQQEQEFYEQKIKEMAEHEDFLLALQMNEEQYQKDGQLIECRCCYGEFPFEELTQCADAHLFCKECLIRYAQEAVFGSGKLELSCMEGSCTCSFPTSELEKVLPQTILYKYYERKAEEEVAAAYADELVRCPSCSFPALLDSDVKRFSCPNPHCRKETCRKCQGLWKEHNGLTCEELAEKDDIKYRTSIEEKMTAARIRKCHKCGTGLIKSEGCNRMSCRCGAQMCYLCRVSINGYDHFCQHPRSPGAPCQECSRCSLWTDPTEDDEKLIEEIQKEAEEEQKRKNGENTFKRIGPPLEKPVEKVQRVEALPRPVPQNLPQPQMPPYAFAHPPFPLPPVRPVFNNFPLNMGPIPAPYVPPLPNVRVNYDFGPIHMPLEHNLPMHFGPQPRHRF

SEQ ID NO: 883650 - protein, 200 aa, Homo sapiens
MTAARIRKCHKCGTGLIKSEGCNRMSCRCGAQMCYLCRVSINGYDHFCQHPRSPGAPCQECSRCSLWTDPTEDDEKLIEEIQKEAEEEQKRKNGENTFKRIGPPLEKPVEKVQRVEALPRPVPQNLPQPQMPPYAFAHPPFPLPPVRPVFNNFPLNMGPIPAPYVPPLPNVRVNYDFGPIHMPLEHNLPMHFGPQPRHRF

SEQ ID NO: 883651 - protein, 209 aa, Homo sapiens
MFSYFSEEKMTAARIRKCHKCGTGLIKSEGCNRMSCRCGAQMCYLCRVSINGYDHFCQHPRSPGAPCQECSRCSLWTDPTEDDEKLIEEIQKEAEEEQKRKNGENTFKRIGPPLEKPVEKVQRVEALPRPVPQNLPQPQMPPYAFAHPPFPLPPVRPVFNNFPLNMGPIPAPYVPPLPNVRVNYDFGPIHMPLEHNLPMHFGPQPRHRF

SEQ ID NO: 883652 - protein, 54 aa, Homo sapiens
DIKIEKRMFFLENKRRHCRSYDRRALLPAVQQEQEFYEQKIKEMAEVGRCALVL

SEQ ID NO: 883653 - protein, 866 aa, Homo sapiens; identical to SEQ ID NO: 883648

SEQ ID NO: 883654 - protein, 866 aa, Homo sapiens; identical to SEQ ID NO: 883648

SEQ ID NO: 883655 - protein, 866 aa, Homo sapiens; identical to SEQ ID NO: 883648

SEQ ID NO: 883656 - protein, 79 aa, Homo sapiens
TLPLVLPCKCNVTPWLPVSWRLHGSCFCHQTNTRLSPGQSPSPFPLAAGALADEAALTGRCWGADPAGNMVRHLEDSAP

SEQ ID NO: 883657 - protein, 151 aa, Homo sapiens
MEGQRQESHATLTLAQAHFNNGEYAEAEALYSAYIRRCACAASSDESPGSKCSPEDLATAYNNRGQIKYFRVDFYEAMDDYTSAIEVQPNFEVPYYNRGLILYRLGYFDDALEDFKKVLDLNPGFQDATLSLKQTILDKEEKQRRNVAKNY

SEQ ID NO: 883658 - protein, 132 aa, Homo sapiens
MDVSEGTTMSSSHSYLISSRQCWNHSDRLISKCSPEDLATAYNNRGQIKYFRVDFYEAMDDYTSAIEVQPNFEVPYYNRGLILYRLGYFDDALEDFKKVLDLNPGFQDATLSLKQTILDKEEKQRRNVAKNY

SEQ ID NO: 883659 - protein, 118 aa, Homo sapiens
TRQRTEYYCRTDCTDFHAEKLINASPFSIRAGYSIIIPFKNVFYHMVTFSIIVDNPAFTIRAGESVRPKKINNITVSFEGNPSGSKTPITTKLTVSCPPGEGSETGVKWVYYLKGITL

SEQ ID NO: 883660 - protein, 132 aa, Homo sapiens
LFEPSHLGETKGILILSSLAGGEYIIPLFGMALPPKPQGPFSIRAGYSIIIPFKNVFYHMVTFSIIVDNPAFTIRAGESVRPKKINNITVSFEGNPSGSKTPITTKLTVSCPPGEGSETGVKWVYYLKGITL

SEQ ID NO: 883661 - protein, 280 aa, Homo sapiens
AGKAGSSWGQGLGRVDLLCLWGLCRGPEAVCPECRWSWQLPSCGPTGRAEHGRCPFLLGISWHRDVWLDLEHVEVVPAESTGHGSWECSGCGVVALAGGDLVAALGAEAPTAAWGAAGVGRGGFWEHFLPLYCIPNPGCLGRGGARGGARPAGGWASLDLKWRGLSAGPGCWSLGGPVSSPPFRSPPLCHRKGLTFVSVHDCYWTHAADVSVMNQVCREQFVRLHSEPILQDLSRFLVKRFCSEPQKILEASQLKETLQAVPKPGAFDLEQVKRSTYFFS

SEQ ID NO: 883662 - protein, 1122 aa, Homo sapiens [sequence omitted]

SEQ ID NO: 883663 - protein, 1270 aa, Homo sapiens
MSALCWGRGAAGLKRALRPCGRPGLPGKEGTAGGVCGPRRSSSASPQEQDQDRRKDWGHVELLEVLQARVRQLQAESVSEVVVNRVDVARLPECGSGDGSLQPPRKVQMGAKDATPVPCGRWAKILEKDKRTQQMRMQRLKAKLQMPFQSGEFKALTRRLQVEPRLLSKQMAGCLEDCTRQAPESPWEEQLARLLQEAPGKLSLDVEQAPSGQHSQAQLSGQQQRLLAFFKCCLLTDQLPLAHHLLVVHHGQRQKRKLLTLDMYNAVMLGWARQGAFKELVYVLFMVKDAGLTPDLLSYAAALQCMGRQDQDAGTIERCLEQMSQEGLKLQALFTAVLLSEEDRATVLKAVHKVKPTFSLPPQLPPPVNTSKLLRDVYAKDGRVSYPKLHLPLKTLQCLFEKQLHMELASRVCVVSVEKPTLPSKEVKHARKTLKTLRDQWEKALCRALRETKNRLEREVYEGRFSLYPFLCLLDEREVVRMLLQVLQALPAQGESFTTLARELSARTFSRHVVQRQRVSGQVQALQNHYRKYLCLLASDAEVPEPCLPRQYWEALGAPEALREQPWPLPVQMELGKLLAEMLVQATQMPCSLDKPHRSSRLVPVLYHVYSFRNVQQIGILKPHPAYVQLLEKAAEPTLTFEAVDVPMLCPPLPWTSPHSGAFLLSPTKLMRTVEGATQHQELLETCPPTALHGALDALTQLGNCAWRVNGRVLDLVLQLFQAKGCPQLGVPAPPSEAPQPPEAHLPHSAAPARKAELRRELAHCQKVAREMHSLRAEALYRLSLAQHLRDRVFWLPHNMDFRGRTYPCPPHFNHLGSDVARALLEFAQGRPLGPHGLDWLKIHLVNLTGLKKREPLRKRLAFAEEVMDDILDSADQPLTGRKWWMGAEEPWQTLACCMEVANAVRASDPAAYVSHLPVHQDGSCNGLQHYAALGRDSVGAASVNLEPSDVPQDVYSGVAAQVEVFRRQDAQRGMRVAQVLEGFITRKVVKQTVMTVVYGVTRYGGRLQIEKRLRELSDFPQEFVWEASHYLVRQVFKSLQEMFSGTRAIQHWLTESARLISHMGSVVEWVTPLGVPVIQPYRLDSKVKQIGGGIQSITYTHNGDISRKPNTRKQKNGFPPNFIHSLDSSHMMLTALHCYRKGLTFVSVHDCYWTHAADVSVMNQVPPYLSLSPPMGGAPTLGRWVGVVPRACLITPGDPLTPAQVCREQFVRLHSEPILQDLSRFLVKRFCSEPQKILEASQLKETLQAVPKPGAFDLEQVKRSTYFFS

SEQ ID NO: 883664 - protein, 1030 aa, Homo sapiens
VLPPQTECYLHNGDISRKPNTRKQRLLAFFKCCLLTDQLPLAHHLLVVHHGQRQKRKLLTLDMYNAVMLGWARQGAFKELVYVLFMVKDAGLTPDLLSYAAALQCMGRQDQDAGTIERCLEQMSQEGLKLQALFTAVLLSEEDRATVLKAVHKVKPTFSLPPQLPPPVNTSKLLRDVYAKDGRVSYPKLHLPLKTLQCLFEKQLHMELASRVCVVSVEKPTLPSKEVKHARKTLKTLRDQWEKALCRALRETKNRLEREVYEGRFSLYPFLCLLDEREVVRMLLQVLQALPAQGESFTTLARELSARTFSRHVVQRQRVSGQVQALQNHYRKYLCLLASDAEVPEPCLPRQYWEALGAPEALREQPWPLPVQMELGKLLAEMLVQATQMPCSLDKPHRSSRLVPVLYHVYSFRNVQQIGILKPHPAYVQLLEKAAEPTLTFEAVDVPMLCPPLPWTSPHSGAFLLSPTKLMRTVEGATQHQELLETCPPTALHGALDALTQLGNCAWRVNGRVLDLVLQLFQAKGCPQLGVPAPPSEAPQPPEAHLPHSAAPARKAELRRELAHCQKVAREMHSLRAEALYRLSLAQHLRDRVFWLPHNMDFRGRTYPCPPHFNHLGSDVARALLEFAQGRPLGPHGLDWLKIHLVNLTGLKKREPLRKRLAFAEEVMDDILDSADQPLTGRKWWMGAEEPWQTLACCMEVANAVRASDPAAYVSHLPVHQDGSCNGLQHYAALGRDSVGAASVNLEPSDVPQDVYSGVAAQVEVFRRQDAQRGMRVAQVLEGFITRKVVKQTVMTVVYGVTRYGGRLQIEKRLRELSDFPQEFVWEASHYLVRQVFKSLQEMFSGTRAIQHWLTESARLISHMGSVVEWVTPLGVPVIQPYRLDSKVKQIGGGIQSITYTHNGDISRKPNTRKQKNGFPPNFIHSLDSSHMMLTALHCYRKGLTFVSVHDCYWTHAADVSVMNQVCREQFVRLHSEPILQDLSRFLVKRFCSEPQKILEASQLKETLQAVPKPGAFDLEQVKRSTYFFS

SEQ ID NO: 883665 - protein, 965 aa, Homo sapiens
MGHIHTVLSLRRKQPTSGGAVNGLPRLCQLPASPPLPPPARCPVSLLEGSRPGGSRPLVCTAGTDFTRSPPFPASAIATSNLQETQKRVHPCCLGVLGGQVPSGKPPTSLPPSLQDGRVSYPKLHLPLKTLQCLFEKQLHMELASRVCVVSVEKPTLPSKEVKHARKTLKTLRDQWEKALCRALRETKNRLEREVYEGRFSLYPFLCLLDEREVVRMLLQVLQALPAQGESFTTLARELSARTFSRHVVQRQRVSGQVQALQNHYRKYLCLLASDAEVPEPCLPRQYWEALGAPEALREQPWPLPVQMELGKLLAEMLVQATQMPCSLDKPHRSSRLVPVLYHVYSFRNVQQIGILKPHPAYVQLLEKAAEPTLTFEAVDVPMLCPPLPWTSPHSGAFLLSPTKLMRTVEGATQHQELLETCPPTALHGALDALTQLGNCAWRVNGRVLDLVLQLFQAKGCPQLGVPAPPSEAPQPPEAHLPHSAAPARKAELRRELAHCQKVAREMHSLRAEALYRLSLAQHLRDRVFWLPHNMDFRGRTYPCPPHFNHLGSDVARALLEFAQGRPLGPHGLDWLKIHLVNLTGLKKREPLRKRLAFAEEVMDDILDSADQPLTGRKWWMGAEEPWQTLACCMEVANAVRASDPAAYVSHLPVHQDGSCNGLQHYAALGRDSVGAASVNLEPSDVPQDVYSGVAAQVEVFRRQDAQRGMRVAQVLEGFITRKVVKQTVMTVVYGVTRYGGRLQIEKRLRELSDFPQEFVWEASHYLVRQVFKSLQEMFSGTRAIQHWLTESARLISHMGSVVEWVTPLGVPVIQPYRLDSKVKQIGGGIQSITYTHNGDISRKPNTRKQKNGFPPNFIHSLDSSHMMLTALHCYRKGLTFVSVHDCYWTHAADVSVMNQVCREQFVRLHSEPILQDLSRFLVKRFCSEPQKILEASQLKETLQAVPKPGAFDLEQVKRSTYFFS

SEQ ID NO: 883666 - protein, 132 aa, Homo sapiens
AGKAGSSWGQGLGRVDLLCLWGLCRGPEAVCPECRWSWQLPSCGPTGRAEHGRCPFLLGISWHRDVWLDLEHVEVVPAESTGHGSWECSGCGVVALAGGDLVAALGAEAPTAAWGAAGVGRGGFWEHFLPLY

SEQ ID NO: 883667 - protein, 73 aa, Homo sapiens
PPTSLPPSLQDGRVSYPKLHLPLKTLQCLFEKQLHMELASRVCVVSVEKPTLPSKEVKHAVGAEPGSRVRRRG

SEQ ID NO: 883668 - protein, 1245 aa, Homo sapiens
MRRRGPVGWPGAACVMSALCWGRGAAGLKRALRPCGRPGLPGKEGTAGGVCGPRRSSSASPQEQDQDRRKDWGHVELLEVLQARVRQLQAESVSEVVVNRVDVARLPECGSGDGSLQPPRKVQMGAKDATPVPCGRWAKILEKDKRTQQMRMQRLKAKLQMPFQSGEFKALTRRLQVEPRLLSKQMAGCLEDCTRQAPESPWEEQLARLLQEAPGKLSLDVEQAPSGQHSQAQLSGQQQRLLAFFKCCLLTDQLPLAHHLLVVHHGQRQKRKLLTLDMYNAVMLGWARQGAFKELVYVLFMVKDAGLTPDLLSYAAALQCMGRQDQDAGTIERCLEQMSQEGLKLQALFTAVLLSEEDRATVLKAVHKVKPTFSLPPQLPPPVNTSKLLRDVYAKDGRVSYPKLHLPLKTLQCLFEKQLHMELASRVCVVSVEKPTLPSKEVKHARKTLKTLRDQWEKALCRALRETKNRLEREVYEGRFSLYPFLCLLDEREVVRMLLQVLQALPAQGESFTTLARELSARTFSRHVVQRQRVSGQVQALQNHYRKYLCLLASDAEVPEPCLPRQYWEALGAPEALREQPWPLPVQMELGKLLAEMLVQATQMPCSLDKPHRSSRLVPVLYHVYSFRNVQQIGILKPHPAYVQLLEKAAEPTLTFEAVDVPMLCPPLPWTSPHSGAFLLSPTKLMRTVEGATQHQELLETCPPTALHGALDALTQLGNCAWRVNGRVLDLVLQLFQAKGCPQLGVPAPPSEAPQPPEAHLPHSAAPARKAELRRELAHCQKVAREMHSLRAEALYRLSLAQHLRDRVFWLPHNMDFRGRTYPCPPHFNHLGSDVARALLEFAQGRPLGPHGLDWLKIHLVNLTGLKKREPLRKRLAFAEEVMDDILDSADQPLTGRKWWMGAEEPWQTLACCMEVANAVRASDPAAYVSHLPVHQDGSCNGLQHYAALGRDSVGAASVNLEPSDVPQDVYSGVAAQVEVFRRQDAQRGMRVAQVLEGFITRKVVKQTVMTVVYGVTRYGGRLQIEKRLRELSDFPQEFVWEASHYLVRQVFKSLQEMFSGTRAIQHWLTESARLISHMGSVVEWVTPLGVPVIQPYRLDSKVKQIGGGIQSITYTHNGDISRKPNTRKQKNGFPPNFIHSLDSSHMMLTALHCYRKGLTFVSVHDCYWTHAADVSVMNQVCREQFVRLHSEPILQDLSRFLVKRFCSEPQKILEASQLKETLQAVPKPGAFDLEQVKRSTYFFS

SEQ ID NO: 883669 - protein, 185 aa, Homo sapiens
TLMLSQQTPHDNCTQSENQLKDKRTQQMRMQRLKAKLQMPFQSGEFKALTRRLQVEPRLLSKQMAGCLEDCTRQAPESPWEEQLARLLQEAPGKLSLDVEQAPSGQHSQAQLSGQQQRLLAFFKCCLLTDQLPLAHHLLVVHHGQRQKRKLLTLDMYNAVMLGWARQVGRVRDRIGPASTRSHSR

SEQ ID NO: 883670 - protein, 1252 aa, Homo sapiens
MRRRGPVGWPGAACVMSALCWGRGAAGLKRALRPCGRPGLPGKEGTAGGVCGPRRSSSASPQEQDQDRRKDWGHVELLEVLQARVRQLQAESVSEVVVNRVDVARLPECGSGDGSLQPPRKVQMGAKDATPVPCGRWAKILEKDKRTQQMRMQRLKAKLQMPFQSGEFKALTRRLQVEPRLLSKQMAGCLEDCTRQAPESPWEEQLARLLQEAPGKLSLDVEQAPSGQHSQAQLSGQQQRLLAFFKCCLLTDQLPLAHHLLVVHHGQRQKRKLLTLDMYNAVMLGWARQGAFKELVYVLFMVKDAGLTPDLLSYAAALQCMGRQDQDAGTIERCLEQMSQEGLKLQALFTAVLLSEEDRATVLKAVHKVKPTFSLPPQLPPPVNTSKLLRDVYAKDGRVSYPKLHLPLKTLQCLFEKQLHMELASRVCVVSVEKPTLPSKEVKHARKTLKTLRDQWEKALCRALRETKNRLEREVYEGRFSLYPFLCLLDEREVVRMLLQVLQALPAQGESFTTLARELSARTFSRHVVQRQRVSGQVQALQNHYRKYLCLLASDAEVPEPCLPRQYWEALGAPEALREQPWPLPVQMELGKLLAEMLVQATQMPCSLDKPHRSSRLVPVLYHVYSFRNVQQIGILKPHPAYVQLLEKAAEPTLTFEAVDVPMLCPPLPWTSPHSGAFLLSPTKLMRTVEGATQHQELLETCPPTALHGALDALTQLGNCAWRVNGRVLDLVLQLFQAKGCPQLGVPAPPSEAPQPPEAHLPHSAAPARKAELRRELAHCQKVAREMHSLRAEALYRLSLAQHLRDRVFWLPHNMDFRGRTYPCPPHFNHLGSDVARALLEFAQGRPLGPHGLDWLKIHLVNLTGLKKREPLRKRLAFAEEVMDDILDSADQPLTGRKWWMGAEEPWQTLACCMEVANAVRASDPAAYVSHLPVHQDGSCNGLQHYAALGRDSVGAASVNLEPSDVPQDVYSGVAAQVEVFRRQDAQRGMRVAQVLEGFITRKVVKQTVMTVVYGVTRYGGRLQIEKRLRELSDFPQEFVWEASHYLVRQVFKSLQEMFSGTRAIQHWLTESARLISHMGSVVEWVTPLGVPVIQPYRLDSKVKQIGGGIQSITYTHNGDISRKPNTRKQKNGFPPNFIHSLDSSHMMLTALHCYRSPPLCHRKGLTFVSVHDCYWTHAADVSVMNQVCREQFVRLHSEPILQDLSRFLVKRFCSEPQKILEASQLKETLQAVPKPGAFDLEQVKRSTYFFS

SEQ ID NO: 883671 - protein, 1162 aa, Homo sapiens
MRRRGPVGWPGAACVMSALCWGRGAAGLKRALRPCGRPGLPGKEGTAGGVCGPRRSSSASPQEQDQDRRKDWGHVELLEVLQARVRQLQAESVSEVVVNRVDVARLPECGSGDGSLQPPRKVQMGAKDATPVPCGRWAKILEKDKRTQQMRMQRLKAKLQMPFQSGEFKALTRRLQVEPRLLSKQMAGCLEDCTRQAPESPWEEQLARLLQEAPGKLSLDVEQAPSGQHSQAQLSGQQQRLLAFFKCCLLTDQLPLAHHLLVVHHGQRQKRKLLTLDMYNAVMLGWARQGAFKELVYVLFMVKDAGLTPDLLSYAAALQCMGRQDQDAGTIERCLEQMSQEGLKLQALFTAVLLSEEDRATVLKAVHKVKPTFSLPPQLPPPVNTSKLLRDVYAKDGRVSYPKLHLPLKTLQCLFEKQLHMELASRVCVVSVEKPTLPSKEVKHARKTLKTLRDQWEKALCRALRETKNRLEREVYEGRFSLYPFLCLLDEREVVRMLLQVLQALPAQGESFTTLARELSARTFSRHVVQRQRVSGQVQALQNHYRKYLCLLASDAEVPEPCLPRQYWEALGAPEALREQPWPLPVQMELGKLLAEMLVQATQMPCSLDKPHRSSRLVPVLYHVYSFRNVQQIGILKPHPAYVQLLEKAAEPTLTFEAVDVPMLCPPLPWTSPHSGAFLLSPTKLMRTVEGATQHQELLETCPPTALHGALDALTQLGNCAWRVNGRVLDLVLQLFQAKGCPQLGVPAPPSEAPQPPEAHLPHSAAPARKAELRRELAHCQKVAREMHSLRAEALYRLSLAQHLRDRVFWLPHNMDFRGRTYPCPPHFNHLGSDVARALLEFAQGRPLGPHGLDWLKIHLVNLTGLKKREPLRKRLAFAEEVMDDILDSADQPLTGRKWWMGAEEPWQTLACCMEVANAVRASDPAAYVSHLPVHQDGSCNGLQHYAALGRDSVGAASVNLEPSDVPQDVYSGVAAQVEVFRRQDAQRGMRVAQVLEGFITRKVVKQTVMTVVYGVTRYGGRLQIEKRLRELSDFPQEFVWEASHYLVRQVFKSLQEMFSGTRAIQHWLTESARLISHMGSVVEWVTPLGVPVIQPYRLDSKVKQIGGGIQSITYTHNGDISRKPNTRKQKNGFPPNFIHSLDSSHMRPRGGLMRRGGLMRP

SEQ ID NO: 883672 - protein, 616 aa, Homo sapiens
MRRRGPVGWPGAACVMSALCWGRGAAGLKRALRPCGRPGLPGKEGTAGGVCGPRRSSSASPQEQDQDRRKDWGHVELLEVLQARVRQLQAESVSEVVVNRVDVARLPECGSGDGSLQPPRKVQMGAKDATPVPCGRWAKILEKDKRTQQMRMQRLKAKLQMPFQSGEFKALTRRLQVEPRLLSKQMAGCLEDCTRQAPESPWEEQLARLLQEAPGKLSLDVEQAPSGQHSQAQLSGQQQRLLAFFKCCLLTDQLPLAHHLLVVHHGQRQKRKLLTLDMYNAVMLGWARQGAFKELVYVLFMVKDAGLTPDLLSYAAALQCMGRQDQDAGTIERCLEQMSQEGLKLQALFTAVLLSEEDRATVLKAVHKVKPTFSLPPQLPPPVNTSKLLRDVYAKDGRVSYPKLHLPLKTLQCLFEKQLHMELASRVCVVSVEKPTLPSKEVKHARKTLKTLRDQWEKALCRALRETKNLPRARGQIGGGIQSITYTHNGDISRKPNTRKQKNGFPPNFIHSLDSSHMMLTALHCYRKGLTFVSVHDCYWTHAADVSVMNQVCREQFVRLHSEPILQDLSRFLVKRFCSEPQKILEASQLKETLQAVPKPGAFDLEQVKRSTYFFS

SEQ ID NO: 883673 - protein, 53 aa, Homo sapiens
MEAPAHTPGPAQPLSSFPQGPPVASAAPGGARPPAPRSKTKTAGRTGATWSCW

SEQ ID NO: 883674 - protein, 189 aa, Homo sapiens
ETPPSNLTLNPTSDTMTCCQTSFCGYPSFSISGTCGSSCCQPSCCETSCCQPRSCQTSFCGFPSFSTSGTCSSSCCQPSCCETSCCQPSCCETSCCQPSCCQISSCGTGCGIGGGISYGQEGSSGAVSTRIRWCRPDSRVEGTYLPPCCVVSCTPPSCCQLHHAQASCCRPSYCGQSCCRPVCCCEPTC

SEQ ID NO: 883675 - protein, 614 aa, Homo sapiens
CFFFQAKSPKEAEADLSFDSYHSTQTDLGPSLGKPGETSPPDSKSSPSVLIHSLGKSTTDNDVRIQQLQEILQDLQKRLESSEAERKQLQVELQSRRAELVCLNNTEISENSSDLSQKLKETQSKYEEAMKEVLSVQKQMKLGLVSPESMDNYSHFHELRVTEEEINVLKQDLQNALEESERNKEKVRELEEKLVEREKGTVIKPPVEEYEEMKSSYCSVIENMNKEKAFLFEKYQEAQEEIMKLKDTLKSQMTQEASDEAEDMKEAMNRMIDELNKQVSELSQLYKEAQAELEDYRKRKSLEDVTAEYIHKAEHEKLMQLTNVSRAKAEDALSEMKSQYSKVLNELTQLKQLVDAQKENSVSITEHLQVITTLRTAAKEMEEKISNLKEHLASKEVEVAKLEKQLLEEKAAMTDAMVPRSSYEKLQSSLESEVSVLASKLKESVKEKEKVHSEVVQIRSEVSQVKREKENIQTLLKSKEQEVNELLQKFQQAQEELAEMKRYAESSSKLEEDKDKKINEMSKEVTKLKEALNSLSQLSYSTSSSKRQSQQLEALQQQVKQLQNQLAECKKQHQEVISVYRMHLLYAVQGQMDEDVQKVLKQILTMCKNQSQKK

SEQ ID NO: 883676 - protein, 614 aa, Homo sapiens; identical to SEQ ID NO: 883675

SEQ ID NO: 883677 - protein, 614 aa, Homo sapiens; identical to SEQ ID NO: 883675

SEQ ID NO: 883678 - protein, 198 aa, Homo sapiens
MVPRSSYEKLQSSLESEVSVLASKLKESVKEKEKVHSEVVQIRSEVSQVKREKENIQTLLKSKEQEVNELLQKFQQAQEELAEMKRYAESSSKLEEDKDKKINEMSKEVTKLKEALNSLSQLSYSTSSSKRQSQQLEALQQQVKQLQNQLAECKKQHQEVISVYRMHLLYAVQGQMDEDVQKVLKQILTMCKNQSQKK

SEQ ID NO: 883679 - protein, 614 aa, Homo sapiens; identical to SEQ ID NO: 883675

SEQ ID NO: 883680 - protein, 614 aa, Homo sapiens; identical to SEQ ID NO: 883675

SEQ ID NO: 883681 - protein, 614 aa, Homo sapiens; identical to SEQ ID NO: 883675

SEQ ID NO: 883682 - protein, 45 aa, Homo sapiens
MSKEVTKLKEALNSLSQLSYSTSSSKRQSQQLEALQQQVKQLQNQ

SEQ ID NO: 883683 - protein, 92 aa, Homo sapiens
LEGARARVLEGGSQVAGPQQSLCDSLFRCFSSAKREKTEPGSWDWRSGKRSIGTTALGPGKTQTLQSQCLLQPAQGRDNLAPSISGRRGDPP

SEQ ID NO: 883684 - protein, 92 aa, Homo sapiens; identical to SEQ ID NO: 883683

SEQ ID NO: 883685 - protein, 92 aa, Homo sapiens; identical to SEQ ID NO: 883683

SEQ ID NO: 883686 - protein, 92 aa, Homo sapiens; identical to SEQ ID NO: 883683

SEQ ID NO: 883687 - protein, 92 aa, Homo sapiens; identical to SEQ ID NO: 883683

SEQ ID NO: 883688 - protein, 92 aa, Homo sapiens; identical to SEQ ID NO: 883683

SEQ ID NO: 883689 - protein, 218 aa, Homo sapiens
MNCRSEVLEVSVEGRQVEEAMLAVLHTVLLHRSTGKFHYKKEGTYSIGTVGTQDVDCDFIDFTYVRVSSEELDRALRKVVGEFKDALRNSGGDGLGQMSLEFYQKKKSRWPFSDECIPWEVWTVKVHVVALATEQERQICREKVGEKLCEKIINIVEVMNRHEYLPKMPTQSEVDNVFDTGLRDVQPYLYKISFQITDALGTSVTTTMRRLIKDTLAL

SEQ ID NO: 883690 - protein, 157 aa, Homo sapiens
  misc_feature (13)..(13): Xaa can be any naturally occurring amino acid
  misc_feature (15)..(15): Xaa can be any naturally occurring amino acid
  misc_feature (17)..(17): Xaa can be any naturally occurring amino acid
DCLLLQLCHFLHXLXTXPCAAPKDALRNSGGDGLGQMSLEFYQKKKSRWPFSDECIPWEVWTVKVHVVALATEQERQICREKVGEKLCEKIINIVEVMNRHEYLPKMPTQSEVDNVFDTGLRDVQPYLYKISFQITDALGTSVTTTMRRLIKDTLAL

SEQ ID NO: 883691 - protein, 218 aa, Homo sapiens; identical to SEQ ID NO: 883689

SEQ ID NO: 883692 - protein, 218 aa, Homo sapiens; identical to SEQ ID NO: 883689

SEQ ID NO: 883693 - protein, 230 aa, Homo sapiens
MNCRSEVLEVSVEGRQVEEAMLAVLHTVLLHRSTGKFHYKKEGTYSIGTVGTQDVDCDFIDFTYVRVSSEELDRALRKVVGEFKDALRNSGGDGLGQMSLEFYQKKKSRWPFSDECIPWEVWTVKVHVVALATEQERQICREKVGEKLCEKIINIVEVMNRHEYLPKMPTQSEVDNVFDTGLRDVQPYLYKISFQITDALGTSVTTTMRRLIKDTPHSVLSTSSVLRDPL

SEQ ID NO: 883694 - protein, 218 aa, Homo sapiens; identical to SEQ ID NO: 883689

SEQ ID NO: 883695 - protein, 218 aa, Homo sapiens; identical to SEQ ID NO: 883689

SEQ ID NO: 883696 - protein, 218 aa, Homo sapiens; identical to SEQ ID NO: 883689

SEQ ID NO: 883697 - protein, 218 aa, Homo sapiens; identical to SEQ ID NO: 883689

SEQ ID NO: 883698 - protein, 218 aa, Homo sapiens; identical to SEQ ID NO: 883689

SEQ ID NO: 883699 - protein, 116 aa, Homo sapiens
MKPPEDLSDALCEFDAVLADFASPFHERHFHYEEHLERMKRRSSASVSDSSGFSDSESADSLYRNSFSFSDEKLNSPTDSTPALLSATVTPQKAKLGDTKELEAFIADLDKTLASM

SEQ ID NO: 883700 - protein, 137 aa, Homo sapiens
MKPPAAQGSPAAAAAAAPALDSAAAEDLSDALCEFDAVLADFASPFHERHFHYEEHLERMKRRSSASVSDSSGFSDSESADSLYRNSFSFSDEKLNSPTDSTPALLSATVTPQKAKLGDTKELEAFIADLDKTLASM

SEQ ID NO: 883701 - protein, 126 aa, Homo sapiens
MALPAAPALDSAAAEDLSDALCEFDAVLADFASPFHERHFHYEEHLERMKRRSSASVSDSSGFSDSESADSLYRNSFSFSDEKLNSPTDSTPALLSATVTPQKAKLGDTKELEAFIADLDKTLASM

SEQ ID NO: 883702 - protein, 144 aa, Homo sapiens
MKPPAAQGSPAAAAAAAPALDSAAAEDLSDALCEFDAVLADFASPFHERHFHYEEHLERMKRRSSASVSDSSGFSDSESADSLYRNSFSFSDEKLNSPTDSTPALLSATVTPQKAKLGDTKELEAFIADLDKTLAIGNKSLGLL

SEQ ID NO: 883703 - protein, 116 aa, Homo sapiens
MAPGSPSSQDLPREGCGLSFLISKLRNGFLKLNAVGRVVAGPLTIITGKVAGGQVGSLAAHGCVTRQASLSSLSRLSQTGLPGPAPGLSAVSLLFSFPCLSPLSCNFADVEQVPVE

SEQ ID NO: 883704 - protein, 328 aa, Homo sapiens
MEIVWEVLFLLQANFIVCISAQQNSPKIHEGWWAYKEVVQGSFVPVPSFWGLVNSAWNLCSVGKRQSPVNIETSHMIFDPFLTPLRINTGGRKVSGTMYNTGRHVSLRLDKEHLVNISGGPMTYSHRLEEIRLHFGSEDSQGSEHLLNGQAFSGEVQLIHYNHELYTNVTEAAKSPNGLVVVSIFIKVSDSSNPFLNRMLNRDTITRITYKNDAYLLQGLNIEELYPETSSFITYDGSMTIPPCYETASWIIMNKPVYITRMQMHSLRLLSQNQPSQIFLSMSDNFRPVQPLNNRCIRTNINFSLQGKDCPNNRAQKLQYRVNEWLLK

SEQ ID NO: 883705 - protein, 328 aa, Homo sapiens; identical to SEQ ID NO: 883704

SEQ ID NO: 883706 - protein, 328 aa, Homo sapiens; identical to SEQ ID NO: 883704

SEQ ID NO: 883707 - protein, 231 aa, Homo sapiens
MYNTGRHVSLRLDKEHLVNISGGPMTYSHRLEEIRLHFGSEDSQGSEHLLNGQAFSGEVQLIHYNHELYTNVTEAAKSPNGLVVVSIFIKVSDSSNPFLNRMLNRDTITRITYKNDAYLLQGLNIEELYPETSSFITYDGSMTIPPCYETASWIIMNKPVYITRMQMHSLRLLSQNQPSQIFLSMSDNFRPVQPLNNRCIRTNINFSLQGKDCPNNRAQKLQYRVNEWLLK

SEQ ID NO: 883708 - protein, 159 aa, Homo sapiens
MEIVWEVLFLLQANFIVCISAQQNSPKIHEGWWAYKEVVQGSFVPVPSFWGLVNSAWNLCSVGKRQSPVNIETSHMIFDPFLTPLRINTGGRKVSGTMYNTGRHVSLRLDKEHLVNISGGPMTYSHRLEEIRLHFGSEDSQGSEHLLNGQAFSGEEKVC

SEQ ID NO: 883709 - protein, 405 aa, Homo sapiens [sequence omitted]

SEQ ID NO: 883710 - protein, 151 aa, Homo sapiens
MVTDLSREIFLKITWFGSDLLVFPLAAMLSVPGNFYHLVICHQPGGKGRVEGEFPDYLPCSVMLQPAPQDSGKSCGVDFEVKAFATDSTDAEEDKIPKKSSVRLLIRKVQHAPLEMGPQPRAEAAWQFFMSDKPLHLAVSLNKEVTTYHRY

SEQ ID NO: 883711 - protein, 405 aa, Homo sapiens [sequence omitted]

SEQ ID NO: 883712 - protein, 364 aa, Homo sapiens
  misc_feature (1)..(1): Xaa can be any naturally occurring amino acid
  misc_feature (3)..(3): Xaa can be any naturally occurring amino acid
  misc_feature (10)..(10): Xaa can be any naturally occurring amino acid
XAXRNFWCRXLTDLVMGKKVYVTLTCAFRYGQEDIDVIGLTFRRDLYFSRVQVYPPVGAASTPTKLQESLLKKLGSNTYPFLLTFPDYLPCSVMLQPAPQDSGKSCGVDFEVKAFATDSTDAEEDKIPKKSSVRLLIRKVQHAPLEMGPQPRAEAAWQFFMSDKPLHLAVSLNKEIYFHGEPIPVTVTVTNNTEKTVKKIKAFVEQVANVVLYSSDYYVKPVAMEEAQEKVPPNSTLTKTLTLLPLLANNRERRGIALDGKIKHEDTNLASSTIIKEGIDRTVLGILVSYQIKVKLTVSGFLGELTSSEVATEVPFRLMHPQPEDPAKESYQDANLVFEEFARHNLKDAGEAEEGKRDKNDIDE

SEQ ID NO: 883713 - protein, 226 aa, Homo sapiens
  misc_feature (219)..(219): Xaa can be any naturally occurring amino acid
MAASGKTSKSEPNHVIFKKISRDKSVTIYLGNRDYIDHVSQVQPVDGVVLVDPDLVKGKKVYVTLTCAFRYGQEDIDVIGLTFRRDLYFSRVQVYPPVGAASTPTKLQESLLKKLGSNTYPFLLTFPDYLPCSVMLQPAPQDSGKSCGVDFEVKAFATDSTDAEEDKIPKKSSVRLLIRKVQHAPLEMGPQPRAEAAWQFFMSDKPLHLAVSLNKEFFXHGGAIPF

SEQ ID NO: 883714 - protein, 474 aa, Homo sapiens
MSTSYGCFWRRGKCPENGWDESTLELFLHELAIMDSNNFLGNCGVGEREGRVASALVARRHYRFIHGIGRSGDISAVQPKAAGSSLLNKITNSLVLDIIKLAGVHTVANCFVVPMATGMSLTLCFLTLRHKRPKAKYIIWPRIDQKSCFKSMITAGFEPVVIENVLEGDELRTDLKAVEAKVQELGPDCILCIHSTTSCFAPRVPDRLEELAVICANYDIPHIVNNAYGVQSSKCMHLIQQGARVGRIDAFVQSLDKNFMVPVGGAIIAGFNDSFIQEISKMYPGRASASPSLDVLITLLSLGSNGYKKLLKERKEMFSYLSNQIKKLSEAYNERLLHTPHNPISLAMTLKTLDEHRDKAVTQLGSMLFTRQVSGARVVPLGSMQTVSGYTFRGFMSHTNNYPCAYLNAASAIGMKMQDVDLFIKRLDRCLKAVRKERSKESDDNYDKTEDVDIEEMALKLDNVLLDTYQDASS

SEQ ID NO: 883715 - protein, 474 aa, Homo sapiens; identical to SEQ ID NO: 883714

SEQ ID NO: 883716 - protein, 449 aa, Homo sapiens
MNRESFAAGERLVSPAYVRQGCEARRSHEHLIRLLLEKVIHGIGRSGDISAVQPKAAGSSLLNKITNSLVLDIIKLAGVHTVANCFVVPMATGMSLTLCFLTLRHKRPKAKYIIWPRIDQKSCFKSMITAGFEPVVIENVLEGDELRTDLKAVEAKVQELGPDCILCIHSTTSCFAPRVPDRLEELAVICANYDIPHIVNNAYGVQSSKCMHLIQQGARVGRIDAFVQSLDKNFMVPVGGAIIAGFNDSFIQEISKMYPGRASASPSLDVLITLLSLGSNGYKKLLKERKEMFSYLSNQIKKLSEAYNERLLHTPHNPISLAMTLKTLDEHRDKAVTQLGSMLFTRQVSGARVVPLGSMQTVSGYTFRGFMSHTNNYPCAYLNAASAIGMKMQDVDLFIKRLDRCLKAVRKERSKESDDNYDKTEDVDIEEMALKLDNVLLDTYQDASS

SEQ ID NO: 883717 - protein, 377 aa, Homo sapiens
MSTSYGCFWRRGKCPENGWDESTLELFLHELAIMDSNNFLGNCGVGEREGRVASALVARRHYRFIHGIGRSGDISAVQPKAAGSSLLNKITNSLVLDIIKLAGVHTVANCFVVPMATGMSLTLCFLTLRHKRPKAKYIIWPRIDQKSCFKSMITAGFEPVVIENVLEGDELRTDLKAVEAKVQELGPDCILCIHSTTSCFAPRVPDRLEELAVICANYDIPHIVNNAYGVQSSKCMHLIQQGARVGRIDAFVQSLDKNFMVPVGGAIIAGFNDSFIQEISKMYPGRASASPSLDVLITLLSLGSNGYKKLLKERKEMFSYLSNQIKKLSEAYNERLLHTPHNPISLAMTLKTLDEHRDKAVTQLGSMLFTRQVSGAR

SEQ ID NO: 883718 - protein, 207 aa, Homo sapiens
MSTSYGCFWRRGKCPENGWDESTLELFLHELAIMDSNNFLGNCGVGEREGRVASALVARRHYRFIHGIGRSGDISAVQPKAAGSSLLNKITNSLVLDIIKLAGVHTVANCFVVPMATGMSLTLCFLTLRHKRPKAKYIIWPRIDQKSCFKSMITAGFEPVVIENVLEGDELRTDLKAVEAKVQELGPDCILCIHSTTSCFAPRVPDR

SEQ ID NO: 883719 - protein, 312 aa, Homo sapiens
MSPQGPAVLSLGSLCLDTNQAPNWTGLQTLLQQLPPQDIDERYCLALGEEERAELQLFCARRKQEALGQGVARLVLPKLEGHTCEKCRELLKPGEYGVFAARAGEQRCWHQPCFACQACGQALINLIYFYHDGQLYCGRHHAELLRPRCPACDQLIFSWRCTEAEGQRWHENHFCCQDCAGPLGGGRYALPGGSPCCPSCFENRYSDAGSSWAGALEGQAFLGAPPPHPPDPSLGARSSHRASLAGAFQGPPEPTPRRGRGCGARLPPRRGRRTPSGGGGGPWRGLSAAAAARTAQGLGGAGGWASPPLAAV

SEQ ID NO: 883720 - protein, 80 aa, Homo sapiens
YTFDSFCPEHGGNRKSSGQPCIFSQPPDNVGDWLRGVYRFATDRNDFRRNLILNLGLFAAGVWLARNLSDIDLMAPQPGV

SEQ ID NO: 883721 - protein, 352 aa, Homo sapiens
MSVQNSGWPHQEDSPKPQDPGPPANSDSDSGHLPGEDPEDTHAQGPAVLSLGSLCLDTNQAPNWTGLQTLLQQLPPQDIDERYCLALGEEERAELQLFCARRKQEALGQGVARLVLPKLEGHTCEKCRELLKPGEYGVFAARAGEQRCWHQPCFACQACGQALINLIYFYHDGQLYCGRHHAELLRPRCPACDQLIFSWRCTEAEGQRWHENHFCCQDCAGPLGGGRYALPGGSPCCPSCFENRYSDAGSSWAGALEGQAFLGAPPPHPPDPSLGARSSHRASLAGAFQGPPEPTPRRGRGCGARLPPRRGRRTPSGGGGGPWRGLSAAAAARTAQGLGGAGGWASPPLAAV

SEQ ID NO: 883722 - protein, 312 aa, Homo sapiens; identical to SEQ ID NO: 883719

SEQ ID NO: 883723 - protein, 160 aa, Homo sapiens
LGTRLGVNRPRVAAPALPACDQLIFSWRCTEAEGQRWHENHFCCQDCAGPLGGGRYALPGGSPCCPSCFENRYSDAGSSWAGALEGQAFLGETGLDRTEGRDQTSVNSATLSRTLLCCCRRFQPANSEGAAWIQSPAGEPTWGQSGGTQRAGAMPPGDYS

SEQ ID NO: 883724 - protein, 352 aa, Homo sapiens; identical to SEQ ID NO: 883721

SEQ ID NO: 883725 - protein, 352 aa, Homo sapiens; identical to SEQ ID NO: 883721

SEQ ID NO: 883726 - protein, 352 aa, Homo sapiens; identical to SEQ ID NO: 883721

SEQ ID NO: 883727 - protein, 352 aa, Homo sapiens; identical to SEQ ID NO: 883721

SEQ ID NO: 883728 - protein, 352 aa, Homo sapiens; identical to SEQ ID NO: 883721

SEQ ID NO: 883729 - protein, 352 aa, Homo sapiens; identical to SEQ ID NO: 883721

SEQ ID NO: 883730 - protein, 352 aa, Homo sapiens; identical to SEQ ID NO: 883721

SEQ ID NO: 883731 - protein, 352 aa, Homo sapiens; identical to SEQ ID NO: 883721

SEQ ID NO: 883732 - protein, 352 aa, Homo sapiens; identical to SEQ ID NO: 883721

SEQ ID NO: 883733 - protein, 342 aa, Homo sapiens
MTFLVGQGETEVAFLSSFPFPFPLLCHYLWHLPEVLQPFSDPAAKPFFLQPMLNVFCWSSPSNCRGLFLQERYCLALGEEERAELQLFCARRKQEALGQGVARLVLPKLEGHTCEKCRELLKPGEYGVFAARAGEQRCWHQPCFACQACGQALINLIYFYHDGQLYCGRHHAELLRPRCPACDQLIFSWRCTEAEGQRWHENHFCCQDCAGPLGGGRYALPGGSPCCPSCFENRYSDAGSSWAGALEGQAFLGAPPPHPPDPSLGARSSHRASLAGAFQGPPEPTPRRGRGCGARLPPRRGRRTPSGGGGGPWRGLSAAAAARTAQGLGGAGGWASPPLAAV

SEQ ID NO: 883734 - protein, 352 aa, Homo sapiens; identical to SEQ ID NO: 883721

SEQ ID NO: 883735 - protein, 68 aa, Homo sapiens
PHLCDWIGTHYLNEQVKAIKELGDHVTNLRKMGAPESGLAEYLFDKHTLGDSDNESYSRGANFPIAVG

SEQ ID NO: 883736 - protein, 352 aa, Homo sapiens; identical to SEQ ID NO: 883721

SEQ ID NO: 883737 - protein, 352 aa, Homo sapiens; identical to SEQ ID NO: 883721

SEQ ID NO: 883738 - protein, 352 aa, Homo sapiens; identical to SEQ ID NO: 883721

SEQ ID NO: 883739 - protein, 352 aa, Homo sapiens; identical to SEQ ID NO: 883721

SEQ ID NO: 883740 - protein, 352 aa, Homo sapiens; identical to SEQ ID NO: 883721

SEQ ID NO: 883741 - protein, 352 aa, Homo sapiens; identical to SEQ ID NO: 883721

SEQ ID NO: 883742 - protein, 578 aa, Homo sapiens
SPVESCPARSRLSVSVSPPPPGIVELGPPFAWEFCSRLGSAVTSQRAGPAAAMVAKDYPFYLTVKRANCSLELPPASGPAKDAEEPSNKRVKPLSRVTSLANLIPPVKATPLKRFSQTLQRSISFRSESRPDILAPRPWSRNAAPSSTKRRDSKLWSETFDVCVNQMLTSKEIKRQEAIFELSQGEEDLIEDLKLAKKAYHDPMLKLSIMTEQELNQIFGTLDSLIPLHEELLSQLRDVRKPDGSTEHVGPILVGWLPCLSSYDSYCSNQVAAKALLDHKKQDHRVQDFLQRCLESPFSRKLDLWNFLDIPRSRLVKYPLLLREILRHTPNDNPDQQHLEEAINIIQGIVAEINTKTGESECRYYKERLLYLEEGQKDSLIDSSRVLCCHGELKNNRGVKLHVFLFQEVLVITRAVTHNEQLCYQLYRQPIPVKDLLLEDLQDGEVRLGGSLRGAFSNNERIKNFFRVSFKNGSQSQTHSLQANDTFNKQQWLNCIRQAKETVLCAAGQAGVLDSEGSFLNPTTGSRELQGETKLEQMDQSDSESDCSMDTSEVSLDCERMEQTDSSCGNSRHGESNV

SEQ ID NO: 883743 - protein, 242 aa, Homo sapiens
MDSSTAMNQCSCRGMEENKERPKRQRQNNFPMFPSPKAWNFRGRKRKQSTQDEDAVSLCSLDISEPSNKRVKPLSRVTSLANLIPPVKATPLKRFSQTLQRSISFRSESRPDILAPRPWSRNAAPSSTKRRDSKLWSETFDVCVNQMLTSKEIKRQEAIFELSQGEEDLIEDLKLAKKAYHDPMLKLSIMTEQELNQIFGTLDSLIPLHEELLSQLRDVRKPDGSTEHVGPILVGWVRKFSG

SEQ ID NO: 883744 - protein, 150 aa, Homo sapiens
SPVESCPARSRLSVSVSPPPPGIVELGPPFAWEFCSRLGSAVTSQRAGPAAAMVAKDYPFYLTVKRANCSLELPPASGPAKDAEVGPRPAPGPLWVICLSRLPPSPILGARPVSLSLFPSLTLRVCHFLSLHLSHSLLCVSPSPSLTLSP

SEQ ID NO: 883745 - protein, 547 aa, Homo sapiens
MNSWLISVLSLGQKTHEARIGYLQRGAELRPHRKRKQSTQDEDAVSLCSLDISEPSNKRVKPLSRVTSLANLIPPVKATPLKRFSQTLQRSISFRSESRPDILAPRPWSRNAAPSSTKRRDSKLWSETFDVCVNQMLTSKEIKRQEAIFELSQGEEDLIEDLKLAKKAYHDPMLKLSIMTEQELNQIFGTLDSLIPLHEELLSQLRDVRKPDGSTEHVGPILVGWLPCLSSYDSYCSNQVAAKALLDHKKQDHRVQDFLQRCLESPFSRKLDLWNFLDIPRSRLVKYPLLLREILRHTPNDNPDQQHLEEAINIIQGIVAEINTKTGESECRYYKERLLYLEEGQKDSLIDSSRVLCCHGELKNNRGVKLHVFLFQEVLVITRAVTHNEQLCYQLYRQPIPVKDLLLEDLQDGEVRLGGSLRGAFSNNERIKNFFRVSFKNGSQSQTHSLQANDTFNKQQWLNCIRQAKETVLCAAGQAGVLDSEGSFLNPTTGSRELQGETKLEQMDQSDSESDCSMDTSEVSLDCERMEQTDSSCGNSRHGESNV

SEQ ID NO: 883746 - protein, 527 aa, Homo sapiens
MFPSPKAWNFRGRKRKQSTQDEDAVSLCSLDISEPSNKRVKPLSRVTSLANLIPPVKATPLKRFSQTLQRSISFRSESRPDILAPRPWSRNAAPSSTKRRDSKLWSETFDVCVNQMLTSKEIKRQEAIFELSQGEEDLIEDLKLAKKAYHDPMLKLSIMTEQELNQIFGTLDSLIPLHEELLSQLRDVRKPDGSTEHVGPILVGWLPCLSSYDSYCSNQVAAKALLDHKKQDHRVQDFLQRCLESPFSRKLDLWNFLDIPRSRLVKYPLLLREILRHTPNDNPDQQHLEEAINIIQGIVAEINTKTGESECRYYKERLLYLEEGQKDSLIDSSRVLCCHGELKNNRGVKLHVFLFQEVLVITRAVTHNEQLCYQLYRQPIPVKDLLLEDLQDGEVRLGGSLRGAFSNNERIKNFFRVSFKNGSQSQTHSLQANDTFNKQQWLNCIRQAKETVLCAAGQAGVLDSEGSFLNPTTGSRELQGETKLEQMDQSDSESDCSMDTSEVSLDCERMEQTDSSCGNSRHGESNV

SEQ ID NO: 883747 - protein, 558 aa, Homo sapiens
MDSSTAMNQCSCRGMEENKERPKRQRQNNFPMFPSPKAWNFRGRKRKQSTQDEDAVSLCSLDISEPSNKRVKPLSRVTSLANLIPPVKATPLKRFSQTLQRSISFRSESRPDILAPRPWSRNAAPSSTKRRDSKLWSETFDVCVNQMLTSKEIKRQEAIFELSQGEEDLIEDLKLAKKAYHDPMLKLSIMTEQELNQIFGTLDSLIPLHEELLSQLRDVRKPDGSTEHVGPILVGWLPCLSSYDSYCSNQVAAKALLDHKKQDHRVQDFLQRCLESPFSRKLDLWNFLDIPRSRLVKYPLLLREILRHTPNDNPDQQHLEEAINIIQGIVAEINTKTGESECRYYKERLLYLEEGQKDSLIDSSRVLCCHGELKNNRGVKLHVFLFQEVLVITRAVTHNEQLCYQLYRQPIPVKDLLLEDLQDGEVRLGGSLRGAFSNNERIKNFFRVSFKNGSQSQTHSLQANDTFNKQQWLNCIRQAKETVLCAAGQAGVLDSEGSFLNPTTGSRELQGETKLEQMDQSDSESDCSMDTSEVSLDCERMEQTDSSCGNSRHGESNV

SEQ ID NO: 883748 - protein, 412 aa, Homo sapiens
MLTSKEIKRQEAIFELSQGEEDLIEDLKLAKKAYHDPMLKLSIMTEQELNQIFGTLDSLIPLHEELLSQLRDVRKPDGSTEHVGPILVGWLPCLSSYDSYCSNQVAAKALLDHKKQDHRVQDFLQRCLESPFSRKLDLWNFLDIPRSRLVKYPLLLREILRHTPNDNPDQQHLEEAINIIQGIVAEINTKTGESECRYYKERLLYLEEGQKDSLIDSSRVLCCHGELKNNRGVKLHVFLFQEVLVITRAVTHNEQLCYQLYRQPIPVKDLLLEDLQDGEVRLGGSLRGAFSNNERIKNFFRVSFKNGSQSQTHSLQANDTFNKQQWLNCIRQAKETVLCAAGQAGVLDSEGSFLNPTTGSRELQGETKLEQMDQSDSESDCSMDTSEVSLDCERMEQTDSSCGNSRHGESNV

SEQ ID NO: 883749 - protein, 572 aa, Homo sapiens
RRNPSGELRVSEGPKRMGLALPCALDETMFDRNIWPKRQRQNNFPMFPSPKAWNFRGRKRKQSTQDEDAVSLCSLDISEPSNKRVKPLSRVTSLANLIPPVKATPLKRFSQTLQRSISFRSESRPDILAPRPWSRNAAPSSTKRRDSKLWSETFDVCVNQMLTSKEIKRQEAIFELSQGEEDLIEDLKLAKKAYHDPMLKLSIMTEQELNQIFGTLDSLIPLHEELLSQLRDVRKPDGSTEHVGPILVGWLPCLSSYDSYCSNQVAAKALLDHKKQDHRVQDFLQRCLESPFSRKLDLWNFLDIPRSRLVKYPLLLREILRHTPNDNPDQQHLEEAINIIQGIVAEINTKTGESECRYYKERLLYLEEGQKDSLIDSSRVLCCHGELKNNRGVKLHVFLFQEVLVITRAVTHNEQLCYQLYRQPIPVKDLLLEDLQDGEVRLGGSLRGAFSNNERIKNFFRVSFKNGSQSQTHSLQANDTFNKQQWLNCIRQAKETVLCAAGQAGVLDSEGSFLNPTTGSRELQGETKLEQMDQSDSESDCSMDTSEVSLDCERMEQTDSSCGNSRHGESNV

SEQ ID NO: 883750 - protein, 578 aa, Homo sapiens; identical to SEQ ID NO: 883742

SEQ ID NO: 883751 - protein, 578 aa, Homo sapiens; identical to SEQ ID NO: 883742

SEQ ID NO: 883752 - protein, 234 aa, Homo sapiens
MNSWLISVLSLGQKTHEARIGYLQRGAELRPHRKRKQSTQDEDAVSLCSLDISEPSNKRVKPLSRVTSLANLIPPVKATPLKRFSQTLQRSISFRSESRPDILAPRPWSRNAAPSSTKRRDSKLWSETFDVCVNQMLTSKEIKRQEAIFELSQGEEDLIEDLKLAKKAYHDPMLKLSIMTEQELNQIFGTLDSLIPLHEELLSQLRDVRKPDGSTEHVGPILVGWERARVHGSK

SEQ ID NO: 883753 - protein, 113 aa, Homo sapiens
KFKSSSHLSQVTFFFLSNFTTLKWCFVRTVFMTKTGLLPHTKQWGKCFKTRGQNSSPDLAPLGVYLCMSLMHVKEYFSLNQKVSMEASPYVYFIVLEVSYVGLFAHRRECVHV

SEQ ID NO: 883754 - protein, 109 aa, Homo sapiens
GGGASLGAQTWRSDSEVRLQLAHHLRPGPDEPPVASAGAAAASRGACGPSHSRHCLPAGLEPSERPNPRPGRDLRGMTAEPPKGGEGFRHAGHSILSQPGDETPPWGRP

SEQ ID NO: 883755 - protein, 74 aa, Homo sapiens
AGAGPAWGPRRGAATRRFASSLRIICGRVPMSLLLPPLALLLLLAALVAPATAATAYRPDWNRLSGLTRARVEA

SEQ ID NO: 883756 - protein, 104 aa, Homo sapiens
MLFPSVRLRKPPPPLPTTPLLNTTSSHNLVMKHLPGADPELVLLGRRYEELERIPLSEMTREEINALVQELGFYRKAAPDAQVPPEYVWAPAKPPEETSDHADL

SEQ ID NO: 883757 - protein, 109 aa, Homo sapiens; identical to SEQ ID NO: 883754

SEQ ID NO: 883758 - protein, 89 aa, Homo sapiens
MRRRPTPTSGVVCCGRRRALHDGVGVDRCTQGRRRAARSKINSSVMGEDKTSGDADREARHSSLSWWGESTEVDTEHTARQRPHQDASN

SEQ ID NO: 883759 - protein, 74 aa, Homo sapiens
AGAGPAWGPRRGAATRRFASSLRIICGRVPMSLLLPPLALLLLLAALVAPATAATAYRPDWNRLSGLTRARVEG

SEQ ID NO: 883760 - protein, 110 aa, Homo sapiens
LLRIPHLAHDGRGQLNRLKEVKAFVTQDIPFYHNLVMKHLPGADPELVLLGRRYEELERIPLSEMTREEINALVQELGFYRKAAPDAQVPPEYVWAPAKPPEETSDHADL

SEQ ID NO: 883761 - protein, 280 aa, Homo sapiens
MNDRSSRRRTMKDDETFEISIPFDEAPHLDPQIFYSLSPSRRNFEEPPEAASSALALMNSVKTQLHMALERNSWLQKRIEDLEEERDFLRCQLDKFISSARMEAEDHCRMKPGPRRMEGDSRGGAGGEASDPESAASSLSGASEEGSASERRRQKQKGGASRRRFGKPKARERQRVKDADGVLCRYKKILGTFQKLKSMSRAFEHHRVDRNTVALTTPIAELLIVAPEKLAEVGEFDPSKERLLEYSRRCFLALDDETLKKVQALKKSKLLLPITYRFKR

SEQ ID NO: 883762 - protein, 280 aa, Homo sapiens; identical to SEQ ID NO: 883761

SEQ ID NO: 883763 - protein, 280 aa, Homo sapiens; identical to SEQ ID NO: 883761

SEQ ID NO: 883764 - protein, 280 aa, Homo sapiens; identical to SEQ ID NO: 883761

SEQ ID NO: 883765 - protein, 172 aa, Homo sapiens
MNDRSSRRRTMKDDETFEISIPFDEAPHLDPQIFYSLSPSRRNFEEPPEAASSALALMNSVKTQLHMALERNSWLQKRIEDLEEERDFLRCQLDKFISSARMEAETLRMKLASGEGNLVVLGSPPDKLSKKPKEAERGTGVSLTTKRKRDPKKSQNWSTESPDKRNNIKKTT

SEQ ID NO: 883766 - protein, 280 aa, Homo sapiens; identical to SEQ ID NO: 883761

SEQ ID NO: 883767 - protein, 280 aa, Homo sapiens; identical to SEQ ID NO: 883761

SEQ ID NO: 883768 - protein, 280 aa, Homo sapiens; identical to SEQ ID NO: 883761

SEQ ID NO: 883769 - protein, 106 aa, Homo sapiens
MQTLCFCRKRRASPGPGDSSTRGASLARLGESPRPCPFRRSVPRHAPLPPRLFAGGWALPSAPRDTLQTLPGAGHGRRRRRSPSRIPRAVPLRPSAAGVRRKPRHE

SEQ ID NO: 883770 - protein, 144 aa, Homo sapiens
MAASKVKQDMPPPGGYGPIDYKRNLPRRGLSGYSMLAIGIGTLIYGHWSIMKWNRERRRLQIEDFEARIALLPLLQAETDRRTLQMLRENLEEEAIIMKDVPDWKVGESVFHTTRWVPPLIGELYGLRTTEEALHASHGFMWYT

SEQ ID NO: 883771 - protein, 273 aa, Homo sapiens
PPSTDALKRRWRWRQRPAPGLTSAMSSAAGPDPSEAPEERHFLSTAEAAALERELLEDYRFGRQQLVELCGHASAVAVTKAFPLPALSRKQRTVLVVCGPEQNGAVGLVCARHLRVFEYEPTIFYPTRSLDLLHRDLTTQCEKMDIPFLSYLPTEVQLINEAYGLVVDAVLGPGVEPGEVGGPCTRALATLKLLSIPLVSLDIPSGWDAETGSDSEDGLRPDVLVSLAAPKRCAGRFSGRHHFVAGRFVPDDVRRKFALRLPGYTGTDCVAAL

SEQ ID NO: 883772 - protein, 80 aa, Homo sapiens
RDERLQKCLLNTVPGLEIKRIYNFPRRIRHEAIIMKDVPDWVGESVFHTTRWVPPLIGELYGLRTTEEALHASHGFMWYT

SEQ ID NO: 883773 - protein, 109 aa, Homo sapiens
MCQREKAGSDGGGEVGVGQQDSGAEGRPPSQFPIPPDPPPSGWDAETGSDSEDGLRPDVLVSLAAPKRCAGRFSGRHHFVAGRFVPDDVRRKFALRLPGYTGTDCVAAL

SEQ ID NO: 883774 - protein, 227 aa, Homo sapiens
MQEPRRVTPCLGKRGVKTPQLQPGSAFLPRVRRQSFPARSDSYTTVRDFLAVPRTISSASATLIMAVAVSHFRPGPEVWDTASMAASKVKQDMPPPGGYGPIDYKRNLPRRGLSGYSMLAIGIGTLIYGHWSIMKWNRERRRLQIEDFEARIALLPLLQAETDRRTLQMLRENLEEEAIIMKDVPDWKVGESVFHTTRWVPPLIGELYGLRTTEEALHASHGFMWYT

SEQ ID NO: 883775 - protein, 227 aa, Homo sapiens; identical to SEQ ID NO: 883774

SEQ ID NO: 883776 - protein, 279 aa, Homo sapiens
MQEPRRVTPCLGKRGVKTPQLQPGSAFLPRVRRQSFPARSDSYTTVRDFLAVPRTISSASATLIMAVAVSHFRPGPEVWDTASMAASKVKQDMPPPGGYGPIDYKRNLPRRGLSENPWHGGRGVTVQAASLLRSRQCPLIAEWAAPGAVEEGVWGRAGPLSSAFFTGYSMLAIGIGTLIYGHWSIMKWNRERRRLQIEDFEARIALLPLLQAETDRRTLQMLRENLEEEAIIMKDVPDWKVGESVFHTTRWVPPLIGELYGLRTTEEALHASHGFMWYT

SEQ ID NO: 883777 - protein, 279 aa, Homo sapiens; identical to SEQ ID NO: 883776

SEQ ID NO: 883778 - protein, 583 aa, Homo sapiens
MQEPRRVTPCLGKRGVKTPQLQPGSAFLPRVRRQSFPARSDSYTTVRDFLAVPRTISSASATLIMAVAVSHFRPGPEVWDTASMAASKVKQDMPPPGGYGPIDYKRNLPRRGLSGYSMLAIGIGTLIYGHWSIMKWNRERRRLQIEDFEARIALLPLLQAETDRRYTAGAKVGRSLAGRPQAAGPDLHPRRWPECTWGPSPCAVSCILRRGDLVETQGGEPEGFLEEEAALGLGQEKSKELAGGKGDRVGGRLEGVLLGALRQGPLRALRPHPHHRPHPHRTLQMLRENLEEEAIIMKDVPDWKGLELQPPLADMGRAELSSNATTSLVQRRKQAWGRQSWLEQIWNAGPVCQSTAEAAALERELLEDYRFGRQQLVELCGHASAVAVTKAFPLPALSRKQRTVLVVCGPEQNGAVGLVCARHLRVFEYEPTIFYPTRSLDLLHRDLTTQCEKMDIPFLSYLPTEVQLINEAYGLVVDAVLGPGVEPGEVGGPCTRALATLKLLSIPLVSLDIPSGWDAETGSDSEDGLRPDVLVSLAAPKRCAGRFSGRHHFVAGRFVPDDVRRKFALRLPGYTGTDCVAAL

SEQ ID NO: 883779 - protein, 269 aa, Homo sapiens
MGRAELSSNATTSLVQRRKQAWGRQSWLEQIWNAGPVCQSTAEAAALERELLEDYRFGRQQLVELCGHASAVAVTKAFPLPALSRKQRTVLVVCGPEQNGAVGLVCARHLRVFEYEPTIFYPTRSLDLLHRDLTTQCEKMDIPFLSYLPTEVQLINEAYGLVVDAVLGPGVEPGEVGGPCTRALATLKLLSIPLVSLDIPSGWDAETGSDSEDGLRPDVLVSLAAPKRCAGRFSGRHHFVAGRFVPDDVRRKFALRLPGYTGTDCVAAL

SEQ ID NO: 883780 - protein, 141 aa, Homo sapiens
MQEPRRVTPCLGKRGVKTPQLQPGSAFLPRVRRQSFPARSDSYTTVRDFLAVPRTISSASATLIMAVAVSHFRPGPEVWDTASMAASKVKQDMPPPGGYGPIDYKRNLPRRGLSGYSMLAIGIGTLIYGHWSIMKWNRERR

SEQ ID NO: 883781 - protein, 227 aa, Homo sapiens; identical to SEQ ID NO: 883774

SEQ ID NO: 883782 - protein, 162 aa, Homo sapiens
FSLAKKSMETGCVPSAVPHRQAKEFMSSWTDKSPSGLASCRIQHVQLINEAYGLVVDAVLGPGVEPGEVGGPCTRALATLKLLSIPLVSLDIPSGWDAETGSDSEDGLRPDVLVSLAAPKRCAGRFSGRHHFVAGRFVPDDVRRKFALRLPGYTGTDCVAAL

SEQ ID NO: 883783 - protein, 227 aa, Homo sapiens; identical to SEQ ID NO: 883774

SEQ ID NO: 883784 - protein, 227 aa, Homo sapiens; identical to SEQ ID NO: 883774

SEQ ID NO: 883785 - protein, 227 aa, Homo sapiens; identical to SEQ ID NO: 883774

SEQ ID NO: 883786 - protein, 227 aa, Homo sapiens; identical to SEQ ID NO: 883774

SEQ ID NO: 883787 - protein, 467 aa, Homo sapiens
MQEPRRVTPCLGKRGVKTPQLQPGSAFLPRVRRQSFPARSDSYTTVRDFLAVPRTISSASATLIMAVAVSHFRPGPEVWDTASMAASKVKQDMPPPGGYGPIDYKRNLPRRGLSGYSMLAIGIGTLIYGHWSIMKWNRERRRLQIEDFEARIALLPLLQAETDRRTLQMLRENLEEEAIIMKDVPDWKGLELQPPLADMGRAELSSNATTSLVQRRKQAWGRQSWLEQIWNAGPVCQSTAEAAALERELLEDYRFGRQQLVELCGHASAVAVTKAFPLPALSRKQRTVLVVCGPEQNGAVGLVCARHLRVFEYEPTIFYPTRSLDLLHRDLTTQCEKMDIPFLSYLPTEVQLINEAYGLVVDAVLGPGVEPGEVGGPCTRALATLKLLSIPLVSLDIPSGWDAETGSDSEDGLRPDVLVSLAAPKRCAGRFSGRHHFVAGRFVPDDVRRKFALRLPGYTGTDCVAAL

SEQ ID NO: 883788 - protein, 323 aa, Homo sapiens
PPSTDALKRRWRWRQRPAPGLTSAMSSAAGPDPSEAPEERHFLRALELQPPLADMGRAELSSNATTSLVQRRKQAWGRQSWLEQIWNAGPVCQSTAEAAALERELLEDYRFGRQQLVELCGHASAVAVTKAFPLPALSRKQRTVLVVCGPEQNGAVGLVCARHLRVFEYEPTIFYPTRSLDLLHRDLTTQCEKMDIPFLSYLPTEVQLINEAYGLVVDAVLGPGVEPGEVGGPCTRALATLKLLSIPLVSLDIPSGWDAETGSDSEDGLRPDVLVSLAAPKRCAGRFSGRHHFVAGRFVPDDVRRKFALRLPGYTGTDCVAAL

SEQ ID NO: 883789 - protein, 296 aa, Homo sapiens
KGGRMSATQAENKQTALRATGSGWMHVFPAPTWQSLRPGLCISSGETEAPRGPTPHPEQLTSCPILLPPGPSPIPSPTPGLSFLSRQGGIWTVPVPCCVPYHQAFPLPALSRKQRTVLVVCGPEQNGAVGLVCARHLRVFEYEPTIFYPTRSLDLLHRDLTTQCEKMDIPFLSYLPTEVQLINEAYGLVVDAVLGPGVEPGEVGGPCTRALATLKLLSIPLVSLDIPSGWDAETGSDSEDGLRPDVLVSLAAPKRCAGRFSGRHHFVAGRFVPDDVRRKFALRLPGYTGTDCVAAL

SEQ ID NO: 883790 - protein, 103 aa, Homo sapiens
MDSRLRAGHPPSSQSPRTLLPQAGTQRPAAIRRTGCGLTCWCLSRRPSAALAASPGATTSWPAGSCPMTCAASSLCACRDTRAPTASRHCDRHPRPHRRDPRQ

SEQ ID NO: 883791 - protein, 505 aa, Homo sapiens [sequence omitted]

SEQ ID NO: 883792 - protein, 505 aa, Homo sapiens [sequence omitted]

SEQ ID NO: 883793 - protein, 505 aa, Homo sapiens [sequence omitted]

SEQ ID NO: 883794 - protein, 575 aa, Homo sapiens
MFAHLETAVLITIGYKPSPHQVIAAVNLWAGYVPVTVPSPSHIASLNLYRDPELHLTDEETARQTADVLIMSDKDDIETPLLTEAAPILEDGNCEPAKNSESVDQGAKPESKSEPVVSTRKRPETKPSSDLETSKVLPIQDNVSKDVPQTRWGYWGSWGKSILSSASATVATVGQGISNVIEKAETSLGIPSPSEISTEVKYVAGETNAKENENSSPVAGAFGVFSTISTAVQSTGKSVISGGLDALEFIGKKTMDVIAEGDPGFKRTKGLMNRNATLSQVLREAKEKEEIRTSNEVTVETDKKTHYGLLFDEFQGLSHLEALEMLSQESEIKVKSILNSLSGEELETLKVELEQLKETFSLAEFCEEEEEEKKGDEDFTKDITELFSQLHVSSKPEKLARARNTAHEWIRKSLTKPLAENEEGEKQSEAENTEQVNKNSIEDIHAFAIRSLAELTACSIELFHKTAALVLHGRKQEVTAIERSQTLSQMTIVLCKELSSLSKEFTTCLTTAGVKEMADVLNPLITAVFLEASNSASYIQDAFQLLLPVLEISLIENKIESHRHELQGQKPLLEH

SEQ ID NO: 883795 - protein, 505 aa, Homo sapiens [sequence omitted]

SEQ ID NO: 883796 - protein, 575 aa, Homo sapiens; identical to SEQ ID NO: 883794

SEQ ID NO: 883797 - protein, 505 aa, Homo sapiens [sequence omitted]

SEQ ID NO: 883798 - protein, 465 aa, Homo sapiens
MSDKDDIETPLLTEAAPILEDGNCEPAKNSESVDQGAKPESKSEPVVSTRKRPETKPSSDLETSKVLPIQDNVSKDVPQTRWGYWGSWGKSILSSASATVATVGQGISNVIEKAETSLGIPSPSEISTEVKYVAGETNAKENENSSPVAGAFGVFSTISTAVQSTGKSVISGGLDALEFIGKKTMDVIAEGDPGFKRTKGLMNRNATLSQVLREAKEKEEIRTSNEVTVETDKKTHYGLLFDEFQGLSHLEALEMLSQESEIKVKSILNSLSGEELETLKVELEQLKETFSLAEFCEEEEEEKKGDEDFTKDITELFSQLHVSSKPEKLARARNTAHEWIRKSLTKPLAENEEGEKQSEAENTEQVNKNSIEDIHAFAIRSLAELTACSIELFHKTAALVLHGRKQEVTAIERSQTLSQMTIVLCKELSSLSKEFTTCLTTAGVKEMADVLNPLITAVFLEKAYS

SEQ ID NO: 883799 - protein, 309 aa, Homo sapiens
MSDKDDIETPLLTEAAPILEDGNCEPAKNSESVDQGAKPESKSEPVVSTRKRPETKPSSDLETSKVLPIQDNVSKDVPQTRWGYWGSWGKSILSSASATVATVGQGISNVIEKAETSLGIPSPSEISTEVKYVAGETNAKENENSSPVAGAFGVFSTISTAVQSTGKSVISGGLDALEFIGKKTMDVIAEGDPGFKRTKGLMNRNATLSQVLREAKEKEEIRTSNEVTVETDKKTHYGLLFDEFQGLSHLEALEMLSQESEIKVKSILNSLSGEELETLKVELEQLKETFSLAEFCEEEEEEKKGNMKI

SEQ ID NO: 883800 - protein, 551 aa, Homo sapiens
MAEGENEVRWDGLCSRDSTTRETALENIRQTILRKTEYLRSVKETPHRPSDGLSNTESSDGLNKLLAHLLMLSKRCPFKDVREKSEFILKSIQELGIRIPRPLGQGPSRFIPEKEILQVGSEDAQMHALFADSFAALGRLDNITLVMVFHPQYLESFLKTQHYLLQMDGPLPLHYRHYIGIMAAARHQCSYLVNLHVNDFLHVGGDPKWLNGLENAPQKLQNLGELNKVLAHRPWLITKEHIEGLLKAEEHSWSLAELVHAVVLLTHYHSLASFTFGCGISPEIHCDGGHTFRPPSVSNYCICDITNGNHSVDEMPVNSAENVSVSDSFFEVEALMEKMRQLQECRDEEEASQEEMASRFEIEKRESMFVFSSDDEEVTPARAVSRHFEDTSYGYKDFSRHGMHVPTFRVQDYCWEDHGYSLVNRLYPDVGQLIDEKFHIAYNLTYNTMAMHKDVDTSMLRRAIWNYIHCMFGIRYDDYDYGEINQLLDRSFKVYIKTVVCTPEKVTKRMYDSFWRQFKHSEKVHVNLLLIEARMQAELLYALRAITRYMT

SEQ ID NO: 883801 - protein, 492 aa, Homo sapiens
MRLAAAANEAYTAPLAVSGLLGCKQCGGGRDQDEELGIRIPRPLGQGPSRFIPEKEILQVGSEDAQMHALFADSFAALGRLDNITLVMVFHPQYLESFLKTQHYLLQMDGPLPLHYRHYIGIMAAARHQCSYLVNLHVNDFLHVGGDPKWLNGLENAPQKLQNLGELNKVLAHRPWLITKEHIEGLLKAEEHSWSLAELVHAVVLLTHYHSLASFTFGCGISPEIHCDGGHTFRPPSVSNYCICDITNGNHSVDEMPVNSAENVSVSDSFFEVEALMEKMRQLQECRDEEEASQEEMASRFEIEKRESMFVFSSDDEEVTPARAVSRHFEDTSYGYKDFSRHGMHVPTFRVQDYCWEDHGYSLVNRLYPDVGQLIDEKFHIAYNLTYNTMAMHKDVDTSMLRRAIWNYIHCMFGIRYDDYDYGEINQLLDRSFKVYIKTVVCTPEKVTKRMYDSFWRQFKHSEKVHVNLLLIEARMQAELLYALRAITRYMT

SEQ ID NO: 883802 - protein, 426 aa, Homo sapiens
MHALFADSFAALGRLDNITLVMVFHPQYLESFLKTQHYLLQMDGPLPLHYRHYIGIMAAARHQCSYLVNLHVNDFLHVGGDPKWLNGLENAPQKLQNLGELNKVLAHRPWLITKEHIEGLLKAEEHSWSLAELVHAVVLLTHYHSLASFTFGCGISPEIHCDGGHTFRPPSVSNYCICDITNGNHSVDEMPVNSAENVSVSDSFFEVEALMEKMRQLQECRDEEEASQEEMASRFEIEKRESMFVFSSDDEEVTPARAVSRHFEDTSYGYKDFSRHGMHVPTFRVQDYCWEDHGYSLVNRLYPDVGQLIDEKFHIAYNLTYNTMAMHKDVDTSMLRRAIWNYIHCMFGIRYDDYDYGEINQLLDRSFKVYIKTVVCTPEKVTKRMYDSFWRQFKHSEKVHVNLLLIEARMQAELLYALRAITRYMT

SEQ ID NO: 883803 - protein, 426 aa, Homo sapiens; identical to SEQ ID NO: 883802

SEQ ID NO: 883804 - protein, 474 aa, Homo sapiens
MRLAAAANEAYTAPLAVSGLLGCKQCGGGRDQDEELGIRIPRPLGQGPSRFIPEKEILQVGSEDAQMHALFADSFAALGRLDNITLVMVFHPQYLESFLKTQHYLLQMDGPLPLHYRHYIGIMAAARHQCSYLVNLHVNDFLHVGGDPKWLNGLENAPQKLQNLGELNKVLAHRPWLITKEHIEGLLKAEEHSWSLAELVHAVVLLTHYHSLASFTFGCGISPEIHCDGGHTFRPPSVSNYCICDITNGNHSVDEMPVNSAENVSVSDSFFEVEALMEKMRQLQECRDEEEASQEEMASRFEIEKRESMFVFSSDDEEVTPARAVSRHFEDTSYGYKDFSRHGMHVPTFRVQDYCWEDHGYSLVNRLYPDVGQLIDEKFHIAYNLTYNTMAMHKDVDTSMLRRAIWNYIHCMFGIRYDDYDYGEINQLLDRSFKVYIKTVVCTPEKVTKRMYDSFWRQFKHSEKVCAYCGLFTL

SEQ ID NO: 883805 - protein, 134 aa, Homo sapiens
MAEGENEVRWDGLCSRDSTTRETALENIRQTILRKTEYLRSVKETPHRPSDGLSNTESSDGLNKLLAHLLMLSKRCPFKDVREKSEFILKSIQCTQSEDRKNEDLHDYPRPLNECIANDVSIPTACYSRHHVQT

SEQ ID NO: 883806 - protein, 492 aa, Homo sapiens; identical to SEQ ID NO: 883801

SEQ ID NO: 883807 - protein, 290 aa, Homo sapiens
  misc_feature (250)..(250): Xaa can be any naturally occurring amino acid
  misc_feature (259)..(259): Xaa can be any naturally occurring amino acid
  misc_feature (269)..(269): Xaa can be any naturally occurring amino acid
  misc_feature (287)..(287): Xaa can be any naturally occurring amino acid
HGSSEGADLEEAPQKATPLASCLSPLEGSLLLISEPGSPSDQPPGASSGRGPGSFRAQHRQLAVMGGSASSQLDEGKCAYIRGKTEAAIKNFSPYYSRQYSVAFCNHVRTEVEQQRDLTSQFLKTKPPLAPGTILYEAELSQFSEDIKKWKERYVVVKNDYAVESYENKEAYQRGAAPKCRILPAGGKVLTSEDEYNLLSDRHFPDPLASSEKENTQPFVVLPKEFPVYLWQPFFRHGYFCFHEAADQKXSFNWPSLEXDLPVQGILQXIEITLKSQNEHFWKAPKXLFL

SEQ ID NO: 883808 - protein, 192 aa, Homo sapiens
  misc_feature (181)..(181): Xaa can be any naturally occurring amino acid
HGSSEGADLEEAPQKATPLASCLSPLEGSLLLISEPGSPSDQPPGASSGRGPGSFRAQHRQLAVMGGSASSQLDEGKCAYIRGKTEAAIKNFSPYYSRQYSVAFCNHVRTEVEQQRDLTSQFLKTKPPLAPGTILYEAELSQFSEDIKKWKERYVVVKNDYAVESYENKEGLSEEGAALQXELKGPILVKSF

SEQ ID NO: 883809 - protein, 992 aa, Homo sapiens
HGSSEGADLEEAPQKATPLASCLSPLEGSLLLISEPGSPSDQPPGASSGRGPGSFRAQHRQLAVMGGSASSQLDEGKCAYIRGKTEAAIKNFSPYYSRQYSVAFCNHVRTEVEQQRDLTSQFLKTKPPLAPGTILYEAELSQFSEDIKKWKERYVVVKNDYAVESYENKEAYQRGAAPKCRILPAGGKVLTSEDEYNLLSDRHFPDPLASSEKENTQPFVVLPKEFPVYLWQPFFRHGYFCFHEAADQKRFSALLSDCVRHLNHDYMKQMTFEAQAFLEAVQFFRQEKGHYGSWEMITGDEIQILSNLVMEELLPTLQTDLLPKMKGKKNDRKRTWLGLLEEAYTLVQHQVSEGLSALKEECRALTKGLEGTIRSDMDQIVNSKNYLIGKIKAMVAQPAEKSCLESVQPFLASILEELMGPVSSGFSEVRVLFEKEVNEVSQNFQTTKDSVQLKEHLDRLMNLPLHSVKMEPCYTKVNLLHERLQDLKSRFRFPHIDLVVQRTQNYMQELMENAVFTFEQLLSPHLQGEASKTAVAIEKVKLRVLKQYDYDSSTIRKKIFQEALVQITLPTVQKALASTCKPELQKYEQFIFADHTNMIHVENVYEEILHQILLDETLKVIKEAAILKKHNLFEDNMALPSESVSSLTDLKPPTGSNQASPARRASAILPGVLGSETLSNEVFQESEEEKQPEVPSSLAKGESLSLPGPSPPPDGTEQVIISRVDDPVVNPVATEDTAGLPGTCSSELEFGGTLEDEEPAQEEPEPITASGSLKALRKLLTASVEVPVDSAPVMEEDTNGESHVPQENEEEEEKEPSQAAAIHPDNCEESEVSEREAQPPCPEAHGEELGGFPEVGSPASPPASGGLTEEPLGPMEGELPGEACTLTAHEGRGGKCTEEGDASQQEGCTLGSDPICLSESQVSEEQEEMGGQSSAAQATASVNAEEIKVARIHECQWVVEDAPNPDVLLSHKDDVKEGEGGQESFPELPSEE

SEQ ID NO: 883810 - protein, 955 aa, Homo sapiens
HGSSEGADLEEAPQKATPLASCLSPLEGSLLLISEPGSPSDQPPGASSGRGPGSFRAQHRQLAVMGGSASSQLDEGKCAYIRGKTEAAIKNFSPYYSRQYSVAFCNHVRTEVEQQRDLTSQFLKTKPPLAPGTILYEAELSQFSEDIKKWKERYVVVKNDYAVESYENKEAYQRGAAPKCRILPAGGKVLTSEDEYNLLSDRHFPDPLASSEKENTQPFVVLPKEFPVYLWQPFFRHGYFCFHEAADQKRFSALLSDCVRHLNHDYMKQMTFEAQAFLEAVQFFRQEKGHYGSWEMITGDEIQILSNLVMEELLPTLQTDLLPKMKGKKNDRKRTWLGLLEEAYTLVQHQVSEGLSALKEECRALTKGLEGTIRSDMDQIVNSKNYLIGKIKAMVAQPAEKSCLESVQPFLASILEELMGPVSSGFSEVRVLFEKEVNEVSQNFQTTKDSVQLKEHLDRLMNLPLHSVKMEPCYTKVNLLHERLQDLKSRFRFPHIDLVVQRTQNYMQEQYDYDSSTIRKKIFQEALVQITLPTVQKALASTCKPELQKYEQFIFADHTNMIHVENVYEEILHQILLDETLKVIKEAAILKKHNLFEDNMALPSESVSSLTDLKPPTGSNQASPARRASAILPGVLGSETLSNEVFQESEEEKQPEVPSSLAKGESLSLPGPSPPPDGTEQVIISRVDDPVVNPVATEDTAGLPGTCSSELEFGGTLEDEEPAQEEPEPITASGSLKALRKLLTASVEVPVDSAPVMEEDTNGESHVPQENEEEEEKEPSQAAAIHPDNCEESEVSEREAQPPCPEAHGEELGGFPEVGSPASPPASGGLTEEPLGPMEGELPGEACTLTAHEGRGGKCTEEGDASQQEGCTLGSDPICLSESQVSEEQEEMGGQSSAAQATASVNAEEIKVARIHECQWVVEDAPNPDVLLSHKDDVKEGEGGQESFPELPSEE

SEQ ID NO: 883811 - protein, 621 aa, Homo sapiens
HGSSEGADLEEAPQKATPLASCLSPLEGSLLLISEPGSPSDQPPGASSGRGPGSFRAQHRQLAVMGGSASSQLDEGKCAYIRGKTEAAIKNFSPYYSRQYSVAFCNHVRTEVEQQRDLTSQFLKTKPPLAPGTILYEAELSQFSEDIKKWKERYVVVKNDYAVESYENKEAYQRGAAPKCRILPAGGKVLTSEDEYNLLSDRHFPDPLASSEKENTQPFVVLPKEFPVYLWQPFFRHGYFCFHEAADQKRFSALLSDCVRHLNHDYMKQMTFEAQAFLEAVQFFRQEKGHYGSWEMITGDEIQILSNLVMEELLPTLQTDLLPKMKGKKNDRKRTWLGLLEEAYTLVQHQVSEGLSALKEECRALTKGLEGTIRSDMDQIVNSKNYLIGKIKAMVAQPAEKSCLESVQPFLASILEELMGPVSSGFSEVRVLFEKEVNEVSQNFQTTKDSVQLKEHLDRLMNLPLHSVKMEPCYTKVNLLHERLQDLKSRFRFPHIDLVVQRTQNYMQELMENAVFTFEQLLSPHLQGEASKTAVAIEKVKLRVLKQYDYDSSTIRKKIFQEALVQITLPTVQKALASTCKPELQKYEQFIFADHTNMIHVENVYEEILHQILLDETLKAG

SEQ ID NO: 883812 - protein, 101 aa, Homo sapiens
LLPTLQTDLLPKMKGKKNDRKRTWLGVSNGFALQLSYSKWEHSLPFSFRAFVVVVDIPFPGCRNAYFEPAESHLQEDCSKQTPTLKEKLQCVCSSVCYDGL

SEQ ID NO: 883813 - protein, 992 aa, Homo sapiens; identical to SEQ ID NO: 883809

SEQ ID NO: 883814 - protein, 992 aa, Homo sapiens; identical to SEQ ID NO: 883809

SEQ ID NO: 883815 - protein, 992 aa, Homo sapiens; identical to SEQ ID NO: 883809

SEQ ID NO: 883816 - protein, 992 aa, Homo sapiens; identical to SEQ ID NO: 883809

SEQ ID NO: 883817 - protein, 114 aa, Homo sapiens
CFVFRYLSVIKEAAILKKHNLFEDNMALPSESVSSLTDLKPPTGSNQASPARRASAILPGVLGSETLSNEVFQESEEEKQPEVPSSLAKGESLSLPGPSPPPDGTEQVIISRVD

SEQ ID NO: 883818 - protein, 205 aa, Homo sapiens
MAARDATSGSLSEESSALDLPSACDIRDYVLQGPSQEANSEAFSSLEFHSFPYSSDVDPDTSNLNIEQNNSWTAENFWLDPAVKGQSEKEEDDGLRKSLDRFYEMFGHPQPGSANSLSASVCKCLSQKITQLRGQESQKYALRSFQMARVIFNRDGCSVLQRHSRDTHFYPLEEGSTSLDDEKPNPGLSKDITHFLLQQNVMKDL

SEQ ID NO: 883819 - protein, 149 aa, Homo sapiens
MVKDTSNLNIEQNNSWTAENFWLDPAVKGQSEKEEDDGLRKSLDRFYEMFGHPQPGSANSLSASVCKCLSQKITQLRGQESQKYALRSFQMARVIFNRDGCSVLQRHSRDTHFYPLEEGSTSLDDEKPNPGLSKDITHFLLQQNVMKDL

SEQ ID NO: 883820 - protein, 202 aa, Homo sapiens
ILIEVEQRPAVLSQELLRAVAPASGHGQRDSASPCHCRMKGELALLTTLAARDALINTSNLNIEQNNSWTAENFWLDPAVKGQSEKEEDDGLRKSLDRFYEMFGHPQPGSANSLSASVCKCLSQKITQLRGQESQKYALRSFQMARVIFNRDGCSVLQRHSRDTHFYPLEEGSTSLDDEKPNPGLSKDITHFLLQQNVMKDL

SEQ ID NO: 883821 - protein, 68 aa, Homo sapiens
RIVTVRTRIAVLSLRPPVWWNSVSVSGGLAAFLLSFLECFGGEDYGSQGRHFRQPVRGEQCFGPAISV

SEQ ID NO: 883822 - protein, 228 aa, Homo sapiens
PNPLFRPPSQPLPPSPPPERLRTMAARDATSGSLSEESSALDLPSACDIRDYVLQGPSQEANSEAFSSLEFHSFPYSSDVDPDTSNLNIEQNNSWTAENFWLDPAVKGQSEKEEDDGLRKSLDRFYEMFGHPQPGSANSLSASVCKCLSQKITQLRGQESQKYALRSFQMARVIFNRDGCSVLQRHSRDTHFYPLEEGSTSLDDEKPNPGLSKDITHFLLQQNVMKDL

SEQ ID NO: 883823 - protein, 205 aa, Homo sapiens; identical to SEQ ID NO: 883818

SEQ ID NO: 883824 - protein, 502 aa, Homo sapiens
RAPPLGRAVTPLQGRPAELLGRCQRPCHRHVADMVISESMDILFRIRGGLDLAFQLATPNEIFLKKALKHVLSDLSTKLSSNALVFRICHSSVYIWPSSDINTIPGELTDASACKNILRFIQFEPEEDIKRKFMRKKDKKLSDMHQIVNIDLMLEMSTSLAAVTPIIERESGGHHYVNMTLPVDAVISVAPEETWGKVRKLLVDAIHNQLTDMEKCILKYMKGTSIVVPEPLHFLLPGKKNLVTISYPSGIPDGQLQAYRKELHDLFNLPHDRPYFKRSNAYHFPDEPYKDGYIRNPHTYLNPPNMETGMIYVVQGIYGYHHYMQDRIDDNGWGCAYRSLQTICSWFKHQGYTERSIPTHREIQQALVDAGDKPATFVGSRQWIGSIEVQLVLNQLIGITSKILFVSQGSEIASQGRELANHFQSEGTPVMIGGGVLAHTILGVAWNEITGQIKFLILDPHYTGAEDLQVILEKGWCGWKGPDFWNKDAYYNLCLPQRPNMI

SEQ ID NO: 883825 - protein, 502 aa, Homo sapiens; identical to SEQ ID NO: 883824

SEQ ID NO: 883826 - protein, 502 aa, Homo sapiens; identical to SEQ ID NO: 883824

SEQ ID NO: 883827 - protein, 420 aa, Homo sapiens
RAPPLGRAVTPLQGRPAELLGRCQRPCHRHVADMVISESMDILFRIRGGLDLAFQLATPNEIFLKKALKHVLSDLSTKLSSNALVFRICHSSVYIWPSSDINTIPGELTDASACKNILRFIQFEPEEDIKRKFMRKKDKKLSDMHQIVNIDLMLEMSTSLAAVTPIIERESGGHHYVNMTLPVDAVISVAPEETWGKVRKLLVDAIHNQLTDMEKCILKYMKGTSIVVPEPLHFLLPGKKNLVTISYPSGIPDGQLQAYRKELHDLFNLPHDRPYFKRSNAYHFPDEPYKDGYIRNPHTYLNPPNMETGMIYVVQGIYGYHHYMQDRIDDNGWGCAYRSLQTICSWFKHQGYTERSIPTHREIQQALVDAGDKPATFVGSRQWIGSIEVQLVLNQLIGITSKILFVSNTRKNKKVGNIVS

SEQ ID NO: 883828 - protein, 324 aa, Homo sapiens
MTLPVDAVISVAPEETWGKVRKLLVDAIHNQLTDMEKCILKYMKGTSIVVPEPLHFLLPGKKNLVTISYPSGIPDGQLQAYRKELHDLFNLPHDRPYFKRSNAYHFPDEPYKDGYIRNPHTYLNPPNMETGMIYVVQGIYGYHHYMQDRIDDNGWGCAYRSLQTICSWFKHQGYTERSIPTHREIQQALVDAGDKPATFVGSRQWIGSIEVQLVLNQLIGITSKILFVSQGSEIASQGRELANHFQSEGTPVMIGGGVLAHTILGVAWNEITGQIKFLILDPHYTGAEDLQVILEKGWCGWKGPDFWNKDAYYNLCLPQRPNMI

SEQ ID NO: 883829 - protein, 501 aa, Homo sapiens
RAPPLGRAVTPLQGRPAELLGRCQRPCHRHVADMVISESMDILFRIRGGLDLAFQLATPNEIFLKKALKHVLSDLSTKLSSNALVFRICHSSVYIWPSSDINTIPGELTDASACKNILRFIQFEPEEDIKRKFMRKKDKKLSDMHQIVNIDLMLEMSTSLAAVTPIIERESGGHHYVNMTLPVDAVISVAPEETWGKVRKLLVDAIHNQLTDMEKCILKYMKGTSIVVPEPLHFLLPGKKNLVTISYPSGIPDGQLQAYRKELHDLFNLPHDRPYFKRSNAYHFPDEPYKDGYIRNPHTYLNPPNMETGMIYVVQGIYGYHHYMQDRIDDNGWGCAYRSLQTICSWFKHQGYTERSIPTHREIQQALVDAGDKPATFVGSRQWIGSIEVQLVLNQLIGITSKILFVSQGSEIASQGRELANHFQSEGTPVMIGGGVLAHTILGVAWNEITGQIKFLILDPHYTGAEDLQVILEKHLEFEVYKRFFDWCMYLTEYSSNILVL

SEQ ID NO: 883830 - protein, 443 aa, Homo sapiens
RAPPLGRAVTPLQGRPAELLGRCQRPCHRHVADMVISESMDILFRIRGGLDLAFQLATPNEIFLKKALKHVLSDLSTKLSSNALVFRICHSSVYIWPSSDINTIPGELTDASACKNILRFIQFEPEEDIKRKFMRKKDKKLSDMHQIVNIDLMLEMSTSLAAVTPIIERESGGHHYVNMTLPVDAVISVAPEETWGKVRKLLVDAIHNQLTDMEKCILKYMKGTSIVVPEPLHFLLPGKKNLVTISYPSGIPDGQLQAYRKELHDLFNLPHDRPYFKRSNAYHFPDEPYKDGYIRNPHTYLNPPNMETGMIYVVQGIYGYHHYMQDRIDDNGWGCAYRSLQTICSWFKHQGYTERSIPTHREIQQALVDAGDKPATFVGSRQWIGSIEVQLVLNQLIGITSKILFVSQGSEIASQGRELANHFQSEGTPVMIGKLFQTLFLVE

SEQ ID NO: 883831 - protein, 416 aa, Homo sapiens
RAPPLGRAVTPLQGRPAELLGRCQRPCHRHVADMVISESMDILFRIRGGLDLAFQLATPNEIFLKKALKHVLSDLSTKLSSNALVFRICHSSVYIWPSSDINTIPGELTDASACKNILRFIQFEPEEDIKRKFMRKKDKKLSDMHQIVNIDLMLEMSTSLAAVTPIIERESGGHHYVNMTLPVDAVISVAPEETWGKVRKLLVDAIHNQLTDMEKCILKYMKGTSIVVPEPLHFLLPGKKNLVTISYPSGIPDGQLQAYRKELHDLFNLPHDRPYFKRSNAYHFPDEPYKDGYIRNPHTYLNPPNMETGMIYVVQGIYGYHHYMQDRIDDNGWGCAYRSLQTICSWFKHQGYTERSIPTHREIQQALVDAGDKPATFVGSRQWIGSIEVQLVLNQLIGITSKILFVSQSVAGSSRV

SEQ ID NO: 883832 - protein, 152 aa, Homo sapiens
SLFIGTIPTHREIQQALVDAGDKPATFVGSRQWIGSIEVQLVLNQLIGITSKILFVSQGSEIASQGRELANHFQSEGTPVMIGGGVLAHTILGVAWNEITGQIKFLILDPHYTGAEDLQVILEKGWCGWKGPDFWNKDAYYNLCLPQRPNMI

SEQ ID NO: 883833 - protein, 443 aa, Homo sapiens
RAPPLGRAVTPLQGRPAELLGRCQRPCHRHVADMVISESMDILFRIRGGLDLAFQLATPNEIFLKKALKHVLSDLSTKLSSNALVFRICHSSVYIWPSSDINTIPGELTDASACKNILRFIQFEPEEDIKRKFMRKKDKKLSDMHQIVNIDLMLEMSTSLAAVTPIIERESGGHHYVNMTLPVDAVISVAPEETWGKVRKLLVDAIHNQLTDMEKCILKYMKGTSIVVPEPLHFLLPGKKNLELHDLFNLPHDRPYFKRSNAYHFPDEPYKDGYIRNPHTYLNPPNMETGMIYVSPKQEKTNKHKKEDRIDDNGWGCAYRSLQTICSWFKHQGYTERSIPTHREIQQLKYDSREDKPATKNGYATKKKKRHRKTTKTKPKKQRRNSTKNRLVQPRVTEKADTRERKTKRNKTKRKKTPRKRTKERKRGIASTRTKKNQKQIKQ

SEQ ID NO: 883834 - protein, 152 aa, Homo sapiens; identical to SEQ ID NO: 883832

SEQ ID NO: 883835 - protein, 502 aa, Homo sapiens; identical to SEQ ID NO: 883824

SEQ ID NO: 883836 - protein, 483 aa, Homo sapiens
RAPPLGRAVTPLQGRPAELLGRCQRPCHRHVADMVISESMDILFRIRGGLDLAFQLATPNEIFLKKALKHVLSDLSTKLSSNALVFRICHSSVYIWPSSDINTIPGELTDASACKNILRFIQFEPEEDIKRKFMRKKDKKLSDMHQIVNIDLMLEMSTSLAAVTPIIERESGGHHYVNMTLPVDAVISVAPEETWGKVRKLLVDAIHNQLTDMEKCILKYMKGTSIVVPEPLHFLLPGKKNLELHDLFNLPHDRPYFKRSNAYHFPDEPYKDGYIRNPHTYLNPPNMETGMIYVVQGIYGYHHYMQDRIDDNGWGCAYRSLQTICSWFKHQGYTERSIPTHREIQQALVDAGDKPATFVGSRQWIGSIEVQLVLNQLIGITSKILFVSQGSEIASQGRELANHFQSEGTPVMIGGGVLAHTILGVAWNEITGQIKFLILDPHYTGAEDLQVILEKGWCGWKGPDFWNKDAYYNLCLPQRPNMI

SEQ ID NO: 883837 - protein, 375 aa, Homo sapiens
ALDEETAVTDGHKVIDMHQIVNIDLMLEMSTSLAAVTPIIERESGGHHYVNMTLPVDAVISVAPEETWGKVRKLLVDAIHNQLTDMEKCILKYMKGTSIVVPEPLHFLLPGKKNLVTISYPSGIPDGQLQAYRKELHDLFNLPHDRPYFKRSNAYHFPDEPYKDGYIRNPHTYLNPPNMETGMIYVVQGIYGYHHYMQDRIDDNGWGCAYRSLQTICSWFKHQGYTERSIPTHREIQQALVDAGDKPATFVGSRQWIGSIEVQLVLNQLIGITSKILFVSQGSEIASQGRELANHFQSEGTPVMIGGGVLAHTILGVAWNEITGQIKFLILDPHYTGAEDLQVILEKGWCGWKGPDFWNKDAYYNLCLPQRPNMI

SEQ ID NO: 883838 - protein, 420 aa, Homo sapiens; identical to SEQ ID NO: 883827

SEQ ID NO: 883839 - protein, 420 aa, Homo sapiens; identical to SEQ ID NO: 883827

SEQ ID NO: 883840 - protein, 95 aa, Homo sapiens
MEGGFGSDFGGSGSGKLDPGLIMEQVKVQIAVANAQELLQRMTDKCFRKCIGKPGGSLDNSEQKCIAMCMDRYMDAWNTVSRAYNSRLQRERANM

SEQ ID NO: 883841 - protein, 113 aa, Homo sapiens
ITEIICTTAFCSVRQRAPAGRVPSVTLLGREERGFRGRYLPYSSPWVIGPSRSDPSDFPWEPHFHYLENGLNAKVADIYGHPPRGPGVERCLPLQPLPALPPRPGDGMRWVAQ

SEQ ID NO: 883842 - protein, 95 aa, Homo sapiens; identical to SEQ ID NO: 883840

SEQ ID NO: 883843 - protein, 95 aa, Homo sapiens; identical to SEQ ID NO: 883840

SEQ ID NO: 883844 - protein, 95 aa, Homo sapiens; identical to SEQ ID NO: 883840

SEQ ID NO: 883845 - protein, 696 aa, Homo sapiens
MLWKLLLVTEGTAVISGKRVKNLPLFVFNVLGRFRFWLGGNRVGANKKRLVKRFRGKGWLAMLNFRCLLHLHVATVSETDSRFLGKKFKLEKQCGVVERILGIQLRGVGSERLTLLLTCSVTLTKSFDLSGPHLYWKMSSRWSLINFCPVLTLCDSKCIYTDLLNCELFVFSAFSMRTYVCHICSIAFTSLDMFRSHMQGSEHQIKESIVINLVKNSRKTQDSYQNECADYINVQKARGLEAKTCFRKMEESSLETRRYREVVDSRPRHRMFEQRLPFETFRTYAAPYNISQAMEKQLPHSKKTYDSFQDELEDYIKVQKARGLDPKTCFRKMRENSVDTHGYREMVDSGPRSRMCEQRFSHEASQTYQRPYHISPVESQLPQWLPTHSKRTYDSFQDELEDYIKVQKARGLEPKTCFRKIGDSSVETHRNREMVDVRPRHRMLEQKLPCETFQTYSGPYSISQVVENQLPHCLPAHDSKQRLDSISYCQLTRDCFPEKPVPLSLNQQENNSGSYSVESEVYKHLSSENNTADHQAGHKRKHQKRKRHLEEGKERPEKEQSKHKRKKSYEDTDLDKDKSIRQRKREEDRVKVSSGKLKHRKKKKSHDVPSEKEERKHRKEKKNLLKKGQKRKCFGMSLFLDFECLDFVLPKVELKKKNSQYGFRKRNTLMKKRRGRYSQCHFQEGTLRFFLYKNLN

SEQ ID NO: 883846 - protein, 638 aa, Homo sapiens
MESCSVTRLECSGAISAHCSLHLPGSSDSPASASQIAGTTDAIWNEQEKAELFTDKFCQVCGVMLQFESQRISHYEGEKHAQNVSFYFQMHGEQNEVPGKKMKMHVENFQVHRYEGVDKNKFCDLCNMMFSSPLIAQSHYVGKVHAKKLKQLMEEHDQASPSGFQPEMAFSMRTYVCHICSIAFTSLDMFRSHMQGSEHQIKESIVINLVKNSRKTQDSYQNECADYINVQKARGLEAKTCFRKMEESSLETRRYREVVDSRPRHRMFEQRLPFETFRTYAAPYNISQAMEKQLPHSKKTYDSFQDELEDYIKVQKARGLDPKTCFRKMRENSVDTHGYREMVDSGPRSRMCEQRFSHEASQTYQRPYHISPVESQLPQWLPTHSKRTYDSFQDELEDYIKVQKARGLEPKTCFRKIGDSSVETHRNREMVDVRPRHRMLEQKLPCETFQTYSGPYSISQVVENQLPHCLPAHDSKQRLDSISYCQLTRDCFPEKPVPLSLNQQENNSGSYSVESEVYKHLSSENNTADHQAGHKRKHQKRKRHLEEGKERPEKEQSKHKRKKSYEDTDLDKDKSIRQRKREEDRVKVSSGKLKHRKKKKSHDVPSEKEERKHRKEKKKSVEERTEEEMLWDESILGF

SEQ ID NO: 883847 - protein, 696 aa, Homo sapiens; identical to SEQ ID NO: 883845

SEQ ID NO: 883848 - protein, 256 aa, Homo sapiens
KLFFTTANAHFKVGCPVLALEVLSKIPKVTKTSALSAKKDQPDFISHRMDDVPSHSKALSDGNGSSGIEWSNVTSSQYDWSQPIVKVDEEPLNLDWGEDHDSALDEEEDDAVGLVMKSTDAREKDKQSDQKASDPNMLLTPQEEDDPEGDTEVDVIAEQLKFRACLKILMTELRTLATGYEVDGGKLRFQLYNWLEKEIAALHEICNHESVIKEYSSKTYSKVESDLLDQEEMVDNHHLGPHEGYVAEKYSQEICF

SEQ ID NO: 883849 - protein, 1176 aa, Homo sapiens
KLFFTTANAHFKVGCPVLALEVLSKIPKVTKTSALSAKKDQPDFISHRMDDVPSHSKALSDGNGSSGIEWSNVTSSQYDWSQPIVKVDEEPLNLDWGEDHDSALDEEEDDAVGLVMKSTDAREKDKQSDQKASDPNMLLTPQEEDDPEGDTEVDVIAEQLKFRACLKILMTELRTLATGYEVDGGKLRFQLYNWLEKEIAALHEICNHESVIKEYSSKTYSKVESDLLDQEEMVDKPDIGSYERHQIERRRLQAKREHAERRKSWLQKNQDLLRVFLSYCSLHGAQGGGLASVRMELKFLLQESQQETTVKQLQSPLPLPTTLPLLSASIASTKTVIANPVLYLNNHIHDILYTIVQMKTPPHPSIEDVKVHTLHSLAASLSASIYQALCDSHSYSSQTEGNQFTGMAYQGLLLSDRRRLRTESIEEHATPNSSPAQWPGVSSLINLLSSAQDEDQPKLNILLCEAVVAVYLSLLIHALATNSSSELFRLAAHPLNNRMWAAVFGGGVKLVVKPRRQSENISAPPVLSEDIDKHRRRFNMRMLVPGRPVKDATPPPVPAERPSYKEKFIPPELSMWDYFVAKPFLPLSDSGVIYDSDESIHSDEEDDAFFSDTQIQEHQDPNSYSWALLHLTMVKLALHNVKNFFPIAGLEFSELPVTSPLGIAVIKNLENWEQILQEKMDQFEGPPPNYINTYPTDLSVGAGPAILRNKAMLEPENTPFKSRDSSAFPVKRLWHFLVKQEVLQETFIRYIFTKKRKQSESIEEHVEQVNQNCIAEDCHIKVEADLGYPGGKAKVIHKESDMIMAFSVNKANCNEIVLASTHDVQELDVTSLLACQSYIWIGEEYDRESKSSDDVDYRGSTTTLYQPSATSYSASQVHPPSSLPWLGTGQTSTGASVLMKRNLHNVKRMTSHPVHQYYLTGAQDGSVRMFEWTRPQQLVCFRQAGNARVTRLYFNSQGNKCGVADGEGFLSIWQVNQTASNPKPYMSWQCHSKATSDFAFITSSSLVATSGHSNDNRNVCLWDTLISPGNSLIHGFTCHDHGATVLQYAPKQQLLISGGRKGHVCIFDIRQRQLIHTFQAHDSAIKALALDPYEEYFTTGSAEGNIKVWRLTGHGLIHSFKSEHAKQSIFRNIGAGVMQIDIIQGNRLFSCGADGTLKTRVLPNAFNIPNRILDIL

SEQ ID NO: 883850 - protein, 375 aa, Homo sapiens [sequence omitted]

SEQ ID NO: 883851 - protein, 1176 aa, Homo sapiens; identical to SEQ ID NO: 883849

SEQ ID NO: 883852 - protein, 1176 aa, Homo sapiens; identical to SEQ ID NO: 883849

SEQ ID NO: 883853 - protein, 791 aa, Homo sapiens
KLFFTTANAHFKVGCPVLALEVLSKIPKVTKTSALSAKKDQPDFISHRMDDVPSHSKALSDGNGSSGIEWSNVTSSQYDWSQPIVKVDEEPLNLDWGEDHDSALDEEEDDAVGLVMKSTDAREKDKQSDQKASDPNMLLTPQEEDDPEGDTEVDVIAEQLKFRACLKILMTELRTLATGYEVDGGKLRFQLYNWLEKEIAALHEICNHESVIKEYSSKTYSKVESDLLDQEEMVDKPDIGSYERHQIERRRLQAKREHAERRKSWLQKNQDLLRVFLSYCSLHGAQGGGLASVRMELKFLLQESQQETTVKQLQSPLPLPTTLPLLSASIASTKTVIANPVLYLNNHIHDILYTIVQMKTPPHPSIEDVKVHTLHSLAASLSASIYQALCDSHSYSSQTEGNQFTGMAYQGLLLSDRRRLRTESIEEHATPNSSPAQWPGVSSLINLLSSAQDEDQPKLNILLCEAVVAVYLSLLIHALATNSSSELFRLAAHPLNNRMWAAVFGGGVKLVVKPRRQSENISAPPVLSEDIDKHRRRFNMRMLVPGRPVKDATPPPVPAERPSYKEKFIPPELSMWDYFVAKPFLPLSDSGVIYDSDESIHSDEEDDAFFSDTQIQEHQDPNSYSWALLHLTMVKLALHNVKNFFPIAGLEFSELPVTSPLGIAVIKNLENWEQILQEKMDQFEGPPPNYINTYPTDLSVGAGPAILRNKAMLEPENTPFKSRDSSAFPVKRLWHFLVKQEVLQETFIRYIFTKKRKQSEVEADLGYPGGKAKVIHKESDMIMAFSVNKLF

SEQ ID NO: 883854 - protein, 1155 aa, Homo sapiens
KLFFTTANAHFKVGCPVLALEVLSKIPKVTKTSALSAKKDQPDFISHRMDDVPSHSKALSDGNGSSGIEWSNVTSSQYDWSQPIVKVDEEPLNLDWGEDHDSALDEEEDDAVGLVMKSTDAREKDKQSDQKASDPNMLLTPQEEDDPEGDTEVDVIAEQLKFRACLKILMTELRTLATGYEVDGGKLRFQLYNWLEKEIAALHEICNHESVIKEYSSKTYSKVESDLLDQEEMVDKPDIGSYERHQIERRRLQAKREHAERRKSWLQKNQDLLRVFLSYCSLHGAQGGGLASVRMELKFLLQESQQETTVKQLQSPLPLPTTLPLLSASIASTKTVIANPVLYLNNHIHDILYTIVQMKTPPHPSIEDVKVHTLHSLAASLSASIYQALCDSHSYSSQTEGNQFTGMAYQGLLLSDRRRLRTESIEEHATPNSSPAQWPGVSSLINLLSSAQDEDQPKLNILLCEAVVAVYLSLLIHALATNSSSELFRLAAHPLNNRMWAAVFGGGVKLVVKPRRQSENISAPPVLSEDIDKHRRRFNMRMLVPGRPVKDATPPPVPAERPSYKEKFIPPELSMWDYFVAKPFLPLSDSGVIYDSDESIHSDEEDDAFFSDTQIQEHQDPNSYSWALLHLTMVKLALHNVKNFFPIAGLEFSELPVTSPLGIAVIKNLENWEQILQEKMDQFEGPPPNYINTYPTDLSVGAGPAILRNKAMLEPENTPFKSRDSSAFPVKRLWHFLVKQEVLQETFIRYIFTKKRKQSEVEADLGYPGGKAKVIHKESDMIMAFSVNKANCNEIVLASTHDVQELDVTSLLACQSYIWIGEEYDRESKSSDDVDYRGSTTTLYQPSATSYSASQVHPPSSLPWLGTGQTSTGASVLMKRNLHNVKRMTSHPVHQYYLTGAQDGSVRMFEWTRPQQLVCFRQAGNARVTRLYFNSQGNKCGVADGEGFLSIWQVNQTASNPKPYMSWQCHSKATSDFAFITSSSLVATSGHSNDNRNVCLWDTLISPGNSLIHGFTCHDHGATVLQYAPKQQLLISGGRKGHVCIFDIRQRQLIHTFQAHDSAIKALALDPYEEYFTTGSAEGNIKVWRLTGHGLIHSFKSEHAKQSIFRNIGAGVMQIDIIQGNRLFSCGADGTLKTRVLPNAFNIPNRILDIL

SEQ ID NO: 883855 - protein, 1041 aa, Homo sapiens
KLFFTTANAHFKVGCPVLALEVLSKIPKVTKTSALSAKKDQPDFISHRMDDVPSHSKALSDGNGSSGIEWSNVTSSQYDWSQPIVKVDEEPLNLDWGEDHDSALDEEEDDAVGLVMKSTDAREKDKQSDQKASDPNMLLTPQEEDDPEGDTEVDVIAEQLKFRACLKILMTELRTLATGYEVDGGKLRFQLYNWLEKEIAALHEICNHESVIKEYSSKTYSKVESDLLDQEEMVDKPDIGSYERHQIERRRLQAKREHAERRKSWLQKNQDLLRVFLSYCSLHGAQGGGLASVRMELKFLLQESQQETTVKQLQSPLPLPTTLPLLSASIASTKTVIANPVLYLNNHIHDILYTIVQMKTPPHPSIEDVKVHTLHSLAASLSASIYQALCDSHSYSSQTEGNQFTGMAYQGLLLSDRRRLRTESIEEHATPNSSPAQWPGVSSLINLLSSAQDEDQPKLNILLCEAVVAVYLSLLIHALATNSSSELFRLAAHPLNNRMWAAVFGGGVKLVVKPRRQSENISAPPVLSEDIDKHRRRFNMRMLVPGRPVKDATPPPVPAERPSYKEKFIPPELSMWDYFVAKPFLPLSDSGVIYDSDESIHSDEEDDAFFSDTQIQEHQDPNSYSWALLHLTMVKLALHNVKNFFPIAGLEFSELPVTSPLGIAVIKNLENWEQILQEKMDQFEGPPPNYINTYPTDLSVGAGPAILRNKAMLEPENTPFKSRDSSAFPVKRLWHFLVKQEVLQETFIRYIFTKKRKQSESIEEHVEQVNQNCIAEDCHIKVEADLGYPGGKAKVIHKESDMIMAFSVNKANCNEIVLASTHDVQELDVTSLLACQSYIWIGEEYDRESKSSDDVDYRGSTTTLYQPSATSYSASQVHPPSSLPWLGTGQTSTGASVLMKRNLHNVKRMTSHPVHQYYLTGAQDGSVRMFEWTRPQQLVCFRQAGNARVTRLYFNSQGNKCGVADGEGFLSIWQVNQTASNPKPYMSWQCHSKATSDFAFITSSSLVATSGHSNDNRFHVPRSWCHGTAVCTQTATPNLGG

SEQ ID NO: 883856 - protein, 278 aa, Homo sapiens
MKRNLHNVKRMTSHPVHQYYLTGAQDGSVRMFEWTRPQQLVCFRQAGNARVTRLYFNSQGNKCGVADGEGFLSIWQVNQTASNPKPYMSWQCHSKATSDFAFITSSSLVATSGHSNDNRNVCLWDTLISPGNSLIHGFTCHDHGATVLQYAPKQQLLISGGRKGHVCIFDIRQRQLIHTFQAHDSAIKALALDPYEEYFTTGSAEGNIKVWRLTGHGLIHSFKSEHAKQSIFRNIGAGVMQIDIIQGNRLFSCGADGTLKTRVLPNAFNIPNRILDIL

SEQ ID NO: 883857 - protein, 1176 aa, Homo sapiens; identical to SEQ ID NO: 883849

SEQ ID NO: 883858 - protein, 762 aa, Homo sapiens
KLFFTTANAHFKVGCPVLALEVLSKIPKVTKTSALSAKKDQPDFISHRMDDVPSHSKALSDGNGSSGIEWSNVTSSQYDWSQPIVKVDEEPLNLDWGEDHDSALDEEEDDAVGLVMKSTDAREKDKQSDQKASDPNMLLTPQEEDDPEGDTEVDVIAEQLKFRACLKILMTELRTLATGYEVDGGKLRFQLYNWLEKEIAALHEICNHESVIKEYSSKTYSKVESDLLDQEEMVDKPDIGSYERHQIERRRLQAKREHAERRKSWLQKNQDLLRVFLSYCSLHGAQGGGLASVRMELKFLLQESQQETTVKQLQSPLPLPTTLPLLSASIASTKTVIANPVLYLNNHIHDILYTIVQMKTPPHPSIEDVKVHTLHSLAASLSASIYQALCDSHSYSSQTEGNQFTGMAYQGLLLSDRRRLRTESIEEHATPNSSPAQWPGVSSLINLLSSAQDEDQPKLNILLCEAVVAVYLSLLIHALATNSSSELFRLAAHPLNNRMWAAVFGGGVKLVVKPRRQSENISAPPVLSEDIDKHRRRFNMRMLVPGRPVKDATPPPVPAERPSYKEKFIPPELSMWDYFVAKPFLPLSDSGVIYDSDESIHSDEEDDAFFSDTQIQEHQDPNSYSWALLHLTMVKLALHNVKNFFPIAGLEFSELPVTSPLGIAVIKNLENWEQILQEKMDQFEGPPPNYINTYPTDLSVGAGPAILRNKAMLEPENTPFKSRDSSAFPVKRLWHFLVKQEVLQETFIRYIFTKKRKQSEVF

SEQ ID NO: 883859 - protein, 186 aa, Homo sapiens
METGAGGSGVPRPEGKGEVPRLRAGCSSPPPAFALKGAGWARRPRWLELGRWRRWPEAAVPPPPRPGAGGDPSERPRPPMRLLAGWLCLSLASVWLARRMWTLRSPLTRSLYVNMTSGPGGPAAAAGGRKENHQVRAGAGAGAGAWRPGLPALGPAIVRDGSARGRPGPRPSASAPWKVFPAPSPP

SEQ ID NO: 883860 - protein, 163 aa, Homo sapiens
MSRTSINGLLGRGSMFVFSPDQFQRLLKINPDWKTHRLLDLGAGDGEVTKIMSPHFEEIYATELSETMIWQLQKKKYRVLGINEWQNTGFQYDVISCLNLLDRCDQPLTLLKDIRSVLEPTRGRVILALVLPFHPYVENGRWQVGETIRNFGNQRTELGRTSE

SEQ ID NO: 883861 - protein, 139 aa, Homo sapiens
METGAGGSGVPRPEGKGEVPRLRAGCSSPPPAFALKGAGWARRPRWLELGRWRRWPEAAVPPPPRPGAGGDPSERPRPPMRLLAGWLCLSLASVWLARRMWTLRSPLTRSLYVNMTSVVCVQQREIMRITPGCLCSELP

SEQ ID NO: 883862 - protein, 353 aa, Homo sapiens
METGAGGSGVPRPEGKGEVPRLRAGCSSPPPAFALKGAGWARRPRWLELGRWRRWPEAAVPPPPRPGAGGDPSERPRPPMRLLAGWLCLSLASVWLARRMWTLRSPLTRSLYVNMTSGPGGPAAAAGGRKENHQWYVCNREKLCESLQAVFVQSYLDQGTQIFLNNSIEKSGWLFIQLYHSFVSSVFSLFMSRTSINGLLGRGSMFVFSPDQFQRLLKINPDWKTHRLLDLGAGDGEVTKIMSPHFEEIYATELSETMIWQLQKKKYRVLGINEWQNTGFQYDVISCLNLLDRCDQPLTLLKDIRSVLEPTRGRVILALVLPFHPYVENGRWQVGETIRNFGNQRTELGRTSE

SEQ ID NO: 883863 - protein, 353 aa, Homo sapiens; identical to SEQ ID NO: 883862

SEQ ID NO: 883864 - protein, 353 aa, Homo sapiens; identical to SEQ ID NO: 883862

SEQ ID NO: 883865 - protein, 353 aa, Homo sapiens; identical to SEQ ID NO: 883862

SEQ ID NO: 883866 - protein, 186 aa, Homo sapiens
METGAGGSGVPRPEGKGEVPRLRAGCSSPPPAFALKGAGWARRPRWLELGRWRRWPEAAVPPPPRPGAGGDPSERPRPPMRLLAGWLCLSLASVWLARRMWTLRSPLTRSLYVNMTSGPGGPAAAAGGRKENHQWYVCNREKLCESLQAVFVQSYLDQGTQIFLNNSIEKSGWLFIQLYQKCLGAN

SEQ ID NO: 883867 - protein, 340 aa, Homo sapiens
METGAGGSGVPRPEGKGEVPRLRAGCSSPPPAFALKGAGWARRPRWLELGRWRRWPEAAVPPPPRPGAGGDPSERPRPPMRLLAGWLCLSLASVWLARRMWTLRSPLTRSLYVNMTSGPGGPAAAAGGRKENHQWYVCNREKLCESLQAVFVQSYLDQGTQIFLNNSIEKSGWLFIQLYHSFVSSVFSLFMSRTSINGLLGRGSMFVFSPDQFQRLLKINPDWKTHRLLDLGAGDGEVTKIMSPHFEEIYATELSETMIWQLQKKKYRVLGINEWQNTGFQYDVISCLNLLDRCDQPLTLLKDIRSVLEPTRGRVILALVLPFHPYVENGVSVVSQASSY

SEQ ID NO: 883868 - protein, 239 aa, Homo sapiens
METGAGGSGVPRPEGKGEVPRLRAGCSSPPPAFALKGAGWARRPRWLELGRWRRWPEAAVPPPPRPGAGGDPSERPRPPMRLLAGWLCLSLASVWLARRMWTLRSPLTRSLYVNMTSGPGGPAAAAGGRKENHQWYVCNREKLCESLQAVFVQSYLDQGTQIFLNNSIEKSGWLFIQLYHSFVSSVFSLFMSRTSINGLLGRGSMFVFSPDQFQRLLKINPDWKTHRLLHLQHLNPDWK

SEQ ID NO: 883869 - protein, 353 aa, Homo sapiens; identical to SEQ ID NO: 883862

SEQ ID NO: 883870 - protein, 234 aa, Homo sapiens
MDRKTTSWDTKFYEKWYVCNREKLCESLQAVFVQSYLDQGTQIFLNNSIEKSGWLFIQLYHSFVSSVFSLFMSRTSINGLLGRGSMFVFSPDQFQRLLKINPDWKTHRLLDLGAGDGEVTKIMSPHFEEIYATELSETMIWQLQKKKYRVLGINEWQNTGFQYDVISCLNLLDRCDQPLTLLKDIRSVLEPTRGRVILALVLPFHPYVENGRWQVGETIRNFGNQRTELGRTSE

SEQ ID NO: 883871 - protein, 163 aa, Homo sapiens; identical to SEQ ID NO: 883860

SEQ ID NO: 883872 - protein, 149 aa, Homo sapiens
MFVFSPDQFQRLLKINPDWKTHRLLDLGAGDGEVTKIMSPHFEEIYATELSETMIWQLQKKKYRVLGINEWQNTGFQYDVISCLNLLDRCDQPLTLLKDIRSVLEPTRGRVILALVLPFHPYVENGRWQVGETIRNFGNQRTELGRTSE

SEQ ID NO: 883873 - protein, 283 aa, Homo sapiens
METGAGGSGVPRPEGKGEVPRLRAGCSSPPPAFALKGAGWARRPRWLELGRWRRWPEAAVPPPPRPGAGGDPSERPRPPMRLLAGWLCLSLASVWLARRMWTLRSPLTRSLYVNMTSGPGGPAAAAGGRKENHQWYVCNREKLCESLQAVFVQSYLDQGTQIFLNNSIEKSGWLFIQLYHSFVSSVFSLFMSRTSINGVLGINEWQNTGFQYDVISCLNLLDRCDQPLTLLKDIRSVLEPTRGRVILALVLPFHPYVENGRWQVGETIRNFGNQRTELGRTSE

SEQ ID NO: 883874 - protein, 159 aa, Homo sapiens
METGAGGSGVPRPEGKGEVPRLRAGCSSPPPAFALKGAGWARRPRWLELGRWRRWPEAAVPPPPRPGAGGDPSERPRPPMRLLAGWLCLSLASVWLARRMWTLRSPLTRSRCLCSQTSINTWRSKSSESAPSGMCPWKRVCVHNYVKGGPLGTAILNIM

SEQ ID NO: 883875 - protein, 271 aa, Homo sapiens
METGAGGSGVPRPEGKGEVPRLRAGCSSPPPAFALKGAGWARRPRWLELGRWRRWPEAAVPPPPRPGAGGDPSERPRPPMRLLAGWLCLSLASVWLARRMWTLRSPLTRSLYVNMTSGPGGPAAAAGGRKENHQWYVCNREKLCESLQAVFVQSYLDQGTQIFLNNSIEKSGWLFIQLYHSFVSSVFSLFMSRTSINGLLGRGSMFVFSPDQFQRLLKINPDWKTHRLLDLGAGDGEVTKIMSPHFEEIYATELSETMIWQLQKKKYRSLV

SEQ ID NO: 883876 - protein, 389 aa, Homo sapiens
SHWQRRDRRCVRNMAERGRKRPCGPGEHGQRIEWRKWKQQKKEEKKKWKDLKLMKKLERQRAQEEQAKRLEEEEAAAEKEDRGRPYTLSVALPGSILDNAQSPELRTYLAGQIARACAIFCVDEIVVFDEEGQDAKTVEGEFTGVGKKGQACVQLARILQYLECPQYLRKAFFPKHQDLQFAGLLNPLDSPHHMRQDEESEFREGIVVDRPTRPGHGSFVNCGMKKEVKIDKNLEPGLRVTVRLNQQQHPDCKTYHGKVVSSQDPRTKAGLYWGYTVRLASCLSAVFAEAPFQDGYDLTIGTSERGSDVASAQLPNFRHALVVFGGLQGLEAGADADPNLEVAEPSVLFDLYVNTCPGQGSRTIRTEEAILISLAALQPGLIQAGARHT

SEQ ID NO: 883877 - protein, 389 aa, Homo sapiens; identical to SEQ ID NO: 883876

SEQ ID NO: 883878 - protein, 389 aa, Homo sapiens; identical to SEQ ID NO: 883876

SEQ ID NO: 883879 - protein, 364 aa, Homo sapiens
VLRIPVIFYTRNGAQKKEEKKKWKDLKLMKKLERQRAQEEQAKRLEEEEAAAEKEDRGRPYTLSVALPGSILDNAQSPELRTYLAGQIARACAIFCVDEIVVFDEEGQDAKTVEGEFTGVGKKGQACVQLARILQYLECPQYLRKAFFPKHQDLQFAGLLNPLDSPHHMRQDEESEFREGIVVDRPTRPGHGSFVNCGMKKEVKIDKNLEPGLRVTVRLNQQQHPDCKTYHGKVVSSQDPRTKAGLYWGYTVRLASCLSAVFAEAPFQDGYDLTIGTSERGSDVASAQLPNFRHALVVFGGLQGLEAGADADPNLEVAEPSVLFDLYVNTCPGQGSRTIRTEEAILISLAALQPGLIQAGARHT

SEQ ID NO: 883880 - protein, 315 aa, Homo sapiens
LGTSLPCSGRPYTLSVALPGSILDNAQSPELRTYLAGQIARACAIFCVDEIVVFDEEGQDAKTVEGEFTGVGKKGQACVQLARILQYLECPQYLRKAFFPKHQDLQFAGLLNPLDSPHHMRQDEESEFREGIVVDRPTRPGHGSFVNCGMKKEVKIDKNLEPGLRVTVRLNQQQHPDCKTYHGKVVSSQDPRTKAGLYWGYTVRLASCLSAVFAEAPFQDGYDLTIGTSERGSDVASAQLPNFRHALVVFGGLQGLEAGADADPNLEVAEPSVLFDLYVNTCPGQGSRTIRTEEAILISLAALQPGLIQAGARHT

SEQ ID NO: 883881 - protein, 81 aa, Homo sapiens
TRRLSISPHRGDSREKRGQIQGLLLPMGRGEMVRGTRQVFGCGGGMRGLEAGKLTGLPRNQMSRELVLTQSLGQAWPCEWQ

SEQ ID NO: 883882 - protein, 233 aa, Homo sapiens
APGSPLHPVCPSTSQTLPGSASTGLLNPLDSPHHMRQDEESEFREGIVVDRPTRPGHGSFVNCGMKKEVKIDKNLEPGLRVTVRLNQQQHPDCKTYHGKVVSSQDPRTKAGLYWGYTVRLASCLSAVFAEAPFQDGYDLTIGTSERGSDVASAQLPNFRHALVVFGGLQGLEAGADADPNLEVAEPSVLFDLYVNTCPGQGSRTIRTEGSLPNLPWAACTLGLTQAGCPGTPE

SEQ ID NO: 883883 - protein, 389 aa, Homo sapiens; identical to SEQ ID NO: 883876

SEQ ID NO: 883884 - protein, 392 aa, Homo sapiens
SHWQRRDRRCVRNMAERGRKRPCGPGEHGQRIEWRKWKQQKKEEKKKWKDLKLMKKLERQRAQEEQAKRLEEEEAAAEKEDRGRPYTLSVALPGSILDNAQSPELRTYLAGQIARACAIFCVDEIVVFDEEGQDAKTVEGEFTGVGKKGQACVQLARILQYLECPQYLRKAFFPKHQDLQFAGLLNPLDSPHHMRQDEESEFREGIVVDRPTRPGHGSFVNCGMKKEVKIDKNLEPGLRVTVRLNQQQHPDCKTYHGKVVSSQDPRTKAGLYWGYTVRLASCLSAVFAEAPFQDGYDLTIGTSERGSDVASAQLPNFRHALVVFGGLQGLEAGADADPNLEVAEPSVLFDLYVNTCPGQGSRTIRTEGSLPNLPWAACTLGLTQAGCPGTPE

SEQ ID NO: 883885 - protein, 230 aa, Homo sapiens
APGSPLHPVCPSTSQTLPGSASTGLLNPLDSPHHMRQDEESEFREGIVVDRPTRPGHGSFVNCGMKKEVKIDKNLEPGLRVTVRLNQQQHPDCKTYHGKVVSSQDPRTKAGLYWGYTVRLASCLSAVFAEAPFQDGYDLTIGTSERGSDVASAQLPNFRHALVVFGGLQGLEAGADADPNLEVAEPSVLFDLYVNTCPGQGSRTIRTEEAILISLAALQPGLIQAGARHT

SEQ ID NO: 883886 - protein, 965 aa, Homo sapiens
RAPPLTGSGLNQSSRTGGDRSHLLAPRTGLHQPQFRGCGSQKSNLPGTPAPTPARGPSNPPATMKIAVIGQSLFGQEVYCHLRKEGHEVVGVFTVPDKDGKADPLGLEAEKDGVPVFKYSRWRAKGQALPDVVAKYQALGAELNVLPFCSQFIPMEIISAPRHGSIIYHPSLLPRHRGASAINWTLIHGDKKGGFSIFWADDGLDTGDLLLQKECEVLPDDTVSTLYNRFLFPEGIKGMVQAVRLIAEGKAPRLPQPEEGATYEGIQKKETAKINWDQPAEAIHNWIRGNDKVPGAWTEACEQKLTFFNSTLNTSGLVPEGDALPIPGAHRPGVVTKAGLILFGNDDKMLLVKNIQLEDGKMILASNFFKGAASSVLELTEAELVTAEAVRSVWQRILPKVLEVEDSTDFFKSGAASVDVVRLVEEVKELCDGLELENEDVYMASTFGDFIQLLVRKLRGDDEEGECSIDYVEMAVNKRTVRMPHQLFIGGEFVDAEGAKTSETINPTDGSVICQVSLAQVTDVDKAVAAAKDAFENGRWGKISARDRGRLMYRLADLMEQHQEELATIEALDAGAVYTLALKTHVGMSIQTFRYFAGWCDKIQGSTIPINQARPNRNLTLTRKEPVGVCGIIIPWNYPLMMLSWKTAACLAAGNTVVIKPAQVTPLTALKFAELTLKAGIPKGVVNVLPGSGSLVGQRLSDHPDVRKIGFTGSTEVGKHIMKSCAISNVKKVSLELGGKSPLIIFADCDLNKAVQMGMSSVFFNKGENCIAAGRLFVEDSIHDEFVRRVVEEVRKMKVGNPLDRDTDHGPQNHHAHLVKLMEYCQHGVKEGATLVCGGNQVPRPGFFFEPTVFTDVEDHMFIAKEESFGPVMIISRFADGDLDAVLSRANATEFGLASGVFTRDINKALYVSDKLQAGTVFVNTYNKTDVAAPFGGFKQSGFGKDLGEAALNEYLRVKTVTFEY

SEQ ID NO: 883887 - protein, 149 aa, Homo sapiens
EHFEGLRPPVNLCSPGGGLLPPQHQGDPLIPPSLPPTGSLVGQRLSDHPDVRKIGFTGSTEVGKHIMKEVRGWGWSRGGAAVGCAWDMAVLSQELCPASQAPGHSHFRGPAGLYANAEEASAFLAKPRGGLGGDLWSPVRPARGWIERC

SEQ ID NO: 883888 - protein, 948 aa, Homo sapiens
RAPPLTGSGLNQSSRTGGDRSHLLAPRTGLHQPQFRGCGSQKSNLPGTPAPTPARGPSNPPATMKIAVIGQSLFGQEVYCHLRKEGHEVVGVFTVPDKDGKADPLGLEAEKDGVPVFKYSRWRAKGQALPDVVAKYQALGAELNVLPFCSQFIPMEIISAPRHGSIIYHPSLLPRHRGASAINWTLIHGDKKGGFSIFWADDGLDTGDLLLQKECEVLPDDTVSTLYNRFLFPEGIKGMVQAVRLIAEGKAPRLPQPEEGATYEGIQKKETAKINWDQPAEAIHNWIRGNDKVPGAWTEACEQKLTFFNSTLNTSGLVPEGDALPIPGAHRPGVVTKAGLILFGNDDKMLLVKNIQLEDGKMILASNFFKGAASSVLELTEAELVTAEAVRSVWQRILPKVLEVEDSTDFFKSGAASVDVVRLVEEVKELCDGLELENEDVYMASTFGDFIQLLVRKLRGDDEEGECSIDYVEMAVNKRTVRMPHQLFIGGEFVDAEGAKTSETINPTDGSVICQVSLAQVTDVDKAVAAAKDAFENGRWGKISARDRGRLMYRLADLMEQHQEELATIEALDAGAVYTLALKTHVGMSIQTFRYFAGWCDKIQGSTIPINQARPNRNLTLTRKEPVGVCGIIIPWNYPLMMLSWKTAACLAAGNTVVIKPAQVTPLTALKFAELTLKAGIPKGVVNVLPGSGSLVGQRLSDHPDVRKIGFTGSTEVGKHIMKSPLIIFADCDLNKAVQMGMSSVFFNKGENCIAAGRLFVEDSIHDEFVRRVVEEVRKMKVGNPLDRDTDHGPQNHHAHLVKLMEYCQHGVKEGATLVCGGNQVPRPGFFFEPTVFTDVEDHMFIAKEESFGPVMIISRFADGDLDAVLSRANATEFGLASGVFTRDINKALYVSDKLQAGTVFVNTYNKTDVAAPFGGFKQSGFGKDLGEAALNEYLRVKTVTFEY

SEQ ID NO: 883889 - protein, 788 aa, Homo sapiens
RDLWSHGLSGRAAQSPGQLVLLRGRVAGYGPEPTAAGGARGSYVRAACPCPRTGWQGRPQAEVQAVRLIAEGKAPRLPQPEEGATYEGIQKKETAKINWDQPAEAIHNWIRGNDKVPGAWTEACEQKLTFFNSTLNTSGLVPEGDALPIPGAHRPGVVTKAGLILFGNDDKMLLVKNIQLEDGKMILASNFFKGAASSVLELTEAELVTAEAVRSVWQRILPKVLEVEDSTDFFKSGAASVDVVRLVEEVKELCDGLELENEDVYMASTFGDFIQLLVRKLRGDDEEGECSIDYVEMAVNKRTVRMPHQLFIGGEFVDAEGAKTSETINPTDGSVICQVSLAQVTDVDKAVAAAKDAFENGRWGKISARDRGRLMYRLADLMEQHQEELATIEALDAGAVYTLALKTHVGMSIQTFRYFAGWCDKIQGSTIPINQARPNRNLTLTRKEPVGVCGIIIPWNYPLMMLSWKTAACLAAGNTVVIKPAQVTPLTALKFAELTLKAGIPKGVVNVLPGSGSLVGQRLSDHPDVRKIGFTGSTEVGKHIMKSCAISNVKKVSLELGGKSPLIIFADCDLNKAVQMGMSSVFFNKGENCIAAGRLFVEDSIHDEFVRRVVEEVRKMKVGNPLDRDTDHGPQNHHAHLVKLMEYCQHGVKEGATLVCGGNQVPRPGFFFEPTVFTDVEDHMFIAKEESFGPVMIISRFADGDLDAVLSRANATEFGLASGVFTRDINKALYVSDKLQAGTVFVNTYNKTDVAAPFGGFKQSGFGKDLGEAALNEYLRVKTVTFEY

SEQ ID NO: 883890 - protein, 727 aa, Homo sapiens
MVQAVRLIAEGKAPRLPQPEEGATYEGIQKKETAKINWDQPAEAIHNWIRGNDKVPGAWTEACEQKLTFFNSTLNTSGLVPEGDALPIPGAHRPGVVTKAGLILFGNDDKMLLVKNIQLEDGKMILASNFFKGAASSVLELTEAELVTAEAVRSVWQRILPKVLEVEDSTDFFKSGAASVDVVRLVEEVKELCDGLELENEDVYMASTFGDFIQLLVRKLRGDDEEGECSIDYVEMAVNKRTVRMPHQLFIGGEFVDAEGAKTSETINPTDGSVICQVSLAQVTDVDKAVAAAKDAFENGRWGKISARDRGRLMYRLADLMEQHQEELATIEALDAGAVYTLALKTHVGMSIQTFRYFAGWCDKIQGSTIPINQARPNRNLTLTRKEPVGVCGIIIPWNYPLMMLSWKTAACLAAGNTVVIKPAQVTPLTALKFAELTLKAGIPKGVVNVLPGSGSLVGQRLSDHPDVRKIGFTGSTEVGKHIMKSCAISNVKKVSLELGGKSPLIIFADCDLNKAVQMGMSSVFFNKGENCIAAGRLFVEDSIHDEFVRRVVEEVRKMKVGNPLDRDTDHGPQNHHAHLVKLMEYCQHGVKEGATLVCGGNQVPRPGFFFEPTVFTDVEDHMFIAKEESFGPVMIISRFADGDLDAVLSRANATEFGLASGVFTRDINKALYVSDKLQAGTVFVNTYNKTDVAAPFGGFKQSGFGKDLGEAALNEYLRVKTVTFEY

SEQ ID NO: 883891 - protein, 918 aa, Homo sapiens
NCCLIPSPGPSNPPATMKIAVIGQSLFGQEVYCHLRKEGHEVVGVFTVPDKDGKADPLGLEAEKDGVPVFKYSRWRAKGQALPDVVAKYQALGAELNVLPFCSQFIPMEIISAPRHGSIIYHPSLLPRHRGASAINWTLIHGDKKGGFSIFWADDGLDTGDLLLQKECEVLPDDTVSTLYNRFLFPEGIKGMVQAVRLIAEGKAPRLPQPEEGATYEGIQKKETAKINWDQPAEAIHNWIRGNDKVPGAWTEACEQKLTFFNSTLNTSGLVPEGDALPIPGAHRPGVVTKAGLILFGNDDKMLLVKNIQLEDGKMILASNFFKGAASSVLELTEAELVTAEAVRSVWQRILPKVLEVEDSTDFFKSGAASVDVVRLVEEVKELCDGLELENEDVYMASTFGDFIQLLVRKLRGDDEEGECSIDYVEMAVNKRTVRMPHQLFIGGEFVDAEGAKTSETINPTDGSVICQVSLAQVTDVDKAVAAAKDAFENGRWGKISARDRGRLMYRLADLMEQHQEELATIEALDAGAVYTLALKTHVGMSIQTFRYFAGWCDKIQGSTIPINQARPNRNLTLTRKEPVGVCGIIIPWNYPLMMLSWKTAACLAAGNTVVIKPAQVTPLTALKFAELTLKAGIPKGVVNVLPGSGSLVGQRLSDHPDVRKIGFTGSTEVGKHIMKSCAISNVKKVSLELGGKSPLIIFADCDLNKAVQMGMSSVFFNKGENCIAAGRLFVEDSIHDEFVRRVVEEVRKMKVGNPLDRDTDHGPQNHHAHLVKLMEYCQHGVKEGATLVCGGNQVPRPGFFFEPTVFTDVEDHMFIAKEESFGPVMIISRFADGDLDAVLSRANATEFGLASGVFTRDINKALYVSDKLQAGTVFVNTYNKTDVAAPFGGFKQSGFGKDLGEAALNEYLRVKTVTFEY

SEQ ID NO: 883892 - protein, 345 aa, Homo sapiens
TRRGRVRQVCGIIIPWNYPLMMLSWKTAACLAAGNTVVIKPAQVTPLTALKFAELTLKAGIPKGVVNVLPGSGSLVGQRLSDHPDVRKIGFTGSTEVGKHIMKSCAISNVKKVSLELGGKSPLIIFADCDLNKAVQMGMSSVFFNKGENCIAAGRLFVEDSIHDEFVRRVVEEVRKMKVGNPLDRDTDHGPQNHHAHLVKLMEYCQHGVKEGATLVCGGNQVPRPGFFFEPTVFTDVEDHMFIAKEESFGPVMIISRFADGDLDAVLSRANATEFGLASGVFTRDINKALYVSDKLQAGTVFVNTYNKTDVAAPFGGFKQSGFGKDLGEAALNEYLRVKTVTFEY

SEQ ID NO: 883893 - protein, 398 aa, Homo sapiens
RAPPLTGSGLNQSSRTGGDRSHLLAPRTGLHQPQFRGCGSQKSNLPGTPAPTPARGPSNPPATMKIAVIGQSLFGQEVYCHLRKEGHEVVGVFTVPDKDGKADPLGLEAEKDGVPVFKYSRWRAKGQALPDVVAKYQALGAELNVLPFCSQFIPMEIISAPRHGSIIYHPSLLPRHRGASAINWTLIHGDKKGGFSIFWADDGLDTGDLLLQKECEVLPDDTVSTLYNRFLFPEGIKGMVQAVRLIAEGKAPRLPQPEEGATYEGIQKKETAKINWDQPAEAIHNWIRGNDKVPGAWTEACEQKLTFFNSTLNTSGLVPEGDALPIPGAHRPGVVTKAGLILFGNDDKMVRARLWVTCLLKATHAPVLGLRPHRKTLGSSGENGKNQTQEGTLTLICP

SEQ ID NO: 883894 - protein, 459 aa, Homo sapiens
RAPPLTGSGLNQSSRTGGDRSHLLAPRTGLHQPQFRGCGSQKSNLPGTPAPTPARGPSNPPATMKIAVIGQSLFGQEVYCHLRKEGHEVVGVFTVPDKDGKADPLGLEAEKDGVPVFKYSRWRAKGQALPDVVAKYQALGAELNVLPFCSQFIPMEIISAPRHGSIIYHPSLLPRHRGASAINWTLIHGDKKGGFSIFWADDGLDTGDLLLQKECEVLPDDTVSTLYNRFLFPEGIKGMVQAVRLIAEGKAPRLPQPEEGATYEGIQKKETAKINWDQPAEAIHNWIRGNDKVPGAWTEACEQKLTFFNSTLNTSGLVPEGDALPIPGAHRPGVVTKAGLILFGNDDKMLLVKNIQLEDGKMILASNFFKGAASSVLELTEAELVTAEAVRSVWQRILPKVLEVEDSTDFFKSGAASVDVVRLVEEVKELCDGLELENEDVYMASTFGDFIHQKQPLAG

SEQ ID NO: 883895 - protein, 322 aa, Homo sapiens
RAPPLTGSGLNQSSRTGGDRSHLLAPRTGLHQPQFRGCGSQKSNLPGTPAPTPARGPSNPPATMKIAVIGQSLFGQEVYCHLRKEGHEVVGVFTVPDKDGKADPLGLEAEKDGVPVFKYSRWRAKGQALPDVVAKYQALGAELNVLPFCSQFIPMEIISAPRHGSIIYHPSLLPRHRGASAINWTLIHGDKKGGFSIFWADDGLDTGDLLLQKECEVLPDDTVSTLYNRFLFPEGIKGMVQAVRLIAEGKAPRLPQPEEGATYEGIQKKETAKINWDQPAEAIHNWIRGNDKVPGAWTEACEQVCPCMAGIQPRALVYPTGH

SEQ ID NO: 883896 - protein, 66 aa, Homo sapiens
VSTRVQDISLSSVSNPRMSSTEQEWPMRPGDVAAPFGGFKQSGFGKDLGEAALNEYLRVKTVTFEY

SEQ ID NO: 883897 - protein, 88 aa, Homo sapiens
GLLAPARGQAGRDGHRQRCCPGMQQEGRRPWGALAVWAQQEEQLQCPLSPRPPQLLATAFYFSVVLNLSSPQIDQLTKIVNKVELLEI

SEQ ID NO: 883898 - protein, 238 aa, Homo sapiens
SGLSGDPPSPTWRRPVGAGSFASRFGQGGGLGFRQVVFSFTMFGDLFEEEYSTVSNNQYGKGKKLKTKALEPPAPREFTNLSGIRNQGGTCYLNSLLQTLHFTPEFREALFSLGPEELGLFEDKDKPDAKVRIIPLQLQRLFAQLLLLDQEAASTADLTDSFGWTSNEEMRQHDVQELNRILFSALETSLVGTSGHDLIYRLYHGTIVNQIVCKECKNVSERQVNMPEYFSNKLCCKL

SEQ ID NO: 883899 - protein, 295 aa, Homo sapiens
SGLSGDPPSPTWRRPVGAGSFASRFGHGGGLGFRQVVFSFTMFGDLFEEEYSTVSNNQYGKGKKLKTKALEPPAPREFTNLSGIRNQGGTCYLNSLLQTLHFTPEFREALFSLGPEELGLFEDKDKPDAKVRIIPLQLQRLFAQLLLLDQEAASTADLTDSFGWTSNEEMRQHDVQELNRILFSALETSLVGTSGHDLIYRLYVAQVLKKLAVFDTWSSLAVHIAMDNTVVMEESEGCAGQQYPVQAPLRILQIPDRALATDSLPELRSPNRTSANGDPWYFSSPGLGLTEINEA

SEQ ID NO: 883900 - protein, 78 aa, Homo sapiens
YSPQSQGHNCLPRARSPPASCRAIKPGLSHPVPLCHIVPAQAATSFLFSRTEEVPYHVWGGSAVYREWDLHFRSSFQD

SEQ ID NO: 883901 - protein, 1277 aa, Homo sapiens
SGLSGDPPSPTWRRPVGAGSFASRFGQGGGLGFRQVVFSFTMFGDLFEEEYSTVSNNQYGKGKKLKTKALEPPAPREFTNLSGIRNQGGTCYLNSLLQTLHFTPEFREALFSLGPEELGLFEDKDKPDAKVRIIPLQLQRLFAQLLLLDQEAASTADLTDSFGWTSNEEMRQHDVQELNRILFSALETSLVGTSGHDLIYRLYHGTIVNQIVCKECKNVSERQEDFLDLTVAVKNVSGLEDALWNMYVEEEVFDCDNLYHCGTCDRLVKAAKSAKLRKLPPFLTVSLLRFNFDFVKCERYKETSCYTFPLRINLKPFCEQSELDDLEYIYDLFSVIIHKGGCYGGHYHVYIKDVDHLGNWQFQEEKSKPDVNLKDLQSEEEIDHPLMILKAILLEEENNLIPVDQLGQKLLKKIGISWNKKYRKQHGPLRKFLQLHSQIFLLSSDESTVRLLKNSSLQAESDFQRNDQQIFKMLPPESPGLNNSISCPHWFDINDSKVQPIREKDIEQQFQGKESAYMLFYRKSQLQRPPEARANPRYGVPCHLLNEMDAANIELQTKRAECDSANNTFELHLHLGPQYHFFNGALHPVVSQTESVWDLTFDKRKTLGDLRQSIFQLLEFWEGDMVLSVAKLVPAGLHIYQSLGGDELTLCETEIADGEDIFVWNGVEVGGVHIQTGIDCEPLLLNVLHLDTSSDGEKCCQVIESPHVFPANAEVGTVLTALAIPAGVIFINSAGCPGGEGWTAIPKEDMRKTFREQGLRNGSSILIQDSHDDNSLLTKEEKWVTSMNEIDWLHVKNLCQLESEEKQVKISATVNTMVFDIRIKAIKELKLMKELADNSCLRPIDRNGKLLCPVPDSYTLKEAELKMGSSLGLCLGKAPSSSQLFLFFAMGSDVQPGTEMEIVVEETISVRDCLKLMLKKSGLQGDAWHLRKMDWCYEAGEPLCEEDATLKELLICSGDTLLLIEGQLPPLGFLKVPIWWYQLQGPSGHWESHQDQTNCTSSWGRVWRATSSQGASGNEPAQVSLLYLGDIEISEDATLAELKSQAMTLPPFLEFGVPSPAHLRAWTVERKRPGRLLRTDRQPLREYKLGRRIEICLEPLQKGENLGPQDVLLRTQVRIPGERTYAPALDLVWNAAQGGTAGSLRQRVADFYRLPVEKIEIAKYFPEKFEWLPISSWNQQITKRKKKKKQDYLQGAPYYLKDGDTIGVKNLLIDDDDDFSTIRDDTGKEKQKQRALGRRKSQEALHEQSSYILSSAETPARPRAPETSLSIHVGSFR

SEQ ID NO: 883902 - protein, 1277 aa, Homo sapiens; identical to SEQ ID NO: 883901

SEQ ID NO: 883903 - protein, 1183 aa, Homo sapiens
SGLSGDPPSPTWRRPVGAGSFASRFGQGGGLGFRQVVFSFTMFGDLFEEEYSTVSNNQYGKGKKLKTKALEPPAPREFTNLSGIRNQGGTCYLNSLLQTLHFTPEFREALFSLGPEELGLFEDKDKPDAKVRIIPLQLQRLFAQLLLLDQEAASTADLTDSFGWTSNEEMRQHDVQELNRILFSALETSLVGTSGHDLIYRLYHGTIVNQIVCKECKNVSERQEDFLDLTVAVKNVSGLEDALWNMYVEEEVFDCDNLYHCGTCDRLVKAAKSAKLRKLPPFLTVSLLRFNFDFVKCERYKETSCYTFPLRINLKPFCEQSELDDLEYIYDLFSVIIHKGGCYGGHYHVYIKDVDHLGNWQFQEEKSKPDVNLKDLQSEEEIDHPLMILKAILLEEENNLIPVDQLGQKLLKKIGISWNKKYRKQHGPLRKFLQLHSQIFLLSSDESTVRLLKNSSLQAESDFQRNDQQIFKMLPPESPGLNNSISCPHWFDINDSKVQPIREKDIEQQFQGKESAYMLFYRKSQLQRPPEARANPRYGVPCHLLNEMDAANIELQTKRAECDSANNTFELHLHLGPQYHFFNGALHPVVSQTESVWDLTFDKRKTLGDLRQSIFQLLEFWEGDMVLSVAKLVPAGLHIYQSLGGRVGQAIPKEDMRKTFREQGLRNGSSILIQDSHDDNSLLTKEEKWVTSMNEIDWLHVKNLCQLESEEKQVKISATVNTMVFDIRIKAIKELKLMKELADNSCLRPIDRNGKLLCPVPDSYTLKEAELKMGSSLGLCLGKAPSSSQLFLFFAMGSDVQPGTEMEIVVEETISVRDCLKLMLKKSGLQGDAWHLRKMDWCYEAGEPLCEEDATLKELLICSGDTLLLIEGQLPPLGFLKVPIWWYQLQGPSGHWESHQDQTNCTSSWGRVWRATSSQGASGNEPAQVSLLYLGDIEISEDATLAELKSQAMTLPPFLEFGVPSPAHLRAWTVERKRPGRLLRTDRQPLREYKLGRRIEICLEPLQKGENLGPQDVLLRTQVRIPGERTYAPALDLVWNAAQGGTAGSLRQRVADFYRLPVEKIEIAKYFPEKFEWLPISSWNQQITKRKKKKKQDYLQGAPYYLKDGDTIGVKNLLIDDDDDFSTIRDDTGKEKQKQRALGRRKSQEALHEQSSYILSSAETPARPRAPETSLSIHVGSFR

SEQ ID NO: 883904 - protein, 411 aa, Homo sapiens
MGSSLGLCLGKAPSSSQLFLFFAMGSDVQPGTEMEIVVEETISVRDCLKLMLKKSGLQGDAWHLRKMDWCYEAGEPLCEEDATLKELLICSGDTLLLIEGQLPPLGFLKVPIWWYQLQGPSGHWESHQDQTNCTSSWGRVWRATSSQGASGNEPAQVSLLYLGDIEISEDATLAELKSQAMTLPPFLEFGVPSPAHLRAWTVERKRPGRLLRTDRQPLREYKLGRRIEICLEPLQKGENLGPQDVLLRTQVRIPGERTYAPALDLVWNAAQGGTAGSLRQRVADFYRLPVEKIEIAKYFPEKFEWLPISSWNQQITKRKKKKKQDYLQGAPYYLKDGDTIGVKNLLIDDDDDFSTIRDDTGKEKQKQRALGRRKSQEALHEQSSYILSSAETPARPRAPETSLSIHVGSFR

SEQ ID NO: 883905 - protein, 231 aa, Homo sapiens [sequence omitted]

SEQ ID NO: 883906 - protein, 193 aa, Homo sapiens
MPQVTTWFCLFVWIWRLTVFWYSPQDVLLRTQVRIPGERTYAPALDLVWNAAQGGTAGSLRQRVADFYRLPVEKIEIAKYFPEKFEWLPISSWNQQITKRKKKKKQDYLQGAPYYLKDGDTIGVKNLLIDDDDDFSTIRDDTGKEKQKQRALGRRKSQEALHEQSSYILSSAETPARPRAPETSLSIHVGSFR

SEQ ID NO: 883907 - protein, 73 aa, Homo sapiens
VLGSRGLQLLPSTAPQPLFLCGSGAGRAVADRPGIAQVPGFLGMGTGCLAPPIPNPLLPLSTGTAPLRPGQCM

SEQ ID NO: 883908 - protein, 845 aa, Homo sapiens
SGLSGDPPSPTWRRPVGAGSFASRFGQGGGLGFRQVVFSFTMFGDLFEEEYSTVSNNQYGKGKKLKTKALEPPAPREFTNLSGIRNQGGTCYLNSLLQTLHFTPEFREALFSLGPEELGLFEDKDKPDAKVRIIPLQLQRLFAQLLLLDQEAASTADLTDSFGWTSNEEMRQHDVQELNRILFSALETSLVGTSGHDLIYRLYHGTIVNQIVCKECKNVSERQEDFLDLTVAVKNVSGLEDALWNMYVEEEVFDCDNLYHCGTCDRLVKAAKSAKLRKLPPFLTVSLLRFNFDFVKCERYKETSCYTFPLRINLKPFCEQSELDDLEYIYDLFSVIIHKGGCYGGHYHVYIKDVDHLGNWQFQEEKSKPDVNLKDLQSEEEIDHPLMILKAILLEEENNLIPVDQLGQKLLKKIGISWNKKYRKQHGPLRKFLQLHSQIFLLSSDESTVRLLKNSSLQAESDFQRNDQQIFKMLPPESPGLNNSISCPHWFDINDSKVQPIREKDIEQQFQGKESAYMLFYRKSQLQRPPEARANPRYGVPCHLLNEMDAANIELQTKRAECDSANNTFELHLHLGPQYHFFNGALHPVVSQTESVWDLTFDKRKTLGDLRQSIFQLLEFWEGDMVLSVAKLVPAGLHIYQSLGGDELTLCETEIADGEDIFVWNGVEVGGVHIQTGIDCEPLLLNVLHLDTSSDGEKCCQVIESPHVFPANAEVGTVLTALAIPAGVIFINSAGCPGGEGWTAIPKEDMRKTFREQGLRNGSSILIQDSHDDNSLLTKEEKWVTSMNEIDWLHVKNLCQLESEEKQVKISATVNTMVFDIRIKAIKELKLMKELGNHLHFLFGS

SEQ ID NO: 883909 - protein, 147 aa, Homo sapiens
MEEPQTKTPSAEFPPYRAQPAQPATAPAATFATLAICPEPAPTSGPGQPCTAAMGSELETAMETLINVFHAHSGKEGDKYKLSKKELKELLQTELSGFLDAQKDVDAVDKVMKELDENGDGEVDFQEYVVLVAALTVACNNFFWENS

SEQ ID NO: 883910 - protein, 143 aa, Homo sapiens
LVLDRDLELVGRVGPDAWVDPRVRGRVRTLAICPEPAPTSGPGQPCTAAMGSELETAMETLINVFHAHSGKEGDKYKLSKKELKELLQTELSGFLDAQKDVDAVDKVMKELDENGDGEVDFQEYVVLVAALTVACNNFFWENS

SEQ ID NO: 883911 - protein, 147 aa, Homo sapiens; identical to SEQ ID NO: 883909

SEQ ID NO: 883912 - protein, 102 aa, Homo sapiens
MRGSCTAAMGSELETAMETLINVFHAHSGKEGDKYKLSKKELKELLQTELSGFLDAQKDVDAVDKVMKELDENGDGEVDFQEYVVLVAALTVACNNFFWENS

SEQ ID NO: 883913 - protein, 147 aa, Homo sapiens; identical to SEQ ID NO: 883909

SEQ ID NO: 883914 - protein, 77 aa, Homo sapiens
VSALPGSLGSTCLSALPCLPCTAAMGSELETAMETLINVFHAHSGKEGDKYKLSKKELKELLQTELSGFLDVKELML

SEQ ID NO: 883915 - protein, 143 aa, Homo sapiens; identical to SEQ ID NO: 883910

SEQ ID NO: 883916 - protein, 166 aa, Homo sapiens
LVLDRDLELVGRVGPDAWVDPRVRGRVRTLAICPEPAPTSGPGQPCTAAMGSELETAMETLINVFHAHSGKEGDKYKLSKKELKELLQTELSGFLDAQKDVDAVDKVMKELDENGDGEVDFQEYVVLVAALTVACNNFFWENSLMQDQATIWGQGVLLSFCCQTHF

SEQ ID NO: 883917 - protein, 115 aa, Homo sapiens
LPEVSRAPRGAQATRGRCTAAMGSELETAMETLINVFHAHSGKEGDKYKLSKKELKELLQTELSGFLDAQKDVDAVDKVMKELDENGDGEVDFQEYVVLVAALTVACNNFFWENS

SEQ ID NO: 883918 - protein, 131 aa, Homo sapiens
TVEDRSPHTAPAATFATLAICPEPAPTSGPGQPCTAAMGSELETAMETLINVFHAHSGKEGDKYKLSKKELKELLQTELSGFLDAQKDVDAVDKVMKELDENGDGEVDFQEYVVLVAALTVACNNFFWENS

SEQ ID NO: 883919 - protein, 147 aa, Homo sapiens; identical to SEQ ID NO: 883909

SEQ ID NO: 883920 - protein, 102 aa, Homo sapiens
LVLDRDLELVGRVGPDAWVDPRVRRRVGTLAICPEPAPTSGPGQPCTAAMGSELETAMETLINVFHAHSGKEGDKYKLSKKELKELLQTELSGFLDVKELML

SEQ ID NO: 883921 - protein, 172 aa, Homo sapiens
TSSRSRSRTSRTRGSGRVGRPTRPPTRRDLGHLSRTCSHLRPRPTGALKSLPRPPLSPRCWEGSQPSPASPPVGCTAAMGSELETAMETLINVFHAHSGKEGDKYKLSKKELKELLQTELSGFLDAQKDVDAVDKVMKELDENGDGEVDFQEYVVLVAALTVACNNFFWENS

SEQ ID NO: 883922 - protein, 147 aa, Homo sapiens; identical to SEQ ID NO: 883909

SEQ ID NO: 883923 - protein, 106 aa, Homo sapiens
KGRPGEQTDRPTRQPTSNNELSSHTTAYASNQPPIYLTRAPPPSTQVRPVPGPPAGAVVAAPGGALASVSFGELDENGDGEVDFQEYVVLVAALTVACNNFFWENS

SEQ ID NO: 883924 - protein, 77 aa, Homo sapiens
LVLDRDLELVGRVGPDAWVDPRVRRRVGPWPSVQNLLPPQAQANRALLQWALSWRRRWRPSSTCSTPTRAKRGTSTS

SEQ ID NO: 883925 - protein, 127 aa, Homo sapiens
QLVHRWMNAPRICSEYDEEEVDYEESDSDESWTTESAISSEAILSSMCMNGGEEKPFACPVPGCKKRYKNVNGIKYHAKNGHRTQIRVRKPFKCRCGKSYKTAQGLRHHTINFHPPVSAEIIRKMQQ

SEQ ID NO: 883926 - protein, 262 aa, Homo sapiens
SLARPALAEPTPGGSRCSTMTGIAAASFFSNTCRFGGCGLHFPTLADLIEHIEDNHIDTDPRVLEKQELQQPTYVALSYINRFMTDAARREQESLKKKIQPKLSLTLSSSVSRGNVSTPPRHSSGSLTPPVTPPITPSSSFRSSTPTGSEYDEEEVDYEESDSDESWTTESAISSEAILSSMCMNGGEEKPFACPVPGCKKRYKNVNGIKYHAKNGHRTQIRVRKPFKCRCGKSYKTAQGLRHHTINFHPPVSAEIIRKMQQ

SEQ ID NO: 883927 - protein, 262 aa, Homo sapiens; identical to SEQ ID NO: 883926

SEQ ID NO: 883928 - protein, 262 aa, Homo sapiens; identical to SEQ ID NO: 883926

SEQ ID NO: 883929 - protein, 925 aa, Homo sapiens
MDRSGFGEISSPVIREAEVTRTARKQSAQKRVLLQASQDENFGNTTPRNQVIPRTPSSFRQPFTPTSRSLLRQPDISCILGTGGKSPRLTQSSGFFGNLSMVTNLDDSNWAAAFSSQRSGLFTNTEPHSITEDVTISAVMLREDDPGEAASMSMFSDFLQSFLKHSSSTVFDLVEEYENICGSQVNILSKIVSRATPGLQKFSKTASMLWLLQQEMVTWRLLASLYRDRIQSALEEESVFAVTAVNASEKTVVEALFQRDSLVRQSQLVVDWLESIAKDEIGEFSDNIEFYAKSVYWENTLHTLKQRQLTSYVGSVRPLVTELDPDAPIRQKMPLDDLDREDEVRLLKYLFTLIRAGMTEEAQRLCKRCGQAWRAATLEGWKLYHDPNVNGGTELEPVEGNPYRRIWKISCWRMAEDELFNRYERAIYAALSGNLKQLLPVCDTWEDTVWAYFRVMVDSLVEQEIQTSVATLDETEELPREYLGANWTLEKVFEELQATDKKRVLEENQEHYHIVQKFLILGDIDGLMDEFSKWLSKSRNNLPGHLLRFMTHLILFFRTLGLQTKEEVSIEVLKTYIQLLIREKHTNLIAFYTCHLPQDLAVAQYALFLESVTEFEQRHHCLELAKEADLDVATITKTVVENIRKKDNGEFSHHDLAPALDTGTTEEDRLKIDVIDWLVFDPAQRAEALKQGNAIMRKFLASKKHEAAKEVFVKIPQDSIAEIYNQCEEQGMESPLPAEDDNAIREHLCIRAYLEAHETFNEWFKHMNSVPQKPALIPQPTFTEKVAHEHKEKKYEMDFGIWKGHLDALTADVKEKMYNVLLFVDGGWMVDVREDAKEDHERTHQMVLLRKLCLPMLCFLLHTILHSTGQYQECLQLADMVSSERHKLYLVFSKEELRKLLQKLRESSLMLLDQGLDPLGYEIQL

SEQ ID NO: 883930 - protein, 233 aa, Homo sapiens
MDRSGFGEISSPVIREAEVTRTARKQSAQKRVLLQASQDENFGNTTPRNQVIPRTPSSFRQPFTPTSRSLLRQPDISCILGTGGKSPRLTQSSGFFGNLSMVTNLDDSNWAAAFSSQRSGLFTNTEPHSITEDVTISAVMLREDDPGEAASMSMFSDFLQSFLKHSSSTVFDLVEEYENICGSQVNILSKIVSRATPGLQKFSKTASMLWLLQQEMVTWRLLASLYRDRIQAA

SEQ ID NO: 883931 - protein, 896 aa, Homo sapiens
MKILVILHQETRLSLELLAHFDSLVLSTNLLFIVTPTSRSLLRQPDISCILGTGGKSPRLTQSSGFFGNLSMVTNLDDSNWAAAFSSQRSGLFTNTEPHSITEDVTISAVMLREDDPGEAASMSMFSDFLQSFLKHSSSTVFDLVEEYENICGSQVNILSKIVSRATPGLQKFSKTASMLWLLQQEMVTWRLLASLYRDRIQSALEEESVFAVTAVNASEKTVVEALFQRDSLVRQSQLVVDWLESIAKDEIGEFSDNIEFYAKSVYWENTLHTLKQRQLTSYVGSVRPLVTELDPDAPIRQKMPLDDLDREDEVRLLKYLFTLIRAGMTEEAQRLCKRCGQAWRAATLEGWKLYHDPNVNGGTELEPVEGNPYRRIWKISCWRMAEDELFNRYERAIYAALSGNLKQLLPVCDTWEDTVWAYFRVMVDSLVEQEIQTSVATLDETEELPREYLGANWTLEKVFEELQATDKKRVLEENQEHYHIVQKFLILGDIDGLMDEFSKWLSKSRNNLPGHLLRFMTHLILFFRTLGLQTKEEVSIEVLKTYIQLLIREKHTNLIAFYTCHLPQDLAVAQYALFLESVTEFEQRHHCLELAKEADLDVATITKTVVENIRKKDNGEFSHHDLAPALDTGTTEEDRLKIDVIDWLVFDPAQRAEALKQGNAIMRKFLASKKHEAAKEVFVKIPQDSIAEIYNQCEEQGMESPLPAEDDNAIREHLCIRAYLEAHETFNEWFKHMNSVPQKPALIPQPTFTEKVAHEHKEKKYEMDFGIWKGHLDALTADVKEKMYNVLLFVDGGWMVDVREDAKEDHERTHQMVLLRKLCLPMLCFLLHTILHSTGQYQECLQLADMVSSERHKLYLVFSKEELRKLLQKLRESSLMLLDQGLDPLGYEIQL

SEQ ID NO: 883932 - protein, 825 aa, Homo sapiens [sequence omitted]

SEQ ID NO: 883933 - protein, 663 aa, Homo sapiens
  misc_feature (10)..(10): Xaa can be any naturally occurring amino acid
KRHEYEPGVXIGRGQEDEIGEFSDNIEFYAKSVYWENTLHTLKQRQLTSYVGSVRPLVTELDPDAPIRQKMPLDDLDREDEVRLLKYLFTLIRAGMTEEAQRLCKRCGQAWRAATLEGWKLYHDPNVNGGTELEPVEGNPYRRIWKISCWRMAEDELFNRYERAIYAALSGNLKQLLPVCDTWEDTVWAYFRVMVDSLVEQEIQTSVATLDETEELPREYLGANWTLEKVFEELQATDKKRVLEENQEHYHIVQKFLILGDIDGLMDEFSKWLSKSRNNLPGHLLRFMTHLILFFRTLGLQTKEEVSIEVLKTYIQLLIREKHTNLIAFYTCHLPQDLAVAQYALFLESVTEFEQRHHCLELAKEADLDVATITKTVVENIRKKDNGEFSHHDLAPALDTGTTEEDRLKIDVIDWLVFDPAQRAEALKQGNAIMRKFLASKKHEAAKEVFVKIPQDSIAEIYNQCEEQGMESPLPAEDDNAIREHLCIRAYLEAHETFNEWFKHMNSVPQKPALIPQPTFTEKVAHEHKEKKYEMDFGIWKGHLDALTADVKEKMYNVLLFVDGGWMVDVREDAKEDHERTHQMVLLRKLCLPMLCFLLHTILHSTGQYQECLQLADMVSSERHKLYLVFSKEELRKLLQKLRESSLMLLDQGLDPLGYEIQL

SEQ ID NO: 883934 - protein, 503 aa, Homo sapiens
MDRSGFGEISSPVIREAEVTRTARKQSAQKRVLLQASQDENFGNTTPRNQVIPRTPSSFRQPFTPTSRSLLRQPDISCILGTGGKSPRLTQSSGFFGNLSMVTNLDDSNWAAAFSSQRSGLFTNTEPHSITEDVTISAVMLREDDPGEAASMSMFSDFLQSFLKHSSSTVFDLVEEYENICGSQVNILSKIVSRATPGLQKFSKTASMLWLLQQEMVTWRLLASLYRDRIQSALEEESVFAVTAVNASEKTVVEALFQRDSLVRQSQLVVDWLESIAKDEIGEFSDNIEFYAKSVYWENTLHTLKQRQLTSYVGSVRPLVTELDPDAPIRQKMPLDDLDREDEVRLLKYLFTLIRAGMTEEAQRLCKRCGQAWRAATLEGWKLYHDPNVNGGTELEPVEGNPYRRIWKISCWRMAEDELFNRYERAIYAALSGNLKQLLPVCDTWEDTVWAYFRVMVDSLVEQEIQTSVATLDETEELPREYLGANWTLEKVFEELQATDKKV

SEQ ID NO: 883935 - protein, 619 aa, Homo sapiens
KGAQTISVQQHDSKLRLDPDAPIRQKMPLDDLDREDEVRLLKYLFTLIRAGMTEEAQRLCKRCGQAWRAATLEGWKLYHDPNVNGGTELEPVEGNPYRRIWKISCWRMAEDELFNRYERAIYAALSGNLKQLLPVCDTWEDTVWAYFRVMVDSLVEQEIQTSVATLDETEELPREYLGANWTLEKVFEELQATDKKRVLEENQEHYHIVQKFLILGDIDGLMDEFSKWLSKSRNNLPGHLLRFMTHLILFFRTLGLQTKEEVSIEVLKTYIQLLIREKHTNLIAFYTCHLPQDLAVAQYALFLESVTEFEQRHHCLELAKEADLDVATITKTVVENIRKKDNGEFSHHDLAPALDTGTTEEDRLKIDVIDWLVFDPAQRAEALKQGNAIMRKFLASKKHEAAKEVFVKIPQDSIAEIYNQCEEQGMESPLPAEDDNAIREHLCIRAYLEAHETFNEWFKHMNSVPQKPALIPQPTFTEKVAHEHKEKKYEMDFGIWKGHLDALTADVKEKMYNVLLFVDGGWMVDVREDAKEDHERTHQMVLLRKLCLPMLCFLLHTILHSTGQYQECLQLADMVSSERHKLYLVFSKEELRKLLQKLRESSLMLLDQGLDPLGYEIQL

SEQ ID NO: 883936 - protein, 925 aa, Homo sapiens; identical to SEQ ID NO: 883929

SEQ ID NO: 883937 - protein, 839 aa, Homo sapiens
MDRSGFGEISSPVIREAEVTRTARKQSAQKRVLLQASQDENFGNTTPRNQVIPRTPSSFRQPFTPTSRSLLRQPDISCILGTGGKSPRLTQSSGFFGNLSMVTNLDDSNWAAAFSSQRSGLFTNTEPHSITEDVTISAVMLREDDPGEAASMSMFSDFLQSFLKHSSSTVFDLVEEYENICGSQVNILSKIVSRATPGLQKFSKTASMLWLLQQEMVTWRLLASLYRDRIQSALEEESVFAVTAVNASEKTVVEALFQRDSLVRQSQLVVDWLESIAKDEIGEFSDNIEFYAKSVYWENTLHTLKQRQLTSYVGSVRPLVTELDPDAPIRQKMPLDDLDREDEVRLLKYLFTLIRAGMTEEAQRLCKRCGQAWRAATLEGWKLYHDPNVNGGTELEPVEGNPYRRIWKISCWRMAEDELFNRYERAIYAALSGNLKQLLPVCDTWEDTVWAYFRVMVDSLVEQEIQTSVATLDETEELPREYLGANWTLEKVFEELQATDKKRVLEENQEHYHIVQKFLILGDIDGLMDEFSKWLSKSRNNLPGHLLRFMTHLILFFRTLGLQTKEEVSIEVLKTYIQLLIREKHTNLIAFYTCHLPQDLAVAQYALFLESVTEFEQRHHCLELAKEADLDVATITKTVVENIRKKDNGEFSHHDLAPALDTGTTEEDRLKIDVIDWLVFDPAQRAEALKQGNAIMRKFLASKKHEAAKEVFVKIPQDSIAEIYNQCEEQGMESPLPAEDDNAIREHLCIRAYLEAHETFNEWFKHMNSVPQKPALIPQPTFTEKVAHEHKEKKYEMDFGIWKGHLDALTADVKEKMYNVLLFVDGGATVQGGRGVRAR

SEQ ID NO: 883938 - protein, 110 aa, Homo sapiens
GIKFDFKYSKHPLELDLLSPDIWHLNVLLFPLDFSIYYFITLKFFLVITPLDLSLKFKNYQVNRFSLEEFARLHIMRKIDILRKTIFQICLYSLCFRSFLIDTREQFMQL

SEQ ID NO: 883939 - protein, 610 aa, Homo sapiens
METAPKPGKDVPPKKDKLQTKRKKPRRYWEEETVPTTAGASPGPPRNKKNRELRPQRPKNAYILKKSRISKKPQVPKKPREWKNPESQRGLSGAQDPFPGPAPVPVEVVQKFCRIDKSRKLPHSKAKTRSRLEVAEAEEEETSIKAARSELLLAEEPGFLEGEDGEDTAKICQADIVEAVDIASAAKHFDLNLRQFGPYRLNYSRTGRHLAFGGRRGHVAALDWVTKKLMCEINVMEAVRDIRFLHSEALLAVAQNRWLHIYDNQGIELHCIRRCDRVTRLEFLPFHFLLATASETGFLTYLDVSVGKIVAALNARAGRLDVMSQNPYNAVIHLGHSNGTVSLWSPAMKEPLAKILCHRGGVRAVAVDSTGTYMATSGLDHQLKIFDLRGTYQPLSTRTLPHGAGHLAFSQRGLLVAGMGDVVNIWAGQGKASPPSLEQPYLTHRLSGPVHGLQFCPFEDVLGVGHTGGITSMLVPGAGEPNFDGLESNPYRSRKQRQEWEVKALLEKVPAELICLDPRALAEVDVISLEQGKKEQIERLGYDPQAKAPFQPKPKQKGRSSTASLVKRKRKVMDEEHRDKVRQSLQQQHHKEAKAKPTGARPSALDRFVR

SEQ ID NO: 883940 - protein, 652 aa, Homo sapiens
METAPKPGKDVPPKKDKLQTKRKKPRRYWEEETVPTTAGASPGPPRNKKNRELRPQRPKNAYILKKSRISKKPQVPKKPREWKNPESQRGLSGAQDPFPGPAPVPVEVVQKFCRIDKSRKLPHSKAKTRSRLEVAEAEEEETSIKAARSELLLAEEPGFLEGEDGEDTAKICQADIVEAVDIASAAKHFDLNLRQFGPYRLNYSRTGRHLAFGGRRGHVAALDWVTKKLMCEINVMEAVRDIRFLHSEALLAVAQNRWLHIYDNQGIELHCIRRCDRVTRLEFLPFHFLLATASETGFLTYLDVSVGKIVAALNARAGRLDVMSQNPYNAVIHLGHSNGTVSLWSPAMKEPLAKILCHRGGVRAVAVDSTGTYMATSGLDHQLKIFDLRGTYQPLSTRTLPHGAGHLAFSQRGLLVAGMGDVVNIWAGQGKASPPSLEQPYLTHRLSGPVHGLQFCPFEDVLGVGHTGGITSMLVPGAGEPNFDGLESNPYRSRKQRQEWEVKALLEKVPAELICLDPRALAEVDVISLEQGKKEQIERLGYDPQAKAPFQPKPKQKGRSSTASLVKRKRKVMDEEHRVNEHWHVAGPSTGCTLLLVPLPLSACHFSLCACVLPVSGPQDDKVRQSLQQQHHKEAKAKPTGARPSALDRFVR

SEQ ID NO: 883941 - protein, 563 aa, Homo sapiens
METAPKPGKDVPPKKDKLQTKRKKPRRYWEEETVPTTAGASPGPPRNKKNRELRPQRPKNAYILKKSRISKKPQVPKKPREWKNPESQRGLSGAQDPFPGPAPVPVEVVQKFCRIDKSRKLPHSKAKTRSRLEVAEAEEEETSIKAARSELLLAEEPGFLEGEDGEDTAKICQADIVEAVDIASAAKHFDLNLRQFGPYRLNYSRTGRHLAFGGRRGHVAALDWVTKKLMCEINVMEAVRDIRFLHSEALLAVAQNRWLHIYDNQGIELHCIRRCDRVTRLEFLPFHFLLATASETGFLTYLDVSVGKIVAALNARAGRLDVMSQNPYNAVIHLGHSNGTVSLWSPAMKEPLAKILCHRGGVRAVAVDSTGTYMATSGLDHQLKIFDLRGTYQPLSTRTLPHGAGHLAFSQRGLLVAGMGDVVNIWAGQGAGEPNFDGLESNPYRSRKQRQEWEVKALLEKVPAELICLDPRALAEVDVISLEQGKKEQIERLGYDPQAKAPFQPKPKQKGRSSTASLVKRKRKVMDEEHRDKVRQSLQQQHHKEAKAKPTGARPSALDRFVR

SEQ ID NO: 883942 - protein, 572 aa, Homo sapiens
METAPKPGKDVPPKKDKLQTKRKKPRRYWEEETVPTTAGASPGPPRNKKNRELRPQRPKNAYILKKSRISKKPQVPKKPREWKNPESQRGLSGAQDPFPGPAPVPVEVVQKFCRIDKSRKLPHSKAKTRSRLEVAEAEEEETSIKAARSELLLAEEPGFLEGEDGEDTAKICQADIVEAVDIASAAKHFDLNLRQFGPYRLNYSRTGRHLAFGGRRGHVAALDWVTKKLMCEINVMEAVRDIRFLHSEALLAVAQNRWLHIYDNQGIELHCIRRCDRVTRLEFLPFHFLLATASETGFLTYLDVSVGKIVAALNARAGRLDVMSQNPYNAVIHLGHSNGTVSLWSPAMKEPLAKILCHRGGVRAVAVDSTGTYMATSGLDHQLKIFDLRGTYQPLSTRTLPHGAGHLAFSQRGLLVAGMGDVVNIWAGQGKASPPSLEQPYLTHRLSGPVHGLQFCPFEDVLGVGHTGGITSMLVPGAGEPNFDGLESNPYRSRKQRQEWEVKALLEKVPAELICLDPRALAEVDVISLEQGKKEQIERLDKVRQSLQQQHHKEAKAKPTGARPSALDRFVR

SEQ ID NO: 883943 - protein, 627 aa, Homo sapiens
METAPKPGKDVPPKKDKLQTKRKKPRRYWEEETVPTTAGASPGPPRNKKNRELRPQRPKNAYILKKSRISKKPQVPKKPREWKNPESQRGLSGAQDPFPGPAPVPVEVVQKFCRIDKSRKVRSSRRVGKLLEAGSVWLPHSKAKTRSRLEVAEAEEEETSIKAARSELLLAEEPGFLEGEDGEDTAKICQADIVEAVDIASAAKHFDLNLRQFGPYRLNYSRTGRHLAFGGRRGHVAALDWVTKKLMCEINVMEAVRDIRFLHSEALLAVAQNRWLHIYDNQGIELHCIRRCDRVTRLEFLPFHFLLATASETGFLTYLDVSVGKIVAALNARAGRLDVMSQNPYNAVIHLGHSNGTVSLWSPAMKEPLAKILCHRGGVRAVAVDSTGTYMATSGLDHQLKIFDLRGTYQPLSTRTLPHGAGHLAFSQRGLLVAGMGDVVNIWAGQGKASPPSLEQPYLTHRLSGPVHGLQFCPFEDVLGVGHTGGITSMLVPGAGEPNFDGLESNPYRSRKQRQEWEVKALLEKVPAELICLDPRALAEVDVISLEQGKKEQIERLGYDPQAKAPFQPKPKQKGRSSTASLVKRKRKVMDEEHRDKVRQSLQQQHHKEAKAKPTGARPSALDRFVR

SEQ ID NO: 883944 - protein, 372 aa, Homo sapiens [sequence omitted]

SEQ ID NO: 883945 - protein, 430 aa, Homo sapiens
METAPKPGKDVPPKKDKLQTKRKKPRRYWEEETVPTTAGASPGPPRNKKNRELRPQRPKNAYMFLHSEALLAVAQNRWLHIYDNQGIELHCIRRCDRVTRLEFLPFHFLLATASETGFLTYLDVSVGKIVAALNARAGRLDVMSQNPYNAVIHLGHSNGTVSLWSPAMKEPLAKILCHRGGVRAVAVDSTGTYMATSGLDHQLKIFDLRGTYQPLSTRTLPHGAGHLAFSQRGLLVAGMGDVVNIWAGQGKASPPSLEQPYLTHRLSGPVHGLQFCPFEDVLGVGHTGGITSMLVPGAGEPNFDGLESNPYRSRKQRQEWEVKALLEKVPAELICLDPRALAEVDVISLEQGKKEQIERLGYDPQAKAPFQPKPKQKGRSSTASLVKRKRKVMDEEHRDKVRQSLQQQHHKEAKAKPTGARPSALDRFVR

SEQ ID NO: 883946 - protein, 296 aa, Homo sapiens
METAPKPGKDVPPKKDKLQTKRKKPRRYWEEETVPTTAGASPGPPRNKKNRELRPQRPKNAYILKKSRISKKPQVPKKPREWKNPESQRGLSGAQDPFPGPAPVPVEVVQKFCRIDKSRKLPHSKAKTRSRLEVAEAEEEETSIKAARSELLLAEEPGFLEGEDGEDTPATSHSVPVSSPSPVPRTTRSGRAFSSSIIRRRRPSPRGPGHLPWTDLCAEPDSRVAWEQSLPKITCREMSVPWNKEVGAVWPLPQLGVDSCLLGWVGIKEESDFLEIMCLDHLVDLFPSPLPSMRPF

SEQ ID NO: 883947 - protein, 105 aa, Homo sapiens
METAPKPGKDVPPKKDKLQTKRKKPRRYWEEETVPTTAGASPGPPRNKKNRELRPQRPKNAYILKKSRISKKPQGPAICPGQICALSQTPGLPGNSLSPRSPVGK

SEQ ID NO: 883948 - protein, 610 aa, Homo sapiens; identical to SEQ ID NO: 883939

SEQ ID NO: 883949 - protein, 486 aa, Homo sapiens
METAPKPGKDVPPKKDKLQTKRKKPRRYWEEETVPTTAGASPGPPRNKKNRELRPQRPKNAYILKKSRISKKPQVPKKPREWKNPESQRGLSGAQDPFPGPAPVPVEVVQKFCRIDKSRKLPHSKAKTRSRLEVAEAEEEETSIKAARSELLLAEEPGFLEGEDGEDTAKICQADIVEAVDIASAAKHFDLNLRQFGPYRLNYSRTGRHLAFGGRRGHVAALDWVTKKLMCEINVMEAVRDIRFLHSEALLAVAQNRWLHIYDNQGIELHCIRRCDRVTRLEFLPFHFLLATASETGFLTYLDVSVGKIVAALNARAGRLDVMSQNPYNAVIHLGHSNGTVSLWSPAMKEPLAKILCHRGGVRAVAVDSTGTYMATSGLDHQLKIFDLRGTYQPLSTRTLPHGAGHLAFSQRGLLVAGMGDVVNIWAGQGKASPPSLEQPYLTHRLSGPVHGLQFCPFEDVLGVGHTGGITSMLVPGEWARGWGLK

SEQ ID NO: 883950 - protein, 651 aa, Homo sapiens
METAPKPGKDVPPKKDKLQTKRKKPRRYWEEETVPTTAGASPGPPRNKKNRELRPQRPKNAYILKKSRISKKPQVPKKPREWKNPESQRGLSGAQDPFPGPAPVPVEVVQKFCRIDKSRKLPHSKAKTRSRLEVAEAEEEETSIKAARSELLLAEEPGGVSPNLDPHSLPFGTVFSRFYVGITCFILGSFTAILTLAFRFLEGEDGEDTAKICQADIVEAVDIASAAKHFDLNLRQFGPYRLNYSRTGRHLAFGGRRGHVAALDWVTKKLMCEINVMEAVRDIRFLHSEALLAVAQNRWLHIYDNQGIELHCIRRCDRVTRLEFLPFHFLLATASETGFLTYLDVSVGKIVAALNARAGRLDVMSQNPYNAVIHLGHSNGTVSLWSPAMKEPLAKILCHRGGVRAVAVDSTGTYMATSGLDHQLKIFDLRGTYQPLSTRTLPHGAGHLAFSQRGLLVAGMGDVVNIWAGQGKASPPSLEQPYLTHRLSGPVHGLQFCPFEDVLGVGHTGGITSMLVPGAGEPNFDGLESNPYRSRKQRQEWEVKALLEKVPAELICLDPRALAEVDVISLEQGKKEQIERLGYDPQAKAPFQPKPKQKGRSSTASLVKRKRKVMDEEHRDKVRQSLQQQHHKEAKAKPTGARPSALDRFVR

SEQ ID NO: 883951 - protein, 86 aa, Homo sapiens
ELHTWYAADWMKDRGLPGVFKPTVWQLRRVLHVDRRSGGRDGDSPQAGQGCPAQERQTSDQEKETAAILGGRDRSDHSRSLSRASS

SEQ ID NO: 883952 - protein, 387 aa, Homo sapiens
PRAESARGEINVMEAVRDIRFLHSEALLAVAQNRWLHIYDNQGIELHCIRRCDRVTRLEFLPFHFLLATASETGFLTYLDVSVGKIVAALNARAGRLDVMSQNPYNAVIHLGHSNGTVSLWSPAMKEPLAKILCHRGGVRAVAVDSTGTYMATSGLDHQLKIFDLRGTYQPLSTRTLPHGAGHLAFSQRGLLVAGMGDVVNIWAGQGKASPPSLEQPYLTHRLSGPVHGLQFCPFEDVLGVGHTGGITSMLVPGAGEPNFDGLESNPYRSRKQRQEWEVKALLEKVPAELICLDPRALAEVDVISLEQGKKEQIERLGYDPQAKAPFQPKPKQKGRSSTASLVKRKRKVMDEEHRDKVRQSLQQQHHKEAKAKPTGARPSALDRFVR

SEQ ID NO: 883953 - protein, 363 aa, Homo sapiens
SASEWRNPDVPHRIYDNQGIELHCIRRCDRVTRLEFLPFHFLLATASETGFLTYLDVSVGKIVAALNARAGRLDVMSQNPYNAVIHLGHSNGTVSLWSPAMKEPLAKILCHRGGVRAVAVDSTGTYMATSGLDHQLKIFDLRGTYQPLSTRTLPHGAGHLAFSQRGLLVAGMGDVVNIWAGQGKASPPSLEQPYLTHRLSGPVHGLQFCPFEDVLGVGHTGGITSMLVPGAGEPNFDGLESNPYRSRKQRQEWEVKALLEKVPAELICLDPRALAEVDVISLEQGKKEQIERLGYDPQAKAPFQPKPKQKGRSSTASLVKRKRKVMDEEHRDKVRQSLQQQHHKEAKAKPTGARPSALDRFVR

SEQ ID NO: 883954 - protein, 86 aa, Homo sapiens; identical to SEQ ID NO: 883951

SEQ ID NO: 883955 - protein, 409 aa, Homo sapiens
FSKMVANDIAKMSRKLSLPTDLKPDLDVKDNSFSRSRSSSVTSIDKESREAISALHFCETFTRKTDSSPSPCLWVGTTLGTVLVIALNLPPGGEQRLLQPVIVSPSGTILRLKGAILRMAFLDTTGCLIPPAYEPWREHNVPEEKDEKEKLKKRRPVSVSPSSSQEISENQYAVICSEKQAKVISLPTQNCAYKQNITETSFVLRGDIVALSNSICLACFCANGHIMTFSLPSLRPLLDVYYLPLTNMRIARTFCFTNNGQALYLVSPTEIQRLTYSQETCENLQEMLGELFTPVETPEAPNRGFFKGLFGGGAQSLDREELFGESSSGKASRSLAQHIPGPGGIEGVKGAASGVVGELARARLALDERGQKLGDLEERTAAMLSSAESFSKHAHEIMLKYKDKKWYQF

SEQ ID NO: 883956 - protein, 409 aa, Homo sapiens; identical to SEQ ID NO: 883955

SEQ ID NO: 883957 - protein, 409 aa, Homo sapiens; identical to SEQ ID NO: 883955

SEQ ID NO: 883958 - protein, 625 aa, Homo sapiens
MIFLYQVVHFILFTSVSGECVTQLLKDTCFEGGDITTVFTPSAKYCQVVCTYHPRCLLFTFTAESPSEDPTRWFTCVLKDSVTETLPRVNRTAAISGYSFKQCSHQISACNKDIYVDLDMKGINYNSSVAKSAQECQERCTDDVHCHFFTYATRQFPSLEHRNICLLKHTQTGTPTRITKLDKVVSGFSLKSCALSNLACIRDIFPNTVFADSNIDSVMAPDAFVCGRICTHHPGCLFFTFFSQEWPKESQRNLCLLKTSESGLPSTRIKKSKALSGFSLQSCRHSIPVFCHSSFYHDTDFLGEELDIVAAKSHEACQKLCTNAVRCQFFTYTPAQASCNEGKGKCYLKLSSNGSPTKILHGRGGISGYTLRLCKMDNECTTKIKPRIVGGTASVRGEWPWQVTLHTTSPTQRHLCGGSIIGNQWILTAAHCFYGVESPKILRVYSGILNQSEIKEDTSFFGVQEIIIHDQYKMAESGYDIALLKLETTVNYTDSQRPICLPSKGDRNVIYTDCWVTGWGYRKLRDKIQNTLQKAKIPLVTNEECQKRYRGHKITHKMICAGYREGGKDACKGDSGGPLSCKHNEVWHLVGITSWGEGCAQRERPGVYTNVVEYVDWILEKTQAV

SEQ ID NO: 883959 - protein, 470 aa, Homo sapiens [sequence omitted]

SEQ ID NO: 883960 - protein, 162 aa, Homo sapiens
MIFLYQVVHFILFTSVSGECVTQLLKDTCFEGGDITTVFTPSAKYCQVVCTYHPRCLLFTFTAESPSEDPTRWFTCVLKDSVTETLPRVNRTAAISGYSFKQCSHQISACNKDIYVDLDMKGINYNSSVAKSAQECQERCTDDVHCHFFTYATRQFPSLEHR

SEQ ID NO: 883961 - protein, 343 aa, Homo sapiens [sequence omitted]

SEQ ID NO: 883962 - protein, 376 aa, Homo sapiens
MNYEFEREIGFINSQPSLAECLTSFPPVADTFQSSSIKTSTLSHSTLIPPPFEQTIPSLNPGSHPRHGAGGRPKPSPAGSRGSPVPAGALQPPEYPWMKEKKAAKKTALLPAAAAAATAAATGPACLSHKESLEIADGSGGGSRRLRTAYTNTQLLELEKEFHFNKYLCRPRRVEIAALLDLTERQVKVWFQNRRMKHKRQTQCKENQNSEGKCKSLEDSEKVEEDEEEKTLFEQALSVSGALLEREGYTFQQNALSQQQAPNGHNGDSQSFPVSPLTSNEKNLKHFQHQSPTVPNCLSTMGQNCGAGLNNDSPEALEVPSLQDFSVFSTDSCLQLSDAVSPSLPGSLDSPVDISADSLDFFTDTLTTIDLQHLNY

SEQ ID NO: 883963 - protein, 176 aa, Homo sapiens
PKPSPAGSRGSPVPAGALQPPEYPWMKEKKAAKKTALLPAAAAAATAAATGPACLSHKGQSKDLAPGLWDPLPSPGCPESGCGGRGEWAGREGGEGEMLGCLVPAPVGSGVGLMERKGDPALYNETYIFLGSGGKLSRTCVMWDDLFELELTSSCLVVLEFGFLTVMKSDRSLLLS

SEQ ID NO: 883964 - protein, 376 aa, Homo sapiens; identical to SEQ ID NO: 883962

SEQ ID NO: 883965 - protein, 146 aa, Homo sapiens
LSRDRPGPYSTGAEGCSTSPKRDAAGGRPAQGAGVDRGGALPSGKTPGSREKVTQASDPDPPSAAEPLPPLPPTPKDRLHLPSQPTVGLASLPPTGRSLPPPAWFAAPLRDDTPPAHSAAGRLIPRVPFTGLTASTPRAPSSVIQE

SEQ ID NO: 883966 - protein, 224 aa, Homo sapiens
MVKREHGQERPTFWGWAATPAPVSAPGNPPTGEGERQGSPPGGGFLGSTSFQRRGEKELLWERGQDVSRSVLAMRAILPPSLSKSVHFPPLPHSCTLVALLSLGLQDPLGCRAPATKPTPAGATLSASSLPRPCSPSASLLLSWPLFWGILGGVFFLGSRACTRTQARRHTGPAAALLRLLFPAPRRPGARSRAGYASPGSPERRSPGTAHKGSLPWPLALRLL

SEQ ID NO: 883967 - protein, 224 aa, Homo sapiens; identical to SEQ ID NO: 883966

SEQ ID NO: 883968 - protein, 106 aa, Homo sapiens
MRTFKSFPRETHANLSLIPGQGSCSSSPYFPEAAEVVKLLFTIRFHVNPGLVERKSQTETKNVMQSWVGEIESLSRKLCCINYKQCCINFTPTMCTMLESDEIYSE

SEQ ID NO: 883969 - protein, 224 aa, Homo sapiens; identical to SEQ ID NO: 883966

SEQ ID NO: 883970 - protein, 196 aa, Homo sapiens
MQDEDGYITLNIKTRKPALVSAVMQRNYLQDENENRTGTLQQLAKRFCQYVVKQSELKGTFKGHKCSPCDTNWRYYGDSCYGFFRHNLTWEESKQYCTDMNATLLKIDNRNIVEYIKARTHLIRWVGLSRQKSNEVWKWEDGSVISENMFEFLEDGKGNMNCAYFHNGKMHPTFCENKHYLMCERKAGMTKVDQLP

SEQ ID NO: 883971 - protein, 229 aa, Homo sapiens [sequence omitted]

SEQ ID NO: 883972 - protein, 76 aa, Homo sapiens
TGRSAERLVQIGVGIWVTHLKDSVRLAPSGTEKARRQVSLEKTGLVLAGACVVGLWAAGLQRRKTTSSRFFFQFLL

SEQ ID NO: 883973 - protein, 604 aa, Homo sapiens
MNIVENSIFLSNLMKSANTFELKYDLSCELYRMSTYSTFPAGVPVSERSLARAGFYYTGVNDKVKCFCCGLMLDNWKRGDSPTEKHKKLYPSCRFVQSLNSVNNLEATSQPTFPSSVTNSTHSLLPGTENSGYFRGSYSNSPSNPVNSRANQDFSALMRSSYHCAMNNENARLLTFQTWPLTFLSPTDLAKAGFYYIGPGDRVACFACGGKLSNWEPKDNAMSEHLRHFPKCPFIENQLQDTSRYTVSNLSMQTHAARFKTFFNWPSSVLVNPEQLASAGFYYVGNSDDVKCFCCDGGLRCWESGDDPWVQHAKWFPRCEYLIRIKGQEFIRQVQASYPHLLEQLLSTSDSPGDENAESSIIHFEPGEDHSEDAIMMNTPVINAAVEMGFSRSLVKQTVQRKILATGENYRLVNDLVLDLLNAEDEIREEERERATEEKESNDLLLIRKNRMALFQHLTCVIPILDSLLTAGIINEQEHDVIKQKTQTSLQARELIDTILVKGNIAATVFRNSLQEAEAVLYEHLFVQQDIKYIPTEDVSDLPVEEQLRRLQEERTCKVCMDKEVSIVFIPCGHLVVCKDCAPSLRKCPICRSTIKGTVRTFLS

SEQ ID NO: 883974 - protein, 604 aa, Homo sapiens; identical to SEQ ID NO: 883973

SEQ ID NO: 883975 - protein, 364 aa, Homo sapiens
DRIELVLSNLSMQTHAARFKTFFNWPSSVLVNPEQLASAGFYYVGNSDDVKCFCCDGGLRCWESGDDPWVQHAKWFPRCEYLIRIKGQEFIRQVQASYPHLLEQLLSTSDSPGDENAESSIIHFEPGEDHSEDAIMMNTPVINAAVEMGFSRSLVKQTVQRKILATGENYRLVNDLVLDLLNAEDEIREEERERATEEKESNDLLLIRKNRMALFQHLTCVIPILDSLLTAGIINEQEHDVIKQKTQTSLQARELIDTILVKGNIAATVFRNSLQEAEAVLYEHLFVQQDIKYIPTEDVSDLPVEEQLRRLQEERTCKVCMDKEVSIVFIPCGHLVVCKDCAPSLRKCPICRSTIKGTVRTFLS

SEQ ID NO: 883976 - protein, 604 aa, Homo sapiens; identical to SEQ ID NO: 883973

SEQ ID NO: 883977 - protein, 383 aa, Homo sapiens
MSEHLRHFPKCPFIENQLQDTSRYTVSNLSMQTHAARFKTFFNWPSSVLVNPEQLASAGFYYVGNSDDVKCFCCDGGLRCWESGDDPWVQHAKWFPRCEYLIRIKGQEFIRQVQASYPHLLEQLLSTSDSPGDENAESSIIHFEPGEDHSEDAIMMNTPVINAAVEMGFSRSLVKQTVQRKILATGENYRLVNDLVLDLLNAEDEIREEERERATEEKESNDLLLIRKNRMALFQHLTCVIPILDSLLTAGIINEQEHDVIKQKTQTSLQARELIDTILVKGNIAATVFRNSLQEAEAVLYEHLFVQQDIKYIPTEDVSDLPVEEQLRRLQEERTCKVCMDKEVSIVFIPCGHLVVCKDCAPSLRKCPICRSTIKGTVRTFLS

SEQ ID NO: 883978 - protein, 1140 aa, Homo sapiens [sequence omitted]

SEQ ID NO: 883979 - protein, 149 aa, Homo sapiens
GAGAGDGGAESAGPPASPAGGSRGRSGGGGGGGGSRSASRPGAGAAALPEPDSSLGCRRGHEGRWTLLKTRPGSTPSPLPLSHRFEIPREAKDSYRKYPGGSAERESQKGQRVSGRSGGHSWAHRSSWALASWVTGVLGYWGQDRELIL

SEQ ID NO: 883980 - protein, 1000 aa, Homo sapiens
MDTAEDPAWLQLLQKDSSPPGPRPTAFFCPQDGSLGAGSSAMRDYCPSQQKASPAPPRHTPDQSPGMESRHRSPSGAGEGASCSDGPRGSLACPSPTCFSPQESPSKETLEAHGASISGTPEATTSGKPEPVSSVKTEPKSSDDRNPMFLEKMDFKSSKQADSTSIGKEDPGSSRKADPMFTGKAEPEILGKGDPVAPGRMDPMTVRKEDLGSLGKVDPLCSSKTYTVSPKKGGSCVLRQSGPCIPKKGGAQVFRKRASCVLRKGRSYICRKGRSCIVGKERSWALGKGRSRALGKHGFCVHRKDRAGAPGQADSRLIRQEWACILWDRGSWVLGKAGSHMLGDGRSRICGKVETVPATKEDSRFLGKMDPASSGEGRPVSGHTDTTASAKTDLTSLKNVDPMSSGKVDPVSLGKMDPMCSGKPELLSPGQAERVSVGKAGTVSPGKEDPVSSRREDPISAGSRKTSSEKVNPESSGKTNPVSSGPGDPRSLGTAGPPSAVKAEPATGGKGDPLSSEKAGLVASGKAAPTASGKAEPLAVGKEDPVSKGKADAGPSGQGDSVSIGKVVSTPGKTVPVPSGKVDPVSLGKAEAIPEGKVGSLPLEKGSPVTTTKADPRASGKAQPQSGGKAETKLPGQEGAAAPGEAGAVCLKKETPQASEKVDPGSCRKAEPLASGKGEPVSLGKADSAPSRKTESPSLGKVVPLSLEKTKPSSSSRQLDRKALGSARSPEGARGSEGRVEPKAEPVSSTEASSLGQKDLEAAGAERSPCPEAAAPPPGPRTRDNFTKAPSWEASAPPPPREDAGTQAGAQACVSVAVSPMSPQDGAGGSAFSFQAAPRAPSPPSRRDAGLQVSLGAAETRSVATGPMTPQAAAPPAFPEVRVRPGSALAAAVAPPEPAEPVRDVSWDEKGMTWEVYGAAMEVEVLGMAIQKHLERQIEEHGRQGAPAPPPAARAGPGRSGSVRTAPPDGAAKRPPGLFRALLQSVRRPRCCSRAGPTAE

SEQ ID NO: 883981 - protein, 1053 aa, Homo sapiens
MDTAEDPAWLQLLQKDSSPPGPRPTAFFCPQDGSLGAGSSAMRDYCPSQQKASPAPPRHTPDQSPGMESRHRSPSGAGEGASCSDGPRGSLACPSPTCFSPQESPSKETLEAHGASISGTPEATTSGKPEPVSSVKTEPKSSDDRNPMFLEKMDFKSSKQADSTSIGKEDPGSSRKADPMFTGKAEPEILGKGDPVAPGRMDPMTVRKEDLGSLGKVDPLCSSKTYTVSPKKGGSCVLRQSGPCIPKKGGAQVFRKRASCVLRKGRSYICRKGRSCIVGKERSWALGKGRSRALGKHGFCVHRKDRAGAPGQADSRLIRQEWACILWDRGSWVLGKAGSHMLGDGRSRICGKVETVPATKEDSRFLGKMDPASSGEGRPVSGHTDTTASAKTDLTSLKNVDPMSSGKVDPVSLGKMDPMCSGKPELLSPGQAERVSVGKAGTVSPGKEDPVSSRREDPISAGSRKTSSEKVNPESSGKTNPVSSGPGDPRSLGTAGPPSAVKAEPATGGKGDPLSSEKAGLVASGKAAPTASGKAEPLAVGKEDPVSKGKADAGPSGQGDSVSIGKVVSTPGKTVPVPSGKVDPVSLGKAEAIPEGKVGSLPLEKGSPVTTTKADPRASGKAQPQSGGKAETKLPGQEGAAAPGEAGAVCLKKETPQASEKVDPGSCRKAEPLASGKGEPVSLGKADSAPSRKTESPSLGKVVPLSLEKTKPSSSSRQLDRKALGSARSPEGARGSEGRVEPKAEPVSSTEASSLGQKDLEAAGAERSPCPEAAAPPPGPRTRDNFTKAPSWEASAPPPPREDAGTQAGAQACVSVAVSPMSPQDGAGGSAFSFQAAPRAPSPPSRRDAGLQVSLGAAETRSVATGPMTPQAAAPPAFPEVRGFAGPGFNGLGGPVVRAPGKPGWKPVSRNKLEAGDTEQGLMSWGHRGKYRGRAGPQLQTWVDNGACLGQHSGGPNSTRERHSSVEQRAAPEAIPEGSTHDGGDTRAHKGGEVHPPEERLKALRPAAPQPQMRKPGGTPKDSRASQEDNREEARPRQERPPPQQKVTGAAGP

SEQ ID NO: 883982 - protein, 798 aa, Homo sapiens
MDTAEDPAWLQLLQKDSSPPGPRPTAFFCPQDGSLGAGSSAMRDYCPSQQKASPAPPRHTPDQSPGMESRHRSPSGAGEGASCSDGPRGSLACPSPTCFSPQESPSKETLEAHGASISGTPEATTSGKPEPVSSVKTEPKSSDDRNPMFLEKMDFKSSKQADSTSIGKEDPGSSRKADPMFTGKAEPEILGKGDPVAPGRMDPMTVRKEDLGSLGKVDPLCSSKTYTVSPRKEDPGSLRKVDPVSSDKVDPVFPRKEEPRYSGKEHPVSSEKVAPTSAEKVDLVLSGKRDPGPSGKADPVPLESMDSASTGKTEPGLLGKLIPGSSGKNGPVSSGTGAPGSLGRLDPTCLGMADPASVGNVETVPATKEDSRFLGKMDPASSGEGRPVSGHTDTTASAKTDLTSLKNVDPMSSGKVDPVSLGKMDPMCSGKPELLSPGQAERVSVGKAGTVSPGKEDPVSSRREDPISAGSRKTSSEKVNPESSGKTNPVSSGPGDPRSLGTAGPPSAVKAEPATGGKGDPLSSEKAGLVASGKAAPTASGKAEPLAVGKEDPVSKGKADAGPSGQGDSVSIGKVVSTPGKTVPVPSGKVDPVSLGKAEAIPEGKVGSLPLEKGSPVTTTKADPRASGKAQPQSGGKAETKLPGQEGAAAPGEAGAVCLKKETPQASEKVDPGSCRKAEPLASGKGEPVSLGKADSAPSRKTESPSLGKVVPLSLEKTKPSSSSRQLDRKALGSARSPEGARGSEGRQASARPVPRAAAECAPAAVLLAGGTHGRVICPHFVRPSFRPSQAPFLITGP

SEQ ID NO: 883983 - protein, 1000 aa, Homo sapiens; identical to SEQ ID NO: 883980

SEQ ID NO: 883984 - protein, 1000 aa, Homo sapiens; identical to SEQ ID NO: 883980

SEQ ID NO: 883985 - protein, 132 aa, Homo sapiens
MSHAGCPERASRQREQKVPSSPSSAGPGTFSSAFYSQSHCSATHFSFLGTPDGKWLYLFIPIALGHSQQPLEEAPQVGKETQGSQPALPHLCAGGPSMMMLIHRICMALRGLGRLNTVDRVMRLRAEMLLRG

SEQ ID NO: 883986 - protein, 268 aa, Homo sapiens
ELQSEGVCHSWAQASVLGFVAWLQGDSGGPVLCLEPDGHWVQAGIISFASSCAQEDAPVLLTNTAAHSSWLQARVQGAAFLAQSPETPEMSDEDSCVACGSLRTAGPQAGAPSPWPWEARLMHQGQLACGGALVSEEAVLTAAHCFIGRQAPEEWSVGLGTRPEEWGLKQLILHGAYTHPEGGYDMALLLLAQPVTLGASLRPLCLPYPDHHLPDGERGWVLGRARPGAGISSLQTVPVTLLGPRACSRLHAAPGGDGSPILPGMVCT

SEQ ID NO: 883987 - protein, 187 aa, Homo sapiens
TLPMALGGQADAPGTAGLWRSPGVRGGGANCCPLLHWVSLGSLSAVPPAPAGSPVTWCQSTLPLHRRQAPEEWSVGLGTRPEEWGLKQLILHGAYTHPEGGYDMALLLLAQPVTLGASLRPLCLPYPDHHLPDGERGWVLGRARPGAGRWAQGQGCCPSNLQAGAASFPLLHRHQLPPDSARDPPGA

SEQ ID NO: 883988 - protein, 3521 aa, Homo sapiens
LPPQFAPRLGLERRSAGSGSPSGASRAHSQRPRRRCGATPRPPQSRPRPPREGAELPAAARMASLAALALSLLLRLQLPPLPGARAQSAPGGCSFDEHYSNCGYSVALGTNGFTWEQINTTEKPMLDQAVPTGSFMMVNSSGRASGQKAHLLLPTLKENDTHCIDFHYYFSSRDRSSPGALNVYVKVNGGPQGNPVWNVSGVVTEGWVKAELAISTFWPHFYQVIFESVSLKGHPGYIAVDEVRVLAHPCRKAPHFLRLQNVEVNVGQNATFQCIAGGKWSQHDKLWLQQWNGRDTALMVTRVVNHRRFSATVSVADTAQRSVSKYRCVIRSDGGSGVSNYAELIVKEPPTPIAPPELLAVGATYLWIKPNANSIIGDGPIILKEVEYRTTTGTWAETHIVDSPNYKLWHLDPDVEYEIRVLLTRPGEGGTGPPGAPLTTRTKCADPVHGPQNVEIVDIRARQLTLQWEPFGYAVTRCHSYNLTVQYQYVFNQQQYEAEEVIQTSSHYTLRGLRPFMTIRLRLLLSNPEGRMESEELVVQTEEDVPGAVPLESIQGGPFEEKIYIQWKPPNETNGVITLYEINYKAVGSLDPSADLSSQRGKVFKLRNETHHLFVGLYPGTTYSFTIKASTAKGFGPPVTTRIATKISAPSMPEYDTDTPLNETDTTITVMLKPAQSRGAPVSVYQLVVKEERLQKSRRAADIIECFSVPVSYRNASSLDSLHYFAAELKPANLPVTQPFTVGDNKTYNGYWNPPLSPLKSYSIYFQALSKANGETKINCVRLATKAPMGSAQVTPGTPLCLLTTGASTQNSNTVEPEKQVDNTVKMAGVIAGLLMFIIILLGVMLTIKRRRNAYSYSYYLSQRKLAKKQKETQSGAQREMGPVASADKPTTKLSASRNDEGFSSSSQDVNGFTDGSRGELSQPTLTIQTHPYRTCDPVEMSYPRDQFQLAIRVADLLQHITQMKRGQGYGFKEEYEALPEGQTASWDTAKEDENRNKNRYGNIISYDHSRVRLLVLDGDPHSDYINANYIDGYHRPRHYIATQGPMQETVKDFWRMIWQENSASIVMVTNLVEVGRVKCVRYWPDDTEVYGDIKVTLIETEPLAEYVIRTFTVQKKGYHEIRELRLFHFTSWPDHGVPCYATGLLGFVRQVKFLNPPEAGPIVVHCSAGAGRTGCFIAIDTMLDMAENEGVVDIFNCVRELRAQRVNLVQTEEQYVFVHDAILEACLCGNTAIPVCEFRSLYYNISRLDPQTNSSQIKDEFQTLNIVTPRVRPEDCSIGLLPRNHDKNRSMDVLPLDRCLPFLISVDGESSNYINAALMDSHKQPAAFVVTQHPLPNTVADFWRLVFDYNCSSVVMLNEMDTAQFCMQYWPEKTSGCYGPIQVEFVSADIDEDIIHRIFRICNMARPQDGYRIVQHLQYIGWPAYRDTPPSKRSLLKVVRRLEKWQEQYDGREGRTVVHCLNGGGRSGTFCAICSVCEMIQQQNIIDVFHIVKTLRNNKSNMVETLEQYKFVYEVALEYLSSFSSMGWGTCRSPEAAVTKPPFVGMAVTGLRSSEVAPCLTPRRRLVALCSTGGSAPSEGSPVAVGDAAPKGPGFLFNLTSHSQGPKQKYTHKQGLGFLAPRPPAFVLSLWISWQANCAGAGEWEAPLPSFSLGVEEMCVLLLYVMEKIEALGGHCSAAPCNLLQGPLAPDICSLDQCDLTMFPRPQERPPILTPNLHGASPTTILYPFPSLGLDRPAFTGRPAVSTAVFDKGVLCFFVWSVGGGGTAGNFSAPPCLCKKGPPPWGRAWADLVGCNPCVSLVVAFFGRDKQDEDLIIFQSVCEKKLSFGGCKILVSYVKKKGAGEFEYVPLRQISRAFYFFLAMSLKAPTLGQHATEQGEMGEPEDGPFGFWGKESTSFVHNLDVQIVNSFLKKPSSHLEKGHCGAHYTLIENRPRESGLEIQGLVQSVSESMRGNQHLLSLYCMPGIMLGTFHRTFHTVLRTPRRELLTCYHLHLIISSNEETHAPSLVMKSWVPKGQVMAMRLLRAVFFIFSEAKQLFYGGKIRPETSEQITPQMEIYTFFLMPVLLGSAEFQIYFSNTFPAPQEKPVSSNFLVSKNNSLFLQAMNGPARETLDLDLYPVLRPKYLTASGGLGPRKLHLEGWSSPRQGMRGREFKKVQLWPSRAHCMLGKWNHGAVVWVDECSMSLGARKSLRPRASWRRGRPFLLGLNKHKKEKKETQAKGSICAMAKKCEKALGEAVWGRPAQCGHSTTRGAARDEPGSRRQMPIASTDFVLLATRSPWSFREMHSASCWPRLLLGQWGCLFSFHQTLENIPLSVHFLISHLFVCLLIVLLLELNMQWIMRLRFYEKPRVSALPRSRVTNPDLQAHEDGTGKEPTKVASIGMGSGAVQKSRDTRLDQGRAVTLEVQKEVPQSKGKQRNPTMNLLFSFDEPLPRCISADPGDPPPLGLLASLGSSPMPQLAFPSLQGACSMANLPAVCYFLRSWYIQTEMRVEGELFNTNPKIFFCSGRGEIAGRYKKTVAFIILNGRNLRCDFREKQTCKEKKISGHVGVTQQGPVMISPSSSPYFPTTQPFSKAGQLNRSYASAHRKKLRLMDGDDFPKIPWDKDVARLGGDGAPVPRNLNIFLYPGNLRSQHHHPQGVSPPHPIYRVSSACHEQRKILLMLSESLQQELLPHRCGLCLGKMQGSNEKPRKFLHLCLWPEIASGCILAALQHCILSGVKNLGQPGVLGPLEGHSRPLFVGMEGDSLLLVLALSVGVACKEPTDPMLGTLTCELIKFFQHSKGGFVIVTMLLMRKLRLLGEKSLAHSSTASEMNEPGFKPVFSHYRDNIFPPLYLTFFPGGYPYTEETRVEQIRQWIKLKANNSKLKIPSSLMFYVHNSCKICIPLSDLALLVLICLYEYFKKKCALFLMLFCSVHPAMTDPRSAGLQLDPRIDSRSSDPAASQSQFIGSRSRPTDLLLGSSFGVWVLYLTVHEGTSTEGIFQLGAGRNPLTHTRMMRICSSGVEKDEPNKTLKGKEKLDTAVLSRFLNARLESGACCPSGVTWLLMWASLRTHFMSSWGLEGSSLSLATHNYWVPTAPSTLEGALLGNRDYYGTINSWVRHGVVVDRAQSLFERKHTYMKNIHEKRTLINIRRGRFGALEAGKQERKARKLEPSEYSEPRMQMTYLAKWHFCDIAGERMGNSLPEPLGTRANLSVWGKKMMHFPLTHHVYSSSTPHCHTSSCCKSSPGSTFPRRWWEPLRVHRGISPVRLLYTTEDEAQGVAARPLSCYLCRSDCPTQIQRHLKEMIIPWYLTALGQNEESHPSLGCSLPLLGWVNRSSAPGSTRSNILEDMGEPKRKHEQDAVPKSCQQVVLGQDPQGKKWSTQLEGRLEEKKHKRGYVMSSQIPDLASPLLDSLSSFLACDQLQITAKENKEIGKVNPTRRDKLRFRFVYSSHAKFPCWRFSMYTCLEVIECKALALSCRDLPLRSETEQQGERLVVECGGAVLAPVSSDTFFRIMDLILRSTAEISKPYLCT

SEQ ID NO: 883989 - protein, 1262 aa, Homo sapiens
MSQGPGDRCPSRVQTLSYWQQGVHGALERCTQLRVGQDSFWANGAASFPFIRHCENIPLSVHFLISHLFVCLLIVLLLELNMQWIMRLRFYEKPRVSALPRSRVTNPDLQAHEDGTGKEPTKVASIGMGSGAVQKSRDTRLDQGRAVTLEVQKEVPQSKGKQRNPTMNLLFSFDEPLPRCISADPGDPPPLGLLASLGSSPMPQLAFPSLQGACSMANLPAVCYFLRSWYIQTGMRVEGELFNTNPKIFFCSGRGEIAGRYKKTVAFIILNGRNLRCDFREKQTCKEKKISGHVGVTQQGPVMISPSSSPYFPTTQPFSKAGQLNRSEASAHRKKLRLMDGDDFPKIPWDKDVARLGGDGAPVPRNLNIFLYPGNLRSQHHHPQGVSPPHPIYRVSSACHEQRKILLMLSESLQQELLPHRCGLCLGKMQGSNEKPRKFLHLCLWPEIASGCILAALQHCILSGVKNLGQPGVLGPLEGHSRPLFVGMEGDSLLLVLALSVGVACKEPTDPMLGTLTCELIKFFQHSKGGFVIVTMLLMRKLRLLGEKSLAHSSTASEMNEPGFKPVFSHYRDNIFPPLYLTFFPGGYPYTEETRVEQIRQWIKLKANNSKLKIPSSLMFYVHNSCKICIPLSDLALLVLICLYEYFKKKCALFLMLFCSVHPAMTDPRSAGLQLDPRIDSRSSDPAASQSQFIGSRSRPTDLLLGSSFGVWVLYLTVHEGTSTKDIFQLGAGRNPLTHTRMMRICSSGVEKDEPNKTLKGKEKLDTAVLSRFLNARLESGACCPSGVTWLLMWASLRTHFMSSWGLEGSSLSLATHNYWVPTAPSTLEGALLGNRDYYGTINSWVRHGVVVDRAQSLFERKHTYMKNIHEKRTLINIRRGRFGALEAGKQERKARKLEPSEYSEPRMQMTYLENGHFCDIAGERMGNSLPEPLGTRANLSVWGKKMMHFPLTHHVYSSSTPHCHTSSCCKSSPGSTFPRRWWEPLRVHRGISPVRLLYTTEDEAQGVAARPLSCYLCRSDCPTQIQRHLKEMIIPWYLTALGQNEESHPSLGCSLPLLGWVNRSSAPGSTRSNILEDMGEPKRKHEQDAVPKSCQQVVLGQDPQGKKWSTQLEGRLEEKKHKRGYVMSSQIPDLASPLLDSLSSFLACDQLQITAKENKEIGKVNPTRRDKLRFRFVYSSHAKFPCWRFSMYTCLEVIECKALALSCRDLPLRSETEQQGERLVVEVGGAVLAPVSSDTFFRIMDLILRSTAEISKPYLCT

SEQ ID NO: 883990 - protein, 1524 aa, Homo sapiens
LPPQFAPRLGLERRSAGSGSPSGASRAHSQRPRRRCGATPRPPQSRPRPPREGAELPAAARMASLAALALSLLLRLQLPPLPGARAQSAPGGCSFDEHYSNCGYSVALGTNGFTWEQINTTEKPMLDQAVPTGSFMMVNSSGRASGQKAHLLLPTLKENDTHCIDFHYYFSSRDRSSPGALNVYVKVNGGPQGNPVWNVSGVVTEGWVKAELAISTFWPHFYQVIFESVSLKGHPGYIAVDEVRVLAHPCRKAPHFLRLQNVEVNVGQNATFQCIAGGKWSQHDKLWLQQWNGRDTALMVTRVVNHRRFSATVSVADTAQRSVSKYRCVIRSDGGSGVSNYAELIVKEPPTPIAPPELLAVGATYLWIKPNANSIIGDGPIILKEVEYRTTTGTWAETHIVDSPNYKLWHLDPDVEYEIRVLLTRPGEGGTGPPGAPLTTRTKCADPVHGPQNVEIVDIRARQLTLQWEPFGYAVTRCHSYNLTVQYQYVFNQQQYEAEEVIQTSSHYTLRGLRPFMTIRLRLLLSNPEGRMESEELVVQTEEDVPGAVPLESIQGGPFEEKIYIQWKPPNETNGVITLYEINYKAVGSLDPSADLSSQRGKVFKLRNETHHLFVGLYPGTTYSFTIKASTAKGFGPPVTTRIATKISAPSMPEYDTDTPLNETDTTITVMLKPAQSRGAPVSVYQLVVKEERLQKSRRAADIIECFSVPVSYRNASSLDSLHYFAAELKPANLPVTQPFTVGDNKTYNGYWNPPLSPLKSYSIYFQALSKANGETKINCVRLATKAPMGSAQVTPGTPLCLLTTGASTQNSNTVEPEKQVDNTVKMAGVIAGLLMFIIILLGVMLTIKRRRNAYSYSYYLSQRKLAKKQKETQSGAQREMGPVASADKPTTKLSASRNDEGFSSSSQDVNGFTDGSRGELSQPTLTIQTHPYRTCDPVEMSYPRDQFQLAIRVADLLQHITQMKRGQGYGFKEEYEALPEGQTASWDTAKEDENRNKNRYGNIISYDHSRVRLLVLDGDPHSDYINANYIDGYHRPRHYIATQGPMQETVKDFWRMIWQENSASIVMVTNLVEVGRVKCVRYWPDDTEVYGDIKVTLIETEPLAEYVIRTFTVQKKGYHEIRELRLFHFTSWPDHGVPCYATGLLGFVRQVKFLNPPEAGPIVVHCSAGAGRTGCFIAIDTMLDMAENEGVVDIFNCVRELRAQRVNLVQTEEQYVFVHDAILEACLCGNTAIPVCEFRSLYYNISRLDPQTNSSQIKDEFQTLNIVTPRVRPEDCSIGLLPRNHDKNRSMDVLPLDRCLPFLISVDGESSNYINAALMDSHKQPAAFVVTQHPLPNTVADFWRLVFDYNCSSVVMLNEMDTAQFCMQYWPEKTSGCYGPIQVEFVSADIDEDIIHRIFRICNMARPQDGYRIVQHLQYIGWPAYRDTPPSKRSLLKVVRRLEKWQEQYDGREGRTVVHCLNGGGRSGTFCAICSVCEMIQQQNIIDVFHIVKTLRNNKSNMVETLEQYKFVYEVALEYLSSF

SEQ ID NO: 883991 - protein, 138 aa, Homo sapiens [sequence omitted]

SEQ ID NO: 883992 - protein, 149 aa, Homo sapiens
RAHTQTQTHTPTHTPCPLSPPCKLVAFSSQSLGCDLKEFRQQQSDPGGALDRQPHPRRLGPPSRDASGGLGKHFHPLLSSILAGWLLLLQDSDVSLRSAVRSAGELPTVPQGAGAGDTAEPGNESGHRRGHHDSSAAWSPCWFTVLGSY

SEQ ID NO: 883993 - protein, 113 aa, Homo sapiens
RLSRVPRLPSRLRRGAPRVNPPACKDLDIQRTAEESNVPAFLPLHSHSARNASSSLVFSFQDLNSNPIGSPDTAGGRVRLLLLQDSDVSLRSAVRSAGELPTVPQGSGSFQGI

SEQ ID NO: 883994 - protein, 109 aa, Homo sapiens
MEEVLLPLAVTSDPRPFNQQLPEPPDPRCVLEPQDNPELALALVCALCCCFGIIYCCFSEGRAKDLGGHCPRLSSSRMMPAFLLAPGPSHLLCQGFLPLVWPMLLWLYS

SEQ ID NO: 883995 - protein, 180 aa, Homo sapiens [sequence omitted]

SEQ ID NO: 883996 - protein, 149 aa, Homo sapiens; identical to SEQ ID NO: 883992

SEQ ID NO: 883997 - protein, 219 aa, Homo sapiens
RAHTQTQTHTPTHTPCPLSPPCKLVAFSSQSLGCDLKEFRQQQSDPGGALDRQPHPRRLGPPSRDASGGLGKHFHPLLSSILAGCARNASSSLVFSFQDLNSNPIGSPDTAGGRVRLLLLQDSDVSLRSAVRSAGELPTVPQAGSYWGSGQPWGPLEPWPSGSSCLRNMEATLMSYFQSLQECQLGPGPQTTAPHTVLDLDSDCGSTVPLTLISGSNQT

SEQ ID NO: 883998 - protein, 180 aa, Homo sapiens
RAHTQTQTHTPTHTPCPLSPPCKLVAFSSQSLGCDLKEFRQQQSDPGGALDRQPHPRRLGPPSRDASGGLGKHFHPLLSSILAGCARNASSSLVFSFQDLNSNPIGSPDTAGGRVRLLLLQDSDVSLRSAVRSAGELPTVPQGAGAGDTAEPGNESGHRRGHHDSSAAWSPCWFTVLGSY

SEQ ID NO: 883999 - protein, 250 aa, Homo sapiens
RAHTQTQTHTPTHTPCPLSPPCKLVAFSSQSLGCDLKEFRQQQSDPGGALDRQPHPRRLGPPSRDASGGLGKHFHPLLSSILAGCARNASSSLVFSFQDLNSNPIGSPDTAGGRVRLLLLQDSDVSLRSAVRSAAGSYWGSGQPWGPLEPWPSGSSCLRNMEATLMTLQQKAKWHWIPSGVGLCEGSCRHQLPANTCSPADSLAPSYFQSLQECQLGPGPQTTAPHTVLDLDSDCGSTVPLTLISGSNQT

SEQ ID NO: 884000 - protein, 109 aa, Homo sapiens; identical to SEQ ID NO: 883994

SEQ ID NO: 884001 - protein, 109 aa, Homo sapiens; identical to SEQ ID NO: 883994

SEQ ID NO: 884002 - protein, 152 aa, Homo sapiens
RAHTQTQTHTPTHTPCPLSPPCKLVAFSSQSLGCDLKEFRQQQSDPGGALDRQPHPRRLGPPSRDASGGLGKHFHPLLSSILAGCARNASSSLVFSFQDLNSNPIGSPDTAGGRVSEPFLSLGIHQSHPCRAPFLPLNSSCLTSQATAASRQ

SEQ ID NO: 884003 - protein, 109 aa, Homo sapiens; identical to SEQ ID NO: 883994

SEQ ID NO: 884004 - protein, 109 aa, Homo sapiens; identical to SEQ ID NO: 883994

SEQ ID NO: 884005 - protein, 175 aa, Homo sapiens
RAHTQTQTHTPTHTPCPLSPPCKLVAFSSQSLGCDLKEFRQQQSDPGGALDRQPHPRRLGPPSRDASGGLGKHFHPLLSSILAGCARNASSSLVFSFQDLNSNPIGSPDTAGGRVSWVLLGIWPALGALGALAQWKLVPEEHGGHANELLPESSRVPTGTRTPDHSPPHRPGPGF

SEQ ID NO: 884006 - protein, 116 aa, Homo sapiens
RAHTQTQTHTPTHTPCPLSPPCKLVAFSSQSLGCDLKEFRQQQSDPGGALDRQPHPRRLGPPSRDASGGLGKHFHPLLSSILAGCARNASSSLVFSFQDLNSNPIGSPDTAGGRVR

SEQ ID NO: 884007 - protein, 180 aa, Homo sapiens
RAHTQTQTHTPTHTPCPLSPPCKLVAFSSQSLGCDLKEFRQQQSDPGGALDRQPHPRRLGPPSRDASGGLGKHFHPLLSSILAGWLLLLQDSDVSLRSAVRSAAGSYWGSGQPWGPLEPWPSGSSCLRNMEATLMSYFQSLQECQLGPGPQTTAPHTVLDLDSDCGSTVPLTLISGSNQT

SEQ ID NO: 884008 - protein, 175 aa, Homo sapiens; identical to SEQ ID NO: 884005

SEQ ID NO: 884009 - protein, 211 aa, Homo sapiens
RAHTQTQTHTPTHTPCPLSPPCKLVAFSSQSLGCDLKEFRQQQSDPGGALDRQPHPRRLGPPSRDASGGLGKHFHPLLSSILAGCARNASSSLVFSFQDLNSNPIGSPDTAGGRVRLLLLQDSDVSLRSAVRSAAGSYWGSGQPWGPLEPWPSGSSCLRNMEATLMSYFQSLQECQLGPGPQTTAPHTVLDLDSDCGSTVPLTLISGSNQT

SEQ ID NO: 884010 - protein, 109 aa, Homo sapiens; identical to SEQ ID NO: 883994

SEQ ID NO: 884011 - protein, 129 aa, Homo sapiens
MGKGEEGKYEYLPLTNNRGALVPKEIDSRIPSKPYPYSFCLFVCFQTRSCSVQCRGVTTAHDNFDFPGPSEPLIQPPEWLGPQTPHTANFYVFVFIFLQRQGLPMLPKLVLNSWAQVILLLQPPKVLGL

SEQ ID NO: 884012 - protein, 109 aa, Homo sapiens; identical to SEQ ID NO: 883994

SEQ ID NO: 884013 - protein, 109 aa, Homo sapiens; identical to SEQ ID NO: 883994

SEQ ID NO: 884014 - protein, 495 aa, Homo sapiens
MSLPNSSCLLEDKMCEGNKTTMASPQLMPLVVVLSTICLVTVGLNLLVLYAVRSERKLHTVGNLYIVSLSVADLIVGAVVMPMNILYLLMSKWSLGRPLCLFWLSMDYVASTASIFSVFILCIDRYRSVQQPLRYLKYRTKTRASATILGAWFLSFLWVIPILGWNHFMQQTSVRREDKCETDFYDVTWFKVMTAIINFYLPTLLMLWFYAKIYKAVRQHCQHRELINRSLPSFSEIKLRPENPKGDAKKPGKESPWEVLKRKPKDAGGGSVLKSPSQTPKEMKSPVVFSQEDDREVDKLYCFPLDIVHMQAAAEGSSRDYVAVNRSHGQLKTDEQGLNTHGASEISEDQMLGDSQSFSRTDSDTTTETAPGKGKLRSGSNTGLDYIKFTWKRLRSHSRQYVSGLHMNRERKAAKQLGFIMAAFILCWIPYFIFFMVIAFCKNCCNEHLHMFTIWLGNRARLCLKKKKYNILTMCPLKCAQIHIHGIPKSGGSSK

SEQ ID NO: 884015 - protein, 487 aa, Homo sapiens
MSLPNSSCLLEDKMCEGNKTTMASPQLMPLVVVLSTICLVTVGLNLLVLYAVRSERKLHTVGNLYIVSLSVADLIVGAVVMPMNILYLLMSKWSLGRPLCLFWLSMDYVASTASIFSVFILCIDRYRSVQQPLRYLKYRTKTRASATILGAWFLSFLWVIPILGWNHFMQQTSVRREDKCETDFYDVTWFKVMTAIINFYLPTLLMLWFYAKIYKAVRQHCQHRELINRSLPSFSEIKLRPENPKGDAKKPGKESPWEVLKRKPKDAGGGSVLKSPSQTPKEMKSPVVFSQEDDREVDKLYCFPLDIVHMQAAAEGSSRDYVAVNRSHGQLKTDEQGLNTHGASEISEDQMLGDSQSFSRTDSDTTTETAPGKGKLRSGSNTGLDYIKFTWKRLRSHSRQYVSGLHMNRERKAAKQLGFIMAAFILCWIPYFIFFMVIAFCKNCCNEHLHMFTIWLGYINSTLNPLIYPLCNENFKKTFKRILHIRS

SEQ ID NO: 884016 - protein, 694 aa, Homo sapiens
MEWGYLLEVTSLLAALALLQRSSGAAAASAKELACQEITVPLCKGIGYNYTYMPNQFNHDTQDEAGLEVHQFWPLVEIQCSPDLKFFLCSMYTPICLEDYKKPLPPCRSVCERAKAGCAPLMRQYGFAWPDRMRCDRLPEQGNPDTLCMDYNRTDLTTAAPSPPRRLPPPPPGEQPPSGSGHGRPPGARPPHRGGGRGGGGGDAAAPPARGGGGGGKARPPGGGAAPCEPGCQCRAPMVSVSSERHPLYNRVKTGQIANCALPCHNPFFSQDERAFTVFWIGLWSVLCFVSTFATVSTFLIDMERFKYPERPIIFLSACYLFVSVGYLVRLVAGHEKVACSGGAPGAGGAGGAGGAAAGAGAAGAGAGGPGGRGEYEELGAVEQHVRYETTGPALCTVVFLLVYFFGMASSIWWVILSLTWFLAAGMKWGNEAIAGYSQYFHLAAWLVPSVKSIAVLALSSVDGDPVAGICYVGNQSLDNLRGFVLAPLVIYLFIGTMFLLAGFVSLFRIRSVIKQQDGPTKTHKLEKLMIRLGLFTVLYTVPAAVVVACLFYEQHNRPRWEATHNCPCLRDLQPDQARRPDYAVFMLKYFMCLVVGITSGVWVWSGKTLESWRSLCTRCCWASKGAAVGGGAGATAAGGGGGPGGGGGGGPGGGGGPGGGGGSLYSDVSTGLTWRSGTASSVSYPKQMPLSQV

SEQ ID NO: 884017 - protein, 535 aa, Homo sapiens
PSSICWLIFSLTLVPAARYEVGKRSHRRLLPVLPPARLGLLPSLKVHRGSGAQLGGRRPGGGHLLRGQPEPGCQCRAPMVSVSSERHPLYNRVKTGQIANCALPCHNPFFSQDERAFTVFWIGLWSVLCFVSTFATVSTFLIDMERFKYPERPIIFLSACYLFVSVGYLVRLVAGHEKVACSGGAPGAGGAGGAGGAAAGAGAAGAGAGGPGGRGEYEELGAVEQHVRYETTGPALCTVVFLLVYFFGMASSIWWVILSLTWFLAAGMKWGNEAIAGYSQYFHLAAWLVPSVKSIAVLALSSVDGDPVAGICYVGNQSLDNLRGFVLAPLVIYLFIGTMFLLAGFVSLFRIRSVIKQQDGPTKTHKLEKLMIRLGLFTVLYTVPAAVVVACLFYEQHNRPRWEATHNCPCLRDLQPDQARRPDYAVFMLKYFMCLVVGITSGVWVWSGKTLESWRSLCTRCCWASKGAAVGGGAGATAAGGGGGPGGGGGGGPGGGGGPGGGGGSLYSDVSTGLTWRSGTASSVSYPKQMPLSQV

SEQ ID NO: 884018 - protein, 535 aa, Homo sapiens; identical to SEQ ID NO: 884017

SEQ ID NO: 884019 - protein, 535 aa, Homo sapiens; identical to SEQ ID NO: 884017

SEQ ID NO: 884020 - protein, 550 aa, Homo sapiens
MVGEEKMSLRNRLSKSRENPEEDEDQRNPAKESLETPSNGRIDIKQLIAKKIKLTAEAEELKPFFMKEVGSHFDDFVTNLIEKSASLDNGGCALTTFSVLEGEKNNHRAKDLRAPPEQGKIFIARRSLLDELLEVDHIRTIYHMFIALLILFILSTLVVDYIDEGRLVLEFSLLSYAFGKFPTVVWTWWIMFLSTFSVPYFLFQHWATGYSKSSHPLIRSLFHGFLFMIFQIGVLGFGPTYVVLAYTLPPASRFIIIFEQIRFVMKAHSFVRENVPRVLNSAKEKSSTVPIPTVNQYLYFLFAPTLIYRDSYPRNPTVRWGYVAMKFAQVFGCFFYVYYIFERLCAPLFRNIKQEPFSARVLVLCVFNSILPGVLILFLTFFAFLHCWLNAFAEMLRFGDRMFYKDWWNSTSYSNYYRTWNVVVHDWLYYYAYKDFLWFFSKRFKSAAMLAVFAVSAVVHEYALAVCLSFFYPVLFVLFMFFGMAFNFIVNDSRKKPIWNVLMWTSLFLGNGVLLCFYSQEWYARQHCPLKNPTFLDYVRPRSWTCRYVF

SEQ ID NO: 884021 - protein, 550 aa, Homo sapiens; identical to SEQ ID NO: 884020

SEQ ID NO: 884022 - protein, 550 aa, Homo sapiens; identical to SEQ ID NO: 884020

SEQ ID NO: 884023 - protein, 550 aa, Homo sapiens; identical to SEQ ID NO: 884020

SEQ ID NO: 884024 - protein, 175 aa, Homo sapiens
MVGEEKMSLRNRLSKSRENPEEDEDQRNPAKESLETPSNGRIDIKQLIAKKIKLTAEAEELKPFFMKEVGSHFDDFVTNLIEKSASLDNGGCALTTFSVLEGEKNNHRAKDLRAPPEQGKIFIARRSLLDELLEVDHIRTIYHMFIALLILFILSTLVVDYIDEGRLVLEFSYLC

SEQ ID NO: 884025 - protein, 78 aa, Homo sapiens
SEALESSEAGPDGVPVCSAASVDLSTPVFSCRKRLRLNLARAFWNQTCGGRQGRAGERKAGRAFPRLLHSELCCLWGR

SEQ ID NO: 884026 - protein, 1132 aa, Homo sapiens
MIATPLKHSRIYLPPEASSQRRNLPMDAIFFDSIPSGTLTPVKDLVKYQNSSLKLNDHKKNQFLKMTTFNNKNIFQSTMLTEATTSNSSLDISAIKPNKDGLKNKANYESPGKIFLRMKEKVLRDKQEQPSRNSSLLEPQKSGNNETFTPNRVEKKKLQHTYLCEEKENNKSFQSDDSSLRASVQGVPLESSNNDIFLPVKQKIQCQQEKKAPLHNLTYELPTLNQEQENFLAVEARNKTLTRAQLAKQIFHSKESIVATTKSKKDTFVLESVDSADEQFQNTNAETLSTNCIPIKNGSLLMVSDSERTTEGTSQQKVKEGNGKTVPGETGLPGSMKDTCKIVLATPRLHITIPRRSKRNISKLSPPRIFQTVTNGLKKNQVVQLQEWMIKSINNNTAICVEGKLIDVTNIYWHSNVIIERIEHNKLRTISGNVYILKGMIDQISMKEAGYPNYLIRKFMFGFPENWKEHIDNFLEQLRAGEKNREKTKQKQKTGRSVRDIRKSMKNDARENQTDTAQRATTTYDFDCDNLELKSNKHSESPGATELNMCHSNCQNKPTLRFPDDQVNNTIQNGGGDDLSNQELIGKKEYKMSSKKLKIGERTNERIIKSQKQETTEELDVSIDILTSREQFFSDEERKYMAINQKKAYILVTPLKSRKVIEQRCMRYNLSAGTIKAVTDFVIPECQKKSPISKSMGTLENTFEGHKSKNKEDCDERDLLTVNRKIKISNLEKEQMLTSDFKKNTRLLPKLKKIENQVAMSFYKHQSSPDLSSEESETEKEIKRKAEVKKTKAGNTKEAVVHLRKSTRNTSNIPVILEPETEESENEFYIKQKKARPSVKETLQKSGVRKEFPITEAVGSDKTNRHPLECLPGLIQDKEWNEKELQKLHCAFASLPKHKPGFWSEVAAAVGSRSPEECQRKYMENPRGKGSQKHVTKKKPANSKGQNGKRGDADQKQTIKITAKVGTLKRKQQMREFLEQLPKDDHDDFFSTTPLQHQRILLPSFQDSEDDDDILPNMDKNPTTPSSVIFPLVKTPQCQHVSPGMLGSINRNDCDKYVFRMQKYHKSNGGIVWGNIKKKLVETDFSTPTPRRKTPFNTDLGENSGIGKLFTNAVESLDEEEKDYYFSNSDSA

SEQ ID NO: 884027 - protein, 1171 aa, Homo sapiens
MIATPLKHSRIYLPPEASSQRRNLPMDAIFFDSIPSGTLTPVKDLVKYQNSSLKLNDHKKNQFLKMTTFNNKNIFQSTMLTEATTSNSSLDISAIKPNKDGLKNKANYESPGKIFLRMKEKVLRDKQEQPSRNSSLLEPQKSGNNETFTPNRVEKKKLQHTYLCEEKENNKSFQSDDSSLRASVQGVPLESSNNDIFLPVKQKIQCQQEKKAPLHNLTYELPTLNQEQENFLAVEARNKTLTRAQLAKQIFHSKESIVATTKSKKDTFVLESVDSADEQFQNTNAETLSTNCIPIKNGSLLMVSDSERTTEGTSQQKVKEGNGKTVPGETGLPGSMKDTCKIVLATPRLHITIPRRSKRNISKLSPPRIFQTVTNGLKKNQVVQLQEWMIKSINNNTAICVEGKLIDVTNIYWHSNVIIERIEHNKLRTISGNVYILKGMIDQISMKEAGYPNYLIRKFMFGFPENWKEHIDNFLEQLRDGVCHVGQTGLELLATSDPPVSASQSVGITGMSHCAWPEAGEKNREKTKQKQKTGRSVRDIRKSMKNDARENQTDTAQRATTTYDFDCDNLELKSNKHSESPGATELNMCHSNCQNKPTLRFPDDQVNNTIQNGGGDDLSNQELIGKKEYKMSSKKLKIGERTNERIIKSQKQETTEELDVSIDILTSREQFFSDEERKYMAINQKKAYILVTPLKSRKVIEQRCMRYNLSAGTIKAVTDFVIPECQKKSPISKSMGTLENTFEGHKSKNKEDCDERDLLTVNRKIKISNLEKEQMLTSDFKKNTRLLPKLKKIENQVAMSFYKHQSSPDLSSEESETEKEIKRKAEVKKTKAGNTKEAVVHLRKSTRNTSNIPVILEPETEESENEFYIKQKKARPSVKETLQKSGVRKEFPITEAVGSDKTNRHPLECLPGLIQDKEWNEKELQKLHCAFASLPKHKPGFWSEVAAAVGSRSPEECQRKYMENPRGKGSQKHVTKKKPANSKGQNGKRGDADQKQTIKITAKVGTLKRKQQMREFLEQLPKDDHDDFFSTTPLQHQRILLPSFQDSEDDDDILPNMDKNPTTPSSVIFPLVKTPQCQHVSPGMLGSINRNDCDKYVFRMQKYHKSNGGIVWGNIKKKLVETDFSTPTPRRKTPFNTDLGENSGIGKLFTNAVESLDEEEKDYYFSNSDSA

SEQ ID NO: 884028 - protein, 1151 aa, Homo sapiens
MIATPLKHSRIYLPPEASSQRRNLPMDAIFFDSIPSGTLTPVKDLVKYQNSSLKLNDHKKNQFLKMTTFNNKNIFQSTMLTEATTSNSSLDISAIKPNKDGLKNKANYESPGKIFLRMKEKVLRDKQEQPSRNSSLLEPQKSGNNETFTPNRVEKKKLQHTYLCEEKENNKSFQSDDSSLRASVQGVPLESSNNDIFLPVKQKIQCQQEKKAPLHNLTYELPTLNQEQENFLAVEARNKTLTRAQLAKQIFHSKESIVATTKSKKDTFVLESVDSADEQFQNTNAETLSTNCIPIKNGSLLMVSDSERTTEGTSQQKVKEGNGKTVPGETGLPGSMKDTCKIVLATPRLHITIPRRSKRNISKLSPPRIFQTVTNGLKKNQVVQLQEWMIKSINNNTAICVEGKLIDVTNIYWHSNVIIERIEHNKLRTISGNVYILKGMIDQISMKEAGYPNYLIRKFMFGFPENWKEHIDNFLEQLRDGVCHVGQTGLELLATSDPPVSASQSVGITGMSHCAWPEAGEKNREKTKQKQKTGRSVRDIRKSMKNDARENQTDTAQRATTTYDFDCDNLELKSNKHSESPGATELNMCHSNCQNKPTLRFPDDQVNNTIQNGGGDDLSNQELIGKKEYKMSSKKLKIGERTNERIIKSQKQETTEELDVSIDILTSREQFFSDEERKYMAINQKKAYILVTPLKSRKVIEQRCMRYNLSAGTIKAVTDFVIPECQKKSPISKSMGTLENTFEGHKSKNKEDCDERDLLTVNRKIKISNLEKEQMLTSDFKKNTRLLPKLKKIENQVAMSFYKHQSSPDLSSEESETEKEIKRKAEVKKTKAGNTKEAVVHLRKSTRNTSNIPVILEPETEESENEFYIKQKKARPSVKETLQKSGVRKEFPITEAVGSDKTNRHPLECLPGLIQDKEWNEKELQKLHCAFASLPKHKPGFWSEVAAAVGSRSPEECQRKYMENPRGKGSQKHVTKKKPANSKGQNGKRGDADQKQTIKITAKVGTLKRKQQMREFLEQLPKDDHDDFFSTTPLQHQRILLPSFQDSEDDDDILPNMDKNPTTPSSVIFPLVKTPQCQHVSPGMLGSINRNDCDKYVFRMQKYHKSNGGIVWGNIKKKLVETDFSTPTPRRKTPFNTGNTLTAFFCGSVLL

SEQ ID NO: 884029 - protein, 1090 aa, Homo sapiens
MIATPLKHSRIYLPPEASSQRRNLPMDAIFFDSIPSGTLTPVKDLVKYQNSSLKLNDHKKNQFLKMTTFNNKNIFQSTMLTEATTSNSSLDISAIKPNKDGLKNKANYESPGKIFLRMKEKVLRDKQEQPSRNSSLLEPQKSGNNETFTPNRVEKKKLQHTYLCEEKENNKSFQSDDSSLRASVQGVPLESSNNDIFLPVKQKIQCQQEKKAPLHNLTYELPTLNQEQENFLAVEARNKTLTRAQLAKQIFHSKESIVATTKSKKDTFVLESVDSADEQFQNTNAETLSTNCIPIKNGSLLMVSDSERTTEGTSQQKVKEGNGKTVPGETGLPGSMKDTCKIVLATPRLHITIPRRSKRNISKLSPPRIFQTVTNGLKKNQVVQLQEWMIKSINNNTAICVEGKLIDVTNIYWHSNVIIERIEHNKLRTISGNVYILKGMIDQISMKEAGYPNYLIRKFMFGFPENWKEHIDNFLEQLRDGVCHVGQTGLELLATSDPPVSASQSVGITGMSHCAWPEAGEKNREKTKQKQKTGRSVRDIRKSMKNDARENQTDTAQRATTTYDFDCDNLELKSNKHSESPGATELNMCHSNCQNKPTLRFPDDQVNNTIQNGGGDDLSNQELIGKKEYKMSSKKLKIGERTNERIIKSQKQETTEELDVSIDILTSREQFFSDEERKYMAINQKKAYILVTPLKSRKVIEQRCMRYNLSAGTIKAVTDFVIPECQKKSPISKSMGTLENTFEGHKSKNKEDCDERDLLTVNRKIKISNLEKEQMLTSDFKKNTRLLPKLKKIENQVAMSFYKHQSSPDLSSEESETEKEIKRKAEVKKTKAGNTKEAVVHLRKSTRNTSNIPVILEPETEESENEFYIKQKKARPSVKETLQKSGVRKEFPITEAVGSDKTNRHPLECLPGLIQDKEWNEKELQKLHCAFASLPKHKPGFWSEVAAAVGSRSPEECQRKYMENPRGKGSQKHVTKKKPANSKGQNGKRGDADQKQTIKITAKVGTLKRKQQMREFLEQLPKDDHDDFFSTTPLQHQRILLPSFQDSEDDDDILPNMDKNPTTPSSVIFPLVKTPQCQHVSPGMLGSINR

SEQ ID NO: 884030 - protein, 1171 aa, Homo sapiens; identical to SEQ ID NO: 884027

SEQ ID NO: 884031 - protein, 1132 aa, Homo sapiens; identical to SEQ ID NO: 884026

SEQ ID NO: 884032 - protein, 729 aa, Homo sapiens
IRHEELRKPKQETPKKQVVHLRKSTRNTSNIPVILEPETEESENEFYIKQKKIENQVAMSFYKHQSSPDLSSEESEAGEKNREKTKQKQKTGRSVRDIRKSMKNDARENQTDTAQRATTTYDFDCDNLELKSNKHSESPGATELNMCHSNCQNKPTLRFPDDQVNNTIQNGGGDDLSNQELIGKKEYKMSSKKLKIGERTNERIIKSQKQETTEELDVSIDILTSREQFFSDEERKYMAINQKKAYILVTPLKSRKVIEQRCMRYNLSAGTIKAVTDFVIPECQKKSPISKSMGTLENTFEGHKSKNKEDCDERDLLTVNRKIKISNLEKEQMLTSDFKKNTRLLPKLKKIENQVAMSFYKHQSSPDLSSEESETEKEIKRKAEVKKTKAGNTKEAVVHLRKSTRNTSNIPVILEPETEESENEFYIKQKKARPSVKETLQKSGVRKEFPITEAVGSDKTNRHPLECLPGLIQDKEWNEKELQKLHCAFASLPKHKPGFWSEVAAAVGSRSPEECQRKYMENPRGKGSQKHVTKKKPANSKGQNGKRGDADQKQTIKITAKVGTLKRKQQMREFLEQLPKDDHDDFFSTTPLQHQRILLPSFQDSEDDDDILPNMDKNPTTPSSVIFPLVKTPQCQHVSPGMLGSINRNDCDKYVFRMQKYHKSNGGIVWGNIKKKLVETDFSTPTPRRKTPFNTDLGENSGIGKLFTNAVESLDEEEKDYYFSNSDSA

SEQ ID NO: 884033 - protein, 668 aa, Homo sapiens
ESVLRKNKIIVFKGLAGEKNREKTKQKQKTGRSVRDIRKSMKNDARENQTDTAQRATTTYDFDCDNLELKSNKHSESPGATELNMCHSNCQNKPTLRFPDDQVNNTIQNGGGDDLSNQELIGKKEYKMSSKKLKIGERTNERIIKSQKQETTEELDVSIDILTSREQFFSDEERKYMAINQKKAYILVTPLKSRKVIEQRCMRYNLSAGTIKAVTDFVIPECQKKSPISKSMGTLENTFEGHKSKNKEDCDERDLLTVNRKIKISNLEKEQMLTSDFKKNTRLLPKLKKIENQVAMSFYKHQSSPDLSSEESETEKEIKRKAEVKKTKAGNTKEAVVHLRKSTRNTSNIPVILEPETEESENEFYIKQKKARPSVKETLQKSGVRKEFPITEAVGSDKTNRHPLECLPGLIQDKEWNEKELQKLHCAFASLPKHKPGFWSEVAAAVGSRSPEECQRKYMENPRGKGSQKHVTKKKPANSKGQNGKRGDADQKQTIKITAKVGTLKRKQQMREFLEQLPKDDHDDFFSTTPLQHQRILLPSFQDSEDDDDILPNMDKNPTTPSSVIFPLVKTPQCQHVSPGMLGSINRNDCDKYVFRMQKYHKSNGGIVWGNIKKKLVETDFSTPTPRRKTPFNTDLGENSGIGKLFTNAVESLDEEEKDYYFSNSDSA

SEQ ID NO: 884034 - protein, 239 aa, Homo sapiens
  misc_feature (3)..(3): Xaa can be any naturally occurring amino acid
EDXRKAHCNTSGSNGGTFDKEIKDKGLLKAAKKEVTHVKGILNKRKPANSKGQNGKRGDADQKQTIKITAKVGTLKRKQQMREFLEQLPKDDHDDFFSTTPLQHQRILLPSFQDSEDDDDILPNMDKNPTTPSSVIFPLVKTPQCQHVSPGMLGSINRNDCDKYVFRMQKYHKSNGGIVWGNIKKKLVETDFSTPTPRRKTPFNTDLGENSGIGKLFTNAVESLDEEEKDYYFSNSDSA

SEQ ID NO: 884035 - protein, 323 aa, Homo sapiens
YASLDKEDLLSPINQNTLQRSSSVRSMVSSATYGGSDDYIGLALPVDINDIFQVKDIPYFQTKNIPPHDDRGARAFAHDAGGLPSGTGGLVKNSFHLLRQQMSLTEIMNSIHSDASLFLESTEDTGLQEHTDDNCLYCVCIEILGFQPSNQLSAICSHSDFQDIPYSDWCEQTIHNPLEVVPSKFSGISGCSDGVSQEGSASSTKSTELLLGVKTIPDDTPMCRILLRREVLRLVINLSSSVSTKCHETGLLTIKEKYPQTFDDICLYSEVSHLLSHCTFRLPCRRFIQELFQDVQFLQMHEEAEAVLATPPKQPIVDTSAES

SEQ ID NO: 884036 - protein, 227 aa, Homo sapiens
YASLDKEDLLSPINQNTLQRSSSVRSMVSSATYGGSDDYIGLALPVDINDIFQVKDIPYFQTKNIPPHDDRGARAFAHDAGGLPSGTGGLVKNSFHLLRQQMSLTEIMNSIHSDASLFLESTEDTGLQEHTDDNCLYCVCIEILGFQPSNQLSAICSHSDFQDIPYSDWCEQTIHNPLEVVPSKFSGISGCSDGVSQEGSASRTKPDWSQGLNNPMVTRGGLRKRLR

SEQ ID NO: 884037 - protein, 323 aa, Homo sapiens; identical to SEQ ID NO: 884035

SEQ ID NO: 884038 - protein, 406 aa, Homo sapiens
MLFHSLSGPEVHGVIDEMDRRAKSEAPAISSAIDRGDTETTMPSISSDRAALCAGCGGKISDRYYLLAVDKQWHMRCLKCCECKLNLESELTCFSKDGSIYCKEDYYRRFSVQRCARCHLGISASEMVMRARDLVYHLNCFTCTTCNKMLTTGDHFGMKDSLVYCRLHFEALLQGEYPAHFNHADVAAAAAAAAAAKSAGLGAAGANPLGLPYYNGVGTVQKGRPRKRKSPGPGADLAAYNAALSCNENDAEHLDRDQPYPSSQKTKRMRTSFKHHQLRTMKSYFAINHNPDAKDLKQLAQKTGLTKRVLQVWFQNARAKFRRNLLRQENTGVDKSTDAALQTGTPSGPASELSNASLSPSSTPTTLTDLTSPTLPTVTSVLTSVPGNLEGHEPHSPSQTTLTNLF

SEQ ID NO: 884039 - protein, 422 aa, Homo sapiens
MLFHSLSGPEVHGVIDEMDRRAKSEAPAISSAIDRGDTETTMPSISSDRAALCAGCGGKISDRYYLLAVDKQWHMRCLKCCECKLNLESELTCFSKDGSIYCKEDYYRRFSVQRCARCHLGISASEMVMRARDLVYHLNCFTCTTCNKMLTTGDHFGMKDSLVYCRLHFEALLQGEYPAHFNHADVAAAAAAAAAAKSAGLGAAGANPLGLPYYNGVGTVQKGRPRKRKSPGPGADLAAYNAALSCNENDAEHLDRDQPYPSSQKTKRMRTSFKHHQLRTMKSYFAINHNPDAKDLKQLAQKTGLTKRVLQASLRFIFCLPDSPGSKVWFQNARAKFRRNLLRQENTGVDKSTDAALQTGTPSGPASELSNASLSPSSTPTTLTDLTSPTLPTVTSVLTSVPGNLEGHEPHSPSQTTLTNLF

SEQ ID NO: 884040 - protein, 389 aa, Homo sapiens
MDRRAKSEAPAISSAIDRGDTETTMPSISSDRAALCAGCGGKISDRYYLLAVDKQWHMRCLKCCECKLNLESELTCFSKDGSIYCKEDYYRRFSVQRCARCHLGISASEMVMRARDLVYHLNCFTCTTCNKMLTTGDHFGMKDSLVYCRLHFEALLQGEYPAHFNHADVAAAAAAAAAAKSAGLGAAGANPLGLPYYNGVGTVQKGRPRKRKSPGPGADLAAYNAALSCNENDAEHLDRDQPYPSSQKTKRMRTSFKHHQLRTMKSYFAINHNPDAKDLKQLAQKTGLTKRVLQVWFQNARAKFRRNLLRQENTGVDKSTDAALQTGTPSGPASELSNASLSPSSTPTTLTDLTSPTLPTVTSVLTSVPGNLEGHEPHSPSQTTLTNLF

SEQ ID NO: 884041 - protein, 622 aa, Homo sapiens
GCLEDHLRRCSASEGPLKWKTALVLMANSSFIGDHVHGAPHAVMPEVEFPDQFFTVLTMDHELVTLRDVVINFSQEEWEYLDSAQRNLYWDVMMENYSNLLSLGLHWDRYRYNGDQDQYRPCSHGIDILVLEMYNKHNLESRNETKHLSVGKDIIQNTGSQWEVMESSKLCGLEGSIFRNDWQSKSKIDVQGPEVGYFSQMKIISENVPSYKTHESLTLPRRTHDSEKPYEYKEYEKVFSCDLEFDEYQKIHTGGKNYECNQCWKTFGIDNSSMLQLNIHTGVKPCKYMEYGNTCSFYKDFNVYQKIHNEKFYKCKEYRRTFERVGKVTPLQRVHDGEKHFECSFCGKSFRVHAQLTRHQKIHTDEKTYKCMECGKDFRFHSQLTEHQRIHTGEKPYKCMHCEKVFRISSQLIEHQRIHTGEKPYACKECGKAFGVCRELARHQRIHTGKKPYECKACGKVFRNSSSLTRHQRIHTGEKPYKCKECEKAFGVGSELTRHERIHSGQKPYECKECGKFFRLTSALIQHQRIHSGEKPYECKVCGKAFRHSSALTEHQRIHTGEKPYECKACGKAFRHSSSFTKHQRIHTDDKPYECKECGNSFSVVGHLTCQPKIYTGEKSFD

SEQ ID NO: 884042 - protein, 435 aa, Homo sapiens
GCLEDHLRRCSASEGPLKWKTALVLMANSSFIGDHVHGAPHAVMPEVEFPDQFFTVLTMDHELVTLRDVVINFSQEEWEYLDSAQRNLYWDVMMENYSNLLSLGLHWDRYRYNGDQDQYRPCSHGIDILVLEMYNKHNLESRNETKHLSVGKDIIQNTGSQWEVMESSKLCGLEGSIFRNDWQSKSKIDVQGPEVGYFSQMKIISENVPSYKTHESLTLPRRTHDSEKPYEYKEYEKVFSCDLEFDEYQKIHTGGKNYECNQCWKTFGIDNSSMLQLNIHTGVKPCKYMEYGNTCSFYKDFNVYQKIHNEKFYKCKEYRRTFERVGKVTPLQRVHDGEKHFECSFCGKSFRVHAQLTRHQKIHTDEKTYKCMECGKDFRFHSQLTEHQRIHTGRLNNLLLEEAEKTMEGKWKLLTYSFPHAGVHLYLRFSCRKKS

SEQ ID NO: 884043 - protein, 458 aa, Homo sapiens
MESSKLCGLEGSIFRNDWQSKSKIDVQGPEVGYFSQMKIISENVPSYKTHESLTLPRRTHDSEKPYEYKEYEKVFSCDLEFDEYQKIHTGGKNYECNQCWKTFGIDNSSMLQLNIHTGVKPCKYMEYGNTCSFYKDFNVYQKIHNEKFYKCKEYRRTFERVGKVTPLQRVHDGEKHFECSFCGKSFRVHAQLTRHQKIHTDEKTYKCMECGKDFRFHSQLTEHQRIHTGEKPYKCMHCEKVFRISSQLIEHQRIHTGEKPYACKECGKAFGVCRELARHQRIHTGKKPYECKACGKVFRNSSSLTRHQRIHTGEKPYKCKECEKAFGVGSELTRHERIHSGQKPYECKECGKFFRLTSALIQHQRIHSGEKPYECKVCGKAFRHSSALTEHQRIHTGEKPYECKACGKAFRHSSSFTKHQRIHTDDKPYECKECGNSFSVVGHLTCQPKIYTGEKSFD

SEQ ID NO: 884044 - protein, 849 aa, Homo sapiens
LSPSSFKAECSEDVENLNAPPAEAGYDQNKTDFDETSSINTAISDATTGDEGNTEMESTTGSSGDVKPALSPKEPKTLDTLPKPATTPTTEVCDDKFLFSLTSPSIHFNDKDGDHDQSFYITDDPDDNADRSETSSIADPSSPNPFGSSNPFKSKSNDRPGHKRFRTQMSNLQLKVLKACFSDYRTPTMQECEMLGNEIGLPKRVVQVWFQNARAKEKKFKINIGKPFMINQGGTEGTKPECTLCGVKYSARLSIRDHIFSKQHISKVRETVGSQLDREKDYLAPTTVRQLMAQQELDRIKKASDVLGLTVQQPGMMDSSSLHGISLPTAYPGLPGLPPVLLPGMNGPSSLPGFPQNSNTLTPPGAGMLGFPTSATSSPALSLSSAPTKPLLQTPPPPPPPPPPPPSSSLSGQQTEQQNKESEKKQTKPNKVKKNQEEELEATKPEKHPKKEEKISSALSVVGKVVGETHVDPIQLQALQNAIAGDPASFIGGQFLPYFIPGFASYFTPQLPGTVQGGYFPPVCGMESLFPYGPTMPQTLAGLSPGALLQQYQQYQQNLQESLQKQQKQQQEQQQKPVQAKTSKVESDQPQNSNDASETKEDKSTATESTKEEPQLESKSADFSDTYVVPFVKYEFICRKCQMMFTDEDAAVNHQKSFCYFGQPLIDPQETVLRVPVSKYQCLACDVAISGNEALSQHLQSSLHKEKTIKQAMRNAKEHVRLLPHSVCSPNPNTTSTSQSAASSNNTYPHLSCFSMKSWPNILFQASARRAASPPSSPPSLSLPSTVTSSLCSTSGVQTSLPTESCSDESDSELSQKLEDLDNSLEVKAKPASGLDGNFNSIRMDMFSV

SEQ ID NO: 884045 - protein, 32 aa, Homo sapiens
LCTSVWQAEVHLFLSLWSKFSCKGITDNQTFV

SEQ ID NO: 884046 - protein, 151 aa, Homo sapiens
SRSDPESKKEQEYSSGFLQTTADEFCFYYARKDGGLCFPDFPRKQVRGPASNYLDQMEEYDKVEEISRKHKHNCFCIQEVVSGLRQPVGALHSGDGSQRLFILEKEGYVKILTPEGEIFKEPYLDIHKLVQSGIKDLLILFIIKKITWLSL

SEQ ID NO: 884047 - protein, 120 aa, Homo sapiens
MRGCVRSCSRRQRRPQHHLEPSAGPASACPAAAVAVSVPATVPPKQLPLHGQVNICGCPLLFFLLFQLLLLLPLPSRSRKPPTQLTLAQLQTVSSAQLYLAPRAPLRHWTHRRVSIDRSV

SEQ ID NO: 884048 - protein, 697 aa, Homo sapiens [sequence omitted]

SEQ ID NO: 884049 - protein, 697 aa, Homo sapiens [sequence omitted]

SEQ ID NO: 884050 - protein, 679 aa, Homo sapiens [sequence omitted]

SEQ ID NO: 884051 - protein, 386 aa, Homo sapiens
MLKMLSFKLLLLAVALGFFEGDAKFGERNEGSGARRRRCLNGNPPKRLKRRDRRMMSQLELLSGGEMLCGGFYPRLSCCLRSDSPGLGRLENKIFSVTNNTECGKLLEEIKCALCSPHSQSLFHSPEREVLERDLVLPLLCKDYCKEFFYTCRGHIPGFLQTTADEFCFYYARKDGGLCFPDFPRKQVRGPASNYLDQMEEYDKVEEISRKHKHNCFCIQEVVSGLRQPVGALHSGDGSQRLFILEKEGYVKILTPEGEIFKEPYLDIHKLVQSGIKGGDERGLLSLAFHPNYKKNGKLYVSYTTNQERWAIGPHDHILRVVEYTVSRKNPHQVDLRTARVFLEVAELHRKHLGGQLLFGPDGFLYIILGDGMITLDDMEEMDGLR

SEQ ID NO: 884052 - protein, 327 aa, Homo sapiens
MLSFKLLLLAVALGFFEGDAKFGERNEGSGARRRRCLNGNPPKRLKRRDRRMMSQLELLSGGEMLCGGFYPRLSCCLRSDSPGLGRLENKIFSVTNNTECGKLLEEIKCALCSPHSQSLFHSPEREVLERDLVLPLLCKDYCKEFFYTCRGHIPGFLQTTADEFCFYYARKDGGLCFPDFPRKQVRGPASNYLDQMEEYDKVEEISRKHKHNCFCIQEVVSGLRQPVGALHSGDGSQRLFILEKEGYVKILTPEGEIFKEPYLDIHKLVQSGIKGGDERGLLSLAFHPNYKKNGKLYVSYTTNQERWAIGPHDHILRVVEYTVSRYH

SEQ ID NO: 884053 - protein, 283 aa, Homo sapiens
MLSFKLLLLAVALGFFEGDAKFGERNEGSGARRRRCLNGNPPKRLKRRDRRMMSQLELLSGGEMLCGGFYPRLSCCLRSDSPGLGRLENKIFSVTNNTECGKLLEEIKCALCSPHSQSLFHSPEREVLERDLVLPLLCKDYCKEFFYTCRGHIPGFLQTTADEFCFYYARKDGGLCFPDFPRKQVRGPASNYLDQMEEYDKVEEISRKHKHNCFCIQEVVSGLRQPVGALHSGDGSQRLFILEKEGYVKILTPEGEIFKEPYLDIHKLVQSGIKVGFLNFKKK

SEQ ID NO: 884054 - protein, 141 aa, Homo sapiens
MRGCVRSCSRRQRRPQHHLEPSAGPASACPAAAVAVSVPATVPPKQLPLHGQVNICGCPLLFFLLFQLLLLLPLPSRSRKPPTQLTLAQLQTVSSAQLYLAPRAPLRHWTHRRVFYFLQSCIAVHIFVPATSLCLWMTARG

SEQ ID NO: 884055 - protein, 293 aa, Homo sapiens
MLKMLSFKLLLLAVALGFFEGDAKFGERNEGSGARRRRCLNGNPPKRLKRRDRRMMSQLELLSGGEMLCGGFYPRLSCCLRSDSPGLGRLENKIFSVTNNTECGKLLEEIKCALCSPHSQSLFHSPEREVLERDLVLPLLCKDYCKEFFYTCRGHIPGFLQTTADEFCFYYARKDGGLCFPDFPRKQVRGPASNYLDQMEEYDKVEEISRKHKHNCFCIQEVVSGLRQPVGALHSGDGSQRLFILEKEGYVKILTPEGEIFKEPYLDIHKLVQSGIKDLLILFIIKKITWLSL

SEQ ID NO: 884056 - protein, 144 aa, Homo sapiens
RVSHHHVFIKTETVLGFLQTTADEFCFYYARKDGGLCFPDFPRKQVRGPASNYLDQMEEYDKVEEISRKHKHNCFCIQEVVSGLRQPVGALHSGDGSQRLFILEKEGYVKILTPEGEIFKEPYLDIHKLVQSGIKVGFLNFKKK

SEQ ID NO: 884057 - protein, 144 aa, Homo sapiens
SDLNVFIATGKKEDSGFLQTTADEFCFYYARKDGGLCFPDFPRKQVRGPASNYLDQMEEYDKVEEISRKHKHNCFCIQEVVSGLRQPVGALHSGDGSQRLFILEKEGYVKILTPEGEIFKEPYLDIHKLVQSGIKVGFLNFKKK

SEQ ID NO: 884058 - protein, 144 aa, Homo sapiens
PAPDTNPKRKPAESSGFLQTTADEFCFYYARKDGGLCFPDFPRKQVRGPASNYLDQMEEYDKVEEISRKHKHNCFCIQEVVSGLRQPVGALHSGDGSQRLFILEKEGYVKILTPEGEIFKEPYLDIHKLVQSGIKVGFLNFKKK

SEQ ID NO: 884059 - protein, 210 aa, Homo sapiens
MSRMFCQAARVDLTLDPDTAHPALMLSPDRRGVRLAERRQEVADHPKRFSADCCVLGAQGFRSGRHYWEVEVGGRRGWAVGAARESTHHKEKVGPGGSSVGSGDASSSRHHHRRRRLHLPQQPLLQREVWCVGTNGKRYQAQSSTEQTLLSPSEKPRRFGVYLDYEAGRLGFYNAETLAHVHTFSAAFLGERVFPFFRVLSKGTRIKLCP

SEQ ID NO: 884060 - protein, 630 aa, Homo sapiens
MAAVAMTPNPVQTLQEEAVCAICLDYFTDPVSIGCGHNFCRVCVTQLWGGEDEEDRDELDREEEEEDGEEEEVEAVGAGAGWDTPMRDEDYEGDMEEEVEEEEEGVFWTSGMSRSSWDNMDYVWEEEDEEEDLDYYLGDMEEEDLRGEDEEDEEEVLEEVEEEDLDPVTPLPPPPAPRRCFTCPQCRKSFPRRSFRPNLQLANMVQVIRQMHPTPGRGSRVTDQGICPKHQEALKLFCEVDEEAICVVCRESRSHKQHSVVPLEEVVQEYKAKLQGHVEPLRKHLEAVQKMKAKEERRVTELKSQMKSELAAVASEFGRLTRFLAEEQAGLERRLREMHEAQLGRAGAAASRLAEQAAQLSRLLAEAQERSQQGGLRLLQDIKETFNRCEEVQLQPPEVWSPDPCQPHSHDFLTDAIVRKMSRMFCQAARVDLTLDPDTAHPALMLSPDRRGVRLAERRQEVADHPKRFSADCCVLGAQGFRSGRHYWEVEVGGRRGWAVGAARESTHHKEKVGPGGSSVGSGDASSSRHHHRRRRLHLPQQPLLQREVWCVGTNGKRYQAQSSTEQTLLSPSEKPRRFGVYLDYEAGRLGFYNAETLAHVHTFSAAFLGERVFPFFRVLSKGTRIKLCP

SEQ ID NO: 884061 - protein, 259 aa, Homo sapiens
PSGNIVVPPPARSPSSRCEEVQLQPPEVWSPDPCQPHSHDFLTDAIVRKMSRMFCQAARVDLTLDPDTAHPALMLSPDRRGVRLAERRQEVADHPKRFSADCCVLGAQGFRSGRHYWEVEVGGRRGWAVGAARESTHHKEKVGPGGSSVGSGDASSSRHHHRRRRLHLPQQPLLQREVWCVGTNGKRYQAQSSTEQTLLSPSEKPRRFGVYLDYEAGRLGFYNAETLAHVHTFSAAFLGERVFPFFRVLSKGTRIKLCP

SEQ ID NO: 884062 - protein, 381 aa, Homo sapiens
MAAVAMTPNPVQTLQEEAVCAICLDYFTDPVSIGCGHNFCRVCVTQLWGGEDEEDRDELDREEEEEDGEEEEVEAVGAGAGWDTPMRDEDYEGDMEEEVEEEEEGVFWTSGMSRSSWDNMDYVWEEEDEEEDLDYYLGDMEEEDLRGEDEEDEEEVLEEVEEEDLDPVTPLPPPPAPRRCFTCPQCRKSFPRRSFRPNLQLANMVQVIRQMHPTPGRGSRVTDQGICPKHQEALKLFCEVDEEAICVVCRESRSHKQHSVVPLEEVVQEYKAKLQGHVEPLRKHLEAVQKMKAKEERRVTELKSQMKSELAAVASEFGRLTRFLAEEQAGLERRLREMHEAQLGRAGAAASRLAEQAAQLSRLLAEAQERSQQGGLRLLQV

SEQ ID NO: 884063 - protein, 630 aa, Homo sapiens; identical to SEQ ID NO: 884060

SEQ ID NO: 884064 - protein, 325 aa, Homo sapiens
MAAVAMTPNPVQTLQEEAVCAICLDYFTDPVSIGCGHNFCRVCVTQLWGGEDEEDRDELDREEEEEDGEEEEVEAVGAGAGWDTPMRDEDYEGDMEEEVEEEEEGVFWTSGMSRSSWDNMDYVWEEEDEEEDLDYYLGDMEEEDLRGEDEEDEEEVLEEVEEEDLDPVTPLPPPPAPRRCFTCPQCRKSFPRRSFRPNLQLANMVQVIRQMHPTPGRGSRVTDQGICPKHQEALKLFCEVDEEAICVVCRESRSHKQHSVVPLEEVVQEYKAKLQGHVEPLRKHLEAVQKMKAKEEEASDRTEEPDEVRAGSGGLGVWATDTVSG

SEQ ID NO: 884065 - protein, 511 aa, Homo sapiens
MAAVAMTPNPVQTLQEEAVCAICLDYFTDPVSIGCGHNFCRVCVTQLWGGEDEEDRDELDREEEEEDGEEEEVEAVGAGAGWDTPMRDEDYEGDMEEEVEEEEEGVFWTSGMSRSSWDNMDYVWEEEDEEEDLDYYLGDMEEEDLRGEDEEDEEEVLEEVEEEDLDPVTPLPPPPAPRRCFTCPQCRKSFPRRSFRPNLQLANMVQVIRQMHPTPGRGSRVTDQGICPKHQEALKLFCEVDEEAICVVCRESRSHKQHSVVPLEEVVQEYKAKLQGHVEPLRKHLEAVQKMKAKEERRVTELKSQMKSELAAVASEFGRLTRFLAEEQAGLERRLREMHEAQLGRAGAAASRLAEQAAQLSRLLAEAQERSQQGGLRLLQDIKETFNRCEEVQLQPPEVWSPDPCQPHSHDFLTDAIVRKMSRMFCQAARVDLTLDPDTAHPALMLSPDRRGVRLAERRQEVADHPKRFSADCCVLGAQGFRSGRHYWETLLASSSAFSHLLCLSNRPARI

SEQ ID NO: 884066 - protein, 630 aa, Homo sapiens; identical to SEQ ID NO: 884060

SEQ ID NO: 884067 - protein, 494 aa, Homo sapiens [sequence omitted]

SEQ ID NO: 884068 - protein, 134 aa, Homo sapiens
TPLFNPEVAKYLKVPQDPLKFYKKIYFCHSCQLYLPSTEFSVSSTSRRIYRCRNCINLQNEAQKRESFLKYKCLLQQLYYTEADYEDDSKIAFLMQLQDIQYLTENIWASQSVLSACDNLSDLVMVRWNKSLEW

SEQ ID NO: 884069 - protein, 277 aa, Homo sapiens
MDEEQARGPLEMRSTQEQLMCWQGASKLVNLCEGSPDLPVSFSPTLLSLSLVRTGVTQLKAGSFLRIPSLHLLLFTSNSFSVIEDDAFAGLSHLQYLFIEDNEIGSISKNALRGLRSLTHLSLANNHLETLPRFLFRGLDTLTHVDLRGNPFQCDCRVLWLLQWMPTVNASVGTGACAGPASLSHMQLHHLDPKTFKCRAIELSWFQTVGESALSVEPFSYQGEPHIVLAQPFAGRCLILSWDYSLQRFRPEEELPAGSVVSCKPLVLGPSLFVLAA

SEQ ID NO: 884070 - protein, 261 aa, Homo sapiens
MGGAGILLLLLAGAGVVVAWRPPKGKCPLRCSCSKDSALCEGSPDLPVSFSPTLLSLSLVRTGVTQLKAGSFLRIPSLHLLLFTSNSFSVIEDDAFAGLSHLQYLFIEDNEIGSISKNALRGLRSLTHLSLANNHLETLPRFLFRGLDTLTHVDLRGNPFQCDCRVLWLLQWMPTVNASVGTGACAGPASLSHMQLHHLDPKTFKCRAIGGGLSRWGGRREIWGKGCQGQEARLTPCPAISRSGKTLSKQHCLPEPQFSHL

SEQ ID NO: 884071 - protein, 285 aa, Homo sapiens
MGGAGILLLLLAGAGVVVAWRPPKGKCPLRCSCSKDSALCEGSPDLPVSFSPTLLSLSLVRTGVTQLKAGSFLRIPSLHLLLFTSNSFSVIEDDAFAGLSHLQYLFIEDNEIGSISKNALRGLRSLTHLSLANNHLETLPRFLFRGLDTLTHVDLRGNPFQCDCRVLWLLQWMPTVNASVGTGACAGPASLSHMQLHHLDPKTFKCRAIELSWFQTVGESALSVEPFSYQGEPHIVLAQPFAGRCLILSWDYSLQRFRPEEELPAGSVVSCKPLVLGPSLFVLAA

SEQ ID NO: 884072 - protein, 251 aa, Homo sapiens
DAQDEEDPGDDEASDLQGLVSVSSRAGKLCEGSPDLPVSFSPTLLSLSLVRTGVTQLKAGSFLRIPSLHLLLFTSNSFSVIEDDAFAGLSHLQYLFIEDNEIGSISKNALRGLRSLTHLSLANNHLETLPRFLFRGLDTLTHVDLRGNPFQCDCRVLWLLQWMPTVNASVGTGACAGPASLSHMQLHHLDPKTFKCRAIGGGLSRWGGRREIWGKGCQGQEARLTPCPAISRSGKTLSKQHCLPEPQFSHL

SEQ ID NO: 884073 - protein, 174 aa, Homo sapiens
QKSETRNVSNDQETTLNYFIEDNEIGSISKNALRGLRSLTHLSLANNHLETLPRFLFRGLDTLTHVDLRGNPFQCDCRVLWLLQWMPTVNASVGTGACAGPASLSHMQLHHLDPKTFKCRAIGGGLSRWGGRREIWGKGCQGQEARLTPCPAISRSGKTLSKQHCLPEPQFSHL

SEQ ID NO: 884074 - protein, 766 aa, Homo sapiens
MRLWKAVVVTLAFMSVDICVTTAIYVFSHLDRSLLEDIRHFNIFDSVLDLWAACLYRSCLLLGATIGVAKNSALGPRRLRASWLVITLVCLFVGIYAMVKLLLFSEVRRPIRDPWFWALFVWTYISLGASFLLWWLLSTVRPGTQALEPGAATEAEGFPGSGRPPPEQASGATLQKLLSYTKPDVAFLVAASFFLIVAALGETFLPYYTGRAIDGIVIQKSMDQFSTAVVIVCLLAIGSSFAAGIRGGIFTLIFARLNIRLRNCLFRSLVSQETSFFDENRTGDLISRLTSDTTMVSDLVSQNINVFLRNTVKVTGVVVFMFSLSWQLSLVTFMGFPIIMMVSNIYGKYYKRLSKEVQNALARASNTAEETISAMKTVRSFANEEEEAEVYLRKLQQVYKLNRKEAAAYMYYVWGSGLTLLVVQVSILYYGGHLVISGQMTSGNLIAFIIYEFVLGDCMESVGSVYSGLMQGVGAAEKVFEFIDRQPTMVHDGSLAPDHLEGRVDFENVTFTYRTRPHTQVLQNVSFSLSPGKVTALVGPSGSGKSSCVNILENFYPLEGGRVLLDGKPISAYDHKYLHRVISLVSQEPVLFARSITDNISYGLPTVPFEMVVEAAQKANAHGFIMELQDGYSTETGEKGAQLSGGQKQRVAMARALVRNPPVLILDEATSALDAESEYLIQQAIHGNLQKHTVLIIAHRLSTVEHAHLIVVLDKGRVVQQGTHQQLLAQGGLYAKLVQRQMLGLQPAADFTAGHNEPVANGSHKA

SEQ ID NO: 884075 - protein, 723 aa, Homo sapiens
MRLWKAVVVTLAFMSVDICVTTAIYVFSHLDRSLLEDIRHFNIFDSVLDLWAACLYRSCLLLGATIGVAKNSALGPRRLRASWLVITLVCLFVGIYAMVKLLLFSEVRRPIRDPWFWALFVWTYISLGASFLLWWLLSTVRPGTQALEPGAATEAEGFPGSGRPPPEQASGATLQKLLSYTKPDVAFLVAASFFLIVAALGETFLPYYTGRAIDGIVIQKSMDQFSTAVVIVCLLAIGSSFAAGIRGGIFTLIFARLNIRLRNCLFRSLVSQETSFFDENRTGDLISRLTSDTTMVSDLVSQNINVFLRNTVKVTGVVVFMFSLSWQLSLVTFMGFPIIMMVSNIYGKYYKRLSKEVQNALARASNTAEETISAMKTVRSFANEEEEAEVYLRKLQQVYKLNRKEAAAYMYYVWGSGSVGSVYSGLMQGVGAAEKVFEFIDRQPTMVHDGSLAPDHLEGRVDFENVTFTYRTRPHTQVLQNVSFSLSPGKVTALVGPSGSGKSSCVNILENFYPLEGGRVLLDGKPISAYDHKYLHRVISLVSQEPVLFARSITDNISYGLPTVPFEMVVEAAQKANAHGFIMELQDGYSTETGEKGAQLSGGQKQRVAMARALVRNPPVLILDEATSALDAESEYLIQQAIHGNLQKHTVLIIAHRLSTVEHAHLIVVLDKGRVVQQGTHQQLLAQGGLYAKLVQRQMLGLQPAADFTAGHNEPVANGSHKA

SEQ ID NO: 884076 - protein, 644 aa, Homo sapiens
MRLWKAVVVTLAFMSVDICVTTAIYVFSHLDRSLLEDIRHFNIFDSVLDLWAACLYRSCLLLGATIGVAKNSALGPRRLRASWLVITLVCLFVGIYAMVKLLLFSEVRRPIRDPWFWALFVWTYISLGASFLLWWLLSTVRPGTQALEPGAATEAEGFPGSGRPPPEQASGATLQKLLSYTKPDVAFLVAASFFLIVAALGETFLPYYTGRAIDGIVIQKSMDQFSTAVVIVCLLAIGSSFAAGIRGGIFTLIFARLNIRLRNCLFRSLVSQETSFFDENRTGDLISRLTSDTTMVSDLVSQNINVFLRNTVKVTGVVVFMFSLSWQLSLVTFMGFPIIMMVSNIYGKYYKRLSKEVQNALARASNTAEETISAMKTVRSFANEEEEAEVYLRKLQQVYKLNRKEAAAYMYYVWGSGLTLLVVQVSILYYGGHLVISGQMTSGNLIAFIIYEFVLGDCMENVSFSLSPGKVTALVGPSGSGKSSCVNILENFYPLEGGRVLLDGKPISAYDHKYLHRVISLVSQEPVLFARSITDNISYGLPTVPFEMVVEAAQKANAHGFIMELQDGYSTETGEKGAQLSGGQKQRVAMARALVRNPPVLILDEATSALDAESEYLVSHRVVGNAGAGAAPGGQSPHRPADGC

SEQ ID NO: 884077 - protein, 84 aa, Homo sapiens
RPGRSACLKARQSQLRPCSGAARVGGGEEQREERSEDRGPAQSSMSSAETAPQTRACCAPPPRAHLVPGNRPGLALWMMMALPP

SEQ ID NO: 884078 - protein, 766 aa, Homo sapiens; identical to SEQ ID NO: 884074

SEQ ID NO: 884079 - protein, 686 aa, Homo sapiens
MRLWKAVVVTLAFMSVDICVTTAIYVFSHLDRSLLEDIRHFNIFDSVLDLWAACLYRSCLLLGATIGVAKNSALGPRRLRASWLVITLVCLFVGIYAMVKLLLFSEVRRPIRDPWFWALFVWTYISLGASFLLWWLLSTVRPGTQALEPGAATEAEGFPGSGRPPPEQASGATLQKLLSYTKPDVAFLVAASFFLIVAALGETFLPYYTGRAIDGIVIQKSMDQFSTAVVIVCLLAIGRLNIRLRNCLFRSLVSQETSFFDENRTGDLISRLTSDTTMVSDLVSQNINVFLRNTVKVTGVVVFMFSLSWQLSLVTFMGFPIIMMVSNIYGKYYKRLSKEVQNALARASNTAEETISAMKTVRSFANEEEEAEVYLRKLQQVYKLNRKEAAAYMYYVWGSGLTLLVVQVSILYYGGHLVISGQMTSGNLIAFIIYEFVLGDCMENVSFSLSPGKVTALVGPSGSGKSSCVNILENFYPLEGGRVLLDGKPISAYDHKYLHRVISLVSQEPVLFARSITDNISYGLPTVPFEMVVEAAQKANAHGFIMELQDGYSTETGEKGAQLSGGQKQRVAMARALVRNPPVLILDEATSALDAESEYLIQQAIHGNLQKHTVLIIAHRLSTVEHAHLIVVLDKGRVVQQGTHQQLLAQGGLYAKLVQRQMLGLQPAADFTAGHNEPVANGSHKA

SEQ ID NO: 884080 - protein, 601 aa, Homo sapiens
MRLWKAVVVTLAFMSVDICVTTAIYVFSHLDRSLLEDIRHFNIFDSVLDLWAACLYRSCLLLGATIGVAKNSALGPRRLRASWLVITLVCLFVGIYAMVKLLLFSEVRRPIRDPWFWALFVWTYISLGASFLLWWLLSTVRPGTQALEPGAATEAEGFPGSGRPPPEQASGATLQKLLSYTKPDVAFLVAASFFLIVAALGETFLPYYTGRAIDGIVIQKSMDQFSTAVVIVCLLAIGSSFAAGIRGGIFTLIFARLNIRLRNCLFRSLVSQETSFFDENRTGDLISRLTSDTTMVSDLVSQNINVFLRNTVKVTGVVVFMFSLSWQLSLVTFMGFPIIMMVSNIYGKYYKRLSKEVQNALARASNTAEETISAMKTVRSFANEEEEAEVYLRKLQQVYKLNRKEAAAYMYYVWGSGNVSFSLSPGKVTALVGPSGSGKSSCVNILENFYPLEGGRVLLDGKPISAYDHKYLHRVISLVSQEPVLFARSITDNISYGLPTVPFEMVVEAAQKANAHGFIMELQDGYSTETGEKGAQLSGGQKQRVAMARALVRNPPVLILDEATSALDAESEYLVSHRVVGNAGAGAAPGGQSPHRPADGC

SEQ ID NO: 884081 - protein, 337 aa, Homo sapiens
QALEDTPANGRHFSLWLGLPSPPPAAWDGSGMGMVGDLRSPRPTSPLPLPQLTLLVVQVSILYYGGHLVISGQMTSGNLIAFIIYEFVLGDCMENVSFSLSPGKVTALVGPSGSGKSSCVNILENFYPLEGGRVLLDGKPISAYDHKYLHRVISLVSQEPVLFARSITDNISYGLPTVPFEMVVEAAQKANAHGFIMELQDGYSTETGEKGAQLSGGQKQRVAMARALVRNPPVLILDEATSALDAESEYLIQQAIHGNLQKHTVLIIAHRLSTVEHAHLIVVLDKGRVVQQGTHQQLLAQGGLYAKLVQRQMLGLQPAADFTAGHNEPVANGSHKA

SEQ ID NO: 884082 - protein, 202 aa, Homo sapiens [sequence omitted]

SEQ ID NO: 884083 - protein, 1191 aa, Homo sapiens
NAPVFQNTAFSTSINETLPVGSVVFSVLAVDKDMGSAGMVVYSIEKVIPSTGDSEHLFRILANGSIVLNGSLSYNNKSAFYQLELKACDLGGMYHNTFTIQCSLPVFLSISVVDQPDLDPQFVREFYSASVAEDAAKGTSVLTVEAVDGDKGINDPVIYSISYSTRPGWFDIGADGVIRVNGSLDREQLLEADEEVQLQVTATETHLNIYGQEAKVSIWVTVRVMDVNDHKPEFYNCSLPACTFTPEEAQVNFTGYVDEHASPRIPIDDLTMVVYDPDKGSNGTFLLSLGGPDAEAFSVSPERAVGSASVQVLVRVSALVDYERQTAMAVQVVATDSVSQNFSVAMVTIHLRDINDHRPTFPQSLYVLTVPEHSATGSVVTDSIHATDPDTGAWGQITYSLLPGNGADLFQVDPVSGTVTVRNGELLDRESQAVYYLTLQATDGGNLSSSTTLQIHLLDINDNAPVVSGSYNIFVQEEEGNVSVTIQAHDNDEPGTNNSRLLFNLLPGPYSHNFSLDPDTGLLRNLGPLDREAIDPALEGRIVLTVLVSDCGEPVLGTKVNVTITVEDINDNLPIFNQSSYNFTVKEEDPGVLVGVVKAWDADQTEANNRISFSLSGSGANYFMIRGLVLGAGWAEGYLRLPPDVSLDYETQPVFNLTVSAENPDPQGGETIVDVCVNVKDVNDNPPTLDVASLRGIRVAENGSQHGQVAVVVASDVDTSAQLEIQLVNILCTKAGVDVGSLCWGWFSVAANGSVYINQSKAIDYEACDLVTLVVRACDLATDPGFQAYSNNGSLLITIEDVNDNAPYFLPENKTFVIIPELVLPNREVASVRARDDDSGNNGVILFSILRVDFISKDGATIPFQGVFSIFTSSEADVFAGSIQPVTSLDSTLQGTYQVTVQARDRPSLGPFLEATTTLNLFTVDQSYRSRLQFSTPKEEVGANRQAINAALTQATRTTVYIVDIQDIDSAARARPHSYLDAYFVFPNGSALTLDELSVMIRNDQDSLTQLLQLGLVVLGSQESQESDLSKQLISVIIGLGVALLLVLVIMTMAFVCVRKSYNRKLQAMKAAKEARKTAAGVMPSAPAIPGTNMYNTERANPMLNLPNKDLGLEYLSPSNDLDSVSVNSLDDNSVDVDKNSQEIKEHRPPHTPPEPDPEPLSVVLLGRQAGASGQLEGPSYTNAGLDTTDL

SEQ ID NO: 884084 - protein, 394 aa, Homo sapiens
MVQVGSVPTPLTPFPFTPAVIIPELVLPNREVASVRARDDDSGNNGVILFSILRVDFISKDGATIPFQGVFSIFTSSEADVFAGSIQPVTSLDSTLQGTYQVTVQARDRPSLGPFLEATTTLNLFTVDQSYRSRLQFSTPKEEVGANRQAINAALTQATRTTVYIVDIQDIDSAARARPHSYLDAYFVFPNGSALTLDELSVMIRNDQDSLTQLLQLGLVVLGSQESQESDLSKQLISVIIGLGVALLLVLVIMTMAFVCVRKSYNRKLQAMKAAKEARKTAAGVMPSAPAIPGTNMYNTERANPMLNLPNKDLGLEYLSPSNDLDSVSVNSLDDNSVDVDKNSQEIKEHRPPHTPPEPDPEPLSVVLLGRQAGASGQLEGPSYTNAGLDTTDL

SEQ ID NO: 884085 - protein, 192 aa, Homo sapiens [sequence omitted]

SEQ ID NO: 884086 - protein, 357 aa, Homo sapiens
MVQVGSVPTPLTPFPFTPAVIIPELVLPNREVASVRARDDDSGNNGVILFSILRVDFISKDGATIPFQGVFSIFTSSEADVFAGSIQPVTSLDSTLQGTYQVTVQARDRPSLGPFLEATTTLNLFTVDQSYRSRLQFSTPKEEVGANRQAINAALTQATRTTVYIVDIQDIDSAARARPHSYLDAYFVFPNGSALTLDELSVMIRNDQDSLTQLLQLGLVVLGSQESQESDLSKQLISVIIGLGVALLLVLVIMTMAFVCVRKSYNRKLQAMKAAKEARKTAAGVMPSAPAIPGTNMYNTERANPMLNLPNKDLGLEYLSPSNDLDSVRVNSLAKTLGCGQERPGIRGPGPPPTPRA

SEQ ID NO: 884087 - protein, 127 aa, Homo sapiens
MIRNDQDSLTQLLQLGLVVLGSQESQESDLSKQLISVIIGLGVALLLVLVIMTMAFVCVRKSYNRKLQAMKAAKEARKTAAGVMPSAPAIPGTNMYNTERANPMLNLPNKDLGLEYLSPSNDLDSVR

SEQ ID NO: 884088 - protein, 63 aa, Homo sapiens
VRSPSELCPLSTGVLVGVVKAWDADQTEANNRISFSLSGSGANYFMIRGLVLGAGWAEGYLRL

SEQ ID NO: 884089 - protein, 101 aa, Homo sapiens
NHLLIRGSVGMADRDGEGQPPRPPLPLIPAGVEGCLAWLGPQILSTLAPKARDDDSGNNGVILFSILRVDFISKDGATIPFQGVFSIFTSSEADVFAGSIQ

SEQ ID NO: 884090 - protein, 111 aa, Homo sapiens [sequence omitted]

SEQ ID NO: 884091 - protein, 111 aa, Homo sapiens [sequence omitted]

SEQ ID NO: 884092 - protein, 111 aa, Homo sapiens [sequence omitted]

SEQ ID NO: 884093 - protein, 111 aa, Homo sapiens [sequence omitted]

SEQ ID NO: 884094 - protein, 72 aa, Homo sapiens
MASLGHILVFCVGLLTMAKAESPKEHDPFTYDYQSLQIGGLVIAGILFILGILIVLSECPQLPPSTPPLPGP

SEQ ID NO: 884095 - protein, 122 aa, Homo sapiens
WARGSKVLSPRGTAGRLGAFFQQGTARLGTMASLGHILVFCVGLLTMAKAESPKEHDPFTYDYQSLQIGGLVIAGILFILGILIVLSRRCRCKFNQQQRTGEPDEEEGTFRSSIRRLSTRRR

SEQ ID NO: 884096 - protein, 110 aa, Homo sapiens
MWESKGTHCLIRGVPPRTMASLGHILVFCVGLLTMAKAESPKEHDPFTYDYQSLQIGGLVIAGILFILGILIVLSRRCRCKFNQQQRTGEPDEEEGTFRSSIRRLSTRRR

SEQ ID NO: 884097 - protein, 155 aa, Homo sapiens
ACVCLSISWPILCFFPSSLPPVLLLPVPSLPFLYTPFLSLVPHFPPPISAPPELSYFPPSACWSFLPVPSFPIYPSPILPPVFPALTFPALLLTDYQSLQIGGLVIAGILFILGILIVLSRRCRCKFNQQQRTGEPDEEEGTFRSSIRRLSTRRR

SEQ ID NO: 884098 - protein, 173 aa, Homo sapiens
RCWGTQDMLNPQPHLPQREPHDTNTKLPSMLGNPGHADLTGWRLHGAAAWKEAEEGEVRLGAHPGALLGAFFQQGTARLGTMASLGHILVFCVGLLTMAKAESPKEHDPFTYDYQSLQIGGLVIAGILFILGILIVLSRRCRCKFNQQQRTGEPDEEEGTFRSSIRRLSTRRR

SEQ ID NO: 884099 - protein, 132 aa, Homo sapiens
CVGLVASLRGGTGGPEEEYWMPDWCLHPTSCSNQQFGERTMASLGHILVFCVGLLTMAKAESPKEHDPFTYDYQSLQIGGLVIAGILFILGILIVLSRRCRCKFNQQQRTGEPDEEEGTFRSSIRRLSTRRR

SEQ ID NO: 884100 - protein, 116 aa, Homo sapiens
MSPRGGQRGCLFLFSLLPREETGWPFPQGQPVAMWQLGLTPAGLCVTPFPALLLTDYQSLQIGGLVIAGILFILGILIVLSRRCRCKFNQQQRTGEPDEEEGTFRSSIRRLSTRRR

SEQ ID NO: 884101 - protein, 92 aa, Homo sapiens
MASLGHILVFCVGLLTMAKAESPKEHDPFTYDYQSLQIGGLVIAGILFILGILIVLSRRCRCKFNQQQRTGEPDEEEGTFRSSIRRLSTRRR

SEQ ID NO: 884102 - protein, 77 aa, Homo sapiens
MPPNNGGEEKQQARGPYQVSPDCPNTSRRIALHTRNIENGRMLRRTETRRRGKAREKKAEQGDEAQTRKERGKATKY

SEQ ID NO: 884103 - protein, 70 aa, Homo sapiens
  misc_feature (3)..(3): Xaa can be any naturally occurring amino acid
ADXAFTPVRWPTTHRPTNRPGRRVHHVWLLQRRRYEESGSTAPAGGRTQPRKSFPGSCRLETVLSAECST

SEQ ID NO: 884104 - protein, 108 aa, Homo sapiens
WLVRPECRDRPRRAPLSCLAPPTHGPRPTDPRIGPAVACTMSGSSSVAAMKKVVQQLRLEAGLNRVKVSQAAADLKQFCLQNAQHDPLLTGVSSSTNPFRPQKVCSFL

SEQ ID NO: 884105 - protein, 113 aa, Homo sapiens
MRTEGGAAEHRTGNLETKFGAPPPPRAAELSGPADPRPTTHRPTNRPGRRVHHVWLLQRRRYEESGSTAPAILGGLSEERCITVDLGRGAPWGENFQNPRGRGYKQFPRQLQT

SEQ ID NO: 884106 - protein, 229 aa, Homo sapiens
MSGALDVLQMKEEDVLKFLAAGTHLGGTNLDFQMEQYIYKRKSDGIYIINLKRTWEKLLLAARAIVAIENPADVSVISSRNTGQRAVLKFAAATGATPIAGRFTPGTFTNQIQAAFREPRLLVVTDPRADHQPLTEASYVNLPTIALCNTDSPLRYVDIAIPCNNKGAHSVGLMWWMLAREVLRMRGTISREHPWEVMPDLYFYRDPEEIEKEEQAAAEKAVTQGGISG

SEQ ID NO: 884107 - protein, 220 aa, Homo sapiens
SRGYAGTRDSQLSIRRGLSSTRRSGGGGDGDGTPARDLQLGWLHLLHGSGDRRGIEECAIKRKDQGVNQKKKKKRTSKLGRMSSCSNVCGSRQAQAAAEGGYQRYGVRSYLHQFYEDCTASIWEYEDDFQIQRSPNRWSSVFWKVGLISGTVFVILGLTVLAVGFLVPPKIEAFGEADFVVVDTHAVQFNSALDMYKLAGAVLFCIGGTSMAGCLLMSVL

SEQ ID NO: 884108 - protein, 154 aa, Homo sapiens
MLSFQLGRMSSCSNVCGSRQAQAAAEGGYQRYGVRSYLHQFYEDCTASIWEYEDDFQIQRSPNRWSSVFWKQELGFHTSSHSQEWNRKLQHKNCPRCCFGSLSPPGEALLCRHWDWPYHPKAPGCSAEPGGGPFQSIPTLLCGPKRGCFASSEL

SEQ ID NO: 884109 - protein, 82 aa, Homo sapiens
SRGYAGTRDSQLSIRRGLSSTRRSGGGGDGDGTPARDLQLGWLHLLHGSGDRRGIEECAIKRKDQGVNQKKKKKRTSKVPGT

SEQ ID NO: 884110 - protein, 220 aa, Homo sapiens; identical to SEQ ID NO: 884107

SEQ ID NO: 884111 - protein, 149 aa, Homo sapiens
MWMLSFQLGRMSSCSNVCGSRQAQAAAEGGYQRYGVRSYLHQFYEDCTASIWEYEDDFQIQRSPNRWSSVFWKVGLISGTVFVILGLTVLAVGFLVPPKIEAFGEADFVVVDTHAVQFNSALDMYKLAGAVLFCIGGTSMAGCLLMSVL

SEQ ID NO: 884112 - protein, 147 aa, Homo sapiens
SRGYAGTRDSQLSIRRGLSSTRRSGGGGDGDGTPARDLQLGWLHLLHGSGDRRGIEECAIKRKDQGVNQKKKKKRTSKLGRMSSCSNVCGSRQAQAAAEGGYQRYGVRSYLHQFYEDCTASIWEYEDDFQIQRSPNRWSSVFWKHSI

SEQ ID NO: 884113 - protein, 108 aa, Homo sapiens
SRGYAGTRDSQLSIRRGLSSTRRSGGGGDGDGTPARDLQLGWLHLLHGSGDRRGIEECAIKRKDQGVNQKKKKKRTSKHWPCGKVAIMGTSVSLSQNHFMGEKSSMKN

SEQ ID NO: 884114 - protein, 304 aa, Homo sapiens
PRWYGRVLYVTGVGKGRQRRRRQRQRQSPVPRPSDRPAGLGLAKPARRALPTPEPGRKSSDSSLASPGAALQTGPVVRGSGADPEAGFAQPPTRAGPLEGAFNSRTRQATMTENSTSAPAAKPKRAKASKKSTDHPKYSDMIVAAIQAEKNRAGSSRQSIQKYIKSHYKVGENADSQIKLSIKRLVTTGVLKQTKGVGASGSFRLAKSDEPKKSVAFKKTKKEIKKVATPKKASKPKKAASKAPTKKPKATPVKKAKKKLAATPKKAKKPKTVKAKPVKASKPKKAKPVKPKAKSSAKRAGKKK

SEQ ID NO: 884115 - protein, 304 aa, Homo sapiens; identical to SEQ ID NO: 884114

SEQ ID NO: 884116 - protein, 304 aa, Homo sapiens; identical to SEQ ID NO: 884114

SEQ ID NO: 884117 - protein, 304 aa, Homo sapiens; identical to SEQ ID NO: 884114

SEQ ID NO: 884118 - protein, 194 aa, Homo sapiens
MTENSTSAPAAKPKRAKASKKSTDHPKYSDMIVAAIQAEKNRAGSSRQSIQKYIKSHYKVGENADSQIKLSIKRLVTTGVLKQTKGVGASGSFRLAKSDEPKKSVAFKKTKKEIKKVATPKKASKPKKAASKAPTKKPKATPVKKAKKKLAATPKKAKKPKTVKAKPVKASKPKKAKPVKPKAKSSAKRAGKKK

SEQ ID NO: 884119 - protein, 219 aa, Homo sapiens
RARYPLAAQAGPLEGAFNSRTRQATMTENSTSAPAAKPKRAKASKKSTDHPKYSDMIVAAIQAEKNRAGSSRQSIQKYIKSHYKVGENADSQIKLSIKRLVTTGVLKQTKGVGASGSFRLAKSDEPKKSVAFKKTKKEIKKVATPKKASKPKKAASKAPTKKPKATPVKKAKKKLAATPKKAKKPKTVKAKPVKASKPKKAKPVKPKAKSSAKRAGKKK

SEQ ID NO: 884120 - protein, 304 aa, Homo sapiens; identical to SEQ ID NO: 884114

SEQ ID NO: 884121 - protein, 304 aa, Homo sapiens; identical to SEQ ID NO: 884114

SEQ ID NO: 884122 - protein, 304 aa, Homo sapiens; identical to SEQ ID NO: 884114

SEQ ID NO: 884123 - protein, 194 aa, Homo sapiens; identical to SEQ ID NO: 884118

SEQ ID NO: 884124 - protein, 304 aa, Homo sapiens; identical to SEQ ID NO: 884114

SEQ ID NO: 884125 - protein, 304 aa, Homo sapiens; identical to SEQ ID NO: 884114

SEQ ID NO: 884126 - protein, 286 aa, Homo sapiens
PRWYGRVLYVTGVGKGRQRRRRQRQRQSPVPRPSDRPAGLGLAKPARRALPTPEPGRKSSDSSLASPGAALQTGPVVRGSGADPEAGFAQPPTRAGPLEGAFNSRTRQATMTENSTSAPAAKPKRAKASKKSTDHPKYSDMIVAAIQAEKNRAGSSRQSIQKYIKSHYKVGENADSQIKLSIKRLVTTGVLKQTKGVGASGSFRLAKSDEPKKSVAFKKTKKEIKKVATPKKASKPKKAASKAPTKKPKATPVKKAKKKLAATPKKAKKPKTVKAKPVKASKPKKK

SEQ ID NO: 884127 - protein, 170 aa, Homo sapiens
  misc_feature (7)..(7): Xaa can be any naturally occurring amino acid
TLVRPRXICDRRRKREAEEAEAEAEAEPGAETKRQTGGAGPRKAGSASSPDTRAGEEKQRLLARIPGSRTPDWPGSQGLRSRSRGRLCSASDEGWPFGRRLQQPDQTGHHDREFHVRPCGQAQAGQGLQEVHRPPQVFRHDRGCHPGREEPRWLLAPVHSEVYQEPLQGG

SEQ ID NO: 884128 - protein, 297 aa, Homo sapiens
MTNQESAVHVKMMPEFQKSSVRIKNPTRVEEIICGLIKGGAAKLQIITDFDMTLSRFSYKGKRCPTCHNIIDNCKLVTDECRKKLLQLKEKYYAIEVDPVLTVEEKYPYMVEWYTKSHGLLVQQALPKAKLKEIVAESDVMLKEGYENFFDKLQQHSIPVFIFSAGIGDVLEEVIRQAGVYHPNVKVVSNFMDFDETGVLKGFKGELIHVFNKHDGALRNTEYFNQLKDNSNIILLGDSQGDLRMADGVANVEHILKIGYLNDRVDELLEKYMDSYDIVLVQDESLEVANSILQKIL

SEQ ID NO: 884129 - protein, 205 aa, Homo sapiens
MTNQESAVHVKMMPEFQKSSVRIKNPTRVEEIICGLIKGGAAKLQIITDFDMTLSRFSYKGKRCPTCHNIIDNCKLVTDECRKKLLQLKEKYYAIEVDPVLTVEEKYPYMVEWYTKSHGLLVQQALPKAKLKEIVAESDVMLKEGYENFFDKLQQHSIPVFIFSAGIGDVLEEVIRQAGVYHPNVKVVSNFMDFDETVRISNRSS

SEQ ID NO: 884130 - protein, 165 aa, Homo sapiens
LITSCYLHLTEEGYENFFDKLQQHSIPVFIFSAGIGDVLEEVIRQAGVYHPNVKVVSNFMDFDETGVLKGFKGELIHVFNKHDGALRNTEYFNQLKDNSNIILLGDSQGDLRMADGVANVEHILKIGYLNDRVDELLEKYMDSYDIVLVQDESLEVANSILQKIL

SEQ ID NO: 884131 - protein, 336 aa, Homo sapiens
MRAPSMDRAAVARVGAVASASVCALVAGVVLAQYIFTLKRKTGRKTKIIEMMPEFQKSSVRIKNPTRVEEIICGLIKGGAAKLQIITDFDMTLSRFSYKGKRCPTCHNIIDNCKLVTDECRKKLLQLKEKYYAIEVDPVLTVEEKYPYMVEWYTKSHGLLVQQALPKAKLKEIVAESDVMLKEGYENFFDKLQQHSIPVFIFSAGIGDVLEEVIRQAGVYHPNVKVVSNFMDFDETGVLKGFKGELIHVFNKHDGALRNTEYFNQLKDNSNIILLGDSQGDLRMADGVANVEHILKIGYLNDRVDELLEKYMDSYDIVLVQDESLEVANSILQKIL

SEQ ID NO: 884132 - protein, 297 aa, Homo sapiens; identical to SEQ ID NO: 884128

SEQ ID NO: 884133 - protein, 80 aa, Homo sapiens
PGCSGIPRFRDSQSTRAACFFPAWTRMRAPSMDRAAVARVGAVASASVCALVAGVVLAQYIFTLKRKTGRKTKIIEMKIG

SEQ ID NO: 884134 - protein, 415 aa, Homo sapiens
MAPVSGSRSPDREASGSGGRRRSSSKSPKPSKSARSPRGRRSRSHSCSRSGDRNGLTHQLGGLSQGSRNQSYRSRSRSRSRERPSAPRGIPFASASSSVYYGSYSRPYGSDKPWPSLLDKEREESLRQKRLSERERIGELGAPEVWGLSPKNPEPDSDEHTPVEDEEPKKSTTSASTSEEEKKKKSSRSKERSKKRRKKKSSKRKHKKYSEDSDSDSDSETDSSDEDNKRRAKKAKKKEKKKKHRSKKYKKKRSKKSRKESSDSSSKESQEEFLENPWKDRTKAEEPSDLIGPEAPKTLTSQDDKPLNYGHALLPGEGAAMAEYVKAGKRIPRRGEIGLTSEEIASFECSGYVMSGSRHRRMEAVRLRKENQIYSADEKRALASFNQEERRKRENKILASFREMVYRKTKGKDDK

SEQ ID NO: 884135 - protein, 415 aa, Homo sapiens; identical to SEQ ID NO: 884134

SEQ ID NO: 884136 - protein, 232 aa, Homo sapiens
MKSQRKALLQLLLQKKKSSKRKHKKYSEDSDSDSDSETDSSDEDNKRRAKKAKKKEKKKKHRSKKYKKKRSKKSRKESSDSSSKESQEEFLENPWKDRTKAEEPSDLIGPEAPKTLTSQDDKPLNYGHALLPGEGAAMAEYVKAGKRIPRRGEIGLTSEEIASFECSGYVMSGSRHRRMEAVRLRKENQIYSADEKRALASFNQEERRKRENKILASFREMVYRKTKGKDDK

SEQ ID NO: 884137 - protein, 506 aa, Homo sapiens
MHRGLIHPQSRAVGGDAMTPIVTVLICLRLSLGPRTHVQAGTLPKPTLWAEPGSVITQGSPVTLWCQGILETQEYRLYREKKTAPWITRIPQEIVKKGQFPIPSITWEHTGRYRCFYGSHTAGWSEPSDPLELVVTGAYIKPTLSALPSPVVTSGGNVTLHCVSQVAFGSFILCKEGEDEHPQCLNSQPRTHGWSRAIFSVGPVSPSRRWSYRCYAYDSNSPHVWSLPSDLLELLVLGVSKKPSLSVQPGPIVAPGESLTLQCVSDVSYDRFVLYKEGERDFLQLPGPQPQAGLSQANFTLGPVSRSYGGQYRCSGAYNLSSEWSAPSDPLDILIAGQFRGRPFISVHPGPTVASGENVTLLCQSWGPFHTFLLTKAGAADAPLRLRSIHEYPKYQAEFPMSPVTSAHSGTYRCYGSLSSNPYLLSHPSDSLELMVSGAAETLSPPQNKSDSKAGAANTLSPSQNKTASHPQDYTVENLIRMGIAGLVLVVLGILLFEAQHSQRSL

SEQ ID NO: 884138 - protein, 150 aa, Homo sapiens
QNQAELGALISDAVGDGLPPPWSEGKCGTAPVTDTAGSRSFLGLTVGTGCTEREHQAQQNQAEFRMGPVTSAHVGTYRCYSSLSSNPYLLSLPSDPLELVVSASLGQHPQDYTVENLIRMGVAGLVLVVLGILLFEAQHSQRSLQDAAGR

SEQ ID NO: 884139 - protein, 466 aa, Homo sapiens
MTPILTVLICLGLSLGPRTHVQAGHLPKPTLWAEPGSVIIQGSPVTLRCQGSLQAEEYHLYRENKSASWVRRIQEPGKNGQFPIPSITWEHAGRYHCQYYSHNHSSEYSDPLELVVTGAYSKPTLSALPSPVVTLGGNVTLQCVSQVAFDGFILCKEGEDEHPQRLNSHSHARGWSWAIFSVGPVSPSRRWSYRCYAYDSNSPYVWSLPSDLLELLVPGVSKKPSLSVQPGPMVAPGESLTLQCVSDVGYDRFVLYKEGERDFLQRPGWQPQAGLSQANFTLGPVSPSHGGQYRCYSAHNLSSEWSAPSDPLDILITGQFYDRPSLSVQPVPTVAPGKNVTLLCQSRGQFHTFLLTKEGAGHPPLHLRSEHQAQQNQAEFRMGPVTSAHVGTYRCYSSLSSNPYLLSLPSDPLELVVSASLGQHPQDYTVENLIRMGVAGLVLVVLGILLFEAQHSQRSLQDAAGR

SEQ ID NO: 884140 - protein, 454 aa, Homo sapiens
MTPILTVLICLGHLPKPTLWAEPGSVIIQGSPVTLRCQGSLQAEEYHLYRENKSASWVRRIQEPGKNGQFPIPSITWEHAGRYHCQYYSHNHSSEYSDPLELVVTGAYSKPTLSALPSPVVTLGGNVTLQCVSQVAFDGFILCKEGEDEHPQRLNSHSHARGWSWAIFSVGPVSPSRRWSYRCYAYDSNSPYVWSLPSDLLELLVPGVSKKPSLSVQPGPMVAPGESLTLQCVSDVGYDRFVLYKEGERDFLQRPGWQPQAGLSQANFTLGPVSPSHGGQYRCYSAHNLSSEWSAPSDPLDILITGQFYDRPSLSVQPVPTVAPGKNVTLLCQSRGQFHTFLLTKEGAGHPPLHLRSEHQAQQNQAEFRMGPVTSAHVGTYRCYSSLSSNPYLLSLPSDPLELVVSASLGQHPQDYTVENLIRMGVAGLVLVVLGILLFEAQHSQRSLQDAAGR

SEQ ID NO: 884141 - protein, 255 aa, Homo sapiens
MVAPGESLTLQCVSDVSYDRFVLYKEGERDFLQLPGPQPQAGLSQANFTLGPVSRSYGGQYRCSGAYNLSSEWSAPSDPLDILIAGQFRGRPFISVHPGPTVASGENVTLLCQSWGPFHTFLLTKAGAADAPLRLRSIHEYPKYQAEFPMSPVTSAHSGTYRCYGSLSSNPYLLSHPSDSLELMVSGAAETLSPPQNKSDSKAGAANTLSPSQNKTASHPQDYTVENLIRMGIAGLVLVVLGILLFEAQHSQRSL

SEQ ID NO: 884142 - protein, 287 aa, Homo sapiens
MTPILTVLICLGLSLGPRTHVQAGHLPKPTLWAEPGSVIIQGSPVTLRCQGSLQAEEYHLYRENKSASWVRRIQEPGKNGQFPIPSITWEHAGRYHCQYYSHNHSSEYSDPLELVVTGAYSKPTLSALPSPVVTLGGNVTLQCVSQVAFDGFILCKEGEDEHPQRLNSHSHARGWSWAIFSVGPVSPSRRWSYRCYAYDSNSPYVWSLPSDLLELLVPGAAETLSPPQNKSDSKAGAANTLSPSQNKTASHPQDYTVENLIRMGIAGLVLVVLGILLFEAQHSQRSL

SEQ ID NO: 884143 - protein, 483 aa, Homo sapiens
MTPILTVLICLGLSLGPRTHVQAGHLPKPTLWAEPGSVIIQGSPVTLRCQGSLQAEEYHLYRENKSASWVRRIQEPGKNGQFPIPSITWEHAGRYHCQYYSHNHSSEYSDPLELVVTGAYSKPTLSALPSPVVTLGGNVTLQCVSQVAFDGFILCKEGEDEHPQRLNSHSHARGWSWAIFSVGPVSPSRRWSYRCYAYDSNSPYVWSLPSDLLELLVPGVSKKPSLSVQPGPMVAPGESLTLQCVSDVGYDRFVLYKEGERDFLQRPGWQPQAGLSQANFTLGPVSPSHGGQYRCYSAHNLSSEWSAPSDPLDILITGQFYDRPSLSVQPVPTVAPGKNVTLLCQSRGQFHTFLLTKEGAGHPPLHLRSEHQAQQNQAEFRMGPVTSAHVGTYRCYSSLSSNPYLLSLPSDPLELVVSEAAETLSPSQNKTDSTTTSLGQHPQDYTVENLIRMGVAGLVLVVLGILLFEAQHSQRSLQDAAGR

SEQ ID NO: 884144 - protein, 125 aa, Homo sapiens
MASSPSHPSPGNTQGGITVSTTATITHQKHQAQQNQAEFRMGPVTSAHVGTYRCYSSLSSNPYLLSLPSDPLELVVSASLGQHPQDYTVENLIRMGVAGLVLVVLGILLFEAQHSQRSLQDAAGR

SEQ ID NO: 884145 - protein, 498 aa, Homo sapiens
MEGRTCPGFRGKFLTGNSLPGLSLGPRTHVQAGTLPKPTLWAEPGSVITQGSPVTLWCQGILETQEYRLYREKKTAPWITRIPQEIVKKGQFPIPSITWEHTGRYRCFYGSHTAGWSEPSDPLELVVTGAYIKPTLSALPSPVVTSGGNVTLHCVSQVAFGSFILCKEGEDEHPQCLNSQPRTHGWSRAIFSVGPVSPSRRWSYRCYAYDSNSPHVWSLPSDLLELLVLGVSKKPSLSVQPGPIVAPGESLTLQCVSDVSYDRFVLYKEGERDFLQLPGPQPQAGLSQANFTLGPVSRSYGGQYRCSGAYNLSSEWSAPSDPLDILIAGQFRGRPFISVHPGPTVASGENVTLLCQSWGPFHTFLLTKAGAADAPLRLRSIHEYPKYQAEFPMSPVTSAHSGTYRCYGSLSSNPYLLSHPSDSLELMVSGAAETLSPPQNKSDSKAGAANTLSPSQNKTASHPQDYTVENLIRMGIAGLVLVVLGILLFEAQHSQRSL

SEQ ID NO: 884146 - protein, 420 aa, Homo sapiens
MEVPPRLSHVPPPLFPSAPATLASRSLSHWRPRPPRQLAPLLPSLAPSSARQGARRAQRHVTAQQPSRLAGGAAIKGGRRRRPDLFRRHFKSSSIQRSAAAAAATRTARQHPPADSSVTMEDMNEYSNIEEFAEGSKINASKNQQDDGKMFIGGLSWDTSKKDLTEYLSRFGEVVDCTIKTDPVTGRSRGFGFVLFKDAASVDKVLELKEHKLDGKLIDPKRAKALKGKEPPKKVFVGGLSPDTSEEQIKEYFGAFGEIENIELPMDTKTNERRGFCFITYTDEEPVKKLLESRYHQIGSGKCEIKVAQPKEVYRQQQQQQKGGRGAAAGGRGGTRGRGRGQGQNWNQGFNNYYDQGYGNYNSAYGGDQNYSGYGGYDYTGYNYGNYGYGQGYADYSGQQSTYGKASRGGGNHQNNYQPY

SEQ ID NO: 884147 - protein, 420 aa, Homo sapiens; identical to SEQ ID NO: 884146

SEQ ID NO: 884148 - protein, 420 aa, Homo sapiens; identical to SEQ ID NO: 884146

SEQ ID NO: 884149 - protein, 301 aa, Homo sapiens
MEDMNEYSNIEEFAEGSKINASKNQQDDGKMFIGGLSWDTSKKDLTEYLSRFGEVVDCTIKTDPVTGRSRGFGFVLFKDAASVDKVLELKEHKLDGKLIDPKRAKALKGKEPPKKVFVGGLSPDTSEEQIKEYFGAFGEIENIELPMDTKTNERRGFCFITYTDEEPVKKLLESRYHQIGSGKCEIKVAQPKEVYRQQQQQQKGGRGAAAGGRGGTRGRGRGQGQNWNQGFNNYYDQGYGNYNSAYGGDQNYSGYGGYDYTGYNYGNYGYGQGYADYSGQQSTYGKASRGGGNHQNNYQPY

SEQ ID NO: 884150 - protein, 301 aa, Homo sapiens; identical to SEQ ID NO: 884149

SEQ ID NO: 884151 - protein, 301 aa, Homo sapiens; identical to SEQ ID NO: 884149

SEQ ID NO: 884152 - protein, 301 aa, Homo sapiens; identical to SEQ ID NO: 884149

SEQ ID NO: 884153 - protein, 301 aa, Homo sapiens; identical to SEQ ID NO: 884149

SEQ ID NO: 884154 - protein, 282 aa, Homo sapiens
MEDMNEYSNIEEFAEGSKINASKNQQDDGKMFIGGLSWDTSKKDLTEYLSRFGEVVDCTIKTDPVTGRSRGFGFVLFKDAASVDKVLELKEHKLDGKLIDPKRAKALKGKEPPKKVFVGGLSPDTSEEQIKEYFGAFGEIENIELPMDTKTNERRGFCFITYTDEEPVKKLLESRYHQIGSGKCEIKVAQPKEVYRQQQQQQKGGRGAAAGGRGGTRGRGRGQGQNWNQGFNNYYDQGYGNYNSAYGGDQNYSGYGGYDYTGYNYGNYGYGQGYADYSGKNI

SEQ ID NO: 884155 - protein, 301 aa, Homo sapiens; identical to SEQ ID NO: 884149

SEQ ID NO: 884156 - protein, 301 aa, Homo sapiens; identical to SEQ ID NO: 884149

SEQ ID NO: 884157 - protein, 301 aa, Homo sapiens; identical to SEQ ID NO: 884149

SEQ ID NO: 884158 - protein, 227 aa, Homo sapiens
MEDMNEYSNIEEFAEGSKINASKNQQDDGKMFIGGLSWDTSKKDLTEYLSRFGEVVDCTIKTDPVTGRSRGFGFVLFKDAASVDKVLELKEHKLDGKLIDPKRAKALKGKEPPKKVFVGGLSPDTSEEQIKEYFGAFGEIENIELPMDTKTNERRGFCFITYTDEEPVKKLLESRYHQIGSGKCEIKVAQPKEVYRQQQQQQKGGRGAAAGGRGGTRGRGREVRLNS

SEQ ID NO: 884159 - protein, 301 aa, Homo sapiens; identical to SEQ ID NO: 884149

SEQ ID NO: 884160 - protein, 155 aa, Homo sapiens
MDTKTNERRGFCFITYTDEEPVKKLLESRYHQIGSGKCEIKVAQPKEVYRQQQQQQKGGRGAAAGGRGGTRGRGRGQGQNWNQGFNNYYDQGYGNYNSAYGGDQNYSGYGGYDYTGYNYGNYGYGQGYADYSGQQSTYGKASRGGGNHQNNYQPY

SEQ ID NO: 884161 - protein, 301 aa, Homo sapiens; identical to SEQ ID NO: 884149

SEQ ID NO: 884162 - protein, 244 aa, Homo sapiens
MEDMNEYSNIEEFAEGSKINASKNQQDDGKMFIGGLSWDTSKKDLTEYLSRFGEVVDCTIKTDPVTGRSRGFGFVLFKDAASVDKVLELKEHKLDGKLIDPKRAKALKGKEPPKKVFVGGLSPDTSEEQIKEYFGAFGEIENIELPMDTKTNERRGFCFITYTDEEPVKKLLESRYHQIGSGKCEIKVAQPKEVYRQQQQQQKGGRGAAAGGRGGTRGRGRGQQSTYGKASRGGGNHQNNYQPY

SEQ ID NO: 884163 - protein, 301 aa, Homo sapiens; identical to SEQ ID NO: 884149

SEQ ID NO: 884164 - protein, 301 aa, Homo sapiens; identical to SEQ ID NO: 884149

SEQ ID NO: 884165 - protein, 301 aa, Homo sapiens; identical to SEQ ID NO: 884149

SEQ ID NO: 884166 - protein, 318 aa, Homo sapiens
  misc_feature (203)..(203): Xaa can be any naturally occurring amino acid
  misc_feature (215)..(217): Xaa can be any naturally occurring amino acid
  misc_feature (238)..(238): Xaa can be any naturally occurring amino acid
  misc_feature (240)..(241): Xaa can be any naturally occurring amino acid
  misc_feature (244)..(246): Xaa can be any naturally occurring amino acid
  misc_feature (250)..(250): Xaa can be any naturally occurring amino acid
GAQGSLIKLIPPLQRSAAAAAATRTARQHPPADSSVTMEDMNEYSNIEEFAEGSKINASKNQQDDGKMFIGGLSWDTSKKDLTEYLSRFGEVVDCTIKVLELKEHKLDGKLIDPKRAKALKGKEPPKKVFVGGLSPDTSEEQIKEYFGAFGEIENIELPMDTKTNERRGFCFITYTDEEPVKKLLESRYHQIGSGKTAPGNGXQSAQPKKPKNQXXXQQKSRTPPPPGAPTGTRGPAXRXXQDXXXGRKXQEEQGYGNYNSAYGGDQNYSGYGGYDYTGYNYGNYGYGQGYADYSGQQSTYGKASRGGGNHQNNYQPY

SEQ ID NO: 884167 - protein, 287 aa, Homo sapiens
MEDMNEYSNIEEFAEGSKINASKNQQDDGKMFIGGLSWDTSKKDLTEYLSRFGEVVDCTIKTDPVTGRSRGFGFVLFKDAASVDKVLELKEHKLDGKLIDPKRAKALKGKEPPKKVFVGGLSPDTSEEQIKEYFGAFGEIENIELPMDTKTNERRGFCFITYTDEEPVKKLLESRYHQIGSGKCEIKVAQPKEVYRQQQQQQKGGRGAAAGGRGGTRGRGRGQGQNWNQGFNNYYDQGYGNYNSAYGGDQNYSGYGGYDYTGYNYGNYGYGQGYADYSALVGGDPLN

SEQ ID NO: 884168 - protein, 270 aa, Homo sapiens
MEDMNEYSNIEEFAEGSKINASKNQQDDGKMFIGGLSWDTSKKDLTEYLSRFGEVVDCTIKTDPVTGRSRGFGFVLFKDAASVDKVLELKEHKLDGKLIDPKRAKALKGKEPPKKVFVGGLSPDTSEEQIKEYFGAFGEIENIELPMDTKTNERRGFCFITYTDEEPVKKLLESRYHQIGSGKCEIKVAQPKEVYRQQQQQQKGGRGAAAGGRGGTRGRGRGQGQNWNQGFNNYYDQGYGNYNSAYGGQQSTYGKASRGGGNHQNNYQPY

SEQ ID NO: 884169 - protein, 244 aa, Homo sapiens; identical to SEQ ID NO: 884162

SEQ ID NO: 884170 - protein, 214 aa, Homo sapiens
MEDMNEYSNIEEFAEGSKINASKNQQDDGKMFIGGLSWDTSKKDLTEYLSRFGEVVDCTIKTDPVTGRSRGFGFVLFKDAASVDKVLELKEHKLDGKLIDPKRAKALKGKEPPKKVFVGGLSPDTSEEQIKEYFGAFGEIENIELPMDTKTNERRGFCFITYTDEEPVKKLLESRYHQIGSGKCEIKVAQPKEVYRQQQQQQKGGRENPPTITS

SEQ ID NO: 884171 - protein, 194 aa, Homo sapiens
MEDMNEYSNIEEFAEGSKINASKNQQDDGKMFIGGLSWDTSKKDLTEYLSRFGEVVDCTIKTDPVTGRSRGFGFVLFKDAASVDKVLELKEHKLDGKLIDPKRAKALKGKEPPKKVFVGGLSPDTSEEQIKEYFGAFGEIENIELPMDTKTNERRGFCFITYTDEEPVKKLLESRYHQIGSGKAAHDSPRSSSQ

SEQ ID NO: 884172 - protein, 420 aa, Homo sapiens; identical to SEQ ID NO: 884146

SEQ ID NO: 884173 - protein, 203 aa, Homo sapiens
MFIGGLSWDTSKKDLTEYLSRFGEVVDCTIKTDPVTGRSRGFGFVLFKDAASVDKVLELKEHKLDGKLIDPKRAKALKGKEPPKKVFVGGLSPDTSEEQIKEYFGAFGEIENIELPMDTKTNERRGFCFITYTDEEPVKKLLESRYHQIGSGKCEIKVAQPKEVYRQQQQQQKGGRGAAAGGRGGTRGRGRAGPKLDANSRLF

SEQ ID NO: 884174 - protein, 338 aa, Homo sapiens
GAQGSLIKLIPPLQRSAAAAAATRTARQHPPADSSVTMEDMNEYSNIEEFAEGSKINASKNQQDDGKMFIGGLSWDTSKKDLTEYLSRFGEVVDCTIKTDPVTGRSRGFGFVLFKDAASVDKVLELKEHKLDGKLIDPKRAKALKGKEPPKKVFVGGLSPDTSEEQIKEYFGAFGEIENIELPMDTKTNERRGFCFITYTDEEPVKKLLESRYHQIGSGKCEIKVAQPKEVYRQQQQQQKGGRGAAAGGRGGTRGRGRGQGQNWNQGFNNYYDQGYGNYNSAYGGDQNYSGYGGYDYTGYNYGNYGYGQGYADYSGQQSTYGKASRGGGNHQNNYQPY

SEQ ID NO: 884175 - protein, 301 aa, Homo sapiens; identical to SEQ ID NO: 884149

SEQ ID NO: 884176 - protein, 301 aa, Homo sapiens; identical to SEQ ID NO: 884149

SEQ ID NO: 884177 - protein, 301 aa, Homo sapiens; identical to SEQ ID NO: 884149

SEQ ID NO: 884178 - protein, 301 aa, Homo sapiens; identical to SEQ ID NO: 884149

SEQ ID NO: 884179 - protein, 301 aa, Homo sapiens; identical to SEQ ID NO: 884149

SEQ ID NO: 884180 - protein, 227 aa, Homo sapiens; identical to SEQ ID NO: 884158

SEQ ID NO: 884181 - protein, 244 aa, Homo sapiens; identical to SEQ ID NO: 884162

SEQ ID NO: 884182 - protein, 301 aa, Homo sapiens; identical to SEQ ID NO: 884149

SEQ ID NO: 884183 - protein, 135 aa, Homo sapiens
MWAEAFPTMETEVSMHNEGSVHRSPSRHCREGSSRVRAKTGTKDLITIMIKDMEITIVPMVVIKTIVAMADMIILGITMGTMDMDRDMQTTVANRALMARHLEGVAITKTITSHTKGEHWRKQVCIRVQENSRNV

SEQ ID NO: 884184 - protein, 244 aa, Homo sapiens; identical to SEQ ID NO: 884162

SEQ ID NO: 884185 - protein, 209 aa, Homo sapiens
MEDMNEYSNIEEFAEGSKINASKNQQDDGKMFIGGLSWDTSKKDLTEYLSRFGEVVDCTIKTDPVTGRSRGFGFVLFKDAASVDKVLELKEHKLDGKLIDPKRAKALKGKEPPKKVFVGGLSPDTSEEQIKEYFGAFGEIENIELPMDTKTNERRGFCFITYTDEEPVKKLLESRYHQIGSGKSCTNLTGILFLFLGGDVKVTHLAGRH

SEQ ID NO: 884186 - protein, 301 aa, Homo sapiens
MEDMNEYSNIEEFAEGSKINASKNQQDDGKMFIGGLSWDTSKKDLTEYLSRFGEVVDCTIKTDPVTGRSRGFGFVLFKDAASVDKVLELKEHKLDGKLIDPKRAKALKGKEPPKKVFVGGLSPDTSEEQIKEYFGAFGEIENIELPMDTKTNERRGFCFITYTDEEPVKKLLESRYHQIGSGKCEIKVAQPKEVYRQQQQQQKGGRGAAAGGRGGTRGRGRGQGQNWNQGFNNYYDQGYGNYNSAYGGDQNYSGYGGYDYTGYNYGNYGYGQGYADYSGQQSTYGKASRGGGNHQNNYQPG

SEQ ID NO: 884187 - protein, 305 aa, Homo sapiens
  misc_feature (190)..(190): Xaa can be any naturally occurring amino acid
  misc_feature (202)..(204): Xaa can be any naturally occurring amino acid
  misc_feature (225)..(225): Xaa can be any naturally occurring amino acid
  misc_feature (227)..(228): Xaa can be any naturally occurring amino acid
  misc_feature (231)..(233): Xaa can be any naturally occurring amino acid
  misc_feature (237)..(237): Xaa can be any naturally occurring amino acid
MEDMNEYSNIEEFAEGSKINASKNQQDDGKMFIGGLSWDTSKKDLTEYLSRFGEVVDCTIKTDPVTGRSRGFGFVLFKDAASVDKVLELKEHKLDGKLIDPKRAKALKGKEPPKKVFVGGLSPDTSEEQIKEYFGAFGEIENIELPMDTKTNERRGFCFITYTDEEPVKKLLESRYHQIGSGKTAPGNGXQSAQPKKPKNQXXXQQKSRTPPPPGAPTGTRGPAXRXXQDXXXGRKXQEEQGYGNYNSAYGGDQNYSGYGGYDYTGYNYGNYGYGQGYADYSGQQSTYGKASRGGGNHQNNYQPY

SEQ ID NO: 884188 - protein, 242 aa, Homo sapiens
  misc_feature (223)..(223): Xaa can be any naturally occurring amino acid
  misc_feature (240)..(240): Xaa can be any naturally occurring amino acid
MEDMNEYSNIEEFAEGSKINASKNQQDDGKMFIGGLSWDTSKKDLTEYLSRFGEVVDCTIKTDPVTGRSRGFGFVLFKDAASVDKVLELKEHKLDGKLIDPKRAKALKGKEPPKKVFVGGLSPDTSEEQIKEYFGAFGEIENIELPMDTKTNERRGFCFITYTDEEPVKKLLESRYHQIGSGKCEIKVAQPKEVYRQQQQQQKGGRGAAAGGRGGTRGRGRAXGSLGPRVKGPKLGKPKXFK

SEQ ID NO: 884189 - protein, 228 aa, Homo sapiens
MEDMNEYSNIEEFAEGSKINASKNQQDDGKMFIGGLSWDTSKKDLTEYLSRFGEVVDCTIKTDPVTGRSRGFGFVLFKDAASVDKVLELKEHKLDGKLIDPKRAKALKGKEPPKKVFVGGLSPDTSEEQIKEYFGAFGEIENIELPMDTKTNERRGFCFITYTDEEPVKKLLESRYHQIGSGKDIKVPTPRGYKQQRTTKGEVLRGGSVQGRRSGKTGNLQENKHGAK

SEQ ID NO: 884190 - protein, 210 aa, Homo sapiens
MEQDKHTTRPDKETDNKRGERKEAPERHHEEEKKQKQRAEKGAEVKTKTRRQRTNSRRGGKQTRQTTRKNEQDTKTQTKARQPSGKEKTRRDKEAKEKPIITNKGNNEGQKENRGEGHESGAEQVKVSEQQRQRTAEENRRESEEEGARRARNGGEGGSTGRDAEQRRKGAAPSRGEGGRERRGGTGERAREARGQTEERRGRKKEQRVD

SEQ ID NO: 884191 - protein, 153 aa, Homo sapiens
MKHTQSGQSTSPLVIDYTCRVCQMAFVFSSLIPLLLMTPVFCLGNTSECFQNFSQSHKCILMHSPPSAMAELPPSANTSVCSTLYFYGIAIFLGSFVLSLLTIMVLLIRAQTLYKKFVKSTGFLGSEQWAVIHIVDQRVRFYPVAFFCCWGPG

SEQ ID NO: 884192 - protein, 102 aa, Homo sapiens [sequence omitted]

SEQ ID NO: 884193 - protein, 245 aa, Homo sapiens
MKHTQSGQSTSPLVIDYTCRVCQMAFVFSSLIPLLLMTPVFCLGNTSECFQNFSQSHKCILMHSPPSAMAELPPSANTSVCSTLYFYGIAIFLGSFVLSLLTIMVLLIRAQTLYKKFVKSTGFLGSEQWAVIHIVDQRVRFYPVAFFCCWGPAVILMIIKLTKPQDTKLHMALYVLQALTATSQGLLNCGVYGWTQHKFHQLKQEARRDADTQTPLLCSQKRFYSRGLNSLESTLTFPASTSTIF

SEQ ID NO: 884194 - protein, 245 aa, Homo sapiens; identical to SEQ ID NO: 884193

SEQ ID NO: 884195 - protein, 311 aa, Homo sapiens
SRGSLTPCHKVKSTGFLGSEQWAVIHIVDQRVRFYPVTFFCCWGIFYISSFLYTVNYIWYLYTELRMKHTQSGQSTSPLVIDYTCRVCQMAFVFSSLIPLLLMTPVFCLGNTSECFQNFSQSHKCILMHSPPSAMAELPPSANTSVCSTLYFYGIAIFLGSFVLSLLTIMVLLIRAQTLYKKFVKSTGFLGSEQWAVIHIVDQRVRFYPVAFFCCWGPAVILMIIKLTKPQDTKLHMALYVLQALTATSQGLLNCGVYGWTQHKFHQLKQEARRDADTQTPLLCSQKRFYSRGLNSLESTLTFPASTSTIF

SEQ ID NO: 884196 - protein, 163 aa, Homo sapiens
MATLSVIGSSSLIAYAVFHNIQKSPEIRPLFYLSFCDLLLGLCWLTETLLYGASVANKDIICYNLQAVGQIFYISSFLYTVNYIWYLYTELRMKHTQSGQSTSPLVIDYTCRVCQMAFVFSSLIPLLLMTPVFCLGNTSECFQNFSQSHKSYLSEPRHCIRSL

SEQ ID NO: 884197 - protein, 244 aa, Homo sapiens
MATLSVIGSSSLIAYAVFHNIQKSPEIRPLFYLSFCDLLLGLCWLTETLLYGASVANKDIICYNLQAVGQIFYISSFLYTVNYIWYLYTELRMKHTQSGQSTSPLVIDYTCRVCQMAFVFSSLIPLLLMTPVFCLGNTSECFQNFSQSHKCILMHSPPSAMAELPPSANTSVCSTLYFYGIAIFLGSFVLSLLTIMGRCLGLLPGLECSGASRLTATSASRVRAVLLPRPPEWLELEAHAATTG

SEQ ID NO: 884198 - protein, 189 aa, Homo sapiens
MATLSVIGSSSLIAYAVFHNIQKSPEIRPLFYLSFCDLLLGLCWLTETLLYGASVANKDIICYNLQAVGQIFYISSFLYTVNYIWYLYTELRMKHTQSGQSTSPLVIDYTCRVCQMAFVFSSLIPLLLMTPVFCLGNTSECFQNFSQSHKCILMHSPPSAMAELPPSANTSVCSTLYFYGLTYPSPDIV

SEQ ID NO: 884199 - protein, 210 aa, Homo sapiens
MATLSVIGSSSLIAYAVFHNIQKSPEIRPLFYLSFCDLLLGLCWLTETLLYGASVANKDIICYNLQAVGQIFYISSFLYTVNYIWYLYTELRMKHTQSGQSTSPLVIDYTCRVCQMAFVFSSLIPLLLMTPVFCLGNTSECFQNFSQSHKCILMHSPPSAMAELPPSANTSVCSTLYFYGIAIFLGSFVLSLLTIMVWYHPTFLCGEMRK

SEQ ID NO: 884200 - protein, 302 aa, Homo sapiens
MATLSVIGSSSLIAYAVFHNIQKSPEIRPLFYLSFCDLLLGLCWLTETLLYGASVANKDIICYNLQAVGQVIDYTCRVCQMAFVFSSLIPLLLMTPVFCLGNTSECFQNFSQSHKCILMHSPPSAMAELPPSANTSVCSTLYFYGIAIFLGSFVLSLLTIMVLLIRAQTLYKKFVKSTGFLGSEQWAVIHIVDQRVRFYPVAFFCCWGPAVILMIIKLTKPQDTKLHMALYVLQALTATSQGLLNCGVYGWTQHKFHQLKQEARRDADTQTPLLCSQKRFYSRGLNSLESTLTFPASTSTIF

SEQ ID NO: 884201 - protein, 337 aa, Homo sapiens
MATLSVIGSSSLIAYAVFHNIQKSPEIRPLFYLSFCDLLLGLCWLTETLLYGASVANKDIICYNLQAVGQIFYISSFLYTVNYIWYLYTELRMKHTQSGQSTSPLVIDYTCRVCQMAFVFSSLIPLLLMTPVFCLGNTSECFQNFSQSHKCILMHSPPSAMAELPPSANTSVCSTLYFYGIAIFLGSFVLSLLTIMVLLIRAQTLYKKFVKSTGFLGSEQWAVIHIVDQRVRFYPVAFFCCWGPAVILMIIKLTKPQDTKLHMALYVLQALTATSQGLLNCGVYGWTQHKFHQLKQEARRDADTQTPLLCSQKRFYSRGLNSLESTLTFPASTSTIF

SEQ ID NO: 884202 - protein, 222 aa, Homo sapiens
MAFVFSSLIPLLLMTPVFCLGNTSECFQNFSQSHKCILMHSPPSAMAELPPSANTSVCSTLYFYGIAIFLGSFVLSLLTIMVLLIRAQTLYKKFVKSTGFLGSEQWAVIHIVDQRVRFYPVAFFCCWGPAVILMIIKLTKPQDTKLHMALYVLQALTATSQGLLNCGVYGWTQHKFHQLKQEARRDADTQTPLLCSQKRFYSRGLNSLESTLTFPASTSTIF

SEQ ID NO: 884203 - protein, 222 aa, Homo sapiens; identical to SEQ ID NO: 884202

SEQ ID NO: 884204 - protein, 151 aa, Homo sapiens
MFPKLQSEPQVLLIRAQTLYKKFVKSTGFLGSEQWAVIHIVDQRVRFYPVAFFCCWGPAVILMIIKLTKPQDTKLHMALYVLQALTATSQGLLNCGVYGWTQHKFHQLKQEARRDADTQTPLLCSQKRFYSRGLNSLESTLTFPASTSTIF

SEQ ID NO: 884205 - protein, 244 aa, Homo sapiens; identical to SEQ ID NO: 884197

SEQ ID NO: 884206 - protein, 210 aa, Homo sapiens; identical to SEQ ID NO: 884199

SEQ ID NO: 884207 - protein, 111 aa, Homo sapiens
TPPCRREHPINFESVGPTIVGRVAWRSWFRRFLGMSVAFVPDWLRGKAEVNQETIQRLLEENDQLIRCIVEYQNKGRGNECVQYQHVLHRNLIYLATIADASPTSTSKAME

SEQ ID NO: 884208 - protein, 111 aa, Homo sapiens; identical to SEQ ID NO: 884207

SEQ ID NO: 884209 - protein, 111 aa, Homo sapiens; identical to SEQ ID NO: 884207

SEQ ID NO: 884210 - protein, 459 aa, Homo sapiens
KRLGFGSGPMRAGLRGAGRTVAAAGGGGGGAAAAEADWGGGGLARPGLACQGAGGGGSSTMSLQYGAEETPLAGSYGAADSFPKDFGYGVEEEEEEAAAAGGGVGAGAGGGCGPGGADSSKPRILLMGLRRSGKSSIQKVVFHKMSPNETLFLESTNKIYKDDISNSSFVNFQIWDFPGQMDFFDPTFDYEMIFRGTGALIYVIDAQDDYMEALTRLHITVSKAYKVNPDMNFEVFIHKVDGLSDDHKIETQRDIHQRANDDLADAGLEKLHLSFYLTSIYDHSIFEAFSKVVQKLIPQLPTLENLLNIFISNSGIEKAFLFDVVSKIYIATDSSPVDMQSYELCCDMIDVVIDVSCIYGLKEDGSGSAYDKESMAIIKLNNTTVLYLKEVTKFLALVCILREESFERKGLIDYNFHCFRKAIHEVFEVGVTSHRSCGHQTSASSLKALTHNGTPRNAI

SEQ ID NO: 884211 - protein, 459 aa, Homo sapiens; identical to SEQ ID NO: 884210

SEQ ID NO: 884212 - protein, 459 aa, Homo sapiens; identical to SEQ ID NO: 884210

SEQ ID NO: 884213 - protein, 459 aa, Homo sapiens; identical to SEQ ID NO: 884210

SEQ ID NO: 884214 - protein, 249 aa, Homo sapiens [sequence omitted]

SEQ ID NO: 884215 - protein, 258 aa, Homo sapiens
MEEMKKTAIRLPKGKQKPIKTEWNSRCVLFTYFQGDISSVVDEHFSRALSNIKSPQELTPSSQSEGVMLKNDDSMSPNQWRYSSPWTKPQPEVPVTNRAANCNLHVPGPMAVNQFSPSLARRASVRPGELWHFSSLAGTSSLEPGYSHPFPARHLVPEPQPDGKREPLLSLLQQDRCLARPQESAARENGNPGQIAGSTGLLFNLPPGSVHYKKLYVSRGSASTSLPNETLSELETPGKYSLTPPNHWGHPHRYLQHL

SEQ ID NO: 884216 - protein, 211 aa, Homo sapiens
MEEMKKTAIRLPKGKQKPIKTEWNSRCVLFTYFQGDISSVVDEHFSRALSNIKSPQELTPSSQSEGVMLKNDDSMSPNQWRYSSPWTKPQPEVPVTNRAANCNLHVPGPMAVNQFSPSLARRASVRPGELWHFSSLAGTSSLEPGYSHPFPARHLVPEPQPDGKHKKLYVSRGSASTSLPNETLSELETPGKYSLTPPNHWGHPHRYLQHL

SEQ ID NO: 884217 - protein, 79 aa, Homo sapiens
KGTTGFTTLGTVTCTVSTSLAGAVGHSTSGFPGHAITTLGTICLGPPTSIPAASLVKLEEKDNTWSKTRQQDIPAYCSR

SEQ ID NO: 884218 - protein, 111 aa, Homo sapiens
MGALLQRKSEVQVAYMGSFMDTDQRKTVSQGRAAILNLLPITSYPRPQVTWFREGHKIIPSNRIAITLENQLVILATTTSDAGAYYVQAVNEKNGENKTSPFIHLSIASEF

SEQ ID NO: 884219 - protein, 117 aa, Homo sapiens
MGALLQRKSEVQVAYMGSFMDTDQRKTVSQGRAAILNLLPITSYPRPQVTWFREGHKIIPSNRIAITLENQLVILATTTSDAGAYYVQAVNEKNGENKTSPFIHLSIASFCGNTTQD

SEQ ID NO: 884220 - protein, 223 aa, Homo sapiens
MGALLQRKSEVQVAYMGSFMDTDQRKTVSQGRAAILNLLPITSYPRPQVTWFREGHKIIPSNRIAITLENQLVILATTTSDAGAYYVQAVNEKNGENKTSPFIHLSIARDVGTPETMAPTIVVPPGNRSVVAGSSETTLECIASARPVEDLSVTWKRNGVRITSGLHSFGRRLTISNPTSADTGPYVCEAALPGSAFEPARATAFLFIIGNAGASKWCCQHLR

SEQ ID NO: 884221 - protein, 293 aa, Homo sapiens
MGALLQRKSEVQVAYMGSFMDTDQRKTVSQGRAAILNLLPITSYPRPQVTWFREGHKIIPSNRIAITLENQLVILATTTSDAGAYYVQAVNEKNGENKTSPFIHLSIARDVGTPETMAPTIVVPPGNRSVVAGSSETTLECIASARPVEDLSVTWKRNGVRITSGLHSFGRRLTISNPTSADTGPYVCEAALPGSAFEPARATAFLFIIEPPYFTAEPESRISAEVEETVDIGCQAMGVPLPTLQWYKDAISISRLQNPRYKVLASGGLRIQKLRPEDSGIFQCFASNEGGEI

SEQ ID NO: 884222 - protein, 214 aa, Homo sapiens
MGALLQRKSEVQVAYMGSFMDTDQRKTVSQGRAAILNLLPITSYPRPQVTWFREGHKIIPSNRIAITLENQLVILATTTSDAGAYYVQAVNEKNGENKTSPFIHLSIARDVGTPETMAPTIVVPPGNRSVVAGSSETTLECIASARPVEDLSVTWKRNGVRITSGLHSFGRRLTISNPTSADTGPYVCEAALPGSAFEPARATAFLFIIGPTLF

SEQ ID NO: 884223 - protein, 351 aa, Homo sapiens
MTLRLLEDWCRGMDMNPRKALLIAGISQSCSVAEIEEALQAGLAPLGEYRLLGRMFRRDENRKVALVGLTAETSHALVPKEIPGKGGIWRVIFKPPDPDNTFLSRLNEFLAGEGMTVGELSRALGHENGSLDPEQGMIPEMWAPMLAQALEALQPALQCLKYKKLRVFSGRESPEPGEEEFGRWMFHTTQMIKAWQVPDVEKRRRLLESLRGPALDVIRVLKINNPLITVDECLQALEEVFGVTDNPRELQVKYLTTYQKDEEKLSAYVLRLEPLLQKLVQRGAIERDAVNQARLDQVIAGAVHKTIRRELNLPEDGPAPGFLQLLVLIKDYEAAEEEEALLQAILEGNFT

SEQ ID NO: 884224 - protein, 351 aa, Homo sapiens; identical to SEQ ID NO: 884223

SEQ ID NO: 884225 - protein, 215 aa, Homo sapiens [sequence omitted]

SEQ ID NO: 884226 - protein, 277 aa, Homo sapiens
MFDGDSQIPGKGGIWRVIFKPPDPDNTFLSRLNEFLAGEGMTVGELSRALGHENGSLDPEQGMIPEMWAPMLAQALEALQPALQCLKYKKLRVFSGRESPEPGEEEFGRWMFHTTQMIKAWQVPDVEKRRRLLESLRGPALDVIRVLKINNPLITVDECLQALEEVFGVTDNPRELQVKYLTTYQKDEEKLSAYVLRLEPLLQKLVQRGAIERDAVNQARLDQVIAGAVHKTIRRELNLPEDGPAPGFLQLLVLIKDYEAAEEEEALLQAILEGNFT

SEQ ID NO: 884227 - protein, 1462 aa, Homo sapiens
MAPVHGDDSLSDSGSFVSSRARREKKSKKGRQEALERLKKAKAGEKYKYEVEDFTGVYEEVDEEQYSKLVQARQDDDWIVDDDGIGYVEDGREIFDDDLEDDALDADEKGKDGKARNKDKRNVKKLAVTKPNNIKSMFIACAGKKTADKAVDLSKDGLLGDILQDLNTETPQITPPPVMILKKKRSIGASPNPFSVHTATAVPSGKIASPVSRKEPPLTPVPLKRAEFAGDDVQVESTEEEQESGAMEFEDGDFDEPMEVEEVDLEPMAAKAWDKESEPAEEVKQEADSGKGTVSYLGSFLPDVSCWDIDQEGDSSFSVQEVQVDSSHLPLVKGADEEQVFHFYWLDAYEDQYNQPGVVFLFGKVWIESAETHVSCCVMVKNIERTLYFLPREMKIDLNTGKETGTPISMKDVYEEFDEKIATKYKIMKFKSKPVEKNYAFEIPDVPEKSEYLEVKYSAEMPQLPQDLKGETFSHVFGTNTSSLELFLMNRKIKGPCWLEVKKSTALNQPVSWCKVEAMALKPDLVNVIKDVSPPPLVVMAFSMKTMQNAKNHQNEIIAMAALVHHSFALDKAAPKPPFQSHFCVVSKPKDCIFPYAFKEVIEKKNVKVEVAATERTLLGFFLAKVHKIDPDIIVGHNIYGFELEVLLQRINVCKAPHWSKIGRLKRSNMPKLGGRSGFGERNATCGRMICDVEISAKELIRCKSYHLSELVQQILKTERVVIPMENIQNMYSESSQLLYLLEHTWKDAKFILQIMCELNVLPLALQITNIAGNIMSRTLMGGRSERNEFLLLHAFYENNYIVPDKQIFRKPQQKLGDEDEEIDGDTNKYKKGRKKGAYAGGLVLDPKVGFYDKFILLLDFNSLYPSIIQEFNICFTTVQRVASEAQKVTEDGEQEQIPELPDPSLEMGILPREIRKLVERRKQVKQLMKQQDLNPDLILQYDIRQKALKLTANSMYGCLGFSYSRFYAKPLAALVTYKGREILMHTKEMVQKMNLEVIYGDTDSIMINTNSTNLEEVFKLGNKVKSEVNKLYKLLEIDIDGVFKSLLLLKKKKYAALVVEPTSDGNYVTKQELKGLDIVRRDWCDLAKDTGNFVIGQILSDQSRDTIVENIQKRLIEIGENVLNGSVPVSQFEINKALTKDPQDYPDKKSLPHVHVALWINSQGGRKVKAGDTVSYVICQDGSNLTASQRAYAPEQLQKQDNLTIDTQYYLAQQIHPVVARICEPIDGIDAVLIATWLGLDPTQFRVHHYHKDEENDALLGGPAQLTDEEKYRDCERFKCPCPTCGTENIYDNVFDGSGTDMEPSLYRCSNIDCKASPLTFTVQLSNKLIMDIRRFIKKYYDGWLICEEPTCRNRTRHLPLQFSRTGPLCPACMKATLQPEYSDKSLYTQLCFYRYIFDAECALEKLTTDHEKDKLKKQFFTPKVLQDYRKLKNTAEQFLSRSGYSEVNLSKLFAGCAVKS

SEQ ID NO: 884228 - protein, 119 aa, Homo sapiens
MALKPDLVNVIKDVSPPPLVVMAFSMKTMQNAKNHQNEIIAMAALVHHSFALDKAAPKPPFQSHFCVVSKPKDCIFPYAFKEVIEKKVKCSLYEASVCLERERKGGWYGLVEKRCFIFY

SEQ ID NO: 884229 - protein, 1401 aa, Homo sapiens
MAKILLATFRNLIPVLNFVPADGIGYVEDGREIFDDDLEDDALDADEKGKDGKARNKDKRNVKKLAVTKPNNIKSMFIACAGKKTADKAVDLSKDGLLGDILQDLNTETPQITPPPVMILKKKRSIGASPNPFSVHTATAVPSGKIASPVSRKEPPLTPVPLKRAEFAGDDVQVESTEEEQESGAMEFEDGDFDEPMEVEEVDLEPMAAKAWDKESEPAEEVKQEADSGKGTVSYLGSFLPDVSCWDIDQEGDSSFSVQEVQVDSSHLPLVKGADEEQVFHFYWLDAYEDQYNQPGVVFLFGKVWIESAETHVSCCVMVKNIERTLYFLPREMKIDLNTGKETGTPISMKDVYEEFDEKIATKYKIMKFKSKPVEKNYAFEIPDVPEKSEYLEVKYSAEMPQLPQDLKGETFSHVFGTNTSSLELFLMNRKIKGPCWLEVKKSTALNQPVSWCKVEAMALKPDLVNVIKDVSPPPLVVMAFSMKTMQNAKNHQNEIIAMAALVHHSFALDKAAPKPPFQSHFCVVSKPKDCIFPYAFKEVIEKKNVKVEVAATERTLLGFFLAKVHKIDPDIIVGHNIYGFELEVLLQRINVCKAPHWSKIGRLKRSNMPKLGGRSGFGERNATCGRMICDVEISAKELIRCKSYHLSELVQQILKTERVVIPMENIQNMYSESSQLLYLLEHTWKDAKFILQIMCELNVLPLALQITNIAGNIMSRTLMGGRSERNEFLLLHAFYENNYIVPDKQIFRKPQQKLGDEDEEIDGDTNKYKKGRKKGAYAGGLVLDPKVGFYDKFILLLDFNSLYPSIIQEFNICFTTVQRVASEAQKVTEDGEQEQIPELPDPSLEMGILPREIRKLVERRKQVKQLMKQQDLNPDLILQYDIRQKALKLTANSMYGCLGFSYSRFYAKPLAALVTYKGREILMHTKEMVQKMNLEVIYGDTDSIMINTNSTNLEEVFKLGNKVKSEVNKLYKLLEIDIDGVFKSLLLLKKKKYAALVVEPTSDGNYVTKQELKGLDIVRRDWCDLAKDTGNFVIGQILSDQSRDTIVENIQKRLIEIGENVLNGSVPVSQFEINKALTKDPQDYPDKKSLPHVHVALWINSQGGRKVKAGDTVSYVICQDGSNLTASQRAYAPEQLQKQDNLTIDTQYYLAQQIHPVVARICEPIDGIDAVLIATWLGLDPTQFRVHHYHKDEENDALLGGPAQLTDEEKYRDCERFKCPCPTCGTENIYDNVFDGSGTDMEPSLYRCSNIDCKASPLTFTVQLSNKLIMDIRRFIKKYYDGWLICEEPTCRNRTRHLPLQFSRTGPLCPACMKATLQPEYSDKSLYTQLCFYRYIFDAECALEKLTTDHEKDKLKKQFFTPKVLQDYRKLKNTAEQFLSRSGYSEVNLSKLFAGCAVKS

SEQ ID NO: 884230 - protein, 619 aa, Homo sapiens
RGFLISGFYDKFILLLDFNSLYPSIIQEFNICFTTVQRVASEAQKVTEDGEQEQIPELPDPSLEMGILPREIRKLVERRKQVKQLMKQQDLNPDLILQYDIRQKALKLTANSMYGCLGFSYSRFYAKPLAALVTYKGREILMHTKEMVQKMNLEVIYGDTDSIMINTNSTNLEEVFKLGNKVKSEVNKLYKLLEIDIDGVFKSLLLLKKKKYAALVVEPTSDGNYVTKQELKGLDIVRRDWCDLAKDTGNFVIGQILSDQSRDTIVENIQKRLIEIGENVLNGSVPVSQFEINKALTKDPQDYPDKKSLPHVHVALWINSQGGRKVKAGDTVSYVICQDGSNLTASQRAYAPEQLQKQDNLTIDTQYYLAQQIHPVVARICEPIDGIDAVLIATWLGLDPTQFRVHHYHKDEENDALLGGPAQLTDEEKYRDCERFKCPCPTCGTENIYDNVFDGSGTDMEPSLYRCSNIDCKASPLTFTVQLSNKLIMDIRRFIKKYYDGWLICEEPTCRNRTRHLPLQFSRTGPLCPACMKATLQPEYSDKSLYTQLCFYRYIFDAECALEKLTTDHEKDKLKKQFFTPKVLQDYRKLKNTAEQFLSRSGYSEVNLSKLFAGCAVKS

SEQ ID NO: 884231 - protein, 1309 aa, Homo sapiens
MAPVHGDDSLSDSGSFVSSRARREKKSKKGRQEALERLKKAKAGEKYKYEVEDFTGVYEEVDEEQYSKLVQARQDDDWIVDDDGIGYVEDGREIFDDDLEDDALDADEKGKDGKARNKDKRNVKKLAVTKPNNIKSMFIACAGKKTADKAVDLSKDGLLGDILQDLNTETPQITPPPVMILKKKRSIGASPNPFSVHTATAVPSGKIASPVSRKEPPLTPVPLKRAEFAGDDVQVESTEEEQESGAMEFEDGDFDEPMEVEEVDLEPMAAKAWDKESEPAEEVKQEADSGKGTVSYLGSFLPDVSCWDIDQEGDSSFSVQEVQVDSSHLPLVKGADEEQVFHFYWLDAYEDQYNQPGVVFLFGKVWIESAETHVSCCVMVKNIERTLYFLPREMKIDLNTGKETGTPISMKDVYEEFDEKIATKYKIMKFKSKPVEKNYAFEIPDVPEKSEYLEVKYSAEMPQLPQDLKGETFSHVFGTNTSSLELFLMNRKIKGPCWLEVKKSTALNQPVSWCKVEAMALKPDLVNVIKDVSPPPLVVMAFSMKTMQNAKNHQNEIIAMAALVHHSFALDKAAPKPPFQSHFCVVSKPKDCIFPYAFKEVIEKKNVKVEVAATERTLLGFFLAKVHKIDPDIIVGHNIYGFELEVLLQRINVCKAPHWSKIGRLKRSNMPKLGGRSGFGERNATCGRMICDVEISAKELIRCKSYHLSELVQQILKTERVVIPMENIQNMYSESSQLLYLLEHTWKDAKFILQIMCELNVLPLALQITNIAGNIMSRTLMGGRSERNEFLLLHAFYENNYIVPDKQIFRKPQQKLGDEDEEIDGDTNKYKKGRKKGAYAGGLVLDPKVGFYDKFILLLDFNSLYPSIIQEFNICFTTVQRVASEAQKVTEDGEQEQIPELPDPSLEMGILPREIRKLVERRKQVKQLMKQQDLNPDLILQYDIRQKALKLTANSMYGCLGFSYSRFYAKPLAALVTYKGREILMHTKEMVQKMNLEVIYGDTDSIMINTNSTNLEEVFKLGNKVKSEVNKLYKLLEIDIDGVFKSLLLLKKKKYAALVVEPTSDGNYVTKQELKGLDIVRRDWCDLAKDTGNFVIGQILSDQSRDTIVENIQKRLIEIGENVLNGSVPVSQFEINKALTKDPQDYPDKKSLPHVHVALWINSQGGRKVKAGDTVSYVICQDGSNLTASQRAYAPEQLQKQDNLTIDTQYYLAQQIHPVVARICEPIDGIDAVLIATWLGLDPTQFRVHHYHKDEENDALLGGPAQLTDEEKYRDCERFKCPCPTCGTENIYDNVFDGSVSCFCLSFCE

SEQ ID NO: 884232 - protein, 425 aa, Homo sapiens
MATAEVLNIGKKLYEGKTKEVYELLDSPGKVLLQSKDQITAGNAARKNHLEGKAAISNKITSCIFQLLQEAGIKTAFTRKCGETAFIAPQCEMIPIEWVCRRIATGSFLKRNPGVKEGYKFYPPKVELFFKDDANNDPQWSEEQLIAAKFCFAGLLIGQTEVDIMSHATQAIFEILEKSWLPQNCTLVDMKIEFGVDVTTKEIVLADVIDNDSWRLWPSGDRSQQKDKQSYRDLKEVTPEGLQMVKKNFEWVAERVELLLKSESQCRVVVLMGSTSDLGHCEKIKKACGNFGIPCELRVTSAHKGPDETLRIKAEYEGDGIPTVFVAVAGRSNGLGPVMSGNTAYPVISCPPLTPDWGVQDVWSSLRLPSGLGCSTVLSPEGSAQFAAQIFGLSNHLVWSKLRASILNTWISLKQADKKIRECNL

SEQ ID NO: 884233 - protein, 128 aa, Homo sapiens
RWSLPLLLRLECSGALSAHCNLHLPGLNDSPASASQVAGITGAHHHTQLIFCNFSRQGFTVLARLVSHATQAIFEILEKSWLPQNCTLVDMKVQIKQVQIKQQDLKVKVIVERCFHKIVFENFVDMLF

SEQ ID NO: 884234 - protein, 425 aa, Homo sapiens; identical to SEQ ID NO: 884232

SEQ ID NO: 884235 - protein, 425 aa, Homo sapiens; identical to SEQ ID NO: 884232

SEQ ID NO: 884236 - protein, 425 aa, Homo sapiens; identical to SEQ ID NO: 884232

SEQ ID NO: 884237 - protein, 425 aa, Homo sapiens; identical to SEQ ID NO: 884232

SEQ ID NO: 884238 - protein, 410 aa, Homo sapiens
MATAEVLNIGKKLYEGKTKEVYELLDSPGKVLLQSKDQITAGNAARKNHLEGKAAISNKITSCIFQLLQEAGIKTAFTRKCGETAFIAPQCEMIPIEWVCRRIATGSFLKRNPGVKEGYKFYPPKVELFFKDDANNDPQWSEEQLIAAKFCFAGLLIGQTEVDIMSHATQAIFEILEKSWLPQNCTLVDMKIEFGVDVTTKEIVLADVIDNDSWRLWPSGDRSQQKDKQSYRDLKEVTPEGLQMVKKNFEWVAERVELLLKSESQCRVVVLMGSTSDLGHCEKIKKACGNFGIPCELRVTSAHKGPDETLRIKAEYEGDGIPTVFVAVAGRSNGLGPVMSGNTAYPVISCPPLTPDWGVQDVWSSLRLPSDGVGLSCPGWSAMAQSQLTAASASQVQAVLVPQPPEYLGL

SEQ ID NO: 884239 - protein, 425 aa, Homo sapiens; identical to SEQ ID NO: 884232

SEQ ID NO: 884240 - protein, 425 aa, Homo sapiens; identical to SEQ ID NO: 884232

SEQ ID NO: 884241 - protein, 425 aa, Homo sapiens; identical to SEQ ID NO: 884232

SEQ ID NO: 884242 - protein, 372 aa, Homo sapiens
MATAEVLNIGKKLYEGKTKEVYELLDSPGKVLLQSKDQITAGNAARKNHLEGKAAISNKITSCIFQLLQEAGIKTAFTRKCGETAFIAPQCEMIPIEWVCRRIATGSFLKRNPGVKEGYKFYPPKVELFFKDDANNDPQWSEEQLIAAKFCFAGLLIGQTEVDIMSHATQAIFEILEKSWLPQNCTLVDMKIEFGVDVTTKEIVLADVIDNDSWRLWPSGDRSQQKDKQSYRDLKEVTPEGLQMVKKNFEWVAERVELLLKSESQCRVVVLMGSTSDLGHCEKIKKACGNFGIPCELRVTSAHKGPDETLRIKAEYEGLGCSTVLSPEGSAQFAAQIFGLSNHLVWSKLRASILNTWISLKQADKKIRECNL

SEQ ID NO: 884243 - protein, 425 aa, Homo sapiens; identical to SEQ ID NO: 884232

SEQ ID NO: 884244 - protein, 425 aa, Homo sapiens; identical to SEQ ID NO: 884232

SEQ ID NO: 884245 - protein, 425 aa, Homo sapiens; identical to SEQ ID NO: 884232

SEQ ID NO: 884246 - protein, 425 aa, Homo sapiens; identical to SEQ ID NO: 884232

SEQ ID NO: 884247 - protein, 449 aa, Homo sapiens
DHPSFLESSASLPGAVAALSPLRIMATAEVLNIGKKLYEGKTKEVYELLDSPGKVLLQSKDQITAGNAARKNHLEGKAAISNKITSCIFQLLQEAGIKTAFTRKCGETAFIAPQCEMIPIEWVCRRIATGSFLKRNPGVKEGYKFYPPKVELFFKDDANNDPQWSEEQLIAAKFCFAGLLIGQTEVDIMSHATQAIFEILEKSWLPQNCTLVDMKIEFGVDVTTKEIVLADVIDNDSWRLWPSGDRSQQKDKQSYRDLKEVTPEGLQMVKKNFEWVAERVELLLKSESQCRVVVLMGSTSDLGHCEKIKKACGNFGIPCELRVTSAHKGPDETLRIKAEYEGDGIPTVFVAVAGRSNGLGPVMSGNTAYPVISCPPLTPDWGVQDVWSSLRLPSGLGCSTVLSPEGSAQFAAQIFGLSNHLVWSKLRASILNTWISLKQADKKIRECNL

SEQ ID NO: 884248 - protein, 449 aa, Homo sapiens
DAWVDPRSSASLPGAVAALSPLRIMATAEVLNIGKKLYEGKTKEVYELLDSPGKVLLQSKDQITAGNAARKNHLEGKAAISNKITSCIFQLLQEAGIKTAFTRKCGETAFIAPQCEMIPIEWVCRRIATGSFLKRNPGVKEGYKFYPPKVELFFKDDANNDPQWSEEQLIAAKFCFAGLLIGQTEVDIMSHATQAIFEILEKSWLPQNCTLVDMKIEFGVDVTTKEIVLADVIDNDSWRLWPSGDRSQQKDKQSYRDLKEVTPEGLQMVKKNFEWVAERVELLLKSESQCRVVVLMGSTSDLGHCEKIKKACGNFGIPCELRVTSAHKGPDETLRIKAEYEGDGIPTVFVAVAGRSNGLGPVMSGNTAYPVISCPPLTPDWGVQDVWSSLRLPSGLGCSTVLSPEGSAQFAAQIFGLSNHLVWSKLRASILNTWISLKQADKKIRECNL

SEQ ID NO: 884249 - protein, 442 aa, Homo sapiens
YCLGDGEKEQSRGEREMAKGWKVLNIGKKLYEGKTKEVYELLDSPGKVLLQSKDQITAGNAARKNHLEGKAAISNKITSCIFQLLQEAGIKTAFTRKCGETAFIAPQCEMIPIEWVCRRIATGSFLKRNPGVKEGYKFYPPKVELFFKDDANNDPQWSEEQLIAAKFCFAGLLIGQTEVDIMSHATQAIFEILEKSWLPQNCTLVDMKIEFGVDVTTKEIVLADVIDNDSWRLWPSGDRSQQKDKQSYRDLKEVTPEGLQMVKKNFEWVAERVELLLKSESQCRVVVLMGSTSDLGHCEKIKKACGNFGIPCELRVTSAHKGPDETLRIKAEYEGDGIPTVFVAVAGRSNGLGPVMSGNTAYPVISCPPLTPDWGVQDVWSSLRLPSGLGCSTVLSPEGSAQFAAQIFGLSNHLVWSKLRASILNTWISLKQADKKIRECNL

SEQ ID NO: 884250 - protein, 432 aa, Homo sapiens
MATAEVLNIGKKLYEGKTKEVYELLDSPGKVLLQSKDQITAGNAARKNHLEGKAAISNKITSCIFQLLQEAVTSYKSNRIKTAFTRKCGETAFIAPQCEMIPIEWVCRRIATGSFLKRNPGVKEGYKFYPPKVELFFKDDANNDPQWSEEQLIAAKFCFAGLLIGQTEVDIMSHATQAIFEILEKSWLPQNCTLVDMKIEFGVDVTTKEIVLADVIDNDSWRLWPSGDRSQQKDKQSYRDLKEVTPEGLQMVKKNFEWVAERVELLLKSESQCRVVVLMGSTSDLGHCEKIKKACGNFGIPCELRVTSAHKGPDETLRIKAEYEGDGIPTVFVAVAGRSNGLGPVMSGNTAYPVISCPPLTPDWGVQDVWSSLRLPSGLGCSTVLSPEGSAQFAAQIFGLSNHLVWSKLRASILNTWISLKQADKKIRECNL

SEQ ID NO: 884251 - protein, 408 aa, Homo sapiens
MATAEVLNIGKKLYEGKTKEVYELLDSPGKVLLQSKDQITAGNAARKNHLEGKAAISNKITSCIFQLLQEAGIKTAFTRKCGETAFIAPQCEMIPIEWVCRRIATGSFLKRNPGVKEGYKFYPPKVELFFKDDANNDPQWSEEQLIAASHATQAIFEILEKSWLPQNCTLVDMKIEFGVDVTTKEIVLADVIDNDSWRLWPSGDRSQQKDKQSYRDLKEVTPEGLQMVKKNFEWVAERVELLLKSESQCRVVVLMGSTSDLGHCEKIKKACGNFGIPCELRVTSAHKGPDETLRIKAEYEGDGIPTVFVAVAGRSNGLGPVMSGNTAYPVISCPPLTPDWGVQDVWSSLRLPSGLGCSTVLSPEGSAQFAAQIFGLSNHLVWSKLRASILNTWISLKQADKKIRECNL

SEQ ID NO: 884252 - protein, 336 aa, Homo sapiens
MATAEVLNIGKKLYEGKTKEVYELLDSPGKVLLQSKDQITAGNAARKNHLEGKAAISNKITSCIFQLLQEAGIKTAFTRKCGETAFIAPQCEMIPIEWVCRRIATGSFLKRNPGVKEGYKFYPPKVELFFKDDANNDPQWSEEQLIAAKFCFAGLLIGQTEVDIMSHATQAIFEILEKSWLPQNCTLVDMKIEFGVDVTTKEIVLADVIDNDSWRLWPSGDRSQQKDKQSYRDLKEVTPEGLQMVKKNFEWVAERVELLLKSESQCRVVVLMGSTSDLGHCEKIKKACGNFGIPCELRVTSAHKGPDETLRIKAEYEGDGIPTVFVARQTISKHRI

SEQ ID NO: 884253 - protein, 408 aa, Homo sapiens; identical to SEQ ID NO: 884251

SEQ ID NO: 884254 - protein, 333 aa, Homo sapiens
MATAEVLNIGKKLYEGKTKEVYELLDSPGKVLLQSKDQITAGNAARKNHLEGKAAISNKITSCIFQLLQEAGIKTAFTRKCGETAFIAPQCEMIPIEWVCRRIATGSFLKRNPGVKEGYKFYPPKVELFFKDDANNDPQWSEEQLIAAKFCFAGLLIGQTEVDIMSHATQAIFEILEKSWLPQNCTLVDMKIEFGVDVTTKEIVLADVIDNDSWRLWPSGDRSQQKDKQSYRDLKEVTPEGLQMVKKNFEWVAERVELLLKSESQCRVVVLMGSTSDLGHCEKIKKACGNFGIPCELRVTSAHKGPDETLKTLSQKGKKKIADVTHEGNSFSS

SEQ ID NO: 884255 - protein, 298 aa, Homo sapiens
LSLVVKDWLMITMHRKTFRRKGECFVDHFGFLFCVWQSSHATQAIFEILEKSWLPQNCTLVDMKIEFGVDVTTKEIVLADVIDNDSWRLWPSGDRSQQKDKQSYRDLKEVTPEGLQMVKKNFEWVAERVELLLKSESQCRVVVLMGSTSDLGHCEKIKKACGNFGIPCELRVTSAHKGPDETLRIKAEYEGDGIPTVFVAVAGRSNGLGPVMSGNTAYPVISCPPLTPDWGVQDVWSSLRLPSGLGCSTVLSPEGSAQFAAQIFGLSNHLVWSKLRASILNTWISLKQADKKIRECNL

SEQ ID NO: 884256 - protein, 285 aa, Homo sapiens
MATAEVLNIGKKLYEGKTKEVYELLDSPGKVLLQSKDQITAGNAARKNHLEGKAAISNKITSCIFQLLQEAGIKTAFTRKCGETAFIAPQCEMIPIEWVCRRIATGSFLKRNPGVKEGYKFYPPKVELFFKDDANNDPQWSEEQLIAAKFCFAGLLIGQTEVDIMSHATQAIFEILEKSWLPQNCTLVDMKIEFGVDVTTKEIVLADVIDNDSWRLWPSGDRSQQKDKQSYRDLKEVTPEGLQMVKKNFEWVAERVELLLKSESQCRVVVLMGSTSDLGHCEKNC

SEQ ID NO: 884257 - protein, 229 aa, Homo sapiens
RGSPTSPTITDVIDNDSWRLWPSGDRSQQKDKQSYRDLKEVTPEGLQMVKKNFEWVAERVELLLKSESQCRVVVLMGSTSDLGHCEKIKKACGNFGIPCELRVTSAHKGPDETLRIKAEYEGDGIPTVFVAVAGRSNGLGPVMSGNTAYPVISCPPLTPDWGVQDVWSSLRLPSGLGCSTVLSPEGSAQFAAQIFGLSNHLVWSKLRASILNTWISLKQADKKIRECNL

SEQ ID NO: 884258 - protein, 182 aa, Homo sapiens [sequence omitted]

SEQ ID NO: 884259 - protein, 261 aa, Homo sapiens
MATAEVLNIGKKLYEGKTKEVYELLDSPGKVLLQSKDQITAGNAARKNHLEGKAAISNKITSCIFQLLQEAGIKTAFTRKCGETAFIAPQCEMIPIEWVCRRIATGSFLKRNPGVKEGYKFYPPKVELFFKDDANNDPQWSEEQLIAAKFCFAGLLIGQTEVDIMSHATQAIFEILEKSWLPQNCTLVDMKIEFGVDVTTKEIVLADVIDNDSWRLWPSGDRSQQKDKQSYRDLKEVTPEGLQMVKKNFEWVAERVEVNLL

SEQ ID NO: 884260 - protein, 259 aa, Homo sapiens
MATAEVLNIGKKLYEGKTKEVYELLDSPGKVLLQSKDQITAGNAARKNHLEGKAAISNKITSCIFQLLQEAGIKTAFTRKCGETAFIAPQCEMIPIEWVCRRIATGSFLKRNPGVKEGYKFYPPKVELFFKDDANNDPQWSEEQLIAAKFCFAGLLIGQTEVDIMSHATQAIFEILEKSWLPQNCTLVDMKIEFGVDVTTKEIVLADVIDNDSWRLWPSGDRSQQKDKQSYRDLKEVTPGRELIFLVILDCHTLVPLVL

SEQ ID NO: 884261 - protein, 254 aa, Homo sapiens
MATAEVLNIGKKLYEGKTKEVYELLDSPGKVLLQSKDQITAGNAARKNHLEGKAAISNKITSCIFQLLQEAGIKTAFTRKCGETAFIAPQCEMIPIEWVCRRIATGSFLKRNPGVKEGYKFYPPKVELFFKDDANNDPQWSEEQLIAAKFCFAGLLIGQTEVDIMSHATQAIFEILEKSWLPQNCTLVDMKIEFGVDVTTKEIVLADVIDNDSWRLWPSGDRSQQKDKQVDNASGFFILFEIKLRLASRDDRHL

SEQ ID NO: 884262 - protein, 254 aa, Homo sapiens; identical to SEQ ID NO: 884261

SEQ ID NO: 884263 - protein, 116 aa, Homo sapiens
AAARDLEREGQIQHYPDLDSPHSQSTLFQVDCPRTSNNKLSFAPQTSLKIYMLLTLSVENRTHKTYQQISLVLGFSRSLSMVYRLRIDEVAGHSGSHLRSQHFGRLKQADHLRSGV

SEQ ID NO: 884264 - protein, 152 aa, Homo sapiens
MATAEVLNIGKKLYEGKTKEVYELLDSPGKVLLQSKDQITAGNAARKNHLEGKAAISNKITSCIFQLLQEAGIKTAFTRKCGETAFIAPQCEMIPIEWVCRRIATGSFLKRNPGVKEGYKFYPPKVELFFKHCTPTWAAEQDSVSKGEKKNC

SEQ ID NO: 884265 - protein, 110 aa, Homo sapiens
MATAEVLNIGKKLYEGKTKEVYELLDSPGKVLLQSKDQITAGNAARKNHLEGKAAISNKITSCIFQLLQEAGKQLPQSLFSHLLWEACRCLSCEVGINMNNLFADVSKAK

SEQ ID NO: 884266 - protein, 254 aa, Homo sapiens; identical to SEQ ID NO: 884261

SEQ ID NO: 884267 - protein, 171 aa, Homo sapiens
MATAEVLNIGKKLYEGKTKEVYELLDSPGKVLLQSKDQITAGNAARKNHLEGKAAISNKITSCIFQLLQEAGIKTAFTRKCGETAFIAPQCEMIPIEWVCRRIATGSFLKRNPGVKEGYKFYPPKVELFFKDDANNDPQWSEEQLIAAKFCFAGLLIGQTEVDIISPVFQI

SEQ ID NO: 884268 - protein, 120 aa, Homo sapiens
DAWVDPRSSASLPGAVAALSPLRIMATAEVLNIGKKLYEGKTKEVYELLDSPGKVLLQSKDQITAGNAARKNHLEGKAAISNKITSCIFQLLQEAGTTALNQTIRVSDDLIEAVTPRSGH

SEQ ID NO: 884269 - protein, 249 aa, Homo sapiens
HSAHVCGCALALRVKMAERGYSFSLTTFSPSGKLVQIEYALAAVAGGAPSVGIKAANGVVLATEKKQKSILYDERSVHKVEPITKHIGLVYSGMGPDYRVLVHRARKLAQQYYLVYQEPIPTAQLVQRVASVMQEYTQSGGVRPFGVSLLICGWNEGRPYLFQSDPSGAYFAWKATAMGKNYVNGKTFLEKRYNEDLELEDAIHTAILTLKESFEGQMTEDNIEVGICNEAGFRRLTPTEVKDYLAAIA

SEQ ID NO: 884270 - protein, 241 aa, Homo sapiens
RLGARPGWWERGYSFPLTTFSPSGKLVQIEYALAAVAGGAPSVGIKAANGVVLATEKKQKSILYDERSVHKVEPITKHIGLVYSGMGPDYRVLVHRARKLAQQYYLVYQEPIPTAQLVQRVASVMQEYTQSGGVRPFGVSLLICGWNEGRPYLFQSDPSGAYFAWKATAMGKNYVNGKTFLEKRYNEDLELEDAIHTAILTLKESFEGQMTEDNIEVGICNEAGFRRLTPTEVKDYLAAIA

SEQ ID NO: 884271 - protein, 249 aa, Homo sapiens; identical to SEQ ID NO: 884269

SEQ ID NO: 884272 - protein, 241 aa, Homo sapiens; identical to SEQ ID NO: 884270

SEQ ID NO: 884273 - protein, 242 aa, Homo sapiens
RTRGSTHASRRGGTAYSLTTFSPSGKLVQIEYALAAVAGGAPSVGIKAANGVVLATEKKQKSILYDERSVHKVEPITKHIGLVYSGMGPDYRVLVHRARKLAQQYYLVYQEPIPTAQLVQRVASVMQEYTQSGGVRPFGVSLLICGWNEGRPYLFQSDPSGAYFAWKATAMGKNYVNGKTFLEKRYNEDLELEDAIHTAILTLKESFEGQMTEDNIEVGICNEAGFRRLTPTEVKDYLAAIA

SEQ ID NO: 884274 - protein, 249 aa, Homo sapiens; identical to SEQ ID NO: 884269

SEQ ID NO: 884275 - protein, 249 aa, Homo sapiens; identical to SEQ ID NO: 884269

SEQ ID NO: 884276 - protein, 249 aa, Homo sapiens; identical to SEQ ID NO: 884269

SEQ ID NO: 884277 - protein, 198 aa, Homo sapiens
HSAHVCGCALALRVKMAERGYSFSLTTFSPSGKLVQIEYALAAVAGGAPSVGIKAANGVVLATEKKQKSILYDERSVHKVEPITKHIGLVYSGMGPDYRVLVHRARKLAQQYYLVYQEPIPTAQLVQRVASVMQEYTQSGGVRPFGVSLLICGWNEGRPYLFQSDPSGAYFAWKATAMGKNYVNGKTFLEKRKALKGK

SEQ ID NO: 884278 - protein, 193 aa, Homo sapiens
HSAHVCGCALALRVKMAERGYSFSLTTFSPSGKLVQIEYALAAVAGGAPSVGIKAANGVVLATEKKQKSILYDERSVHKVEPITKHIGLVYSGMGPDYRVLVHRARKLAQQYYLVYQEPIPTAQLVQRVASVMQEYTQSGGVRPFGVSLLICGWNEGRPYLFQSDPSGAYFAWKATAMGKNYVNGKTFLEKRY

SEQ ID NO: 884279 - protein, 249 aa, Homo sapiens; identical to SEQ ID NO: 884269

SEQ ID NO: 884280 - protein, 249 aa, Homo sapiens; identical to SEQ ID NO: 884269

SEQ ID NO: 884281 - protein, 264 aa, Homo sapiens
HDETALLVATYEFQWRNGICPEFGHTAGVKMAERGYSFSLTTFSPSGKLVQIEYALAAVAGGAPSVGIKAANGVVLATEKKQKSILYDERSVHKVEPITKHIGLVYSGMGPDYRVLVHRARKLAQQYYLVYQEPIPTAQLVQRVASVMQEYTQSGGVRPFGVSLLICGWNEGRPYLFQSDPSGAYFAWKATAMGKNYVNGKTFLEKRYNEDLELEDAIHTAILTLKESFEGQMTEDNIEVGICNEAGFRRLTPTEVKDYLAAIA

SEQ ID NO: 884282 - protein, 156 aa, Homo sapiens
MGPDYRVLVHRARKLAQQYYLVYQEPIPTAQLVQRVASVMQEYTQSGGVRPFGVSLLICGWNEGRPYLFQSDPSGAYFAWKATAMGKNYVNGKTFLEKRYNEDLELEDAIHTAILTLKESFEGQMTEDNIEVGICNEAGFRRLTPTEVKDYLAAIA

SEQ ID NO: 884283 - protein, 249 aa, Homo sapiens; identical to SEQ ID NO: 884269

SEQ ID NO: 884284 - protein, 241 aa, Homo sapiens
HDETALLVATYEFQWRNGICPEFGHTAGVKMAERGYSFSLTTFSPSGKLVQIEYALAAVAGGAPSVGIKAANGVVLATEKKQKSILYDERSVHKVEPITKHIGLVYSGMGPDYRAQLVQRVASVMQEYTQSGGVRPFGVSLLICGWNEGRPYLFQSDPSGAYFAWKATAMGKNYVNGKTFLEKRYNEDLELEDAIHTAILTLKESFEGQMTEDNIEVGICNEAGFRRLTPTEVKDYLAAIA

SEQ ID NO: 884285 - protein, 156 aa, Homo sapiens; identical to SEQ ID NO: 884282

SEQ ID NO: 884286 - protein, 117 aa, Homo sapiens
MQEYTQSGGVRPFGVSLLICGWNEGRPYLFQSDPSGAYFAWKATAMGKNYVNGKTFLEKRYNEDLELEDAIHTAILTLKESFEGQMTEDNIEVGICNEAGFRRLTPTEVKDYLAAIA

SEQ ID NO: 884287 - protein, 82 aa, Homo sapiens
FPLAVNLLRDVPTDAPPPEVGSLSREVPAVRVFPARTVFNPRPLPFALLNPAPFIGAPAFVQEKPVVSRYNLGAPPRGSIFF

SEQ ID NO: 884288 - protein, 113 aa, Homo sapiens
GGSWVPRPLCVCLGPLFLGCRLFVARQGFLLSSYPSAFCCPAAVVLTPRRFFFYLFLLWGTLFLVVECLVVSSTVVVPRGVFVVVRPPPLLFVFVVVLFFFFFFLFFFFFFFL

SEQ ID NO: 884289 - protein, 113 aa, Homo sapiens; identical to SEQ ID NO: 884288

SEQ ID NO: 884290 - protein, 964 aa, Homo sapiens
MDEQSVESIAEVFRCFICMEKLRDARLCPHCSKLCCFSCIRRWLTEQRAQCPHCRAPLQLRELVNCRWAEEVTQQLDTLQLCSLTKHEENEKDKCENHHEKLSVFCWTCKKCICHQCALWGGMHGGHTFKPLAEIYEQHVTKVNEEVAKLRRRLMELISLVQEVERNVEAVRNAKDERVREIRNAVEMMIARLDTQLKNKLITLMGQKTSLTQETELLESLLQEVEHQLRSCSKSELISKSSEILMMFQQVHRKPMASFVTTPVPPDFTSELVPSYDSATFVLENFSTLRQRADPVYSPPLQVSGLCWRLKVYPDGNGVVRGYYLSVFLELSAGLPETSKYEYRVEMVHQSCNDPTKNIIREFASDFEVGECWGYNRFFRLDLLANEGYLNPQNDTVILRFQVRSPTFFQKSRDQHWYITQLEAAQTSYIQQINNLKERLTIELSRTQKSRDLSPPDNHLSPQNDDALETRAKKSACSDMLLEGGPTTASVREAKEDEEDEEKIQNEDYHHELSDGDLDLDLVYEDEVNQLDGSSSSASSTATSNTEENDIDEETMSGENDVEYNNMELEEGELMEDAAAAGPAGSSHGYVGSSSRISRRTHLCSAATSSLLDIDPLILIHLLDLKDRSSIENLWGLQPRPPASLLQPTASYSRKDKDQRKQQAMWRVPSDLKMLKRLKTQMAEVRCMKTDVKNTLSEIKSSSAASGDMQTSLFSADQAALAACGTENSGRLQDLGMELLAKSSVANCYIRNSTNKKSNSPKPARSSVAGSLSLRRAVDPGENSRSKGDCQTLSEGSPGSSQSGSRHSSPRALIHGSIGDILPKTEDRQCKALDSDAVVVAVFSGLPAVEKRRKMVTLGANAKGGHLEGLQMTDLENNSETGELQPVLPEGASAAPEEGMSSDSDIECDTENEEQEEHTSVGGFHDSFMVMTQPPDEDTHSSFPDGEQIGPEDLSFNTDENSGR

SEQ ID NO: 884291 - protein, 130 aa, Homo sapiens [sequence omitted]

SEQ ID NO: 884292 - protein, 925 aa, Homo sapiens
MDEQSVESIAEVFRCFICMEKLRDARLCPHCSKLCCFSCIRRWLTEQRAQCPHCRAPLQLRELVNCRWAEEVTQQLDTLQLCSLTKHEENEKDKCENHHEKLSVFCWTCKKCICHQCALWGGMHGGHTFKPLAEIYEQHVTKVNEEVAKLRRRLMELISLVQEVERNVEAVRNAKDERVREIRNAVEMMIARLDTQLKNKLITLMGQKTSLTQETELLESLLQEVEHQLRSCSKSELISKSSEILMMFQQVHRKPMASFVTTPVPPDFTSELVPSYDSATFVLENFSTLRQRADPVYSPPLQVSGLCWRLKVYPDGNGVVRGYYLSVFLELSAGLPETSKYEYRVEMVHQSCNDPTKNIIREFASDFEVGECWGYNRFFRLDLLANEGYLNPQNDTVILRFQVRSPTFFQKSRDQHWYITQLEAAQTSYIQQINNLKERLTIELSRTQKSRDLSPPDNHLSPQNDDALETRAKKSACSDMLLEGGPTTASVREAKEDEEDEEKIQNEDYHHELSDGDLDLDLVYEDEVNQLDGSSSSASSTATSNTEENDIDEETMSGENDVEYNNMELEEGELMEDAAAAGPAGSSHGYVGSSSRISRRTHLCSAATSSLLDIDPLILIHLLDLKDRSSIENLWGLQPRPPASLLQPTASYSRKDKDQRKQQAMWRVPSDLKMLKRLKTQMAEVRCMKTDVKNTLSEIKSSSAASGDMQTSLFSADQAALAACGTENSGRLQDLGMELLAKSSVANCYIRNSTNKKSNSPKPARSSVAGSLSLRRAVDPGENSRSKGDCQTLSEGSPGSSQSGSRHSSPRALIHGSIGDILPKTEDRQCKALDSDAVVVAVFSGLPAVEKRRKMVTLGANAKGGHLEGLQMTDLENNSETGELQPVLPEGASAAPEEDTHSSFPDGEQIGPEDLSFNTDENSGR

SEQ ID NO: 884293 - protein, 416 aa, Homo sapiens
ISLLLRIQSGENDVEYNNMELEEGELMEDAAAAGPAGSSHGYVGSSSRISRRTHLCSAATSSLLDIDPLILIHLLDLKDRSSIENLWGLQPRPPASLLQPTASYSRKDKDQRKQQAMWRVPSDLKMLKRLKTQMAEVRCMKTDVKNTLSEIKSSSAASGDMQTSLFSADQAALAACGTENSGRLQDLGMELLAKSSVANCYIRNSTNKKSNSPKPARSSVAGSLSLRRAVDPGENSRSKGDCQTLSEGSPGSSQSGSRHSSPRALIHGSIGDILPKTEDRQCKALDSDAVVVAVFSGLPAVEKRRKMVTLGANAKGGHLEGLQMTDLENNSETGELQPVLPEGASAAPEEGMSSDSDIECDTENEEQEEHTSVGGFHDSFMVMTQPPDEDTHSSFPDGEQIGPEDLSFNTDENSGR

SEQ ID NO: 884294 - protein, 964 aa, Homo sapiens; identical to SEQ ID NO: 884290

SEQ ID NO: 884295 - protein, 973 aa, Homo sapiens
MDEQSVESIAEVFRCFICMEKLRDARLCPHCSKLCCFSCIRRWLTEQRAQCPHCRAPLQLRELVNCRWAEEVTQQLDTLQLCSLTKHEENEKDKCENHHEKLSVFCWTCKKCICHQCALWGGMHGGHTFKPLAEIYEQHVTKVNEEVAKLRRRLMELISLVQEVERNVEAVRNAKDERVREIRNAVEMMIARLDTQLKNKLITLMGQKTSLTQETELLESLLQEVEHQLRSCSKSELISKSSEILMMFQQVHRKPMASFVTTPVPPDFTSELVPSYDSATFVLENFSTLRQRADPVYSPPLQVSGLCWRLKVYPDGNGVVRGYYLSVFLELSAGLPETSKYEYRVEMVHQSCNDPTKNIIREFASDFEVGECWGYNRFFRLDLLANEGYLNPQNDTVILRFQVRSPTFFQKSRDQHWYITQLEAAQTSYIQQINNLKERLTIELSRTQKSRDLSPPDNHLSPQNDDALETRAKKSACSDMLLEGGPTTASVREAKEDEEDEEKIQNEDYHHELSDGDLDLDLVYEDEVNQLDGSSSSASSTATSNTEENDIDEETMSGENDVEYNNMELEEGELMEDAAAAGPAGSSHGYVGSSSRISRRTHLCSAATSSLLDIDPLILIHLLDLKDRSSIENLWGLQPRPPASLLQPTASYSRKDKDQRKQQAMWRVPSDLKMLKRLKTQMAEVRCMKTDVKNTLSEIKSSSAASGDMQTSLFSADQAALAACGTENSGRLQDLGMELLAKSSVANCYIRNSTNKKSNSPKPARSSVAGSLSLRRAVDPGENSRSKGDCQTLSEGSPGSSQSGSRHSSPRALIHGSIGDILPKTEDRQCKALDSDAVVVAVFSGLPAVEKRRKMVTLGANAKGGHLEGLQMTDLENNSETGELQPVLPEGASAAPEEETCSPSFLPGMSSDSDIECDTENEEQEEHTSVGGFHDSFMVMTQPPDEDTHSSFPDGEQIGPEDLSFNTDENSGR

SEQ ID NO: 884296 - protein, 287 aa, Homo sapiens
MDEQSVESIAEVFRCFICMEKLRDARLCPHCSKLCCFSCIRRWLTEQRAQCPHCRAPLQLRELVNCRWAEEVTQQLDTLQLCSLTKHEENEKDKCENHHEKLSVFCWTCKKCICHQCALWGGMHGGHTFKPLAEIYEQHVTKVNEEVAKLRRRLMELISLVQEVERNVEAVRNAKDERVREIRNAVEMMIARLDTQLKNKLITLMGQKTSLTQETELLESLLQEVEHQLRSCSKSELISKSSEILMMFQQVHRKPMASFVTTPVPPDFTSELVPSYDSATFVLENFR

SEQ ID NO: 884297 - protein, 103 aa, Homo sapiens
MDEQSVESIAEVFRCFICMEKLRDARLCPHCSKLCCFSCIRRWLTEQRAQCPHCRAPLQLRELVNCRWAEEVTQQLDTLQLCSLTKHEENEKDKYVLNFFVQY

SEQ ID NO: 884298 - protein, 930 aa, Homo sapiens
MDEQSVERWLTEQRAQCPHCRAPLQLRELVNCRWAEEVTQQLDTLQLCSLTKHEENEKDKCENHHEKLSVFCWTCKKCICHQCALWGGMHGGHTFKPLAEIYEQHVTKVNEEVAKLRRRLMELISLVQEVERNVEAVRNAKDERVREIRNAVEMMIARLDTQLKNKLITLMGQKTSLTQETELLESLLQEVEHQLRSCSKSELISKSSEILMMFQQVHRKPMASFVTTPVPPDFTSELVPSYDSATFVLENFSTLRQRADPVYSPPLQVSGLCWRLKVYPDGNGVVRGYYLSVFLELSAGLPETSKYEYRVEMVHQSCNDPTKNIIREFASDFEVGECWGYNRFFRLDLLANEGYLNPQNDTVILRFQVRSPTFFQKSRDQHWYITQLEAAQTSYIQQINNLKERLTIELSRTQKSRDLSPPDNHLSPQNDDALETRAKKSACSDMLLEGGPTTASVREAKEDEEDEEKIQNEDYHHELSDGDLDLDLVYEDEVNQLDGSSSSASSTATSNTEENDIDEETMSGENDVEYNNMELEEGELMEDAAAAGPAGSSHGYVGSSSRISRRTHLCSAATSSLLDIDPLILIHLLDLKDRSSIENLWGLQPRPPASLLQPTASYSRKDKDQRKQQAMWRVPSDLKMLKRLKTQMAEVRCMKTDVKNTLSEIKSSSAASGDMQTSLFSADQAALAACGTENSGRLQDLGMELLAKSSVANCYIRNSTNKKSNSPKPARSSVAGSLSLRRAVDPGENSRSKGDCQTLSEGSPGSSQSGSRHSSPRALIHGSIGDILPKTEDRQCKALDSDAVVVAVFSGLPAVEKRRKMVTLGANAKGGHLEGLQMTDLENNSETGELQPVLPEGASAAPEEGMSSDSDIECDTENEEQEEHTSVGGFHDSFMVMTQPPDEDTHSSFPDGEQIGPEDLSFNTDENSGR

SEQ ID NO: 884299 - protein, 973 aa, Homo sapiens; identical to SEQ ID NO: 884295

SEQ ID NO: 884300 - protein, 964 aa, Homo sapiens; identical to SEQ ID NO: 884290

SEQ ID NO: 884301 - protein, 340 aa, Homo sapiens
MDEQSVESIAEVFRCFICMEKLRDARLCPHCSKLCCFSCIRRWLTEQRAQCPHCRAPLQLRELVNCRWAEEVTQQLDTLQLCSLTKHEENEKDKCENHHEKLSVFCWTCKKCICHQCALWGGMHGGHTFKPLAEIYEQHVTKVNEEVAKLRRRLMELISLVQEVERNVEAVRNAKDERVREIRNAVEMMIARLDTQLKNKLITLMGQKTSLTQETELLESLLQEVEHQGASCFWKKWCQGRIYTLRSCSKSELISKSSEILMMFQQVHRKPMASFVTTPVPPDFTSELVPSYDSATFVLENFSTLRQRADPVYSPPLQVSGLCWRLKVYPDGNGVVRACS

SEQ ID NO: 884302 - protein, 76 aa, Homo sapiens
RTQKSRDLSPPDNHLSPQNDDALETRAKKSACSDMLLEGGPTTASVREAKEDEEDEEKIQNEDYHVIMRPVLDFCV

SEQ ID NO: 884303 - protein, 120 aa, Homo sapiens
FHLPSRDPGHTGGPQHPAHPEGPQRHPCHAPCCSASHHRPQRHSQSCCGDPAVTLTPPEILGQSSFPQLQRGGRLLKDSPDDMFRRWGLQLPLSCSCVSTSLMPVGWAATSWAALPTKCT

SEQ ID NO: 884304 - protein, 350 aa, Homo sapiens
MATTAAPAGGARNGAGPEWGGFEENIQGGGSAVIDMENMDDTSGSSFEDMGELHQRLREEEVDADAADAAAAEEEDGEFLGMKGFKGQLSRQVADQMWQAGKRQASRAFSLYANIDILRPYFDVEPAQVRSRLLESMIPIKMVNFPQKIAGELYGPLMLVFTLVAILLHGMKTSDTIIREGTLMGTAIGTCFGYWLGVSSFIYFLAYLCNAQITMLQMLALLGYGLFGHCIVLFITYNIHLHALFYLFWLLVGGLSTLRMVAVLVSRTVGPTQRLLLCGTLAALHMLFLLYLHFAYHKVVEGILDTLEGPNIPPIQRVPRDIPAMLPAARLPTTVLNATAKAVAVTLQSH

SEQ ID NO: 884305 - protein, 350 aa, Homo sapiens; identical to SEQ ID NO: 884304

SEQ ID NO: 884306 - protein, 350 aa, Homo sapiens; identical to SEQ ID NO: 884304

SEQ ID NO: 884307 - protein, 315 aa, Homo sapiens
MENMDDTSGSSFEDMGELHQRLREEEVDADAADAAAAEEEDGEFLGMKGFKGQLSRQVADQMWQAGKRQASRAFSLYANIDILRPYFDVEPAQVRSRLLESMIPIKMVNFPQKIAGELYGPLMLVFTLVAILLHGMKTSDTIIREGTLMGTAIGTCFGYWLGVSSFIYFLAYLCNAQITMLQMLALLGYGLFGHCIVLFITYNIHLHALFYLFWLLVGGLSTLRMVAVLVSRTVGPTQRLLLCGTLAALHMLFLLYLHFAYHKVVEGILDTLEGPNIPPIQRVPRDIPAMLPAARLPTTVLNATAKAVAVTLQSH

SEQ ID NO: 884308 - protein, 315 aa, Homo sapiens; identical to SEQ ID NO: 884307

SEQ ID NO: 884309 - protein, 290 aa, Homo sapiens
MATTAAPAGGARNGAGPEWGGFEENIQGGGSAVIDMENMDDTSGSSFEDMGELHQRLREEEVDADAADAAAAEEEDGEFLGMKGFKGQLSRQVADQMWQAGKRQASRAFSLYANIDILRPYFDVEPAQVRSRLLESMIPIKMVNFPQKIAGELYGPLMLVFTLVAILLHGMKTSDTIIREGTLMGTAIGTCFGYWLGVSSFIYFLAYLCNAQITMLQMLALLGMALGHCLSCHHYKFTQPLTFVGGVALAVRGSTGPRGLDWGQVRSVAQGGGGASGDGAPTANCKRGPR

SEQ ID NO: 884310 - protein, 403 aa, Homo sapiens
MATTAAPAGGARNGAGPEWGGFEENIQGGGSAVIDMENMDDTSGSSFEDMGELHQRLREEEVDADAADAAAAEEEDGEFLGMKGFKGQLSRQVADQMWQAGKRQASRAFSLYANIDILRPYFDVEPAQVRSRLLESMIPIKMVNFPQKIAGELYGPLMLVFTLVAILLHGMKTSDTIIRKQDRQLWGGGCTRLKAASGYNGGVRQEQPLRKALGEAEIRGLLGLNRAFTPQREGTLMGTAIGTCFGYWLGVSSFIYFLAYLCNAQITMLQMLALLGYGLFGHCIVLFITYNIHLHALFYLFWLLVGGLSTLRMVAVLVSRTVGPTQRLLLCGTLAALHMLFLLYLHFAYHKVVEGILDTLEGPNIPPIQRVPRDIPAMLPAARLPTTVLNATAKAVAVTLQSH

SEQ ID NO: 884311 - protein, 317 aa, Homo sapiens
MATTAAPAGGARNGAGPEWGGFEENIQGGGSAVIDMENMDDTSGSSFEDMGELHQRLREEEVDADAADAAAAEEEDGEFLGMKGFKGQLSRQVADQMWQAGKRQASRAFSLYANIDILRPYFDVEPAQVRSRLLESMIPIKMVNFPQKIAGELYGPLMLVFTLVAILLHGMKTSDTIIQITMLQMLALLGYGLFGHCIVLFITYNIHLHALFYLFWLLVGGLSTLRMVAVLVSRTVGPTQRLLLCGTLAALHMLFLLYLHFAYHKVVEGILDTLEGPNIPPIQRVPRDIPAMLPAARLPTTVLNATAKAVAVTLQSH

SEQ ID NO: 884312 - protein, 468 aa, Homo sapiens
MATTAAPAGGARNGAGPEWGGFEENIQGGGSAVIDMENMDDTSGSSFEDMGELHQRLREEEVDADAADAAAAEEEDGEFLGMKGFKGQLSRQVADQMWQAGKRQASRAFSLYANIDILRPYFDVEPAQVRSRLLESMIPIKMVNFPQKIAGELYGPLMLVFTLVAILLHGMKTSDTIIRKQDRQLWGGGCTRLKAASGYNGGVRQEQPLRKALGEAEIRGLLGLNRAFTPQREGTLMGTAIGTCFGYWLGVSSFIYFLAYLCNAQITMLQMLALLVRSQVWWARVMLKRVARPWSASVLGPQSLEWEEEANGPCVSQGPHEGPEKQPNLNDFPLHHPPSQGYGLFGHCIVLFITYNIHLHALFYLFWLLVGGLSTLRMVAVLVSRTVGPTQRLLLCGTLAALHMLFLLYLHFAYHKVVEGILDTLEGPNIPPIQRVPRDIPAMLPAARLPTTVLNATAKAVAVTLQSH

SEQ ID NO: 884313 - protein, 360 aa, Homo sapiens
MENMDDTSGSSFEDMGELHQRLREEEVDADAADAAAAEEEDGEFLGMKGFKGQLSRQVADQMWQAGKRQASRAFSLYANIDILRPYFDVEPAQVRSRLLESMIPIKMVNFPQVNRGWHVWRAGGSTRAEGGTTRQILGSHKQMSCCTLSLNELVYGQKIAGELYGPLMLVFTLVAILLHGMKTSDTIIREGTLMGTAIGTCFGYWLGVSSFIYFLAYLCNAQITMLQMLALLGYGLFGHCIVLFITYNIHLHALFYLFWLLVGGLSTLRMVAVLVSRTVGPTQRLLLCGTLAALHMLFLLYLHFAYHKVVEGILDTLEGPNIPPIQRVPRDIPAMLPAARLPTTVLNATAKAVAVTLQSH

SEQ ID NO: 884314 - protein, 332 aa, Homo sapiens
MQAGTAEWYDPGFSFLCSGRSHLSSTLDVYLPEAHILPTPRAGLARVSATGALKGHGNYSGAGGRRPKWSWPGMGRVRRKHPGSSFEDMGELHQRLREEEVDADAADAAAAEEEDGEFLGMKGFKGQLSRQVADQMWQAGKRQASRAFSLYANIDILRPYFDVEPAQVRSRLLESMIPIKMVNFPQKIAGELYGPLMLVFTLVAILLHGMKTSDTIIREGTLMGTAIGTCFGYWLGVSSFIYFLAYLCNAQITMLQMLALLGYGLFGHCIVLFITYNIHLHALFYLFWLLVGGLSTLRMCRGFRPVPPGSFGRGLRLAPRWPGGPVGPPGNP

SEQ ID NO: 884315 - protein, 350 aa, Homo sapiens; identical to SEQ ID NO: 884304

SEQ ID NO: 884316 - protein, 350 aa, Homo sapiens; identical to SEQ ID NO: 884304

SEQ ID NO: 884317 - protein, 350 aa, Homo sapiens; identical to SEQ ID NO: 884304

SEQ ID NO: 884318 - protein, 415 aa, Homo sapiens
MATTAAPAGGARNGAGPEWGGFEENIQGGGSAVIDMENMDDTSGSSFEDMGELHQRLREEEVDADAADAAAAEEEDGEFLGMKGFKGQLSRQVADQMWQAGKRQASRAFSLYANIDILRPYFDVEPAQVRSRLLESMIPIKMVNFPQKIAGELYGPLMLVFTLVAILLHGMKTSDTIIREGTLMGTAIGTCFGYWLGVSSFIYFLAYLCNAQITMLQMLALLVRSQVWWARVMLKRVARPWSASVLGPQSLEWEEEANGPCVSQGPHEGPEKQPNLNDFPLHHPPSQGYGLFGHCIVLFITYNIHLHALFYLFWLLVGGLSTLRMVAVLVSRTVGPTQRLLLCGTLAALHMLFLLYLHFAYHKVVEGILDTLEGPNIPPIQRVPRDIPAMLPAARLPTTVLNATAKAVAVTLQSH

SEQ ID NO: 884319 - protein, 341 aa, Homo sapiens
CRLVRPEWYDGEGRRKHPGGGSAVIDMENMDDTSGSSFEDMGELHQRLREEEVDADAADAAAAEEEDGEFLGMKGFKGQLSRQVADQMWQAGKRQASRAFSLYANIDILRPYFDVEPAQVRSRLLESMIPIKMVNFPQKIAGELYGPLMLVFTLVAILLHGMKTSDTIIREGTLMGTAIGTCFGYWLGVSSFIYFLAYLCNAQITMLQMLALLGYGLFGHCIVLFITYNIHLHALFYLFWLLVGGLSTLRMVAVLVSRTVGPTQRLLLCGTLAALHMLFLLYLHFAYHKVVEGILDTLEGPNIPPIQRVPRDIPAMLPAARLPTTVLNATAKAVAVTLQSH

SEQ ID NO: 884320 - protein, 389 aa, Homo sapiens
CRLVRPEWYDPGFSFLCSGRSHLSSTLDVYLPEAHILPTPRAGLARVSATGALKGHGNYSGAGGRRPKWSWPGMGRVRRKHPGSSFEDMGELHQRLREEEVDADAADAAAAEEEDGEFLGMKGFKGQLSRQVADQMWQAGKRQASRAFSLYANIDILRPYFDVEPAQVRSRLLESMIPIKMVNFPQKIAGELYGPLMLVFTLVAILLHGMKTSDTIIREGTLMGTAIGTCFGYWLGVSSFIYFLAYLCNAQITMLQMLALLGYGLFGHCIVLFITYNIHLHALFYLFWLLVGGLSTLRMVAVLVSRTVGPTQRLLLCGTLAALHMLFLLYLHFAYHKVVEGILDTLEGPNIPPIQRVPRDIPAMLPAARLPTTVLNATAKAVAVTLQSH

SEQ ID NO: 884321 - protein, 209 aa, Homo sapiens
MVNFPQKIAGELYGPLMLVFTLVAILLHGMKTSDTIIREGTLMGTAIGTCFGYWLGVSSFIYFLAYLCNAQITMLQMLALLGYGLFGHCIVLFITYNIHLHALFYLFWLLVGGLSTLRMVAVLVSRTVGPTQRLLLCGTLAALHMLFLLYLHFAYHKVVEGILDTLEGPNIPPIQRVPRDIPAMLPAARLPTTVLNATAKAVAVTLQSH

SEQ ID NO: 884322 - protein, 193 aa, Homo sapiens [sequence omitted]

SEQ ID NO: 884323 - protein, 448 aa, Homo sapiens
MATTAAPAGGARNGAGPEWGGFEENIQGGGSAVIDMENMDDTSGSSFEDMGELHQRLREEEVDADAADAAAAEEEDGEFLGMKGFKGQLSRQVADQMWQAGKRQASRAFSLYANIDILRPYFDVEPAQVRSRLLESMIPIKMVNFPQVNRGWHVWRAGGSTRAEGGTTRQILGSHKQMSCCTLSLNELVYGQKIAGELYGPLMLVFTLVAILLHGMKTSDTIIRKQDRQLWGGGCTRLKAASGYNGGVRQEQPLRKALGEAEIRGLLGLNRAFTPQREGTLMGTAIGTCFGYWLGVSSFIYFLAYLCNAQITMLQMLALLGYGLFGHCIVLFITYNIHLHALFYLFWLLVGGLSTLRMVAVLVSRTVGPTQRLLLCGTLAALHMLFLLYLHFAYHKVVEGILDTLEGPNIPPIQRVPRDIPAMLPAARLPTTVLNATAKAVAVTLQSH

SEQ ID NO: 884324 - protein, 87 aa, Homo sapiens
AGWYGRVVGSGLLLFVFRPIPPLLDPGRLPSGGPHLAHSARGASAGFSDGSPQGTWQLQRRRRAAPEMELARNGEGSKKTSRAEAQL

SEQ ID NO: 884325 - protein, 508 aa, Homo sapiens
MNCQQLWLGFLLPMTVSGRVLGLAEVAPVDYLSQYGYLQKPLEGSNNFKPEDITEALRAFQEASELPVSGQLDDATRARMRQPRCGLEDPFNQKTLKYLLLGRWRKKHLTFRILNLPSTLPPHTARAALRQAFQDWSNVAPLTFQEVQAGAADIRLSFHGRQSSYCSNTFDGPGRVLAHADIPELGSVHFDEDEFWTEGTYRGVNLRIIAAHEVGHALGLGHSRYSQALMAPVYEGYRPHFKLHPDDVAGIQALYGKKSPVIRDEEEEETELPTVPPVPTEPSPMPDPCSSELDAMMLGPRGKTYAFKGDYVWTVSDSGPGPLFRVSALWEGLPGNLDAAVYSPRTQWIHFFKGDKVWRYINFKMSPGFPKKLNRVEPNLDAALYWPLNQKVFLFKGSGYWQWDELARTDFSSYPKPIKGLFTGVPNQPSAAMSWQDGRVYFFKGKVYWRLNQQLRVEKGYPRNISHNWMHCRPRTIDTTPSGGNTTPSGTGITLDTTLSATETTFEY

SEQ ID NO: 884326 - protein, 85 aa, Homo sapiens
MQLSIGLSTKRCSSLRYKVQSKGKSLLRRSGLPYTEKQSLRLKGDVLQLQWAGGGPLGVLSSLLFLSPLPTHPISRAPGTGSGTS

SEQ ID NO: 884327 - protein, 222 aa, Homo sapiens
MGVTWDFSMSNGGPRGKTYAFKGDYVWTVSDSGPGPLFRVSALWEGLPGNLDAAVYSPRTQWIHFFKGDKVWRYINFKMSPGFPKKLNRVEPNLDAALYWPLNQKVFLFKGSGYWQWDELARTDFSSYPKPIKGLFTGVPNQPSAAMSWQDGRVYFFKGKVYWRLNQQLRVEKGYPRNISHNWMHCRPRTIDTTPSGGNTTPSGTGITLDTTLSATETTFEY

SEQ ID NO: 884328 - protein, 508 aa, Homo sapiens; identical to SEQ ID NO: 884325

SEQ ID NO: 884329 - protein, 508 aa, Homo sapiens; identical to SEQ ID NO: 884325

SEQ ID NO: 884330 - protein, 508 aa, Homo sapiens; identical to SEQ ID NO: 884325

SEQ ID NO: 884331 - protein, 279 aa, Homo sapiens
MAPVYEGYRPHFKLHPDDVAGIQALYGKKSPVIRDEEEEETELPTVPPVPTEPSPMPDPCSSELDAMMLGPRGKTYAFKGDYVWTVSDSGPGPLFRVSALWEGLPGNLDAAVYSPRTQWIHFFKGDKVWRYINFKMSPGFPKKLNRVEPNLDAALYWPLNQKVFLFKGSGYWQWDELARTDFSSYPKPIKGLFTGVPNQPSAAMSWQDGRVYFFKGKVYWRLNQQLRVEKGYPRNISHNWMHCRPRTIDTTPSGGNTTPSGTGITLDTTLSATETTFEY

SEQ ID NO: 884332 - protein, 144 aa, Homo sapiens
MSPGFPKKLNRVEPNLDAALYWPLNQKVFLFKGSGYWQWDELARTDFSSYPKPIKGLFTGVPNQPSAAMSWQDGRVYFFKGKVYWRLNQQLRVEKGYPRNISHNWMHCRPRTIDTTPSGGNTTPSGTGITLDTTLSATETTFEY

SEQ ID NO: 884333 - protein, 115 aa, Homo sapiens
GDLEDPISGQDELARTDFSSYPKPIKGLFTGVPNQPSAAMSWQDGRVYFFKGKVYWRLNQQLRVEKGYPRNISHNWMHCRPRTIDTTPSGGNTTPSGTGITLDTTLSATETTFEY

SEQ ID NO: 884334 - protein, 483 aa, Homo sapiens
MNCQQLWLGFLLPMTVSGRVLGLAEVAPVDYLSQYGYLQKPLEGSNNFKPEDITEALRAFQEASELPVSGQLDDATRARMRQPRCGLEDPFNQKTLKYLLLGRWRKKHLTFRILNLPSTLPPHTARAALRQAFQDWSNVAPLTFQEVQAGAADIRLSFHGRQSSYCSNTFDGPGRVLAHADIPELGSVHFDEDEFWTEGTYRGVNLRIIAAHEVGHALGLGHSRYSQALMAPVYEGYRPHFKLHPDDVAGIQALYGKKSPVIRDEEEEETELPTVPPVPTEPSPMPDPCSSELDAMMLGPRGKTYAFKGDYVWTVSDSGPGPLFRVSALWEGLPGNLDAAVYSPRTQWIHFFKGDKVWRYINFKMSPGFPKKLNRVEPNLDAALYWPLNQKVFLFKGSGYWQWDELARTDFSSYPKPIKGLFTGVPNQPSAAMSWQDGRVYFFKGKVYWRLNQQLRVEKGYPRNISHNWMHCRPGLRWDPLDH

SEQ ID NO: 884335 - protein, 508 aa, Homo sapiens; identical to SEQ ID NO: 884325

SEQ ID NO: 884336 - protein, 464 aa, Homo sapiens
MRQPRCGLEDPFNQKTLKYLLLGRWRKKHLTFRILNLPSTLPPHTARAALRQAFQDWSNVAPLTFQEVQAGAADIRLSFHGRQSSYCSNTFDGPGRVLAHADIPELGSVHFDEDEFWTEGTYRGVNLRIIAAHEVGHALGLGHSRYSQALMAPVYEGYRPHFKLHPDDVAGIQALYGKKSPVIRDEEEEETELPTVPPVPTEPSPMPDPCSSELDAMMLGEAPPLQAVGRRWGQLLILRPGQMGVTWDFSMSNGGPRGKTYAFKGDYVWTVSDSGPGPLFRVSALWEGLPGNLDAAVYSPRTQWIHFFKGDKVWRYINFKMSPGFPKKLNRVEPNLDAALYWPLNQKVFLFKGSGYWQWDELARTDFSSYPKPIKGLFTGVPNQPSAAMSWQDGRVYFFKGKVYWRLNQQLRVEKGYPRNISHNWMHCRPRTIDTTPSGGNTTPSGTGITLDTTLSATETTFEY

SEQ ID NO: 884337 - protein, 90 aa, Homo sapiens
GDLEDPISGQDELARTDFSSYPKPIKGLFTGVPNQPSAAMSWQDGRVYFFKGKVYWRLNQQLRVEKGYPRNISHNWMHCRPGLRWDPLDH

SEQ ID NO: 884338 - protein, 339 aa, Homo sapiens [sequence omitted]

SEQ ID NO: 884339 - protein, 397 aa, Homo sapiens
MNCQQLWLGFLLPMTVSGRVLGLAEVAPVDYLSQYGYLQKPLEGSNNFKPEDITEALRAFQEASELPVSGQLDDATRARMRQPRCGLEDPFNQKTLKYLLLGRWRKKHLTFRILNLPSTLPPHTARAALRQAFQDWSNVAPLTFQEVQAGAADIRLSFHGRQSSYCSNTFDGPGRVLAHADIPELGSVHFDEDEFWTEGTYRGVNLRIIAAHEVGHALGLGHSRYSQALMAPVYEGYRPHFKLHPDDVAGIQALYGKKSPVIRDEEEEETELPTVPPVPTEPSPMPDPCSSELDAMMLGPRGKTYAFKGDYVWTVSDSGPGPLFRVSALWEGLPGNLDAAVYSPRTQWIHFFKGDKVWRYINFKMSPGFPKKLNRVEPNLDAALYWPLNQKVFLFKV

SEQ ID NO: 884340 - protein, 193 aa, Homo sapiens
TEFVIADLEVSPRTCYPREYWMLSLCTRLEHNWIHFFKGDKVWRYINFKMSPGFPKKLNRVEPNLDAALYWPLNQKVFLFKGSGYWQWDELARTDFSSYPKPIKGLFTGVPNQPSAAMSWQDGRVYFFKGKVYWRLNQQLRVEKGYPRNISHNWMHCRPRTIDTTPSGGNTTPSGTGITLDTTLSATETTFEY

SEQ ID NO: 884341 - protein, 509 aa, Homo sapiens
MRVRCAIIPSDMLHISTNCRTAEKMALTLLDYLFHREVQAVSNLSGQGKHGKKQLDPLTIYGIRCHLFYKFGITESDWYRIKQSIDSKCRTAWRRKQRGQSLAVKSFSRRTPNSSSYCPSEPMMSTPPPASELPQPQPQPQALHYALANAQQVQIHQIGEDGQVQVIPQGHLHIAQVPQGEQVQITQDSEEPVFWYYVKEVLNKHELQRFYSLRHIASDVGRGRTWLRCALNEHSLERYLHMLLADRCRLSTFYEDWSFVMDEERSSMLPTMAAGPNSILFAINIDNKDLNGQSKFAPTVSDLLKESTQNVTLLKESTQGVSSVFREITASSAISILIKPEQETDPLPVVSRNVSADAKCKKERKKKKQVTNIISFDDEEDEQNSGDMFKKTPGAGESSEDNSDHSSVNIMSAFESPFGPNSNGSQSSNSWKIDSLSLNREFGYQKLDVKSIDDEDVDENEDDVYGNSSGRKHRGHSESPEKNGAHSVTQAGVQWHDLSSLQPLPPGFK

SEQ ID NO: 884342 - protein, 349 aa, Homo sapiens
MAVPGRRQNTIVVKVPGQEDSHHEDGESGSEASDSVSSCGQAGSQSIGSNVTLITLNSEEDYPNGTWLGDENNPEMRVRCAIIPSDMLHISTNCRTAEKMALTLLDYLFHREVQAVSNLSGQGKHGKKQLDPLTIYGIRCHLFYKFGITESDWYRIKQSIDSKCRTAWRRKQRGQSLAVKSFSRRTPNSSSYCPSEPMMSTPPPASELPQPQPQPQALHYALANAQQVQIHQIGEDGQVQVIPQGHLHIAQVPQGEQVQITQDSEGNLQIHHVGQDGQVLQGAQLIAVASSDPAAAGVDGSPLQGSDIQVQYVQLAPVSDHTAGAQTAEALQPTLQPEMQLEHGAIQIQ

SEQ ID NO: 884343 - protein, 138 aa, Homo sapiens
MSEHDLADVVQIAVEDLSPDHPGTELWDRVVLENHVVTDEDEPALKRQRLEINCQDPSIKSFLYSINQTICLRLDSIEAKLQALEATCKSLEEKLDLVTNKQHSPIQVPMVAGSPLGATQTCNKVRWLCLGVGRTPLW

SEQ ID NO: 884344 - protein, 349 aa, Homo sapiens; identical to SEQ ID NO: 884342

SEQ ID NO: 884345 - protein, 191 aa, Homo sapiens
MLPTMAAGPNSILFAINIDNKDLNGQSKFAPTVSDLLKESTQNVTLLKESTQGVSSVFREITASSAISILIKPEQETDPLPVVSRNVSADAKCKKERKKKKQVTNIISFDDEEDEQNSGDMFKKTPGAGESSEDNSDHSSVNIMSAFESPFGPNSNGSQSSNSWKIDSLSLNREFGYQKLDVKSIDDEDVG

SEQ ID NO: 884346 - protein, 742 aa, Homo sapiens
MSEHDLADVVQIAVEDLSPDHPVVLENHVVTDEDEPALKRQRLEINCQDPSIKSFLYSINQTICLRLDSIEAKLQALEATCKSLEEKLDLVTNKQHSPIQVPMVAGSPLGATQTCNKVRCVVPQTTVILNNDRQNAIVAKMEDPLSNRAPDSLENVISNAVPGRRQNTIVVKVPGQEDSHHEDGESGSEASDSVSSCGQAGSQSIGSNVTLITLNSEEDYPNGTWLGDENNPEMRVRCAIIPSDMLHISTNCRTAEKMALTLLDYLFHREVQAVSNLSGQGKHGKKQLDPLTIYGIRCHLFYKFGITESDWYRIKQSIDSKCRTAWRRKQRGQSLAVKSFSRRTPNSSSYCPSEPMMSTPPPASELPQPQPQPQALHYALANAQQVQIHQIGEDGQVQVIPQGHLHIAQVPQGEQVQITQDSEEPVFWYYVKEVLNKHELQAFYSLRHIASDVGRGRTWLRCALNEHSLERYLHMLLADRCRLSTFYEDWSFVMDEERSSMLPTMAAGPNSILFAINIDNKDLNGQSKFAPTVSDLLKESTQNVTLLKESTQGVSSVFREITASSAISILIKPEQETDPLPVVSRNVSADAKCKKERKKKKQVTNIISFDDEEDEQNSGDMFKKTPGAGESSEDNSDHSSVNIMSAFESPFGPNSNGSQSSNSWKIDSLSLNREFGYQKLDVKSIDDEDVDENEDDVYGNSSGRKHRGHSESPEKNGAHSVTQAGVQWHDLSSLQPLPPGFK

SEQ ID NO: 884347 - protein, 749 aa, Homo sapiens
MSEHDLADVVQIAVEDLSPDHPGTELWDSVVLENHVVTDEDEPALKRQRLEINCQDPSIKSFLYSINQTICLRLDSIEAKLQALEATCKSLEEKLDLVTNKQHSPIQVPMVAGSPLGATQTCNKVRCVVPQTTVILNNDRQNAIVAKMEDPLSNRAPDSLENVISNAVPGRRQNTIVVKVPGQEDSHHEDGESGSEASDSVSSCGQAGSQSIGSNVTLITLNSEEDYPNGTWLGDENNPEMRVRCAIIPSDMLHISTNCRTAEKMALTLLDYLFHREVQAVSNLSGQGKHGKKQLDPLTIYGIRCHLFYKFGITESDWYRIKQSIDSKCRTAWRRKQRGQSLAVKSFSRRTPNSSSYCPSEPMMSTPPPASELPQPQPQPQALHYALANAQQVQIHQIGEDGQVQVIPQGHLHIAQVPQGEQVQITQDSEEPVFWYYVKEVLNKHELKRFYSLRHIASDVGRGRTWLRCALNEHSLERYLHMLLADRCRLSTFYEDWSFVMDEERSSMLPTMAAGPNSILFAINIDNKDLNGQSKFAPTVSDLLKESTQNVTLLKESTQGVSSVFREITASSAISILIKPEQETDPLPVVSRNVSADAKCKKERKKKKQVTNIISFDDEEDEQNSGDMFKKTPGAGESSEDNSDHSSVNIMSAFESPFGPNSNGSQSSNSWKIDSLSLNREFGYQKLDVKSIDDEDVDENEDDVYGNSSGRKHRGHSESPEKNGAHSVTQAGVQWHDLSSLQPLPPGFK

SEQ ID NO: 884348 - protein, 742 aa, Homo sapiens
MFLAHSSEASSSVGIVLSEWIELRSGNSCLVFLGVVFLQFRRPFLKPVFSHFQSFLYSINQTICLRLDSIEAKLQALEATCKSLEEKLDLVTNKQHSPIQVPMVAGSPLGATQTCNKVRCVVPQTTVILNNDRQNAIVAKMEDPLSNRAPDSLENVISNAVPGRRQNTIVVKVPGQEDSHHEDGESGSEASDSVSSCGQAGSQSIGSNVTLITLNSEEDYPNGTWLGDENNPEMRVRCAIIPSDMLHISTNCRTAEKMALTLLDYLFHREVQAVSNLSGQGKHGKKQLDPLTIYGIRCHLFYKFGITESDWYRIKQSIDSKCRTAWRRKQRGQSLAVKSFSRRTPNSSSYCPSEPMMSTPPPASELPQPQPQPQALHYALANAQQVQIHQIGEDGQVQVIPQGHLHIAQVPQGEQVQITQDSEEPVFWYYVKEVLNKHELQRFYSLRHIASDVGRGRTWLRCALNEHSLERYLHMLLADRCRLSTFYEDWSFVMDEERSSMLPTMAAGPNSILFAINIDNKDLNGQSKFAPTVSDLLKESTQNVTLLKESTQGVSSVFREITASSAISILIKPEQETDPLPVVSRNVSADAKCKKERKKKKQVTNIISFDDEEDEQNSGDMFKKTPGAGESSEDNSDHSSVNIMSAFESPFGPNSNGSQSSNSWKIDSLSLNREFGYQKLDVKSIDDEDVDENEDDVYGNSSGRKHRGHSESPEKNGAHSVTQAGVQWHDLSSLQPLPPGFK

SEQ ID NO: 884349 - protein, 509 aa, Homo sapiens; identical to SEQ ID NO: 884341

SEQ ID NO: 884350 - protein, 326 aa, Homo sapiens
MIVPLCSSLGDRVRPCPHPTPQKQNKTKKTQTRKRNAVWCTCSSDINSWFSLSTNYMPEPVFWYYVKEVLNKQSCKRFYSLRHIASDVGRGRTWLRCALNEHSLERYLHMLLADRCRLSTFYEDWSFVMDEERSSMLPTMAAGPNSILFAINIDNKDLNGQSKFAPTVSDLLKESTQNVTLLKESTQGVSSVFREITASSAISILIKPEQETDPLPVVSRNVSADAKCKKERKKKKQVTNIISFDDEEDEQNSGDMFKKTPGAGESSEDNSDHSSVNIMSAFESPFGPNSNGSQSSNSWKIDSLSLNREFGYQKLDVKSIDDEDVG

SEQ ID NO: 884351 - protein, 349 aa, Homo sapiens; identical to SEQ ID NO: 884342

SEQ ID NO: 884352 - protein, 172 aa, Homo sapiens
MDEERSSMLPTMAAGPNSILFAINIDNKDLNGQSKFAPTVSDLLKESTQNVTLLKESTQGVSSVFREITASSAISILIKPEQETDPLPVVSRNVSADAKCKKERKKKKQVTNIISFDDEEDEQNSGDMFKKTPGAGESSEDNSDHSSVNIMSAFESPFGPNSNGSQSSYSGG

SEQ ID NO: 884353 - protein, 191 aa, Homo sapiens; identical to SEQ ID NO: 884345

SEQ ID NO: 884354 - protein, 742 aa, Homo sapiens
MSEHDLADVVQIAVEDLSPDHPVVLENHVVTDEDEPALKRQRLEINCQDPSIKSFLYSINQTICLRLDSIEAKLQALEATCKSLEEKLDLVTNKQHSPIQVPMVAGSPLGATQTCNKVRCVVPQTTVILNNDRQNAIVAKMEDPLSNRAPDSLENVISNAVPGRRQNTIVVKVPGQEDSHHEDGESGSEASDSVSSCGQAGSQSIGSNVTLITLNSEEDYPNGTWLGDENNPEMRVRCAIIPSDMLHISTNCRTAEKMALTLLDYLFHREVQAVSNLSGQGKHGKKQLDPLTIYGIRCHLFYKFGITESDWYRIKQSIDSKCRTAWRRKQRGQSLAVKSFSRRTPNSSSYCPSEPMMSTPPPASELPQPQPQPQALHYALANAQQVQIHQIGEDGQVQVIPQGHLHIAQVPQGEQVQITQDSEEPVFWYYVKEVLNKHELQRFYSLRHIASDVGRGRTWLRCALNEHSLERYLHMLLADRCRLSTFYEDWSFVMDEERSSMLPTMAAGPNSILFAINIDNKDLNGQSKFAPTVSDLLKESTQNVTLLKESTQGVSSVFREITASSAISILIKPEQETDPLPVVSRNVSADAKCKKERKKKKQVTNIISFDDEEDEQNSGDMFKKTPGAGESSEDNSDHSSVNIMSAFESPFGPNSNGSQSSNSWKIDSLSLNREFGYQKLDVKSIDDEDVDENEDDVYGNSSGRKHRGHSESPEKNGAHSVTQAGVQWHDLSSLQPLPPGFK

SEQ ID NO: 884355 - protein, 740 aa, Homo sapiens
MSGKTPPSLRNLRAGPAAAAVVLENHVVTDEDEPALKRQRLEINCQDPSIKSFLYSINQTICLRLDSIEAKLQALEATCKSLEEKLDLVTNKQHSPIQVPMVAGSPLGATQTCNKVRCVVPQTTVILNNDRQNAIVAKMEDPLSNRAPDSLENVISNAVPGRRQNTIVVKVPGQEDSHHEDGESGSEASDSVSSCGQAGSQSIGSNVTLITLNSEEDYPNGTWLGDENNPEMRVRCAIIPSDMLHISTNCRTAEKMALTLLDYLFHREVQAVSNLSGQGKHGKKQLDPLTIYGIRCHLFYKFGITESDWYRIKQSIDSKCRTAWRRKQRGQSLAVKSFSRRTPNSSSYCPSEPMMSTPPPASELPQPQPQPQALHYALANAQQVQIHQIGEDGQVQVIPQGHLHIAQVPQGEQVQITQDSEEPVFWYYVKEVLNKHELQRFYSLRHIASDVGRGRTWLRCALNEHSLERYLHMLLADRCRLSTFYEDWSFVMDEERSSMLPTMAAGPNSILFAINIDNKDLNGQSKFAPTVSDLLKESTQNVTLLKESTQGVSSVFREITASSAISILIKPEQETDPLPVVSRNVSADAKCKKERKKKKQVTNIISFDDEEDEQNSGDMFKKTPGAGESSEDNSDHSSVNIMSAFESPFGPNSNGSQSSNSWKIDSLSLNREFGYQKLDVKSIDDEDVDENEDDVYGNSSGRKHRGHSESPEKNGAHSVTQAGVQWHDLSSLQPLPPGFK

SEQ ID NO: 884356 - protein, 770 aa, Homo sapiens
MSEHDLADVVQIAVEDLSPDHPVVLENHVVTDEDEPALKRQRLEINCQDPSIKSFLYSINQTICLRLDSIEAKLQALEATCKSLEEKLDLVTNKQHSPIQVPMVAGSPLGATQTCNKVRCLPQQSRTLDIPCDQKVLRLKKRMMENCGVVPQTTVILNNDRQNAIVAKMEDPLSNRAPDSLENVISNAVPGRRQNTIVVKVPGQEDSHHEDGESGSEASDSVSSCGQAGSQSIGSNVTLITLNSEEDYPNGTWLGDENNPEMRVRCAIIPSDMLHISTNCRTAEKMALTLLDYLFHREVQAVSNLSGQGKHGKKQLDPLTIYGIRCHLFYKFGITESDWYRIKQSIDSKCRTAWRRKQRGQSLAVKSFSRRTPNSSSYCPSEPMMSTPPPASELPQPQPQPQALHYALANAQQVQIHQIGEDGQVQVIPQGHLHIAQVPQGEQVQITQDSEEPVFWYYVKEVLNKHELQRFYSLRHIASDVGRGRTWLRCALNEHSLERYLHMLLADRCRLSTFYEDWSFVMDEERSSMLPTMAAGPNSILFAINIDNKDLNGQSKFAPTVSDLLKESTQNVTLLKESTQGVSSVFREITASSAISILIKPEQETDPLPVVSRNVSADAKCKKERKKKKQVTNIISFDDEEDEQNSGDMFKKTPGAGESSEDNSDHSSVNIMSAFESPFGPNSNGSQSSNSWKIDSLSLNREFGYQKLDVKSIDDEDVDENEDDVYGNSSGRKHRGHSESPEKNGAHSVTQAGVQWHDLSSLQPLPPGFK

SEQ ID NO: 884357 - protein, 166 aa, Homo sapiens
  misc_feature (151)..(151): Xaa can be any naturally occurring amino acid
MSEHDLADVVQIAVEDLSPDHPGTELWDRVVLENHVVTDEDEPALKRQRLEINCQDPSIKSFLYSINQTICLRLDSIEAKLQALEATCKSLEEKLDLVTNKQHSPIQVPMVAGSPLGATQTCNKVRWRYRFGMIPTLTWLRTLDLSHGMSXDGVTENVKPVLMQVC

SEQ ID NO: 884358 - protein, 225 aa, Homo sapiens
GHIECLQWLIKMGADSNITNKAGERPSDVAKRFAHLAAVKLLEELQKYDIDDENEIDENDVKYFIRHGVEGSTDAKDDLCLSDLDKTDARMRAYKKIVELRHLLEIAESNYKHLGGITEEDLKQKKEQLESEKTIKELQGQLEYERLRREKLECQLDEYRAEVDQLRETLEKIQVPNFVAMEDSASCESNKEKRRVKKKVSSGGVFVRRFTIGQVTLPRAEWIRG

SEQ ID NO: 884359 - protein, 805 aa, Homo sapiens
WVVRRSSSEEKLLCLVRERAGHTCEAAVIVILILVWEGIPLSLADKLYSELTETLRKYGTLTNRRCALNEERTCACQGLDPETCGASFSFGCSWSMYYNGCKFARSKIPRKFKLLGDDPKEEEKLESHLQNLSTLMAPTYKKLAPDAYNNQIEYEHRAPECRLGLKEGRPFSGVTACLDFCAHAHRDLHNMQNGSTLVCTLTREDNREFGGKPEDEQLHVLPLYKVSDVDEFGSVEAQEEKKRSGAIQVLSSFRRKVRMLAEPVKTCRQRKLEAKKAAAEKLSSLENSSNKNEKEKSAPSRTKQTENASQAKQLAELLRLSGPVMQQSQQPQPLQKQPPQPQQQQRPQQQQPHHPQTESVNSYSASGSTNPYMRRPNPVSPYPNSSHTSDIYGSTSPMNFYSTSSQAAGSYLNSSNPMNPYPGLLNQNTQYPSYQCNGNLSVDNCSPYLGSYSPQSQPMDLYRYPSQDPLSKLSLPPIHTLYQPRFGNSQSFTSKYLGYGNQNMQGDGFSSCTIRPNVHHVGKLPPYPTHEMDGHFMGATSRLPPNLSNPNMDYKNGEHHSPSHIIHNYSAAPGMFNSSLHALHLQNKENDMLSHTANGLSKMLPALNHDRTACVQGGLHKLSDANGQEKQPLALVQGVASGAEDNDEVWSDSEQSFLDPDIGGVAVAPTHGSILIECAKRELHATTPLKNPNRNHPTRISLVFYQHKSMNEPKHGLALWEAKMAEKAREKEEECEKYGPDYVPQKSHGKKVKREPAEPHETSEPTYLRFIKSLAERTMSVTTDSTVTTSPYAFTRVTGPYNRYI

SEQ ID NO: 884360 - protein, 805 aa, Homo sapiens; identical to SEQ ID NO: 884359

SEQ ID NO: 884361 - protein, 805 aa, Homo sapiens; identical to SEQ ID NO: 884359

SEQ ID NO: 884362 - protein, 90 aa, Homo sapiens
SVEAQEEKKRSGAIQVLSSFRRKVRMLAEPVKTCRQRKLEAKKAAAEKLSSLENSSNKNEKEKSAPSRTKQTENASQAKQLAGKFNVKHL

SEQ ID NO: 884363 - protein, 755 aa, Homo sapiens
DLKNNEISWTIEDMNGAFYGLDKLRRLILQGNRIRSITKKASTGLDALEHLDLSDNAIMSLQGNAFSQMKKLQQLHLNTSSLLCDCQLKWLPQWVAENNFQSFVNASCAHPQLLKGRSIFAVSPDGFVCDDFPKPQITVQPETQSAIKGSNLSFICSAASSSDSPMTFAWKKDNELLHDAEMENYAHLRAQGGEVMEYTTILRLREVEFASEGKYQCVISNHFGSSYSVKAKLTVNMLPSFTKTPMDLTIRAGAMARLECAAVGHPAPQIAWQKDGGTDFPAARERRMHVMPEDDVFFIVDVKIEDIGVYSCTAQNSAGSISANATLTVLETPSFLRPLLDRTVTKGETAVLQCIAGGSPPPKLNWTKDDSPLVVTERHFFAAGNQLLIIVDSDVSDAGKYTCEMSNTLGTERGNVRLSVIPTPTCDSPQMTAPSLDDDGWATVGVVIIAVVCCVVGTSLVWVVIIYHTRRRNEDCSITNTDETNLPADIPSYLSSQGTLADRQDGYVSSESGSHHQFVTSSGAGFFLPQHDSSGTCHIDNSSEADVEAATDLFLCPFLGSTGPMYLKGNVYGSDPFETYHTGCSPDPRTVLMDHYEPSYIKKKECYPCSHPSEESCERSFSNISWPSHVRKLLNTSYSHNEGPGMKNLCLNKSSLDFSANPEPASVASSNSFMGTFGKALRRPHLDAYSSFGQPSDCQPRAFYLKAHSSPDLDSGSEEDGKERTDFQEENHICTFKQTLENYRTPNFQSYDLDT

SEQ ID NO: 884364 - protein, 788 aa, Homo sapiens
DLKNNEISWTIEDMNGAFYGLDKLRRLILQGNRIRSITKKASTGLDALEHLDLSDNAIMSLQGNAFSQMKKLQQLHLNTSSLLCDCQLKWLPQWVAENNFQSFVNASCAHPQLLKGRSIFAVSPDGFVCDDFPKPQITVQPETQSAIKGSNLSFICSAASSSDSPMTFAWKKDNELLHDAEMENYAHLRAQGGEVMEYTTILRLREVEFASEGKYQCVISNHFGSSYSVKAKLTVNMLPSFTKTPMDLTIRAGAMARLECAAVGHPAPQIAWQKDGGTDFPAARERRMHVMPEDDVFFIVDVKIEDIGVYSCTAQNSAGSISANATLTVLETPSFLRPLLDRTVTKGETAVLQCIAGGSPPPKLNWTKDDSPLVVTERHFFAAGNQLLIIVDSDVSDAGKYTCEMSNTLGTERGNVRLSVIPTPTCDSPQMTAPSLDDDGWATVGVVIIAVVCCVVGTSLVWVVIIYHTRRRNEDCSITNTDETNLPADIPSYLSSQGTLADRQDGYVSSESGSHHQFVTSSGAGFFLPQHDSSGTCHIDNSSEADVEAATDLFLCPFLGSTGPMYLKGNVYGSDPFETYHTGRWFSCLSTVLFLRETSRCANCNLLLLLPPYEKGCSPDPRTVLMDHYEPSYIKKKECYPCSHPSEESCERSFSNISWPSHVRKLLNTSYSHNEGPGMKNLCLNKSSLDFSANPEPASVASSNSFMGTFGKALRRPHLDAYSSFGQPSDCQPRAFYLKAHSSPDLDSGSEEDGKERTDFQEENHICTFKQTLENYRTPNFQSYDLDT

SEQ ID NO: 884365 - protein, 755 aa, Homo sapiens; identical to SEQ ID NO: 884363

SEQ ID NO: 884366 - protein, 103 aa, Homo sapiens
MVPRVQLWGRPRRNRVSWRWERAYFRFRLPTFRNLILRAGLRFQAGFVHIFALEGERSLGHICINCAAGPTPDSFSAHQPALELLERPWLQAGITRRAFDIDA

SEQ ID NO: 884367 - protein, 182 aa, Homo sapiens
MPEAQLWSDSLKRAAASPSQNPALPPERFPGEEGTTNSFLKARPRDLMTFEDVAVEFSQWEWGQLNPAQKDLYREVMLENFRNLAILGLLVSKPYVICQLEEGGEPFMVEREISTGAHSDWKRRSKSKESMPSWGISKEELFQLHEELPVTSCLKKKTLGLGLLMVLHDLLVSPESGQLQYC

SEQ ID NO: 884368 - protein, 400 aa, Homo sapiens
MTFEDVAVEFSQWEWGQLNPAQKDLYREVMLENFRNLAILGLLVSKPYVICQLEEGGEPFMVEREISTGAHSDWKRRSKSKESMPSWGISKEELFQVVSVEKHIQDVLQFSKLKAACGCDGQLEMQQIKQERHLKQMSTIHKSATTLSRDYKWNGFGRSLGLRSVLVNQHSILMGEGSYKCDTEFRQTLGGNNSQRTHPEKKSCKCNECGKSFHFQSELRRHQRCHTGEKPYECSDCGRAFGHISSLIKHQRTHTGEKPYECSECGRAFSQSSSLVLHYRFHTGEKPYKCNECGRAFGHTSSLIKHQRTHTGEKPYECRECGRTFSQSSSLIVHYRFHTGEKPYKCNKCGRAFSQSSSLTQHYRFHTGEKPYKCNECGRAFAHTASLIKHQRSHAGKKTL

SEQ ID NO: 884369 - protein, 400 aa, Homo sapiens; identical to SEQ ID NO: 884368

SEQ ID NO: 884370 - protein, 400 aa, Homo sapiens; identical to SEQ ID NO: 884368

SEQ ID NO: 884371 - protein, 103 aa, Homo sapiens; identical to SEQ ID NO: 884366

SEQ ID NO: 884372 - protein, 400 aa, Homo sapiens; identical to SEQ ID NO: 884368

SEQ ID NO: 884373 - protein, 400 aa, Homo sapiens; identical to SEQ ID NO: 884368

SEQ ID NO: 884374 - protein, 400 aa, Homo sapiens; identical to SEQ ID NO: 884368

SEQ ID NO: 884375 - protein, 681 aa, Homo sapiens
MAPQVWRRRTLERCLTEVGKATGRPECFLTIQEGLASKFTSLTKVLYDFNKILENGRIHGSPLQKLVIENFDDEQIWQQLELQNEPILQYFQNAVSETINDEDISLLPESEEQEREEDGSEIEADDKEDLEDLEEEEVSDMGNDDPEMGERAENSSKSDLRKSPVFSDEDSDLDFDISKLEQQSKVQNKGQGKPREKSIVDDKFFKLSEMEAYLENIEKEEERKDDNDEEEEDIDFFEDIDSDEDEGGLFGSKKLKSGKSSRNLKYKDFFDPVESDEDITNVHDDELDSNKEDDEIAEEEAEELSISETDEDDDLQENEDNKQHKESLKRVTFALPDDAETEDTGVLNVKKNSDEVKSSFEKRQEKMNEKIASLEKELLEKKPWQLQGEVTAQKRPENSLLEETLHFDHAVRMAPVITEETTLQLEDIIKQRIRDQAWDDVVRKEKPKEDAYEYKKRLTLDHEKSKLSLAEIYEQEYIKLNQQKTAEEENPEHVEIQKMMDSLFLKLDALSNFHFIPKPPVPEIKVVSNLPAITMEEVAPVSVSDAALLAPEEIKEKNKAGDIKTAAEKTATDKKRERRKKKYQKRMKIKEKEKRRKLLEKSSVDQAGKYSKTVASEKLKQLTKTGKASFIKDEGKDKALKSSQAFFSKLQDQVKMQINDAKKTEKKKKKRQDISVHKLKL

SEQ ID NO: 884376 - protein, 258 aa, Homo sapiens
MAPQVWRRRTLERCLTEVGKATGRPECFLTIQEGLASKFTSLTKVLYDFNKILENGRIHGSPLQKLVIENFDDEQIWQQLELQNEPILQYFQNAVSETINDEDISLLPESEEQEREEDGSEIEADDKEDLEDLEEEEVSDMGNDDPEMGERAENSSKSDLRKSPVFSDEDSDLDFDISKLEQQSKVQNKGQGKPREKSIVDDKFFKLSEMEAYLENIEKEEERKDDNDEEEEDIDFFEDIDSDEDEGGLFGSKKLKIR

SEQ ID NO: 884377 - protein, 182 aa, Homo sapiens
MDSLFLKLDALSNFHFIPKPPVPEIKVVSNLPAITMEEVAPVSVSDAALLAPEEIKEKNKAGDIKTAAEKTATDKKRERRKKKYQKRMKIKEKEKRRKLLEKSSVDQAGKYSKTVASEKLKQLTKTGKASFIKDEGKDKALKSSQAFFSKLQDQVKMQINDAKKTEKKKKKRQDISVHKLKL

SEQ ID NO: 884378 - protein, 668 aa, Homo sapiens [sequence omitted]

SEQ ID NO: 884379 - protein, 426 aa, Homo sapiens
MAPQVWRRRTLERCLTEVGKATGRPECFLTIQEGLASKFTSLTKVLYDFNKILENGRIHGSPLQKLVIENFDDEQIWQQLELQNEPILQYFQNAVSETINDEDISLLPESEEQEREEDGSEIEADDKEDLEDLEEEEVSDMGNDDPEMGERAENSSKSDLRKSPVFSDEDSDLDFDISKLEQQSKVQNKGQGKPREKSIVDDKFFKLSEMEAYLENIEKEEERKDDNDEEEEDIDFFEDIDSDEDEGGLFGSKKLKSGKSSRNLKYKDFFDPVESDEDITNVHDDELDSNKEDDEIAEEEAEELSISETDEDDDLQENEDNKQHKESLKRVTFALPDDAETEDTGVLNVKKNSDEVKSSFEKRQEKMNEKIASLEKELLEKKPWQLQGEVTAQKRPENSLLEETLHFDHAVRMAPVILTFLEAMSI

SEQ ID NO: 884380 - protein, 288 aa, Homo sapiens
SLISNSAREETLHFDHAVRMAPVITEETTLQLEDIIKQRIRDQAWDDVVRKEKPKEDAYEYKKRLTLDHEKSKLSLAEIYEQEYIKLNQQKTAEEENPEHVEIQKMMDSLFLKLDALSNFHFIPKPPVPEIKVVSNLPAITMEEVAPVSVSDAALLAPEEIKEKNKAGDIKTAAEKTATDKKRERRKKKYQKRMKIKEKEKRRKLLEKSSVDQAGKYSKTVASEKLKQLTKTGKASFIKDEGKDKALKSSQAFFSKLQDQVKMQINDAKKTEKKKKKRQDISVHKLKL

SEQ ID NO: 884381 - protein, 372 aa, Homo sapiens
EFDGFSTGGDSVPQGTRFSLTTGGGCSWHLVSTDRDAAKHPAVSSTAPYNKELFVPIGSMSTVLNKVEKPWSNLTFSTYNGGSGCPKKESGFPEVTQGVRGRLCKLRPCFLLFIERPLCPGLYHAAGAWDDVVRKEKPKEDAYEYKKRLTLDHEKSKLSLAEIYEQEYIKLNQQKTAEEENPEHVEIQKMMDSLFLKLDALSNFHFIPKPPVPEIKVVSNLPAITMEEVAPVSVSDAALLAPEEIKEKNKAGDIKTAAEKTATDKKRERRKKKYQKRMKIKEKEKRRKLLEKSSVDQAGKYSKTVASEKLKQLTKTGKASFIKDEGKDKALKSSQAFFSKLQDQVKMQINDAKKTEKKKKKRQDISVHKLKL

SEQ ID NO: 884382 - protein, 668 aa, Homo sapiens
MAPQVWRRRTLERCLTEVGKATGRPECFLTIQEGLASKFTSLTKVLYDFNKILENGRIHGSPLQKLVIENFDDEQIWQQLELQNEPILQYFQNAVSETINDEDISLLPESEEQEREEDGSEIEADDKEDLEDLEEEEVSDMGNDDPEMGERAENSSKSDLRKSPVFSDEDSDLDFDISKLEQQSKVQNKGQGKPREKSIVDDKFFKLSEMEAYLENIEKEEERKDDNDEEEEDIDFFEDIDSDEDEGGLFGSKKLKSGKSSRNLKYKDFFDPVESDEDITNVHDDELDSNKEDDEIAEEEAEELSISETDEDDDLQENEDNKQHKESLKRVTFALPDDAETEDTGVLNVKKNSDEVKSSFEKRQEKMNEKIASLEKELLEKKPWQLQGEVTAQKRPENSLLEETLHFDHAVRMAPVITEETTLQLEDIIKQRIRDQAWDDVVRKEKPKEDAYEYKKRLTLDHEKSKLSLAEIYEQEYIKLNQQKTAEEENPEHVEIQKMMDSLFLKLDALSNFHFIPKPPVPEIKVVSNLPAITMEEVAPVSEKNKAGDIKTAAEKTATDKKRERRKKKYQKRMKIKEKEKRRKLLEKSSVDQAGKYSKTVASEKLKQLTKTGKASFIKDEGKDKALKSSQAFFSKLQDQVKMQINDAKKTEKKKKKRQDISVHKLKL

SEQ ID NO: 884383 - protein, 668 aa, Homo sapiens [sequence omitted]

SEQ ID NO: 884384 - protein, 112 aa, Homo sapiens [sequence omitted]

SEQ ID NO: 884385 - protein, 441 aa, Homo sapiens
PKKCLCRREGYGYRECPGPLWPSLSPLPEWQVMDLGRDATRRFFNWFYWSINLGAVLSLLVVAFIQQIGEVLYNAAPLSIWWQIPQYLLIGISEIFASIPGLEFAYSEAPRSSKPPMGSQVSSMLKLALQNCCPQLWQRHSARDRQCARVLADERSPQPGASPQEDIANFQVLVKILPVMVTLVPYWMVYFQMQSTYVLQGLHLHIPNIFPANPANISVALRAQGSSYTIPEAWLLLANVVVVLILVPLKDRLIDPLLLRCKLLPSALQKMALGMFFGFTSVIVAGVLEMERLHYIHHNETVSQQIGEVLYNAAPLSIWWQIPQYLLIGISEIFASIPGLEFAYSEAPRSMQGAIMGIFFCLSGVGSLLGSSLVALLSLPGGWLHCPKDFGNINNCRMDLYFFLLAGIQAVTALLFVWIAGRYERASQGPASHSRFSRDRG

SEQ ID NO: 884386 - protein, 581 aa, Homo sapiens
MPAPRAREQPRVPGERQPLLPRGARGPRRWRRAAGAAVLLVEMLERAAFFGVTANLVLYLNSTNFNWTGEQATRAALVFLGASYLLAPVGGWLADVYLGRYRAVALSLLLYLAASGLLPATAFPDGRSSFCGEMPASPLGPACPSAGCPRSSPSPYCAPVLYAGLLLLGLAASSVRSNLTSFGADQVMDLGRDATRRFFNWFYWSINLGAVLSLLVVAFIQQNISFLLGYSIPVGCVGLAFFIFLFATPVFITKPPMGSQVSSMLKLALQNCCPQLWQRHSARDRQCARVLADERSPQPGASPQEDIANFQVLVKILPVMVTLVPYWMVYFQMQSTYVLQGLHLHIPNIFPANPANISVALRAQGSSYTIPEAWLLLANVVVVLILVPLKDRLIDPLLLRCKLLPSALQKMALGMFFGFTSVIVAGVLEMERLHYIHHNETVSQQIGEVLYNAAPLSIWWQIPQYLLIGISEIFASIPGLEFAYSEAPRSMQGAIMGIFFCLSGVGSLLGSSLVALLSLPGGWLHCPKDFGNINNCRMDLYFFLLAGIQAVTALLFVWIAGRYERASQGPASHSRFSRDRG

SEQ ID NO: 884387 - protein, 535 aa, Homo sapiens
MPAPRAREQPRVPGERQPLLPRGARGPRRWRRAAGAAVLLVEMLERAAFFGVTANLVLYLNSTNFNWTGEQATRAALVFLGASYLLAPVGGWLADVYLGRYRAVALSLLLYLAASGLLPATAFPDGRSSFCGEMPASPLGPACPSAGCPRSSPSPYCAPVLYAGLLLLGLAASSVRSNLTSFGADQVMDLGRDATRRFFNWFYWSINLGAVLSLLVVAFIQQNISFLLGYSIPVGCVGLAFFIFLFATPVFITKPPMGSQVSSMLKLALQNCCPQLWQRHSARDRQCARVLADERSPQPGASPQEDIANFQVLVKILPVMVTLVPYWMVYFQMQSTYVLQGLHLHIPNIFPANPANISVALRAQGSSYTIPEAWLLLANVVVVLILVPLKDRLIDPLLLRCKLLPSALQKMALGMFFGFTSVIVAGVLEMERLHYIHHNETVSQQIGEVLYNAAPLSIWWQIPQYLLIGISEIFASIPGLEFAYSEAPRSMQGAIMGIFFCLSGVGSLLGSSLVALLSLPGGWLHCPKDFAEEEL

SEQ ID NO: 884388 - protein, 581 aa, Homo sapiens; identical to SEQ ID NO: 884386

SEQ ID NO: 884389 - protein, 525 aa, Homo sapiens
MPAPRAREQPRVPGERQPLLPRGARGPRRWRRAAGAAVLLVEMLERAAFFGVTANLVLYLNSTNFNWTGEQATRAALVFLGASYLLAPVGGWLADVYLGRYRAVALSLLLYLAASGLLPATAFPDGRSSFCGEMPASPLGPACPSAGCPRSSPSPYCAPVLYAGLLLLGLAASSVRSNLTSFGADQVMDLGRDATRRFFNWFYWSINLGAVLSLLVVAFIQQNISFLLGYSIPVGCVGLAFFIFLFATPVFITKPPMGSQVSSMLKLALQNCCPQLWQRHSARDRQCARVLADERSPQPGASPQEDIANFQVLVKILPVMVTLVPYWMVYFQDAVHLCPAGSSPPHPKHFPSQPGQHLCGPESPGQQLHGVLEMERLHYIHHNETVSQQIGEVLYNAAPLSIWWQIPQYLLIGISEIFASIPGLEFAYSEAPRSMQGAIMGIFFCLSGVGSLLGSSLVALLSLPGGWLHCPKDFGNINNCRMDLYFFLLAGIQAVTALLFVWIAGRYERASQGPASHSRFSRDRG

SEQ ID NO: 884390 - protein, 249 aa, Homo sapiens
MQSTYVLQGLHLHIPNIFPANPANISVALRAQGSSYTIPEAWLLLANVVVVLILVPLKDRLIDPLLLRCKLLPSALQKMALGMFFGFTSVIVAGVLEMERLHYIHHNETVSQQIGEVLYNAAPLSIWWQIPQYLLIGISEIFASIPGLEFAYSEAPRSMQGAIMGIFFCLSGVGSLLGSSLVALLSLPGGWLHCPKDFGNINNCRMDLYFFLLAGIQAVTALLFVWIAGRYERASQGPASHSRFSRDRG

SEQ ID NO: 884391 - protein, 144 aa, Homo sapiens
ARGYELPDGQVITIGNERFRCPEALFQPSFLGMESCGIHETTFNSIMKCDVDIRKDLYANTVLSGGTTMYPGIADRMQKEITALAPSTMKIKIIAPPHLLEGGPLALLVAAETAVKCEVLCLLAARGDEAGRHGSEGCQFCASQ

SEQ ID NO: 884392 - protein, 148 aa, Homo sapiens
MEVKDANSALLSNYEVFQLLTDLKEQRKESGKNKHSSGQQNLNTITYETLKYISKTPCRHQSPEIVREFLTALKSHKLTKAEKLQLLNHRPVTAVEIQLMVEESEERLTEEQIEALLHTVTSILPAEPEAEQKKNTNSNVAMDEEDPA

SEQ ID NO: 884393 - protein, 144 aa, Homo sapiens; identical to SEQ ID NO: 884391

SEQ ID NO: 884394 - protein, 144 aa, Homo sapiens; identical to SEQ ID NO: 884391

SEQ ID NO: 884395 - protein, 144 aa, Homo sapiens; identical to SEQ ID NO: 884391

SEQ ID NO: 884396 - protein, 162 aa, Homo sapiens
MPVKEEKEEEEEEETARKDANSALLSNYEVFQLLTDLKEQRKESGKNKHSSGQQNLNTITYETLKYISKTPCRHQSPEIVREFLTALKSHKLTKAEKLQLLNHRPVTAVEIQLMVEESEERLTEEQIEALLHTVTSILPAEPEAEQKKNTNSNVAMDEEDPA

SEQ ID NO: 884397 - protein, 66 aa, Homo sapiens
RGSGSAKLPACSAAIPASTLARGAGTLALLVAAETAVKCEVLCLLAARGDEAGRHGSEGCQFCASQ

SEQ ID NO: 884398 - protein, 108 aa, Homo sapiens
MKLIRTWSTKGDTSIFPAVHQSPEIVREFLTALKSHKLTKAEKLQLLNHRPVTAVEIQLMVEESEERLTEEQIEALLHTVTSILPAEPEAEQKKNTNSNVAMDEEDPA

SEQ ID NO: 884399 - protein, 115 aa, Homo sapiens
MEVKDANSALLSNYETLKYISKTPCRHQSPEIVREFLTALKSHKLTKAEKLQLLNHRPVTAVEIQLMVEESEERLTEEQIEALLHTVTSILPAEPEAEQKKNTNSNVAMDEEDPA

SEQ ID NO: 884400 - protein, 115 aa, Homo sapiens; identical to SEQ ID NO: 884399

SEQ ID NO: 884401 - protein, 249 aa, Homo sapiens
ARGYELPDGQVITIGNERFRCPEALFQPSFLGMESCGIHETTFNSIMKCDVDIRKDLYANTVLSGGTTMYPGIADRMQKEITALAPSTMKIKIIAPPHLLEGGPLALLVAAETAVKCEVLCLLAARGDEAGRHGSVSLLGRVPFRPRSPTVCPLRAESREPWGLGDPRTGVRAAGRPCPGGPRGGDGDERDSRFALPNLRFPSTPCLVRGRALPCPAAFQCAPSFSHSFTSVSGSQCGGGAQSGIRPRT

SEQ ID NO: 884402 - protein, 144 aa, Homo sapiens; identical to SEQ ID NO: 884391

SEQ ID NO: 884403 - protein, 144 aa, Homo sapiens; identical to SEQ ID NO: 884391

SEQ ID NO: 884404 - protein, 144 aa, Homo sapiens; identical to SEQ ID NO: 884391

SEQ ID NO: 884405 - protein, 144 aa, Homo sapiens; identical to SEQ ID NO: 884391

SEQ ID NO: 884406 - protein, 154 aa, Homo sapiens
PPPPGFKRFSCLSLLSELGLQVFQLLTDLKEQRKESGKNKHSSGQQNLNTITYETLKYISKTPCRHQSPEIVREFLTALKSHKLTKAEKLQLLNHRPVTAVEIQLMVEESEERLTEEQIEALLHTVTSILPAEPEAEQKKNTNSNVAMDEEDPA

SEQ ID NO: 884407 - protein, 71 aa, Homo sapiens
  misc_feature (5)..(5): Xaa can be any naturally occurring amino acid
  misc_feature (8)..(9): Xaa can be any naturally occurring amino acid
  misc_feature (14)..(14): Xaa can be any naturally occurring amino acid
CMEFXRDXXEPPGXVTAVEIQLMVEESEERLTEEQIEALLHTVTSILPAEPEAEQKKNTNSNVAMDEEDPA

SEQ ID NO: 884408 - protein, 144 aa, Homo sapiens; identical to SEQ ID NO: 884391

SEQ ID NO: 884409 - protein, 233 aa, Homo sapiens [sequence omitted]

SEQ ID NO: 884410 - protein, 233 aa, Homo sapiens [sequence omitted]

SEQ ID NO: 884411 - protein, 82 aa, Homo sapiens
WGGPESSDKGDPFATCLHVPAPKPRPDSWGEDNWEGLETDSRQVKAELARKKREERRREMEAKRAERKVAKGPMKLGARKLD

SEQ ID NO: 884412 - protein, 201 aa, Homo sapiens
MTLRPSLLPLHLLLLLLLSAAVCRAEAGLETESPVRTLQVETLVEPPEPCAEPAAFGDTLHIHYTGSLVDGRIIDTSLTRDPLVIELGQKQVIPGLEQSLLDMCVGEKRRAIIPSHLAYGKRGFPPSVPADAVVQYDVELIALIRANYWLKLVKGILPLVGMAMVPALLGLIGYHLYRKANRPKVSKKKLKEEKRNKSKKK

SEQ ID NO: 884413 - protein, 139 aa, Homo sapiens
MTLRPSLLPLHLLLLLLLSAAVCRAEAGLETESPVRTLQVETLVEPPEPCAEPAAFGDTLHIHYTGSLVDGRIIDTSLTRDPLVIELGQKQVIPGLEQSLLDMCVGWKNSCFGCEDSGGFAEGASAGLRLLAYLSCLWL

SEQ ID NO: 884414 - protein, 146 aa, Homo sapiens
MTLRPSLLPLHLLLLLLLSAAVCRAEAGLETESPVRTLQVETLVEPPEPCAEPAAFGDTLHIHYTGSLVDGRIIDTSLTRDPLVIELGQKQVIPGLEQSLLDMCVGEKRRAIIPSHLAYGKRGFPPSVPGTKDNLMRPPGMTSSSQ

SEQ ID NO: 884415 - protein, 106 aa, Homo sapiens
MTLRPSLLPLHLLLLLLLSAAVCRAEAGLETESPVRTLQVETLVEPPEPCAEPAAFGDTLHIHYTGSLVDGRIIDTSLTRDPLVIELGQKQVIPGLEQSLLDMCVG

SEQ ID NO: 884416 - protein, 169 aa, Homo sapiens
  misc_feature (1)..(1): Xaa can be any naturally occurring amino acid
XSKLASSYLARRSAGWRDLREAPAFWGFLFLTAGSLVDGRIIDTSLTRDPLVIELGQKQVIPGLEQSLLDMCVGEKRRAIIPSHLAYGKRGFPPSVPADAVVQYDVELIALIRANYWLKLVKGILPLVGMAMVPALLGLIGYHLYRKANRPKVSKKKLKEEKRNKSKKK

SEQ ID NO: 884417 - protein, 182 aa, Homo sapiens
MTLRPSLLPLHLLLLLLLSAAVCRAEAGLETESPVRTLQVETLVEPPEPCAEPAAFGDTLHIHYTGSLVDGRIIDTSLTRDPLVIELGQKQVIPGLEQSLLDMCVGEKRRAIIPSHLAYGKRGFPPSVPDGVSLLLPRLECNSAIFTHHNLRHPGSSNSPVSASRVAGITGMRHHDRLILYF

SEQ ID NO: 884418 - protein, 146 aa, Homo sapiens
MYALDALSPQGSLVDGRIIDTSLTRDPLVIELGQKQVIPGLEQSLLDMCVGEKRRAIIPSHLAYGKRGFPPSVPADAVVQYDVELIALIRANYWLKLVKGILPLVGMAMVPALLGLIGYHLYRKANRPKVSKKKLKEEKRNKSKKK

SEQ ID NO: 884419 - protein, 139 aa, Homo sapiens; identical to SEQ ID NO: 884413

SEQ ID NO: 884420 - protein, 163 aa, Homo sapiens
GGGGESQSFRAQDGTRTPATDCLMYLQGPRKLMTQGGYDMVQKLFLDFFRRRLSQRPTAEELEQRNILKPRNEQEEQEEKREIKRRLTRKLSQRPTVEELRERKILIRFSDYVEVADAQDYDRRADKPWTRLTAADKVSRGECWRVGGRTVCWVSLGSPLGSV

SEQ ID NO: 884421 - protein, 71 aa, Homo sapiens
GGGGESQSFRAQDGTRTPATDCLMYLQGPRKLMTQGGYDMVQKLFLDFFRRRLSQRPTAEELEQRNILKRK

SEQ ID NO: 884422 - protein, 167 aa, Homo sapiens
GGGGESQSFRAQDGTRTPATDCLMYLQGPRKLMTQGGYDMVQKLFLDFFRRRLSQRPTAEELEQRNILKPRNEQEEQEEKREIKRRLTRKLSQRPTVEELRERKILIRFSDYVEVADAQDYDRRADKPWTRLTAADKAAIRKELNEFKSTEMEVHELSRHLTRFHRP

SEQ ID NO: 884423 - protein, 534 aa, Homo sapiens
MAASSEDDIDRRPIRRVRSKSDTPYLAEARISFNLGAAEEVERLAAMRSDSLVPGTHTPPIRRRSKFANLGRIFKPWKWRKKKSEKFKHTSAALERKISMRQSREELIKRGVLKEIYDKDGELSISNEEDSLENGQSLSSSQLSLPALSEMEPVPMPRDPCSYEVLQPSDIMDGPDPGAPVKLPCLPVKLSPPLPPKKVMICMPVGGPDLSLVSYTAQKSGQQGVAQHHHTVLPSQIQHQLQYGSHGQHLPSTTGSLPMHPSGCRMIDELNKTLAMTMQRLESSEQRVPCSTSYHSSGLHSGDGVTKAGPMGLPEIRQVPTVVIECDDNKENVPHESDYEDSSCLYTREEEEEEEDEDDDSSLYTSSLAMKVCRKDSLAIKLSNRPSKRELEEKNILPRQTDEERLELRQQIGTKLTRRLSQRPTAEELEQRNILKPRNEQEEQEEKREIKRRLTRKLSQRPTVEELRERKILIRFSDYVEVADAQDYDRRADKPWTRLTAADKAAIRKELNEFKSTEMEVHELSRHLTRFHRP

SEQ ID NO: 884424 - protein, 167 aa, Homo sapiens; identical to SEQ ID NO: 884422

SEQ ID NO: 884425 - protein, 274 aa, Homo sapiens
MDPSCQMGGHLVHAEEVERLAAMRSDSLVPGTHTPPIRRRSKFANLGRIFKPWKWRKKKSEKFKHTSAALERKISMRQSREELIKRGVLKEIYDKDGELSISNEEDSLENGQSLSSSQLSLPALSEMEPVPMPRDPCSYEVLQPSDIMDGPVSEESPSASESGVLLSQDPSAKPVLLLPPKKPAAFPGDHEETPVKQLPLLKQPPALPPKPTTRIANHLTDWHQAHQVGQRHPLPPWQWAFSSPGSSKRIQSRPGAVAYACNPSTLGGRGRWIT

SEQ ID NO: 884426 - protein, 104 aa, Homo sapiens
PVKLPCLPVKLSPPLPPKKVMICMPVGGPDLSLVSYTAQKSGQQGVAQHHHTVLPSQIQHQLQYGSHGQHLPSTTGSLPMHPSGCRMIDELNKTLAMTMQRLER

SEQ ID NO: 884427 - protein, 484 aa, Homo sapiens
MDYPKMDYFLDVESAHRLLDVESAQRFFYSQGAQARRATLLLPPTLMAASSEDDIDRRPIRRVRSKSDTPYLAEARISFNLGAAEEVERLAAMRSDSLVPGTHTPPIRRRSKFANLGRIFKPWKWRKKKSEKFKHTSAALERKISMRQSREELIKRGVLKEIYDKDGELSISNEEDSLENGQSLSSSQLSLPALSEMEPVPMPRDPCSYEVLQPSDIMDGPDPGAPVKLPCLPVKLSPPLPPKKVMICMPVGGPDLSLVSYTAQKSGQQGVAQHHHTVLPSQIQHQLQYGSHGQHLPSTTGSLPMHPSGCRMIDELNKTLAMTMQRLESSEQRVPCSTSYHSSGLHSGDGVTKAGPMGLPEIRQVPTVVIECDDNKENVPHESDYEDSSCLYTREEEEEEEDEDDDSSLYTSSLAMKVCRKDSLAIKLSNRPSKRELEEKNILPRQTDEERLELRQQIGTKLTRRLSQRPTAEELEQRNILKRK

SEQ ID NO: 884428 - protein, 169 aa, Homo sapiens
MDYPKMDYFLDVESAHRLLDVESAQRFFYSQGAQARRATLLLPPTLMAASSEDDIDRRPIRRVRSKSDTPYLAEARISFNLGAGVSLFGDMDEARMGPAVPTLGRPLGLELCSLENHGLLKTAPTYTTSAHICSGPSTGGQFSTQGMSPVQGAKRRRVVWLPLEGEEFG

SEQ ID NO: 884429 - protein, 510 aa, Homo sapiens
MDPSCQMGGHLVHAEEVERLAAMRSDSLVPGTHTPPIRRRSKFANLGRIFKPWKWRKKKSEKFKHTSAALERKISMRQSREELIKRGVLKEIYDKDGELSISNEEDSLENGQSLSSSQLSLPALSEMEPVPMPRDPCSYEVLQPSDIMDGPDPGAPVKLPCLPVKLSPPLPPKKVMICMPVGGPDLSLVSYTAQKSGQQGVAQHHHTVLPSQIQHQLQYGSHGQHLPSTTGSLPMHPSGCRMIDELNKTLAMTMQRLESSEQRVPCSTSYHSSGLHSGDGVTKAGPMGLPEIRQVPTVVIECDDNKENVPHESDYEDSSCLYTREEEEEEEDEDDDSSLYTSSLAMKVCRKDSLAIKLSNRPSKRELEEKNILPRQTDEERLELRQQIGTKLTRRLSQRPTAEELEQRNILKPRNEQEEQEEKREIKRRLTRKLSQRPTVEELRERKILIRFSDYVEVADAQDYDRRADKPWTRLTAADKAAIRKELNEFKSTEMEVHELSRHLTRFHRP

SEQ ID NO: 884430 - protein, 526 aa, Homo sapiens
MDPSCQMGGHLVHAEEVERLAAMRSDSLVPGTHTPPIRRRSKFANLGRIFKPWKWRKKKSEKFKHTSAALERKISMRQSREELIKRGVLKEIYDKDGELSISNEEDSLENGQSLSSSQLSLPALSEMEPVPMPRDPCSYEVLQPSDIMDGPDPGAPVKLPCLPVKLSPPLPPKKVMICMPVGGPDLSLVSYTAQKSGQQGVAQHHHTVLPSQIQHQLQYGSHGQHLPSTTGSLPMHPSGCRMIDELNKTLAMTMQRLESSEQRVPCSTSYHSSGLHSGDGVTKAGPMGLPEIRQVPTVVIECDDNKENVPHESDYEDSSCLYTREEEEEEEDEDDDSSLYTSSLAMKVCRKDSLAIKLSNRPSKRELEEKNILPRQTDEERLELRQQIGTKLTRRLSQRPTAEELEQRNILKPRNEQEEQEEKREIKRRLTRKLSQRPTVEELRERKILIRFSDYVEVADAQDYDRRADKPWTRLTAADKAAIRKELNEFKSTEMEVHELSRHLTRLVLRVFFFLFFPQVAIFISK

SEQ ID NO: 884431 - protein, 101 aa, Homo sapiens
RWSLTLSPGLECNGAISAHYNLCLPGSSNSPASASQVVEITDVMGPAFSTSSWAAHNSHLCTCHIPHLVENTQKVLSPPPLGVSPNDCIGGPYFCHRASWP

SEQ ID NO: 884432 - protein, 453 aa, Homo sapiens
MAGAAAGGRGGGAWGPGRGGAGGLRRGCSPPAPAGSPRAGLQPLRATIPFQLQQPHQRRDGGGRAASVPCSVAPEKSVCRPQPLQVRRTFSLDTILSSYLLGQWPRDADGAFTCCTNDKATQTPLSWQELEGERASSCAHKRSASWGSTDHRKEISKLKQQLQRTKLSRSGKEKERGSPLLGDHAVRGALRASPPSFPSGSPVLRLSPCLHRSLEGLNQELEEVFVKEQGEEELLRILDIPDGHRAPAPPQSGSCDHPLLLLEPGNLASSPSMSLASPQPCGLASHEEHRGAAEELASTPNDKASSPGHPAFLEDGSPSPVLAFAASPRPNHSYIFKREPPEGCEKVRVFEEATSPGPDLAFLTSCPDKNKVHFNPTGSAFCPVNLMKPLFPGMGFIFRNCPSNPGSPLPPASPRPPPRKDPEASKASPLPFEPWQRTPPSEEPVLFQSSLMV

SEQ ID NO: 884433 - protein, 421 aa, Homo sapiens
GKFDPFGEASGRHFEVGQKVTPVVEPGANHFLLPSVPCSVAPEKSVCRPQPLQVRRTFSLDTILSSYLLGQWPRDADGAFTCCTNDKATQTPLSWQELEGERASSCAHKRSASWGSTDHRKEISKLKQQLQRTKLSRSGKEKERGSPLLGDHAVRGALRASPPSFPSGSPVLRLSPCLHRSLEGLNQELEEVFVKEQGEEELLRILDIPDGHRAPAPPQSGSCDHPLLLLEPGNLASSPSMSLASPQPCGLASHEEHRGAAEELASTPNDKASSPGHPAFLEDGSPSPVLAFAASPRPNHSYIFKREPPEGCEKVRVFEEATSPGPDLAFLTSCPDKNKVHFNPTGSAFCPVNLMKPLFPGMGFIFRNCPSNPGSPLPPASPRPPPRKDPEASKASPLPFEPWQRTPPSEEPVLFQSSLMV

SEQ ID NO: 884434 - protein, 419 aa, Homo sapiens
VTVEPKQAASPANQYGFQTFQRPINKNASDPASVPCSVAPEKSVCRPQPLQVRRTFSLDTILSSYLLGQWPRDADGAFTCCTNDKATQTPLSWQELEGERASSCAHKRSASWGSTDHRKEISKLKQQLQRTKLSRSGKEKERGSPLLGDHAVRGALRASPPSFPSGSPVLRLSPCLHRSLEGLNQELEEVFVKEQGEEELLRILDIPDGHRAPAPPQSGSCDHPLLLLEPGNLASSPSMSLASPQPCGLASHEEHRGAAEELASTPNDKASSPGHPAFLEDGSPSPVLAFAASPRPNHSYIFKREPPEGCEKVRVFEEATSPGPDLAFLTSCPDKNKVHFNPTGSAFCPVNLMKPLFPGMGFIFRNCPSNPGSPLPPASPRPPPRKDPEASKASPLPFEPWQRTPPSEEPVLFQSSLMV

SEQ ID NO: 884435 - protein, 397 aa, Homo sapiens
HNDSCLISQTSVPCSVAPEKSVCRPQPLQVRRTFSLDTILSSYLLGQWPRDADGAFTCCTNDKATQTPLSWQELEGERASSCAHKRSASWGSTDHRKEISKLKQQLQRTKLSRSGKEKERGSPLLGDHAVRGALRASPPSFPSGSPVLRLSPCLHRSLEGLNQELEEVFVKEQGEEELLRILDIPDGHRAPAPPQSGSCDHPLLLLEPGNLASSPSMSLASPQPCGLASHEEHRGAAEELASTPNDKASSPGHPAFLEDGSPSPVLAFAASPRPNHSYIFKREPPEGCEKVRVFEEATSPGPDLAFLTSCPDKNKVHFNPTGSAFCPVNLMKPLFPGMGFIFRNCPSNPGSPLPPASPRPPPRKDPEASKASPLPFEPWQRTPPSEEPVLFQSSLMV

SEQ ID NO: 884436 - protein, 343 aa, Homo sapiens [sequence omitted]

SEQ ID NO: 884437 - protein, 421 aa, Homo sapiens
MAGAAAGGRGGGAWGPGRGGAGGLRRGCSPPAPAGSPRAGLQPLRATIPFQLQQPHQRRDGGGRAASVPCSVAPEKSVCRPQPLQVRRTFSLDTILSSYLLGQWPRDADGAFTCCTNDKATQISKLKQQLQRTKLSRSGKEKERGSPLLGDHAVRGALRASPPSFPSGSPVLRLSPCLHRSLEGLNQELEEVFVKEQGEEELLRILDIPDGHRAPAPPQSGSCDHPLLLLEPGNLASSPSMSLASPQPCGLASHEEHRGAAEELASTPNDKASSPGHPAFLEDGSPSPVLAFAASPRPNHSYIFKREPPEGCEKVRVFEEATSPGPDLAFLTSCPDKNKVHFNPTGSAFCPVNLMKPLFPGMGFIFRNCPSNPGSPLPPASPRPPPRKDPEASKASPLPFEPWQRTPPSEEPVLFQSSLMV

SEQ ID NO: 884438 - protein, 438 aa, Homo sapiens
MAGAAAGGRGGGAWGPGRGGAGGLRRGCSPPAPAGSPRAGLQPLRATIPFQLQQPHQRRDGGGRAASVPCSVAPEKSVCRPQPLQVRRTFSLDTILSSYLLGQWPRDADGAFTCCTNDKATQTPLSWQELEGERASSCAHKRSASWGSTDHRKEISKLKQQLQRTKLSRSGKEKERGSPLLGDHAVRGALRASPPSFPSGSPVLRLSPCLHRSLEGLNQELEEVFVKEQGEEELLRILDIPDGHRAPAPPQSGSCDHPLLLLEPGNLASSPSMSLASPQPCGLASHEEHRGAAEELASTPNDKASSPGHPAFLEDGSPSPVLAFAASPRPNHSYIFKREPPEGCEKVRVFEEATSPGPDLAFLTSCPDKNKVHFNPTGSAFCPVNLMKPLFPGMGFIFRNCPSLSAFEHFLSLTVSKPWVLFLMGTGPSERDGTCLLH

SEQ ID NO: 884439 - protein, 453 aa, Homo sapiens; identical to SEQ ID NO: 884432

SEQ ID NO: 884440 - protein, 332 aa, Homo sapiens
MPSSPGQGKKDWSLFRMFSRTLTEPCPLASESRVYVDITTYNQDNETLEVHPPPTTTYQDVILGTRKTYAIYDLLDTAMINNSRNLNIQLKWKRPPENEAPPVPFLHAQRYVSGYGLQKGELSTLLYNTHPYRAFPVLLLDTVPWYLRLYVHTLTITSKGKENKPSYIHYQPAQDRLQPHLLEMLIQLPANSVTKVSIQFERALLKWTEYTPDPNHGFYVSPSVLSALVPSMVAAKPVDWEESPLFNSLFPVSDGSNYFVRLYTEPLLVNLPTPDFSMPYNVICLTCTVVAVCYGSFYNLLTRTFHIEEPRTGGLAKRLANLIRRARGVPPL

SEQ ID NO: 884441 - protein, 332 aa, Homo sapiens; identical to SEQ ID NO: 884440

SEQ ID NO: 884442 - protein, 332 aa, Homo sapiens; identical to SEQ ID NO: 884440

SEQ ID NO: 884443 - protein, 332 aa, Homo sapiens; identical to SEQ ID NO: 884440

SEQ ID NO: 884444 - protein, 318 aa, Homo sapiens
MAAAMPLALLVLLLLGPGGWCLAEPPRDSLREELVITPLPSGDVAATFQFRTRWDSELQREGVSHYRLFPKALGQLISKYSLRELHLSFTQGFWRTRYWGPPFLQAPSGAELWVWFQDTVTDVDKSWKELSNVLSGIFCASLNFIDSTNTVTPTASFKPLGLANDTDHYFLRYAVLPREVVCTENLTPWKKLLPCSSKAGLSVLLKADRLFHTSYHSQAVHIRPVCRNARCTSISWELRQTLSVVFDAFITGAGKERLVPLPDVLPNPHGALPPGFREPSLCGHHHLQPGQRDIRGAPTPDHYISGRHPRHSEDLCHL

SEQ ID NO: 884445 - protein, 265 aa, Homo sapiens
MPSSPGQGKKDWSLFRMFSRTLTEPCPLASESRVYVDITTYNQDNETLEVHPPPTTTYQDVILGTRKTYAIYDLLDTAMINNSRNLNIQLKWKRPPENGYIHYQPAQDRLQPHLLEMLIQLPANSVTKVSIQFERALLKWTEYTPDPNHGFYVSPSVLSALVPSMVAAKPVDWEESPLFNSLFPVSDGSNYFVRLYTEPLLVNLPTPDFSMPYNVICLTCTVVAVCYGSFYNLLTRTFHIEEPRTGGLAKRLANLIRRARGVPPL

SEQ ID NO: 884446 - protein, 318 aa, Homo sapiens; identical to SEQ ID NO: 884444

SEQ ID NO: 884447 - protein, 280 aa, Homo sapiens
MPSSPGQGKKDWSLFRMFSRTLTEPCPLASESRVYVDITTYNQDNETLEVHPPPTTTYQDVILGTRKTYAIYDLLDTAMINNSRNLNIQLKWKRPPENEAPPVPFLHAQRYVSGYGLQKGELSTLLYNTHPYRAFPVLLLDTVPWYLRLYVHTLTITSKGKENKPSYIHYQPAQDRLQPHLLEMLIQLPANSVTKVSIQFERALLKWTEYTPDPNHGFYVSPSVLSALVPSMVAAKPVDWEESPLFNSLFPVSDGSNYFVRLYTEPLLVNLPTPDFSKQV

SEQ ID NO: 884448 - protein, 253 aa, Homo sapiens
MPSSPGQGKKDWSLFRMFSRTLTEPCPLASESRVYVDITTYNQDNETLEVHPPPTTTYQDVILGTRKTYAIYDLLDTAMINNSRNLNIQLKWKRPPENEAPPVPFLHAQRYVSGYGLQKGELSTLLYNTHPYRAFPVLLLDTVPWYLRLYVHTLTITSKGKENKPSYIHYQPAQDRLQPHLLEMLIQLPANSVTKVSIQFERALLKWTEYTPDPNHGFYVSPSVLSALVPSMVAAKPVDWEESPLFNSLLPWT

SEQ ID NO: 884449 - protein, 314 aa, Homo sapiens
  misc_feature (281)..(281): Xaa can be any naturally occurring amino acid
MPSSPGQGKKDWSLFRMFSRTLTEPCPLASESRVYVDITTYNQDNETLEVHPPPTTTYQDVILGTRKTYAIYDLLDTAMINNSRNLNIQLKWKRPPENEAPPVPFLHAQRYVSGYGLQKGELSTLLYNTHPYRAFPVLLLDTVPWYLRLYVHTLTITSKGKENKPSYIHYQPAQDRLQPHLLEMLIQLPANSVTKVSIQFERALLKWTEYTPDPNHGFYVSPSVLSALVPSMVAAKPVDWEESPLFNSLFGYRLGLTRVPYKWGRAWSPPKGGFRRDGRAXEERPLGIEGPAQLTGNDHGGGAPVGRGIEAHPG

SEQ ID NO: 884450 - protein, 332 aa, Homo sapiens; identical to SEQ ID NO: 884440

SEQ ID NO: 884451 - protein, 332 aa, Homo sapiens; identical to SEQ ID NO: 884440

SEQ ID NO: 884452 - protein, 332 aa, Homo sapiens; identical to SEQ ID NO: 884440

SEQ ID NO: 884453 - protein, 318 aa, Homo sapiens; identical to SEQ ID NO: 884444

SEQ ID NO: 884454 - protein, 332 aa, Homo sapiens; identical to SEQ ID NO: 884440

SEQ ID NO: 884455 - protein, 332 aa, Homo sapiens; identical to SEQ ID NO: 884440

SEQ ID NO: 884456 - protein, 332 aa, Homo sapiens; identical to SEQ ID NO: 884440

SEQ ID NO: 884457 - protein, 332 aa, Homo sapiens; identical to SEQ ID NO: 884440

SEQ ID NO: 884458 - protein, 332 aa, Homo sapiens; identical to SEQ ID NO: 884440

SEQ ID NO: 884459 - protein, 332 aa, Homo sapiens; identical to SEQ ID NO: 884440

SEQ ID NO: 884460 - protein, 332 aa, Homo sapiens; identical to SEQ ID NO: 884440

SEQ ID NO: 884461 - protein, 316 aa, Homo sapiens
MFSRTLTEPCPLASESRVYVDITTYNQDNETLEVHPPPTTTYQDVILGTRKTYAIYDLLDTAMINNSRNLNIQLKWKRPPENEAPPVPFLHAQRYVSGYGLQKGELSTLLYNTHPYRAFPVLLLDTVPWYLRLYVHTLTITSKGKENKPSYIHYQPAQDRLQPHLLEMLIQLPANSVTKVSIQFERALLKWTEYTPDPNHGFYVSPSVLSALVPSMVAAKPVDWEESPLFNSLFPVSDGSNYFVRLYTEPLLVNLPTPDFSMPYNVICLTCTVVAVCYGSFYNLLTRTFHIEEPRTGGLAKRLANLIRRARGVPPL

SEQ ID NO: 884462 - protein, 384 aa, Homo sapiens
MAAAMPLALLVLLLLGPGGWCLAEPPRDSLREELVITPLPSGDVAATFQFRTRWDSELQREGDWSLFRMFSRTLTEPCPLASESRVYVDITTYNQDNETLEVHPPPTTTYQDVILGTRKTYAIYDLLDTAMINNSRNLNIQLKWKRPPENEAPPVPFLHAQRYVSGYGLQKGELSTLLYNTHPYRAFPVLLLDTVPWYLRLYVHTLTITSKGKENKPSYIHYQPAQDRLQPHLLEMLIQLPANSVTKVSIQFERALLKWTEYTPDPNHGFYVSPSVLSALVPSMVAAKPVDWEESPLFNSLFPVSDGSNYFVRLYTEPLLVNLPTPDFSMPYNVICLTCTVVAVCYGSFYNLLTRTFHIEEPRTGGLAKRLANLIRRARGVPPL

SEQ ID NO: 884463 - protein, 483 aa, Homo sapiens
MAAAMPLALLVLLLLGPGGWCLAEPPRDSLREELVITPLPSGDVAATFQFRTRWDSELQREGDTDHYFLRYAVLPREVVCTENLTPWKKLLPCSSKAGLSVLLKADRLFHTSYHSQAVHIRPVCRNARCTSISWELRQTLSVVFDAFITGAGKERLVPLPDVLPNPHGALPPGFREPSLCGHHHLQPALPLCPQDNETLEVHPPPTTTYQDVILGTRKTYAIYDLLDTAMINNSRNLNIQLKWKRPPENEAPPVPFLHAQRYVSGYGLQKGELSTLLYNTHPYRAFPVLLLDTVPWYLRLYVHTLTITSKGKENKPSYIHYQPAQDRLQPHLLEMLIQLPANSVTKVSIQFERALLKWTEYTPDPNHGFYVSPSVLSALVPSMVAAKPVDWEESPLFNSLFPVSDGSNYFVRLYTEPLLVNLPTPDFSMPYNVICLTCTVVAVCYGSFYNLLTRTFHIEEPRTGGLAKRLANLIRRARGVPPL

SEQ ID NO: 884464 - protein, 344 aa, Homo sapiens
TQSLFGGLFTLTCMKFGAVTRIGGPPLGDQSPVLLLFAPEKDPPTTSGPQTDQPKDNETLEVHPPPTTTYQDVILGTRKTYAIYDLLDTAMINNSRNLNIQLKWKRPPENEAPPVPFLHAQRYVSGYGLQKGELSTLLYNTHPYRAFPVLLLDTVPWYLRLYVHTLTITSKGKENKPSYIHYQPAQDRLQPHLLEMLIQLPANSVTKVSIQFERALLKWTEYTPDPNHGFYVSPSVLSALVPSMVAAKPVDWEESPLFNSLFPVSDGSNYFVRLYTEPLLVNLPTPDFSMPYNVICLTCTVVAVCYGSFYNLLTRTFHIEEPRTGGLAKRLANLIRRARGVPPL

SEQ ID NO: 884465 - protein, 243 aa, Homo sapiens
VNLLIFLYTEAPPVPFLHAQRYVSGYGLQKGELSTLLYNTHPYRAFPVLLLDTVPWYLRLYVHTLTITSKGKENKPSYIHYQPAQDRLQPHLLEMLIQLPANSVTKVSIQFERALLKWTEYTPDPNHGFYVSPSVLSALVPSMVAAKPVDWEESPLFNSLFPVSDGSNYFVRLYTEPLLVNLPTPDFSMPYNVICLTCTVVAVCYGSFYNLLTRTFHIEEPRTGGLAKRLANLIRRARGVPPL

SEQ ID NO: 884466 - protein, 106 aa, Homo sapiens
VNLLIFLYTEAPPVPFLHAQRYVSGYGLQKGELSTLLYNTHPYRAFPVLLLDTVPWYLRLYVHTLTITSKGKENKPSEDLSPEPGPQPALSCPLQVPQTLISQGSS

SEQ ID NO: 884467 - protein, 179 aa, Homo sapiens
TLEIRKNSEVCTAGVSLGIFPMPAWRYVSERNYTSVCRSVTKVSIQFERALLKWTEYTPDPNHGFYVSPSVLSALVPSMVAAKPVDWEESPLFNSLFPVSDGSNYFVRLYTEPLLVNLPTPDFSMPYNVICLTCTVVAVCYGSFYNLLTRTFHIEEPRTGGLAKRLANLIRRARGVPPL

SEQ ID NO: 884468 - protein, 155 aa, Homo sapiens
MPTGKRTSEAHNRRQRQTDDRRGAKRRRDNQSHNWDRETRETGHTQKHTGTPSEEHGETNRTASITAGVGTSRHEPPERSHQGQQGGHRPPRNRGSKRATRAESREATRNRTRPKNADQRNTQSAHSETPVTTDSNKKKEKDKPEVRTKRHNMLN

SEQ ID NO: 884469 - protein, 265 aa, Homo sapiens; identical to SEQ ID NO: 884445

SEQ ID NO: 884470 - protein, 124 aa, Homo sapiens
GRYDGRRYEVALAPSVLSALVPSMVAAKPVDWEESPLFNSLFPVSDGSNYFVRLYTEPLLVNLPTPDFSMPYNVICLTCTVVAVCYGSFYNLLTRTFHIEEPRTGGLAKRLANLIRRARGVPPL

SEQ ID NO: 884471 - protein, 155 aa, Homo sapiens
MPTGKRTSEAHNRRQRQTDDRRGAKRRRDNQSHNWDRETRETGHTQKHTGTPSEEHGETNRTASITAGVGTSRHEPPERSHQGQQGGHRPPRNRGSKRATRAESREATRNRTRPKNADQRNTQSAHSETPVTNDSNKKKEKDKPEVRTKRHNMLN

SEQ ID NO: 884472 - protein, 418 aa, Homo sapiens
MSLLDCFCTSRTQVESLRPEKQSETSIHQYLVDEPTLSWSRPSTRASEVLCSTNVSHYELQVEIGRGFDNLTSVHLARHTPTGTLVTIKITNLENCNEERLKALQKAVILSHFFRHPNITTYWTVFTVGSWLWVISPFMAYGSASQLLRTYFPEGMSETLIRNILFGAVRGLNYLHQNGCIHRSIKASHILISGDGLVTLSGLSHLHSLVKHGQRHRAVYDFPQFSTSVQPWLSPELLRQDLHGYNVKSDIYSVGITACELASGQVPFQDMHRTQMLLQKLKGPPYSPLDISIFPQSESRMKNSQSGVDSGIGESVLVSSGTHTVNSDRLHTPSSKTFSPAFFSLVQLCLQQDPEKRPSASSLLSHVFFKQMKEESQDSILSLLPPAYNKPSISLPPVLPWTEPECDFPDEKDSYWEF

SEQ ID NO: 884473 - protein, 418 aa, Homo sapiens; identical to SEQ ID NO: 884472

SEQ ID NO: 884474 - protein, 418 aa, Homo sapiens; identical to SEQ ID NO: 884472

SEQ ID NO: 884475 - protein, 418 aa, Homo sapiens; identical to SEQ ID NO: 884472

SEQ ID NO: 884476 - protein, 373 aa, Homo sapiens [sequence omitted]

SEQ ID NO: 884477 - protein, 285 aa, Homo sapiens
MSLLDCFCTSRTQVESLRPEKQSETSIHQYLVDEPTLSWSRPSTRASEVLCSTNVSHYELQVEIGRGFDNLTSVHLARHTPTGTLVTIKITNLENCNEERLKALQKAVILSHFFRHPNITTYWTVFTVGSWLWVISPFMAYGSASQLLRTYFPEGMSETLIRNILFGAVRGLNYLHQNGCIHRSIKASHILISGDGLVTLSGLSHLHSLVKHGQRHRAVYDFPQFSTSVQPWLSPELLRQDLHGYNVKSDIYSVGITACELASGQVPFQDMHRTQLGTALFATRS

SEQ ID NO: 884478 - protein, 363 aa, Homo sapiens
MTQTSPFYNGRGFDNLTSVHLARHTPTGTLVTIKITNLENCNEERLKALQKAVILSHFFRHPNITTYWTVFTVGSWLWVISPFMAYGSASQLLRTYFPEGMSETLIRNILFGAVRGLNYLHQNGCIHRSIKASHILISGDGLVTLSGLSHLHSLVKHGQRHRAVYDFPQFSTSVQPWLSPELLRQDLHGYNVKSDIYSVGITACELASGQVPFQDMHRTQMLLQKLKGPPYSPLDISIFPQSESRMKNSQSGVDSGIGESVLVSSGTHTVNSDRLHTPSSKTFSPAFFSLVQLCLQQDPEKRPSASSLLSHVFFKQMKEESQDSILSLLPPAYNKPSISLPPVLPWTEPECDFPDEKDSYWEF

SEQ ID NO: 884479 - protein, 263 aa, Homo sapiens
MSETLIRNILFGAVRGLNYLHQNGCIHRSIKASHILISGDGLVTLSGLSHLHSLVKHGQRHRAVYDFPQFSTSVQPWLSPELLRQDLHGYNVKSDIYSVGITACELASGQVPFQDMHRTQMLLQKLKGPPYSPLDISIFPQSESRMKNSQSGVDSGIGESVLVSSGTHTVNSDRLHTPSSKTFSPAFFSLVQLCLQQDPEKRPSASSLLSHVFFKQMKEESQDSILSLLPPAYNKPSISLPPVLPWTEPECDFPDEKDSYWEF

SEQ ID NO: 884480 - protein, 256 aa, Homo sapiens
FPARARNRAGSLAARGVLSRGQPGSAAAPRQEKQPRTPWKSRSTWACENGANTSPAKPHSKAGPRTATVAPQASRMTVKPAKAASLARNLAKRRRTYLGGAAGRSQEPEVPCAAVLPGKPGDRNCPEFPPPDRTLGCWATDAAPAAGLCGAGSEPSIAPTSCAGNLPSRPPPLLSPLLASRNPCPWHYLHLSGSHNTLAPTCFKAKLHRKRGSQPPDMASALTDRTSRAPSTYTYTSRPRALPCQRSRYRDSLTQP

SEQ ID NO: 884481 - protein, 464 aa, Homo sapiens
FPARARNRAGSLAARGVLSRGQPGSAAAPRQEKQPRTPWKSRSTWACENGANTSPAKPHSKAGPRTATVAPQASRMTVKPAKAASLARNLAKRRRTYLGGAAGRSQEPEVPCAAVLPGKPGDRNCPEFPPPDRTLGCWATDAAPAAGLCGAGSEPSIAPTSCAGNLPSRPPPLLSPLLASRNPCPWHYLHLSGSHNTLAPTCFKAKLHRKRGSQPPDMASALTDRTSRAPSTYTYTSRPRALPCQRSRYRDSLTQPDEEPMHYGNIMYDRRVIRGNTYALQTGPLLGRPDSLELQRQREARKRALARKQAQEQLRPQTPEPVEGRKHVDVQTELYLEEIADRIIEVDMECQTDAFLDRPPTPLFIPAKTGKDVATQILEGELFDFDLEVKPVLEVLVGKTIEQSLLEVMEEEELANLRASQREYEELRNSERAEVQRLEEQERRHREEKVYIIIFSFLGSLLAS

SEQ ID NO: 884482 - protein, 635 aa, Homo sapiens
FPARARNRAGSLAARGVLSRGQPGSAAAPRQEKQPRTPWKSRSTWACENGANTSPAKPHSKAGPRTATVAPQASRMTVKPAKAASLARNLAKRRRTYLGGAAGRSQEPEVPCAAVLPGKPGDRNCPEFPPPDRTLGCWATDAAPAAGLCGAGSEPSIAPTSCAGNLPSRPPPLLSPLLASRNPCPWHYLHLSGSHNTLAPTCFKAKLHRKRGSQPPDMASALTDRTSRAPSTYTYTSRPRALPCQRSRYRDSLTQPDEEPMHYGNIMYDRRVIRGNTYALQTGPLLGRPDSLELQRQREARKRALARKQAQEQLRPQTPEPVEGRKHVDVQTELYLEEIADRIIEVDMECQTDAFLDRPPTPLFIPAKTGKDVATQILEGELFDFDLEVKPVLEVLVGKTIEQSLLEVMEEEELANLRASQREYEELRNSERAEVQRLEEQERRHREEKERRKKQQWEIMHKHNETSQKIAARAFAQRYLADLLPSVFGSLRDSGYFYDPIERDIEIGFLPWLMNEVEKTMEYSMVGRTVLDMLIREVVEKRLCMYEHGEDTHQSPEPEDEPGGPGAMTESLEASEFLEQSMSQTRELLLDGGYLQRTTYDRRSSQERKFMEERELLGQDEETAMRKSLGEEELS

SEQ ID NO: 884483 - protein, 425 aa, Homo sapiens
RIPCDVECRGRIDAWSLCRFQSRDSETRPRALPCQRSRYRDSLTQPDEEPMHYGNIMYDRRVIRGNTYALQTGPLLGRPDSLELQRQREARKRALARKQAQEQLRPQTPEPVEGRKHVDVQTELYLEEIADRIIEVDMECQTDAFLDRPPTPLFIPAKTGKDVATQILEGELFDFDLEVKPVLEVLVGKTIEQSLLEVMEEEELANLRASQREYEELRNSERAEVQRLEEQERRHREEKERRKKQQWEIMHKHNETSQKIAARAFAQRYLADLLPSVFGSLRDSGYFYDPIERDIEIGFLPWLMNEVEKTMEYSMVGRTVLDMLIREVVEKRLCMYEHGEDTHQSPEPEDEPGGPGAMTESLEASEFLEQSMSQTRELLLDGGYLQRTTYDRRSSQERKFMEERELLGQDEETAMRKSLGEEELS

SEQ ID NO: 884484 - protein, 384 aa, Homo sapiens
MALNDCFLLNLEVDHFMHCNISSHSADLPVNDDWSHPGILYVIPAVYGVIILIGLIGNITLIKIFCTVKSMRNVPNLFISSLALGDLLLLITCAPVDASRYLADRWLFGRIGCKLIPFIQLTSVGVSVFTLTALSADRYKAIVRPMDIQASHALMKICLKAAFIWIISMLLAIPEAVFSDLHPFHEESTNQTFISCAPYPHSNELHPKIHSMASFLVFYVIPLSIISVYYYFIAKNLIQSAYNLPVEGNIHVKKQIESRKRLAKTVLVFVGLFAFCWLPNHVIYLYRSYHYSEVDTSMLHFVTSICARLLAFTNSCVNPFALYLLSKSFRKQFNTQLLCCQPGLIIRSHSTGRSTTCMTSLKSTNPSVATFSLINGNICHERYV

SEQ ID NO: 884485 - protein, 574 aa, Homo sapiens
MASTEGANNMPKQVEVRMHDSHLGSEEPKHRHLGLRLCDKLGKNLLLTLTVFGVILGAVCGGLLRLASPIHPDVVMLIAFPGDILMRMLKMLILPLIISSLITGLSGLDAKASGRLGTRAMVYYMSTTIIAAVLGVILVLAIHPGNPKLKKQLGPGKKNDEVSSLDAFLDLIRNLFPENLVQACFQQIQTVTKKVLVAPPPDEEANATSAVVSLLNETVTEVPEETKMVIKKGLEFKDGMNVLGLIGFFIAFGIAMGKMGDQAKLMVDFFNILNEIVMKLVIMIMWYSPLGIACLICGKIIAIKDLEVVARQLGMYMVTVIIGLIIHGGIFLPLIYFVVTRKNPFSFFAGIFQAWITALGTASSAGTLPVTFRCLEENLGIDKRVTRFVLPVGATINMDGTALYEAVAAIFIAQMNGVVLDGGQIVTVSLTATLASVGAASIPSAGLVTMLLILTAVGLPTEDISLLVAVDWLLDRMRTSVNVVGDSFGAGIVYHLSKSELDTIDSQHRVHEDIEMTKTQSIYDDMKNHRESNSNQCVYAAHNSVIVDECKVTLAANGKSADCSVEEEPWKREK

SEQ ID NO: 884486 - protein, 574 aa, Homo sapiens; identical to SEQ ID NO: 884485

SEQ ID NO: 884487 - protein, 629 aa, Homo sapiens
SRSTPLDLGPPDVGGWGGCACGDLVSSSRAISGHLYLPSTSPDPEAWGQGGEVRCQQWKDSANNMPKQVEVRMHDSHLGSEEPKHRHLGLRLCDKLGKNLLLTLTVFGVILGAVCGGLLRLASPIHPDVVMLIAFPGDILMRMLKMLILPLIISSLITGLSGLDAKASGRLGTRAMVYYMSTTIIAAVLGVILVLAIHPGNPKLKKQLGPGKKNDEVSSLDAFLDLIRNLFPENLVQACFQQIQTVTKKVLVAPPPDEEANATSAVVSLLNETVTEVPEETKMVIKKGLEFKDGMNVLGLIGFFIAFGIAMGKMGDQAKLMVDFFNILNEIVMKLVIMIMWYSPLGIACLICGKIIAIKDLEVVARQLGMYMVTVIIGLIIHGGIFLPLIYFVVTRKNPFSFFAGIFQAWITALGTASSAGTLPVTFRCLEENLGIDKRVTRFVLPVGATINMDGTALYEAVAAIFIAQMNGVVLDGGQIVTVSLTATLASVGAASIPSAGLVTMLLILTAVGLPTEDISLLVAVDWLLDRMRTSVNVVGDSFGAGIVYHLSKSELDTIDSQHRVHEDIEMTKTQSIYDDMKNHRESNSNQCVYAAHNSVIVDECKVTLAANGKSADCSVEEEPWKREK

SEQ ID NO: 884488 - protein, 563 aa, Homo sapiens
MASTEGANNMPKQVEVRMHDSHLGSEEPKHRHLGLRLCDKLGKNLLLTLTVFGVILGAVCGGLLRLASPIHPDVVMLIAFPGDILMRMLKMLILPLIISSLITGLSGLDAKASGRLGTRAMVYYMSTTIIAAVLGVILVLAIHPGNPKLKKQLGPGKKNDEVSSLDAFLDLIRNLFPENLVQACFQQIQTVTKKVLVAPPPDEEANATSAVVSLLNETVTEVPEETKMVIKKGLEFKDGMNVLGLIGFFIAFGIAMGKMGDQAKLMVDFFNILNEIVMKLVIMIMWYSPLGIACLICGKIIAIKDLEVVARQLGMYMVTVIIGLIIHGGIFLPLIYFVVTRKNPFSFFAGIFQAWITALGTASSAGTLPVTFRCLEENLGIDKRVTRFVLPVGATINMDGTALYEAVAAIFIAQMNGVVLDGGQIVTVSLTATLASVGAASIPSAGLVTMLLILTAVGLPTEDISLLVAVDWLLDRMRTSVNVVGDSFGAGIVYHLSKSELDTIDSQHRVHEDIEMTKTQSIYDDMKNHRESNSNQCVYAAHNSVIVDECKVHFPFMDIETCI

SEQ ID NO: 884489 - protein, 69 aa, Homo sapiens
ERDINQLFFRPQGFVPSAMCVKSGIPPPGAKRKSGIAELSCRHLAPGPRGPRDPPLTPPASGPHGRAGP

SEQ ID NO: 884490 - protein, 69 aa, Homo sapiens; identical to SEQ ID NO: 884489

SEQ ID NO: 884491 - protein, 690 aa, Homo sapiens
MGVRQQLALLLLLLLLLWGLGQPVWPVAVALTLRWLLGDPTCCVLLGLAMLARPWLGPWVPHGLSLAAAALALTLLPARLPPGLRWLPADVIFLAKILHLGLKIRGCLSRQPPDTFVDAFERRARAQPGRALLVWTGPGAGSVTFGELDARACQAAWALKAELGDPASLCAGEPTALLVLASQAVPALCMWLGLAKLGCPTAWINPHGRGMPLAHSVLSSGARVLVVDPDLRESLEEILPKLQAENIRCFYLSHTSPTPGVGALGAALDAAPSHPVPADLRAGITWRSPALFIYTSGTTGLPKPAILTHERVLQMSKMLSLSGATADDVVYTVLPLYHVMGLVVGILGCLDLGATCVLAPKFSTSCFWDDCRQHGVTVILYVGELLRYLCNIPQQPEDRTHTVRLAMGNGLRADVWETFQQRFGPIRIWEVYGSTEGNMGLVNYVGRCGALGKMSCLLRMLSPFELVQFDMEAAEPVRDNQGFCIPVGLGEPGLLLTKVVSQQPFVGYRGPRELSERKLVRNVRQSGDVYYNTGDVLAMDREGFLYFRDRLGDTFRWKGENVSTHEVEGVLSQVDFLQQVNVYGVCVPGCEGKVGMAAVQLAPGQTFDGEKLYQHVRAWLPAYATPHFIRIQDAMEVTSTFKLMKTRLVREGFNVGIVVDPLFVLDNRAQSFRPLTAEMYQAVCEGTWRL

SEQ ID NO: 884492 - protein, 148 aa, Homo sapiens
SRGRGHKRRLPPCRWKGENVSTHEVEGVLSQVDFLQQVNVYGVCVPGCEGKVGMAAVQLAPGQTFDGEKLYQHVRAWLPAYATPHFIRIQDAMEVTSTFKLMKTRLVREGFNVGIVVDPLFVLDNRAQSFRPLTAEMYQAVCEGTWRL

SEQ ID NO: 884493 - protein, 142 aa, Homo sapiens
ALKLVIPPGFQEFGPEHEVEGVLSQVDFLQQVNVYGVCVPGCEGKVGMAAVQLAPGQTFDGEKLYQHVRAWLPAYATPHFIRIQDAMEVTSTFKLMKTRLVREGFNVGIVVDPLFVLDNRAQSFRPLTAEMYQAVCEGTWRL

SEQ ID NO: 884494 - protein, 229 aa, Homo sapiens [sequence omitted]

SEQ ID NO: 884495 - protein, 229 aa, Homo sapiens [sequence omitted]

SEQ ID NO: 884496 - protein, 107 aa, Homo sapiens
MLFSTSCSSACICGSQIPPRNLKGEPCLCFSSDPSLQTSGRAWRRSFPSCRLRTSAASTSAIPPLHQGWGLWGLPWMQRPPTQCLLTCVLGSHGEALPSSSIPRGPL

SEQ ID NO: 884497 - protein, 229 aa, Homo sapiens [sequence omitted]

SEQ ID NO: 884498 - protein, 89 aa, Homo sapiens
VSPGWPGGWVEDHSQGAGGCHSDWTMVTALQDAMEVTSTFKLMKTRLVREGFNVGIVVDPLFVLDNRAQSFRPLTAEMYQAVCEGTWRL

SEQ ID NO: 884499 - protein, 101 aa, Homo sapiens
SRRNGSQLCFPGSSAALHTETSGPASAQTSGKAQFLNTHLRQGGPRRGSVVSPGHVTGREGAWCLAVTPQALVSHRREPRPPSRRQGQEEREQLLFLAPRS

SEQ ID NO: 884500 - protein, 453 aa, Homo sapiens
GSPGAGLREARPGRRPGPAGREQQGRPAGGSGSPGTGAGSGASRAGEFRAPSPWPGAGRGDGGGADRPRAGRGRRAWAGAWGCGKMNALLEQKEQQERLREAAALGDIREVQKLVESGVDVNSQNEVNGWTCLHWACKRNHGQVVSYLLKSGADKEILTTKGEMPVQLTSRREIRKIMGVEEEDDDDDDDDNLPQLKKESELPFVPNYLANPAFPFIYTPTAEDSAQMQNGGPSTPPASPPADGSPPLLPPGEPPLLGTFPRDHTSLALVQNGDVSAPSAILRTPESTKPGPVCQPPVSQSRSLFSSVPSKPPMSLEPQNGTYAGPAPAFQPFFFTGAFPFNMQELVLKVRIQNPSLRENDFIEIELDRQELTYQELLRVCCCELGVNPDQVEKIRKLPNTLLRKDKDVARLQDFQELELVLMISENNFLFRNAASTLTERPCYNRRASKLTY

SEQ ID NO: 884501 - protein, 379 aa, Homo sapiens
GSPGAGLREARPGRRPGPAGREQQGRPAGGSGSPGTGAGSGASRAGEFRAPSPWPGAGRGDGGGADRPRAGRGRRAWAGAWGCGKMNALLEQKEQQERLREAAALGDIREVQKLVESGVDVNSQNEVNGWTCLHWACKRNHGQVVSYLLKSGADKEILTTKGEMPVQLTSRREIRKIMGVEEEDDDDDDDDNLPQLKKESELPFVPNYLANPAFPFIYTPTAEDSAQMQNGGPSTPPASPPADGSPPLLPPGEPPLLGTFPRDHTSLALVQNGDVSAPSAILRTPESTKPGPVCQPPVSQSRSLFSSVPSKPPMSLEPQNGTYAGPAPAFQPFFFTGAFPFNMQELVLKVRIQNPSLRENDFIEIEWSLFSFIKSSVVN

SEQ ID NO: 884502 - protein, 290 aa, Homo sapiens
MPVQLTSRREIRKIMGVEEEDDDDDDDDNLPQLKKESELPFVPNYLANPAFPFIYTPTAEDSAQMQNGGPSTPPASPPADGSPPLLPPGEPPLLGTFPRDHTSLALVQNGDVSAPSAILRTPESTKPGPVCQPPVSQSRSLFSSVPSKPPMSLEPQNGTYAGPAPAFQPFFFTGAFPFNMQELVLKVRIQNPSLRENDFIEIELDRQELTYQELLRVCCCELGVNPDQVEKIRKLPNTLLRKDKDVARLQDFQELELVLMISENNFLFRNAASTLTERPCYNRRASKLTY

SEQ ID NO: 884503 - protein, 1007 aa, Homo sapiens
HPALRPPPVRVLRYRLLSVLCSLLLSAPHPLSLPSSPLASPPLQRLHYFLPAGSACTAAAARGGGWVGGEETVQVVGEGVPSSSPLPSPANSFPSFSPFPLPAPTFFLLSEGLVTCRAERTGGGGGGGTIQAGTMGTSALWALWLLLALCWAPRESGATGTGRKAKCEPSQFQCTNGRCITLLWKCDGDEDCVDGSDEKNCVKKTCAESDFVCNNGQCVPSRWKCDGDPDCEDGSDESPEQCHMRTCRIHEISCGAHSTQCIPVSWRCDGENDCDSGEDEENCGNITCSPDEFTCSSGRCISRNFVCNGQDDCSDGSDELDCAPPTCGAHEFQCSTSSCIPISWVCDDDADCSDQSDESLEQCGRQPVIHTKCPASEIQCGSGECIHKKWRCDGDPDCKDGSDEVNCPSRTCRPDQFECEDGSCIHGSRQCNGIRDCVDGSDEVNCKNVNQCLGPGKFKCRSGECIDISKVCNQEQDCRDWSDEPLKECHINECLVNNGGCSHICKDLVIGYECDCAAGFELIDRKTCGDIDECQNPGICSQICINLKGGYKCECSRGYQMDLATGVCKAVGKEPSLIFTNRRDIRKIGLERKEYIQLVEQLRNTVALDADIAAQKLFWADLSQKAIFSASIDDKVGRHVKMIDNVYNPAAIAVDWVYKTIYWTDAASKTISVATLDGTKRKFLFNSDLREPASIAVDPLSGFVYWSDWGEPAKIEKAGMNGFDRRPLVTADIQWPNGITLDLIKSRLYWLDSKLHMLSSVDLNGQDRRIVLKSLEFLAHPLALTIFEDRVYWIDGENEAVYGANKFTGSELATLVNNLNDAQDIIVYHELVQPSGKNWCEEDMENGGCEYLCLPAPQINDHSPKYTCSCPSGYNVEENGRDCQSTATTVTYSETKDTNTTEISATSGLVPGGINVTTAVSEVSVPPKGTSAAWAILPLLLLVMAAVGGYLMWRNWQHKNMKSMNFDNPVYLKTTEEDLSIDIGRHSASVGHTYPAISVVSTDDDLA

SEQ ID NO: 884504 - protein, 756 aa, Homo sapiens
HPALRPPPVRVLRYRLLSVLCSLLLSAPHPLSLPSSPLASPPLQRLHYFLPAGSACTAAAARGGGWVGGEETVQVVGEGVPSSSPLPSPANSFPSFSPFPLPAPTFFLLSEGLVTCRAERTGGGGGGGTIQAGTMGTSALWALWLLLALCWAPRESGATGTGRKAKCEPSQFQCTNGRCITLLWKCDGDEDCVDGSDEKNCVKKTCAESDFVCNNGQCVPSRWKCDGDPDCEDGSDESPEQCHMRTCRIHEISCGAHSTQCIPVSWRCDGENDCDSGEDEENCGNITCSPDEFTCSSGRCISRNFVCNGQDDCSDGSDELDCAPPTCGAHEFQCSTSSCIPISWVCDDDADCSDQSDESLEQCGRQPVIHTKCPASEIQCGSGECIHKKWRCDGDPDCKDGSDEVNCPSRTCRPDQFECEDGSCIHGSRQCNGIRDCVDGSDEVNCKNVNQCLGPGKFKCRSGECIDISKVCNQEQDCRDWSDEPLKECHINECLVNNGGCSHICKDLVIGYECDCAAGFELIDRKTCGDIDECQNPGICSQICINLKGGYKCECSRGYQMDLATGVCKAVGKEPSLIFTNRRDIRKIGLERKEYIQLVEQLRNTVALDADIAAQKLFWADLSQKAIFSASIDDKVGRHVKMIDNVYNPAAIAVDWVYKTIYWTDAASKTISVATLDGTKRKFLFNSDLREPASIAVDPLSGFVYWSDWGEPAKIEKAGMNGFDRRPLVTADIQWPNGITLGMYVLPSRPPTQLSS

SEQ ID NO: 884505 - protein, 912 aa, Homo sapiens
HPALRPPPVRVLRYRLLSVLCSLLLSAPHPLSLPSSPLASPPLQRLHYFLPAGSACTAAAARGGGWVGGEETVQVVGEGVPSSSPLPSPANSFPSFSPFPLPAPTFFLLSEGLVTCRAERTGGGGGGGTIQAGTMGTSALWALWLLLALCWAPRESGATGTGRKAKCEPSQFQCTNGRCITLLWKCDGDEDCVDGSDEKNCVKKTCAESDFVCNNGQCVPSRWKCDGDPDCEDGSDESPEQCHMRTCRIHEISCGAHSTQCIPVSWRCDGENDCDSGEDEENCGNITCSPDEFTCSSGRCISRNFVCNGQDDCSDGSDELDCAPPTCGAHEFQCSTSSCIPISWVCDDDADCSDQSDESLEQCGRQPVIHTKCPASEIQCGSGECIHKKWRCDGDPDCKDGSDEVNCPSRTCRPDQFECEDGSCIHGSRQCNGIRDCVDGSDEVNCKNVNQCLGPGKFKCRSGECIDISKVCNQEQDCRDWSDEPLKECHINECLVNNGGCSHICKDLVIGYECDCAAGFELIDRKTCGDIDECQNPGICSQICINLKGGYKCECSRGYQMDLATGVCKAVGKEPSLIFTNRRDIRKFLFNSDLREPASIAVDPLSGFVYWSDWGEPAKIEKAGMNGFDRRPLVTADIQWPNGITLDLIKSRLYWLDSKLHMLSSVDLNGQDRRIVLKSLEFLAHPLALTIFEDRVYWIDGENEAVYGANKFTGSELATLVNNLNDAQDIIVYHELVQPSGKNWCEEDMENGGCEYLCLPAPQINDHSPKYTCSCPSGYNVEENGRDCQSTATTVTYSETKDTNTTEISATSGLVPGGINVTTAVSEVSVPPKGTSAAWAILPLLLLVMAAVGGYLMWRNWQHKNMKSMNFDNPVYLKTTEEDLSIDIGRHSASVGHTYPAISVVSTDDDLA

SEQ ID NO: 884506 - protein, 979 aa, Homo sapiens
HPALRPPPVRVLRYRLLSVLCSLLLSAPHPLSLPSSPLASPPLQRLHYFLPAGSACTAAAARGGGWVGGEETVQVVGEGVPSSSPLPSPANSFPSFSPFPLPAPTFFLLSEGLVTCRAERTGGGGGGGTIQAGTMGTSALWALWLLLALCWAPRESGATGTGRKAKCEPSQFQCTNGRCITLLWKCDGDEDCVDGSDEKNCVKKTCAESDFVCNNGQCVPSRWKCDGDPDCEDGSDESPEQCHMRTCRIHEISCGAHSTQCIPVSWRCDGENDCDSGEDEENCGNITCSPDEFTCSSGRCISRNFVCNGQDDCSDGSDELDCAPPTCGAHEFQCSTSSCIPISWVCDDDADCSDQSDESLEQCGRQPVIHTKCPASEIQCGSGECIHKKWRCDGDPDCKDGSDEVNCPSRTCRPDQFECEDGSCIHGSRQCNGIRDCVDGSDEVNCKNVNQCLGPGKFKCRSGECIDISKVCNQEQDCRDWSDEPLKECHINECLVNNGGCSHICKDLVIGYECDCAAGFELIDRKTCGDIDECQNPGICSQICINLKGGYKCECSRGYQMDLATGVCKAVGKEPSLIFTNRRDIRKIGLERKEYIQLVEQLRNTVALDADIAAQKLFWADLSQKAIFSASIDDKVGRHVKMIDNVYNPAAIAVDWVYKTIYWTDAASKTISVATLDGTKRKFLFNSDLREPASIAVDPLSGFVYWSDWGEPAKIEKAGMNGFDRRPLVTADIQWPNGITLDLIKSRLYWLDSKLHMLSSVDLNGQDRRIVLKSLEFLAHPLALTIFEDRVYWIDGENEAVYGANKFTGSELATLVNNLNDAQDIIVYHELVQPSGKNWCEEDMENGGCEYLCLPAPQINDHSPKYTCSCPSGYNVEENGRDCQRINVTTAVSEVSVPPKGTSAAWAILPLLLLVMAAVGGYLMWRNWQHKNMKSMNFDNPVYLKTTEEDLSIDIGRHSASVGHTYPAISVVSTDDDLA

SEQ ID NO: 884507 - protein, 447 aa, Homo sapiens
MDLATGVCKAVGKEPSLIFTNRRDIRKIGLERKEYIQLVEQLRNTVALDADIAAQKLFWADLSQKAIFSASIDDKVGRHVKMIDNVYNPAAIAVDWVYKTIYWTDAASKTISVATLDGTKRKFLFNSDLREPASIAVDPLSGFVYWSDWGEPAKIEKAGMNGFDRRPLVTADIQWPNGITLDLIKSRLYWLDSKLHMLSSVDLNGQDRRIVLKSLEFLAHPLALTIFEDRVYWIDGENEAVYGANKFTGSELATLVNNLNDAQDIIVYHELVQPSGKNWCEEDMENGGCEYLCLPAPQINDHSPKYTCSCPSGYNVEENGRDCQSTATTVTYSETKDTNTTEISATSGLVPGGINVTTAVSEVSVPPKGTSAAWAILPLLLLVMAAVGGYLMWRNWQHKNMKSMNFDNPVYLKTTEEDLSIDIGRHSASVGHTYPAISVVSTDDDLA

SEQ ID NO: 884508 - protein, 66 aa, Homo sapiens
KEPSLIFTNRRDIRKIGLERKEYIQLVEQLRNTVALDADIAAQKLFWADLSQKAIFRELSVPFVVS

SEQ ID NO: 884509 - protein, 720 aa, Homo sapiens
AAVPGAPSKLGEGRSRGLQLGKGEESACACTPVCRAESAGGDSLGLGRRRGQGNGGAAPPLSPRISRGSPGLPSAPHHGLARSWDGPRQQQAAGCRALGERGRARGDGEVGWPPSATPAAPTQRPLGGAADSPERTGVWAEAASPRPRLRESPRLFHPLAPATPQDTMSKAAGGAAAAAAAAESCSPAPAGSSAAPPAPVEDLSKVSDEELLQWSKEELIRSLRRAEAEKVSAMLDHSNLIREVNRRLQLHLGEIRGLKDINQKLQEDNQELRDLCCFLDDDRQKGKRVSREWQRLGRYTAGVMHKEVALYLQKLKDLEVKQEEVVKENMELKELCVLLDEEKGAGCAGSRCSIDSQASLCQLTASTAPYVRDVGDGSSTSSTGSTDSPDHHKHHASSGSPEHLQKPRSEGSPEHSKHRSASPEHPQKPRACGTPDRPKALKGPSPEHHKPLCKGSPEQQRHPHPGSSPETLPKHVLSGSPEHFQKHRSGSSPEHARHSGGSPEHLQKHALGGSLEHLPRARGTSPEHLKQHYGGSPDHKHGGGSGGSGGSGGGSREGTLRRQAQEDGSPHHRNVYSGMNESTLSYVRQLEARVRQLEEENRMLPQASQNRRQPPTRNSSNMEKGWGSRARRVLQWWQGCRGIGRCLPTLPGSFRLSSGADGSNSSPNSAASFSGHATPSQQPEPVVHSLKVVWRKLGDAAGSCPGIRQHLSGNQYKGPM

SEQ ID NO: 884510 - protein, 635 aa, Homo sapiens
AAVPGAPSKLGEGRSRGLQLGKGEESACACTPVCRAESAGGDSLGLGRRRGQGNGGAAPPLSPRISRGSPGLPSAPHHGLARSWDGPRQQQAAGCRALGERGRARGDGEVGWPPSATPAAPTQRPLGGAADSPERTGVWAEAASPRPRLRESPRLFHPLAPATPLDTMSKAAGGAAAAAAAAESCSPAPAGSSAAPPAPVEDLSKVSDEELLQWSKEELIRSLRRAEAEKVSAMLDHSNLIREVNRRLQLHLGEIRGLKDINQKLQEDNQELRDLCCFLDDDRQKGKRVSREWQRLGRYTAGVMHKEVALYLQKLKDLEVKQEEVVKENMELKELCVLLDEEKGAGCAGSRCSIDSQASLCQLTASTAPYVRDVGDGSSTSSTGSTDSPDHHKHHASSGSPEHLQKPRSEGSPEHSKHRSASPEHPQKPRACGTPDRPKALKGPSPEHHKPLCKGSPEQQRHPHPGSSPETLPKHVLSGSPEHFQKHRSGSSPEHARHSGGSPEHLQKHALGGSLEHLPRARGTSPEHLKQHYGGSPDHKHGGGSGGSGGSGGGSREGTLRRQAQEDGSPHHRNVYSGMNESTLSYVRQLEARVRQLEEENRMLPQVVWRKLGDAAGSCPGIRQHLSGNQYKGPM

SEQ ID NO: 884511 - protein, 600 aa, Homo sapiens
AAVPGAPSKLGEGRSRGLQLGKGEESACACTPVCRAESAGGDSLGLGRRRGQGNGGAAPPLSPRISRGSPGLPSAPHHGLARSWDGPRQQQAAGCRALGERGRARGDGEVGWPPSATPAAPTQRPLGGAADSPERTGVWAEAASPRPRLRESPRLFHPLAPATPLDTMSKAAGGAAAAAAAAESCSPAPAGSSAAPPAPVEDLSKVSDEELLQWSKEELIRSLRRAEAEKVSAMLDHSNLIREVNRRLQLHLGEIRGLKDINQKLQEDNQELRDLCCFLDDDRQKGKRVSREWQRLGRYTAGVMHKEVALYLQKLKDLEVKQEEVVKENMELKELCVLLDEEKGAGCAGSRCSIDSQASLCQLTASTAPYVRDVGDGSSTSSTGSTDSPDHHKHHASSGSPEHLQKPRSEGSPEHSKHRSASPEHPQKPRACGTPDRPKALKGPSPEHHKPLCKGSPEQQRHPHPGSSPETLPKHVLSGSPEHFQKHRSGSSPEHARHSGGSPEHLQKHALGGSLEHLPRARGTSPEHLKQHYGGSPDHKHGGGSGGSGGSGGGSREGTLRRQAQEDGSPHHRNVYSGMNGGSVCAGVLLGLGNSVESYE

SEQ ID NO: 884512 - protein, 134 aa, Homo sapiens
MSLCFLRKFSKIVCCVPGHSRYSRNGGYEFYHNSLLLGEQLFARLKFGRGTGFPLVLAASTRRVSLQPVSELFGNSTDPCPSVQTMPQGPPAFKLGLFSFPPLLSFQLYGQYMQFSHSFSHLTSNSFMISPFYR

SEQ ID NO: 884513 - protein, 106 aa, Homo sapiens
LEDPHAVYSLILHSPSIPRPHPLYLPSPEHTPNFLTSVPLCKLLPLPGNLHLSSCCCLQDLPGQNLLLSSSATHSNVSLHWLAFPTHWSRATASECPGAGVRNTDF

SEQ ID NO: 884514 - protein, 160 aa, Homo sapiens
TPASLQAWGASFSPVPLLPAGSEPPPPWLLRSASPSFSVHLPQWPLSTLSASASRSLLVPRKHFDLCFPFKCCGSSLPNPTIPPKGAADRESSLSQLLPLPGNLHLSSCCCLQDLPGQNLLLSSSATHSNVSLHWLAFPTHWSRATASECPGAGVRNTDF

SEQ ID NO: 884515 - protein, 162 aa, Homo sapiens
ALQPPCKLGAPHSLPCPFSQLGLSPRPPGSSVLLLPASLSISPNGLSLHSLPQLPGLCWSLGSTLTSASPSNAVDQASPTPPSHQRGLLTERAHSARMRAKEFKMVEPYYAKEPNPSVHWKKTAQDFYLPGNICPESTSWKKTAQDFYLPGNICIRLCGVGK

SEQ ID NO: 884516 - protein, 113 aa, Homo sapiens
MAPAGEVGCLWPYRKGEQLPPRGSVCLRWGSRSVAQAGVQWCNLGSLQPPPPGFKQFSCLSLPSIWNYRARFLLCHPGWHDHSSLQPRTPGFKQSSHLSIPSSWNYREPAVKH

SEQ ID NO: 884517 - protein, 148 aa, Homo sapiens
TPASLQAWGASFSPVPLLPAGSEPPPPWLLRSASPSFSVHLPQWPLSTLSASASRSLLVPRKHFDLCFPFKCCGSSLPNPTIPPKGAADRESSLSQMGVSLCCPGWSAVVQSWLTATSASRVQAILLPEPPEYLELQSQILTLSPRLA

SEQ ID NO: 884518 - protein, 134 aa, Homo sapiens; identical to SEQ ID NO: 884512

SEQ ID NO: 884519 - protein, 618 aa, Homo sapiens
MSVLTSPRGKVEVVHCRRTESQDVYCIKSLIRKFTCKLFGKLNIIYLLEKANLAVTLCNDKEEIMAQATFLDYPNWNVAKQDDWVSVFRELDSDIPCTPLNTLFMHLFVAVDEYSVGCCKEILRTVYKAVPELHFIFLIVPSYMSLGSTLITVFDQVGNIPCLTYEEDFAVHICHRHSHYPQLHVRKARVEDHDDLMPIFMRYDTILKETYGEYFLAELIEAQDEENHAVVCEVEGTAVGFMSVCSRVNMQLLHECFDLGPFHGLCFPHPDDVLESPQDLSVRRSQDAELRSSSQGSQKIVEELQEPVSPDTMENIQGNIAREAASEEALTAVQSGNVSEPEDIEKLSDISTGYAQYHHVSSRSLASLVLPEEPVHFRPIYRGASAAFCIQLFCIDEKYEARSLDFMNFVFSLFSDKNFCVISLPHLTPEFFLIQNFVKMVPFNTCTLEQDLYVFHRAGLLKNICLGRSSEHHQSVKGLCGMQEFQTHGQSGLFFLVLRASSEHRSHIAAHREGWNEKWKRGSTFLLGDMNHLCSYYVIRNLVAWPYLAAREPGRYVAGRLGMCPVKNSVDSLIKKKRKKDTMGTLYLVFILCMYRSSKKLHRISVTLYASGKQDWEL

SEQ ID NO: 884520 - protein, 618 aa, Homo sapiens; identical to SEQ ID NO: 884519

SEQ ID NO: 884521 - protein, 422 aa, Homo sapiens
MLVNRRSLDFMNFVFSLFSDKNFCVISLPHLTPEFFLIQNFVKMVPFNTCTLEQDLYVFHRAGLLKSINIRFATLLDTPGVENLVSTLMLNKSILEDLDRYNKARKDPDIEYIRSHYNIEDFIYFSHHQREEHGHMHHFALNPIFRHYTKFFLKEILRLGFKSCLYYRVYPKSREGKFQNPYAHSLTSALHYLVPVRPRRQIVYPLEKLGINAPSKAVSKDPMSYALNHTNRKLTLEPKITVNAKIIVVGASSVGISFLETLVFCSHMKFNNLTLISTHGLPGKKLLDTEQRKFLASDHCFNDKDYALMSLCSWVNVVVGRMTGIDRAAKHVVLSTDEIVPYDHLILCTGQQYQVPCPTEADISQHLTNREVPNSSQRRYTGKVPCNHFTLNEEEDCFKALIWIRNNSITTEDGGRASVLFC

SEQ ID NO: 884522 - protein, 511 aa, Homo sapiens
MPQPSKKLVQGNIAREAASEEALTAVQSGNVSEPEDIEKLSDISTGYAQYHHVSSRSLASLVLPEEPVHFRPIYRGASAAFCIQLFCIDEKYEARSLDFMNFVFSLFSDKNFCVISLPHLTPEFFLIQNFVKMVPFNTCTLEQDLYVFHRAGLLKSINIRFATLLDTPGVENLVSTLMLNKSILEDLDRYNKARKDPDIEYIRSHYNIEDFIYFSHHQREEHGHMHHFALNPIFRHYTKFFLKEILRLGFKSCLYYRVYPKSREGKFQNPYAHSLTSALHYLVPVRPRRQIVYPLEKLGINAPSKAVSKDPMSYALNHTNRKLTLEPKITVNAKIIVVGASSVGISFLETLVFCSHMKFNNLTLISTHGLPGKKLLDTEQRKFLASDHCFNDKDYALMSLCSWVNVVVGRMTGIDRAAKHVVLSTDEIVPYDHLILCTGQQYQVPCPTEADISQHLTNREVPNSSQRRYTGKVPCNHFTLNEEEDCFKALIWIRNNSITTEDGGRASVLFC

SEQ ID NO: 884523 - protein, 360 aa, Homo sapiens
MLNKSILEDLDRYNKARKDPDGTLLQAFVAEVAEQIVGIAVIRNEMDIEYIRSHYNIEDFIYFSHHQREEHGHMHHFALNPIFRHYTKFFLKEILRLGFKSCLYYRVYPKSREGKFQNPYAHSLTSALHYLVPVRPRRQIVYPLEKLGINAPSKAVSKDPMSYALNHTNRKLTLEPKITVNAKIIVVGASSVGISFLETLVFCSHMKFNNLTLISTHGLPGKKLLDTEQRKFLASDHCFNDKDYALMSLCSWVNVVVGRMTGIDRAAKHVVLSTDEIVPYDHLILCTGQQYQVPCPTEADISQHLTNREVPNSSQRRYTGKVPCNHFTLNEEEDCFKALIWIRNNSITTEDGGRASVLFC

SEQ ID NO: 884524 - protein, 200 aa, Homo sapiens
MSYALNHTNRKLTLEPKITVNAKIIVVGASSVGISFLETLVFCSHMKFNNLTLISTHGLPGKKLLDTEQRKFLASDHCFNDKDYALMSLCSWVNVVVGRMTGIDRAAKHVVLSTDEIVPYDHLILCTGQQYQVPCPTEADISQHLTNREVPNSSQRRYTGKVPCNHFTLNEEEDCFKALIWIRNNSITTEDGGRASVLFC

SEQ ID NO: 884525 - protein, 818 aa, Homo sapiens
MSVLTSPRGKVEVVHCRRTESQDVYCIKSLIRKFTCKLFGKLNIIYLLEKANLAVTLCNDKEEIMAQATFLDYPNWNVAKQDDWVSVFRELDSDIPCTPLNTLFMHLFVAVDEYSVGCCKEILRTVYKAVPELHFIFLIVPSYMSLGSTLITVFDQVGNIPCLTYEEDFAVHICHRHSHYPQLHVRKARVEDHDDLMPIFMRYDTILKETYGEYFLAELIEAQDEENHAVVCEVEGTAVGFMSVCSRVNMQLLHECFDLGPFHGLCFPHPDDVLESPQDLSVRRSQDAELRSSSQGSQKIVEELQEPVSPDTMENIQGNIAREAASEEALTAVQSGNVSEPEDIEKLSDISTGYAQYHHVSSRSLASLVLPEEPVHFRPIYRGASAAFCIQLFCIDEKYEARSLDFMNFVFSLFSDKNFCVISLPHLTPEFFLIQNFVKMVPFNTCTLEQDLYVFHRAGLLKSINIRFATLLDTPGVENLVSTLMLNKSILEDLDRYNKARKDPDIEYIRSHYNIEDFIYFSHHQREEHGHMHHFALNPIFRHYTKFFLKEILRLGFKSCLYYRVYPKSREGKFQNPYAHSLTSALHYLVPVRPRRQIVYPLEKLGINAPSKAVSKDPMSYALNHTNRKLTLEPKITVNAKIIVVGASSVGISFLETLVFCSHMKFNNLTLISTHGLPGKKLLDTEQRKFLASDHCFNDKDYALMSLCSWVNVVVGRMTGIDRAAKHVVLSTDEIVPYDHLILCTGQQYQVPCPTEADISQHLTNREVPNSSQRRYTGKVPCNHFTLNEEEDCFKALIWIRNNSITTEDGGRASVLFC

SEQ ID NO: 884526 - protein, 522 aa, Homo sapiens
VTVRTRIAVLSLRPPVWWNSKGNIAREAASEEALTAVQSGNVSEPEDIEKLSDISTGYAQYHHVSSRSLASLVLPEEPVHFRPIYRGASAAFCIQLFCIDEKYEARSLDFMNFVFSLFSDKNFCVISLPHLTPEFFLIQNFVKMVPFNTCTLEQDLYVFHRAGLLKSINIRFATLLDTPGVENLVSTLMLNKSILEDLDRYNKARKDPDIEYIRSHYNIEDFIYFSHHQREEHGHMHHFALNPIFRHYTKFFLKEILRLGFKSCLYYRVYPKSREGKFQNPYAHSLTSALHYLVPVRPRRQIVYPLEKLGINAPSKAVSKDPMSYALNHTNRKLTLEPKITVNAKIIVVGASSVGISFLETLVFCSHMKFNNLTLISTHGLPGKKLLDTEQRKFLASDHCFNDKDYALMSLCSWVNVVVGRMTGIDRAAKHVVLSTDEIVPYDHLILCTGQQYQVPCPTEADISQHLTNREVPNSSQRRYTGKVPCNHFTLNEEEDCFKALIWIRNNSITTEDGGRASVLFC

SEQ ID NO: 884527 - protein, 586 aa, Homo sapiens
MSWLFGINKGPKGEGAGPPPPLPPAQPGAEGGGDRGLGDRPAPKDKWSNFDPTGLERAAKAARELEHSRYAKDALNLAQMQEQTLQLEQQSKLKEYEAAVEQLKSEQIRAQAEERRKTLSEETRQHQARAQYQDKLARQRYEDQLKQQQLLNEENLRKQEESVQKQEAMRRATVEREMELRHKNEMLRVEAEARARAKAERENADIIREQIRLKAAEHRQTVLESIRTAGTLFGEGFRAFVTDWDKVTATVAGLTLLAVGVYSAKNATLVAGRFIEARLGKPSLVRETSRITVLEALRHPIQVSRRLLSRPQDALEGVVLSPSLEARVRDIAIATRNTKKNRSLYRNILMYGPPGTGKTLFAKKLALHSGMDYAIMTGGDVAPMGREGVTAMHKLFDWANTSRRGLLLFVDEADAFLRKRATEKISEDLRATLNAFLYRTGQHSNKFMLVLASNQPEQFDWAINDRINEMVHFDLPGQEERERLVRMYFDKYVLKPATEGKQRLKLAQFDYGRKCSEVARLTEGMSGREIAQLAVSWQATAYASEDGVLTEAMMDTRVQDAVQQHQQKMCWLKAEGPGRGDEPSPS

SEQ ID NO: 884528 - protein, 600 aa, Homo sapiens
CVWRLRSGGDHRLAARGGCSQPRASQTRVGVPAPPLPPAQPGAEGGGDRGLGDRPAPKDKWSNFDPTGLERAAKAARELEHSRYAKDALNLAQMQEQTLQLEQQSKLKEYEAAVEQLKSEQIRAQAEERRKTLSEETRQHQARAQYQDKLARQRYEDQLKQQQLLNEENLRKQEESVQKQEAMRRATVEREMELRHKNEMLRVEAEARARAKAERENADIIREQIRLKAAEHRQTVLESIRTAGTLFGEGFRAFVTDWDKVTATVAGLTLLAVGVYSAKNATLVAGRFIEARLGKPSLVRETSRITVLEALRHPIQVSRRLLSRPQDALEGVVLSPSLEARVRDIAIATRNTKKNRSLYRNILMYGPPGTGKTLFAKKLALHSGMDYAIMTGGDVAPMGREGVTAMHKLFDWANTSRRGLLLFVDEADAFLRKRATEKISEDLRATLNAFLYRTGQHSNKFMLVLASNQPEQFDWAINDRINEMVHFDLPGQEERERLVRMYFDKYVLKPATEGKQRLKLAQFDYGRKCSEVARLTEGMSGREIAQLAVSWQATAYASEDGVLTEAMMDTRVQDAVQQHQQKMCWLKAEGPGRGDEPSPS

SEQ ID NO: 884529 - protein, 577 aa, Homo sapiens
LVSGTSVVSPPPLPPAQPGAEGGGDRGLGDRPAPKDKWSNFDPTGLERAAKAARELEHSRYAKDALNLAQMQEQTLQLEQQSKLKEYEAAVEQLKSEQIRAQAEERRKTLSEETRQHQARAQYQDKLARQRYEDQLKQQQLLNEENLRKQEESVQKQEAMRRATVEREMELRHKNEMLRVEAEARARAKAERENADIIREQIRLKAAEHRQTVLESIRTAGTLFGEGFRAFVTDWDKVTATVAGLTLLAVGVYSAKNATLVAGRFIEARLGKPSLVRETSRITVLEALRHPIQVSRRLLSRPQDALEGVVLSPSLEARVRDIAIATRNTKKNRSLYRNILMYGPPGTGKTLFAKKLALHSGMDYAIMTGGDVAPMGREGVTAMHKLFDWANTSRRGLLLFVDEADAFLRKRATEKISEDLRATLNAFLYRTGQHSNKFMLVLASNQPEQFDWAINDRINEMVHFDLPGQEERERLVRMYFDKYVLKPATEGKQRLKLAQFDYGRKCSEVARLTEGMSGREIAQLAVSWQATAYASEDGVLTEAMMDTRVQDAVQQHQQKMCWLKAEGPGRGDEPSPS

SEQ ID NO: 884530 - protein, 533 aa, Homo sapiens
KTKGQDKECEPSPVIGYAKDALNLAQMQEQTLQLEQQSKLKEYEAAVEQLKSEQIRAQAEERRKTLSEETRQHQARAQYQDKLARQRYEDQLKQQQLLNEENLRKQEESVQKQEAMRRATVEREMELRHKNEMLRVEAEARARAKAERENADIIREQIRLKAAEHRQTVLESIRTAGTLFGEGFRAFVTDWDKVTATVAGLTLLAVGVYSAKNATLVAGRFIEARLGKPSLVRETSRITVLEALRHPIQVSRRLLSRPQDALEGVVLSPSLEARVRDIAIATRNTKKNRSLYRNILMYGPPGTGKTLFAKKLALHSGMDYAIMTGGDVAPMGREGVTAMHKLFDWANTSRRGLLLFVDEADAFLRKRATEKISEDLRATLNAFLYRTGQHSNKFMLVLASNQPEQFDWAINDRINEMVHFDLPGQEERERLVRMYFDKYVLKPATEGKQRLKLAQFDYGRKCSEVARLTEGMSGREIAQLAVSWQATAYASEDGVLTEAMMDTRVQDAVQQHQQKMCWLKAEGPGRGDEPSPS

SEQ ID NO: 884531 - protein, 586 aa, Homo sapiens; identical to SEQ ID NO: 884527

SEQ ID NO: 884532 - protein, 491 aa, Homo sapiens
MSWLFGINKGPKGEGAGPPPPLPPAQPGAEGGGDRGLGDRPAPKDKWSNFDPTGLERAAKAARELEHSRYAKDALNLAQMQEQTLQLEQQSKLKEYEAAVEQLKSEQIRAQAEERRKTLSEETRQHQARAQYQDKLARQRYEDQLKQQQLLNEENLRKQEESVQKQEAMRRATVEREMELRHKNEMLRVEAEARARAKAERENADIIREQIRLKAAEHRQTVLESIRTAGTLFGEGFRAFVTDWDKVTATVAGLTLLAVGVYSAKNATLVAGRFIEARLGKPSLVRETSRITVLEALRHPIQVSRRLLSRPQDALEGVVLSPSLEARVRDIAIATRNTKKNRSLYRNILMYGPPGTGKTLFAKKLALHSGMDYAIMTGGDVAPMGREGVTAMHKLFDWANTSRRGLLLFVDEADAFLRKRATEKISEDLRATLNAFLYRTGQHSNKFMLVLASNQPEQFDWAINDRINEMVHFDLPGQEERERLAPEAGPV

SEQ ID NO: 884533 - protein, 509 aa, Homo sapiens
MQSWSRVYCSLAKRGHFNRISHGLQGLSAVPLRTYADQPIDADVTVIGSGPGGYVAAIKAAQLGFKTVCIEKNETLGGTCLNVGCIPSKALLNNSHYYHMAHGKDFASRGIEMSEVRLNLDKMMEQKSTAVKALTGGIAHLFKQNKVVHVNGYGKITGKNQVTATKADGGTQVIDTKNILIATGSEVTPFPGITIDEDTIVSSTGALSLKKVPEKMVVIGAGVIGVELGSVWQRLGADVTAVEFLGHVGGVGIDMEISKNFQRILQKQGFKFKLNTKVTGATKKSDGKIDVSIEAASGGKAEVITCDVLLVCIGRRPFTKNLGLEELGIELDPRGRIPVNTRFQTKIPNIYAIGDVVAGPMLAHKAEDEGIICVEGMAGGAVHIDYNCVPSVIYTHPEVAWVGKSEEQLKEEGIEYKVGKFPFAANSRAKTNADTDGMVKILGQKSTDRVLGAHILGPGAGEMVNEAALALEYGASCEDIARVCHAHPTLSEAFREANLAASFGKSINF

SEQ ID NO: 884534 - protein, 354 aa, Homo sapiens
MQSWSRVYCSLAKRGHFNRISHGLQGLSAVPLRTYADQPIDADVTVIGSGPGGYVAAIKAAQLGFKTVCIEKNETLGGTCLNVGCIPSKALLNNSHYYHMAHGKDFASRGIEMSEVRLNLDKMMEQKSTAVKALTGGIAHLFKQNKVVHVNGYGKITGKNQVTATKADGGTQVIDTKNILIATGSEVTPFPGITIDEDTIVSSTGALSLKKVPEKMVVIGAGVIGVELGSVWQRLGADVTAVEFLGHVGGVGIDMEISKNFQRILQKQGFKFKLNTKVTGATKKSDGKIDVSIEAASGGKAEVITCDVLLVCIGRRPFTKNLGLEELGIELDPRGRIPVNTRFQTKIPNSQSRG

SEQ ID NO: 884535 - protein, 410 aa, Homo sapiens
MAHGKDFASRGIEMSEVRLNLDKMMEQKSTAVKALTGGIAHLFKQNKVVHVNGYGKITGKNQVTATKADGGTQVIDTKNILIATGSEVTPFPGITIDEDTIVSSTGALSLKKVPEKMVVIGAGVIGVELGSVWQRLGADVTAVEFLGHVGGVGIDMEISKNFQRILQKQGFKFKLNTKVTGATKKSDGKIDVSIEAASGGKAEVITCDVLLVCIGRRPFTKNLGLEELGIELDPRGRIPVNTRFQTKIPNIYAIGDVVAGPMLAHKAEDEGIICVEGMAGGAVHIDYNCVPSVIYTHPEVAWVGKSEEQLKEEGIEYKVGKFPFAANSRAKTNADTDGMVKILGQKSTDRVLGAHILGPGAGEMVNEAALALEYGASCEDIARVCHAHPTLSEAFREANLAASFGKSINF

SEQ ID NO: 884536 - protein, 387 aa, Homo sapiens
MMEQKSTAVKALTGGIAHLFKQNKVVHVNGYGKITGKNQVTATKADGGTQVIDTKNILIATGSEVTPFPGITIDEDTIVSSTGALSLKKVPEKMVVIGAGVIGVELGSVWQRLGADVTAVEFLGHVGGVGIDMEISKNFQRILQKQGFKFKLNTKVTGATKKSDGKIDVSIEAASGGKAEVITCDVLLVCIGRRPFTKNLGLEELGIELDPRGRIPVNTRFQTKIPNIYAIGDVVAGPMLAHKAEDEGIICVEGMAGGAVHIDYNCVPSVIYTHPEVAWVGKSEEQLKEEGIEYKVGKFPFAANSRAKTNADTDGMVKILGQKSTDRVLGAHILGPGAGEMVNEAALALEYGASCEDIARVCHAHPTLSEAFREANLAASFGKSINF

SEQ ID NO: 884537 - protein, 387 aa, Homo sapiens; identical to SEQ ID NO: 884536

SEQ ID NO: 884538 - protein, 509 aa, Homo sapiens; identical to SEQ ID NO: 884533

SEQ ID NO: 884539 - protein, 509 aa, Homo sapiens; identical to SEQ ID NO: 884533

SEQ ID NO: 884540 - protein, 479 aa, Homo sapiens
MQSWSRVYCSLAKRGHFNRISHGLQGLSAVPLRTYADQPIDADVTVIGSGPGGYVAAIKAAQLGFKTVCIEKNETLGGTCLNVGCIPSKALLNNSHYYHMAHGKDFASRGIEMSEVRLNLDKMMEQKSTAVKALTGGIAHLFKQNKVVHVNGYGKITGKNQVTATKADGGTQVIDTKNILIATGSEVTPFPGITIDEDTIVSSTGALSLKKVPEKMVVIGAGVIGVELGSVWQRLGADVTAVEFLGHVGGVGIDMEISKNFQRILQKQGFKFKLNTKVTGATKKSDGKIDVSIEAASGGKAEVITCDVLLVCIGRRPFTKNLGLEELGIELDPRGRIPVNTRFQTKIPNIYAIGDVVAGPMLAHKAEDEGIICVEGMAGGAVHIDYNCVPSVIYTHPEVAWVGKSEEQLKEEGIEYKVGKFPFAANSRAKTNADTDGMVKILGQKSTDRVLGAHILGPTLSEAFREANLAASFGKSINF

SEQ ID NO: 884541 - protein, 387 aa, Homo sapiens; identical to SEQ ID NO: 884536

SEQ ID NO: 884542 - protein, 496 aa, Homo sapiens
MQSWSRVYCSLAKRGHFNRISHGLQGLSAVPLRTYADQPIDADVTVIGSGPGGYVAAIKAAQLGFKTVCIEKNETLGGTCLNVGCIPSKALLNNSHYYHMAHGKDFASRGIEMSEVRLNLDKMMEQKSTAVKALTGGIAHLFKQNKVVHVNGYGKITGKNQVTANILIATGSEVTPFPGITIDEDTIVSSTGALSLKKVPEKMVVIGAGVIGVELGSVWQRLGADVTAVEFLGHVGGVGIDMEISKNFQRILQKQGFKFKLNTKVTGATKKSDGKIDVSIEAASGGKAEVITCDVLLVCIGRRPFTKNLGLEELGIELDPRGRIPVNTRFQTKIPNIYAIGDVVAGPMLAHKAEDEGIICVEGMAGGAVHIDYNCVPSVIYTHPEVAWVGKSEEQLKEEGIEYKVGKFPFAANSRAKTNADTDGMVKILGQKSTDRVLGAHILGPGAGEMVNEAALALEYGASCEDIARVCHAHPTLSEAFREANLAASFGKSINF

SEQ ID NO: 884543 - protein, 282 aa, Homo sapiens
MERPSLRALLLGAAGLLLLLLPLSSSSSSDTCGPCEPASCPPLPPLGCLLGETRDACGCCPMCARGEGEPCGGGGAGRGYCAPGMECVKSRKRRKGKAGAAAGGPGVSGVCVCKSRYPVCGSDGTTYPSGCQLRAASQRAESRGEKAITQVSKGTCEQGPSIVTPPKDIWNVTGAQVYLSCEVIGIPTPVLIWNKVKRGHYGVQRTELLPGDRDNLAIQTRGGPEKHEVTGWVLVSPLSKEDAGEYECHASNSQGQASASAKITVVDALHEIPVKKGEGAEL

SEQ ID NO: 884544 - protein, 282 aa, Homo sapiens; identical to SEQ ID NO: 884543

SEQ ID NO: 884545 - protein, 282 aa, Homo sapiens; identical to SEQ ID NO: 884543

SEQ ID NO: 884546 - protein, 282 aa, Homo sapiens; identical to SEQ ID NO: 884543

SEQ ID NO: 884547 - protein, 282 aa, Homo sapiens; identical to SEQ ID NO: 884543

SEQ ID NO: 884548 - protein, 243 aa, Homo sapiens
MERPSLRALLLGAAGLLLLLLPLSSSSSSDTCGPCEPASCPPLPPLGCLLGETRDACGCCPMCARGEGEPCGGGGAGRGYCAPGMECVKSRKRRKGKAGAAAGGPGVSGVCVCKSRYPVCGSDGTTYPSGCQLRAASQRAESRGEKAITQVSKGTCEQGPSIVTPPKDIWNVTGAQVYLSCEVIGIPTPVLIWNKVSPLSKEDAGEYECHASNSQGQASASAKITVVDALHEIPVKKGEGAEL

SEQ ID NO: 884549 - protein, 245 aa, Homo sapiens
RTRALAAATAPRHGAAVAARPAPRRRWAAAPAPAPLLFLLFGHLRPLRAGLLPAPAPAGLPAGRAGGPGVSGVCVCKSRYPVCGSDGTTYPSGCQLRAASQRAESRGEKAITQVSKGTCEQGPSIVTPPKDIWNVTGAQVYLSCEVIGIPTPVLIWNKVKRGHYGVQRTELLPGDRDNLAIQTRGGPEKHEVTGWVLVSPLSKEDAGEYECHASNSQGQASASAKITVVDALHEIPVKKGEGAEL

SEQ ID NO: 884550 - protein, 186 aa, Homo sapiens
MERPSLRALLLGAAGLLLLLLPLSSSSSSDTCGPCEPRAASQRAESRGEKAITQVSKGTCEQGPSIVTPPKDIWNVTGAQVYLSCEVIGIPTPVLIWNKVKRGHYGVQRTELLPGDRDNLAIQTRGGPEKHEVTGWVLVSPLSKEDAGEYECHASNSQGQASASAKITVVDALHEIPVKKGEGAEL

SEQ ID NO: 884551 - protein, 282 aa, Homo sapiens; identical to SEQ ID NO: 884543

SEQ ID NO: 884552 - protein, 282 aa, Homo sapiens; identical to SEQ ID NO: 884543

SEQ ID NO: 884553 - protein, 282 aa, Homo sapiens; identical to SEQ ID NO: 884543

SEQ ID NO: 884554 - protein, 282 aa, Homo sapiens; identical to SEQ ID NO: 884543

SEQ ID NO: 884555 - protein, 125 aa, Homo sapiens
SPDCRGRRGREWSGAVPSTLEEVVLPPRSCRVFWIHSGTTMSKVSFKITLTSDPRLPYKVLSVPESTPFTAVLKFAAEEFKVPAATSAIITNDGIGINPAQTAGNVFLKHGSELRIIPRDRVGSC

SEQ ID NO: 884556 - protein, 125 aa, Homo sapiens; identical to SEQ ID NO: 884555

SEQ ID NO: 884557 - protein, 125 aa, Homo sapiens; identical to SEQ ID NO: 884555

SEQ ID NO: 884558 - protein, 125 aa, Homo sapiens; identical to SEQ ID NO: 884555

SEQ ID NO: 884559 - protein, 103 aa, Homo sapiens
MIRAFPTTTPRSLHLFTSSTFLARALPGAFPTGACEERLSVPESTPFTAVLKFAAEEFKVPAATSAIITNDGIGINPAQTAGNVFLKHGSELRIIPRDRVGSC

SEQ ID NO: 884560 - protein, 111 aa, Homo sapiens
SPDCRGRRGREWSGAVPSTLEEVVLPPRSCRVFWIHSGTTMSKVSFKITLTSDPRLPYKVLSVPESTPFTAVLKFAAEEFKVPAATSAIITNDGIGINPAQTAGLAVEIQP

SEQ ID NO: 884561 - protein, 125 aa, Homo sapiens; identical to SEQ ID NO: 884555

SEQ ID NO: 884562 - protein, 125 aa, Homo sapiens; identical to SEQ ID NO: 884555

SEQ ID NO: 884563 - protein, 125 aa, Homo sapiens; identical to SEQ ID NO: 884555

SEQ ID NO: 884564 - protein, 125 aa, Homo sapiens; identical to SEQ ID NO: 884555

SEQ ID NO: 884565 - protein, 125 aa, Homo sapiens; identical to SEQ ID NO: 884555

SEQ ID NO: 884566 - protein, 100 aa, Homo sapiens
SPDCRGRRGREWSGAVPSTLEEVVLPPRSCRVFWIHSGTTMSKVSFKITLTSDPRLPYKVLSVPESTPFTAVLKFAAEEVSTEVGTTFMECGLPICFKCL

SEQ ID NO: 884567 - protein, 111 aa, Homo sapiens; identical to SEQ ID NO: 884560

SEQ ID NO: 884568 - protein, 81 aa, Homo sapiens
SPDCRGRRGREWSGAVPSTLEEVVLPPRSCRVFWIHSGTTMSKVSFKITLTSDPRLPYKVLSVPESTPFTAVLKFAAEEME

SEQ ID NO: 884569 - protein, 125 aa, Homo sapiens; identical to SEQ ID NO: 884555

SEQ ID NO: 884570 - protein, 517 aa, Homo sapiens
MLSSRAEAAMTAADRAIQRFLRTGAAVRYKVMKNWGVIGGIAAALAAGIYVIWGPITERKKRRKGLVPGLVNLGNTCFMNSLLQGLSACPAFIRWLEEFTSQYSRDQKEPPSHQYLSLTLLHLLKALSCQEVTDDEVLDASCLLDVLRMYRWQISSFEEQDAHELFHVITSSLEDERDRQPRVTHLFDVHSLEQQSEITPKQITCRTRGSPHPTSNHWKSQHPFHGRLTSNMVCKHCEHQSPVRFDTFDSLSLSIPAATWGHPLTLDHCLHHFISSESVRDVVCDNCTKIEAKGTLNGEKVEHQRTTFVKQLKLGKLPQCLCIHLQRLSWSSHGTPLKRHEHVQFNEFLMMDIYKYHLLGHKPSQHNPKLNKNPGPTLELQDGPGAPTPVLNQPGAPKTQIFMNGACSPSLLPTLSAPMPFPLPVVPDYSSSTYLFRLMAVVVHHGDMHSGHFVTYRRSPPSARNPLSTSNQWLWVSDDTVRKASLQEVLSSSAYLLFYERVLSRMQHQSQECKSEE

SEQ ID NO: 884571 - protein, 541 aa, Homo sapiens
GHRRLGPGAQHCSRTGGLKPSPPLPPPPPPPPDRGIRRFPRQRNLRPGAAVRYKVMKNWGVIGGIAAALAAGIYVIWGPITERKKRRKGLVPGLVNLGNTCFMNSLLQGLSACPAFIRWLEEFTSQYSRDQKEPPSHQYLSLTLLHLLKALSCQEVTDDEVLDASCLLDVLRMYRWQISSFEEQDAHELFHVITSSLEDERDRQPRVTHLFDVHSLEQQSEITPKQITCRTRGSPHPTSNHWKSQHPFHGRLTSNMVCKHCEHQSPVRFDTFDSLSLSIPAATWGHPLTLDHCLHHFISSESVRDVVCDNCTKIEAKGTLNGEKVEHQRTTFVKQLKLGKLPQCLCIHLQRLSWSSHGTPLKRHEHVQFNEFLMMDIYKYHLLGHKPSQHNPKLNKNPGPTLELQDGPGAPTPVLNQPGAPKTQIFMNGACSPSLLPTLSAPMPFPLPVVPDYSSSTYLFRLMAVVVHHGDMHSGHFVTYRRSPPSARNPLSTSNQWLWVSDDTVRKASLQEVLSSSAYLLFYERVLSRMQHQSQECKSEE

SEQ ID NO: 884572 - protein, 486 aa, Homo sapiens
MKNWGVIGGIAAALAAGIYVIWGPITERKKRRKGLVPGLVNLGNTCFMNSLLQGLSACPAFIRWLEEFTSQYSRDQKEPPSHQYLSLTLLHLLKALSCQEVTDDEVLDASCLLDVLRMYRWQISSFEEQDAHELFHVITSSLEDERDRQPRVTHLFDVHSLEQQSEITPKQITCRTRGSPHPTSNHWKSQHPFHGRLTSNMVCKHCEHQSPVRFDTFDSLSLSIPAATWGHPLTLDHCLHHFISSESVRDVVCDNCTKIEAKGTLNGEKVEHQRTTFVKQLKLGKLPQCLCIHLQRLSWSSHGTPLKRHEHVQFNEFLMMDIYKYHLLGHKPSQHNPKLNKNPGPTLELQDGPGAPTPVLNQPGAPKTQIFMNGACSPSLLPTLSAPMPFPLPVVPDYSSSTYLFRLMAVVVHHGDMHSGHFVTYRRSPPSARNPLSTSNQWLWVSDDTVRKASLQEVLSSSAYLLFYERVLSRMQHQSQECKSEE

SEQ ID NO: 884573 - protein, 446 aa, Homo sapiens
KKRGYSPHINHWKSQHPFHGRLTSNMVCKHCEHQSPVRFDTFDSLSLKYSSRHMALSCQEVTDDEVLDASCLLDVLRMYRWQISSFEEQDAHELFHVITSSLEDERDRQPRVTHLFDVHSLEQQSEITPKQITCRTRGSPHPTSNHWKSQHPFHGRLTSNMVCKHCEHQSPVRFDTFDSLSLSIPAATWGHPLTLDHCLHHFISSESVRDVVCDNCTKIEAKGTLNGEKVEHQRTTFVKQLKLGKLPQCLCIHLQRLSWSSHGTPLKRHEHVQFNEFLMMDIYKYHLLGHKPSQHNPKLNKNPGPTLELQDGPGAPTPVLNQPGAPKTQIFMNGACSPSLLPTLSAPMPFPLPVVPDYSSSTYLFRLMAVVVHHGDMHSGHFVTYRRSPPSARNPLSTSNQWLWVSDDTVRKASLQEVLSSSAYLLFYERVLSRMQHQSQECKSEE

SEQ ID NO: 884574 - protein, 541 aa, Homo sapiens; identical to SEQ ID NO: 884571

SEQ ID NO: 884575 - protein, 369 aa, Homo sapiens [sequence omitted]

SEQ ID NO: 884576 - protein, 292 aa, Homo sapiens
MTAADRAIQRFLRTGAAVRYKVMKNWGVIGGIAAALAAGIYVIWGPITERKKRRKGLVPGLVNLGNTCFMNSLLQGLSACPAFIRWLEEFTSQYSRDQKEPPSHQYLSLTLLHLLKALSCQEVTDDEVLDASCLLDVLRMYRWQISSFEEQDAHELFHVITSSLEDERDRQPRVTHLFDVHSLEQQSEITPKQITCRTRGSPHPTSNHWKSQHPFHGRLTSNMVCKHCEHQPLLTPGSVNFITFSLPPKETPYSLATSPHPFHHPTLVNHESTSVSMDLHILDASYKWNHVM

SEQ ID NO: 884577 - protein, 224 aa, Homo sapiens
MFPAALARRPRRPKSGTGEGPERQRPGGSLRSGFPVPAGGLAGGIEICITFPTEYVKTQLQLDERSHPPRYRGIGDCVRQTVRSHGVLGLYRGLSSLLYGSIPKAAVRFGMFEFLSNHMRDAQGRLDSTRGLLCGLGAGVAEAVVVVCPMETIKVKFIHDQTSPNPKYRGFFHGVREIVREQGLKGTYQGLTATVLKQGSNQAIRFFVMTSLRNWYRGGQPESQ

SEQ ID NO: 884578 - protein, 311 aa, Homo sapiens
MPAPRAPRALAAAAPASGKAKLTHPGKAILAGGLAGGIEICITFPTEYVKTQLQLDERSHPPRYRGIGDCVRQTVRSHGVLGLYRGLSSLLYGSIPKAAVRFGMFEFLSNHMRDAQGRLDSTRGLLCGLGAGVAEAVVVVCPMETIKVKFIHDQTSPNPKYRGFFHGVREIVREQGLKGTYQGLTATVLKQGSNQAIRFFVMTSLRNWYRGDNPNKPMNPLITGVFGAIAGAASVFGNTPLDVIKTRMQGLEAHKYRNTWDCGLQILKKEGLKAFYKGTVPRLGRVCLDVAIVFVIYDEVVKLLNKVWKTD

SEQ ID NO: 884579 - protein, 311 aa, Homo sapiens; identical to SEQ ID NO: 884578

SEQ ID NO: 884580 - protein, 318 aa, Homo sapiens
MFPAALARRPRRPKSGTGEGPERQRPGGSLRSGFPVPAGGLAGGIEICITFPTEYVKTQLQLDERSHPPRYRGIGDCVRQTVRSHGVLGLYRGLSSLLYGSIPKAAVRFGMFEFLSNHMRDAQGRLDSTRGLLCGLGAGVAEAVVVVCPMETIKVKFIHDQTSPNPKYRGFFHGVREIVREQGLKGTYQGLTATVLKQGSNQAIRFFVMTSLRNWYRGDNPNKPMNPLITGVFGAIAGAASVFGNTPLDVIKTRMQGLEAHKYRNTWDCGLQILKKEGLKAFYKGTVPRLGRVCLDVAIVFVIYDEVVKLLNKVWKTD

SEQ ID NO: 884581 - protein, 339 aa, Homo sapiens
MPAPRAPRALAAAAPASGKAKLTHPGKAILAGGLAGGIEICITFPTEYVKTQLQLDERSHPPRYRGIGDCVRQTVRSHGVLGLYRGLSSLLYGSIPKAAVRFGMFEFLSNHMRDAQGRLDSTRGLLCGLGAGVAEAVVVVCPMETIKVKFIHDQTSPNPKYRGFFHGVREIVREQGLKGTYQGLTATVLKQGSNQAIRFFVMTSLRNWYRGDNPNKPMNPLITGVFGAIAGAASVFGNTPLDVIKTRMQVVGPGRGGEGGTRPELAAEPLPADVPHKGLEAHKYRNTWDCGLQILKKEGLKAFYKGTVPRLGRVCLDVAIVFVIYDEVVKLLNKVWKTD

SEQ ID NO: 884582 - protein, 110 aa, Homo sapiens [sequence omitted]

SEQ ID NO: 884583 - protein, 110 aa, Homo sapiens [sequence omitted]

SEQ ID NO: 884584 - protein, 94 aa, Homo sapiens
MTSLRNWYRGDNPNKPMNPLITGVFGAIAGAASVFGNTPLDVIKTRMQACGAKFRDTGDWADILRKGGQISRAVPAGRVARLARVATIDGGLHT

SEQ ID NO: 884585 - protein, 311 aa, Homo sapiens; identical to SEQ ID NO: 884578

SEQ ID NO: 884586 - protein, 321 aa, Homo sapiens
APLPGWAVGWGVVEARSWSPPGALGLARLPSVTPCASPGQRGGLAGGIEICITFPTEYVKTQLQLDERSHPPRYRGIGDCVRQTVRSHGVLGLYRGLSSLLYGSIPKAAVRFGMFEFLSNHMRDAQGRLDSTRGLLCGLGAGVAEAVVVVCPMETIKVKFIHDQTSPNPKYRGFFHGVREIVREQGLKGTYQGLTATVLKQGSNQAIRFFVMTSLRNWYRGDNPNKPMNPLITGVFGAIAGAASVFGNTPLDVIKTRMQGLEAHKYRNTWDCGLQILKKEGLKAFYKGTVPRLGRVCLDVAIVFVIYDEVVKLLNKVWKTD

SEQ ID NO: 884587 - protein, 311 aa, Homo sapiens; identical to SEQ ID NO: 884578

SEQ ID NO: 884588 - protein, 274 aa, Homo sapiens
MPAPRAPRALAAAAPASGKAKLTHPGKAILAGGLAGGIEICITFPTEYVKTQLQLDERSHPPRYRGIGDCVRQTVRSHGVLGLYRGLSSLLYGSIPKAAVRFGMFEFLSNHMRDAQGRLDSTRGLLCGLGAGVAEAVVVVCPMETIKVKFIHDQTSPNPKYRGFFHGVREIVREQGLKGTYQGLTATVLKQGSNQAIRFFVMTSLRNWYRGDNPNKPMNPLITGVFGAIAGAASVFGNTPLDVIKTRMQGLEAHKYRNTWDCGLQILKKEGLKA

SEQ ID NO: 884589 - protein, 341 aa, Homo sapiens
MPAPRAPRALAAAAPASGKAKLTHPGKAILAGGLAGGIEICITFPTEYVKTQLQLDERSHPPRYRGIGEEGEAAAPRGAGTQGGGTEGRGVLPPPPPGDCVRQTVRSHGVLGLYRGLSSLLYGSIPKAAVRFGMFEFLSNHMRDAQGRLDSTRGLLCGLGAGVAEAVVVVCPMETIKVKFIHDQTSPNPKYRGFFHGVREIVREQGLKGTYQGLTATVLKQGSNQAIRFFVMTSLRNWYRGDNPNKPMNPLITGVFGAIAGAASVFGNTPLDVIKTRMQGLEAHKYRNTWDCGLQILKKEGLKAFYKGTVPRLGRVCLDVAIVFVIYDEVVKLLNKVWKTD

SEQ ID NO: 884590 - protein, 527 aa, Homo sapiens [sequence omitted]

SEQ ID NO: 884591 - protein, 550 aa, Homo sapiens
ELSRCRPASFPACSAPSRNYFRGGCRGRCPGEGAWRRAVWGGWRRQPEGGARPEAQHREPICGFTPLMEAAAAGHEIIVQYFLNHGVKVDARDHSGATARMLAKQYGHMKIVALMDTYSPSLPKSLYRSPEKYEDLSSSDESCPAPQRQRPCRKKGVSIHEGPRALARITGIGLGGRAPRPRYEQAPPRGYVTFNSSGENPLEEEGLCCRDVTSPINERDVESSSSSSSREEHAFCANLGPVQSSSSSEGLARAQGLSSEASVESNEDSDHACKSSARKQAKSYMKTKNPDSQWPPRTATDREGFLAESSPQTQRAPYSGPQDLAALLEQIGCLKYLQVFEEQDVDLRIFLTLTESDLKEIGITLFGPKRKMTSAIARWHSSARPPGDALELAYADRLEAEMQELAIQLHKRCEEVEATRGQVCQEQELRAVVESCLLEQDRAREDLQARLRETWALARDAALVLDQLRACQAELSSRVRQDQPPGAATLGLAVPPADSKGWQASLQAMSLPELSGALEDRVREMGQALCLVTQSLEKLQVLNGKKWRET

SEQ ID NO: 884592 - protein, 674 aa, Homo sapiens
GSCPGADPRASRRAPRPPATTSGAGAGGGAPARERGGELFGGVGDGSPRAAQGLRPSTVMSELSDEASEPELLNRSLSMWHGLGTQVSGEELDVPLDLHTAASIGQYEVVKECVQRRELDLNKKNGGGWTPLMYASYIGHDTIVHLLLEAGVSVNVPTPEGQTPLMLASSCGNESSPTFFSREPICGFTPLMEAAAAGHEIIVQYFLNHGVKVDARDHSGATARMLAKQYGHMKIVALMDTYSPSLPKSLYRSPEKYEDLSSSDESCPAPQRQRPCRKKGVSIHEGPRALARITGIGLGGRAPRPRYEQAPPRGYVTFNSSGENPLEEEGLCCRDVTSPINERDVESSSSSSSREEHAFCANLGPVQSSSSSEGLARAQGLSSEASVESNEDSDHACKSSARKQAKSYMKTKNPDSQWPPRTATDREGFLAESSPQTQRAPYSGPQDLAALLEQIGCLKYLQVFEEQDVDLRIFLTLTESDLKEIGITLFGPKRKMTSAIARWHSSARPPGDALELAYADRLEAEMQELAIQLHKRCEEVEATRGQVCQEQELRAVVESCLLEQDRAREDLQARLRETWALARDAALVLDQLRACQAELSSRVRQDQPPGAATLGLAVPPADSKGWQASLQAMSLPELSGALEDRVREMGQALCLVTQSLEKLQVLNGKKWRET

SEQ ID NO: 884593 - protein, 450 aa, Homo sapiens [sequence omitted]

SEQ ID NO: 884594 - protein, 614 aa, Homo sapiens
GSCPGADPRASRRAPRPPATTSGAGAGGGAPARERGGELFGGVGDGSPRAAQGLRPSTVMSELSDEASEPELLNRSLSMWHGLGTQVSGEELDVPLDLHTAASIGQYEVVKECVQRKVQELEMKDIQGWTALFHCTSAGHQHMVRFLLDSGANANVREPICGFTPLMEAAAAGHEIIVQYFLNHGVKVDARDHSGATARMLAKQYGHMKIVALMDTYSPSLPKSLYRSPEKYEDLSSSDESCPAPQRQRPCRKKGVSIHEGPRALARITGIGLGGRAPRPRYEQAPPRGYVTFNSSGENPLEEEGLCCRDVTSPINERDVESSSSSSSREEHAFCANLGPVQSSSSSEGLARAQGLSSEASVESNEDSDHACKSSARKQAKSYMKTKNPDSQWPPRTATDREGFLAESSPQTQRAPYSGPQDLAALLEQIGCLKYLQVFEEQDVDLRIFLTLTESDLKEIGITLFGPKRKMTSAIARWHSSARPPGDALELAYADRLEAEMQELAIQLHKRCEEVEATRGQVCQEQELRAVVESCLLEQDRAREDLQARLRETWALARDAALVLDQLRACQAELSSRVRQDQPPGAATLGLAVPPAGKSSGLTPHWAEGKVGEP

SEQ ID NO: 884595 - protein, 35 aa, Homo sapiens [sequence omitted]

SEQ ID NO: 884596 - protein, 649 aa, Homo sapiens
GSCPGADPRASRRAPRPPATTSGAGAGGGAPARERGGELFGGVGDGSPRAAQGLRPSTVMSELSDEASEPELLNRSLSMWHGLGTQVSGEELDVPLDLHTAASIGQYEVVKECVQRKVQELEMKDIQGWTALFHCTSAGHQHMVRFLLDSGANANVREPICGFTPLMEAAAAGHEIIVQYFLNHGVKVDARDHSGATARMLAKQYGHMKIVALMDTYSPSLPKSLYRSPEKYEDLSSSDESCPAPQRQRPCRKKGVSIHEGPRALARITGIGLGGRAPRPRYEQAPPRGYVTFNSSGENPLEEEGLCCRDVTSPINERDVESSSSSSSREEHAFCANLGPVQSSSSSEGLARAQGLSSEASVESNEDSDHACKSSARKQAKSYMKTKNPDSQWPPRTATDREGFLAESSPQTQRAPYSGPQDLAALLEQIGCLKYLQVFEEQDVDLRIFLTLTESDLKEIGITLFGPKRKMTSAIARWHSSARPPGDALELAYADRLEAEMQELAIQLHKRCEEVEATRGQVCQEQELRAVVESCLLEQDRAREDLQARLRETWALARDAALVLDQLRACQAELSSRVRQDQPPGAATLGLAVPPADSKGWQASLQAMSLPELSGALEDRVREMGQALCLVTQSLEKLQVLNGKKWRET

SEQ ID NO: 884597 - protein, 715 aa, Homo sapiens
GSCPGADPRASRRAPRPPATTSGAGAGGGAPARERGGELFGGVGDGSPRAAQGLRPSTVMSELSDEASEPELLNRSLSMWHGLGTQVSGEELDVPLDLHTAASIGQYEVVKECVQRRELDLNKKNGGGWTPLMYASYIGHDTIVHLLLEAGVSVNVPTPEGQTPLMLASSCGNESIAYFLLQQGAELEMKDIQGWTALFHCTSAGHQHMVRFLLDSGANANVREPICGFTPLMEAAAAGHEIIVQYFLNHGVKVDARDHSGATARMLAKQYGHMKIVALMDTYSPSLPKSLYRSPEKYEDLSSSDESCPAPQRQRPCRKKGVSIHEGPRALARITGIGLGGRAPRPRYEQAPPRGYVTFNSSGENPLEEEGLCCRDVTSPINERDVESSSSSSSREEHAFCANLGPVQSSSSSEGLARAQGLSSEASVESNEDSDHACKSSARKQAKSYMKTKNPDSQWPPRTATDREGFLAESSPQTQRAPYSGPQDLAALLEQIGCLKYLQVFEEQDVDLRIFLTLTESDLKEIGITLFGPKRKMTSAIARWHSSARPPGDALELAYADRLEAEMQELAIQLHKRCEEVEATRGQVCQEQELRAVVESCLLEQDRAREDLQARLRETWALARDAALVLDQLRACQAELSSRVRQDQPPGAATLGLAVPPADSKGWQASLQAMSLPELSGALEDRVREMGQALCLVTQSLEKLQVLNGKKWRET

SEQ ID NO: 884598 - protein, 229 aa, Homo sapiens
MDLAALLEQIGCLKYLQVFEEQDVDLRIFLTLTESDLKEIGITLFGPKRKMTSAIARWHSSARPPGDALELAYADRLEAEMQELAIQLHKRCEEVEATRGQVCQEQELRAVVESCLLEQDRAREDLQARLRETWALARDAALVLDQLRACQAELSSRVRQDQPPGAATLGLAVPPADSKGWQASLQAMSLPELSGALEDRVREMGQALCLVTQSLEKLQVLNGKKWRET

SEQ ID NO: 884599 - protein, 283 aa, Homo sapiens
MAAAPQAPGRGSLRKTRPLVVKTSLNNPYIIRWSALESEDMHFILQTLEDRLKAIGLQKIEDKKKKNKTPFLKKESREKCSIAVDISENLKEKKTDAKQQVSGWTPAHVRKQLAIGVNEVTRALERRELLLVLVCKSVKPAMITSHLIQLSLSRSVPACQVPRLSERIAPVIGLKCVLALAFKKNTTDFVDEVRAIIPRVPSLSVPWLQDRIEDSGENLETEPLESQDRELLDTSFEDLSKPKRKLADGRQASVTLQPLKIKKLIPNPNKIRKPPKSKKATPK

SEQ ID NO: 884600 - protein, 283 aa, Homo sapiens; identical to SEQ ID NO: 884599

SEQ ID NO: 884601 - protein, 167 aa, Homo sapiens
MAAAPQAPGRGSLRKTRPLVVKTSLNNPYIIRWSALESEDMHFILQTLEDRLKAIGLQKIEDKKKKNKTPFLKKESREKCSIAVDISENLKEKKTDAKQQVSGWTPAHVRKQLAIGVNEVTRALERRELLLVLVLTLLPRLECSGVIPAHCNPASWVQAILLPQPPE

SEQ ID NO: 884602 - protein, 761 aa, Homo sapiens
DGPDARIPERRPYTVPFDTHLGHYIYIPSRQDSRKVHTSPPMYSLDRIFAGFRTRSQMLLGHIEEQDKVLHCQFSDNSDDEESEGQEKSGTRCRSRSWIQKPDSVCSLVELSDTQDETQKSDLENEDLKIDCLQESQELNLQKLKNSERILTEAKQKMRDLQINIKMKEDLIKELIKTGNDAKSVSKQYSLKVTKLEHDAEQAKVELIETQKQLQELENKDLSDVAMKVKLQKEFRKKMDAAKLRVQVLQKKQQDSKKLASLSIQNEKRANELEQSVDHMKYQKIQLQRKLREENEKRKQLDAVIKRDQQKIKEIQLKTGQEEGLKPKAEDLDACNLKRRKGSFGSIDHLQKLDEQKKWLDEEVEKVLNQRQELEELEADLKKREAIVSKKEALLQEKSHLENKKLRSSQEEHVLFQLEEGIEALEAAIEYRNESIQNRQKSLRASFHNLSRGEANVLEKLACLSPVEIRTILFRYFNKVVNLREAERKQQLYNEEMKMKVLERDNMVRELESALDHLKLQCDRRLTLQQKEHEQKMQLLLHHFKEQDGEGIMETFKTYEDKIQQLEKDLYFYKKTSRDHKKKLKELVGEAIRRQLAPSEYQEAGDGVLKPEGGGMLSEELKWASRPESMKLSGREREMDSSASSLRTQPNPQKLWEDIPELPPIHSSLAPPSGHMLGNENKTETDDNQFTKSHSRLSSQIQVVGNVGRLHGVTPVKLCRKELRQISALELSLRRSSLGVGIGSMAADSIEVSRKPRDLKT

SEQ ID NO: 884603 - protein, 833 aa, Homo sapiens
DGPDARIPERRPYTVPFDTHLGHYIYIPSRQDSRKVHTSPPMYSLDRIFAGFRTRSQMLLGHIEEQDKVLHCQFSDNSDDEESEGQEKSGTRCRSRSWIQKPDSVCSLVELSDTQDETQKSDLENEDLKIDCLQESQELNLQKLKNSERILTEAKQKMRDLQINIKMKEDLIKELIKTGNDAKSVSKQYSLKVTKLEHDAEQAKVELIETQKQLQELENKDLSDVAMKVKLQKEFRKKMDAAKLRVQVLQKKQQDSKKLASLSIQNEKRANELEQSVDHMKYQKIQLQRKLREENEKRKQLDAVIKRDQQKIKEIQLKTGQEEGLKPKAEDLDACNLKRRKGSFGSIDHLQKLDEQKKWLDEEVEKVLNQRQELEELEADLKKREAIVSKKEALLQEKSHLENKKLRSSQALNTDSLKISTRLNLLEQELSEKNVQLQTSTAEEKTKISEQVEVLQKEKDQLQKRRHDVDEKLKNGRVLSPEEEHVLFQLEEGIEALEAAIEYRNESIQNRQKSLRASFHNLSRGEANVLEKLACLSPVEIRTILFRYFNKVVNLREAERKQQLYNEEMKMKVLERDNMVRELESALDHLKLQCDRRLTLQQKEHEQKMQLLLHHFKEQDGEGIMETFKTYEDKIQQLEKDLYFYKKTSRDHKKKLKELVGEAIRRQLAPSEYQEAGDGVLKPEGGGMLSEELKWASRPESMKLSGREREMDSSASSLRTQPNPQKLWEDIPELPPIHSSLAPPSGHMLGNENKTETDDNQFTKSHSRLSSQIQVVGNVGRLHGVTPVKLCRKELRQISALELSLRRSSLGVGIGSMAADSIEVSRKPRDLKT

SEQ ID NO: 884604 - protein, 240 aa, Homo sapiens
SSRIPLIRFKEHEQKMQLLLHHFKEQDGEGIMETFKTYEDKIQQLEKDLYFYKKTSRDHKKKLKELVGEAIRRQLAPSEYQEAGDGVLKPEGGGMLSEELKWASRPESMKLSGREREMDSSASSLRTQPNPQKLWEDIPELPPIHSSLAPPSGHMLGNENKTETDDNQFTKSHSRLSSQIQVVGNVGRLHGVTPVKLCRKELRQISALELSLRRSSLGVGIGSMAADSIEVSRKPRDLKT

SEQ ID NO: 884605 - protein, 164 aa, Homo sapiens
AWEGRGNGSWRCFAKGPCFCCGKLPGVARASEPKPLPSTPLPACPGAAKRLRSSRPAEMALDPADQHLRHVEKDVLIPKIMREKAKERCSEQVQDFTKCCKNSGVLMVVKCRKENSALKECLTAYYNDPAFYEECKMEYLKEREEFRKTGIPTKKRLQKLPTSM

SEQ ID NO: 884606 - protein, 264 aa, Homo sapiens
MDALVEDDICILNHEKAHKRDTVTPVSIYSGDESVASHFALVTAYEDIKKRLKDSEKENSLLKKRIRFLEEKLIARFEEETSSVGREQVNKAYHAYREVCIDRDNLKSKLDKMNKDNSESLKVLNEQLQSKEVELLQLRTEVETQQVMRNLNPPSSNWEVEKLSCDLKIHGLEQELELMRKECSDLKIELQKAKQTDPYQEDNLKSRDLQKLSISSDNMQHAYWELKREMSNLHLVTQVQAELLRKLKTSTAIKKGKSLFTGNH

SEQ ID NO: 884607 - protein, 164 aa, Homo sapiens; identical to SEQ ID NO: 884605

SEQ ID NO: 884608 - protein, 109 aa, Homo sapiens
EKITISVSILFVVMRNLNPPSSNWEVEKLSCDLKIHGLEQELELMRKECSDLKIELQKAKQTDPYQEDNLKSRDLQKLSISRQSICSTAWSAVAQSWDSMNFEDCSLFA

SEQ ID NO: 884609 - protein, 224 aa, Homo sapiens
RLGTRLGVNRPRKDSEKENSLLKKRIRFLEEKLIARFEEETSSVGREQVNKAYHAYREVCIDRDNLKSKLDKMNKDNSESLKVLNEQLQSKEVELLQLRTEVETQQVMRNLNPPSSNWEVEKLSCDLKIHGLEQELELMRKECSDLKIELQKAKQTDPYQEDNLKSRDLQKLSISSDNMQHAYWELKREMSNLHLVTQVQAELLRKLKTSTAIKKGKSLFTGNH

SEQ ID NO: 884610 - protein, 114 aa, Homo sapiens
MDALVEDDICILNHEKAHKRDTVTPVSIYSGDESVASHFALVTAYEDIKKRLKDSEKENSLLKKRIRFLEEKVIFIFYLHCVCDIRNNSEILEILNTFCPVFHDCTKFPRITHC

SEQ ID NO: 884611 - protein, 392 aa, Homo sapiens
MDALVEDDICILNHEKAHKRDTVTPVSIYSGDESVASHFALVTAYEDIKKRLKDSEKENSLLKKRIRFLEEKLIARFEEETSSVGREQVNKAYHAYREVCIDRDNLKSKLDKMNKDNSESLKVLNEQLQSKEVELLQLRTEVETQQVMRNLNPPSSNWEVEKLSCDLKIHGLEQELELMRKECSDLKIELQKAKQTDPYQEDNLKSRDLQKLSISSDNMQHAYWELKREMSNLHLVTQVQAELLRKLKTSTAIKKACAPVGCSEDLGRDSTKLHLMNFTATYTRHPPLLPNGKALCHTTSSPLPGDVKVLSEKAILQSWTDNERSIPNDGTCFQEHSSYGRNSLEDNSWVFPSPPKSSETAFGETKTKTLPLPNLPPLHYLDQHNQNCLYKN

SEQ ID NO: 884612 - protein, 392 aa, Homo sapiens; identical to SEQ ID NO: 884611

SEQ ID NO: 884613 - protein, 392 aa, Homo sapiens; identical to SEQ ID NO: 884611

SEQ ID NO: 884614 - protein, 392 aa, Homo sapiens; identical to SEQ ID NO: 884611

SEQ ID NO: 884615 - protein, 258 aa, Homo sapiens
EKITISVSILFVVMRNLNPPSSNWEVEKLSCDLKIHGLEQELELMRKECSDLKIELQKAKQTDPYQEDNLKSRDLQKLSISSDNMQHAYWELKREMSNLHLVTQVQAELLRKLKTSTAIKKACAPVGCSEDLGRDSTKLHLMNFTATYTRHPPLLPNGKALCHTTSSPLPGDVKVLSEKAILQSWTDNERSIPNDGTCFQEHSSYGRNSLEDNSWVFPSPPKSSETAFGETKTKTLPLPNLPPLHYLDQHNQNCLYKN

SEQ ID NO: 884616 - protein, 243 aa, Homo sapiens
MDALVEDDICILNHEKAHKRDTVTPVSIYSGDESVASHFALVTAYEDIKKRLKDSEKENSLLKKRIRFLEEKLIARFEEETSSVGREQVNKAYHAYREVCIDRDNLKSKLDKMNKDNSESLKVLNEQLQSKEVELLQLRTEVETQQVMRNLNPPSSNWEVEKLSCDLKIHGLEQELELMRKECSDLKIELQKAKQTDPYQEDNLKSRDLQKLSISRQSICSTAWSAVAQSWDSMNFEDCSLFA

SEQ ID NO: 884617 - protein, 156 aa, Homo sapiens
MDALVEDDICILNHEKAHKRDTVTPVSIYSGDESVASHFALVTAYEDIKKRLKDSEKENSLLKKRIRFLEEKLIARFEEETSSVGREQVNKAYHAYREVCIDRDNLKSKLDKMNKDNSESLKVLNEQLQSKEVELLQLRTEVETQQVIICSMHTGN

SEQ ID NO: 884618 - protein, 134 aa, Homo sapiens
AWEGRGNGSWRCFAKGPCFCCGKLPGVARASEPKPLPSTPLPACPGAAKRLRSSRPAEMALDPADFTKCCKNSGVLMVVKCRKENSALKECLTAYYNDPAFYEECKMEYLKEREEFRKTGIPTKKRLQKLPTSM

SEQ ID NO: 884619 - protein, 243 aa, Homo sapiens; identical to SEQ ID NO: 884616

SEQ ID NO: 884620 - protein, 120 aa, Homo sapiens
MDALVEDDICILNHEKAHKRDTVTPVSIYSGDESVASHFALVTAYEDIKKRLKDSEKENSLLKKRIRFLEEKLIARFEEETSSVGREQVNKAYHAYREVCIDRDNLKSKLDKMVSSFEAN

SEQ ID NO: 884621 - protein, 134 aa, Homo sapiens; identical to SEQ ID NO: 884618

SEQ ID NO: 884622 - protein, 106 aa, Homo sapiens
MALDPADQHLRHVEKDVLIPKIMREKAKERCSEQVQDFTKCCKNSGVLMVVKCRKENSALKECLTAYYNDPAFYEECKMEYLKEREEFRKTGIPTKKRLQKLPTSM

SEQ ID NO: 884623 - protein, 392 aa, Homo sapiens; identical to SEQ ID NO: 884611

SEQ ID NO: 884624 - protein, 392 aa, Homo sapiens; identical to SEQ ID NO: 884611

SEQ ID NO: 884625 - protein, 430 aa, Homo sapiens
MALDPADQHLRHVEKDVLIPKIMREKAKERCSEQVQVVMDALVEDDICILNHEKAHKRDTVTPVSIYSGDESVASHFALVTAYEDIKKRLKDSEKENSLLKKRIRFLEEKLIARFEEETSSVGREQVNKAYHAYREVCIDRDNLKSKLDKMNKDNSESLKVLNEQLQSKEVELLQLRTEVETQQVMRNLNPPSSNWEVEKLSCDLKIHGLEQELELMRKECSDLKIELQKAKQTDPYQEDNLKSRDLQKLSISSDNMQHAYWELKREMSNLHLVTQVQAELLRKLKTSTAIKKACAPVGCSEDLGRDSTKLHLMNFTATYTRHPPLLPNGKALCHTTSSPLPGDVKVLSEKAILQSWTDNERSIPNDGTCFQEHSSYGRNSLEDNSWVFPSPPKSSETAFGETKTKTLPLPNLPPLHYLDQHNQNCLYKN

SEQ ID NO: 884626 - protein, 174 aa, Homo sapiens [sequence omitted]

SEQ ID NO: 884627 - protein, 124 aa, Homo sapiens
AWEGRGNGSWRCFAKGPCFCCGKLPGVARASEPKPLPSTPLPACPGAAKRLRSSRPAEMALDPADQHLRHVEKDVLIPKIMREKAKERCSEQVQDFTKCCKNSGVLMVVKCRKENSALKECLTA

SEQ ID NO: 884628 - protein, 74 aa, Homo sapiens
TPTTEPGFANALPAPSGLTSGFLARPWRRARGQRQPLFRLRAHPHFQSLSGVLPLPPARAGPDGGPGSRARIAG

SEQ ID NO: 884629 - protein, 713 aa, Homo sapiens
MSTRTPLPTVNERDTENHTSHGDGRQEVTSRTSRSGARCRNSIASCADEQPHIGNYRLLKTIGKGNFAKVKLARHILTGREVAIKIIDKTQLNPTSLQKLFREVRIMKILNHPNIVKLFEVIETEKTLYLIMEYASGGEVFDYLVAHGRMKEKEARSKFRQIVSAVQYCHQKRIVHRDLKAENLLLDADMNIKIADFGFSNEFTVGGKLDTFCGSPPYAAPELFQGKKYDGPEVDVWSLGVILYTLVSGSLPFDGQNLKELRERVLRGKYRIPFYMSTDCENLLKRFLVLNPIKRGTLEQIMKDRWINAGHEEDELKPFVEPELDISDQKRIDIMVGMGYSQEEIQESLSKMKYDEITATYLLLGRKSSEVRPSSDLNNSTGQSPHHKVQRSVSSSQKQRRYSDHAGPAIPSVVAYPKRSQTSTADSDLKEDGISSRKSSGSAVGGKGIAPASPMLGNASNPNKADIPERKKSSTVPSSNTASGGMTRRNTYVCSERTTADRHSVIQNGKENSTIPDQRTPVASTHSISSAATPDRIRFPRGTASRSTFHGQPRERRTATYNGPPASPSLSHEATPLSQTRSRGSTNLFSKLTSKLTRSRNVSAEQKDENKEAKPRSLRFTWSMKTTSSMDPGDMMREIRKVLDANNCDYEQRERFLLFCVHGDGHAENLVQWEMEVCKLPRLSLNGVRFKRISGTSIAFKNIASKIANELKL

SEQ ID NO: 884630 - protein, 729 aa, Homo sapiens
MSTRTPLPTVNERDTENHTSHGDGRQEVTSRTSRSGARCRNSIASCADEQPHIGNYRLLKTIGKGNFAKVKLARHILTGREVAIKIIDKTQLNPTSLQKLFREVRIMKILNHPNIVKLFEVIETEKTLYLIMEYASGGEVFDYLVAHGRMKEKEARSKFRQIVSAVQYCHQKRIVHRDLKAENLLLDADMNIKIADFGFSNEFTVGGKLDTFCGSPPYAAPELFQGKKYDGPEVDVWSLGVILYTLVSGSLPFDGQNLKELRERVLRGKYRIPFYMSTDCENLLKRFLVLNPIKRGTLEQIMKDRWINAGHEEDELKPFVEPELDISDQKRIDIMVGMGYSQEEIQESLSKMKYDEITATYLLLGRKSSELDASDSSSSSNLSLAKVRPSSDLNNSTGQSPHHKVQRSVSSSQKQRRYSDHAGPAIPSVVAYPKRSQTSTADSDLKEDGISSRKSSGSAVGGKGIAPASPMLGNASNPNKADIPERKKSSTVPSSNTASGGMTRRNTYVCSERTTADRHSVIQNGKENSTIPDQRTPVASTHSISSAATPDRIRFPRGTASRSTFHGQPRERRTATYNGPPASPSLSHEATPLSQTRSRGSTNLFSKLTSKLTRSRNVSAEQKDENKEAKPRSLRFTWSMKTTSSMDPGDMMREIRKVLDANNCDYEQRERFLLFCVHGDGHAENLVQWEMEVCKLPRLSLNGVRFKRISGTSIAFKNIASKIANELKL

SEQ ID NO: 884631 - protein, 729 aa, Homo sapiens; identical to SEQ ID NO: 884630

SEQ ID NO: 884632 - protein, 729 aa, Homo sapiens; identical to SEQ ID NO: 884630

SEQ ID NO: 884633 - protein, 428 aa, Homo sapiens [sequence omitted]

SEQ ID NO: 884634 - protein, 744 aa, Homo sapiens
MSTRTPLPTVNERDTENHTSHGDGRQEVTSRTSRSGARCRNSIASCADEQPHIGNYRLLKTIGKGNFAKVKLARHILTGREVAIKIIDKTQLNPTSLQKLFREVRIMKILNHPNIVKLFEVIETEKTLYLIMEYASGGEVFDYLVAHGRMKEKEARSKFRQIVSAVQYCHQKRIVHRDLKAENLLLDADMNIKIADFGFSNEFTVGGKLDTFCGSPPYAAPELFQGKKYDGPEVDVWSLGVILYTLVSGSLPFDGQNLKELRERVLRGKYRIPFYMSTDCENLLKRFLVLNPIKRGTLEQIMKDRWINAGHEEDELKPFVEPELDISDQKRIDIMVGMGYSQEEIQESLSKMKYDEITATYLLLGRKSSELDASDSSSSSNLSLAKVRPSSDLNNSTGQSPHHKVQRSVSSSQKQRRYSDHAGPAIPSVVAYPKRSQTSTADSDLKEDGISSRKSSGSAVGGKGIAPASPMLGNASNPNKADIPERKKSSTVPSSNTASGGMTRRNTYVCSERTTADRHSVIQNGKENSTIPDQRTPVASTHSISSAATPDRIRFPRGTASRSTFHGQPRERRTATYNGPPASPSLSHEATPLSQTRSRGSTNLFSKLTSKLTRRLPTEYERNGRYEGSSRNVSAEQKDENKEAKPRSLRFTWSMKTTSSMDPGDMMREIRKVLDANNCDYEQRERFLLFCVHGDGHAENLVQWEMEVCKLPRLSLNGVRFKRISGTSIAFKNIASKIANELKL

SEQ ID NO: 884635 - protein, 623 aa, Homo sapiens
MKILNHPNIVKLFEVIETEKTLYLIMEYASGGEVFDYLVAHGRMKEKEARSKFRQIVSAVQYCHQKRIVHRDLKAENLLLDADMNIKIADFGFSNEFTVGGKLDTFCGSPPYAAPELFQGKKYDGPEVDVWSLGVILYTLVSGSLPFDGQNLKELRERVLRGKYRIPFYMSTDCENLLKRFLVLNPIKRGTLEQIMKDRWINAGHEEDELKPFVEPELDISDQKRIDIMVGMGYSQEEIQESLSKMKYDEITATYLLLGRKSSELDASDSSSSSNLSLAKVRPSSDLNNSTGQSPHHKVQRSVSSSQKQRRYSDHAGPAIPSVVAYPKRSQTSTADSDLKEDGISSRKSSGSAVGGKGIAPASPMLGNASNPNKADIPERKKSSTVPSSNTASGGMTRRNTYVCSERTTADRHSVIQNGKENSTIPDQRTPVASTHSISSAATPDRIRFPRGTASRSTFHGQPRERRTATYNGPPASPSLSHEATPLSQTRSRGSTNLFSKLTSKLTRSRNVSAEQKDENKEAKPRSLRFTWSMKTTSSMDPGDMMREIRKVLDANNCDYEQRERFLLFCVHGDGHAENLVQWEMEVCKLPRLSLNGVRFKRISGTSIAFKNIASKIANELKL

SEQ ID NO: 884636 - protein, 623 aa, Homo sapiens; identical to SEQ ID NO: 884635

SEQ ID NO: 884637 - protein, 623 aa, Homo sapiens; identical to SEQ ID NO: 884635

SEQ ID NO: 884638 - protein, 540 aa, Homo sapiens
MNIKIADFGFSNEFTVGGKLDTFCGSPPYAAPELFQGKKYDGPEVDVWSLGVILYTLVSGSLPFDGQNLKELRERVLRGKYRIPFYMSTDCENLLKRFLVLNPIKRGTLEQIMKDRWINAGHEEDELKPFVEPELDISDQKRIDIMVGMGYSQEEIQESLSKMKYDEITATYLLLGRKSSELDASDSSSSSNLSLAKVRPSSDLNNSTGQSPHHKVQRSVSSSQKQRRYSDHAGPAIPSVVAYPKRSQTSTADSDLKEDGISSRKSSGSAVGGKGIAPASPMLGNASNPNKADIPERKKSSTVPSSNTASGGMTRRNTYVCSERTTADRHSVIQNGKENSTIPDQRTPVASTHSISSAATPDRIRFPRGTASRSTFHGQPRERRTATYNGPPASPSLSHEATPLSQTRSRGSTNLFSKLTSKLTRSRNVSAEQKDENKEAKPRSLRFTWSMKTTSSMDPGDMMREIRKVLDANNCDYEQRERFLLFCVHGDGHAENLVQWEMEVCKLPRLSLNGVRFKRISGTSIAFKNIASKIANELKL

SEQ ID NO: 884639 - protein, 753 aa, Homo sapiens
MSTRTPLPTVNERDTENHTSHGDGRQEVTSRTSRSGARCRNSIASCADEQPHIGNYRLLKTIGKGNFAKVKLARHILTGREVAIKIIDKTQLNPTSLQKLFREVRIMKILNHPNIVKLFEVIETEKTLYLIMEYASGGEVFDYLVAHGRMKEKEARSKFRQIVSAVQYCHQKRIVHRDLKAENLLLDADMNIKIADFGFSNEFTVGGKLDTFCGSPPYAAPELFQGKKYDGPEVDVWSLGVILYTLVSGSLPFDGQNLKELRERVLRGKYRIPFYMSTDCENLLKRFLVLNPIKRGTLEQIMKDRWINAGHEEDELKPFVEPELDISDQKRIDIMVGMGYSQEEIQESLSKMKYDEITATYLLLGRKSSELDASDSSSSSNLSLAKVRPSSDLNNSTGQSPHHKVQRSVSSSQKQRRYSDHAGPAIPSVVAYPKRSQTSTADSDLKEDGISSRKSSGSAVGGKGIAPASPMLGNASNPNKADIPERKKSSTVPSSNTASGGMTRRNTYVCSERTTADRHSVIQNGKENSTIPDQRTPVASTHSISSAATPDRIRFPRGTASRSTFHGQPRERRTATYNGPPASPSLSHEATPLSQTRSRGSTNLFSKLTSKLTRRNMSFRFIKRLPTEYERNGRYEGSSRNVSAEQKDENKEAKPRSLRFTWSMKTTSSMDPGDMMREIRKVLDANNCDYEQRERFLLFCVHGDGHAENLVQWEMEVCKLPRLSLNGVRFKRISGTSIAFKNIASKIANELKL

SEQ ID NO: 884640 - protein, 737 aa, Homo sapiens
MSTRTPLPTVNERDTENHTSHGDGRQEVTSRTSRSGARCRNSIASCADEQPHIGNYRLLKTIGKGNFAKVKLARHILTGREVAIKIIDKTQLNPTSLQKLFREVRIMKILNHPNIVKLFEVIETEKTLYLIMEYASGGEVFDYLVAHGRMKEKEARSKFRQIVSAVQYCHQKRIVHRDLKAENLLLDADMNIKIADFGFSNEFTVGGKLDTFCGSPPYAAPELFQGKKYDGPEVDVWSLGVILYTLVSGSLPFDGQNLKELRERVLRGKYRIPFYMSTDCENLLKRFLVLNPIKRGTLEQIMKDRWINAGHEEDELKPFVEPELDISDQKRIDIMVGMGYSQEEIQESLSKMKYDEITATYLLLGRKSSEVRPSSDLNNSTGQSPHHKVQRSVSSSQKQRRYSDHAGPAIPSVVAYPKRSQTSTADSDLKEDGISSRKSSGSAVGGKGIAPASPMLGNASNPNKADIPERKKSSTVPSSNTASGGMTRRNTYVCSERTTADRHSVIQNGKENSTIPDQRTPVASTHSISSAATPDRIRFPRGTASRSTFHGQPRERRTATYNGPPASPSLSHEATPLSQTRSRGSTNLFSKLTSKLTRRNMSFRFIKRLPTEYERNGRYEGSSRNVSAEQKDENKEAKPRSLRFTWSMKTTSSMDPGDMMREIRKVLDANNCDYEQRERFLLFCVHGDGHAENLVQWEMEVCKLPRLSLNGVRFKRISGTSIAFKNIASKIANELKL

SEQ ID NO: 884641 - protein, 259 aa, Homo sapiens
MLGNASNPNKADIPERKKSSTVPSSNTASGGMTRRNTYVCSERTTADRHSVIQNGKENSTIPDQRTPVASTHSISSAATPDRIRFPRGTASRSTFHGQPRERRTATYNGPPASPSLSHEATPLSQTRSRGSTNLFSKLTSKLTRSRNVSAEQKDENKEAKPRSLRFTWSMKTTSSMDPGDMMREIRKVLDANNCDYEQRERFLLFCVHGDGHAENLVQWEMEVCKLPRLSLNGVRFKRISGTSIAFKNIASKIANELKL

SEQ ID NO: 884642 - protein, 208 aa, Homo sapiens
MVLALHHGDLDSCEKSLGTLYSSIRSLPGLPGLCSLCTASRSTFHGQPRERRTATYNGPPASPSLSHEATPLSQTRSRGSTNLFSKLTSKLTRSRNVSAEQKDENKEAKPRSLRFTWSMKTTSSMDPGDMMREIRKVLDANNCDYEQRERFLLFCVHGDGHAENLVQWEMEVCKLPRLSLNGVRFKRISGTSIAFKNIASKIANELKL

SEQ ID NO: 884643 - protein, 727 aa, Homo sapiens
MSTRTPLPTVNERDTENHTSHGDGRQEVTSRTSRSGARCRNSIASCADEQPHIGNYRLLKTIGKGNFAKVKLARHILTGREVAIKIIDKTQLNPTSLQKLFREVRIMKILNHPNIVKLFEVIETEKTLYLIMEYASGGEVFDYLVAHGRMKEKEARSKFRQIVSAVQYCHQKRIVHRDLKAENLLLDADMNIKIADFGFSNEFTVGGKLDTFCGSPPYAAPELFQGKKYDGPEVDVWSLGVILYTLVSGSLPFDGQNLKELRERVLRGKYRIPFYMSTDCENLLKRFLVLNPIKRGTLEQIMKDRWINAGHEEDELKPFVEPELDISDQKRIDIMVGMGYSQEEIQESLSKMKYDEITATYLLLGRKSSELDASDSSSSSNLSLAKVRPSSDLNNSTGQSPHHKVQRSVSSSQKQRRYSDHAGPAIPSVVAYPKRSQTSTADSDLKEDGISSRKSSGSAVGGKGIAPASPMLGNASNPNKADIPERKKSSTVPSSNTASGGMTRRNTYVCSERTTADRHSVIQNGKENSTIPDQRTPVASTHSISSAATPDRIRFPRGTASRSTFHGQPRERRTATYNGPPASPSLSHEATPLSQTRSRGSTNLFSKLTSKLTRSRNVSAEQKDENKEAKPRSLRFTWSMKTTSSMDPGDMMREIRKVLDANNCDYEQRERFLLFCVHGDGHAENLVQWEMEVCKLPRLSLNGVRFKRISGTSIAFKNIASTIKVFS

SEQ ID NO: 884644 - protein, 161 aa, Homo sapiens
MVLVLVLVVMYWHVRFLFSFPLLSASTFCSLRLPTEYERNGRYEGSSRNVSAEQKDENKEAKPRSLRFTWSMKTTSSMDPGDMMREIRKVLDANNCDYEQRERFLLFCVHGDGHAENLVQWEMEVCKLPRLSLNGVRFKRISGTSIAFKNIASKIANELKL

SEQ ID NO: 884645 - protein, 118 aa, Homo sapiens [sequence omitted]

SEQ ID NO: 884646 - protein, 683 aa, Homo sapiens
MSTRTPLPTVNERDTENHTSHGDGRQEVTSRTSRSGARCRNSIASCADEQPHIGNYRLLKTIGKGNFAKVKLARHILTGREVAIKIIDKTQLNPTSLQKLFREVRIMKILNHPNIVKLFEVIETEKTLYLIMEYASGGEVFDYLVAHGRMKEKEARSKFRQIVSAVQYCHQKRIVHRDLKAENLLLDADMNIKIADFGFSNEFTVGGKLDTFCGSPPYAAPELFQGKKYDGPEVDVWSLGVILYTLVSGSLPFDGQNLKELRERVLRGKYRIPFYMSTDCENLLKRFLVLNPIKRGTLEQIMKDRWINAGHEEDELKPFVEPELDISDQKRIDIMVGMGYSQEEIQESLSKMKYDEITATYLLLGRKSSELDASDSSSSSNLSLAKVRPSSDLNNSTGQSPHHKVQRSVSSSQKQRRYSDHAGPAIPSVVAYPKRSQTSTADSDLKEDGISSRKSSGSAVGGKGIAPASPMLGNASNPNKADIPERKKSSTVPSSNTASGGMTRRNTYVCSERTTADRHSVIQNGKENSTIPDQRTPVASTHSISSAATPDRIRFPRGTASRSTFHGQPRERRTATYNGPPASPSLSHEATPLSQTRSRGSTNLFSKLTSKLTRSRNVSAEQKDENKEAKPRSLRFTWSMKTTSSMDPGDMMREIRKVLDANNCDYEQRERFLLFCCLPSGWV

SEQ ID NO: 884647 - protein, 558 aa, Homo sapiens
MSTRTPLPTVNERDTENHTSHGDGRQEVTSRTSRSGARCRNSIASCADEQPHIGNYRLLKTIGKGNFAKVKLARHILTGREVAIKIIDKTQLNPTSLQKLFREVRIMKILNHPNIVKLFEVIETEKTLYLIMEYASGGEVFDYLVAHGRMKEKEARSKFRQIVSAVQYCHQKRIVHRDLKAENLLLDADMNIKIADFGFSNEFTVGGKLDTFCGSPPYAAPELFQGKKYDGPEVDVWSLGVILYTLVSGSLPFDGQNLKELRERVLRGKYRIPFYMSTDCENLLKRFLVLNPIKRGTLEQIMKDRWINAGHEEDELKPFVEPELDISDQKRIDIMVGMGYSQEEIQESLSKMKYDEITATYLLLGRKSSELDASDSSSSSNLSLAKVRPSSDLNNSTGQSPHHKVQRSVSSSQKQRRYSDHAGPAIPSVVAYPKRSQTSTADSDLKEDGISSRKSSGSAVGGKGIAPASPMLGNASNPNKADIPERKKSSTVPSSNTASGGMTRRNTYVCSERTTADRHSVIQNGKENSTIPDQRTPVASTHSISSATYAPPALLPLP

SEQ ID NO: 884648 - protein, 377 aa, Homo sapiens [sequence omitted]

SEQ ID NO: 884649 - protein, 273 aa, Homo sapiens
MLGQLLPHTARGLGAAEMPGQGPGSDWTERSSSAEPPAVAGTEGGGGGSAGYSCYQNSKGSDRIKDGYKVNSHIAKLQELWKTPQNQTIHLSKSMMEASFFKHPDLTTGQKRYLCSIAKIYNANYLKMLMKRQYMHVLQHSSQKPGVLTHHRSRLSSRYSQKQHYPCTTWRHQLEREDSGSSDIAAASAPEMLIQHSLWRPVRNKEGIKTGYASKTRCKSLKIFRRPRKLFMQTVSSDDSESHMSEEKKEEDLLNNFMQSMSIEEQGEHLMLT

SEQ ID NO: 884650 - protein, 273 aa, Homo sapiens; identical to SEQ ID NO: 884649

SEQ ID NO: 884651 - protein, 256 aa, Homo sapiens [sequence omitted]

SEQ ID NO: 884652 - protein, 377 aa, Homo sapiens
QCDMNEGKKAGKLIDEYTKRVVGEDDKGINTVGCAGKMEESERRGQIQRETPTGSRRVSRLQRTDLTPHAKSQTWGVHETRISKTARNTGIVTHRPRSIDQPVSPALREPTAEYHEGQEIQPTSASQSAGITGVSHHTRPKYQILIIQFVELIFASEIHMMSLPTDRIKDGYKVNSHIAKLQELWKTPQNQTIHLSKSMMEASFFKHPDLTTGQKRYLCSIAKIYNANYLKMLMKRQYMHVLQHSSQKPGVLTHHRSRLSSRYSQKQHYPCTTWRHQLEREDSGSSDIAAASAPEMLIQHSLWRPVRNKEGIKTGYASKTRCKSLKIFRRPRKLFMQTVSSDDSESHMSEEKKEEDLLNNFMQSMSIEEQGEHLMLT

SEQ ID NO: 884653 - protein, 255 aa, Homo sapiens
MLGQLLPHTARGLGAAEMPGQGPGSDWTERSSSAEPPAVAGTEGGGGGSAGYSCYQNSKGSDRIKDGYKVNSHIAKLQELWKTPQNQTIHLSKSMMEASFFKHPDLTTGQKRYLCSIAKIYNANYLKMLMKRQYMHVLQHSSQKPGVLTHHRSRLSSRYSQKQHYPCTTWRHQLEREDSGSSDIAAASAPEMLIQHSLWRPVRNKEGIKTGYASKTRCKSLKIFRRPRKLFMQTVSSDDSESHMSEEKGEHLMLT

SEQ ID NO: 884654 - protein, 185 aa, Homo sapiens
LGDSRVPRMGDHLKHPDLTTGQKRYLCSIAKIYNANYLKMLMKRQYMHVLQHSSQKPGVLTHHRSRLSSRYSQKQHYPCTTWRHQLEREDSGSSDIAAASAPEMLIQHSLWRPVRNKEGIKTGYASKTRCKSLKIFRRPRKLFMQTVSSDDSESHMSEEKKEEDLLNNFMQSMSIEEQGEHLMLT

SEQ ID NO: 884655 - protein, 210 aa, Homo sapiens [sequence omitted]

SEQ ID NO: 884656 - protein, 253 aa, Homo sapiens
MATHRLVMVRHGESTWNQENRFCGWFDAELSEKGTEEAKRGAKAIKDAKMEFDICYTSVLKRAIRTLWAILDGTDQMWLPVVRTWRLNERHYGGLTGLNKAETAAKHGEEQVKIWRRSFDIPPPPMDEKHPYYNSISKERRYAGLKPGELPTCESLKDTIARALPFWNEEIVPQIKAGKRVLIAAHGNSLRGIVKHLEGMSDQAIMELNLPTGIPIVYELNKELKPTKPMQFLGDEETVRKAMEAVAAQGKAK

SEQ ID NO: 884657 - protein, 253 aa, Homo sapiens; identical to SEQ ID NO: 884656

SEQ ID NO: 884658 - protein, 147 aa, Homo sapiens
MATHRLVMVRHGESTWNQENRFCGWFDAELSEKGTEEAKRGAKAIKDAKMEFDICYTSVLKRAIRTLWAILDGTDQMWLPVVRTWRLNERHYGGLTGLNKAETAAKHGEEQVKIWRRSFDIPPPPMDEKHPYYNSISKGCQTRRSWS

SEQ ID NO: 884659 - protein, 288 aa, Homo sapiens
MATHRLVMVRHGESTWNQENRFCGWFDAELSEKGTEEAKRGAKAIKDAKMEFDICYTSVLKRAIRTLWAILDGTDQMWLPVVRTWRLNERHYGGLTGLNKAETAAKHGEEQVKIWRRSFDIPPPPMDEKHPYYNSISKVGCLCWEGLWEAAEWGVGWGPTGLGGKAAVPVSPQERRYAGLKPGELPTCESLKDTIARALPFWNEEIVPQIKAGKRVLIAAHGNSLRGIVKHLEGMSDQAIMELNLPTGIPIVYELNKELKPTKPMQFLGDEETVRKAMEAVAAQGKAK

SEQ ID NO: 884660 - protein, 230 aa, Homo sapiens
MATHRLVMVRHGESTWNQENRFCGWFDAELSEKGTEEAKRGAKAIKDAKMEFDICYTSVLKRAIRTLWAILDGTDQMWLPVVRTWRLNERHYGGLTGLNKAETAAKHGEEQVKIWRRSFDIPPPPMDEKHPYYNSISKERRYAGLKPGELPTCESLKDTIAAHGNSLRGIVKHLEGMSDQAIMELNLPTGIPIVYELNKELKPTKPMQFLGDEETVRKAMEAVAAQGKAK

SEQ ID NO: 884661 - protein, 92 aa, Homo sapiens
IRNEASCALVPPRAVNWLRSPSTPRLDSQEPHLWGYAPTRDHCPQHSDSLFKTWLSAGPSVPTHSCATQPQRQKPMGHCALRGLTREPRAVP

SEQ ID NO: 884662 - protein, 132 aa, Homo sapiens
WQSDGRSTVDSAEDVHSLDSCEYIWEAGVGFAHSPQPNYIHDMNRMELLKLLLTCFSEAMYLPPAPESGSTNPWVQFFCSTENRHALPLFTSLLNTVCAYDPDECVIRNPVSASRSDPVLLISSRRLPKYLP

SEQ ID NO: 884663 - protein, 835 aa, Homo sapiens
AGPTRAGGGARRLSPARAAGAAELEPELKPEPGWSLGGGRAGAGSRDMGSTDSKLNFRKAVIQLTTKTQPVEATDDAFWDQFWADTATSVQDVFALVPAAEIRAVREESPSNLATLCYKAVEKLVQGAESGCHSEKEKQIVLNCSRLLTRVLPYIFEDPDWRGFFWSTVPGAGRGGQGEEDDEHARPLAESLLLAIADLLFCPDFTVQSHRRSTVDSAEDVHSLDSCEYIWEAGVGFAHSPQPNYIHDMNRMELLKLLLTCFSEAMYLPPAPESGSTNPWVQFFCSTENRHALPLFTSLLNTVCAYDPVGYGIPYNHLLFSDYREPLVEEAAQVLIVTLDHDSASSASPTVDGTTTGTAMDDADPPGPENLFVNYLSRIHREEDFQFILKGIARLLSNPLLQTYLPNSTKKIQFHQELLVLFWKLCDFNKKFLFFVLKSSDVLDILVPILFFLNDARADQSRVGLMHIGVFILLLLSGERNFGVRLNKPYSIRVPMDIPVFTGTHADLLIVVFHKIITSGHQRLQPLFDCLLTIVVNVSPYLKSLSMVTANKLLHLLEAFSTTWFLFSAAQNHHLVFFLLEVFNNIIQYQFDGNSNLVYAIIRKRSIFHQLANLPTDPPTIHKALQRRRRTPEPLSRTGSQEGTSMEGSRPAAPAEPGTLKTSLVATPGIDKLTEKSQVSEDGTLRSLEPEPQQSLEDGSPAKGEPSQAWREQRRPSTSSASGQWSPTPEWVLSWKSKLPLQTIMRLLQVLVPQVEKICIDKGLTDESEILRFLQHGTLVGLLPVPHPILIRKYQANSGTAMWFRTYMWGVIYLRNVDPPVWYDTDVKLFEIQRV

SEQ ID NO: 884664 - protein, 900 aa, Homo sapiens
AGPTRAGGGARRLSPARAAGAAELEPELKPEPGWSLGGGRAGAGSRDMGSTDSKLNFRKAVIQLTTKTQPVEATDDAFWDQFWADTATSVQDVFALVPAAEIRAVREESPSNLATLCYKAVEKLVQGAESGCHSEKEKQIVLNCSRLLTRVLPYIFEDPDWRGFFWSTVPGAGRGGQGEEDDEHARPLAESLLLAIADLLFCPDFTVQSHRRSTVDSAEDVHSLDSCEYIWEAGVGFAHSPQPNYIHDMNRMELLKLLLTCFSEAMYLPPAPESGSTNPWVQFFCSTENRHALPLFTSLLNTVCAYDPVGYGIPYNHLLFSDYREPLVEEAAQVLIVTLDHDSASSASPTVDGTTTGTAMDDADPPGPENLFVNYLSRIHREEDFQFILKGIARLLSNPLLQTYLPNSTKKIQFHQELLVLFWKLCDFNKKFLFFVLKSSDVLDILVPILFFLNDARADQCKTRVGVGCWGLSWRRGGGLAICPDSQELRPGTLTSYGGRPPKWSLPGPLLPPPTRVTPPTPPAAARVGLMHIGVFILLLLSGERNFGVRLNKPYSIRVPMDIPVFTGTHADLLIVVFHKIITSGHQRLQPLFDCLLTIVVNVSPYLKSLSMVTANKLLHLLEAFSTTWFLFSAAQNHHLVFFLLEVFNNIIQYQFDGNSNLVYAIIRKRSIFHQLANLPTDPPTIHKALQRRRRTPEPLSRTGSQEGTSMEGSRPAAPAEPGTLKTSLVATPGIDKLTEKSQVSEDGTLRSLEPEPQQSLEDGSPAKGEPSQAWREQRRPSTSSASGQWSPTPEWVLSWKSKLPLQTIMRLLQVLVPQVEKICIDKGLTDESEILRFLQHGTLVGLLPVPHPILIRKYQANSGTAMWFRTYMWGVIYLRNVDPPVWYDTDVKLFEIQRV

SEQ ID NO: 884665 - protein, 825 aa, Homo sapiens
AGPTRAGGGARRLSPARAAGAAELEPELKPEPGWSLGGGRAGAGSRDMGSTDSKLNFRKAVIQLTTKTQPVEATDDAFWDQFWADTATSVQDVFALVPAAEIRAVREESPSNLATLCYKAVEKLVQGAESGCHSEKEKQIVLNCSRLLTRVLPYIFEDPDWRGFFWSTVPGAGRGGQGEEDDEHARPLAESLLLAIADLLFCPDFTVQSHRRSTVDSAEDVHSLDSCEYIWEAGVGFAHSPQPNYIHDMNRMELLKLLLTCFSEAMYLPPAPESGSTNPWVQFFCSTENRHALPLFTSLLNTVCAYDPVGYGIPYNHLLFSDYREPLVEEAAQVLIVTLDHDSASSASPTVDGTTTGTAMDDADPPGPENLFVNYLSRIHREEDFQFILKGIARLLSNPLLQTYLPNSTKKIQFHQELLVLFWKLCDFNKKFLFFVLKSSDVLDILVPILFFLNDARADQSRVGLMHIGVFILLLLSGERNFGVRLNKPYSIRVPMDIPVFTGTHADLLIVVFHKIITSGHQRLQPLFDCLLTIVVNVSPYLKSLSMVTANKLLHLLEAFSTTWFLFSAAQNHHLVFFLLEVFNNIIQYQFDGNSNLVYAIIRKRSIFHQLANLPTDPPTIHKALQRRRRTPEPLSRTGSQEGTSMEGSRPAAPAEPGTLKTSLVATPGIDKLTEKSQVSEDGTLRSLEPEPQQSLEDGSPAKGEPSQAWREQRRPSTSSASGQWSPTPEWVLSWKSKLPLQTIMRLLQVLVPQVEKICIDKGLTDESEILRFLQHGTLVGLLPVPHPILIRKYQANSGTAMWFRTYMWGVIYLRWAPGSGVVST

SEQ ID NO: 884666 - protein, 859 aa, Homo sapiens
AGPTRAGGGARRLSPARAAGAAELEPELKPEPGWSLGGGRAGAGSRDMGSTDSKLNFRKAVIQLTTKTQPVEATDDAFWDQFWADTATSVQDVFALVPAAEIRAVREESPSNLATLCYKAVEKLVQGAESGCHSEKEKQIVLNCSRLLTRVLPYIFEDPDWRGFFWSTVPGAGRGGQGEEDDEHARPLAESLLLAIADLLFCPDFTVQSHRRSTVDSAEDVHSLDSCEYIWEAGVGFAHSPQPNYIHDMNRMELLKLLLTCFSEAMYLPPAPESGSTNPWVQFFCSTENRHALPLFTSLLNTVCAYDPVGYGIPYNHLLFSDYREPLVEEAAQVLIVTLDHDSASSASPTVDGTTTGTAMDDADPPGPENLFVNYLSRIHREEDFQFILKGIARLLSNPLLQTYLPNSTKKIQFHQELLVLFWKLCDFNKKFLFFVLKSSDVLDILVPILFFLNDARADQSRVGLMHIGVFILLLLSGERNFGVRLNKPYSIRVPMDIPVFTGTHADLLIVVFHKIITSGHQRLQPLFDCLLTIVVNVSPYLKSLSMVTANKLLHLLEAFSTTWFLFSAAQNHHLVFFLLEVFNNIIQYQFDGSPPRLDGGSWRGPPEAKACSLPTGNSNLVYAIIRKRSIFHQLANLPTDPPTIHKALQRRRRTPEPLSRTGSQEGTSMEGSRPAAPAEPGTLKTSLVATPGIDKLTEKSQVSEDGTLRSLEPEPQQSLEDGSPAKGEPSQAWREQRRPSTSSASGQWSPTPEWVLSWKSKLPLQTIMRLLQVLVPQVEKICIDKGLTDESEILRFLQHGTLVGLLPVPHPILIRKYQANSGTAMWFRTYMWGVIYLRNVDPPVWYDTDVKLFEIQRV

SEQ ID NO: 884667 - protein, 774 aa, Homo sapiens
AGPTRAGGGARRLSPARAAGAAELEPELKPEPGWSLGGGRAGAGSRDMGSTDSKLNFRKAVIQLTTKTQPVEATDDAFWDQFWADTATSVQDVFALVPAAEIRAVREESPSNLATLCYKAVEKLVQGAESGCHSEKEKQIVLNCSRLLTRVLPYIFEDPDWRGFFWSTVPGAGRGGQGEEDDEHARPLAESLLLAIADLLFCPDFTVQSHRRSTVDSAEDVHSLDSCEYIWEAGVGFAHSPQPNYIHDMNRMELLKLLLTCFSEAMYLPPAPESGSTNPWVQFFCSTENRHALPLFTSLLNTVCAYDPVGYGIPYNHLLFSDYREPLVEEAAQVLIVTLDHDSASSASPTVDGTTTGTAMDDADPPGPENLFVNYLSRIHREEDFQFILKGIARLLSNPLLQTYLPNSTKKIQFHQELLVLFWKLCDFNKKFLFFVLKSSDVLDILVPILFFLNDARADQSRVGLMHIGVFILLLLSGERNFGVRLNKPYSIRVPMDIPVFTGTHADLLIVVFHKIITSGHQRLQPLFDCLLTIVVNVSPYLKSLSMVTANKLLHLLEAFSTTWFLFSAAQNHHLVFFLLEVFNNIIQYQFDGNSNLVYAIIRKRSIFHQLANLPTDPPTIHKALQRRRRTPEPLSRTGSQEGTSMEGSREQRRPSTSSASGQWSPTPEWVLSWKSKLPLQTIMRLLQVLVPQVEKICIDKGLTDESEILRFLQHGTLVGLLPVPHPILIRKYQANSGTAMWFRTYMWGVIYLRNVDPPVWYDTDVKLFEIQRV

SEQ ID NO: 884668 - protein, 728 aa, Homo sapiens
AGPTRAGGGARRLSPARAAGAAELEPELKPEPGWSLGGGRAGAGSRDMGSTDSKLNFRKAVIQLTTKTQQGEEDDEHARPLAESLLLAIADLLFCPDFTVQSHRRSTVDSAEDVHSLDSCEYIWEAGVGFAHSPQPNYIHDMNRMELLKLLLTCFSEAMYLPPAPESGSTNPWVQFFCSTENRHALPLFTSLLNTVCAYDPVGYGIPYNHLLFSDYREPLVEEAAQVLIVTLDHDSASSASPTVDGTTTGTAMDDADPPGPENLFVNYLSRIHREEDFQFILKGIARLLSNPLLQTYLPNSTKKIQFHQELLVLFWKLCDFNKKFLFFVLKSSDVLDILVPILFFLNDARADQSRVGLMHIGVFILLLLSGERNFGVRLNKPYSIRVPMDIPVFTGTHADLLIVVFHKIITSGHQRLQPLFDCLLTIVVNVSPYLKSLSMVTANKLLHLLEAFSTTWFLFSAAQNHHLVFFLLEVFNNIIQYQFDGNSNLVYAIIRKRSIFHQLANLPTDPPTIHKALQRRRRTPEPLSRTGSQEGTSMEGSRPAAPAEPGTLKTSLVATPGIDKLTEKSQVSEDGTLRSLEPEPQQSLEDGSPAKGEPSQAWREQRRPSTSSASGQWSPTPEWVLSWKSKLPLQTIMRLLQVLVPQVEKICIDKGLTDESEILRFLQHGTLVGLLPVPHPILIRKYQANSGTAMWFRTYMWGVIYLRNVDPPVWYDTDVKLFEIQRV

SEQ ID NO: 884669 - protein, 607 aa, Homo sapiens
AGPTRAGGGARRLSPARAAGAAELEPELKPEPGWSLGGGRAGAGSRDMGSTDSKLNFRKAVIQLTTKTQPLLNTVCAYDPVGYGIPYNHLLFSDYREPLVEEAAQVLIVTLDHDSASSASPTVDGTTTGTAMDDADPPGPENLFVNYLSRIHREEDFQFILKGIARLLSNPLLQTYLPNSTKKIQFHQELLVLFWKLCDFNKKFLFFVLKSSDVLDILVPILFFLNDARADQSRVGLMHIGVFILLLLSGERNFGVRLNKPYSIRVPMDIPVFTGTHADLLIVVFHKIITSGHQRLQPLFDCLLTIVVNVSPYLKSLSMVTANKLLHLLEAFSTTWFLFSAAQNHHLVFFLLEVFNNIIQYQFDGNSNLVYAIIRKRSIFHQLANLPTDPPTIHKALQRRRRTPEPLSRTGSQEGTSMEGSRPAAPAEPGTLKTSLVATPGIDKLTEKSQVSEDGTLRSLEPEPQQSLEDGSPAKGEPSQAWREQRRPSTSSASGQWSPTPEWVLSWKSKLPLQTIMRLLQVLVPQVEKICIDKGLTDESEILRFLQHGTLVGLLPVPHPILIRKYQANSGTAMWFRTYMWGVIYLRNVDPPVWYDTDVKLFEIQRV

SEQ ID NO: 884670 - protein, 324 aa, Homo sapiens
SLNGASLSGHQRLQPLFDCLLTIVVNVSPYLKSLSMVTANKLLHLLEAFSTTWFLFSAAQNHHLVFFLLEVFNNIIQYQFDGNSNLVYAIIRKRSIFHQLANLPTDPPTIHKALQRRRRTPEPLSRTGSQEGTSMEGSRPAAPAEPGTLKTSLVATPGIDKLTEKSQVSEDGTLRSLEPEPQQSLEDGSPAKGEPSQAWREQRRPSTSSASGQWSPTPEWVLSWKSKLPLQTIMRLLQVLVPQVEKICIDKGLTDESEILRFLQHGTLVGLLPVPHPILIRKYQANSGTAMWFRTYMWGVIYLRNVDPPVWYDTDVKLFEIQRV

SEQ ID NO: 884671 - protein, 213 aa, Homo sapiens
KIGTIQRRLAWPLRKDDTQIREAVPYFSPAAPAEPGTLKTSLVATPGIDKLTEKSQVSEDGTLRSLEPEPQQSLEDGSPAKGEPSQAWREQRRPSTSSASGQWSPTPEWVLSWKSKLPLQTIMRLLQVLVPQVEKICIDKGLTDESEILRFLQHGTLVGLLPVPHPILIRKYQANSGTAMWFRTYMWGVIYLRNVDPPVWYDTDVKLFEIQRV

SEQ ID NO: 884672 - protein, 835 aa, Homo sapiens; identical to SEQ ID NO: 884663

SEQ ID NO: 884673 - protein, 190 aa, Homo sapiens [sequence omitted]

SEQ ID NO: 884674 - protein, 835 aa, Homo sapiens; identical to SEQ ID NO: 884663

SEQ ID NO: 884675 - protein, 447 aa, Homo sapiens
AGPTRAGGGARRLSPARAAGAAELEPELKPEPGWSLGGGRAGAGSRDMGSTDSKLNFRKAVIQLTTKTQPVEATDDAFWDQFWADTATSVQDVFALVPAAEIRAVREESPSNLATLCYKAVEKLVQGAESGCHSEKEKQIVLNCSRLLTRVLPYIFEDPDWRGFFWSTVPGAGRGGQGEEDDEHARPLAESLLLAIADLLFCPDFTVQSHRRSTVDSAEDVHSLDSCEYIWEAGVGFAHSPQPNYIHDMNRMELLKLLLTCFSEAMYLPPAPESGSTNPWVQFFCSTENRHALPLFTSLLNTVCAYDPVGYGIPYNHLLFSDYREPLVEEAAQVLIVTLDHDSASSASPTVDGTTTGTAMDDADPPGPENLFVNYLSRIHREEDFQFILKGIARLLSNPLLQTYLPNSTKKIQFHQELLVLFWKLCDFNKVGQPRGALQGDGEQLPQ

SEQ ID NO: 884676 - protein, 1115 aa, Homo sapiens
MNFEGLDPGLAEYAPAMHSALDPVLDAHLNPSLLQNVELDPEGVALEALPVQESVHIMEGVYSELHSVVAEVGVPVSVSHFDLHEEMLWVGSHGGHATSFFGPALERYSSFQVNGSDDIRQIQSLENGILFLTKNNLKYMARGGLIIFDYLLDENEDMHSLLLTDSSTLLVGGLQNHILEIDLNTVQETQKYAVETPGVTIMRQTNRFFFCGHTSGKVSLRDLRTFKVEHEFDAFSGSLSDFDVHGNLLAACGFSSRLTGLACDRFLKVYDLRMMRAITPLQVHVDPAFLRFIPTYTSRLAIISQSGQCQFCEPTGLANPADIFHVNPVGPLLMTFDVSASKQALAFGDSEGCVHLWTDSPEPSFNPYSRETEFALPCLVDSLPPLDWSQDLLPLSLIPVPLTTDTLLSDWPAANSAPAPRRAPPVDAEILRTMKKVGFIGYAPNPRTRLRNQIPYRLKESDSEFDSFSQVTESPVGREEEPHLHMVSKKYRKVTIKYSKLGLEDFDFKHYNKTLFAGLEPHIPNAYCNCMIQVLYFLEPVRCLIQNHLCQKEFCLACELGFLFHMLDLSRGDPCQGNNFLRAFRTIPEASALGLILADSDEASGKGNLARLIQRWNRFILTQLHQDMQELEIPQAYRGAGGSSFCSSGDSVIGQLFSCEMENCSLCRCGSETVRASSTLLFTLSYPDGSKDKTGKNYDFAQVLKRSICLDQNTQAWCDTCEKYQPTIQTRNIRHLPDILVINCEVNSSKEADFWRMQAEVAFKMAVKKHGGEISKNKEFALADWKELGSPEGVLVCPSIEELKNVWLPFSIRMKMTKNKGLDVCNWTDGDEMQWGPARAEEEHGVYVYDLMATVVHILDSRTGGSLVAHIKVGETYHQRKEGVTHQQWYLFNDFLIEPIDKHEAVQFDMNWKVPAILYYVKRNLNSRYNLNIKNPIEASVLLAEASLARKQRKTHTTFIPLMLNEMPQIGDLVGLDAEFVTLNEEEAELRSDGTKSTIKPSQMSVARITCVRGQGPNEGIPFIDDYISTQEQVVDYLTQYSGIKPGDLDAKISSKHLTTLKSTYLKLRFLIDIGVKFVGHGLQKDFRVINLMVWQGSFKSLLVRVGPSGYTLCL

SEQ ID NO: 884677 - protein, 1243 aa, Homo sapiens
MNFEGLDPGLAEYAPAMHSALDPVLDAHLNPSLLQNVELDPEGVALEALPVQESVHIMEGVYSELHSVVAEVGVPVSVSHFDLHEEMLWVGSHGGHATSFFGPALERYSSFQVNGSDDIRQIQSLENGILFLTKNNLKYMARGGLIIFDYLLDENEDMHSLLLTDSSTLLVGGLQNHILEIDLNTVQETQKYAVETPGVTIMRQTNRFFFCGHTSGKVSLRDLRTFKVEHEFDAFSGSLSDFDVHGNLLAACGFSSRLTGLACDRFLKVYDLRMMRAITPLQVHVDPAFLRFIPTYTSRLAIISQSGQCQFCEPTGLANPADIFHVNPVGPLLMTFDVSASKQALAFGDSEGCVHLWTDSPEPSFNPYSRETEFALPCLVDSLPPLDWSQDLLPLSLIPVPLTTDTLLSDWPAANSAPAPRRAPPVDAEILRTMKKVGFIGYAPNPRTRLRNQIPYRLKESDSEFDSFSQVTESPVGREEEPHLHMVSKKYRKVTIKYSKLGLEDFDFKHYNKTLFAGLEPHIPNAYCNCMIQVLYFLEPVRCLIQNHLCQKEFCLACELGFLFHMLDLSRGDPCQGNNFLRAFRTIPEASALGLILADSDEASGKGNLARLIQRWNRFILTQLHQDMQELEIPQAYRGAGGSSFCSSGDSVIGQLFSCEMENCSLCRCGSETVRASSTLLFTLSYPDGSKEWYTLQLSWEGSPKCPVISGRGCWGLTVGRGENQEYSINFPSDKTGKNYDFAQVLKRSICLDQNTQAWCDTCEKYQPTIQTRNIRHLPDILVINCEVNSSKEADFWRMQAEVAFKMAVKKHGGEISKNKEFALADWKELGSPEGVLVCPSIEELKNVWLPFSIRMKMTKNKGLDVCNWTDGDEMQWGPARAEEEHGVYVYDLMATVVHILDSRTGGSLVAHIKVGETYHQRKEGVTHQQWYLFNDFLIEPIDKHEAVQFDMNWKVPAILYYVKRNLNSRYNLNIKNPIEASVLLAEASLARKQRKTHTTFIPLMLNEMPQIGDLVGLDAEFVTLNEEEAELRSDGTKSTIKPSQMSVARITCVRGQGPNEGIPFIDDYISTQEQVVDYLTQYSGIKPGDLDAKISSKHLTTLKSTYLKLRFLIDIGVKFVGHGLQKDFRVINLMVPKDQVLDTVYLFHMPRKRMISLRFLAWYFLDLKIQGETHDSIEDARTALQLYRKYLELSKNGTEPESFHKVLKGLYEKGRKMDWKVPEPEGQTSPKNAAVFSSVLAL

SEQ ID NO: 884678 - protein, 1201 aa, Homo sapiens
MNFEGLDPGLAEYAPAMHSALDPVLDAHLNPSLLQNVELDPEGVALEALPVQESVHIMEGVYSELHSVVAEVGVPVSVSHFDLHEEMLWVGSHGGHATSFFGPALERYSSFQVNGSDDIRQIQSLENGILFLTKNNLKYMARGGLIIFDYLLDENEDMHSLLLTDSSTLLVGGLQNHILEIDLNTVQETQKYAVETPGVTIMRQTNRFFFCGHTSGKVSLRDLRTFKVEHEFDAFSGSLSDFDVHGNLLAACGFSSRLTGLACDRFLKVYDLRMMRAITPLQVHVDPAFLRFIPTYTSRLAIISQSGQCQFCEPTGLANPADIFHVNPVGPLLMTFDVSASKQALAFGDSEGCVHLWTDSPEPSFNPYSRETEFALPCLVDSLPPLDWSQDLLPLSLIPVPLTTDTLLSDWPAANSAPAPRRAPPVDAEILRTMKKVGFIGYAPNPRTRLRNQIPYRLKESDSEFDSFSQVTESPVGREEEPHLHMVSKKYRKVTIKYSKLGLEDFDFKHYNKTLFAGLEPHIPNAYCNCMIQVLYFLEPVRCLIQNHLCQKEFCLACELGFLFHMLDLSRGDPCQGNNFLRAFRTIPEASALGLILADSDEASGKGNLARLIQRWNRFILTQLHQDMQELEIPQAYRGAGGSSFCSSGDSVIGQLFSCEMENCSLCRCGSETVRASSTLLFTLSYPDGSKDKTGKNYDFAQVLKRSICLDQNTQAWCDTCEKYQPTIQTRNIRHLPDILVINCEVNSSKEADFWRMQAEVAFKMAVKKHGGEISKNKEFALADWKELGSPEGVLVCPSIEELKNVWLPFSIRMKMTKNKGLDVCNWTDGDEMQWGPARAEEEHGVYVYDLMATVVHILDSRTGGSLVAHIKVGETYHQRKEGVTHQQWYLFNDFLIEPIDKHEAVQFDMNWKVPAILYYVKRNLNSRYNLNIKNPIEASVLLAEASLARKQRKTHTTFIPLMLNEMPQIGDLVGLDAEFVTLNEEEAELRSDGTKSTIKPSQMSVARITCVRGQGPNEGIPFIDDYISTQEQVVDYLTQYSGIKPGDLDAKISSKHLTTLKSTYLKLRFLIDIGVKFVGHGLQKDFRVINLMVPKDQVLDTVYLFHMPRKRMISLRFLAWYFLDLKIQGETHDSIEDARTALQLYRKYLELSKNGTEPESFHKVLKGLYEKGRKMDWKVPEPEGQTSPKNAAVFSSVLAL

SEQ ID NO: 884679 - protein, 732 aa, Homo sapiens
GRAGSTHASGGTSISTWFLIKYRKVTIKYSKLGLEDFDFKHYNKTLFAGLEPHIPNAYCNCMIQVLYFLEPVRCLIQNHLCQKEFCLACELGFLFHMLDLSRGDPCQGNNFLRAFRTIPEASALGLILADSDEASGKGNLARLIQRWNRFILTQLHQDMQELEIPQAYRGAGGSSFCSSGDSVIGQLFSCEMENCSLCRCGSETVRASSTLLFTLSYPDGSKDKTGKNYDFAQVLKRSICLDQNTQAWCDTCEKYQPTIQTRNIRHLPDILVINCEVNSSKEADFWRMQAEVAFKMAVKKHGGEISKNKEFALADWKELGSPEGVLVCPSIEELKNVWLPFSIRMKMTKNKGLDVCNWTDGDEMQWGPARAEEEHGVYVYDLMATVVHILDSRTGGSLVAHIKVGETYHQRKEGVTHQQWYLFNDFLIEPIDKHEAVQFDMNWKVPAILYYVKRNLNSRYNLNIKNPIEASVLLAEASLARKQRKTHTTFIPLMLNEMPQIGDLVGLDAEFVTLNEEEAELRSDGTKSTIKPSQMSVARITCVRGQGPNEGIPFIDDYISTQEQVVDYLTQYSGIKPGDLDAKISSKHLTTLKSTYLKLRFLIDIGVKFVGHGLQKDFRVINLMVPKDQVLDTVYLFHMPRKRMISLRFLAWYFLDLKIQGETHDSIEDARTALQLYRKYLELSKNGTEPESFHKVLKGLYEKGRKMDWKVPEPEGQTSPKNAAVFSSVLAL

SEQ ID NO: 884680 - protein, 1183 aa, Homo sapiens
MNFEGLDPGLAEYAPAMHSALDPVLDAHLNPSLLQNVELDPEGVALEALPVQESVHIMEGVYSELHSVVAEVGVPVSVSHFDLHEEMLWVGSHGGHATSFFGPALERYSSFQVNGSDDIRQIQSLENGILFLTKNNLKYMARGGLIIFDYLLDENEDMHSLLLTDSSTLLVGGLQNHILEIDLNTVQETQKYAVETPGVTIMRQTNRFFFCGHTSGKVSLRDLRTFKVEHEFDAFSGSLSDFDVHGNLLAACGFSSRLTGLACDRFLKVYDLRMMRAITPLQVHVDPAFLRFIPTYTSRLAIISQSGQCQFCEPTGLANPADIFHVNPVGPLLMTFDVSASKQALAFGDSEGCVHLWTDSPEPSFNPYSRETEFALPCLVDSLPPLDWSQDLLPLSLIPVPLTTDTLLSDWPAANSAPAPRRAPPVDAEILRTMKKVGFIGYAPNPRTRLRNQIPYRLKESDSEFDSFSQVTESPVGREEEPHLHMVSKKYRKVTIKYSKLGLEDFDFKHYNKTLFAGLEPHIPNAYCNCMIQVLYFLEPVRCLIQNHLCQKEFCLACELGFLFHMLDLSRGDPCQGNNFLRAFRTIPEASALGLILADSDEASGKGNLARLIQRWNRFILTQLHQDMQELEIPQAYRGAGGSSFCSSGDSVIGQLFSCEMENCSLCRCGSETVRASSTLLFTLSYPDGSKDKTGKNYDFAQVLKRSICLDQNTQAWCDTCEKYQPTIQTRNIRHLPDILVINCEVNSSKEADFWRMQAEVAFKMAVKKHGGEISKNKEFALADWKELGSPEGVLVCPSIEELKNVWLPFSIRMKMTKNKGLDVCNWTDGDEMQWGPARAEEEHGVYVYDLMATVVHILDSRTGGSLVAHIKVGETYHQRKEGVTHQQWYLFNDFLIEPIDKHEAVQFDMNWKVPAILYYVKRNLNSRYNLNIKNPIEASVLLAEASLARKQRDLVGLDAEFVTLNEEEAELRSDGTKSTIKPSQMSVARITCVRGQGPNEGIPFIDDYISTQEQVVDYLTQYSGIKPGDLDAKISSKHLTTLKSTYLKLRFLIDIGVKFVGHGLQKDFRVINLMVPKDQVLDTVYLFHMPRKRMISLRFLAWYFLDLKIQGETHDSIEDARTALQLYRKYLELSKNGTEPESFHKVLKGLYEKGRKMDWKVPEPEGQTSPKNAAVFSSVLAL

SEQ ID NO: 884681 - protein, 1117 aa, Homo sapiens
MNFEGLDPGLAEYAPAMHSALDPVLDAHLNPSLLQNVELDPEGVALEALPVQESVHIMEGVYSELHSVVAEVGVPVSVSHFDLHEEMLWVGSHGGHATSFFGPALERYSSFQVNGSDDIRQIQSLENGILFLTKNNLKYMARGGLIIFDYLLDENEDMHSLLLTDSSTLLVGGLQNHILEIDLNTVQETQKYAVETPGVTIMRQTNRFFFCGHTSGKVSLRDLRTFKVEHEFDAFSGSLSDFDVHGNLLAACGFSSRLTGLACDRFLKVYDLRMMRAITPLQVHVDPAFLRFIPTYTSRLAIISQSGQCQFCEPTGLANPADIFHVNPVGPLLMTFDVSASKQALAFGDSEGCVHLWTDSPEPSFNPYSRETEFALPCLVDSLPPLDWSQDLLPLSLIPVPLTTDTLLSDWPAANSAPAPRRAPPVDAEILRTMKKVGFIGYAPNPRTRLRNQIPYRLKESDSEFDSFSQVTESPVGREEEPHLHMVSKKYRKVTIKYSKLGLEDFDFKHYNKTLFAGLEPHIPNAYCNCMIQVLYFLEPVRCLIQNHLCQKEFCLACELGFLFHMLDLSRGDPCQGNNFLRAFRTIPEASALGLILADSDEASGKGNLARLIQRWNRFILTQLHQDMQELEIPQAYRGAGGSSFCSSGDSVIGQLFSCEMENCSLCRCGSETVRASSTLLFTLSYPDGSKDKTGKNYDFAQVLKRSICLDQNTQAWCDTCEKYQPTIQTRNIRHLPDILVINCEVNSSKEADFWRMQAEVAFKMAVKKHGGEISKNKEFALADWKELGSPEGVLVCPSIEELKNVWLPFSIRMKMTKNKGLDVCNWTDGDEMQWGPARAEEEHGVYVYDLMATVVHILDSRTGGSLVAHIKVGETYHQRKEGVTHQQWYLFNDFLIEPIDKHEAVQFDMNWKVPAILYYVKRNLNSRYNLNIKNPIEASVLLAEASLARKQRKTHTTFIPLMLNEMPQIGDLVGLDAEFVTLNEEEAELRSDGTKSTIKPSQMSVARITCVRGQGPNEGIPFIDDYISTQEQVVDYLTQYSGIKPGDLDAKISSKHLTTLKSTYLKLRFLIDIGVKFVGHGLQKDFRVINLMVPKDQVLDTVYLFHMPPEDSRGNP

SEQ ID NO: 884682 - protein, 1183 aa, Homo sapiens
MNFEGLDPGLAEYAPAMHSALDPVLDAHLNPSLLQNVELDPEGVALEALPVQESVHIMEGVYSELHSVVAEVGVPVSVSHFDLHEEMLWVGSHGGHATSFFGPALERYSSFQVNGSDDIRQIQSLENGILFLTKNNLKYMARGGLIIFDYLLDENEDMHSLLLTDSSTLLVGGLQNHILEIDLNTVQETQKYAVETPGVTIMRQTNRFFFCGHTSGKVSLRDLRTFKVEHEFDAFSGSLSDFDVHGNLLAACGFSSRLTGLACDRFLKVYDLRMMRAITPLQVHVDPAFLRFIPTYTSRLAIISQSGQCQFCEPTGLANPADIFHVNPVGPLLMTFDVSASKQALAFGDSEGCVHLWTDSPEPSFNPYSRETEFALPCLVDSLPPLDWSQDLLPLSLIPVPLTTDTLLSDWPAANSAPAPRRAPPVDAEILRTMKKVGFIGYAPNPRTRLRNQIPYRLKESDSEFDSFSQVTESPVGREEEPHLHMVSKKYRKVTIKYSKLGLEDFDFKHYNKTLFAGLEPHIPNAYCNCMIQVLYFLEPVRCLIQNHLCQKEFCLACELGFLFHMLDLSRGDPCQGNNFLRAFRTIPEASALGLILADSDEASGKGNLARLIQRWNRFILTQLHQDMQELEIPQAYRGAGGSSFCSSGDSVIGQLFSCEMENCSLCRCGSETVRASSTLLFTLSYPDGSKDKTGKNYDFAQVLKRSICLDQNTQAWCDTCEKYQPTIQTRNIRHLPDILVINCEVNSSKEADFWRMQAEVAFKMAVKKHGGEISKNKEFALADWKELGSPEGVLVCPSIEELKNVWLPFSIRMKMTKNKGLDVCNWTDGDEMQWGPARAEEEHGVYVYDLMATVVHILDSRTGGSLVAHIKVGETYHQRKEGVTHQQWYLFNDFLIEPIDKHEAVQFDMNWKVPAILYYVKRNLNSRYNLNIKNPIEASVLLAEASLARKQRKTHTTFIPLMLNEMPQIGDLVGLDAEFVTLNEEEAELRSDGTKSTIKPSQMSVARITCVRGQGPNEGIPFIDDYISTQEQVVDYLTQYSGIKPGDLDAKISSKHLTTLKSTYLKLRFLIDIGVKFVGHGLQKDFRVINLMVPKDQVLDTVYLFHMPRKRMISLRFLAWYFLDLKIQGETHDSIEDARTALQLYRKYLELSKGRKMDWKVPEPEGQTSPKNAAVFSSVLAL

SEQ ID NO: 884683 - protein, 144 aa, Homo sapiens
DEDAVFAARALRNQEEAELRSDGTKSTIKPSQMSVARITCVRGQGPNEGIPFIDDYISTQEQVVDYLTQYSGIKPGDLDAKISSKHLTTLKSTYLKLRFLIDIGVKFVGHGLQKDFRVINLMVWQGSFKSLLVRVGPSGYTLCL

SEQ ID NO: 884684 - protein, 1201 aa, Homo sapiens; identical to SEQ ID NO: 884678

SEQ ID NO: 884685 - protein, 1150 aa, Homo sapiens
MNFEGLDPGLAEYAPAMHSALDPVLDAHLNPSLLQNVELDPEGVALEALPVQESVHIMEGVYSELHSVVAEVGVPVSVSHFDLHEEMLWVGSHGGHATSFFGPALERYSSFQVNGSDDIRQIQSLENGILFLTKNNLKYMARGGLIIFDYLLDENEDMHSLLLTDSSTLLVGGLQNHILEIDLNTVQETQKYAVETPGVTIMRQTNRFFFCGHTSGKVSLRDLRTFKVEHEFDAFSGSLSDFDVHGNLLAACGFSSRLTGLACDRFLKVYDLRMMRAITPLQVHVDPAFLRFIPTYTSRLAIISQSGQCQFCEPTGLANPADIFHVNPVGPLLMTFDVSASKQALAFGDSEGCVHLWTDSPEPSFNPYSRETEFALPCLVDSLPPLDWSQDLLPLSLIPVPLTTDTLLSDWPAANSAPAPRRAPPVDAEILRTMKKVGFIGYAPNPRTRLRNQIPYRLKESDSEFDSFSQVTESPVGREEEPHLHMVSKKYRKVTIKYSKLGLEDFDFKHYNKTLFAGLEPHIPNAYCNCMIQVLYFLEPVRCLIQNHLCQKEFCLACELGFLFHMLDLSRGDPCQGNNFLRAFRTIPEASALGLILADSDEASGKGNLARLIQRWNRFILTQLHQDMQELEIPQAYRGAGGSSFCSSGDSVIGQLFSCEMENCSLCRCGSETVRASSTLLFTLSYPDGSKDKTGKNYDFAQVLKRSICLDQNTQAWCDTCEKYQPTIQTRNIRHLPDILVINCEVNSSKEADFWRMQAEVAFKMAVKKHGGEISKNKEFALADWKELGSPEGVLVCPSIEELKNVWLPFSIRMKMTKNKGLDVCNWTDGDEMQWGPARAEEEHGVYVYDLMATVVHILDSRTGGSLVAHIKVGETYHQRKEGVTHQQWYLFNDFLIEPIDKHEAVQFDMNWKVPAILYYVKRNLNSRYNLNIKNPIEASVLLAEASLARKQRKTHTTFIPLMLNEMPQIGDLVGLDAEFVTLNEEEAELRSDGTKSTIKPSQMSVARITCVRGQGPNEGIPFIDDYISTQEQVVDYLTQYSGIKPGDLDAKISSKHLTTLKSTYLKLRFLIDIGVKFVGHGLQKDFRVINLMAQCTKPDTDYPFHMPRRRLITVRLLASYFLDLEIQRGTHDRIGDARTDLNLTQCIGL

SEQ ID NO: 884686 - protein, 842 aa, Homo sapiens
MNFEGLDPGLAEYAPAMHSALDPVLDAHLNPSLLQNVELDPEGVALEALPVQESVHIMEGVYSELHSVVAEVGVPVSVSHFDLHEEMLWVGSHGGHATSFFGPALERYSSFQVNGSDDIRQIQSLENGILFLTKNNLKYMARGGLIIFDYLLDENEDMHSLLLTDSSTLLVGGLQNHILEIDLNTVQETQKYAVETPGVTIMRQTNRFFFCGHTSGKVSLRDLRTFKVEHEFDAFSGSLSDFDVHGNLLAACGFSSRLTGLACDRFLKVYDLRMMRAITPLQVHVDPAFLRFIPTYTSRLAIISQSGQCQFCEPTGLANPADIFHVNPVGPLLMTFDVSASKQALAFGDSEGCVHLWTDSPEPSFNPYSRETEFALPCLVDSLPPLDWSQDLLPLSLIPVPLTTDTLLSDWPAANSAPAPRRAPPVDAEILRTMKKVGFIGYAPNPRTRLRNQIPYRLKESDSEFDSFSQVTESPVGREEEPHLHMVSKKYRKVTIKYSKLGLEDFDFKHYNKTLFAGLEPHIPNAYCNCMIQVLYFLEPVRCLIQNHLCQKEFCLACELGFLFHMLDLSRGDPCQGNNFLRAFRTIPEASALGLILADSDEASGKGNLARLIQRWNRFILTQLHQDMQELEIPQAYRGAGGSSFCSSGDSVIGQLFSCEMENCSLCRCGSETVRASSTLLFTLSYPDGSKDKTGKNYDFAQVLKRSICLDQNTQAWCDTCEKYQPTIQTRNIRHLPDILVINCEVNSSKEADFWRMQAEVAFKMAVKKHGGEISKNKEFALADWKELGSPEGVLVCPSIEELKNVWLPFSIRMKMTKNKGLDVCNWTDGDEMQRFGILKIT

SEQ ID NO: 884687 - protein, 94 aa, Homo sapiens
RIFVPSGFSGGGSVTEDTTVVQDLAQVTNCFRDTWRGQQVECWWPKQTSVANTIAKRAFGSWTKLGCRLHLFLLMAEKHLSSIPLACPKFCSIF

SEQ ID NO: 884688 - protein, 1201 aa, Homo sapiens; identical to SEQ ID NO: 884678

SEQ ID NO: 884689 - protein, 1062 aa, Homo sapiens
MARGGLIIFDYLLDENEDMHSLLLTDSSTLLVGGLQNHILEIDLNTVQETQKYAVETPGVTIMRQTNRFFFCGHTSGKVSLRDLRTFKVEHEFDAFSGSLSDFDVHGNLLAACGFSSRLTGLACDRFLKVYDLRMMRAITPLQVHVDPAFLRFIPTYTSRLAIISQSGQCQFCEPTGLANPADIFHVNPVGPLLMTFDVSASKQALAFGDSEGCVHLWTDSPEPSFNPYSRETEFALPCLVDSLPPLDWSQDLLPLSLIPVPLTTDTLLSDWPAANSAPAPRRAPPVDAEILRTMKKVGFIGYAPNPRTRLRNQIPYRLKESDSEFDSFSQVTESPVGREEEPHLHMVSKKYRKVTIKYSKLGLEDFDFKHYNKTLFAGLEPHIPNAYCNCMIQVLYFLEPVRCLIQNHLCQKEFCLACELGFLFHMLDLSRGDPCQGNNFLRAFRTIPEASALGLILADSDEASGKGNLARLIQRWNRFILTQLHQDMQELEIPQAYRGAGGSSFCSSGDSVIGQLFSCEMENCSLCRCGSETVRASSTLLFTLSYPDGSKDKTGKNYDFAQVLKRSICLDQNTQAWCDTCEKYQPTIQTRNIRHLPDILVINCEVNSSKEADFWRMQAEVAFKMAVKKHGGEISKNKEFALADWKELGSPEGVLVCPSIEELKNVWLPFSIRMKMTKNKGLDVCNWTDGDEMQWGPARAEEEHGVYVYDLMATVVHILDSRTGGSLVAHIKVGETYHQRKEGVTHQQWYLFNDFLIEPIDKHEAVQFDMNWKVPAILYYVKRNLNSRYNLNIKNPIEASVLLAEASLARKQRKTHTTFIPLMLNEMPQIGDLVGLDAEFVTLNEEEAELRSDGTKSTIKPSQMSVARITCVRGQGPNEGIPFIDDYISTQEQVVDYLTQYSGIKPGDLDAKISSKHLTTLKSTYLKLRFLIDIGVKFVGHGLQKDFRVINLMVPKDQVLDTVYLFHMPRKRMISLRFLAWYFLDLKIQGETHDSIEDARTALQLYRKYLELSKNGTEPESFHKVLKGLYEKGRKMDWKVPEPEGQTSPKNAAVFSSVLAL

SEQ ID NO: 884690 - protein, 1330 aa, Homo sapiens
MNFEGLDPGLAEYAPAMHSALDPVLDAHLNPSLLQNVELDPEGVALEALPVQESVHIMEGVYSELHSVVAEVGVPVSVSHFDLHEEMLWVGSHGGHATSFFGPALERYSSFQVNGSDDIRQIQSLENGILFLTKNNLKYMARGGLIIFDYLLDENEDMHSLLLTDSSTLLVGGLQNHILEIDLNTVQETQKYAVETPGVTIMRQTNRFFFCGHTSGKVSLRDLRTFKVEHEFDAFSGSLSDFDVHGNLLAACGFSSRLTGLACDRFLKVYDLRMMRAITPLQVHVDPAFLRFIPTYTSRLAIISQSGQCQFCEPTGLANPADIFHVNPVGPLLMTFDVSASKQALAFGDSEGCVHLWTDSPEPSFNPYSRETEFALPCLVDSLPPLDWSQDLLPLSLIPVPLTTDTLLSDWPAANSAPAPRRAPPVDAEILRTMKKVGFIGYAPNPRTRLRNQIPYRLKESDSEFDSFSQVTESPVGREEEPHLHMVSKKYRKVTIKYSKLGLEDFDFKHYNKTLFAGLEPHIPNAYCNCMIQVLYFLEPVRCLIQNHLCQKEFCLACELGFLFHMLDLSRGDPCQGNNFLRAFRTIPEASALGLILADSDEASGKGNLARLIQRWNRFILTQLHQDMQELEIPQAYRGAGGSSFCSSGDSVIGQLFSCEMENCSLCRCGSETVRASSTLLFTLSYPDGSKDKTGKNYDFAQVLKRSICLDQNTQAWCDTCEKYQPTIQTRNIRHLPDILVINCEVNSSKEADFWRMQAEVAFKMAVKKHGGEISKNKEFALADWKELGSPEGVLVCPSIEELKNVWLPFSIRMKMTKNKGLDVCNWTDGDEMQWGPARAEEEHGVYVYDLMATVVHILDSRTGGSLVAHIKVGETYHQRKEVSEVVEGRNTPGMATVSPRSVLESETEWSSHQFVSPQAFFVFPWALLTSSGICSMTFLLNLLIRLVATCSVSSFISPFPSILIFEGSIECQADSTGREEGILRNKNHEHLKIAPEKKQKLAPESWPPSEVGEKEKGDIHYAISAFSLLQHEAVQFDMNWKVPAILYYVKRNLNSRYNLNIKNPIEASVLLAEASLARKQRKTHTTFIPLMLNEMPQIGDLVGLDAEFVTLNEEEAELRSDGTKSTIKPSQMSVARITCVRGQGPNEGIPFIDDYISTQEQVVDYLTQYSGIKPGDLDAKISSKHLTTLKSTYLKLRFLIDIGVKFVGHGLQKDFRVINLMVPKDQVLDTVYLFHMPRKRMISLRFLAWYFLDLKIQGETHDSIEDARTALQLYRKYLELSKNGTEPESFHKVLKGLYEKGRKMDWKVPEPEGQTSPKNAAVFSSVLAL

SEQ ID NO: 884691 - protein, 1094 aa, Homo sapiens
MNFEGLDPGLAEYAPAMHSALDPVLDAHLNPSLLQNVELDPEGVALEALPVQESVHIMEGVYSELHSVVAEVGVPVSVSHFDLHEEMLWVGSHGGHATSFFGPALERYSSFQVNGSDDIRQIQSLENGILFLTKNNLKYMARGGLIIFDYLLDENEDMHSLLLTDSSTLLVGGLQNHILEIDLNTVQETQKYAVETPGVTIMRQTNRFFFCGHTSGKVSLRDLRTFKVEHEFDAFSGSLSDFDVHGNLLAACGFSSRLTGLACDRFLKVYDLRMMRAITPLQVHVDPAFLRFIPTYTSRLAIISQSGQCQFCEPTGLANPADIFHVNPVGPLLMTFDVSASKQALAFGDSEGCVHLWTDSPEPSFNPYSRETEFALPCLVDSLPPLDWSQDLLPLSLIPVPLTTDTLLSDWPAANSAPAPRRAPPVDAEILRTMKKVGFIGYAPNPRTRLRNQIPYRLKESDSEFDSFSQVTESPVGREEEPHLHMVSKKYRKVTIKYSKLGLEDFDFKHYNKTLFAGLEPHIPNAYCNCMIQVLYFLEPVRCLIQNHLCQKEFCLACELGFLFHMLDLSRGDPCQGNNFLRAFRTIPEASALGLILADSDEASGKGNLARLIQRWNRFILTQLHQDMQELEIPQAYRGAGGSSFCSSGDSVIGQLFSCEMENCSLCRCGSETVRASSTLLFTLSYPDGSKDKTGKNYDFAQVLKRSICLDQNTQAWCDTCEKYQPTIQTRNIRHLPDILVINCEVNSSKEADFWRMQAEVAFKMAVKKHGGEISKNKEFALADWKELGSPEGVLVCPSIEELKNVWLPFSIRMKMTKNKGLDVCNWTDGDEMQWGPARAEEEHGVYVYDLMATVVHILDSRTGGSLVAHIKVGETYHQRKEGVTHQQWYLFNDFLIEPIDKHEAVQFDMNWKVPAILYYVKRNLNSRYNLNIKNPIEASVLLAEASLARKQRKTHTTFIPLMLNEMPQIGDLVGLDAEFVTLNEEEAELRSDGTKSTIKPSQMSVARITCVRGQGPNEGIPFIDDYISTQEQVVDYLTQYSGIKPGDLDAKISSKHLTTLKSTYLKLRFLIDIGVKFVGHGLQKDFRVINLMT

SEQ ID NO: 884692 - protein, 1115 aa, Homo sapiens; identical to SEQ ID NO: 884676

SEQ ID NO: 884693 - protein, 66 aa, Homo sapiens
GAILDSGQFWTLMFADRYYPSQRTTALSLYCSIAPELGDGFLSWLYLVHFQYWTCSGSRVTDGAIN

SEQ ID NO: 884694 - protein, 1220 aa, Homo sapiens
MNFEGLDPGLAEYAPAMHSALDPVLDAHLNPSLLQNVELDPEGVALEALPVQESVHIMEGVYSELHSVVAEVGVPVSVSHFDLHEEMLWVGSHGGHATSFFGPALERYSSFQVNGSDDIRQIQSLENGILFLTKNNLKYMARGGLIIFDYLLDENEDMHSLLLTDSSTLLVGGLQNHILEIDLNTVQETQKYAVETPGVTIMRQTNRFFFCGHTSGKVSLRDLRTFKVEHEFDAFSGSLSDFDVHGNLLAACGFSSRLTGLACDRFLKVYDLRMMRAITPLQVHVDPAFLRFIPTYTSRLAIISQSGQCQFCEPTGLANPADIFHVNPVGPLLMTFDVSASKQALAFGDSEGCVHLWTDSPEPSFNPYSRETEFALPCLVDSLPPLDWSQDLLPLSLIPVPLTTDTLLSDWPAANSAPAPRRAPPVDAEILRTMKKVGFIGYAPNPRTRLRNQIPYRLKESDSEFDSFSQVTESPVGREEEPHLHMVSKKYRKVTIKYSKLGLEDFDFKHYNKTLFAGLEPHIPNAYCNCMIQVLYFLEPVRCLIQNHLCQKEFCLACELGFLFHMLDLSRGDPCQGNNFLRAFRTIPEASALGLILADSDEASGKGNLARLIQRWNRFILTQLHQDMQELEIPQAYRGAGGSSFCSSGDSVIGQLFSCEMENCSLCRCGSETVRASSTLLFTLSYPDGSKDKTGKNYDFAQVLKRSICLDQNTQAWCDTCEKYQPTIQTRNIRHLPDILVINCEVNSSKEADFWRMQAEVAFKMAVKKHGGEISKNKEFALADWKELGSPEGVLVCPSIEELKNVWLPFSIRMKMTKNKGLDVCNWTDGDEMQWGPARAEEEHGVYVYDLMATVVHILDSRTGGSLVAHIKVGETYHQRKEGVTHQQWYLFNDFLIEPIDKHEAVQFDMNWKVPAILYYVKRNLNSRYNLNIKNPIEASVLLAEASLARKQRKTHTTFIPLMLNEMPQIGDLVGLDAEFVTLNEEEAELRSDGTKSTIKPSQMSVARITCVRGQGPNEGIPFIDDYISTQEQVVDYLTQYSGIKPGDLDAKISSKHLTTLKSTYLKLRFLIDIGVKFVGHGLQKDFRVINLMVPKDQVLDTVYLFHMPRKRMISLRFLAWYFLDLKIQGETHDSIEDARTALQLYRKYLELSKNGTEPESFHKVLKGLYEKGRKMDWKVPEPEGQTSPKSKTWDGTRETGLGGFCILFVCDRVSLCHPG

SEQ ID NO: 884695 - protein, 809 aa, Homo sapiens
MNFEGLDPGLAEYAPAMHSALDPVLDAHLNPSLLQNVELDPEGVALEALPVQESVHIMEGVYSELHSVVAEVGVPVSVSHFDLHEEMLWVGSHGGHATSFFGPALERYSSFQVNGSDDIRQIQSLENGILFLTKNNLKYMARGGLIIFDYLLDENEDMHSLLLTDSSTLLVGGLQNHILEIDLNTVQETQKYAVETPGVTIMRQTNRFFFCGHTSGKVSLRDLRTFKVEHEFDAFSGSLSDFDVHGNLLAACGFSSRLTGLACDRFLKVYDLRMMRAITPLQVHVDPAFLRFIPTYTSRLAIISQSGQCQFCEPTGLANPADIFHVNPVGPLLMTFDVSASKQALAFGDSEGCVHLWTDSPEPSFNPYSRETEFALPCLVDSLPPLDWSQDLLPLSLIPVPLTTDTLLSDWPAANSAPAPRRAPPVDAEILRTMKKVGFIGYAPNPRTRLRNQIPYRLKESDSEFDSFSQVTESPVGREEEPHLHMVSKKYRKVTIKYSKLGLEDFDFKHYNKTLFAGLEPHIPNAYCNCMIQVLYFLEPVRCLIQNHLCQKEFCLACELGFLFHMLDLSRGDPCQGNNFLRAFRTIPEASALGLILADSDEASGKGNLARLIQRWNRFILTQLHQDMQELEIPQAYRGAGGAAFAHRGTLLLGSSSAVRWRTAASAAVAVRPCEPHPGVTHQQWYLFNDFLIEPIDKHEAVQFDMNWKVPAILYYVKRNLNSRYNLNIKNPIEASVLLAEASLARKQRKTHTTFIPLMLNEMPQIGDLVGLDAEFVTLNEQCCQYHCQKGLWILDKAWLPASFIPADG

SEQ ID NO: 884696 - protein, 83 aa, Homo sapiens
LDPVLDAHLNPSLLQNVELDPEGVALEALPVQESVHIMEGVYSELHSVVAEVGVPVSVSHFDLHEEMLWVGSHGVRTVPLCEG

SEQ ID NO: 884697 - protein, 446 aa, Homo sapiens
NQLFHAVQRLQRVQNQLKSMRQAAADAKPESLMKRLEEEIKFNLYMVTEKFPKELENKKKELHFLQKVVSEPAMGHSDLLELESKINEINTEINQLIEKKMMRNEPIEGKLSLYRQQASIISRKKEAKAEELQEAKEKLASLEREASVKRNQTREFDGTEVLKGDEFKRYVNKLRSKSTVFKKKHQIIAELKAEFGLLQRTEELLKQRHENIQQQLQTMEEKKGISGYSYTQEELERVSALKSEVDEMKGRTLDDMSEMVKKLYSLVSEKKSALASVIKELRQLRQKYQELTQECDEKKSQYDSCAAGLESNRSKLEQEVRRLREECLQEESRYHYTNCMIKNLEVQLRRATDEMKAYISSDQQEKRKAIREQYTKNTAEQENLGKKLREKQKVIRESHGPNMKQAKMWRDLEQLMECKKQCFLKQQSQTSIGQVIQEGGEDRLIL

SEQ ID NO: 884698 - protein, 369 aa, Homo sapiens
MRACISLVLAVLCGLAWAEDHKESEPLPQLEEETEEALASNLYSAPTSCQGRCYEAFDKHHQCHCNARCQEFGNCCKDFESLCSDHEVSHSSDAITKEEIQSISEKIYRADTNKAQKEDIVLNSQNCISPSETRNQVDRCPKPLFTYVNEKLFSKPTYAAFINLLNNYQRATGHGEHFSAQELAEQDAFLREIMKTAVMKELYSFLHHQNRYGSEQEFVDDLKNMWFGLYSRGNEEGDSSGFEHVFSGEVKKGKVTGFHNWIRFYLEEKEGLVDYYSHIYDGPWDSYPDVLAMQFNWDGYYKEVGSAFIGSSPEFEFALYSLCFIARPGKVCQLSLGGYPLAVRTYTWDKSTYGNGKKYIATAYIVSST

SEQ ID NO: 884699 - protein, 140 aa, Homo sapiens
SRTYIRTRGTEWLEHVFSGEVKKGKVTGFHNWIRFYLEEKEGLVDYYSHIYDGPWDSYPDVLAMQFNWDGYYKEVGSAFIGSSPEFEFALYSLCFIARPGKVCQLSLGGYPLAVRTYTWDKSTYGNGKKYIATAYIVSST

SEQ ID NO: 884700 - protein, 503 aa, Homo sapiens
PFGRLHPQNLLSSPKSTMTCGSYCGGRAFSCISACGPRPGRCCITAAPYRGISCYRGLTGGFGSHSVCGGFRAGSCGRSFGYRSGGVCGPSPPCITTVSVNESLLTPLNLEIDPNAQCVKQEEKEQIKSLNSRFAAFIDKVRFLEQQNKLLETKLQFYQNRECCQSNLEPLFEGYIETLRREAECVEADSGRLASELNHVQEVLEGYKKKYEEEVSLRATAENEFVALKKDVDCAYLRKSDLEANVEALIQEIDFLRRLYEEEIRVLQSHISDTSVVVKLDNSRDLNMDCIIAEIKAQYDDIVTRSRAEAESWYRSKCEEMKATVIRHGETLRRTKEEINELNRMIQRLTAEVENAKCQNSKLEAAVAQSEQQGEAALSDARCKLAELEGALQKAKQDMACLIREYQEVMNSKLGLDIEIATYRRLLEGEEQRLCEGVGSVNVCVSSSRGGVVCGDLCASTTAPVVSTRVSSVPSNSNVVVGTTNACAPSARVGVCGGSCKRC

SEQ ID NO: 884701 - protein, 503 aa, Homo sapiens; identical to SEQ ID NO: 884700

SEQ ID NO: 884702 - protein, 923 aa, Homo sapiens
MQTLFGKKKSFDPSAREPPGSTAGLPQEPKTTAEDGVPAPPLLDPIVQQFGQFSKDKALEEEEDDRPYDPEEEYDPERAFDTQLVERGRRHEVERAPEAAAAEREEVAYDPEDETILEEAKVTVDDLPNRMCADVRRNSVERPAEPVAGAATPSLVEQQKMLEELNKQIEEQKRQLEEQEEALRQQRAAVGVSMAHFSVSDALMSPPPKSSLPKAELFQQEQQSADKPASLPPASQASNHRDPRQARRLATETGEGEGEPLSRLSARGAQGALPERDASRGGLVGQAPMPVPEEKEPASSPWASGEKPPAGSEQDGWKAEPGEGTRPATVGDSSARPARRVLLPTPPCGALQPGFPLQHDGERDPFTCPGFASQDKALGSAQYEDPRNLHSAGRSSSPAGETEGDREPQARPGEGTAPLPPPGQKVGGSQPPFQGQREPGPHALGMSGLHGPNFPGPRGPAPPFPEENIASNDGPRGPPPARFGAQKGPIPSLFSGQHGPPPYGDSRGPSPSYLGGPRGVAPSQFEERKDPHGEKREFQDAPYNEVTGAPAQFEGTEQAPFLGSRGGAPFQFGGQRRPLLSQLKGPRGGPPPSQFGGQRGPPPGHFVGPRGPHPSQFETARGPHPNQFEGPRGQAPNFMPGPRGIQPQQFEDQRVHSPPRFTNQRAPAPLQFGGLRGSAPFSEKNEQTPSRFHFQGQAPQVMKPGPRPLLELPSHPPQHRKDRWEEAGPPSALSSSAPGQGPEADGQWASADFREGKGHEYRNQTFEGRQRERFDVGPKEKPLEEPDAQGRASEDRRRERERGRNWSRERDWDRPREWDRHRDKDSSRDWDRNRERSANRDREREADRGKEWDRSRERSRNRERERDRRRDRDRSRSRERDRDKARDRERGRDRKDRSKSKESARDPKPEASRASDAGTASQA

SEQ ID NO: 884703 - protein, 923 aa, Homo sapiens; identical to SEQ ID NO: 884702

SEQ ID NO: 884704 - protein, 923 aa, Homo sapiens; identical to SEQ ID NO: 884702

SEQ ID NO: 884705 - protein, 923 aa, Homo sapiens; identical to SEQ ID NO: 884702

SEQ ID NO: 884706 - protein, 122 aa, Homo sapiens
KRGKGRAKARYEAWCCEREGSKMAARKGRRRTCETGEPMEAESGDTSSEGPAQVYLPGRGPPLREGEELVMDEEAYVLYHRAQTGAPCLSFDIVRDHLGDNRTELPLTLYLCPQNPVFCLFV

SEQ ID NO: 884707 - protein, 446 aa, Homo sapiens
MAARKGRRRTCETGEPMEAESGDTSSEGPAQVYLPGRGPPLREGEELVMDEEAYVLYHRAQTGAPCLSFDIVRDHLGDNRTELPLTLYLCAGTQAESAQSNRLMMLRMHNLHGTKPPPSEGSDEEEEEEDEEDEEERKPQLELAMVPHYGGINRVRVSWLGEEPVAGVWSEKGQVEVFALRRLLQVVEEPQALAAFLRDEQAQMKPIFSFAGHMGEGFALDWSPRVTGRLLTGDCQKNIHLWTPTDGGSWHVDQRPFVGHTRSVEDLQWSPTENTVFASCSADASIRIWDIRAAPSKACMLTTATAHDGDVNVISWSRREPFLLSGGDDGALKIWDLRQFKSGSPVATFKQHVAPVTSVEWHPQDSGVFAASGADHQITQWDLAVERDPEAGDVEADPGLADLPQQLLFVHQGETELKELHWHPQCPGLLVSTALSGFTIFRTISV

SEQ ID NO: 884708 - protein, 360 aa, Homo sapiens
MAARKGRRRTCETGEPMEAESGDTSSEGPAQVYLPGRGPPLREGEELVMDEEAYVLYHRAQTGAPCLSFDIVRDHLGDNRTELPLTLYLCAGTQAESAQSNRLMMLRMHNLHGTKPPPSEGSDEEEEEEDEEDEEERKPQLELAMVPHYGGINRVRVSWLGEEPVAGVWSEKGQVEVFALRRLLQVVEEPQALAAFLRDEQAQMKPIFSFAGHMGEGFALDWSPRVTGRLLTGDCQKNIHLWTPTDGGSWHVDQRPFVGHTRSVEDLQWSPTENTVFASCSADASIRIWDIRAAPSKACMLTTATAHDGDVNVISWSRREPFLLSGGDDGALKIWDLRQFKSVPSGHLSGVARDLRSGPE

SEQ ID NO: 884709 - protein, 446 aa, Homo sapiens; identical to SEQ ID NO: 884707

SEQ ID NO: 884710 - protein, 469 aa, Homo sapiens
MAARKGRRRTCETGEPMEAESGDTSSEGPAQVYLPGRGPPLREGEELVMDEEAYVLYHRAQTGAPCLSFDIVRDHLGDNRTELPLTLYLCAGTQAESAQSNRLMMLRMHNLHGTKPPPSEGSDEEEEEEDEEDEEERKPQLELAMVPHYGGINRVRVSWLGEEPVAGVWSEKGQVEVFALRRLLQVVEEPQALAAFLRDEQAQMKPIFSFAGHMGEGFALDWSPRVTGRLLTGDCQKNIHLWTPTDGGSWHVDQRPFVGHTRSVEDLQWSPTENTVFASCSADASIRIWDIRAAPSKACMLTTATAHDGDVNVISWSRREPFLLSGGDDGALKIWDLRQFKSGSPVATFKQHVAPVTSVEWHPQDSGVFAASGADHQITQWDLAVERDPEAGDVEADRMANYRRVWFWTGENDEGLAGPSAQVWDKGWKYTFRTHVGATAIVPSEGEGPGGQVEKGRANVERGLTNKKG

SEQ ID NO: 884711 - protein, 652 aa, Homo sapiens
ATPASQKQPEPIYSKKTEIQRQTVRAPFAKLFIFSALQVARQLLLQQQQQQQVSGLKSPKRNDKQPALQVPVSVAMMTPQVITPQQMQQILQQQVLSPQQLQVLLQQQQALMLQQQQLQEFYKKQQEQLQLQLLQQQHAGKQPKEQQQVATQQLAFQQQLLQMQQLQQQHLLSLQRQGLLTIQPGQPALPLQPLAQGMIPTELQQLWKEVTSAHTAEETTGNNHSSLDLTTTCVSSSAPSKTSLIMNPHASTNGQLSVHTPKRESLSHEEHPHSHPLYGHGVCKWPGCEAVCEDFQSFLKHLNSEHALDDRSTAQCRVQMQVVQQLELQLAKDKERLQAMMTHLHVKSTEPKAAPQPLNLVSSVTLSKSASEASPQSLPHTPTTPTAPLTPVTQGPSVITTTSMHTVGPIRRRYSDKYNVPISSADIAQNQEFYKNAEVRPPFTYASLIRQAILESPEKQLTLNEIYNWFTRMFAYFRRNAATWKNAVRHNLSLHKCFVRVENVKGAVWTVDEVEFQKRRPQKISGNPSLIKNMQSSHAYCTPLNAALQASMAENSIPLYTTASMGNPTLGNLASAIREELNGAMEHTNSNESDSSPGRSPMQAVHPVHVKEEPLDPEEAEGPLSLVTTANHSPDFDHDRDYEDEPVNEDME

SEQ ID NO: 884712 - protein, 505 aa, Homo sapiens
MKDGSRVSGYDDTSSYHSPANAADPPATSAEPSAAPGSPPAAAGPHASTGMIPTELQQLWKEVTSAHTAEETTGNNHSSLDLTTTCVSSSAPSKTSLIMNPHASTNGQLSVHTPKRESLSHEEHPHSHPLYGHGVCKWPGCEAVCEDFQSFLKHLNSEHALDDRSTAQCRVQMQVVQQLELQLAKDKERLQAMMTHLHVKSTEPKAAPQPLNLVSSVTLSKSASEASPQSLPHTPTTPTAPLTPVTQGPSVITTTSMHTVGPIRRRYSDKYNVPISSADIAQNQEFYKNAEVRPPFTYASLIRQAILESPEKQLTLNEIYNWFTRMFAYFRRNAATWKNAVRHNLSLHKCFVRVENVKGAVWTVDEVEFQKRRPQKISGNPSLIKNMQSSHAYCTPLNAALQASMAENSIPLYTTASMGNPTLGNLASAIREELNGAMEHTNSNESDSSPGRSPMQAVHPVHVKEEPLDPEEAEGPLSLVTTANHSPDFDHDRDYEDEPVNEDME

SEQ ID NO: 884713 - protein, 182 aa, Homo sapiens
AIRTNLSLHKCFIRVEDEFGSFWTVDDEEFKRGRHIQRGRPRKYCPDENFDELVAHNPSLIKNMQSSHAYCTPLNAALQASMAENSIPLYTTASMGNPTLGNLASAIREELNGAMEHTNSNESDSSPGRSPMQAVHPVHVKEEPLDPEEAEGPLSLVTTANHSPDFDHDRDYEDEPVNEDME

SEQ ID NO: 884714 - protein, 89 aa, Homo sapiens
LEDPFIGGHLASAIREELNGAMEHTNSNESDSSPGRSPMQAVHPVHVKEEPLDPEEAEGPLSLVTTANHSPDFDHDRDYEDEPVNEDME

SEQ ID NO: 884715 - protein, 94 aa, Homo sapiens
VMIALSSRVSRGGAGAGSRDTGEPQAALGVLRPQRASRGGASLAIRHRERGMCPSSGRVPEAFVDNSSFRTKHFGNGEGFDPFSDLLSAMNGWM

SEQ ID NO: 884716 - protein, 677 aa, Homo sapiens
MMQESGTETKSNGSAIQNGSGGSNHLLECGGLREGRSNGETPAVDIGAADLAHAQQQQQQALQVARQLLLQQQQQQQVSGLKSPKRNDKQPALQVPVSVAMMTPQVITPQQMQQILQQQVLSPQQLQVLLQQQQALMLQQQQLQEFYKKQQEQLQLQLLQQQHAGKQPKEQQQVATQQLAFQQQLLQMQQLQQQHLLSLQRQGLLTIQPGQPALPLQPLAQGMIPTELQQLWKEVTSAHTAEETTGNNHSSLDLTTTCVSSSAPSKTSLIMNPHASTNGQLSVHTPKRESLSHEEHPHSHPLYGHGVCKWPGCEAVCEDFQSFLKHLNSEHALDDRSTAQCRVQMQVVQQLELQLAKDKERLQAMMTHLHVKSTEPKAAPQPLNLVSSVTLSKSASEASPQSLPHTPTTPTAPLTPVTQGPSVITTTSMHTVGPIRRRYSDKYNVPISSADIAQNQEFYKNAEVRPPFTYASLIRQAILESPEKQLTLNEIYNWFTRMFAYFRRNAATWKNAVRHNLSLHKCFVRVENVKGAVWTVDEVEFQKRRPQKISGNPSLIKNMQSSHAYCTPLNAALQASMAENSIPLYTTASMGNPTLGNLASAIREELNGAMEHTNSNESDSSPGRSPMQAVHPVHVKEEPLDPEEAEGPLSLVTTANHSPDFDHDRDYEDEPVNEDME

SEQ ID NO: 884717 - protein, 677 aa, Homo sapiens; identical to SEQ ID NO: 884716

SEQ ID NO: 884718 - protein, 612 aa, Homo sapiens
LCTFQDLLNNEPTCLYQWTALSPHSQKGKVPVSVAMMTPQVITPQQMQQILQQQVLSPQQLQVLLQQQQALMLQQQQLQEFYKKQQEQLQLQLLQQQHAGKQPKEQQQVATQQLAFQQQLLQMQQLQQQHLLSLQRQGLLTIQPGQPALPLQPLAQGMIPTELQQLWKEVTSAHTAEETTGNNHSSLDLTTTCVSSSAPSKTSLIMNPHASTNGQLSVHTPKRESLSHEEHPHSHPLYGHGVCKWPGCEAVCEDFQSFLKHLNSEHALDDRSTAQCRVQMQVVQQLELQLAKDKERLQAMMTHLHVKSTEPKAAPQPLNLVSSVTLSKSASEASPQSLPHTPTTPTAPLTPVTQGPSVITTTSMHTVGPIRRRYSDKYNVPISSADIAQNQEFYKNAEVRPPFTYASLIRQAILESPEKQLTLNEIYNWFTRMFAYFRRNAATWKNAVRHNLSLHKCFVRVENVKGAVWTVDEVEFQKRRPQKISGNPSLIKNMQSSHAYCTPLNAALQASMAENSIPLYTTASMGNPTLGNLASAIREELNGAMEHTNSNESDSSPGRSPMQAVHPVHVKEEPLDPEEAEGPLSLVTTANHSPDFDHDRDYEDEPVNEDME

SEQ ID NO: 884719 - protein, 677 aa, Homo sapiens; identical to SEQ ID NO: 884716

SEQ ID NO: 884720 - protein, 761 aa, Homo sapiens
MMQESGTETKSNGSAIQNGSGGSNHLLECGGLREGRSNGETPAVDIGAADLAHAQQQQQQALQVARQLLLQQQQQQQVSGLKSPKRNDKQPALQVPVSVAMMTPQVITPQQMQQILQQQVLSPQQLQVLLQQQQALMLQQQQLQEFYKKQQEQLQLQLLQQQHAGKQPKEQQQVATQQLAFQQQLLQMQQLQQQHLLSLQRQGLLTIQPGQPALPLQPLAQGMIPTELQQLWKEVTSAHTAEETTGNNHSSLDLTTTCVSSSAPSKTSLIMNPHASTNGQLSVHTPKRESLSHEEHPHSHPLYGHGVCKWPGCEAVCEDFQSFLKHLNSEHALDDRSTAQCRVQMQVVQQLELQLAKDKERLQAMMTHLHVKSTEPKAAPQPLNLVSSVTLSKSASEASPQSLPHTPTTPTAPLTPVTQGPSVITTTSMHTVGPIRRRYSDKYNVPISSADIAQNQEFYKNAEVRPPFTYASLIRQAILESPEKQLTLNEIYNWFTRMFAYFRRNAATWKNAVRHNLSLHKCFVRVENVKGAVWTVDEVEFQKRRPQKISGNPSLIKNMQSSHAYCTPLNAALQASMAENSIPLYTTASMGNPTLGNLASAIREELNGAMEHTNSNESDSSPGRSPMQAVNPVHVRKNPPGSDKNPGEEKAEEEGVAEEEGVNQFSYPPSHRECCPAVEEEDDEEAVKKEAHRTSTSALSPGSKPSTWVSCPGEEENQATEDKRTERSKGARKTSVSPRSSGSDPRSWEYRSKRPAGDPLG

SEQ ID NO: 884721 - protein, 245 aa, Homo sapiens
MMQESGTETKSNGSAIQNGSGGSNHLLECGGLREGRSNGETPAVDIGAADLAHAQQQQQQALQVARQLLLQQQQQQQVSGLKSPKRNDKQPALQVPVSVAMMTPQVITPQQMQQILQQQVLSPQQLQVLLQQQQALMLQQQQLQEFYKKQQEQLQLQLLQQQHAGKQPKEQQQVATQQLAFQQQLLQMQQLQQQHLLSLQRQGLLTIQPGQPALPLQPLAQDFAFPRISVCQFSISCVCNVEIFW

SEQ ID NO: 884722 - protein, 109 aa, Homo sapiens
MMQESGTETKSNGSAIQNGSGGSNHLLECGGLREGRSNGETPAVDIGAADLAHAQQQQQQALQVARQLLLQQQQQQQVSGLKSPKRNDKQPALQVTILFLFKLTLYPLG

SEQ ID NO: 884723 - protein, 576 aa, Homo sapiens
ATPASQKQPEPIYSKKTEIQRQTVRAPFAKLFIFSALQVARQLLLQQQQQQQVSGLKSPKRNDKQPALQQQQVATQQLAFQQQLLQMQQLQQQHLLSLQRQGLLTIQPGQPALPLQPLAQGMIPTELQQLWKEVTSAHTAEETTGNNHSSLDLTTTCVSSSAPSKTSLIMNPHASTNGQLSVHTPKRESLSHEEHPHSHPLYGHGVCKWPGCEAVCEDFQSFLKHLNSEHALDDRSTAQCRVQMQVVQQLELQLAKDKERLQAMMTHLHVKSTEPKAAPQPLNLVSSVTLSKSASEASPQSLPHTPTTPTAPLTPVTQGPSVITTTSMHTVGPIRRRYSDKYNVPISSADIAQNQEFYKNAEVRPPFTYASLIRQAILESPEKQLTLNEIYNWFTRMFAYFRRNAATWKNAVRHNLSLHKCFVRVENVKGAVWTVDEVEFQKRRPQKISGNPSLIKNMQSSHAYCTPLNAALQASMAENSIPLYTTASMGNPTLGNLASAIREELNGAMEHTNSNESDSSPGRSPMQAVHPVHVKEEPLDPEEAEGPLSLVTTANHSPDFDHDRDYEDEPVNEDME

SEQ ID NO: 884724 - protein, 109 aa, Homo sapiens
GGGWAPAPRRTAKREPLPLGGPLECPAGTRKFVRGRERAASERAGRGQRQRRRGPWCCRRLLRGREGGAPTPSPDSAVSQKLLLTIPVSEQNISAMVRASIPSLICCQP

SEQ ID NO: 884725 - protein, 104 aa, Homo sapiens
MASMAENSIPLYTTASMGNPTLGNLASAIREELNGAMEHTNSNESDSSPGRSPMQAVHPVHVKEEPLDPEEAEGPLSLVTTANHSPDFDHDRDYEDEPVNEDME

SEQ ID NO: 884726 - protein, 114 aa, Homo sapiens
MMQESGTETKSNGSAIQNGSGGSNHLLECGGLREGRSNGETPAVDIGAADLAHAQQQQQQWHLINHQPSRSPSSWLKRLISSPWELEVLQVPLWGAVAETKMSGPVCQPNPSPF

SEQ ID NO: 884727 - protein, 617 aa, Homo sapiens
RSPPARRGRRTPRPARAGAPSPAPRAWRLHGECQVPVSVAMMTPQVITPQQMQQILQQQVLSPQQLQVLLQQQQALMLQQQQLQEFYKKQQEQLQLQLLQQQHAGKQPKEQQQVATQQLAFQQQLLQMQQLQQQHLLSLQRQGLLTIQPGQPALPLQPLAQGMIPTELQQLWKEVTSAHTAEETTGNNHSSLDLTTTCVSSSAPSKTSLIMNPHASTNGQLSVHTPKRESLSHEEHPHSHPLYGHGVCKWPGCEAVCEDFQSFLKHLNSEHALDDRSTAQCRVQMQVVQQLELQLAKDKERLQAMMTHLHVKSTEPKAAPQPLNLVSSVTLSKSASEASPQSLPHTPTTPTAPLTPVTQGPSVITTTSMHTVGPIRRRYSDKYNVPISSADIAQNQEFYKNAEVRPPFTYASLIRQAILESPEKQLTLNEIYNWFTRMFAYFRRNAATWKNAVRHNLSLHKCFVRVENVKGAVWTVDEVEFQKRRPQKISGNPSLIKNMQSSHAYCTPLNAALQASMAENSIPLYTTASMGNPTLGNLASAIREELNGAMEHTNSNESDSSPGRSPMQAVHPVHVKEEPLDPEEAEGPLSLVTTANHSPDFDHDRDYEDEPVNEDME

SEQ ID NO: 884728 - protein, 577 aa, Homo sapiens
MMTPQVITPQQMQQILQQQVLSPQQLQVLLQQQQALMLQQQQLQEFYKKQQEQLQLQLLQQQHAGKQPKEQQQVATQQLAFQQQLLQMQQLQQQHLLSLQRQGLLTIQPGQPALPLQPLAQGMIPTELQQLWKEVTSAHTAEETTGNNHSSLDLTTTCVSSSAPSKTSLIMNPHASTNGQLSVHTPKRESLSHEEHPHSHPLYGHGVCKWPGCEAVCEDFQSFLKHLNSEHALDDRSTAQCRVQMQVVQQLELQLAKDKERLQAMMTHLHVKSTEPKAAPQPLNLVSSVTLSKSASEASPQSLPHTPTTPTAPLTPVTQGPSVITTTSMHTVGPIRRRYSDKYNVPISSADIAQNQEFYKNAEVRPPFTYASLIRQAILESPEKQLTLNEIYNWFTRMFAYFRRNAATWKNAVRHNLSLHKCFVRVENVKGAVWTVDEVEFQKRRPQKISGNPSLIKNMQSSHAYCTPLNAALQASMAENSIPLYTTASMGNPTLGNLASAIREELNGAMEHTNSNESDSSPGRSPMQAVHPVHVKEEPLDPEEAEGPLSLVTTANHSPDFDHDRDYEDEPVNEDME

SEQ ID NO: 884729 - protein, 176 aa, Homo sapiens
MFSLLYLLQNAVRHNLSLHKCFVRVENVKGAVWTVDEVEFQKRRPQKISGNPSLIKNMQSSHAYCTPLNAALQASMAENSIPLYTTASMGNPTLGNLASAIREELNGAMEHTNSNESDSSPGRSPMQAVHPVHVKEEPLDPEEAEGPLSLVTTANHSPDFDHDRDYEDEPVNEDME

SEQ ID NO: 884730 - protein, 132 aa, Homo sapiens
MFFLHSNPSLIKNMQSSHAYCTPLNAALQASMAENSIPLYTTASMGNPTLGNLASAIREELNGAMEHTNSNESDSSPGRSPMQAVHPVHVKEEPLDPEEAEGPLSLVTTANHSPDFDHDRDYEDEPVNEDME

SEQ ID NO: 884731 - protein, 114 aa, Homo sapiens; identical to SEQ ID NO: 884726

SEQ ID NO: 884732 - protein, 72 aa, Homo sapiens
APGGTRGSPSPKSQPGWREPSDKAPGARNVPILRPVGASKYWTSSPPPFSPLSFLNLKIWRSKFSVECKVLR

SEQ ID NO: 884733 - protein, 373 aa, Homo sapiens
MSTTGQVIRCKAAILWKPGAPFSIEEVEVAPPKAKEVRIKVVATGLCGTEMKVLGSKHLDLLYPTILGHEGAGIVESIGEGVSTVKPGDKVITLFLPQCGECTSCLNSEGNFCIQFKQSKTQLMSDGTSRFTCKGKSIYHFGNTSTFCEYTVIKEISVAKIDAVAPLEKVCLISCGFSTGFGAAINTAKVTPGSTCAVFGLGGVGLSVVMGCKAAGAARIIGVDVNKEKFKKAQELGATECLNPQDLKKPIQEVLFDMTDAGIDFCFEAIGNLDVLAAALASCNESYGVCVVVGVLPASVQLKISGQLFFSGRSLKGSVFGGWKSRQHIPKLVADYMAEKLNLDPLITHTLNLDKINEAVELMKTGKCGKLPT

SEQ ID NO: 884734 - protein, 357 aa, Homo sapiens
MSTTGQVIRCKAAILWKPGAPFSIEEVEVAPPKAKEVRIKVVATGLCGTEMKVLGSKHLDLLYPTILGHEGAGIVESIGEGVSTVKPGDKVITLFLPQCGECTSCLNSEGNFCIQFKQSKTQLMSDGTSRFTCKGKEISVAKIDAVAPLEKVCLISCGFSTGFGAAINTAKVTPGSTCAVFGLGGVGLSVVMGCKAAGAARIIGVDVNKEKFKKAQELGATECLNPQDLKKPIQEVLFDMTDAGIDFCFEAIGNLDVLAAALASCNESYGVCVVVGVLPASVQLKISGQLFFSGRSLKGSVFGGWKSRQHIPKLVADYMAEKLNLDPLITHTLNLDKINEAVELMKTGKCIRCILLL

SEQ ID NO: 884735 - protein, 375 aa, Homo sapiens
MSTTGQVIRCKAAILWKPGAPFSIEEVEVAPPKAKEVRIKVVATGLCGTEMKVLGSKHLDLLYPTILGHEGAGIVESIGEGVSTVKPGDKVITLFLPQCGECTSCLNSEGNFCIQFKQSKTQLMSDGTSRFTCKGKSIYHFGNTSTFCEYTVIKEISVAKIDAVAPLEKVCLISCGFSTGFGAAINTAKVTPGSTCAVFGLGGVGLSVVMGCKAAGAARIIGVDVNKEKFKKAQELGATECLNPQDLKKPIQEVLFDMTDAGIDFCFEAIGNLDVLAAALASCNESYGVCVVVGVLPASVQLKISGQLFFSGRSLKGSVFGGWKSRQHIPKLVADYMAEKLNLDPLITHTLNLDKINEAVELMKTGKCIRCILLL

SEQ ID NO: 884736 - protein, 357 aa, Homo sapiens; identical to SEQ ID NO: 884734

SEQ ID NO: 884737 - protein, 357 aa, Homo sapiens; identical to SEQ ID NO: 884734

SEQ ID NO: 884738 - protein, 149 aa, Homo sapiens
MSTTGQVIRCKAAILWKPGAPFSIEEVEVAPPKAKEVRIKVVATGLCGTEMKVLGSKHLDLLYPTILGHEGAGIVESIGEGVSTVKPGDKVITLFLPQCGECTSCLNSEGNFCIQFNSTQLVFDVPAGLTCRETSCKIVQSLLRGNLGG

SEQ ID NO: 884739 - protein, 295 aa, Homo sapiens
MSTTGQVIRCKAAILWKPGAPFSIEEVEVAPPKAKEVRIKVVATGLCGTEMKVLGSKHLDLLYPTILGHEGAGIVESIGEGVSTVKPGDKVITLFLPQCGECTSCLNSEGNFCIQFKQSKTQLMSDGTSRFTCKGKSIYHFGNTSTFCEYTVIKEISVAKIDAVAPLEKVCLISCGFSTGFGAAINTAKVTPGSTCAVFGLGGVGLSVVMGCKAAGAARIIGVDVNKEKFKKAQELGATECLNPQDLKKPIQEVLFDMTDAGIDFCFEAIGNLDVLAGRADSTSLNWLLIIWQRS

SEQ ID NO: 884740 - protein, 360 aa, Homo sapiens
MSTTGQVIRCKAAILWKPGAPFSIEEVEVAPPKAKEVRIKVVATGLCGTEMKVLGSKHLDLLYPTILGHEGAGIVESIGEGVSTVKPGDKVITLFLPQCGECTSCLNSEGNFCIQFKQSKTQLMSDGTSRFTCKGKEISVAKIDAVAPLEKVCLISCGFSTGFGAAINTAKVTPGSTCAVFGLGGVGLSVVMGCKAAGAARIIGVDVNKEKFKKAQELGATECLNPQDLKKPIQEVLFDMTDAGIDFCFEAIGNLDVLAAALASCNESYGVCVVVGVLPASVQLKISGQLFFSGRSLKGSVFGGWKSRQHIPKLVADYMAEKLNLDPLITHTLNLDKINEAVELMKTGKCQRIFHQLNGI

SEQ ID NO: 884741 - protein, 357 aa, Homo sapiens; identical to SEQ ID NO: 884734

SEQ ID NO: 884742 - protein, 323 aa, Homo sapiens
MSERKVLNKYYPPDFDPSKIPKLKLPKDRQYVVRLMAPFNMRCKTCGEYIYKGKKFNARKETVQNEVYLGLPIFRFYIKCTRCLAEITFKTDPENTDYTMEHGATRNFQAEKLLEEEEKRVQKEREDEELNNPMKVLENRTKDSKLEMEVLENLQELKDLNQRQAHVDFEAMLRQHRLSEEERRRQQQEEDEQETAALLEEARKRRLLEDSDSEDEAAPSPLQPALRPNPTAILDEAPKPKRKVEVWEQSVGSLGSRPPLSRLVVVKKAKADPDCSNGQPQAAPTPGAPQNRKEANPTPLTPGASSLSQLGAYLDSDDSNGSN

SEQ ID NO: 884743 - protein, 323 aa, Homo sapiens; identical to SEQ ID NO: 884742

SEQ ID NO: 884744 - protein, 288 aa, Homo sapiens [sequence omitted]

SEQ ID NO: 884745 - protein, 282 aa, Homo sapiens
MSERKVLNKYYPPDFDPSKIPKLKLPKDRQYVVRLMAPFNMRCKTCGEYIYKGKKFNARKETVQNEVYLGLPIFRFYIKCTRCLAEITFKTDPENTDYTMEHGATRNFQAEKLLEEEEKRVQKEREDEELNNPMKVLENRTKDSKLEMEVLENLQELKDLNQRQAHVDFEAMLRQHRLSEEERRRQQQEEDEQETAALLEEARKRRLLEDSDSEDEAAPSPLQPALRPNPTAILDEAPKPKRKVEVWEQSVGSLGSRPPLSRLVVVKKAKAYLDSDDSNGSN

SEQ ID NO: 884746 - protein, 449 aa, Homo sapiens
MPATLLRAVARSHHILSKAHQCRRIGHLMLKPLKEFENTTCSTLTIRQSLDLFLPDKTASGLNKSQILEMNQKKSDTSMLSPLNAARCQDEKAHLPTMKSFGTHRRVTHKPNLLGSKWFIKILKRHFSSVSTETFVPKQDFPQVKRPLKASRTRQPSRTNLPVLSVNEDLMHCTAFATADEYHLGNLSQDLASHGYVEVTSLPRDAANILVMGVENSAKEGDPGTIFFFREGAAVFWNVKDKTMKHVMKVLEKHEIQPYEIALVHWENEELNYIKIEGQSKLHRGEIKLNSELDLDDAILEKFAFSNALCLSVKLAIWEASLDKFIESIQSIPEALKAGKKVKLSHEEVMQKIGELFALRHRINLSSDFLITPDFYWDRENLEGLYDKTCQFLSIGRRVKVMNEKLQHCMELTDLMRNHLNEKRALRLEWMIVILITIEVMFELGRVFF

SEQ ID NO: 884747 - protein, 208 aa, Homo sapiens
MPATLLRAVARSHHILSKAHQCRRIGHLMLKPLKEFENTTCSTLTIRQSLDLFLPDKTASGLNKSQILEMNQKKSDTSMLSPLNAARCQDEKAHLPTMKSFGTHRRVTHKPNLLGSKWFIKILKRHFSSVSTETFVPKQDFPQVKRPLKASRTRQPSRTNLPVLSVNEDLMHCTAFATADEYHLGNLSQDLASHGYVEVTSLPRGTSS

SEQ ID NO: 884748 - protein, 449 aa, Homo sapiens; identical to SEQ ID NO: 884746

SEQ ID NO: 884749 - protein, 406 aa, Homo sapiens
MPATLLRAVARSHHILSKAHQCRRIGHLMLKPLKEFENTTCSTLTIRQSLDLFLPDKTASGLNKSQILEMNQKKSDTSMLSPLNAARCQDEKAHLPTMKSFGTHRRVTHKPNLLGSKWFIKILKRHFSSVSTETFVPKQDFPQVKRPLKASRTRQPSRTNLPVLSVNEDLMHCTAFATADEYHLGNLSQDLASHGYVEVTSLPRDAANILVMGVENSAKEGDPGTIFFFREGAAVFWNVKDKTMKHVMKVLEKHEIQPYEIALVHWENEELNYIKIEGQSKLHRGEIKLNSELDLDDAILEKFAFSNALCLSVKLAIWEASLDKFIESIQSIPEALKAGKKVKLSHEEVMQKIGELFALRHRINLSSDFLITPDFYWDRENLEGLYDKTCQFLSIGRRVKVRILHF

SEQ ID NO: 884750 - protein, 224 aa, Homo sapiens
MVLSSGRAAVFWNVKDKTMKHVMKVLEKHEIQPYEIALVHWENEELNYIKIEGQSKLHRGEIKLNSELDLDDAILEKFAFSNALCLSVKLAIWEASLDKFIESIQSIPEALKAGKKVKLSHEEVMQKIGELFALRHRINLSSDFLITPDFYWDRENLEGLYDKTCQFLSIGRRVKVMNEKLQHCMELTDLMRNHLNEKRALRLEWMIVILITIEVMFELGRVFF

SEQ ID NO: 884751 - protein, 238 aa, Homo sapiens
MGVENSAKEGDPGTIFFFREGAAVFWNVKDKTMKHVMKVLEKHEIQPYEIALVHWENEELNYIKIEGQSKLHRGEIKLNSELDLDDAILEKFAFSNALCLSVKLAIWEASLDKFIESIQSIPEALKAGKKVKLSHEEVMQKIGELFALRHRINLSSDFLITPDFYWDRENLEGLYDKTCQFLSIGRRVKVMNEKLQHCMELTDLMRNHLNEKRALRLEWMIVILITIEVMFELGRVFF

SEQ ID NO: 884752 - protein, 277 aa, Homo sapiens
MPATLLRAVARSHHILSKAHQCRRIGHLMLKPLKEFENTTCSTLTIRQSLDLFLPDKTASGLNKSQILEMNQKKSDTSMLSPLNAARCQDEKAHLPTMKSFGTHRRVTHKPNLLGSKWFIKILKRHFSSVSTETFVPKQDFPQVKRPLKASRTRQPSRTNLPVLSVNEDLMHCTAFATADEYHLGNLSQDLASHGYVEVTSLPRDAANILVMGVENSAKEGDPGTIFFFREGAAVFWNVKDKTMKHVMKVLEKHEIQPYEIALVHWENEELNYIKIE

SEQ ID NO: 884753 - protein, 325 aa, Homo sapiens
GGRERPSRRWVGCSSERLGVRLFPCSPAEEACVPGASFFSSGGEDLMHCTAFATADEYHLGNLSQDLASHGYVEVTSLPRDAANILVMGVENSAKEGDPGTIFFFREGAAVFWNVKDKTMKHVMKVLEKHEIQPYEIALVHWENEELNYIKIEGQSKLHRGEIKLNSELDLDDAILEKFAFSNALCLSVKLAIWEASLDKFIESIQSIPEALKAGKKVKLSHEEVMQKIGELFALRHRINLSSDFLITPDFYWDRENLEGLYDKTCQFLSIGRRVKVMNEKLQHCMELTDLMRNHLNEKRALRLEWMIVILITIEVMFELGRVFF

SEQ ID NO: 884754 - protein, 159 aa, Homo sapiens
RRATRGADMEASESRKQARDREVPGPRERKRSRRRGSRGQTVTWPEFLPLSGTRVQCGCAVAGVGGSALPGDGLAAVVRGWGCGSFPAVLPRKRASLALPSSLPAERLVYCLFFSSSSGPAWRSAPWLLAARNVYSYGLRQCGCDPLPLTVIFGQLSWE

SEQ ID NO: 884755 - protein, 219 aa, Homo sapiens
MNRGFSVFSSRRPLDRGSSRGPGRSSRSPFTSSDFSLSPRYPGSGSISPGTPGTSSSRGIFLGSSRSPSDGAGLGASASVSIFSPILLFFSGFSSWFSASSFSRGVLMPSPFSLGAGVAGLEVQGLLVAEASGVVGDVLVGEEALEERLESALGSGISSGIDQRPLMCSNSCTFFLTRDMTPMRVNTCWRLSPSRGTPSAKVSEPSAPGSHRWRMNKDT

SEQ ID NO: 884756 - protein, 546 aa, Homo sapiens
MSSIQITSPARGSFRSSPSDTNAPTISFSFFTKHWRAVGGGCDEGPCRHLAVIGACGGQGPYGCGAEGRPVPRRCSVGTRRVGRCGVRLRALAGQPAEDAALGHLKAGCDGGYSGQRGWQAGHVRLHVAQQLLQLVQNLVQDGVGRLVPRQRLLGEVLVALGQALGLGEAGVEGHGGVRRLLRQVQVGRPPQLLLNHQRLLQELEPPGQELIFHLQKVPLIGFSFKWLVDNGKLSIILDVLPPCIAMEDNPSQKPIVMSSVPDLIEFPRGNSCPFLILPQCVKLCEATIGDIEHEPGLLCLFLSSPIGPWLISRPWSKLPVTFYIFSLAQIPCFPLRPLPVFLSINGFSSPLSPGVDSVADFSLSPRYPGSGSISPGTPGTSSSRGIFLGSSRSPSDGAGLGASASVSIFSPILLFFSGFSSWFSASSFSRGVLMPSPFSLGAGVAGLEVQGLLVAEASGVVGDVLVGEEALEERLESALGSGISSGIDQRPLMCSNSCTFFLTRDMTPMRVNTCWRLSPSRGTPSAKVSEPSAPGSHRWRMNKDT

SEQ ID NO: 884757 - protein, 125 aa, Homo sapiens
MAPAAALRAGLWGAFGCVQVAPSLSQPIGAQSDAIHQELVQEGGGQAFLQGSKAIHLADGDEGMEDISVVPLVCARGLQFSLQLHPGLHHLQGIGEYTGPAGCQATHQEVHGGIAVAGTDPRVRK

SEQ ID NO: 884758 - protein, 118 aa, Homo sapiens
MDERSRFLRFRGFPGLFSFCFLGPRFLFFTPNADGSSRMSSLSGGGGGGGGGSGGGGGGGGGKRWQPGGLWRSRPRSWPGPRPSTPSSSSSSSSSSAASTSSSSSNQYDWCSHKRKKF

SEQ ID NO: 884759 - protein, 1442 aa, Homo sapiens
MSTRCPCSFSFRSIFWSSMSFPDDLISAPPSEAPLGSLGDSIAATGKRYGWLQHFLRSIMILSSDTWFPPPREFKASKFRVRMYLKYFFCMGLSSTRTMSSVLAGMFLKTSALSLRSMCGPSNIMQFLDLVLFGYVSKLLQEALQVVKSLWGEEVQEMEELLQIILQWGSCQQQLMIYLVTIENPEKLGLVVLESMGLIYHKTGPADGTKCCLINGDQLIRCQENMELHLCLPFHLKSFLAPFDGIVLKGEFILTNDGPAVLVTRVCHHIEFGCPHLELPLPVNDGREWGTHQEGTFCVALLVELSRGRRWFVWSCLAPSHQLEWCQCPGPRRSVPVQPFQLIHVQGASSGCDKPWLSLIFHGRIISEENWEAHHPVAPSSSSYTCGAGQGLPPELVLGVSSSFAYVLRIQGYSFHLPPTWTGHMVSPSILLDSGNPLFIHTVVDDAVDGHPLWLDAKTIVLLLHLSIVRVFHFTLVALPIILAGAIVQGWGLIHVILPLVVSIHNQMEDFQLKLLGPGAVPVGESYPLDKELSLLICLEEDGGVGHLDFHLPVEGLALLQVAPPTANVGSSALDPSARGMCIGDTAIHHWECQAGEGLDNECGGGDARVTAQELPAVLAYAAVLHVIILLLLLPFFLSLLFVFFFFLLGLPLDPLLLTVRAAPFALWSPVKLRIKADEVVGTRAGVTQNNFPTLLAHLTVILVIRLVAINLLLPGQLQDSPGPSSSSFLAGLSLVSWCGQGHQAGLRHCGHCHCPGLIPQPLVQDLRRSEKTYEPPFFLLPPRSPSFILSGAIFFPRSFLRPSGTRGLLLRLLWPGPLPSLVLALRMGGGWISAAGGGGRAGGPEGAMGVADETAADTCSATAAAAAAAAAATAAADPLKGLLALNSLHLAPRMVIILDIGILGFFLAIRGLMKLAEGFVVGERVVILLREHMLHILQAPGQKQQLLMTSVPLAFAPHLPPPFSAALSSSPFFLGASFFVSDPVRFHIHCPHSLTSPGTHLAQNQIPPHCHASCVFGVFLACSPSASWVLVFSSSHPMLTAAAECHPYLAAGAAAAGAAVAAAAAAAGRGGSRGGCGGRGPGRGPARARVLPRRRPPHRPRRPPPPPPPPPTNMTGVLIRGRNFDTDIYTGKSMRRHMEKTAIYKMRREGSEETNPADTLILDFLAFRIITKSIFIVEATHSVIHCYGSPQQTKTVSKEYMGILYSLYCNLFKILKLFPNKKVNSYWTHFAHQALYRNSWVKVPGLNPGPHSYWPGRGSHRALSNFLVVQSAGNVGIVNSSLAASFMVVRGSLQLPAVDKEHQITASRVLLLPVVVSLSKRDRFAETRGISRLELKMHLLQLRLNYFSFLFFTPNADGSSRMSSLSGGGGGGGGGSGGGGGGGGGKRWQPGGLWRSRPRSWPGPRPSTPSSSSSSSSSSAASTSSSSSNQYDWCSHKRKKF

SEQ ID NO: 884760 - protein, 125 aa, Homo sapiens; identical to SEQ ID NO: 884757

SEQ ID NO: 884761 - protein, 76 aa, Homo sapiens
MAPAAALRAGLWGAFGCVQVAPSLSQPIGAQSDAIHQELVQEGGGQAFLQGSKAIHLADGDEGMDVTFLIQDPLER

SEQ ID NO: 884762 - protein, 219 aa, Homo sapiens; identical to SEQ ID NO: 884755

SEQ ID NO: 884763 - protein, 670 aa, Homo sapiens
MKKASRSVGSVPKVSAISKTQTAEKIKPENSSSASTGGKLVKPGTAASLSKTKSSDDLLAGMAGGVTVTNGVKGKKSTCPSAAPSASAPAMTTVENKSKISTGTASSTKRSTSTGNKESSSTRERLRERTRLNQSKKLPSAGQGANDMALAKRSRSRTATECDVRMSKSKSDNQISDRAALEAKVKDLLTLAKTKDVEILHLRNELRDMRAQLGINEDHSEGDEKSEKETIMAHQPTDVESTLLQLQEQNTAIREELNQLKNENRMLKDRLNALGFSLEQRLDNSEKLFGYQSLSPEITPGNQSDGGGTLTSSVEGSAPGSVEDLLSQDENTLMDHQHSNSMDNLDSECSEVYQPLTSSDDALDAPSSSESEGIPSIERSRKGSSGNASEVSVACLTERIHQMEENQHSTSEELQATLQELADLQQITQELNSENERLGEEKVILMESLCQQSDKLEHFSRQIEYFRSLLDEHHISYVIDEDVKSGRYMELEQRYMDLAENARFEREQLLGVQQHLSNTLKMAEQDNKEAQEMIGALKERSHHMERIIESEQKGKAALAATLEEYKATVASDQIEMNRLKAQLENEKQKVAELYSIHNSGDKSDIQDLLESVRLDKEKAETLASSLQEDLAHTRNDANRLQDAIAKVEDEYRAFQEEAKKQIEDLNMTLE

SEQ ID NO: 884764 - protein, 1176 aa, Homo sapiens
AGRPGKRRCGVGCFPEAGLNGSRLSHRVSSPPSPNQEIARERCGAARFACKCITKRQPRMKKASRSVGSVPKVSAISKTQTAEKIKPENSSSASTGGKLVKPGTAASLSKTKSSDDLLAGMAGGVTVTNGVKGKKSTCPSAAPSASAPAMTTVENKSKISTGTASSTKRSTSTGNKESSSTRERLRERTRLNQSKKLPSAGQGANDMALAKRSRSRTATECDVRMSKSKSDNQISDRAALEAKVKDLLTLAKTKDVEILHLRNELRDMRAQLGINEDHSEGDEKSEKETIMAHQPTDVESTLLQLQEQNTAIREELNQLKNENRMLKDRLNALGFSLEQRLDNSEKLFGYQSLSPEITPGNQSDGGGTLTSSVEGSAPGSVEDLLSQDENTLMDHQHSNSMDNLDSECSEVYQPLTSSDDALDAPSSSESEGIPSIERSRKGSSGNASEVSVACLTERIHQMEENQHSTSEELQATLQELADLQQITQELNSENERLGEEKVILMESLCQQSDKLEHFSRQIEYFRSLLDEHHISYVIDEDVKSGRYMELEQRYMDLAENARFEREQLLGVQQHLSNTLKMAEQDNKEAQEMIGALKERSHHMERIIESEQKGKAALAATLEEYKATVASDQIEMNRLKAQLENEKQKVAELYSIHNSGDKSDIQDLLESVRLDKEKAETLASSLQEDLAHTRNDANRLQDAIAKVEDEYRAFQEEAKKQIEDLNMTLEKLRSDLDEKETERSDMKETIFELEDEVEQHRAVKLHDNLIISDLENTVKKLQDQKHDMEREIKTLHRRLREESAEWRQFQADLQTAVVIANDIKSEAQEEIGDLKRRLHEAQEKNEKLTKELEEIKSRKQEEERGRVYNYMNAVERDLAALRQGMGLSRRSSTSSEPTPTVKTLIKSFDSASQVPNPAAAAIPRTPLSPSPMKTPPAAAVSPMQRHSISGPISTSKPLTALSDKRPNYGEIPVQEHLLRTSSASRPASLPRVPAMESAKTLSVSRRSSEEMKRDISAQEGASPASLMAMGTTSPQLSLSSSPTASVTPTTRSRIREERKDPLSALAREYGGSKRNALLKWCQKKTEGYQNIDITNFSSSWNDGLAFCALLHTYLPAHIPYQELNSQDKRRNFMLAFQAAESVGIKSTLDINEMVRTERPDWQNVMLYVTAIYKYFET

SEQ ID NO: 884765 - protein, 107 aa, Homo sapiens
YALGRGRGVIGRGKTEGYQNIDITNFSSSWNDGLAFCALLHTYLPAHIPYQELNSQDKRRNFMLAFQAAESVGIKSTLDINEMVRTERPDWQNVMLYVTAIYKYFET

SEQ ID NO: 884766 - protein, 1117 aa, Homo sapiens
MKKASRSVGSVPKVSAISKTQTAEKIKPENSSSASTGGKLVKPGTAASLSKTKSSDDLLAGMAGGVTVTNGVKGKKSTCPSAAPSASAPAMTTVENKSKISTGTASSTKRSTSTGNKESSSTRERLRERTRLNQSKKLPSAGQGANDMALAKRSRSRTATECDVRMSKSKSDNQISDRAALEAKVKDLLTLAKTKDVEILHLRNELRDMRAQLGINEDHSEGDEKSEKETIMAHQPTDVESTLLQLQEQNTAIREELNQLKNENRMLKDRLNALGFSLEQRLDNSEKLFGYQSLSPEITPGNQSDGGGTLTSSVEGSAPGSVEDLLSQDENTLMDHQHSNSMDNLDSECSEVYQPLTSSDDALDAPSSSESEGIPSIERSRKGSSGNASEVSVACLTERIHQMEENQHSTSEELQATLQELADLQQITQELNSENERLGEEKVILMESLCQQSDKLEHFSRQIEYFRSLLDEHHISYVIDEDVKSGRYMELEQRYMDLAENARFEREQLLGVQQHLSNTLKMAEQDNKEAQEMIGALKERSHHMERIIESEQKGKAALAATLEEYKATVASDQIEMNRLKAQLENEKQKVAELYSIHNSGDKSDIQDLLESVRLDKEKAETLASSLQEDLAHTRNDANRLQDAIAKVEDEYRAFQEEAKKQIEDLNMTLEKLRSDLDEKETERSDMKETIFELEDEVEQHRAVKLHDNLIISDLENTVKKLQDQKHDMEREIKTLHRRLREESAEWRQFQADLQTAVVIANDIKSEAQEEIGDLKRRLHEAQEKNEKLTKELEEIKSRKQEEERGRVYNYMNAVERDLAALRQGMGLSRRSSTSSEPTPTVKTLIKSFDSASQVPNPAAAAIPRTPLSPSPMKTPPAAAVSPMQRHSISGPISTSKPLTALSDKRPNYGEIPVQEHLLRTSSASRPASLPRVPAMESAKTLSVSRRSSEEMKRDISAQEGASPASLMAMGTTSPQLSLSSSPTASVTPTTRSRIREERKDPLSALAREYGGSKRNALLKWCQKKTEGYQNIDITNFSSSWNDGLAFCALLHTYLPAHIPYQELNSQDKRRNFMLAFQAAESVGIKSTLDINEMVRTERPDWQNVMLYVTAIYKYFET

SEQ ID NO: 884767 - protein, 183 aa, Homo sapiens
MESAKTLSVSRRSSEEMKRDISAQEGASPASLMAMGTTSPQLSLSSSPTASVTPTTRSRIREERKDPLSALAREYGGSKRNALLKWCQKKTEGYQNIDITNFSSSWNDGLAFCALLHTYLPAHIPYQELNSQDKRRNFMLAFQAAESVGIKSTLDINEMVRTERPDWQNVMLYVTAIYKYFET

SEQ ID NO: 884768 - protein, 1117 aa, Homo sapiens; identical to SEQ ID NO: 884766

SEQ ID NO: 884769 - protein, 576 aa, Homo sapiens
MPVAATNSETAMQQVLDNLGSLPSATGAAELDLIFLRGIMESPIVRSLAKVIMVLWFMQQNVFVPMKYMLKYFGAHERLEETKLEAVRDNNLELVQEILRDLAQLAEQSSTAAELAHILQEPHFQSLLETHDSVASKTYETPPPSPGLDPTFSNQPVPPDAVRMVGIRKTAGEHLGVTFRVEGGELVIARILHGGMVAQQGLLHVGDIIKEVNGQPVGSDPRALQELLRNASGSVILKILPSYQEPHLPRQVFVKCHFDYDPARDSLIPCKEAGLRFNAGDLLQIVNQDDANWWQACHVEGGSAGLIPSQLLEEKRKAFVKRDLELTPNSGTLCGSLSGKKKKRMMYLTTKNAEFDRHELLIYEEVARMPPFRRKTLVLIGAQGVGRRSLKNKLIMWDPDRYGTTVPYTSRRPKDSEREGQGYSFVSRGEMEADVRAGRYLEHGEYEGNLYGTRIDSIRGVVAAGKVCVLDVNPQAVKVLRTAEFVPYVVFIEAPDFETLRAMNRAALESGISTKQLTEADLRRTVEESSRIQRGYGHYFDLCLVNSNLERTFRELQTAMEKLRTEPQWVPVSWVY

SEQ ID NO: 884770 - protein, 225 aa, Homo sapiens
MAALASSLIRQKREVREPGGSRPVSAQRRVCPRGTKSLCQKQLLILLSKVRLCGGRPARPDRGPEPQLKGIVTKLFCRQGFYLQANPDGSIQGTPEDTSSFTHFNLIPVGLRVVTIQSAKLGHYMAMNAEGLLYSSPHFTAECRFKECVFENYYVLYASALYRQRRSGRAWYLGLDKEGQVMKGNRVKKTKAAAHFLPKLLEVAMYQEPSLHSVPEASPSSPPAP

SEQ ID NO: 884771 - protein, 569 aa, Homo sapiens
MAGSPGSGVSLEGISLESSEEAELQREAMQQVLDNLGSLPSATGAAELDLIFLRGIMESPIVRSLAKAHERLEETKLEAVRDNNLELVQEILRDLAQLAEQSSTAAELAHILQEPHFQSLLETHDSVASKTYETPPPSPGLDPTFSNQPVPPDAVRMVGIRKTAGEHLGVTFRVEGGELVIARILHGGMVAQQGLLHVGDIIKEVNGQPVGSDPRALQELLRNASGSVILKILPSYQEPHLPRQVFVKCHFDYDPARDSLIPCKEAGLRFNAGDLLQIVNQDDANWWQACHVEGGSAGLIPSQLLEEKRKAFVKRDLELTPNSGTLCGSLSGKKKKRMMYLTTKNAEFDRHELLIYEEVARMPPFRRKTLVLIGAQGVGRRSLKNKLIMWDPDRYGTTVPYTSRRPKDSEREGQGYSFVSRGEMEADVRAGRYLEHGEYEGNLYGTRIDSIRGVVAAGKVCVLDVNPQAVKVLRTAEFVPYVVFIEAPDFETLRAMNRAALESGISTKQLTEADLRRTVEESSRIQRGYGHYFDLCLVNSNLERTFRELQTAMEKLRTEPQWVPVSWVY

SEQ ID NO: 884772 - protein, 541 aa, Homo sapiens
MQQVLDNLGSLPSATGAAELDLIFLRGIMESPIVRSLAKAHERLEETKLEAVRDNNLELVQEILRDLAQLAEQSSTAAELAHILQEPHFQSLLETHDSVASKTYETPPPSPGLDPTFSNQPVPPDAVRMVGIRKTAGEHLGVTFRVEGGELVIARILHGGMVAQQGLLHVGDIIKEVNGQPVGSDPRALQELLRNASGSVILKILPSYQEPHLPRQVFVKCHFDYDPARDSLIPCKEAGLRFNAGDLLQIVNQDDANWWQACHVEGGSAGLIPSQLLEEKRKAFVKRDLELTPNSGTLCGSLSGKKKKRMMYLTTKNAEFDRHELLIYEEVARMPPFRRKTLVLIGAQGVGRRSLKNKLIMWDPDRYGTTVPYTSRRPKDSEREGQGYSFVSRGEMEADVRAGRYLEHGEYEGNLYGTRIDSIRGVVAAGKVCVLDVNPQAVKVLRTAEFVPYVVFIEAPDFETLRAMNRAALESGISTKQLTEADLRRTVEESSRIQRGYGHYFDLCLVNSNLERTFRELQTAMEKLRTEPQWVPVSWVY

SEQ ID NO: 884773 - protein, 225 aa, Homo sapiens; identical to SEQ ID NO: 884770

SEQ ID NO: 884774 - protein, 110 aa, Homo sapiens
LPPLCLVQPPAQCSDFAGPGSSAETPSLLPEGPGRLAGRGGKLRLRGTGREEPGAEASATRRRINRTGQSLSSKASSPNCSAARVSTSRRIPTEASRAPQRIPAPSPTST

SEQ ID NO: 884775 - protein, 552 aa, Homo sapiens
MPVAATNSETAMQQVLDNLGSLPSATGAAELDLIFLRGIMESPIVRSLAKAHERLEETKLEAVRDNNLELVQEILRDLAQLAEQSSTAAELAHILQEPHFQSLLETHDSVASKTYETPPPSPGLDPTFSNQPVPPDAVRMVGIRKTAGEHLGVTFRVEGGELVIARILHGGMVAQQGLLHVGDIIKEVNGQPVGSDPRALQELLRNASGSVILKILPSYQEPHLPRQVFVKCHFDYDPARDSLIPCKEAGLRFNAGDLLQIVNQDDANWWQACHVEGGSAGLIPSQLLEEKRKAFVKRDLELTPNSGTLCGSLSGKKKKRMMYLTTKNAEFDRHELLIYEEVARMPPFRRKTLVLIGAQGVGRRSLKNKLIMWDPDRYGTTVPYTSRRPKDSEREGQGYSFVSRGEMEADVRAGRYLEHGEYEGNLYGTRIDSIRGVVAAGKVCVLDVNPQAVKVLRTAEFVPYVVFIEAPDFETLRAMNRAALESGISTKQLTEADLRRTVEESSRIQRGYGHYFDLCLVNSNLERTFRELQTAMEKLRTEPQWVPVSWVY

SEQ ID NO: 884776 - protein, 552 aa, Homo sapiens; identical to SEQ ID NO: 884775

SEQ ID NO: 884777 - protein, 225 aa, Homo sapiens; identical to SEQ ID NO: 884770

SEQ ID NO: 884778 - protein, 713 aa, Homo sapiens
  misc_feature (150)..(150): Xaa can be any naturally occurring amino acid
MAALASSLIRQKREVREPGGSRPVSAQRRVCPRGTKSLCQKQLLILLSKVRLCGGRPARPDRGPEPQLKGIVTKLFCRQGFYLQANPDGSIQGTPEDTSSFTHFNLIPVGLRVVTIQSAKLGHYMAMNAEGLLYSSTWRSPGLKCWVDPXERRFRALASFTMPVAATNSETAMQQVLDNLGSLPSATGAAELDLIFLRGIMESPIVRSLAKAHERLEETKLEAVRDNNLELVQEILRDLAQLAEQSSTAAELAHILQEPHFQSLLETHDSVASKTYETPPPSPGLDPTFSNQPVPPDAVRMVGIRKTAGEHLGVTFRVEGGELVIARILHGGMVAQQGLLHVGDIIKEVNGQPVGSDPRALQELLRNASGSVILKILPSYQEPHLPRQVFVKCHFDYDPARDSLIPCKEAGLRFNAGDLLQIVNQDDANWWQACHVEGGSAGLIPSQLLEEKRKAFVKRDLELTPNSGTLCGSLSGKKKKRMMYLTTKNAEFDRHELLIYEEVARMPPFRRKTLVLIGAQGVGRRSLKNKLIMWDPDRYGTTVPYTSRRPKDSEREGQGYSFVSRGEMEADVRAGRYLEHGEYEGNLYGTRIDSIRGVVAAGKVCVLDVNPQAVKVLRTAEFVPYVVFIEAPDFETLRAMNRAALESGISTKQLTEADLRRTVEESSRIQRGYGHYFDLCLVNSNLERTFRELQTAMEKLRTEPQWVPVSWVY

SEQ ID NO: 884779 - protein, 169 aa, Homo sapiens
SAPTPHILEPQLKGIVTKLFCRQGFYLQANPDGSIQGTPEDTSSFTHFNLIPVGLRVVTIQSAKLGHYMAMNAEGLLYSSPHFTAECRFKECVFENYYVLYASALYRQRRSGRAWYLGLDKEGQVMKGNRVKKTKAAAHFLPKLLEVAMYQEPSLHSVPEASPSSPPAP

SEQ ID NO: 884780 - protein, 81 aa, Homo sapiens
LPPLCLVQPPAQCSDFAGPGSSAETPSLLPEGPGRLAGRGGKLRLRGTGREEPGAEASATRRRINRTGQVEGRREKEEGVL

SEQ ID NO: 884781 - protein, 209 aa, Homo sapiens
MPVAVMAESAFSFKKLLDQCENQELEAPGGIATPPVYGQLLALYLLHNDMNNARYLWKRIPPAIKSANSELGGIWSVGQRIWQRDFPGIYTTINAHQWSETVQPIMEALRDATRRRAFALVSQAYTSIIADDFAAFVGLPVEEAVKGILEQGWQADSTTRMVLPRKPVAGALDVSFNKFIPLSEPAPVPPIPNEQQLARLTDYVAFLEN

SEQ ID NO: 884782 - protein, 209 aa, Homo sapiens; identical to SEQ ID NO: 884781

SEQ ID NO: 884783 - protein, 209 aa, Homo sapiens; identical to SEQ ID NO: 884781

SEQ ID NO: 884784 - protein, 209 aa, Homo sapiens; identical to SEQ ID NO: 884781

SEQ ID NO: 884785 - protein, 160 aa, Homo sapiens
MNNARYLWKRIPPAIKSANSELGGIWSVGQRIWQRDFPGIYTTINAHQWSETVQPIMEALRDATRRRAFALVSQAYTSIIADDFAAFVGLPVEEAVKGILEQGWQADSTTRMVLPRKPVAGALDVSFNKFIPLSEPAPVPPIPNEQQLARLTDYVAFLEN

SEQ ID NO: 884786 - protein, 190 aa, Homo sapiens [sequence omitted]

SEQ ID NO: 884787 - protein, 180 aa, Homo sapiens
MDRRVLSLIYSSRLLPLNGRNISGASYHIPNLATHDLANSELGGIWSVGQRIWQRDFPGIYTTINAHQWSETVQPIMEALRDATRRRAFALVSQAYTSIIADDFAAFVGLPVEEAVKGILEQGWQADSTTRMVLPRKPVAGALDVSFNKFIPLSEPAPVPPIPNEQQLARLTDYVAFLEN

SEQ ID NO: 884788 - protein, 104 aa, Homo sapiens [sequence omitted]

SEQ ID NO: 884789 - protein, 193 aa, Homo sapiens
MPVAVMAESAFSFKKLLDQCENQELEAPGGIATPPVYGQLLALYLLHNDMNNARYLWKRIPPAIKSANSELGGIWSVGQRIWQRDFPGIYTTINAHQWSETVQPIMEALRDATRRRAFALVSQAYTSIIADDFAAFVGLPVEEAVKGILEQGWQADSTTRMVLPRKPEPAPVPPIPNEQQLARLTDYVAFLEN

SEQ ID NO: 884790 - protein, 209 aa, Homo sapiens; identical to SEQ ID NO: 884781

SEQ ID NO: 884791 - protein, 106 aa, Homo sapiens
MPVAVMAESAFSFKKLLDQCENQELEAPGGIATPPVYGQLLALYLLHNDIVSMFEPKAKSNRFLKVIWKYFCTEVAPLNIGTTSYLFYYSNFNVYFLLNHRLMNYD

SEQ ID NO: 884792 - protein, 209 aa, Homo sapiens; identical to SEQ ID NO: 884781

SEQ ID NO: 884793 - protein, 114 aa, Homo sapiens
MPVAVMAESAFSFKKLLDQCENQELEVTLCVALGETAEYVLGPGAAPVSRVTGSEASGLWELTGRAWEVDVWIPDRRNLLRPGPVSPNSPGPFCYVSSACEPENPVRLCSSTYR

SEQ ID NO: 884794 - protein, 209 aa, Homo sapiens; identical to SEQ ID NO: 884781

SEQ ID NO: 884795 - protein, 209 aa, Homo sapiens; identical to SEQ ID NO: 884781

SEQ ID NO: 884796 - protein, 215 aa, Homo sapiens
MPVAVMAESAFSFKKLLDQCENQELEAPGGIATPPVYGQLLALYLLHNDIVVAEIRNNARYLWKRIPPAIKSANSELGGIWSVGQRIWQRDFPGIYTTINAHQWSETVQPIMEALRDATRRRAFALVSQAYTSIIADDFAAFVGLPVEEAVKGILEQGWQADSTTRMVLPRKPVAGALDVSFNKFIPLSEPAPVPPIPNEQQLARLTDYVAFLEN

SEQ ID NO: 884797 - protein, 190 aa, Homo sapiens [sequence omitted]

SEQ ID NO: 884798 - protein, 127 aa, Homo sapiens
MPVAVMAESAFSFKKLLDQCENQELEAPGGIATPPVYGQLLALYLLHNDMNNARYLWKRIPPAIKSESGREISLGSIQPSTLTSGLRRSSQLWKHLEMQQGDAPLPWSLKRILQSSPMILQPLLDFL

SEQ ID NO: 884799 - protein, 76 aa, Homo sapiens
SRGIPGFLQEAVKGILEQGWQADSTTRMVLPRKPVAGALDVSFNKFIPLSEPAPVPPIPNEQQLARLTDYVAFLEN

SEQ ID NO: 884800 - protein, 106 aa, Homo sapiens; identical to SEQ ID NO: 884791

SEQ ID NO: 884801 - protein, 211 aa, Homo sapiens
RGAGVGDITGQALSGNTKFHAGSWESWCCCCLIPADRPWDRGQHWQLEMADTRSVHETRFEAAVKVIQSLPKNVIPHNNEQTLDIAEHAAKQATLRGPRRTAQARRQEHPELARKITGEARRDTDGNDQRGKPGLASTRKNVKRTMDNDATDVQTKTQEEKRHEGTEGNTDDGTNRVTGTRKKRQQRPEKEETKSVTTKQRTENSRRQREK

SEQ ID NO: 884802 - protein, 525 aa, Homo sapiens
MLFLSFHAGSWESWCCCCLIPADRPWDRGQHWQLEMADTRSVHETRFEAAVKVIQSLPKNGSFQPTNEMMLKFYSFYKQATEGPCKLSRPGFWDPIGRYKWDAWSSLGDMTKEEAMIAYVEEMKKIIETMPMTEKVEELLRVIGPFYEIVEDKKSGRSSDITSDLGNVLTSTPNAKTVNGKAESSDSGAESEEEEAQEEVKGAEQSDNDKKMMKKSADHKNLEVIVTNGYDKDGFVQDIQNDIHASSSLNGRSTEEVKPIDENLGQTGKSAVCIHQDINDDHVEDVTGIQHLTSDSDSEVYCDSMEQFGQEESLDSFTSNNGPFQYYLGGHSSQPMENSGFREDIQVPPGNGNIGNMQVVAVEGKGEVKHGGEDGRNNSGAPHREKRGGETDEFSNVRRGRGHRMQHLSEGTKGRQVGSGGDGERWGSDRGSRGSLNEQIALVLMRLQEDMQNVLQRLQKLETLTALQAKSSTSTLQTAPQPTSQRPSWWPFEMSPGVLTFAIIWPFIAQWLVYLYYQRRRRKLN

SEQ ID NO: 884803 - protein, 112 aa, Homo sapiens
RGAGVGDITGQALSGNTKFHAGSWESWCCCCLIPADRPWDRGQHWQLEMADTRSVHETRFEAAVKVIQSLPKNEFSCLRLLSSWDYNCMPPHLANFCIFSRDRVLPCWPGWS

SEQ ID NO: 884804 - protein, 525 aa, Homo sapiens; identical to SEQ ID NO: 884802

SEQ ID NO: 884805 - protein, 112 aa, Homo sapiens; identical to SEQ ID NO: 884803

SEQ ID NO: 884806 - protein, 525 aa, Homo sapiens; identical to SEQ ID NO: 884802

SEQ ID NO: 884807 - protein, 298 aa, Homo sapiens
MKTLQSTLLLLLLVPLIKPAPPTQQDSRIIYDYGTDNFEESIFSQDYEDKYLDGKNIKEKETVIIPNEKSLQLQKDEAITPLPPKKENDEMPTCLLCVCLSGSVYCEEVDIDAVPPLPKESAYLYARFNKIKKLTAKDFADIPNLRRLDFTGNLIEDIEDGTFSKLSLLEELSLAENQLLKLPVLPPKLTLFNAKYNKIKSRGIKANAFKKLNNLTFLYLDHNALESVPLNLPESLRVIHLQFNNIASITDDTFCKANDTSYIRDRIEEIRLEGNPIVLGKHPNSFICLKRLPIGSYF

SEQ ID NO: 884808 - protein, 298 aa, Homo sapiens; identical to SEQ ID NO: 884807

SEQ ID NO: 884809 - protein, 298 aa, Homo sapiens; identical to SEQ ID NO: 884807

SEQ ID NO: 884810 - protein, 113 aa, Homo sapiens
MKTLQSTLLLLLLVPLIKPAPPTQQDSRIIYDYGTDNFEESIFSQDYEDKYLDGKNIKEKETVIIPNEKSLQLQKDEAITPLPPKKENDGKYHSKYFSNGSFKNSYNGLYSLW

SEQ ID NO: 884811 - protein, 298 aa, Homo sapiens; identical to SEQ ID NO: 884807

SEQ ID NO: 884812 - protein, 364 aa, Homo sapiens
TAFHPRERMLAKISTTWKLFLKLLGPEILLSSLKSRHSFSHSPSHLGLMHRHEHLLRKTTKNFKTATTTLQSTLLLLLLVPLIKPAPPTQQDSRIIYDYGTDNFEESIFSQDYEDKYLDGKNIKEKETVIIPNEKSLQLQKDEAITPLPPKKENDEMPTCLLCVCLSGSVYCEEVDIDAVPPLPKESAYLYARFNKIKKLTAKDFADIPNLRRLDFTGNLIEDIEDGTFSKLSLLEELSLAENQLLKLPVLPPKLTLFNAKYNKIKSRGIKANAFKKLNNLTFLYLDHNALESVPLNLPESLRVIHLQFNNIASITDDTFCKANDTSYIRDRIEEIRLEGNPIVLGKHPNSFICLKRLPIGSYF

SEQ ID NO: 884813 - protein, 214 aa, Homo sapiens [sequence omitted]

SEQ ID NO: 884814 - protein, 283 aa, Homo sapiens
MPRGLGGLAVTQRGHRRGGKRDLVRPYPLPVSPGRARATRTDGTRRSWRPAGLAGDPGPCSPGACGEVSLLPCPPALCPLRFAVQPIFPLQGPPGVKGEKGDHGLPGLQGHPGHQGIPGRVGLQGPKGMRGLEGTAGLPGPPGPRGFQGMAGARGTSGERGPPGTVGPTGLPGPKGERGEKGEPQSLATLYQLVSQACESAIQTHVSKFDSFHENTRPPMPILEQKLEPGTEPLGSPGTRSKALVPGEWGRGGRHLEGRGEPGAVGQMGSPGQQGASTQGLWE

SEQ ID NO: 884815 - protein, 616 aa, Homo sapiens
GLWRTSRAVSQVHVAVGRSKVRLYVDCRKVAERPLGEMGSPPAAGFVTLGRLAKARGPRSSSAAFQLQMLQIVCSDTWADEDRCCELPASRDGETCPAFVSACSCSSETPGPPGPQGPPGLPGRNGTPGEQGFPGPRGPPGVKGEKGDHGLPGLQGNPDTGHPRESMAPGTKENERLRDCWLLEPLSPSGFQAWQGAGALVESEDIRDRAATWMPCPNGDRGQMGTRDIATLTRVSQAEYAPRTWPVDLQRHRPDIAQKDARRGAHARSTHVSCRTSGTTALDGLTPLRTAHARQLTALGGPPQDETRADTTHTQRPRARTRPKQTQGPPSAQRTQHDHPNTRATAPTADTSDQTLSTNTKYSPHTPIQTKQNNYTTASQDTKSTPTNYITKSHSLHYIRTLQPPTDDQHTPLNHPPQVRYTEQNNTPTQRRTAHHTYARNTFHNDHYEPQSAQREHEAQNNTTRQHNGKQARETQKRRKDEEREKDSDERDGDTRQAHRRSRDPEERETNRPATDRDESSEEREHCLTRPKTRELRKQAQERLRTNPTATKNEAQEESTELTQSHDPTSRNDKRAEKQQEDIDENAEKGDRRVEMLNDEMAGLLRDAREIDGGAL

SEQ ID NO: 884816 - protein, 1297 aa, Homo sapiens
MSSGDPAHLGLCLWLWLGATLGREQVQASGLLRLAVLPEDRLQMKWRESEGSGLGYLVQVKPMAGDSEQEVILTTKTPKATVGGLSPSKGYTLQIFELTGSGRFLLARREFVIEDLKSSSLDRSSQRPLGSGAPEPTPYHTGSPDPEQASEPQVAFKPSQDPRTPGGSEWRETGPQYRCLPPVPADMVFLVDGSWSIGHSHFQQVKDFLASVIAPFEIGPDKVQVGLTQYSGDAQTEWDLNSLSTKEQVLAAVRRLRYKGGNTFTGLALTHVLGQNLQPAAGLRPEAAKVVILVTDGKSQDDVHTAARVLKDLGVNVFAVGVKNADEAELRLLASPPRDITVHSVLDFLQLGALAGLLSRLICQRLQGGSPRQGPAAAPALDTLPAPTSLVLSQVTSSSIRLSWTPAPRHPLKYLIVWRASRGGTPREVVVEGPAASTELHNLASRTEYLVSVFPIYEGGVGEGLRGLVTTAPLPPPRALTLAAVTPRTVHLTWQPSAGATHYLVRCSPASPKGEEEEREVQVGRPEVLLDGLEPGRDYEVSVQSLRGPEGSEARGIRARTPTLAPPRHLGFSDVSHDAARVFWEGAPRPVRLVRVTYVSSEGGHSGQTEAPGNATSATLGPLSSSTTYTVRVTCLYPGGGSSTLTGRVTTKKAPSPSQLSMTELPGDAVQLAWVAAAPSGVLVYQITWTPLGEGKAHEISVPGNLGTAVLPGLGRHTEYDVTILAYYRDGARSDPVSLRYTPSTVSRSPPSNLALASETPDSLQVSWTPPLGRVLHYWLTYAPASGLGPEKSVSVPGARSHVTLPDLQAATKYRVLVSAIYAAGRSEAVSATGQTACPALRPDGSLPGFDLMVAFSLVEKAYASIRGVAMEPSAFGGTPTFTLFKDAQLTRRVSDVYPAPLPPEHTIVFLVRLLPETPREAFALWQMTAEDFQPLLGVLLDAGKKSLTYFHRDPRAALQEATFDPQEVRKIFFGSFHKVHVAVGRSKVRLYVDCRKVAERPLGEMGSPPAAGFVTLGRLAKARGPRSSSAAFQLQMLQIVCSDTWADEDRCCELPASRDGETCPAFVSACSCSSETPGPPGPQGPPGLPGRNGTPGEQGFPGPRGPPGVKGEKGDHGLPGLQGHPGHQGIPGRVGLQGPKGMRGLEGTAGLPGPPGPRGFQGMAGARGTSGERGPPGTVGPTGLPGPKGERGEKGEPQSLATLYQLVSQACESAIQTHVSKFDSFHENTRPPMPILEQKLEPGTEPLGSPGTRSKALVPGEWGRGGRHLEGRGEPGAVGQMGSPGQQGASTQGLWE

SEQ ID NO: 884817 - protein, 1322 aa, Homo sapiens
MSSGDPAHLGLCLWLWLGATLGREQVQASGLLRLAVLPEDRLQMKWRESEGSGLGYLVQVKPMAGDSEQEVILTTKTPKATVGGLSPSKGYTLQIFELTGSGRFLLARREFVIEDLKSSSLDRSSQRPLGSGAPEPTPYHTGSPDPEQASEPQVAFKPSQDPRTPAGPQYRCLPPVPADMVFLVDGSWSIGHSHFQQVKDFLASVIAPFEIGPDKVQVGLTQYSGDAQTEWDLNSLSTKEQVLAAVRRLRYKGGNTFTGLALTHVLGQNLQPAAGLRPEAAKVVILVTDGKSQDDVHTAARVLKDLGVNVFAVGVKNADEAELRLLASPPRDITVHSVLDFLQLGALAGLLSRLICQRLQGGSPRQGPAAAPALDTLPAPTSLVLSQVTSSSIRLSWTPAPRHPLKYLIVWRASRGGTPREVVVEGPAASTELHNLASRTEYLVSVFPIYEGGVGEGLRGLVTTAPLPPPRALTLAAVTPRTVHLTWQPSAGATHYLVRCSPASPKGEEEEREVQVGRPEVLLDGLEPGRDYEVSVQSLRGPEGSEARGIRARTPTLAPPRHLGFSDVSHDAARVFWEGAPRPVRLVRVTYVSSEGGHSGQTEAPGNATSATLGPLSSSTTYTVRVTCLYPGGGSSTLTGRVTTKKAPSPSQLSMTELPGDAVQLAWVAAAPSGVLVYQITWTPLGEGKAHEISVPGNLGTAVLPGLGRHTEYDVTILAYYRDGARSDPVSLRYTPSTVSRSPPSNLALASETPDSLQVSWTPPLGRVLHYWLTYAPASGLGPEKSVSVPGARSHVTLPDLQAATKYRVLVSAIYAAGRSEAVSATGQTACPALRPDGSLPGFDLMVAFSLVEKAYASIRGVAMEPSAFGGTPTFTLFKDAQLTRRVSDVYPAPLPPEHTIVFLVRLLPETPREAFALWQMTAEDFQPLLGVLLDAGKKSLTYFHRDPRAALQEATFDPQEVRKIFFGSFHKVHVAVGRSKVRLYVDCRKVAERPLGEMGSPPAAGFVTLGRLAKARGPRSSSAAFQLQMLQIVCSDTWADEDRCCELPASRDGETCPAFVSACSCSSETPGPPGPQGPPGLPGRNGTPGEQGFPGPRGEPGPPGQMGPEGPGGQQGSPGTQGRAVQGPVGPPGVKGEKGDHGLPGLQGHPGHQGIPGRVGLQGPKGMRGLEGTAGLPGPPGPRGFQGMAGARGTSGERGPPGTVGPTGLPGPKGERGEKGEPQSLATLYQLVSQACESAIQTHVSKFDSFHENTRPPMPILEQKLEPGTEPLGSPGTRSKALVPGEWGRGGRHLEGRGEPGAVGQMGSPGQQGASTQGLWE

SEQ ID NO: 884818 - protein, 1316 aa, Homo sapiens
MSSGDPAHLGLCLWLWLGATLGREQVQASGLLRLAVLPEDRLQMKWRESEGSGLGYLVQVKPMAGDSEQEVILTTKTPKATVGGLSPSKGYTLQIFELTGSGRFLLARREFVIEDLKSSSLDRSSQRPLGSGAPEPTPYHTGSPDPEQASEPQVAFKPSQDPRTPAGPQYRCLPPVPADMVFLVDGSWSIGHSHFQQVKDFLASVIAPFEIGPDKVQVGLTQYSGDAQTEWDLNSLSTKEQVLAAVRRLRYKGGNTFTGLALTHVLGQNLQPAAGLRPEAAKVVILVTDGKSQDDVHTAARVLKDLGVNVFAVGVKNADEAELRLLASPPRDITVHSVLDFLQLGALAGLLSRLICQRLQGGSPRQGPAAAPALDTLPAPTSLVLSQVTSSSIRLSWTPAPRHPLKYLIVWRASRGGTPREVVVEGPAASTELHNLASRTEYLVSVFPIYEGGVGEGLRGLVTTAPLPPPRALTLAAVTPRTVHLTWQPSAGATHYLVRCSPASPKGEEEEREVQVGRPEVLLDGLEPGRDYEVSVQSLRGPEGSEARGIRARTPTLAPPRHLGFSDVSHDAARVFWEGAPRPVRLVRVTYVSSEGGHSGQTEAPGNATSATLGPLSSSTTYTVRVTCLYPGGGSSTLTGRVTTKKAPSPSQLSMTELPGDAVQLAWVAAAPSGVLVYQITWTPLGEGKAHEISVPGNLGTAVLPGLGRHTEYDVTILAYYRDGARSDPVSLRYTPSTVSRSPPSNLALASETPDSLQVSWTPPLGRVLHYWLTYAPASGLGPEKSVSVPGARSHVTLPDLQAATKYRVLVSAIYAAGRSEAVSATGQTACPALRPDGSLPGFDLMVAFSLVEKAYASIRGVAMEPSAFGGTPTFTLFKDAQLTRRVSDVYPAPLPPEHTIVFLVRLLPETPREAFALWQMTAEDFQPLLGVLLDAGKKSLTYFHRDPRAALQEATFDPQEVRKIFFGSFHKVHVAVGRSKVRLYVDCRKVAERPLGEMGSPPAAGFVTLGRLAKARGPRSSSAAFQLQMLQIVCSDTWADEDRCCELPASRDGETCPAFVSACSCSSETPGPPGPQGPPGLPGRNGTPGEQGFPGPRGEPGPPGQMGPEGPGGQQGSPGTQGRAVQGPVGPPGVKGEKGDHGLPGLQGHPGHQGIPGRVGLQGPKGMRGLEGTAGLPGPPGPRGFQGMAGARGTSGERGPPGTVGPTGLPGPKGERGEKGEPQSLATLYQLVSQASHVSKFDSFHENTRPPMPILEQKLEPGTEPLGSPGTRSKALVPGEWGRGGRHLEGRGEPGAVGQMGSPGQQGASTQGLWE

SEQ ID NO: 884819 - protein, 1394 aa, Homo sapiens
MSSGDPAHLGLCLWLWLGATLGREQVQASGLLRLAVLPEDRLQMKWRESEGSGLGYLVQVKPMAGDSEQEVILTTKTPKATVGGLSPSKGYTLQIFELTGSGRFLLARREFVIEDLKSSSLDRSSQRPLGSGAPEPTPYHTGSPDPEQASEPQVAFKPSQDPRTPAGPQYRCLPPVPADMVFLVDGSWSIGHSHFQQVKDFLASVIAPFEIGPDKVQVGLTQYSGDAQTEWDLNSLSTKEQVLAAVRRLRYKGGNTFTGLALTHVLGQNLQPAAGLRPEAAKVVILVTDGKSQDDVHTAARVLKDLGVNVFAVGVKNADEAELRLLASPPRDITVHSVLDFLQLGALAGLLSRLICQRLQGGSPRQGPAAAPALDTLPAPTSLVLSQVTSSSIRLSWTPAPRHPLKYLIVWRASRGGTPREVVVEGPAASTELHNLASRTEYLVSVFPIYEGGVGEGLRGLVTTAPLPPPRALTLAAVTPRTVHLTWQPSAGATHYLVRCSPASPKGEEEEREVQVGRPEVLLDGLEPGRDYEVSVQSLRGPEGSEARGIRARTPTLAPPRHLGFSDVSHDAARVFWEGAPRPVRLVRVTYVSSEGGHSGQTEAPGNATSATLGPLSSSTTYTVRVTCLYPGGGSSTLTGRVTTKKAPSPSQLSMTELPGDAVQLAWVAAAPSGVLVYQITWTPLGEGKAHEISVPGNLGTAVLPGLGRHTEYDVTILAYYRDGARSDPVSLRYTPSTVSRSPPSNLALASETPDSLQVSWTPPLGRVLHYWLTYAPASGLGPEKSVSVPGARSHVTLPDLQAATKYRVLVSAIYAAGRSEAVSATGQTACPALRPDGSLPGFDLMVAFSLVEKAYASIRGVAMEPSAFGGTPTFTLFKDAQLTRRVSDVYPAPLPPEHTIVFLVRLLPETPREAFALWQMTAEDFQPLLGVLLDAGKKSLTYFHRDPRAALQEATFDPQEVRKIFFGSFHKVHVAVGRSKVRLYVDCRKVAERPLGEMGSPPAAGFVTLGRLAKARGPRSSSAAFQLQMLQIVCSDTWADEDRCCELPASVCPVPAPVPRSKLGQVPTEGHSAWEGWRDLPRLRVCLFLFLRDPWAPRTSRTPSSSAPQVTAGASRAGSGTGQAHFSELSVHSLVYSGGRGLNPELPDYEEGLPGRNGTPGEQGFPGPRGEPGPPGQMGPEGPGGQQGSPGTQGRAVQGPVGPPGVKGEKGDHGLPGLQGHPGHQGIPGRVGLQGPKGMRGLEGTAGLPGPPGPRGFQGMAGARGTSGERGPPGTVGPTGLPGPKGERGEKGEPQSLATLYQLVSQACESAIQTHVSKFDSFHENTRPPMPILEQKLEPGTEPLGSPGTRSKALVPGEWGRGGRHLEGRGEPGAVGQMGSPGQQGASTQGLWE

SEQ ID NO: 884820 - protein, 1303 aa, Homo sapiens
MSSGDPAHLGLCLWLWLGATLGREQVQASGLLRLAVLPEDRLQMKWRESEGSGLGYLVQVKPMAGDSEQEVILTTKTPKATVGGLSPSKGYTLQIFELTGSGRFLLARREFVIEDLKSSSLDRSSQRPLGSGAPEPTPYHTGSPDPEQASEPQVAFKPSQDPRTPAGPQYRCLPPVPADMVFLVDGSWSIGHSHFQQVKDFLASVIAPFEIGPDKVQVGLTQYSGDAQTEWDLNSLSTKEQVLAAVRRLRYKGGNTFTGLALTHVLGQNLQPAAGLRPEAAKVVILVTDGKSQDDVHTAARVLKDLGVNVFAVGVKNADEAELRLLASPPRDITVHSVLDFLQLGALAGLLSRLICQRLQGGSPRQGPAAAPALDTLPAPTSLVLSQVTSSSIRLSWTPAPRHPLKYLIVWRASRGGTPREVVVEGPAASTELHNLASRTEYLVSVFPIYEGGVGEGLRGLVTTAPLPPPRALTLAAVTPRTVHLTWQPSAGATHYLVRCSPASPKGEEEEREVQVGRPEVLLDGLEPGRDYEVSVQSLRGPEGSEARGIRARTPTLAPPRHLGFSDVSHDAARVFWEGAPRPVRLVRVTYVSSEGGHSGQTEAPGNATSATLGPLSSSTTYTVRVTCLYPGGGSSTLTGRVTTKKAPSPSQLSMTELPGDAVQLAWVAAAPSGVLVYQITWTPLGEGKAHEISVPGNLGTAVLPGLGRHTEYDVTILAYYRDGARSDPVSLRYTPSTVSRSPPSNLALASETPDSLQVSWTPPLGRVLHYWLTYAPASGLGPEKSVSVPGARSHVTLPDLQAATKYRVLVSAIYAAGRSEAVSATGQTACPALRPDGSLPGFDLMVAFSLVEKAYASIRGVAMEPSAFGGTPTFTLFKDAQLTRRVSDVYPAPLPPEHTIVFLVRLLPETPREAFALWQMTAEDFQPLLGVLLDAGKKSLTYFHRDPRAALQEATFDPQEVRKIFFGSFHKVHVAVGRSKVRLYVDCRKVAERPLGEMGSPPAAGFVTLGRLAKARGPRSSSAAFQLQMLQIVCSDTWADEDRCCELPASRDGETCPAFVSACSCSSETPGPPGPQGPPGLPGRNGTPGEQGFPGPRGEPGPPGQMGPEGPGGQQGSPGTQGRAVQGPVGPPGVKGEKGDHGLPGLQGHPGHQGIPGRVGLQGPKGMRGLEGTAGLPGPPGPRGFQGMAGARGTSGERGPPGTVGPTGLQGQRDQERRRASPCHLYSCEQGLELPFDTVSSPALPGKTGPPCPFGAQLGTSDLKPGVPGDRKKAWSRAMGWWRTSLARRYREANKSRQRGQQ

SEQ ID NO: 884821 - protein, 989 aa, Homo sapiens
MSSGDPAHLGLCLWLWLGATLGREQVQASGLLRLAVLPEDRLQMKWRESEGSGLGYLVQVKPMAGDSEQEVILTTKTPKATVGGLSPSKGYTLQIFELTGSGRFLLARREFVIEDLKSSSLDRSSQRPLGSGAPEPTPYHTGSPDPEQASEPQVAFKPSQDPRTPAGPQYRCLPPVPADMVFLVDGSWSIGHSHFQQVKDFLASVIAPFEIGPDKVQVGLTQYSGDAQTEWDLNSLSTKEQVLAAVRRLRYKGGNTFTGLALTHVLGQNLQPAAGLRPEAAKVVILVTDGKSQDDVHTAARVLKDLGVNVFAVGVKNADEAELRLLASPPRDITVHSVLDFLQLGALAGLLSRLICQRLQGGSPRQGPAAAPALDTLPAPTSLVLSQVTSSSIRLSWTPAPRHPLKYLIVWRASRGGTPREVVVEGPAASTELHNLASRTEYLVSVFPIYEGGVGEGLRGLVTTAPLPPPRALTLAAVTPRTVHLTWQPSAGATHYLVRCSPASPKGEEEEREVQVGRPEVLLDGLEPGRDYEVSVQSLRGPEGSEARGIRARTPTLAPPRHLGFSDVSHDAARVFWEGAPRPVRLVRVTYVSSEGGHSGQTEAPGNATSATLGPLSSSTTYTVRVTCLYPGGGSSTLTGRVTTKKAPSPSQLSMTELPGDAVQLAWVAAAPSGVLVYQITWTPLGEGKAHEISVPGNLGTAVLPGLGRHTEYDVTILAYYRDGARSDPVSLRYTPSTVSRSPPSNLALASETPDSLQVSWTPPLGRVLHYWLTYAPASGLGPEKSVSVPGARSHVTLPDLQAATKYRVLVSAIYAAGRSEAVSATGQTACPALRPDGSLPGFDLMVAFSLVEKAYASIRGVAMEPSAFGGTPTFTLFKDAQLTRRVSDVYPAPLPPEHTIVFLVRLLPETPREAFALWQMTAEDFQPLLGVLLDGDVGPASPPAVRRSRGREAPEPWEAFRGSPASRPGPQHPLGGRQVSRAGGCGPH

SEQ ID NO: 884822 - protein, 1297 aa, Homo sapiens; identical to SEQ ID NO: 884816

SEQ ID NO: 884823 - protein, 1290 aa, Homo sapiens
MSSGDPAHLGLCLWLWLGATLGREQVQASGLLRLAVLPEDRLQMKWRESEGSGLGYLVQVKPMAGDSEQEVILTTKTPKATVGGLSPSKGYTLQIFELTGSGRFLLARREFVIEDLKSSSLDRSSQRPLGSGAPEPTPYHTGSPDPEQASEPQVAFKPSQDPRTPAGPQYRCLPPVPADMVFLVDGSWSIGHSHFQQVKDFLASVIAPFEIGPDKVQVGLTQYSGDAQTEWDLNSLSTKEQVLAAVRRLRYKGGNTFTGLALTHVLGQNLQPAAGLRPEAAKVVILVTDGKSQDDVHTAARVLKDLGVNVFAVGVKNADEAELRLLASPPRDITVHSVLDFLQLGALAGLLSRLICQRLQGGSPRQGPAAAPALDTLPAPTSLVLSQVTSSSIRLSWTPAPRHPLKYLIVWRASRGGTPREVVVEGPAASTELHNLASRTEYLVSVFPIYEGGVGEGLRGLVTTAPLPPPRALTLAAVTPRTVHLTWQPSAGATHYLVRCSPASPKGEEEEREVQVGRPEVLLDGLEPGRDYEVSVQSLRGPEGSEARGIRARTPTLAPPRHLGFSDVSHDAARVFWEGAPRPVRLVRVTYVSSEGGHSGQTEAPGNATSATLGPLSSSTTYTVRVTCLYPGGGSSTLTGRVTTKKAPSPSQLSMTELPGDAVQLAWVAAAPSGVLVYQITWTPLGEGKAHEISVPGNLGTAVLPGLGRHTEYDVTILAYYRDGARSDPVSLRYTPSTVSRSPPSNLALASETPDSLQVSWTPPLGRVLHYWLTYAPASGLGPEKSVSVPGARSHVTLPDLQAATKYRVLVSAIYAAGRSEAVSATGQTACPALRPDGSLPGFDLMVAFSLVEKAYASIRGVAMEPSAFGGTPTFTLFKDAQLTRRVSDVYPAPLPPEHTIVFLVRLLPETPREAFALWQMTAEDFQPLLGVLLDAGKKSLTYFHRDPRAALQEATFDPQEVRKIFFGSFHKVHVAVGRSKVRLYVDCRKVAERPLGEMGSPPAAGFVTLGRLAKARGPRSSSAAFQLQMLQIVCSDTWADEDRCCELPASRDGETCPAFVSACSCSSETPGPPGPQGPPGLPGRNGTPGEQGFPGPRGPPGVKGEKGDHGLPGLQGHPGHQGIPGRVGLQGPKGMRGLEGTAGLPGPPGPRGFQGMAGARGTSGERGPPGTVGPTGLPGPKGERGEKGEPQSLATLYQLVSQACESAIQTHVSKFDSFHENTRPPMPILEQKLEPGTEPLGSPGTRSKALVPGEWGRGGRHLEGRGEPGAVGQMGSPGQQGASTQGLWE

SEQ ID NO: 884824 - protein, 1272 aa, Homo sapiens
MSSGDPAHLGLCLWLWLGATLGREQVQASGLLRLAVLPEDRLQMKWRESEGSGLGYLVQVKPMAGDSEQEVILTTKTPKATVGGLSPSKGYTLQIFELTGSGRFLLARREFVIEDLKSSSLDRSSQRPLGSGAPEPTPYHTGSPDPEQASEPQVAFKPSQDPRTPAGPQYRCLPPVPADMVFLVDGSWSIGHSHFQQVKDFLASVIAPFEIGPDKVQVGLTQYSGDAQTEWDLNSLSTKEQVLAAVRRLRYKGGNTFTGLALTHVLGQNLQPAAGLRPEAAKVVILVTDGKSQDDVHTAARVLKDLGVNVFAVGVKNADEAELRLLASPPRDITVHSVLDFLQLGALAGLLSRLICQRLQGGSPRQGPAAAPALDTLPAPTSLVLSQVTSSSIRLSWTPAPRHPLKYLIVWRASRGGTPREVVVEGPAASTELHNLASRTEYLVSVFPIYEGGVGEGLRGLVTTAPLPPPRALTLAAVTPRTVHLTWQPSAGATHYLVRCSPASPKGEEEEREVQVGRPEVLLDGLEPGRDYEVSVQSLRGPEGSEARGIRARTPTLAPPRHLGFSDVSHDAARVFWEGAPRPVRLVRVTYVSSEGGHSGQTEAPGNATSATLGPLSSSTTYTVRVTCLYPGGGSSTLTGRVTTKKAPSPSQLSMTELPGDAVQLAWVAAAPSGVLVYQITWTPLGEGKAHEISVPGNLGTAVLPGLGRHTEYDVTILAYYRDGARSDPVSLRYTPSTVSRSPPSNLALASETPDSLQVSWTPPLGRVLHYWLTYAPASGLGPEKSVSVPGARSHVTLPDLQAATKYRVLVSAIYAAGRSEAVSATGQTACPALRPDGSLPGFDLMVAFSLVEKAYASIRGVAMEPSAFGGTPTFTLFKDAQLTRRVSDVYPAPLPPEHTIVFLVRLLPETPREAFALWQMTAEDFQPLLGVLLDAGKKSLTYFHRDPRAALQEATFDPQEVRKIFFGSFHKVHVAVGRSKVRLYVDCRKVAERPLGEMGSPPAAGFVTLGRLAKARGPRSSSAAFQLQMLQIVCSDTWADEDRCCELPASRDGETCPAFVSACSCSSETPGPPGPQGPPGPPGVKGEKGDHGLPGLQGHPGHQGIPGRVGLQGPKGMRGLEGTAGLPGPPGPRGFQGMAGARGTSGERGPPGTVGPTGLPGPKGERGEKGEPQSLATLYQLVSQACESAIQTHVSKFDSFHENTRPPMPILEQKLEPGTEPLGSPGTRSKALVPGEWGRGGRHLEGRGEPGAVGQMGSPGQQGASTQGLWE

SEQ ID NO: 884825 - protein, 1316 aa, Homo sapiens; identical to SEQ ID NO: 884818

SEQ ID NO: 884826 - protein, 452 aa, Homo sapiens
MPSLSSQGSLELLVRWAALGSRGLAPRASGSDRTFSALPRGTLSLPPWVCLDTESDHILEKPGEKLRKSLQVEGEGSSGLGQGPPHTLGSVAFPSSDKPLSAHPAKRGGSHFLGECPPPWLCAPHLEALQLQPQWGRGGAGLMANRVQEGSSALWPSQSSKTGSTTCPAPFSGPHLSLARALWARLSLRLTQATDGSTAGPPVTCTMAPPSEQHSHPGPSTFTSGHRQVPACLIVPSVPSPEGVQILCVNGHPSPTQPCAEFLVQGHCFETWHHQPLVLRVSEQGHPSAGFWPVLLLSTSAQVSPNHHRRCVSLDFLPYPHCGPNSMGASSEHTPGLLGLVARGGDVGTSTSFPNKYSVTSPLLPLRQLSKKGARNEEGSHIIEERMKSIKKEQRETLDIDRRKTHQDHQCSIACTKAYPKEVSAKQLQGKHFIYDSTVPGTDQTWRPNRES

SEQ ID NO: 884827 - protein, 407 aa, Homo sapiens
MRWVWALLKNASLAGAPKYIEHFSKFSPSPLSMKQFLDFGSSNACEKTSFTFLRQELPVRLANIMKEINLLPDRVLSTPSVQLVQSWYVQSLLDIMEFLDKDPEDHRTLSQFTDALVTIRNRHNDVVPTMAQGVLEYKDTYGDDPVSNQNIQYFLDRFYLSRISIRMLINQHTLIFDGSTNPAHPKHIGSIDPNCNVSEVVKDAYDMAKLLCDKYYMASPDLEIQEINAANSKQPIHMVYVPSHLYHMLFELFKNAMRATVESHESSLILPPIKVMVALGEEDLSIKMSDRGGGVPLRKIERLFSYMYSTAPTPQPGTGGTPLAGFGYGLPISRLYAKYFQGDLQLFSMEGFGTDAVIYLKALSTDSVERLPVYNKSAWRHYQTIQEAGDWCVPSTEPKNTSTYRVS

SEQ ID NO: 884828 - protein, 184 aa, Homo sapiens
WAGAPGTVMWSQAAYTSLGCPRVLGSSNACEKTSFTFLRQELPVRLANIMKEINLLPDRVLSTPSVQLVQSWYVQSLLDIMEFLDKDPEDHRTLSQFTDALVTIRNRHNDVVPTMAQGVLEYKDTYGDDPVSNQNIQYFLDRFYLSRISIRMLINQHSGCRPQRRGAGGGGGGAGAQGRAAEGT

SEQ ID NO: 884829 - protein, 111 aa, Homo sapiens
WNARQGKGREEAAEPRRWAERCASAARAGTTTKVAAAAAMRWVWALLKNASLAGAPKYIEHFSKFSPSPLSMKQFLDFGTEWAGGGWQRRPAGRWEGQPGARGTEEKKGPE

SEQ ID NO: 884830 - protein, 407 aa, Homo sapiens; identical to SEQ ID NO: 884827

SEQ ID NO: 884831 - protein, 407 aa, Homo sapiens; identical to SEQ ID NO: 884827

SEQ ID NO: 884832 - protein, 420 aa, Homo sapiens
  misc_feature (6)..(7): Xaa can be any naturally occurring amino acid
VPGRAXXDIEHFIKFSPSPLLKNASLAGAPKYIEHFSKFSPSPLSMKQFLDFGSSNACEKTSFTFLRQELPVRLANIMKEINLLPDRVLSTPSVQLVQSWYVQSLLDIMEFLDKDPEDHRTLSQFTDALVTIRNRHNDVVPTMAQGVLEYKDTYGDDPVSNQNIQYFLDRFYLSRISIRMLINQHTLIFDGSTNPAHPKHIGSIDPNCNVSEVVKDAYDMAKLLCDKYYMASPDLEIQEINAANSKQPIHMVYVPSHLYHMLFELFKNAMRATVESHESSLILPPIKVMVALGEEDLSIKMSDRGGGVPLRKIERLFSYMYSTAPTPQPGTGGTPLAGFGYGLPISRLYAKYFQGDLQLFSMEGFGTDAVIYLKALSTDSVERLPVYNKSAWRHYQTIQEAGDWCVPSTEPKNTSTYRVS

SEQ ID NO: 884833 - protein, 347 aa, Homo sapiens
MRWVWALLKNASLAGAPKYIEHFSKFSPSPLSMKQFLDFGSSNACEKTSFTFLRQELPVRLANIMKEINLLPDRVLSTPSVQLVQSWYVQSLLDIMEFLDKDPEDHRTLSQFTDALVTIRNRHNDVVPTMAQGVLEYKDTYGDDPVSNQNIQYFLDRFYLSRISIRMLINQHTLIFDGSTNPAHPKHIGSIDPNCNVSEVVKDAYDMAKLLCDKYYMASPDLEIQEINAANSKQPIHMVYVPSHLYHMLFELFKNAMRATVESHESSLILPPIKVMVALGEEDLSIKMSDRGGGVPLRKIERLFSYMYSTAPTSVTHLDGQIFLTQGHHDLDGWENEAGLMAFHSRP

SEQ ID NO: 884834 - protein, 392 aa, Homo sapiens
WAGAPGTVMWSQAAYTSLGCPRVLGSSNACEKTSFTFLRQELPVRLANIMKEINLLPDRVLSTPSVQLVQSWYVQSLLDIMEFLDKDPEDHRTLSQFTDALVTIRNRHNDVVPTMAQGVLEYKDTYGDDPVSNQNIQYFLDRFYLSRISIRMLINQHTLIFDGSTNPAHPKHIGSIDPNCNVSEVVKDAYDMAKLLCDKYYMASPDLEIQEINAANSKQPIHMVYVPSHLYHMLFELFKNAMRATVESHESSLILPPIKVMVALGEEDLSIKMSDRGGGVPLRKIERLFSYMYSTAPTPQPGTGGTPLAGFGYGLPISRLYAKYFQGDLQLFSMEGFGTDAVIYLKALSTDSVERLPVYNKSAWRHYQTIQEAGDWCVPSTEPKNTSTYRVS

SEQ ID NO: 884835 - protein, 278 aa, Homo sapiens
MAQGVLEYKDTYGDDPVSNQNIQYFLDRFYLSRISIRMLINQHTLIFDGSTNPAHPKHIGSIDPNCNVSEVVKDAYDMAKLLCDKYYMASPDLEIQEINAANSKQPIHMVYVPSHLYHMLFELFKNAMRATVESHESSLILPPIKVMVALGEEDLSIKMSDRGGGVPLRKIERLFSYMYSTAPTPQPGTGGTPLAGFGYGLPISRLYAKYFQGDLQLFSMEGFGTDAVIYLKALSTDSVERLPVYNKSAWRHYQTIQEAGDWCVPSTEPKNTSTYRVS

SEQ ID NO: 884836 - protein, 199 aa, Homo sapiens
MRWVWALLKNASLAGAPKYIEHFSKFSPSPLSMKQFLDFGSSNACEKTSFTFLRQELPVRLANIMKEINLLPDRVLSTPSVQLVQSWYVQSLLDIMEFLDKDPEDHRTLSQFTDALVTIRNRHNDVVPTMAQGVLEYKDTYGDDPVSNQNIQYFLDRFYLSRISIRMLINQHSGCRPQRRGAGGGGGGAGAQGRAAEGT

SEQ ID NO: 884837 - protein, 199 aa, Homo sapiens; identical to SEQ ID NO: 884836

SEQ ID NO: 884838 - protein, 151 aa, Homo sapiens [sequence omitted]

SEQ ID NO: 884839 - protein, 113 aa, Homo sapiens
SVVCSTIKVLRDLSSEPGLALNLGGGTPLAGFGYGLPISRLYAKYFQGDLQLFSMEGFGTDAVIYLKALSTDSVERLPVYNKSAWRHYQTIQEAGDWCVPSTEPKNTSTYRVS

SEQ ID NO: 884840 - protein, 299 aa, Homo sapiens
HPRSCHSVQRRRLRPGVRDLLRVTQPSLLPLPLPPLEGAACLNGQERDTGGTTLLWSFQAPVSGSWAAAGAGVGWSAEEWTRHREVGGADPDTPQGPVHGLGGAPACLQQVSLAPLPDHPGGRRLVCAQHGAQEHVHVPRQLRAAVHLHLRGRTAASGSPHRGAPHHPPGGAGGGFSLMTRFCLYGSHCGDRSVMVPKCQSISVETPRWPPYLCGRCLRVRDVSTLMGCPRDIFPWQSSSLRPGLSLFCQGYWVPLSTLHSTGLPSGCPVALFPQPTKAPWPWSAEVLGRGWVPSRPGD

SEQ ID NO: 884841 - protein, 202 aa, Homo sapiens
MRWVWALLKNASLAGAPKYIEHFSKFSPSPLSMKQFLDFGSSNACEKTSFTFLRQELPVRLANIMKEINLLPDRVLSTPSVQLVQSWYVQSLLDIMEFLDKDPEDHRTLSQFTDALVTIRNRHNDVVPTMAQGVLEYKDTYGDDPVSNQNIQYFLDRFYLSRISIRMLINQHTLIFDGSTNPHPSPKHTGVKAVCPSQWLWQ

SEQ ID NO: 884842 - protein, 93 aa, Homo sapiens
  misc_feature (6)..(7): Xaa can be any naturally occurring amino acid
VPGRAXXDIEHFIKFSPSPLLKNASLAGAPKYIEHFSKFSPSPLSMKQFLDFGSSNACEKTSFTFLRQELPVRLANIMKEINLLPDRVLSTVH

SEQ ID NO: 884843 - protein, 1308 aa, Homo sapiens
DESSLLRRRGLQKELSLPRRGRGCRSGNRKSLVVGTPSPTLSRPLSPLSVPTAGSSPLDSPRNFSAASALNFPFARRADGRRWSLASLPSSGYGTNTPSSTLSSSSSSRERLHQLPFQPTPDELHFLSKHFRSSENVLDEEGGRSPRLRPRSRSLSPGRATGTFDNEIVMMNHVYRERFPKATAQMEGRLQEFLTAYAPGARLALADGVLGFIHHQIVELARDCLAKSGENLVTSRYFLEMQEKLERLLQDAHERSDSEEVSFIVQLVRKLLIIISRPARLLECLEFDPEEFYHLLEAAEGHAREGQGIKTDLPQYIIGQLGLAKDPLEEMVPLSHLEEEQPPAPESPESRALVGQSRRKPCESDFETIKLISNGAYGAVYLVRHRDTRQRFAIKKINKQNLILRNQIQQVFVERDILTFAENPFVVSMFCSFETRRHLCMVMEYVEGGDCATLLKNMGPLPVDMARLYFAETVLALEYLHNYGIVHRDLKPDNLLITSLGHIKLTDFGLSKIGLMSMATNLYEGHIEKDAREFIDKQVCGTPEYIAPEVIFRQGYGKPVDWWAMGVVLYEFLVGCVPFFGDTPEELFGQVVSDEIMWPEGDEALPADAQDLITRLLRQSPLDRLGTGGTHEVKQHPFFLALDWAGLLRHKAEFVPQLEAEDDTSYFDTRSERYRHLGSEDDETNDEESSTEIPQFSSCSHRFSKVYSSSEFLAVQPTPTFAERSFSEDREEGWERSEVDYGRRLSADIRLRSWTSSGSSCQSSSSQPERGPSPSLLNTISLDTMPKFAFSSEDEGVGPGPAGPKRPVFILGEPDPPPAATPVMPKPSSLSADTAALSHARLRSNSIGARHSTPRPLDASRGRRLGGPRDPAPEKSRASSSGGSGGGSGGRVPKSASVSALSLIITADDGSGGPLMSPLSPRSLSSNPSSRDSSPSRDPSPVCGSLRPPIVIHSSGKKYGFSLRAIRVYMGDSDVYTVHHVVWSVEDGSPAQEAGLRAGDLITHINGESVLGLVHMDVVELLLKSGNKISLRTTALENTSIKVGPARKNVAKGRMARRSKRSRRRETQDRRKSLFKKISKQTSVLHTSRSFSSGLHHSLSSSESLPGSPTHSLSPSPTTPCRSPAPDVPADTTASPPSASPSSSSPASPAAAGHTRPSSLHGLAAKLGPPRPKTGRRKSTSSIPPSPLACPPISAPPPRSPSPLPGHPPAPARSPRLRRGQSADKLGTGERLDGEAGRRTRGPEAELVVMRRLHLSERRDSFKKQEAVQEVSFDEPQEEATGLPTSVPQIAVEGEEAVPVALGPTGRD

SEQ ID NO: 884844 - protein, 1138 aa, Homo sapiens
MNHVYRERFPKATAQMEGRLQEFLTAYAPGARLALADGVLGFIHHQIVELARDCLAKSGENLVTSRYFLEMQEKLERLLQDAHERSDSEEVSFIVQLVRKLLIIISRPARLLECLEFDPEEFYHLLEAAEGHAREGQGIKTDLPQYIIGQLGLAKDPLEEMVPLSHLEEEQPPAPESPESRALVGQSRRKPCESDFETIKLISNGAYGAVYLVRHRDTRQRFAIKKINKQNLILRNQIQQVFVERDILTFAENPFVVSMFCSFETRRHLCMVMEYVEGGDCATLLKNMGPLPVDMARLYFAETVLALEYLHNYGIVHRDLKPDNLLITSLGHIKLTDFGLSKIGLMSMATNLYEGHIEKDAREFIDKQVCGTPEYIAPEVIFRQGYGKPVDWWAMGVVLYEFLVGCVPFFGDTPEELFGQVVSDEIMWPEGDEALPADAQDLITRLLRQSPLDRLGTGGTHEVKQHPFFLALDWAGLLRHKAEFVPQLEAEDDTSYFDTRSERYRHLGSEDDETNDEESSTEIPQFSSCSHRFSKVYSSSEFLAVQPTPTFAERSFSEDREEGWERSEVDYGRRLSADIRLRSWTSSGSSCQSSSSQPERGPSPSLLNTISLDTMPKFAFSSEDEGVGPGPAGPKRPVFILGEPDPPPAATPVMPKPSSLSADTAALSHARLRSNSIGARHSTPRPLDASRGRRLGGPRDPAPEKSRASSSGGSGGGSGGRVPKSASVSALSLIITADDGSGGPLMSPLSPRSLSSNPSSRDSSPSRDPSPVCGSLRPPIVIHSSGKKYGFSLRAIRVYMGDSDVYTVHHVVWSVEDGSPAQEAGLRAGDLITHINGESVLGLVHMDVVELLLKSGNKISLRTTALENTSIKVGPARKNVAKGRMARRSKRSRRRETQDRRKSLFKKISKQTSVLHTSRSFSSGLHHSLSSSESLPGSPTHSLSPSPTTPCRSPAPDVPADTTASPPSASPSSSSPASPAAAGHTRPSSLHGLAAKLGPPRPKTGRRKSTSSIPPSPLACPPISAPPPRSPSPLPGHPPAPARSPRLRRGQSADKLGTGERLDGEAGRRTRGPEAELVVMRRLHLSERRDSFKKQEAVQEVSFDEPQEEATGLPTSVPQIAVEGEEAVPVALGPTGRD

SEQ ID NO: 884845 - protein, 1147 aa, Homo sapiens
MNHVYRERFPKATAQMEGRLQEFLTAYAPGARLALADGVLGFIHHQIVELARDCLAKSGENLVTSRYFLEMQEKLERLLQDAHERSDSEEVSFIVQLVRKLLIIISRPARLLECLEFDPEEFYHLLEAAEGHAREGQGIKTDLPQYIIGQLGLAKDPLEEMVPLSHLEEEQPPAPESPESRALVGQSRRKPCESDFETIKLISNGAYGAVYLVRHRDTRQRFAIKKINKQNLILRNQIQQVFVERDILTFAENPFVVSMFCSFETRRHLCMVMEYVEGGDCATLLKNMGPLPVDMARLYFAETVLALEYLHNYGIVHRDLKPDNLLITSLGHIKLTDFGLSKIGLMSMATNLYEGHIEKDAREFIDKQVCGTPEYIAPEVIFRQGYGKPVDWWAMGVVLYEFLVGCVPFFGDTPEELFGQVVSDEIMWPEGDEALPADAQDLITRLLRQSPLDRLGTGGTHEVKQHPFFLALDWAGLLRHKAEFVPQLEAEDDTSYFDTRSERYRHLGSEDDETNDEESSTEIPQFSSCSHRFSKVYSSSEFLAVQPTPTFAERSFSEDREEGWERSEVDYGRRLSADIRLRSWTSSGSSCQSSSSQPERGPSPSLLNTISLDTMPKFAFSSEDEGVGPGPAGPKRPVFILGEPDPPPAATPVMPKPSSLSADTAALSHARLRSNSIGARHSTPRPLDASRGRRLGGPRDPAPEKSRASSSGGSGGGSGGRVPKSASVSALSLIITADDGSGGPLMSPLSPRSLSSNPSSRDSSPSRDPSPVCGSLRPPIVIHSSGKKYGFSLRAIRVYMGDSDVYTVHHVVWSVEDGSPAQEAGLRAGDLITHINGESVLGLVHMDVVELLLKSGNKISLRTTALENTSIKVGPARKNVAKGRMARRSKRSRRRETQDRCAAVTTRERRKSLFKKISKQTSVLHTSRSFSSGLHHSLSSSESLPGSPTHSLSPSPTTPCRSPAPDVPADTTASPPSASPSSSSPASPAAAGHTRPSSLHGLAAKLGPPRPKTGRRKSTSSIPPSPLACPPISAPPPRSPSPLPGHPPAPARSPRLRRGQSADKLGTGERLDGEAGRRTRGPEAELVVMRRLHLSERRDSFKKQEAVQEVSFDEPQEEATGLPTSVPQIAVEGEEAVPVALGPTGRD

SEQ ID NO: 884846 - protein, 1101 aa, Homo sapiens
MNHVYRERFPKATAQMEGRLQEFLTAYAPGARLALADGVLGFIHHQIVELARDCLAKSGENLVTSRYFLEMQEKLERLLQDAHERSDSEEVSFIVQLVRKLLIIISRPARLLECLEFDPEEFYHLLEAAEGHAREGQGIKTDLPQYIIGQLGLAKDPLEEMVPLSHLEEEQPPAPESPESRALVGQSRRKPCESDFETIKLISNGAYGAVYLVRHRDTRQRFAIKKINKQNLILRNQIQQVFVERDILTFAENPFVVSMFCSFETRRHLCMVMEYVEGGDCATLLKNMGPLPVDMARLYFAETVLALEYLHNYGIVHRDLKPDNLLITSLGHIKLTDFGLSKIGLMSMATNLYEGHIEKDAREFIDKQVCGTPEYIAPEVIFRQGYGKPVDWWAMGVVLYEFLVGCVPFFGDTPEELFGQVVSDEIMWPEGDEALPADAQDLITRLLRQSPLDRLGTGGTHEVKQHPFFLALDWAGLLRHKAEFVPQLEAEDDTSYFDTRSERYRHLGSEDDETNDEESSTEIPQFSSCSHRFSKVYSSSEFLAVQPTPTFAERSFSEDREEGWERSEVDYGRRLSADIRLRSWTSSGSSCQSSSSQPERGPSPSLLNTISLDTMPKFAFSSEDEGVGPGPAGPKRPVFILGEPDPPPAATPVMPKPSSLSADTAALSHARLRSNSIGARHSTPRPLDASRGRRLGGPRDPAPEKSRASSSGGSGGGSGGRVPKSASVSALSLIITAAAGKKYGFSLRAIRVYMGDSDVYTVHHVVWSVEDGSPAQEAGLRAGDLITHINGESVLGLVHMDVVELLLKSGNKISLRTTALENTSIKVGPARKNVAKGRMARRSKRSRRRETQDRCAAVTTRERRKSLFKKISKQTSVLHTSRSFSSGLHHSLSSSESLPGSPTHSLSPSPTTPCRSPAPDVPADTTASPPSASPSSSSPASPAAAGHTRPSSLHGLAAKLGPPRPKTGRRKSTSSIPPSPLACPPISAPPPRSPSPLPGHPPAPARSPRLRRGQSADKLGTGERLDGEAGRRTRGPEAELVVMRRLHLSERRDSFKKQEAVQEVSFDEPQEEATGLPTSVPQIAVEGEEAVPVALGPTGRD

SEQ ID NO: 884847 - protein, 1076 aa, Homo sapiens
MNHVYRERFPKATAQMEGRLQEFLTAYAPGARLALADGVLGFIHHQIVELARDCLAKSGENLVTSRYFLEMQEKLERLLQDAHERSDSEEVSFIVQLVRKLLIIISRPARLLECLEFDPEEFYHLLEAAEGHAREGQGIKTDLPQYIIGQLGLAKDPLEEMVPLSHLEEEQPPAPESPESRALVGQSRRKPCESDFETIKLISNGAYGAVYLVRHRDTRQRFAIKKINKQNLILRNQIQQVFVERDILTFAENPFVVSMFCSFETRRHLCMVMEYVEGGDCATLLKNMGPLPVDMARLYFAETVLALEYLHNYGIVHRDLKPDNLLITSLGHIKLTDFGLSKIGLMSMATNLYEGHIEKDAREFIDKQVCGTPEYIAPEVIFRQGYGKPVDWWAMGVVLYEFLVGCVPFFGDTPEELFGQVVSDEIMWPEGDEALPADAQDLITRLLRQSPLDRLGTGGTHEVKQHPFFLALDWAGLLRHKAEFVPQLEAEDDTSYFDTRSERYRHLGSEDDETNDEESSTEIPQFSSCSHRFSKVYSSSEFLAVQPTPTFAERSFSEDREEGWERSEVDYGRRLSADIRGADPPPAATPVMPKPSSLSADTAALSHARLRSNSIGARHSTPRPLDASRGRRLGGPRDPAPEKSRASSSGGSGGGSGGRVPKSASVSALSLIITADDGSGGPLMSPLSPRSLSSNPSSRDSSPSRDPSPVCGSLRPPIVIHSSGKKYGFSLRAIRVYMGDSDVYTVHHVVWSVEDGSPAQEAGLRAGDLITHINGESVLGLVHMDVVELLLKSGNKISLRTTALENTSIKVGPARKNVAKGRMARRSKRSRRRETQDRRKSLFKKISKQTSVLHTSRSFSSGLHHSLSSSESLPGSPTHSLSPSPTTPCRSPAPDVPADTTASPPSASPSSSSPASPAAAGHTRPSSLHGLAAKLGPPRPKTGRRKSTSSIPPSPLACPPISAPPPRSPSPLPGHPPAPARSPRLRRGQSADKLGTGERLDGEAGRRTRGPEAELVVMRRLHLSERRDSFKKQEAVQEVSFDEPQEEATGLPTSVPQIAVEGEEAVPVALGPTGRD

SEQ ID NO: 884848 - protein, 574 aa, Homo sapiens
MLLCLTQLAKGLVTPELRSWTSSGSSCQSSSSQPERGPSPSLLNTISLDTMPKFAFSSEDEGVGPGPAGPKRPVFILGEPDPPPAATPVMPKPSSLSADTAALSHARLRSNSIGARHSTPRPLDASRGRRLGGPRDPAPEKSRASSSGGSGGGSGGRVPKSASVSALSLIITADDGSGGPLMSPLSPRSLSSNPSSRDSSPSRDPSPVCGSLRPPIVIHSSGKKYGFSLRAIRVYMGDSDVYTVHHVVWSVEDGSPAQEAGLRAGDLITHINGESVLGLVHMDVVELLLKSGNKISLRTTALENTSIKVGPARKNVAKGRMARRSKRSRRRETQDRRKSLFKKISKQTSVLHTSRSFSSGLHHSLSSSESLPGSPTHSLSPSPTTPCRSPAPDVPADTTASPPSASPSSSSPASPAAAGHTRPSSLHGLAAKLGPPRPKTGRRKSTSSIPPSPLACPPISAPPPRSPSPLPGHPPAPARSPRLRRGQSADKLGTGERLDGEAGRRTRGPEAELVVMRRLHLSERRDSFKKQEAVQEVSFDEPQEEATGLPTSVPQIAVEGEEAVPVALGPTGRD

SEQ ID NO: 884849 - protein, 1138 aa, Homo sapiens; identical to SEQ ID NO: 884844

SEQ ID NO: 884850 - protein, 1138 aa, Homo sapiens; identical to SEQ ID NO: 884844

SEQ ID NO: 884851 - protein, 1138 aa, Homo sapiens; identical to SEQ ID NO: 884844

SEQ ID NO: 884852 - protein, 774 aa, Homo sapiens
MNHVYRERFPKATAQMEGRLQEFLTAYAPGARLALADGVLGFIHHQIVELARDCLAKSGENLVTSRYFLEMQEKLERLLQDAHERSDSEEVSFIVQLVRKLLIIISRPARLLECLEFDPEEFYHLLEAAEGHAREGQGIKTDLPQYIIGQLGLAKDPLEEMVPLSHLEEEQPPAPESPESRALVGQSRRKPCESDFETIKLISNGAYGAVYLVRHRDTRQRFAIKKINKQNLILRNQIQQVFVERDILTFAENPFVVSMFCSFETRRHLCMVMEYVEGGDCATLLKNMGPLPVDMARLYFAETVLALEYLHNYGIVHRDLKPDNLLITSLGHIKLTDFGLSKIGLMSMATNLYEGHIEKDAREFIDKQVCGTPEYIAPEVIFRQGYGKPVDWWAMGVVLYEFLVGCVPFFGDTPEELFGQVVSDEIMWPEGDEALPADAQDLITRLLRQSPLDRLGTGGTHEVKQHPFFLALDWAGLLRHKAEFVPQLEAEDDTSYFDTRSERYRHLGSEDDETNDEESSTEIPQFSSCSHRFSKVYSSSEFLAVQPTPTFAERSFSEDREEGWERSEVDYGRRLSADIRLRSWTSSGSSCQSSSSQPERGPSPSLLNTISLDTMPKFAFSSEDEGVGPGPAGPKRPVFILGEPDPPPAATPVMPKPSSLSADTAALSHARLRSNSIGARHSTPRPLDASRGRRLGGPRDPAPEKSRASSILQTKQLRPQRGAETCPTITQQESWQNGASARPCCGRCHQGSLNGGSGVRYSRLQPQLIPHDAV

SEQ ID NO: 884853 - protein, 1151 aa, Homo sapiens
MNHVYRERFPKATAQMEGRLQEFLTAYAPGARLALADGVLGFIHHQIVELARDCLAKSGENLVTSRYFLEMQEKLERLLQDAHERSDSEEVSFIVQLVRKLLIIISRPARLLECLEFDPEEFYHLLEAAEGHAREGQGIKTDLPQYIIGQLGLAKDPLEEMVPLSHLEEEQPPAPESPESRALVGQSRRKPCESDFETIKLISNGAYGAVYLVRHRDTRQRFAIKKINKQNLILRNQIQQVFVERDILTFAENPFVVSMFCSFETRRHLCMVMEYVEGGDCATLLKNMGPLPVDMARLYFAETVLALEYLHNYGIVHRDLKPDNLLITSLGHIKLTDFGLSKIGLMSMATNLYEGHIEKDAREFIDKQVCGTPEYIAPEVIFRQGYGKPVDWWAMGVVLYEFLVGCVPFFGDTPEELFGQVVSDEIMWPEGDEALPADAQDLITRLLRQSPLDRLGTGGTHEVKQHPFFLALDWAGLLRHKAEFVPQLEAEDDTSYFDTRSERYRHLGSEDDETNDEESSTEIPQFSSCSHRFSKVYSSSEFLAVQPTPTFAERSFSEDREEGWERSEVDYGRRLSADIRLRSWTSSGSSCQSSSSQPERGPSPSLLNTISLDTMPKFAFSSEDEGVGPGPAGPKRPVFILGEPDPPPAATPVMPKPSSLSADTAALSHARLRSNSIGARHSTPRPLDASRGRRLGGPRDPAPEKSRASSSGGSGGGSGGRVPKSASVSALSLIITADDGSGGPLMSPLSPRSLSSNPSSRDSSPSRDPSPVCGSLRPPIVIHSSGKKYGFSLRAIRVYMGDSDVYTVHHVVWSVEDGSPAQEAGLRAGDLITHINGESVLGLVHMDVVELLLKSGNKISLRTTALENTSIKVGPARKNVAKGRMARRSKRSRRRETQDRCAAVTTRERRKSLFKKISKQTSVLHTSRSFSSGLHHSLSSSESLPGSPTHSLSPSPTTPCRSPAPDVPADTTCSTATQAHPPKHPSQATAITRDMLAGAQTDQALRATAHGPASIARHNHQPRRGPAKTSHKQHIARLSTIKTRALNIQPHSELHRYPAPCRAPQIELDQTSHIALPDPHSQRALTRNAPPTQPDSSMSHSRAIPHKPTHIDTSSCSQRTHQQPTQTSRRHPSTTPPENQSHNRDTTACSH

SEQ ID NO: 884854 - protein, 120 aa, Homo sapiens
MATNLYEGHIEKDAREFIDKQVGGQVGGQPRDASSSLLGPLLGWGLASVSPFSLAQVCGTPEYIAPEVIFRQGYGKPVDWWAMGVVLYEFLVGCVPFFGDTPEELFGQVVSGAFPPRAWV

SEQ ID NO: 884855 - protein, 180 aa, Homo sapiens
MSVLRPLDKLPGLNTATILLVGTEDALLQQLADSMLKEDCASELKVHLAKSLPLPSSVNRPRIDLIVFVVNLHSKYSLQNTEESLRHVDASFFLGKVCFLATGAGRESHCSIHRHTVVKLAHTYQSPLLYCDLEVEGFRATMAQRLVRVLQICAGHVPGVSALNLLSLLRSSEGPSLEDL

SEQ ID NO: 884856 - protein, 105 aa, Homo sapiens
SGSGCLRRLFEGLGKLRQLEATLRCGMNEGVAVVGSGDLSYPQVSAPSPALAAPAAALGKGAGPAFYLTAVLCSPRRWKALGPPWRSAWCACCRSVLATCPVSQL

SEQ ID NO: 884857 - protein, 180 aa, Homo sapiens; identical to SEQ ID NO: 884855

SEQ ID NO: 884858 - protein, 180 aa, Homo sapiens; identical to SEQ ID NO: 884855

SEQ ID NO: 884859 - protein, 237 aa, Homo sapiens
WERGSGSRECGAHRPAAGPNLRPPARAASRGPLLGKCPPSRLLAVSRSPREWVEGPGPPQGVLCLGLDCPLSLPAQLVGTEDALLQQLADSMLKEDCASELKVHLAKSLPLPSSVNRPRIDLIVFVVNLHSKYSLQNTEESLRHVDASFFLGKVCFLATGAGRESHCSIHRHTVVKLAHTYQSPLLYCDLEVEGFRATMAQRLVRVLQICAGHVPGVSALNLLSLLRSSEGPSLEDL

SEQ ID NO: 884860 - protein, 107 aa, Homo sapiens
MSVLRPLDKLPGLNTATILLVGTEDALLQQLADSMLKEDCASELKVHLAKSLPLPSSVNRPRIDLIVFVVNLHSKYSLQNTEESLRHVDASFFLGKVCFLATGGGRL

SEQ ID NO: 884861 - protein, 206 aa, Homo sapiens
WERGSGSRECGAHRPAAGPNLRPPARAASRGPLLGKCPPSRLLAVSRSPREWVEGPGPPQGVLCLGLDCPLSLPAQLVGTEDALLQQLADSMLKEDCASELKVLQNTEESLRHVDASFFLGKVCFLATGAGRESHCSIHRHTVVKLAHTYQSPLLYCDLEVEGFRATMAQRLVRVLQICAGHVPGVSALNLLSLLRSSEGPSLEDL

SEQ ID NO: 884862 - protein, 164 aa, Homo sapiens
WERGSGSRECGAHRPAAGPNLRPPARAASRGPLLGKCPPSRLLAVSRSPREWVEGPGPPQGVLCLGLDCPLSLPAQLVGTEDALLQQLADSMLKEDCASELKVHLAKSLPLPSSVNRPRIDLIVFVVNLHSKYSLQNTEESLRHVDASFFLGKVCFLATGGGRL

SEQ ID NO: 884863 - protein, 107 aa, Homo sapiens; identical to SEQ ID NO: 884860

SEQ ID NO: 884864 - protein, 132 aa, Homo sapiens
MSVLRPLDKLPGLNTATILLVGTEDALLQQLADSMLKEDCASELKVHLAKSLPLPSSVNRPRIDLIVFVVNLHSKYSLQNTEESLRHVDASFFLGKVCFLATGGKYVPRLLLPTPSQGKAGAAVGFLLRHPG

SEQ ID NO: 884865 - protein, 399 aa, Homo sapiens
MGILLGLLLLGHLTVDTYGRPILEVPESVTGPWKGDVNLPCTYDPLQGYTQVLVKWLVQRGSDPVTIFLRDSSGDHIQQAKYQGRLHVSHKVPGDVSLQLSTLEMDDRSHYTCEVTWQTPDGNQVVRDKITELRVQKLSVSKPTVTTGSGYGFTVPQGMRISLQCQARGSPPISYIWYKQQTNNQEPIKVATLSTLLFKPAVIADSGSYFCTAKGQVGSEQHSDIVKFVVKDSSKLLKTKTEAPTTMTYPLKATSTVKQSWDWTTDMDGYLGETSAGPGKSLPVFAIILIISLCCMVVFTMAYIMLCRKTSQQEHVYEAARAHAREANDSGETMRVAIFASGCSSDEPTSQNLGNNYSDEPCIGQEYQIIAQINGNYARLLDTVPLDYEFLATEGKSVC

SEQ ID NO: 884866 - protein, 445 aa, Homo sapiens
QRETISYYRNVRKAAVRSEFWDAATRSLSLFGSRRLEERTEVALAVMGILLGLLLLGHLTVDTYGRPILEVPESVTGPWKGDVNLPCTYDPLQGYTQVLVKWLVQRGSDPVTIFLRDSSGDHIQQAKYQGRLHVSHKVPGDVSLQLSTLEMDDRSHYTCEVTWQTPDGNQVVRDKITELRVQKLSVSKPTVTTGSGYGFTVPQGMRISLQCQARGSPPISYIWYKQQTNNQEPIKVATLSTLLFKPAVIADSGSYFCTAKGQVGSEQHSDIVKFVVKDSSKLLKTKTEAPTTMTYPLKATSTVKQSWDWTTDMDGYLGETSAGPGKSLPVFAIILIISLCCMVVFTMAYIMLCRKTSQQEHVYEAARAHAREANDSGETMRVAIFASGCSSDEPTSQNLGNNYSDEPCIGQEYQIIAQINGNYARLLDTVPLDYEFLATEGKSVC

SEQ ID NO: 884867 - protein, 399 aa, Homo sapiens; identical to SEQ ID NO: 884865

SEQ ID NO: 884868 - protein, 332 aa, Homo sapiens
MGILLGLLLLGHLTVDTYGRPILEVPESVTGPWKGDVNLPCTYDPLQGYTQVLVKWLVQRGSDPVTIFLRDSSGDHIQQAKYQGRLHVSHKVPGDVSLQLSTLEMDDRSHYTCEVTWQTPDGNQVVRDKITELRVQKLSVSKPTVTTGSGYGFTVPQGMRISLQCQARGSPPISYIWYKQQTNNQEPIKVATLSTLLFKPAVIADSGSYFCTAKGQVGSEQHSDIVKFVVKDSSKLLKTKTEAPTTMTYPLKATSTVKQSWDWTTDMDGYLGETSAGPGKSLPVFAIILIISLCCMVVFTMAYIMLCRKTSQQEHVYEAARIWATTTLMSPA

SEQ ID NO: 884869 - protein, 407 aa, Homo sapiens
MGILLGLLLLGHLTVDTYGRPILEVPESVTGPWKGDVNLPCTYDPLQGYTQVLVKWLVQRGSDPVTIFLRDSSGDHIQQAKYQGRLHVSHKVPGDVSLQLSTLEMDDRSHYTCEVTWQTPDGNQVVRDKITELRVQKLSVSKPTVTTGSGYGFTVPQGMRISLQCQARGSPPISYIWYKQQTNNQEPIKVATLSTLLFKPAVIADSGSYFCTAKGQVGSEQHSDIVKFVVKDSSKLLKTKTEAPTTMTYPLKATSTVKQSWDWTTDMDGYLGETSAGPGKSLPVFAIILIISLCCMVVFTMAYIMLCRKTSQQEHVYEAARAHAREANDSGETMRVAIFASGCSSDEPTSQNLGNNYSDEPCIGQEYQIIAQINGNYARLLDTVGFALEFARCISSKPAAGFGSGPF

SEQ ID NO: 884870 - protein, 347 aa, Homo sapiens
MGILLGLLLLGHLTVDTYGRPILEVPESVTGPWKGDVNLPCTYDPLQGYTQVLVKWLVQRGSDPVTIFLRDSSGDHIQQAKYQGRLHVSHKVPGDVSLQLSTLEMDDRSHYTCEVTWQTPDGNQVVRDKITELRVQKLSVSKPTVTTGSGYGFTVPQGMRISLQCQARGSPPISYIWYKQQTNNQEPIKVATLSTLLFKPAVIADSGSYFCTAKGQVGSEQHSDIVKFVVKDSSKLLKTKTEAPTTMTYPLKATSTVKQSWDWTTDMDGYLGETSAGPGKSLPVFAIILIISLCCMVVFTMAYIMLCRKTSQQEHVYEAASPKCPPTNTGAAGSHWLCPGICQMHLK

SEQ ID NO: 884871 - protein, 351 aa, Homo sapiens
QRETISYYRNVRKAAVRSEFWDAATRSLSLFGSRRLEERTEVALAVMGILLGLLLLGHLTVDTYGRPILEVPESVTGPWKGDVNLPCTYDPLQGYTQVLVKWLVQRGSDPVTIFLRDSSGDHIQQAKYQGRLHVSHKVPGDVSLQLSTLEMDDRSHYTCEVTWQTPDGNQVVRDKITELRVQKHSSKLLKTKTEAPTTMTYPLKATSTVKQSWDWTTDMDGYLGETSAGPGKSLPVFAIILIISLCCMVVFTMAYIMLCRKTSQQEHVYEAARAHAREANDSGETMRVAIFASGCSSDEPTSQNLGNNYSDEPCIGQEYQIIAQINGNYARLLDTVPLDYEFLATEGKSVC

SEQ ID NO: 884872 - protein, 388 aa, Homo sapiens
MGILLGLLLLGHLTVDTYGRPILEVPESVTGPWKGDVNLPCTYDPLQGYTQVLVKWLVQRGSDPVTIFLRDSSGDHIQQAKYQGRLHVSHKVPGDVSLQLSTLEMDDRSHYTCEVTWQTPDGNQVVRDKITELRVQKLSVSKPTVTTGSGYGFTVPQGMRISLQCQARGSPPISYIWYKQQTNNQEPIKVATLSTLLFKPAVIADSGSYFCTAKGQVGSEQHSDIVKFVVKDSSKLLKTKTEAPTTMTYPLKATSTVKQSWDWTTDMDGYLGETSAGPGKSLPVFAIILIISLCCMVVFTMAYIMLCRKTSQQEHVYEAARAHAREANDSGETMRVAIFASGCSSDEPTSQNLGNNYSDEPCIGQEYQIIAQINGNYARLLDTVSGPF

SEQ ID NO: 884873 - protein, 321 aa, Homo sapiens
MGILLGLLLLGHLTVDTYGRPILEVPESVTGPWKGDVNLPCTYDPLQGYTQVLVKWLVQRGSDPVTIFLRDSSGDHIQQAKYQGRLHVSHKVPGDVSLQLSTLEMDDRSHYTCEVTWQTPDGNQVVRDKITELRVQKLSVSKPTVTTGSGYGFTVPQGMRISLQCQARGSPPISYIWYKQQTNNQEPIKVATLSTLLFKPAVIADSGSYFCTAKGQVGSEQHSDIVKFVVKDSSKLLKTKTEAPTTMTYPLKATSTVKQSWDWTTDMDGYLGETSAGPGKSLPVFAIILIISLCCMVVFTMAYIMLCRKTSQQEHVYEAAR

SEQ ID NO: 884874 - protein, 341 aa, Homo sapiens
MGILLGLLLLGHLTVDTYGRPILEVPESVTGPWKGDVNLPCTYDPLQGYTQVLVKWLVQRGSDPVTIFLRDSSGDHIQQAKYQGRLHVSHKVPGDVSLQLSTLEMDDRSHYTCEVTWQTPDGNQVVRDKITELRVQKLSVSKPTVTTGSGYGFTVPQGMRISLQCQARGSPPISYIWYKQQTNNQEPIKVATLSTLLFKPAVIADSGSYFCTAKGQVGSEQHSDIVKFVVKDSSKLLKTKTEAPTTMTYPLKATSTVKQSWDWTTDMDGYLGETSAGPGKSLPVFAIILIISLCCMVVFTMAYIMLCRKTSQQEHVYETPRHMPESPLFLKTPWGGLFWGG

SEQ ID NO: 884875 - protein, 351 aa, Homo sapiens; identical to SEQ ID NO: 884871

SEQ ID NO: 884876 - protein, 340 aa, Homo sapiens
QRETISYYRNVRKAAVRSEFWDAATRSLSLFGSRRLEERTEVALAVMGILLGLLLLGHLTVDTYGRPILEVPESVTGPWKGDVNLPCTYDPLQGYTQVLVKWLVQRGSDPVTIFLRDSSGDHIQQAKYQGRLHVSHKVPGDVSLQLSTLEMDDRSHYTCEVTWQTPDGNQVVRDKITELRVQKHSSKLLKTKTEAPTTMTYPLKATSTVKQSWDWTTDMDGYLGETSAGPGKSLPVFAIILIISLCCMVVFTMAYIMLCRKTSQQEHVYEAARAHAREANDSGETMRVAIFASGCSSDEPTSQNLGNNYSDEPCIGQEYQIIAQINGNYARLLDTVSGPF

SEQ ID NO: 884877 - protein, 321 aa, Homo sapiens; identical to SEQ ID NO: 884873

SEQ ID NO: 884878 - protein, 185 aa, Homo sapiens
QRETISYYRNVRKAAVRSEFWDAATRSLSLFGSRRLEERTEVALAVMGILLGLLLLGHLTVDTYGRPILEVPESVTGPWKGDVNLPCTYDPLQGYTQVLVKWLVQRGSDPVTIFLRDSSGDHIQQAKYQGRLHVSHKVPGDVSLQLSTLEMDDRSHYTCEVTGFALEFARCISSKPAAGFGSGPF

SEQ ID NO: 884879 - protein, 84 aa, Homo sapiens
MKGWGWLALLLGALLGTAWARRSQDLHCGACRALVDELEWEIAQVDPKKTIQMGSFRINPDGSQSVVEVTVTVPPNKVAHSGFG

SEQ ID NO: 884880 - protein, 108 aa, Homo sapiens
MGVNRPRVRRSPGHPVCGRRRSALENPGQPCSLQPGVVSGATGAKVRVQRSSSAWATAAALGAEVERPHYAKDERLGLAGPASGGPAGNRLGSEEPGSPLWSMQGSGG

SEQ ID NO: 884881 - protein, 182 aa, Homo sapiens
MKGWGWLALLLGALLGTAWARRSQDLHCGACRALVDELEWEIAQVDPKKTIQMGSFRINPDGSQSVVEVPYARSEAHLTELLEEICDRMKEYGEQIDPSTHRKNYVRVVGRNGESSELDLQGIRIDSDISGTLKFACESIVEEYEDELIEFFSREADNVKDKLCSKRTDLCDHALHISHDEL

SEQ ID NO: 884882 - protein, 75 aa, Homo sapiens
THASGVLATGAKVRVQRSSSAWATAAALGAEVERPHYAKDERLGLAGPASGGPAGNRLGSEEPGSPLWSMQGSGG

SEQ ID NO: 884883 - protein, 115 aa, Homo sapiens
MVPYARSEAHLTELLEEICDRMKEYGEQIDPSTHRKNYVRVVGRNGESSELDLQGIRIDSDISGTLKFACESIVEEYEDELIEFFSREADNVKDKLCSKRTDLCDHALHISHDEL

SEQ ID NO: 884884 - protein, 105 aa, Homo sapiens
DNLNPVPAVMWSDPITLKMKGWGWLALLLGALLGTAWARRSQDLHCGACRALVDELEWEIAQVDPKKTIQMGSFRINPDGSQSVVEVSALCPLRGPPHRAAGGDM

SEQ ID NO: 884885 - protein, 85 aa, Homo sapiens
KDEWKSWVDPILLTPYPLPCPLLSFSPLPPACRALVDELEWEIAQVDPKKTIQMGSFRINPDGSQSVVEVTVTVPPNKVAHSGFG

SEQ ID NO: 884886 - protein, 136 aa, Homo sapiens
WCSRGSHARRFINPDGSSQWWMVPYARSEAHLTELLEEICDRMKEYGEQIDPSTHRKNYVRVVGRNGESSELDLQGIRIDSDISGTLKFACESIVEEYEDELIEFFSREADNVKDKLCSKRTDLCDHALHISHDEL

SEQ ID NO: 884887 - protein, 104 aa, Homo sapiens
RLVRGSVVNGRGEYGEQIDPSTHRKNYVRVVGRNGESSELDLQGIRIDSDISGTLKFACESIVEEYEDELIEFFSREADNVKDKLCSKRTDLCDHALHISHDEL

SEQ ID NO: 884888 - protein, 114 aa, Homo sapiens
GGGGTNRQVEAGCVRRSPGHPVCGRRRSALENPGQPCSLQPGVVSGATGAKVRVQRSSSAWATAAALGAEVERPHYAKDERLGLAGPASGGPAGNRLGSEEPGSPLWSMQGSGG

SEQ ID NO: 884889 - protein, 115 aa, Homo sapiens; identical to SEQ ID NO: 884883

SEQ ID NO: 884890 - protein, 40 aa, Homo sapiens
MDHPQEGDGHTKGDGHTKGDGHTKGDGHAKGDGHTKGDEH

SEQ ID NO: 884891 - protein, 105 aa, Homo sapiens
MGIGSWFLDIKGLLENQLESEADILVLLFGSEGKRPLIALCHPFLPWVGSVRALWRNTRMNSLNSFPERLTMLKTNFAVSEQIFVTMPCTYRMMSYEPLEQPTLA

SEQ ID NO: 884892 - protein, 122 aa, Homo sapiens
GGHSFIRSHISSSSSVRASERAKEICDRMKEYGEQIDPSTHRKNYVRVVGRNGESSELDLQGIRIDSDISGTLKFACESIVEEYEDELIEFFSREADNVKDKLCSKRTDLCDHALHISHDEL

SEQ ID NO: 884893 - protein, 85 aa, Homo sapiens
KSGINADLPLRPVGTAWARRSQDLHCGACRALVDELEWEIAQVDPKKTIQMGSFRINPDGSQSVVEVNEVPGTVVHACSPSTLGG

SEQ ID NO: 884894 - protein, 182 aa, Homo sapiens; identical to SEQ ID NO: 884881

SEQ ID NO: 884895 - protein, 140 aa, Homo sapiens [sequence omitted]

SEQ ID NO: 884896 - protein, 140 aa, Homo sapiens [sequence omitted]

SEQ ID NO: 884897 - protein, 247 aa, Homo sapiens
  misc_feature (1)..(1): Xaa can be any naturally occurring amino acid
XSLFSRHLVHPCLEGGGCGIQYRQEDMPFTCEGITPDIIINPHAIPSRMTIGHLIECLQGKVSANKGEIGDATPFNDAVNVQKISNLLSDYGYHLRGNEVLYNGFTGRKITSQIFIGPTYYQRLKHMVDDKIHSRARGPIQILNRQPMEGRSRDGGLRFGEMERDCQIAHGAAQFLRERLFEASDPYQVHVCNLCGIMAIANTRTHTYECRGCRNKTQISLVRMPYACKLLFQELMSMSIAPRMMSV

SEQ ID NO: 884898 - protein, 265 aa, Homo sapiens
MYDADEDMQYDEDDDEITPDLWQEACWIVISSYFDEKGLVRQQLDSFDEFIQMSVQRIVEDAPPIDLQAEAQHASGEVEEPPRYLLKFEQIYLSKPTHWERDGAPSPMMPNEARLRNLTYSAPLYVDITKTVIKEGEEQLQTQHQKTFIGKIPIMLRSTYCLLNGLTDRDLCELNECPLDPGGYFIINGSEKVLIAQEKMATNTVYVFAKKDSKYAYTGECGSMASRNTRPRTSKDSMGSTRRPEGRDRWTRKRGKRPQDEGGDT

SEQ ID NO: 884899 - protein, 1174 aa, Homo sapiens
MYDADEDMQYDEDDDEITPDLWQEACWIVISSYFDEKGLVRQQLDSFDEFIQMSVQRIVEDAPPIDLQAEAQHASGEVEEPPRYLLKFEQIYLSKPTHWERDGAPSPMMPNEARLRNLTYSAPLYVDITKTVIKEGEEQLQTQHQKTFIGKIPIMLRSTYCLLNGLTDRDLCELNECPLDPGGYFIINGSEKVLIAQEKMATNTVYVFAKKDSKYAYTGECRSCLENSSRPTSTIWVSMLARGGQGAKKSAIGQRIVATLPYIKQEVPIIIVFRALGFVSDRDILEHIIYDFEDPEMMEMVKPSLDEAFVIQEQNVALNFIGSRGAKPGVTKEKRIKYAKEVLQKEMLPHVGVSDFCETKKAYFLGYMVHRLLLAALGRRELDDRDHYGNKRLDLAGPLLAFLFRGMFKNLLKEVRIYAQKFIDRGKDFNLELAIKTRIISDGLKYSLATGNWGDQKKAHQARAGVSQVLNRLTFASTLSHLRRLNSPIGRDGKLAKPRQLHNTLWGMVCPAETPEGHAVGLVKNLALMAYISVGSQPSPILEFLEEWSMENLEEISPAAIADATKIFVNGCWVGIHKDPEQLMNTLRKLRRQMDIIVSEVSMIRDIREREIRIYTDAGRICRPLLIVEKQKLLLKKRHIDQLKEREYNNYSWQDLVASGVVEYIDTLEEETVMLAMTPDDLQEKEVAYCSTYTHCEIHPSMILGVCASIIPFPDHNQSPRNTYQSAMGKQAMGVYITNFHVRMDTLAHVLYYPQKPLVTTRSMEYLRFRELPAGINSIVAIASYTGYNQEDSVIMNRSAVDRGFFRSVFYRSYKEQESKKGFDQEEVFEKPTRETCQGMRHAIYDKLDDDGLIAPGVRVSGDDVIIGKTVTLPENEDELESTNRRYTKRDCSTFLRTSETGIVDQVMVTLNQEGYKFCKIRVRSVRIPQIGDKFASRHGQKGTCGIQYRQEDMPFTCEGITPDIIINPHAIPSRMTIGHLIECLQGKVSANKGEIGDATPFNDAVNVQKISNLLSDYGYHLRGNEVLYNGFTGRKITSQIFIGPTYYQRLKHMVDDKIHSRARGPIQILNRQPMEGRSRDGGLRFGEMERDCQIAHGAAQFLRERLFEASDPYQVHVCNLCGIMAIANTRTHTYECRGCRNKTQISLVRMPYACKLLFQELMSMSIAPRMMSV

SEQ ID NO: 884900 - protein, 1174 aa, Homo sapiens; identical to SEQ ID NO: 884899

SEQ ID NO: 884901 - protein, 645 aa, Homo sapiens
MYDADEDMQYDEDDDEITPDLWQEACWIVISSYFDEKGLVRQQLDSFDEFIQMSVQRIVEDAPPIDLQAEAQHASGEVEEPPRYLLKFEQIYLSKPTHWERDGAPSPMMPNEARLRNLTYSAPLYVDITKTVIKEGEEQLQTQHQKTFIGKIPIMLRSTYCLLNGLTDRDLCELNECPLDPGGYFIINGSEKVLIAQEKMATNTVYVFAKKDSKYAYTGECRSCLENSSRPTSTIWVSMLARGGQGAKKSAIGQRIVATLPYIKQEVPIIIVFRALGFVSDRDILEHIIYDFEDPEMMEMVKPSLDEAFVIQEQNVALNFIGSRGAKPGVTKEKRIKYAKEVLQKEMLPHVGVSDFCETKKAYFLGYMVHRLLLAALGRRELDDRDHYGNKRLDLAGPLLAFLFRGMFKNLLKEVRIYAQKFIDRGKDFNLELAIKTRIISDGLKYSLATGNWGDQKKAHQARAGVSQVLNRLTFASTLSHLRRLNSPIGRDGKLAKPRQLHNTLWGMVCPAETPEGHAVGLVKNLALMAYISVGSQPSPILEFLEEWSMENLEEISPAAIADATKIFVNGCWVGIHKDPEQLMNTLRKLRRQMDIIVSEVSMIRDIREREIRIYTDAGRICRPLLIVEKQKLAGSCGQWGSGVY

SEQ ID NO: 884902 - protein, 929 aa, Homo sapiens [sequence omitted]

SEQ ID NO: 884903 - protein, 1174 aa, Homo sapiens; identical to SEQ ID NO: 884899

SEQ ID NO: 884904 - protein, 1099 aa, Homo sapiens
MLDCNQPRYLLKFEQIYLSKPTHWERDGAPSPMMPNEARLRNLTYSAPLYVDITKTVIKEGEEQLQTQHQKTFIGKIPIMLRSTYCLLNGLTDRDLCELNECPLDPGGYFIINGSEKVLIAQEKMATNTVYVFAKKDSKYAYTGECRSCLENSSRPTSTIWVSMLARGGQGAKKSAIGQRIVATLPYIKQEVPIIIVFRALGFVSDRDILEHIIYDFEDPEMMEMVKPSLDEAFVIQEQNVALNFIGSRGAKPGVTKEKRIKYAKEVLQKEMLPHVGVSDFCETKKAYFLGYMVHRLLLAALGRRELDDRDHYGNKRLDLAGPLLAFLFRGMFKNLLKEVRIYAQKFIDRGKDFNLELAIKTRIISDGLKYSLATGNWGDQKKAHQARAGVSQVLNRLTFASTLSHLRRLNSPIGRDGKLAKPRQLHNTLWGMVCPAETPEGHAVGLVKNLALMAYISVGSQPSPILEFLEEWSMENLEEISPAAIADATKIFVNGCWVGIHKDPEQLMNTLRKLRRQMDIIVSEVSMIRDIREREIRIYTDAGRICRPLLIVEKQKLLLKKRHIDQLKEREYNNYSWQDLVASGVVEYIDTLEEETVMLAMTPDDLQEKEVAYCSTYTHCEIHPSMILGVCASIIPFPDHNQSPRNTYQSAMGKQAMGVYITNFHVRMDTLAHVLYYPQKPLVTTRSMEYLRFRELPAGINSIVAIASYTGYNQEDSVIMNRSAVDRGFFRSVFYRSYKEQESKKGFDQEEVFEKPTRETCQGMRHAIYDKLDDDGLIAPGVRVSGDDVIIGKTVTLPENEDELESTNRRYTKRDCSTFLRTSETGIVDQVMVTLNQEGYKFCKIRVRSVRIPQIGDKFASRHGQKGTCGIQYRQEDMPFTCEGITPDIIINPHAIPSRMTIGHLIECLQGKVSANKGEIGDATPFNDAVNVQKISNLLSDYGYHLRGNEVLYNGFTGRKITSQIFIGPTYYQRLKHMVDDKIHSRARGPIQILNRQPMEGRSRDGGLRFGEMERDCQIAHGAAQFLRERLFEASDPYQVHVCNLCGIMAIANTRTHTYECRGCRNKTQISLVRMPYACKLLFQELMSMSIAPRMMSV

SEQ ID NO: 884905 - protein, 669 aa, Homo sapiens
AGCGEMVFCEPGHAVGLVKNLALMAYISVGSQPSPILEFLEEWSMENLEEISPAAIADATKIFVNGCWVGIHKDPEQLMNTLRKLRRQMDIIVSEVSMIRDIREREIRIYTDAGRICRPLLIVEKQKLLLKKRHIDQLKEREYNNYSWQDLVASGVVEYIDTLEEETVMLAMTPDDLQEKEVAYCSTYTHCEIHPSMILGVCASIIPFPDHNQSPRNTYQSAMGKQAMGVYITNFHVRMDTLAHVLYYPQKPLVTTRSMEYLRFRELPAGINSIVAIASYTGYNQEDSVIMNRSAVDRGFFRSVFYRSYKEQESKKGFDQEEVFEKPTRETCQGMRHAIYDKLDDDGLIAPGVRVSGDDVIIGKTVTLPENEDELESTNRRYTKRDCSTFLRTSETGIVDQVMVTLNQEGYKFCKIRVRSVRIPQIGDKFASRHGQKGTCGIQYRQEDMPFTCEGITPDIIINPHAIPSRMTIGHLIECLQGKVSANKGEIGDATPFNDAVNVQKISNLLSDYGYHLRGNEVLYNGFTGRKITSQIFIGPTYYQRLKHMVDDKIHSRARGPIQILNRQPMEGRSRDGGLRFGEMERDCQIAHGAAQFLRERLFEASDPYQVHVCNLCGIMAIANTRTHTYECRGCRNKTQISLVRMPYACKLLFQELMSMSIAPRMMSV

SEQ ID NO: 884906 - protein, 1174 aa, Homo sapiens; identical to SEQ ID NO: 884899

SEQ ID NO: 884907 - protein, 263 aa, Homo sapiens
NSAIMAGCKIRVRSVRIPQIGDKFASRHGQKGTCGIQYRQEDMPFTCEGITPDIIINPHAIPSRMTIGHLIECLQGKVSANKGEIGDATPFNDAVNVQKISNLLSDYGYHLRGNEVLYNGFTGRKITSQIFIGPTYYQRLKHMVDDKIHSRARGPIQILNRQPMEGRSRDGGLRFGEMERDCQIAHGAAQFLRERLFEASDPYQVHVCNLCGIMAIANTRTHTYECRGCRNKTQISLVRMPYACKLLFQELMSMSIAPRMMSV

SEQ ID NO: 884908 - protein, 198 aa, Homo sapiens
LNGVASPISPLKVSANKGEIGDATPFNDAVNVQKISNLLSDYGYHLRGNEVLYNGFTGRKITSQIFIGPTYYQRLKHMVDDKIHSRARGPIQILNRQPMEGRSRDGGLRFGEMERDCQIAHGAAQFLRERLFEASDPYQVHVCNLCGIMAIANTRTHTYECRGCRNKTQISLVRMPYACKLLFQELMSMSIAPRMMSV

SEQ ID NO: 884909 - protein, 238 aa, Homo sapiens [sequence omitted]

SEQ ID NO: 884910 - protein, 238 aa, Homo sapiens [sequence omitted]

SEQ ID NO: 884911 - protein, 238 aa, Homo sapiens [sequence omitted]

SEQ ID NO: 884912 - protein, 1174 aa, Homo sapiens; identical to SEQ ID NO: 884899

SEQ ID NO: 884913 - protein, 1174 aa, Homo sapiens; identical to SEQ ID NO: 884899

SEQ ID NO: 884914 - protein, 1174 aa, Homo sapiens; identical to SEQ ID NO: 884899

SEQ ID NO: 884915 - protein, 1174 aa, Homo sapiens; identical to SEQ ID NO: 884899

SEQ ID NO: 884916 - protein, 238 aa, Homo sapiens [sequence omitted]

SEQ ID NO: 884917 - protein, 789 aa, Homo sapiens
MYDADEDMQYDEDDDEITPDLWQEACWIVISSYFDEKGLVRQQLDSFDEFIQMSVQRIVEDAPPIDLQAEAQHASGEVEEPPRYLLKFEQIYLSKPTHWERDGAPSPMMPNEARLRNLTYSAPLYVDITKTVIKEGEEQLQTQHQKTFIGKIPIMLRSTYCLLNGLTDRDLCELNECPLDPGGYFIINGSEKVLIAQEKMATNTVYVFAKKDSKYAYTGECRSCLENSSRPTSTIWVSMLARGGQGAKKSAIGQRIVATLPYIKQEVPIIIVFRALGFVSDRDILEHIIYDFEDPEMMEMVKPSLDEAFVIQEQNVALNFIGSRGAKPGVTKEKRIKYAKEVLQKEMLPHVGVSDFCETKKAYFLGYMVHRLLLAALGRRELDDRDHYGNKRLDLAGPLLAFLFRGMFKNLLKEVRIYAQKFIDRGKDFNLELAIKTRIISDGLKYSLATGNWGDQKKAHQARAGVSQVLNRLTFASTLSHLRRLNSPIGRDGKLAKPRQLHNTLWGMVCPAETPEGHAVGLVKNLALMAYISVGSQPSPILEFLEEWSMENLEEISPAAIADATKIFVNGCWVGIHKDPEQLMNTLRKLRRQMDIIVSEVSMIRDIREREIRIYTDAGRICRPLLIVEKQKLLLKKRHIDQLKEREYNNYSWQDLVASGVVEYIDTLEEETVMLAMTPDDLQEKEVAYCSTYTHCEIHPSMILGVCASIIPFPDHNQSPRNTYQSAMGKQAMGVYITNFHVRMDTLAHVLYYPQKPLVTTRSMEYLRFRELPAGMVSFALRYLRSFCA

SEQ ID NO: 884918 - protein, 193 aa, Homo sapiens
MYDADEDMQYDEDDDEITPDLWQEACWIVISSYFDEKGLVRQQLDSFDEFIQMSVQRIVEDAPPIDLQAEAQHASGEVEEPPRYLLKFEQIYLSKPTHWERDGAPSPMMPNEARLRNLTYSAPLYVDITKTVIKEGEEQLQTQHQKTFIGKIPIMLRSTYCLLNGLTDRDLCELNECPLDPGGYFIINGSEKV

SEQ ID NO: 884919 - protein, 1174 aa, Homo sapiens; identical to SEQ ID NO: 884899

SEQ ID NO: 884920 - protein, 1174 aa, Homo sapiens; identical to SEQ ID NO: 884899

SEQ ID NO: 884921 - protein, 1174 aa, Homo sapiens; identical to SEQ ID NO: 884899

SEQ ID NO: 884922 - protein, 649 aa, Homo sapiens
MYDADEDMQYDEDDDEITPDLWQEACWIVISSYFDEKGLVRQQLDSFDEFIQMSVQRIVEDAPPIDLQAEAQHASGEVEEPPRYLLKFEQIYLSKPTHWERDGAPSPMMPNEARLRNLTYSAPLYVDITKTVIKEGEEQLQTQHQKTFIGKIPIMLRSTYCLLNGLTDRDLCELNECPLDPGGYFIINGSEKVLIAQEKMATNTVYVFAKKDSKYAYTGECRSCLENSSRPTSTIWVSMLARGGQGAKKSAIGQRIVATLPYIKQEVPIIIVFRALGFVSDRDILEHIIYDFEDPEMMEMVKPSLDEAFVIQEQNVALNFIGSRGAKPGVTKEKRIKYAKEVLQKEMLPHVGVSDFCETKKAYFLGYMVHRLLLAALGRRELDDRDHYGNKRLDLAGPLLAFLFRGMFKNLLKEVRIYAQKFIDRGKDFNLELAIKTRIISDGLKYSLATGNWGDQKKAHQARAGVSQVLNRLTFASTLSHLRRLNSPIGRDGKLAKPRQLHNTLWGMVCPAETPEGHAVGLVKNLALMAYISVGSQPSPILEFLEEWSMENLEEISPAAIADATKIFVNGCWVGIHKDPEQLMNTLRKLRRQMDIIVSEVSMIRDIREREIRIYTDAGRICRPLLIVEKQKLLLKKRHIDQLKERSTI

SEQ ID NO: 884923 - protein, 957 aa, Homo sapiens
MYDADEDMQYDEDDDEITPDLWQEACWIVISSYFDEKGLVRQQLDSFDEFIQMSVQRIVEDAPPIDLQAEAQHASGEVEEPPRYLLKFEQIYLSKPTHWERDGAPSPMMPNEARLRNLTYSAPLYVDITKTVIKEGEEQLQTQHQKTFIGKIPIMLRSTYCLLNGLTDRDLCELNECPLDPGGYFIINGSEKVLIAQEKMATNTVYVFAKKDSKYAYTGECRSCLENSSRPTSTIWVSMLARGGQGAKKSAIGQRIVATLPYIKQEVPIIIVFRALGFVSDRDILEHIIYDFEDPEMMEMVKPSLDEAFVIQEQNVALNFIGSRGAKPGVTKEKRIKYAKEVLQKEMLPHVGVSDFCETKKAYFLGYMVHRLLLAALGRRELDDRDHYGNKRLDLAGPLLAFLFRGMFKNLLKEVRIYAQKFIDRGKDFNLELAIKTRIISDGLKYSLATGNWGDQKKAHQARAGVSQVLNRLTFASTLSHLRRLNSPIGRDGKLAKPRQLHNTLWGMVCPAETPEGHAVGLVKNLALMAYISVGSQPSPILEFLEEWSMENLEEISPAAIADATKIFVNGCWVGIHKDPEQLMNTLRKLRRQMDIIVSEVSMIRDIREREIRIYTDAGRICRPLLIVEKQKLLLKKRHIDQLKEREYNNYSWQDLVASGVVEYIDTLEEETVMLAMTPDDLQEKEVAYCSTYTHCEIHPSMILGVCASIIPFPDHNQSPRNTYQSAMGKQAMGVYITNFHVRMDTLAHVLYYPQKPLVTTRSMEYLRFRELPAGINSIVAIASYTGYNQEDSVIMNRSAVDRGFFRSVFYRSYKEQESKKGFDQEEVFEKPTRETCQGMRHAIYDKLDDDGLIAPGVRVSGDDVIIGKTVTLPENEDELESTNRRYTKRDCSTFLRTSETGIVDQVMVTLNQEGYKFCKIRVRSVRIPQIGDKFASRHGQVSPLISSSIPMPSPLV

SEQ ID NO: 884924 - protein, 929 aa, Homo sapiens [sequence omitted]

SEQ ID NO: 884925 - protein, 878 aa, Homo sapiens
MMEMVKPSLDEAFVIQEQNVALNFIGSRGAKPGVTKEKRIKYAKEVLQKEMLPHVGVSDFCETKKAYFLGYMVHRLLLAALGRRELDDRDHYGNKRLDLAGPLLAFLFRGMFKNLLKEVRIYAQKFIDRGKDFNLELAIKTRIISDGLKYSLATGNWGDQKKAHQARAGVSQVLNRLTFASTLSHLRRLNSPIGRDGKLAKPRQLHNTLWGMVCPAETPEGHAVGLVKNLALMAYISVGSQPSPILEFLEEWSMENLEEISPAAIADATKIFVNGCWVGIHKDPEQLMNTLRKLRRQMDIIVSEVSMIRDIREREIRIYTDAGRICRPLLIVEKQKLLLKKRHIDQLKEREYNNYSWQDLVASGVVEYIDTLEEETVMLAMTPDDLQEKEVAYCSTYTHCEIHPSMILGVCASIIPFPDHNQSPRNTYQSAMGKQAMGVYITNFHVRMDTLAHVLYYPQKPLVTTRSMEYLRFRELPAGINSIVAIASYTGYNQEDSVIMNRSAVDRGFFRSVFYRSYKEQESKKGFDQEEVFEKPTRETCQGMRHAIYDKLDDDGLIAPGVRVSGDDVIIGKTVTLPENEDELESTNRRYTKRDCSTFLRTSETGIVDQVMVTLNQEGYKFCKIRVRSVRIPQIGDKFASRHGQKGTCGIQYRQEDMPFTCEGITPDIIINPHAIPSRMTIGHLIECLQGKVSANKGEIGDATPFNDAVNVQKISNLLSDYGYHLRGNEVLYNGFTGRKITSQIFIGPTYYQRLKHMVDDKIHSRARGPIQILNRQPMEGRSRDGGLRFGEMERDCQIAHGAAQFLRERLFEASDPYQVHVCNLCGIMAIANTRTHTYECRGCRNKTQISLVRMPYACKLLFQELMSMSIAPRMMSV

SEQ ID NO: 884926 - protein, 355 aa, Homo sapiens
MWFLIFVGDYVTFRVYFLTGMRHAIYDKLDDDGLIAPGVRVSGDDVIIGKTVTLPENEDELESTNRRYTKRDCSTFLRTSETGIVDQVMVTLNQEGYKFCKIRVRSVRIPQIGDKFASRHGQKGTCGIQYRQEDMPFTCEGITPDIIINPHAIPSRMTIGHLIECLQGKVSANKGEIGDATPFNDAVNVQKISNLLSDYGYHLRGNEVLYNGFTGRKITSQIFIGPTYYQRLKHMVDDKIHSRARGPIQILNRQPMEGRSRDGGLRFGEMERDCQIAHGAAQFLRERLFEASDPYQVHVCNLCGIMAIANTRTHTYECRGCRNKTQISLVRMPYACKLLFQELMSMSIAPRMMSV

SEQ ID NO: 884927 - protein, 247 aa, Homo sapiens; identical to SEQ ID NO: 884897
  misc_feature (1)..(1): Xaa can be any naturally occurring amino acid

SEQ ID NO: 884928 - protein, 1174 aa, Homo sapiens; identical to SEQ ID NO: 884899

SEQ ID NO: 884929 - protein, 1174 aa, Homo sapiens; identical to SEQ ID NO: 884899

SEQ ID NO: 884930 - protein, 1174 aa, Homo sapiens; identical to SEQ ID NO: 884899

SEQ ID NO: 884931 - protein, 1174 aa, Homo sapiens; identical to SEQ ID NO: 884899

SEQ ID NO: 884932 - protein, 976 aa, Homo sapiens [sequence omitted]

SEQ ID NO: 884933 - protein, 265 aa, Homo sapiens; identical to SEQ ID NO: 884898

SEQ ID NO: 884934 - protein, 749 aa, Homo sapiens
MARKLSVILILTFALSVTNPLHELKAAAFPQTTEKISPNWESGINVDLAISTRQYHLQQLFYRYGENNSLSVEGFRKLLQNIGIDKIKRIHIHHDHDHHSDHEHHSDHERHSDHEHHSDHEHHSDHNHAASGKNKRKALCPDHDSDSSGKDPRNSQGKGAHRPEHASGRRNVKDSVSASEVTSTVYNTVSEGTHFLETIETPRPGKLFPKDVSSSTPPSVTSKSRVSRLAGRKTNESVSEPRKGFMYSRNTNENPQECFNASKLLTSHGMGIQVPLNATEFNYLCPAIINQIDARSCLIHTSEKKAEIPPKTYSLQIAWVGGFIAISIISFLSLLGVILVPLMNRVFFKFLLSFLVALAVGTLSGDAFLHLLPHSHASHHHSHSHEEPAMEMKRGPLFSHLSSQNIEESAYFDSTWKGLTALGGLYFMFLVEHVLTLIKQFKDKKKKNQKKPENDDDVEIKKQLSKYESQLSTNEEKVDTDDRTEGYLRADSQEPSHFDSQQPAVLEEEEVMIAHAHPQEVYNEYVPRGCKNKCHSHFHDTLGQSDDLIHHHHDYHHILHHHHHQNHHPHSHSQRYSREELKDAGVATLAWMVIMGDGLHNFSDGLAIGAAFTEGLSSGLSTSVAVFCHELPHELGDFAVLLKAGMTVKQAVLYNALSAMLAYLGMATGIFIGHYAENVSMWIFALTAGLFMYVALVDMVPEMLHNDASDHGCSRWGYFFLQNAGMLLGFGIMLLISIFEHKIVFRINF

SEQ ID NO: 884935 - protein, 504 aa, Homo sapiens
MYSRNTNENPQECFNASKLLTSHGMGIQVPLNATEFNYLCPAIINQIDARSCLIHTSEKKAEIPPKTYSLQIAWVGGFIAISIISFLSLLGVILVPLMNRVFFKFLLSFLVALAVGTLSGDAFLHLLPHSHASHHHSHSHEEPAMEMKRGPLFSHLSSQNIEESAYFDSTWKGLTALGGLYFMFLVEHVLTLIKQFKDKKKKNQKKPENDDDVEIKKQLSKYESQLSTNEEKVDTDDRTEGYLRADSQEPSHFDSQQPAVLEEEEVMIAHAHPQEVYNEYVPRGCKNKCHSHFHDTLGQSDDLIHHHHDYHHILHHHHHQNHHPHSHSQRYSREELKDAGVATLAWMVIMGDGLHNFSDGLAIGAAFTEGLSSGLSTSVAVFCHELPHELGDFAVLLKAGMTVKQAVLYNALSAMLAYLGMATGIFIGHYAENVSMWIFALTAGLFMYVALVDMVPEMLHNDASDHGCSRWGYFFLQNAGMLLGFGIMLLISIFEHKIVFRINF

SEQ ID NO: 884936 - protein, 749 aa, Homo sapiens; identical to SEQ ID NO: 884934

SEQ ID NO: 884937 - protein, 500 aa, Homo sapiens
LCFGTADSGTDCCSSEEVGFPEGSVPLNATEFNYLCPAIINQIDARSCLIHTSEKKAEIPPKTYSLQIAWVGGFIAISIISFLSLLGVILVPLMNRVFFKFLLSFLVALAVGTLSGDAFLHLLPHSHASHHHSHSHEEPAMEMKRGPLFSHLSSQNIEESAYFDSTWKGLTALGGLYFMFLVEHVLTLIKQFKDKKKKNQKKPENDDDVEIKKQLSKYESQLSTNEEKVDTDDRTEGYLRADSQEPSHFDSQQPAVLEEEEVMIAHAHPQEVYNEYVPRGCKNKCHSHFHDTLGQSDDLIHHHHDYHHILHHHHHQNHHPHSHSQRYSREELKDAGVATLAWMVIMGDGLHNFSDGLAIGAAFTEGLSSGLSTSVAVFCHELPHELGDFAVLLKAGMTVKQAVLYNALSAMLAYLGMATGIFIGHYAENVSMWIFALTAGLFMYVALVDMVPEMLHNDASDHGCSRWGYFFLQNAGMLLGFGIMLLISIFEHKIVFRINF

SEQ ID NO: 884938 - protein, 104 aa, Homo sapiens [sequence omitted]

SEQ ID NO: 884939 - protein, 702 aa, Homo sapiens
MARKLSVILILTFALSVTNPLHELKAAAFPQTTEKISPNWESGINVDLAISTRQYHLQQLFYRYGENNSLSVEGFRKLLQNIGIDKIKRIHIHHDHDHHSDHEHHSDHERHSDHEHHSDHEHHSDHNHAASGKNKRKALCPDHDSDSSGKDPRNSQGKGAHRPEHASGRRNVKDSVSASEVTSTVYNTVSEGTHFLETIETPRPGKLFPKDVSSSTPPSVTSKSRVSRLAGRKTNESVSEPRKGFMYSRNTNENPQECFNASKLLTSHGMGIQVPLNATEFNYLCPAIINQIDARSCLIHTSEKKAEIPPKTYSLQIAWVGGFIAISIISFLSLLGVILVPLMNRVFFKFLLSFLVALAVGTLSGDAFLHLLPHSHASHHHSHSHEEPAMEMKRGPLFSHLSSQNIEESAYFDSTWKGLTALGGLYFMFLVEHVLTLIKQFKDKKKKNQKKPENDDDVEIKKQLSKYESQLSTNEEKVDTDDRTEGYLRADSQEPSHFDSQQPAVLEEEEVMIAHAHPQEVYNEYVPRGCKNKCHSHFHDTLGQSDDLIHHHHDYHHILHHHHHQNHHPHSHSQRYSREELKDAGVATLAWMVIMGDGLHNFSDGLAIGAAFTEGLSSGLSTSVAVFCHELPHELGDFAVLLKAGMTVKQAVLYNALSAMLAYLGMATGIFIGHYAENVSMWIFALTAGLFMYVALVDMVSF

SEQ ID NO: 884940 - protein, 692 aa, Homo sapiens
MARKLSVILILTFALSVTNPLHELKAAAFPQTTEKISPNWESGINVDLAISTRQYHLQQLFYRYGENNSLSVEGFRKLLQNIGIDKIKRIHIHHDHDHHSDHEHHSDHERHSDHEHHSDHEHHSDHNHAASGKNKRKALCPDHDSDSSGKDPRNSQGKGAHRPEHASGRRNVKDSVSASEVTSTVYNTVSEGTHFLETIETPRPGKLFPKDVSSSTPPSVTSKSRVSRLAGRKTNESVSEPRKGFMYSRNTNENPQECFNASKLLTSHGMGIQVPLNATEFNYLCPAIINQIDARSCLIHTSEKKAEIPPKTYSLQIAWVGGFIAISIISFLSLLGVILVPLMNRVFFKFLLSFLVALAVGTLSGDAFLHLLPHSHASHHHSHSHEEPAMEMKRGPLFSHLSSQNIEESAYFDSTWKGLTALGGLYFMFLVEHVLTLIKQFKDKKKKNQKKPENDDDVEIKKQLSKYESQLSTNEEKVDTDDRTEGYLRADSQEPSHFDSQQPAVLEEEEVMIAHAHPQEVYNEYVPRGCKNKCHSHFHDTLGQSDDLIHHHHDYHHILHHHHHQNHHPHSHSQRYSREELKDAGVATLAWMVIMGDGLHNFSDGLAIGAAFTEGLSSGLSTSVAVFCHELPHELGDFAVLLKAGMTVKQAVLYNALSAMLAYLGMATGIFIGHYAENVSMWIFDWFRVPSS

SEQ ID NO: 884941 - protein, 613 aa, Homo sapiens
MARKLSVILILTFALSVTNPLHELKAAAFPQTTEKISPNWESGINVDLAISTRQYHLQQLFYRYGENNSLSVEGFRKLLQNIGIDKIKRIHIHHDHDHHSDHEHHSDHERHSDHEHHSDHEHHSDHNHAASGKNKRKALCPDHDSDSSGKDPRNSQGKGAHRPEHASGRRNVKDSVSASEVTSTVYNTVSEGTHFLETIETPRPGKLFPKDVSSSTPPSVTSKSRVSRLAGRKTNESVSEPRKGFMYSRNTNENPQECFNASKLLTSHGMGIQVPLNATEFNYLCPAIINQIDARSCLIHTSEKKAEIPPKTYSLQIAWVGGFIAISIISFLSLLGVILVPLMNRVFFKFLLSFLVALAVGTLSGDAFLHLLPHSHASHHHSHSHEEPAMEMKRGPLFSHLSSQNIEESAYFDSTWKGLTALGGLYFMFLVEHVLTLIKQFKDKKKKNQKKPENDDDVEIKKQLSKYESQLSTNEEKVDTDDRTEGYLRADSQEPSHFDSQQPAVLEEEEVMIAHAHPQEVYNEYVPRGCKNKCHSHFHDTLGQSDDLIHHHHDYHHILHHHHHQNHHPHSHSQRYSREELKDAGVATLAWMVIMGDGLHNFSDGLAIAAAFN

SEQ ID NO: 884942 - protein, 777 aa, Homo sapiens
LLLWLPRDPPCCQTWSGRGTTRRGDEGAMARKLSVILILTFALSVTNPLHELKAAAFPQTTEKISPNWESGINVDLAISTRQYHLQQLFYRYGENNSLSVEGFRKLLQNIGIDKIKRIHIHHDHDHHSDHEHHSDHERHSDHEHHSDHEHHSDHNHAASGKNKRKALCPDHDSDSSGKDPRNSQGKGAHRPEHASGRRNVKDSVSASEVTSTVYNTVSEGTHFLETIETPRPGKLFPKDVSSSTPPSVTSKSRVSRLAGRKTNESVSEPRKGFMYSRNTNENPQECFNASKLLTSHGMGIQVPLNATEFNYLCPAIINQIDARSCLIHTSEKKAEIPPKTYSLQIAWVGGFIAISIISFLSLLGVILVPLMNRVFFKFLLSFLVALAVGTLSGDAFLHLLPHSHASHHHSHSHEEPAMEMKRGPLFSHLSSQNIEESAYFDSTWKGLTALGGLYFMFLVEHVLTLIKQFKDKKKKNQKKPENDDDVEIKKQLSKYESQLSTNEEKVDTDDRTEGYLRADSQEPSHFDSQQPAVLEEEEVMIAHAHPQEVYNEYVPRGCKNKCHSHFHDTLGQSDDLIHHHHDYHHILHHHHHQNHHPHSHSQRYSREELKDAGVATLAWMVIMGDGLHNFSDGLAIGAAFTEGLSSGLSTSVAVFCHELPHELGDFAVLLKAGMTVKQAVLYNALSAMLAYLGMATGIFIGHYAENVSMWIFALTAGLFMYVALVDMVPEMLHNDASDHGCSRWGYFFLQNAGMLLGFGIMLLISIFEHKIVFRINF

SEQ ID NO: 884943 - protein, 480 aa, Homo sapiens [sequence omitted]

SEQ ID NO: 884944 - protein, 320 aa, Homo sapiens
EGVKKHHHSKSQRPVPQGNQKKPENDDDVEIKKQLSKYESQLSTNEEKVDTDDRTEGYLRADSQEPSHFDSQQPAVLEEEEVMIAHAHPQEVYNEYVPRGCKNKCHSHFHDTLGQSDDLIHHHHDYHHILHHHHHQNHHPHSHSQRYSREELKDAGVATLAWMVIMGDGLHNFSDGLAIGAAFTEGLSSGLSTSVAVFCHELPHELGDFAVLLKAGMTVKQAVLYNALSAMLAYLGMATGIFIGHYAENVSMWIFALTAGLFMYVALVDMVPEMLHNDASDHGCSRWGYFFLQNAGMLLGFGIMLLISIFEHKIVFRINF

SEQ ID NO: 884945 - protein, 588 aa, Homo sapiens
MARKLSVILILTFALSVTNPLHELKAAAFPQTTEKISPNWESGINVDLAISTRQYHLQQLFYRYGENNSLSVEGFRKLLQNIGIDKIKRIHIHHDHDHHSDHEHHSDHERHSDHEHHSDHEHHSDHNHAASGKNKRKALCPDHDSDSSGKDPRNSQGKGAHRPEHASGRRNVKDSVSASEVTSTVYNTVSEGTHFLETIETPRPGKLFPKDVSSSTPPSVTSKSRVSRLAGRKTNESVSEPRKGFMYSRNTNENPQECFNASKLLTSHGMGIQVPLNATEFNYLCPAIINQIDARSCLIHTSEKKAEIPPKTYSLQIAWVGGFIAISIISFLSLLGVILVPLMNRVFFKFLLSFLVALAVGTLSGDAFLHLLPHSHASHHHSHSHEEPAMEMKRGPLFSHLSSQNIEESAYFDSTWKGLTALGGLYFMFLVEHVLTLIKQFKDKKKKNQKKPENDDDVEIKKQLSKYESQLSTNEEKVDTDDRTEGYLRADSQEPSHFDSQQPAVLEEEEVMIAHAHPQEVYNEYVPRGCKNKCHSHFHDTLGQSDDLIHHHHDYHHILHHHHHQNHHPHSHSQRYSREELKDAGVAT

SEQ ID NO: 884946 - protein, 588 aa, Homo sapiens; identical to SEQ ID NO: 884945

SEQ ID NO: 884947 - protein, 83 aa, Homo sapiens
DDLIHHHHDYHHILHHHHHQNHHPHSHSQRYSREELKDAGVATLAWMVIMGDGLHNFSDGLAIGIYLHICSLLIDSENVTLNT

SEQ ID NO: 884948 - protein, 292 aa, Homo sapiens
MSASVKESLQLQLLEMEMLFSMFPNQGEVKLEDVNALTNIKRYLEGTREALPPKIEFVITLQIEEPKVKIDLQVTMPHSYPYVALQLFGRSSELDRHQQLLLNKGLTSYIGTFDPGELCVCAAIQWLQDNSASYFLNRKLVYEPSTQAKPVKNTFLRMWIYSHHIYQQDLRKKILDVGKRLDVTGFCMTGKPGIICVEGFKEHCEEFWHTIRYPNWKHISCKHAESVETEGNGEDLRLFHSFEELLLEAHGDYGLRNDYHMNLGQFLEFLKKHKSEHVFQILFGIESKSSDS

SEQ ID NO: 884949 - protein, 318 aa, Homo sapiens
MSASVKESLQLQLLEMEMLFSMFPNQGEVKLEDVNALTNIKRYLEGTREALPPKIEFVITLQIEEPKRRLSGSPDWILSRWFTHFNGTLHFSMVKIDLQVTMPHSYPYVALQLFGRSSELDRHQQLLLNKGLTSYIGTFDPGELCVCAAIQWLQDNSASYFLNRKLVYEPSTQAKPVKNTFLRMWIYSHHIYQQDLRKKILDVGKRLDVTGFCMTGKPGIICVEGFKEHCEEFWHTIRYPNWKHISCKHAESVETEGNGEDLRLFHSFEELLLEAHGDYGLRNDYHMNLGQFLEFLKKHKSEHVFQILFGIESKSSDS

SEQ ID NO: 884950 - protein, 217 aa, Homo sapiens
MPHSYPYVALQLFGRSSELDRHQQLLLNKGLTSYIGTFDPGELCVCAAIQWLQDNSASYFLNRKLVYEPSTQAKPVKNTFLRMWIYSHHIYQQDLRKKILDVGKRLDVTGFCMTGKPGIICVEGFKEHCEEFWHTIRYPNWKHISCKHAESVETEGNGEDLRLFHSFEELLLEAHGDYGLRNDYHMNLGQFLEFLKKHKSEHVFQILFGIESKSSDS

SEQ ID NO: 884951 - protein, 136 aa, Homo sapiens
MSAALLRRGLELLAASEAPRDPPGQAKPRGAPVKRPRKTKAIQAQKLRNSAKGKVPKSALDEYRKRECRDHLRVNLKFLTRTRSTVAESVSQQILRQNRGRKACDRPVAKTKKKKAEGTVFTEEDFQKFQQEYFGS

SEQ ID NO: 884952 - protein, 111 aa, Homo sapiens
MSAALLRRGLELLAASEAPRDPPGQAKPRGAPVKRPRKTKAIQAQKLRNSAKGKVPKSALGKFGKGLKVLPPVLGPAPQRRWRLRQGLKRSPGIARPTVCQARSGALDIRR

SEQ ID NO: 884953 - protein, 140 aa, Homo sapiens
MGVGAKSLGLSAGPVWRMHLMEKSPAAVITWEGNDEVFGRAMGQGLRMVPGGVNLKCAPCLLPTDEYRKRECRDHLRVNLKFLTRTRSTVAESVSQQILRQNRGRKACDRPVAKTKKKKAEGTVFTEEDFQKFQQEYFGS

SEQ ID NO: 884954 - protein, 105 aa, Homo sapiens
MRQVQCDYGKDKKKLEQSSPNELSKWNYLDEYRKRECRDHLRVNLKFLTRTRSTVAESVSQQILRQNRGRKACDRPVAKTKKKKAEGTVFTEEDFQKFQQEYFGS

SEQ ID NO: 884955 - protein, 136 aa, Homo sapiens; identical to SEQ ID NO: 884951

SEQ ID NO: 884956 - protein, 140 aa, Homo sapiens; identical to SEQ ID NO: 884953

SEQ ID NO: 884957 - protein, 136 aa, Homo sapiens; identical to SEQ ID NO: 884951

SEQ ID NO: 884958 - protein, 137 aa, Homo sapiens
MGTLRALSPGSLPLSSPTAPRDPPGQAKPRGAPVKRPRKTKAIQAQKLRNSAKGKVPKSALDEYRKRECRDHLRVNLKFLTRTRSTVAESVSQQILRQNRGRKACDRPVAKTKKKKAEGTVFTEEDFQKFQQEYFGS

SEQ ID NO: 884959 - protein, 72 aa, Homo sapiens
MRPCIWIHVHLKPPCRLVELLPFSSALQGLSHLSLGTTLPVILPERNEEQNLQELSHNADKYQMGDCCKEEI

SEQ ID NO: 884960 - protein, 86 aa, Homo sapiens
MAGAPPPASLPPCSLISDCCASNQRDSVGVAPSEPGAGYNLVVHRFLSWSEKRSIRVGVTRFSRYSPLVECKWKPEEKGTLDTVFI

SEQ ID NO: 884961 - protein, 107 aa, Homo sapiens
MECWNAAEVSWEGAWCSPHVYTVARPGWHFACGKRSENGGGCLRGITGILRYHRPEPSLPFLSHRWKFECWGSVEHLKEAGEADVPLCLPSVMQPVHACQHLCRWTL

SEQ ID NO: 884962 - protein, 107 aa, Homo sapiens
MAGAPPPASLPPCSLISDCCASNQRDSVGVAPSEPGAGYNLVVHRFLSWSEKRSIRVGVTRFSRCCVAIFKVITLDHISIASCLGIINEDKVGLLFSMIWAFVFSTG

SEQ ID NO: 884963 - protein, 86 aa, Homo sapiens; identical to SEQ ID NO: 884960

SEQ ID NO: 884964 - protein, 72 aa, Homo sapiens; identical to SEQ ID NO: 884959

SEQ ID NO: 884965 - protein, 186 aa, Homo sapiens [sequence omitted]

SEQ ID NO: 884966 - protein, 191 aa, Homo sapiens
MEPTRDCPLFGGAFSAILPMGAIDVSDLRPVPDNQEVFCHPVTDQSLIVELLELQAHVRGEAAARYHFEDVGGVQGARAVHVESVQPLSLENLALRGRCQEAWVLSGKQQIAKENQQVAKDVTLHQALLRLPQYQTDLLLTFNQPPSPRKEEGTGGYLMTGFPGESGWEGQNRETHWWDPPRKQEWARGLG

SEQ ID NO: 884967 - protein, 138 aa, Homo sapiens
MEPTRDCPLFGGAFSAILPMGAIDVSDLRPVPDNQEVFCHPVTDQSLIVELLELQAHVRGEAAARYHFEDVGGVQGARAVHVESVQPLSLENLALRGRCQEAWVLSGKQQIAKENQQVRARECVMSWKGGSGDAEIQP

SEQ ID NO: 884968 - protein, 165 aa, Homo sapiens
MEPTRDCPLFGGAFSAILPMGAIDVSDLRPVPDNQEVFCHPVTDQSLIVELLELQAHVRGEAAARYHFEDVGGVQGARAVHVESVQPLSLENLALRGRCQEAWVLSGKQQIAKENQQVRARECVMSWKGGSGDAEIQVSILTLIPLGSKGRDTSSGLAEAAPVPD

SEQ ID NO: 884969 - protein, 118 aa, Homo sapiens
MEPTRDCPLFGGAFSAILPMGAIDVSDLRPVPDNQEVFCHPVTDQSLIVELLELQAHVRGEAAARYHFEDVGGVQGARAVHVESVQPLSLENLALRGRCQEAWVLSGKQQIAKENQQP

SEQ ID NO: 884970 - protein, 124 aa, Homo sapiens
SASTRSALGEPEPEVEEVKRRARRLLQEPARDPSILRLPRVVGVPGPRGRRHRGEQQQQREQRGGGARAPGPGPGSRQPLPAGLHGRRKVGSAPDRHGLGAGSAGARGNKAVIIVKHLCQALGE

SEQ ID NO: 884971 - protein, 123 aa, Homo sapiens
SASTRSALGEPEPEVEEVKRRARRLLQEPARDPSILRLPRVVGVPGPRGRRHRGEQQQQREQRGGGARAPGPGPGSRQPLPAGLHGRRKVGSAPDRHGLGAGSAGARGNKAVVGPSPPPPGRR

SEQ ID NO: 884972 - protein, 123 aa, Homo sapiens; identical to SEQ ID NO: 884971

SEQ ID NO: 884973 - protein, 123 aa, Homo sapiens; identical to SEQ ID NO: 884971

SEQ ID NO: 884974 - protein, 123 aa, Homo sapiens; identical to SEQ ID NO: 884971

SEQ ID NO: 884975 - protein, 501 aa, Homo sapiens
WLLSSLKRHFSETQSFSSAKMKHSLNALLIFLIITSAWGGSKGPLDQLEKGGETAQSADPQWEQLNNKNLSMPLLPADFHKVDLEKIFSEDDDYIDIVDSLSVSPTDSDVSAGNILQLFHGKSRIQRLNILNAKFAFNLYRVLKDQVNTFDNIFIAPVGISTAMGMISLGLKGETHEQVHSILHFKDFVNASSKYEITTIHNLFRKLTHRLFRRNFGYTLRSVNDLYIQKQFPILLDFKTKVREYYFAEAQIADFSDPAFISKTNNHIMKLTKGLIKDALENIDPATQMMILNCIYFKGSWVNKFPVEMTHNHNFRLNEREVVKVSMMQTKGNFLAANDQELDCDILQLEYVGGISMLIVVPHKMSGMKTLEAQLTPRVVERWQKSMTNRTREVLLPKFKLEKNYNLVESLKLMGIRMLFDKNGNMAGISDQRIAIDLFKHQGTITVNEEGTQATTVTTVGFMPLSTQVRFTVDRPFLFLIYEHRTSCLLFMGRVANPSRS

SEQ ID NO: 884976 - protein, 503 aa, Homo sapiens
WLLSSLKRHFSETQSFSSAKMKHSLNALLIFLIITSAWGGSKGPLDQLEKGGETAQSADPQWEQLNNKNLSMPLLPADFHKENTVTNDWIPEGEEDDDYLDLEKIFSEDDDYIDIVDSLSVSPTDSDVSAGNILQLFHGKSRIQRLNILNAKFAFNLYRVLKDQVNTFDNIFIAPVGISTAMGMISLGLKGETHEQVHSILHFKDFVNASSKYEITTIHNLFRKLTHRLFRRNFGYTLRSVNDLYIQKQFPILLDFKTKVREYYFAEAQIADFSDPAFISKTNNHIMKLTKGLIKDALENIDPATQMMILNCIYFKGSWVNKFPVEMTHNHNFRLNEREVVKVSMMQTKGNFLAANDQELDCDILQLEYVGGISMLIVVPHKMSGMKTLEAQLTPRVVERWQKSMTNRTREVLLPKFKLEKNYNLVESLKLMGIRMLFDKFKHQGTITVNEEGTQATTVTTVGFMPLSTQVRFTVDRPFLFLIYEHRTSCLLFMGRVANPSRS

SEQ ID NO: 884977 - protein, 332 aa, Homo sapiens
WLLSSLKRHFSETQSFSSAKMKHSLNALLIFLIITSAWGGSKGPLDQLEKGGETAQSADPQWEQLNNKNLSMPLLPADFHKENTVTNDWIPEGEEDDDYLDLEKIFSEDDDYIDIVDSLSVSPTDSDVSAGNILQLFHGKSRIQRLNILNAKFAFNLYRVLKDQVNTFDNIFIAPVGISTAMGMISLGLKGETHEQVHSILHFKDFVNASSKYEITTIHNLFRKLTHRLFRRNFGYTLRSVNDLYIQKQFPILLDFKTKVREYYFAEAQIADFSDPAFISKTNNHIMKLTKGLIKDALENIDPHPCTPDSVTQAFLHQAPHLNTKHRNEWCD

SEQ ID NO: 884978 - protein, 519 aa, Homo sapiens
WLLSSLKRHFSETQSFSSAKMKHSLNALLIFLIITSAWGGSKGPLDQLEKGGETAQSADPQWEQLNNKNLSMPLLPADFHKENTVTNDWIPEGEEDDDYLDLEKIFSEDDDYIDIVDSLSVSPTDSDVSAGNILQLFHGKSRIQRLNILNAKFAFNLYRVLKDQVNTFDNIFIAPVGISTAMGMISLGLKGETHEQVHSILHFKDFVNASSKYEITTIHNLFRKLTHRLFRRNFGYTLRSVNDLYIQKQFPILLDFKTKVREYYFAEAQIADFSDPAFISKTNNHIMKLTKGLIKDALENIDPATQMMILNCIYFKGSWVNKFPVEMTHNHNFRLNEREVVKVSMMQTKGNFLAANDQELDCDILQLEYVGGISMLIVVPHKMSGMKTLEAQLTPRVVERWQKSMTNRTREVLLPKFKLEKNYNLVESLKLMGIRMLFDKNGNMAGISDQRIAIDLFKHQGTITVNEEGTQATTVTTVGFMPLSTQVRFTVDRPFLFLIYEHRTSCLLFMGRVANPSRS

SEQ ID NO: 884979 - protein, 373 aa, Homo sapiens
WLLSSLKRHFSETQSFSSAKMKHSLNALLIFLIITSAWGGSKGPLDQLEKGGETAQSADPQWEQLNNKNLSMPLLPADFHKENTVTNDWIPEGEEDDDYLDLEKIFSEDDDYIDIVDSLSVSPTDSDVSAGNILQLFHGKSRIQRLNILNAKFAFNLYRVLKDQVNTFDNIFIAPVGISTAMGMISLGLKGETHEQVHSILHFKDFVNASSKYEITTIHNLFRKLTHRLFRRNFGYTLRSVNDLYIQKQFPILLDFKTKVREYYFAEAQIADFSDPAFISKTNNHIMKLTKGLIKDALENIDPATQMMILNCIYFKGSWVNKFPVEMTHNHNFRLNEREVVKVSMMQTKGNFLALPALHGKSGQPQQVLEVEV

SEQ ID NO: 884980 - protein, 519 aa, Homo sapiens; identical to SEQ ID NO: 884978

SEQ ID NO: 884981 - protein, 163 aa, Homo sapiens
DSASGPARVGCFGGRERSGRVLLSNPRGGGRTPTSHAAPQPGRGSSLRGPSLLFPPVFSPPLPSPPGSAWLRAGRAGLRARAGPQQLLPISPRPSAGPRTPMAGSEQHAAAAAGRRRLGRGSGGGGAPAGRGAGPGRHQHAAQQRLQGVGPAFQTIQKKFFDF

SEQ ID NO: 884982 - protein, 551 aa, Homo sapiens
MRPRRRDDGDSDAAAAAAAPLQDAELALAGINMLLNNGFRESDQLFKQYRNHSPLMSFGASFVSFLNAMMTFEEEKMQLACDDLKTTEKLCESEEAGVIETIKNKIKKNVDVRKSAPSMVDRLQRQIIIADCQVYLAVLSFVKQELSAYIKGGWILRKAWKIYNKCYLDINALQELYQKKLTEESLTSDAANDNHIVAEGVSEESLNRLKGAVSFGYGLFHLCISMVPPNLLKIINLLGFPGDRLQGLSSLMYAKRKLALLWYHTVVRPFFALDGSDNKAGLDEAKEILLKKEAAYPNSSLFMFFKGRIQRLECQINSALTSFHTALELAVDQREIQHVCLYEIGWCSMIELNFKDAFDSFERLKNESRWSQCYYAYLTAVCQGATGDVDGAQIVFKEVQKLFKRKNNQIEQFSVKASIEVLYLWKALPNCSFPNLQRMSQACHEVDDSSVVGLKYLLLGAIHKCLGNSEDAVQYFQRAVKDELCRQNNLYVQPYACYELGCLLLDKPETVGRGRALLLQAKEDFSGYDFENRLHVRIHAALASLRELVPQ

SEQ ID NO: 884983 - protein, 568 aa, Homo sapiens
MRPRRRDDGDSDAAAAAAAPLQDAELALAGINMLLNNGFRESDQLFKQYRNHSPLMSFGASFVSFLNAMMTFEEEKMQLACDDLKTTEKLCESEEAGVIETIKNKIKKNVDVRKSAPSMVDRLQRQIIIADCQVYLAVLSFVKQELSAYIKGGWILRKAWKIYNKCYLDINALQELYQKKLTEESLTSDAANDNHIVAEGVSEESLNRLKGAVSFGYGLFHLCISMVPPNLLKIINLLGFPGDRLQGLSSLMYAKRKLALLWYHTVVRPFFALDGSDNKAGLDEAKEILLKKEAAYPNSSLFMFFKGRIQRLECQINSALTSFHTALELAVDQREIQHVCLYEIGWCSMIELNFKDAFDSFERLKNESRWSQCYYAYLTAVCQGATGDVDGAQIVFKEVQKLFKRKNNQIEQFSVKKAERFRKQTPTKALCVLASIEVLYLWKALPNCSFPNLQRMSQACHEVDDSSVVGLKYLLLGAIHKCLGNSEDAVQYFQRAVKDELCRQNNLYVQPYACYELGCLLLDKPETVGRGRALLLQAKEDFSGYDFENRLHVRIHAALASLRELVPQ

SEQ ID NO: 884984 - protein, 568 aa, Homo sapiens; identical to SEQ ID NO: 884983

SEQ ID NO: 884985 - protein, 142 aa, Homo sapiens
MRPRRRDDGDSDAAAAAAAPLQDAELALAGINMLLNNGFRESDQLFKQYRNHSPLMSFGASFVSFLNAMMTFEEEKMQLACDDLKTTEKLCESEEAGVIETIKNKIKKNLISKVGGSLGKPGRFTINAIWTSMPFRSCIRRS

SEQ ID NO: 884986 - protein, 266 aa, Homo sapiens
EPLTPEQRRERWRRRRVRAEPLPPEQGECQINSALTSFHTALELAVDQREIQHVCLYEIGWCSMIELNFKDAFDSFERLKNESRWSQCYYAYLTAVCQGATGDVDGAQIVFKEVQKLFKRKNNQIEQFSVKASIEVLYLWKALPNCSFPNLQRMSQACHEVDDSSVVGLKYLLLGAIHKCLGNSEDAVQYFQRAVKDELCRQNNLYVQPYACYELGCLLLDKPETVGRGRALLLQAKEDFSGYDFENRLHVRIHAALASLRELVPQ

SEQ ID NO: 884987 - protein, 113 aa, Homo sapiens [sequence omitted]

SEQ ID NO: 884988 - protein, 87 aa, Homo sapiens
SCRIRHEAVQYFQRAVKDELCRQNNLYVQPYACYELGCLLLDKPETVGRGRALLLQAKEDFSGYDFENRLHVRIHAALASLRELVPQ

SEQ ID NO: 884989 - protein, 560 aa, Homo sapiens
MRPRRRDDGDSDAAAAAAAPLQDAELALAGINMLLNNGFRESDQLFKQYRNHSPLMSFGASFVSFLNAMMTFEEEKMQLACDDLKTTEKLCESEEAGVIETIKNKIKKNVDVRKSAPSMVDRLQRQIIIADCQVYLAVLSFVKQELSAYIKGGWILRKAWKIYNKCYLDINALQELYQKKLTEESLTSDAANDNHIVAEGVSEESLNRLKGAVSFGYGLFHLCISMVPPNLLKIINLLGFPGDRLQGLSSLMYASESKDMKAPLATLALLWYHTVVRPFFALDGSDNKAGLDEAKEILLKKEAAYPNSSLFMFFKGRIQRLECQINSALTSFHTALELAVDQREIQHVCLYEIGWCSMIELNFKDAFDSFERLKNESRWSQCYYAYLTAVCQGATGDVDGAQIVFKEVQKLFKRKNNQIEQFSVKASIEVLYLWKALPNCSFPNLQRMSQACHEVDDSSVVGLKYLLLGAIHKCLGNSEDAVQYFQRAVKDELCRQNNLYVQPYACYELGCLLLDKPETVGRGRALLLQAKEDFSGYDFENRLHVRIHAALASLRELVPQ

SEQ ID NO: 884990 - protein, 439 aa, Homo sapiens
MRPRRRDDGDSDAAAAAAAPLQDAELALAGINMLLNNGFRESDQLFKQYRNHSPLMSFGASFVSFLNAMMTFEEEKMQLACDDLKTTEKLCESEEAGVIETIKNKIKKNVDVRKSAPSMVDRLQRQIIIADCQVYLAVLSFVKQELSAYIKGGWILRKAWKIYNKCYLDINALQELYQKKLTEESLTSDAANDNHIVAEGVSEESLNRLKGAVSFGYGLFHLCISMVPPNLLKIINLLGFPGDRLQGLSSLMYAKRKLALLWYHTVVRPFFALDGSDNKAGLDEAKEILLKKEAAYPNSSLFMFFKGRIQRLECQINSALTSFHTALELAVDQREIQHVCLYEIGWCSMIELNFKDAFDSFERLKNESRWSQCYYAYLTAVCQGATGDVDGAQIVFKEVQKLFKRKNNQIEQFSVKKRLLKCCTCGKLFQTVPSPTCRG

SEQ ID NO: 884991 - protein, 271 aa, Homo sapiens
MLLSCSSWVLVASCWQTLSDIFSGGKTKCISLGCQINSALTSFHTALELAVDQREIQHVCLYEIGWCSMIELNFKDAFDSFERLKNESRWSQCYYAYLTAVCQGATGDVDGAQIVFKEVQKLFKRKNNQIEQFSVKASIEVLYLWKALPNCSFPNLQRMSQACHEVDDSSVVGLKYLLLGAIHKCLGNSEDAVQYFQRAVKDELCRQNNLYVQPYACYELGCLLLDKPETVGRGRALLLQAKEDFSGYDFENRLHVRIHAALASLRELVPQ

SEQ ID NO: 884992 - protein, 87 aa, Homo sapiens; identical to SEQ ID NO: 884988

SEQ ID NO: 884993 - protein, 544 aa, Homo sapiens
GALWRRQPGWQLTGQPGSILLRVFSKSRAGLEARKLKAYRTMEYMAESTDRSPGHILCCECGVPISPNPANICVACLRSKVDISQGIPKQVSISFCKQCQRYFQPPGTWIQCALESRELLALCLKKIKAPLSKVRLVDAGFVWTEPHSKRLKVKLTIQKEVMNGAILQQVFVVDYVVQSQMCGDCHRVEAKDFWKAVIQVRQKTLHKKTFYYLEQLILKYGMHQNTLRIKEIHDGLDFYYSSKQHAQKMVEFLQCTVPCRYKASQRLISQDIHSNTYNYKSTFSVEIVPICKDNVVCLSPKLAQSLGNMNQICVCIRVTSAIHLIDPNTLQVADIDGSTFWSHPFNSLCHPKQLEEFIVMECSIVQDIKRAAGAGMISKKHTLGEVWVQKTSEMNTDKQYFCRTHLGHLLNPGDLVLGFDLANCNLNDEHVNKMNSDRVPDVVLIKKSYDRTKRQRRRNWKLKELARERENMDTDDERQYQDFLEDLEEDEAIRKNVNIYRDSAIPVESDTDDEGAPRISLAEMLEDLHISQDATGEEGASMLT

SEQ ID NO: 884994 - protein, 544 aa, Homo sapiens; identical to SEQ ID NO: 884993

SEQ ID NO: 884995 - protein, 544 aa, Homo sapiens; identical to SEQ ID NO: 884993

SEQ ID NO: 884996 - protein, 544 aa, Homo sapiens; identical to SEQ ID NO: 884993

SEQ ID NO: 884997 - protein, 544 aa, Homo sapiens; identical to SEQ ID NO: 884993

SEQ ID NO: 884998 - protein, 544 aa, Homo sapiens; identical to SEQ ID NO: 884993

SEQ ID NO: 884999 - protein, 544 aa, Homo sapiens; identical to SEQ ID NO: 884993

SEQ ID NO: 885000 - protein, 192 aa, Homo sapiens
HILEEWPRTAPLLPELGRRRSSRMAPSEDPRDWRANLKGTIRETGLETSSGGKLAGHQKTVPTAHLTFVIDCIHGKQLSLAATASPPQAPSPNRGLVTPPMKTYIVFCGENWPHLTRVTPMGGGCLAQARATLPLCRGSVASASFPVSPLCPQEVPEAKGKPVKAAPVRSSTWGTVKDSLKALSSCVCGQAD

SEQ ID NO: 885001 - protein, 161 aa, Homo sapiens
SLPSLASCPSSQTHKKKGPGGKLAGHQKTVPTAHLTFVIDCIHGKQLSLAATASPPQAPSPNRGLVTPPMKTYIVFCGENWPHLTRVTPMGGGCLAQARATLPLCRGSVASASFPVSPLCPQEVPEAKGKPVKAAPVRSSTWGTVKDSLKALSSCVCGQAD

SEQ ID NO: 885002 - protein, 219 aa, Homo sapiens [sequence omitted]

SEQ ID NO: 885003 - protein, 161 aa, Homo sapiens
SGSWDEERHWVSTSADKGYSLQGRVLSLFSAGPRWQLLASGLPSASLWDLCLPGISCLASAGGASLWGRSLPPALSSSPEAAALPGWAQEAPCRHMMGRGCPYPPPRGYSPVSGHVSPGLSPGCWFLFCGAQTSVKHTDVGKMKNCGPTGLNPMDGGIFIQ

SEQ ID NO: 885004 - protein, 219 aa, Homo sapiens [sequence omitted]

SEQ ID NO: 885005 - protein, 219 aa, Homo sapiens [sequence omitted]

SEQ ID NO: 885006 - protein, 219 aa, Homo sapiens [sequence omitted]

SEQ ID NO: 885007 - protein, 219 aa, Homo sapiens [sequence omitted]

SEQ ID NO: 885008 - protein, 219 aa, Homo sapiens [sequence omitted]

SEQ ID NO: 885009 - protein, 92 aa, Homo sapiens
VTVSTRAPRSQHAALTQSGTDHAQECLDLVHVLPEAVEQPVVLEQCVMVVRVCVKLAVGLLEDLPRSRRSAKLAERRESRVHNQCHTEAGRV

SEQ ID NO: 885010 - protein, 332 aa, Homo sapiens [sequence omitted]

SEQ ID NO: 885011 - protein, 332 aa, Homo sapiens [sequence omitted]

SEQ ID NO: 885012 - protein, 184 aa, Homo sapiens
MALLCYNRGCGQRFDPETNSDDACTYHPGVPVFHDALKGWSCCKRRTTDFSDFLSIVGCTKGRHNSEKPPEPVKPEVKTTEKKELCELKPKFQEHIIQAPKPVEAIKRPSPDEPMTNLELKISASLKQALDKLKLSSGNEENKKEEDNDEIKIGTSCKNGGCSKSLHLQQQWGPDLPDKPWIYI

SEQ ID NO: 885013 - protein, 83 aa, Homo sapiens
SGVKRNGSFPEAGSRLSRQTGASDTGVANASSCRSRCLGLACDGGKRKWPCCATTGAAVSASILRPIPTKLAHTTEVCGGSHL

SEQ ID NO: 885014 - protein, 332 aa, Homo sapiens [sequence omitted]

SEQ ID NO: 885015 - protein, 144 aa, Homo sapiens [sequence omitted]

SEQ ID NO: 885016 - protein, 188 aa, Homo sapiens [sequence omitted]

SEQ ID NO: 885017 - protein, 313 aa, Homo sapiens [sequence omitted]

SEQ ID NO: 885018 - protein, 133 aa, Homo sapiens [sequence omitted]

SEQ ID NO: 885019 - protein, 332 aa, Homo sapiens [sequence omitted]

SEQ ID NO: 885020 - protein, 361 aa, Homo sapiens
YRKIPCHCWKRSPLHDKCTKNLCVRVRLLWSGKRNGCVLRGWARFILNNPDACTYHPGVPVFHDALKGWSCCKRRTTDFSDFLSIVGCTKGRHNSEKPPEPVKPEVKTTEKKELCELKPKFQEHIIQAPKPVEAIKRPSPDEPMTNLELKISASLKQALDKLKLSSGNEENKKEEDNDEIKIGTSCKNGGCSKTYQGLESLEEVCVYHSGVPIFHEGMKYWSCCRRKTSDFNTFLAQEGCTKGKHMWTKKDAGKKVVPCRHDWHQTGGEVTISVYAKNSLPELSRVEANSTLLNVHIVFEGEKEFDQNVKLWGVIDVKRSYVTMTATKIEITMRKAEPMQWASLELPAAKKQEKQKDDTTD

SEQ ID NO: 885021 - protein, 207 aa, Homo sapiens
MAKTYDYLFKLLLIGDSGVGKTCVLFRFSEDAFNSTFISTIGIDFKIRTIELDGKRIKLQIWDTAGQERFRTITTAYYRGAMGIMLVYDITNEKSFDNIRNWIRNIEEHASADVEKMILGNKCDVNDKRQVSKERGEKLALDYGIKFMETSAKANINVENAFFTLARDIKAKMDKKLEGNSPQGSNQGVKITPDQQKRSSFFRCVLL

SEQ ID NO: 885022 - protein, 207 aa, Homo sapiens; identical to SEQ ID NO: 885021

SEQ ID NO: 885023 - protein, 218 aa, Homo sapiens
MLGTSLGYNRPRAKTYDYLFKLLLIGDSGVGKTCVLFRFSEDAFNSTFISTIGIDFKIRTIELDGKRIKLQIWDTAGQERFRTITTAYYRGAMGIMLVYDITNEKSFDNIRNWIRNIEEHASADVEKMILGNKCDVNDKRQVSKERGEKLALDYGIKFMETSAKANINVENAFFTLARDIKAKMDKKLEGNSPQGSNQGVKITPDQQKRSSFFRCVLL

SEQ ID NO: 885024 - protein, 78 aa, Homo sapiens
SCTTDWKNKNSRAKNVRFGDSGRTRRSGGHFGAERRVPQLQEDHVTAVVVFGVTCQHTLRPLDALWGPHTGLRTSEVP

SEQ ID NO: 885025 - protein, 207 aa, Homo sapiens; identical to SEQ ID NO: 885021

SEQ ID NO: 885026 - protein, 213 aa, Homo sapiens
MVRKRWEAKTYDYLFKLLLIGDSGVGKTCVLFRFSEDAFNSTFISTIGIDFKIRTIELDGKRIKLQIWDTAGQERFRTITTAYYRGAMGIMLVYDITNEKSFDNIRNWIRNIEEHASADVEKMILGNKCDVNDKRQVSKERGEKLALDYGIKFMETSAKANINVENAFFTLARDIKAKMDKKLEGNSPQGSNQGVKITPDQQKRSSFFRCVLL

SEQ ID NO: 885027 - protein, 207 aa, Homo sapiens; identical to SEQ ID NO: 885021

SEQ ID NO: 885028 - protein, 207 aa, Homo sapiens; identical to SEQ ID NO: 885021

SEQ ID NO: 885029 - protein, 207 aa, Homo sapiens; identical to SEQ ID NO: 885021

SEQ ID NO: 885030 - protein, 207 aa, Homo sapiens; identical to SEQ ID NO: 885021

SEQ ID NO: 885031 - protein, 177 aa, Homo sapiens
QVGTGRVANRPRIDFKIRTIELDGKRIKLQIWDTAGQERFRTITTAYYRGAMGIMLVYDITNEKSFDNIRNWIRNIEEHASADVEKMILGNKCDVNDKRQVSKERGEKLALDYGIKFMETSAKANINVENAFFTLARDIKAKMDKKLEGNSPQGSNQGVKITPDQQKRSSFFRCVLL

SEQ ID NO: 885032 - protein, 123 aa, Homo sapiens
MLVYDITNEKSFDNIRNWIRNIEEHASADVEKMILGNKCDVNDKRQVSKERGEKLALDYGIKFMETSAKANINVENAFFTLARDIKAKMDKKLEGNSPQGSNQGVKITPDQQKRSSFFRCVLL

SEQ ID NO: 885033 - protein, 144 aa, Homo sapiens
GRSEEDPRAASTAYYRSAMGIMLVYDITNEKSFDNIRNWIRNIEEHASADVEKMILGNKCDVNDKRQVSKERGEKLALDYGIKFMETSAKANINVENAFFTLARDIKAKMDKKLEGNSPQGSNQGVKITPDQQKRSSFFRCVLL

SEQ ID NO: 885034 - protein, 107 aa, Homo sapiens
  misc_feature (7)..(7): Xaa can be any naturally occurring amino acid
TRARYRXEPTHTLYIQRERGSQGVTVDHSQCQASASGPLLCGLTATQSSTRRLVHVPYHGSEVPEGQRWFQEQQLPNPEQGNRSPGPGSITQEIWRPLPPLLSVLDK

SEQ ID NO: 885035 - protein, 207 aa, Homo sapiens; identical to SEQ ID NO: 885021

SEQ ID NO: 885036 - protein, 232 aa, Homo sapiens
  misc_feature (220)..(220): Xaa can be any naturally occurring amino acid
  misc_feature (225)..(225): Xaa can be any naturally occurring amino acid
  misc_feature (228)..(228): Xaa can be any naturally occurring amino acid
MAKTYDYLFKLLLIGDSGVGKTCVLFRFSEDAFNSTFISTIGIDFKIRTIELDGKRIKLQIWDTAGQERFRTITTAYYRGAMGIMLVYDITNEKSFDNIRNWIRNIEEHASADVEKMILGNKCDVNDKRQVSKERGEKLALDYGIKFMETSAKANINVENAFFTLARDIKAKMDKKLVHSQGLGLQARLRSPSSIKGTLCVLQVTPKTTTAVTWSTPRPXRGQRXHGXQNAI

SEQ ID NO: 885037 - protein, 225 aa, Homo sapiens
MAKTYDYLFKLLLIGDSGVGKTCVLFRFSEDAFNSTFISTIGIDFKIRTIELDGKRIKLQIWDTAGQERFRTITTAYYRGAMGIMLVYDITNEKSFDNIRNWIRNIEEHASADVEKMILGNKCDVNDKRQVSKERGEKLALDYGIKFMETSAKANINVENAFFTLARDIKAEFAKKAEEMEQPEKKVMPNSPQNGVLVKETAIETKVTVFEEEILAATRGMNGDS

SEQ ID NO: 885038 - protein, 215 aa, Homo sapiens
MAKTYDYLFKLLLIGDSGVGKTCVLFRFSEDAFNSTFISTIGIDFKIRTIELDGKRIKLQIWDTAGQERFRTITTAYYRGAMGIMLVYDITNEKSFDNIRNWIRNIEEHASADVEKMILGNKCDVNDKRQVSKERGEKLALDYGIKFMETSAKANINVENAFFTLARDIKAGNSDSEEDDANGRVELILEPKDLYIDRPLPYLIGSKLFMEQEDV

SEQ ID NO: 885039 - protein, 522 aa, Homo sapiens
MRLRVRLLKRTWPLEVPETEPTLGHLRSHLRQSLLCTWGYSSNTRFTITLNYKDPLTGDEETLASYGIVSGDLICLILQDDIPAPNIPSSTDSEHSSLQNNEQPSLATSSNQTSMQDEQPSDSFQGQAAQSGVWNDDSMLGPSQNFEAESIQDNAHMAEGTGFYPSEPMLCSESVEGQVPHSLETLYQSADCSDANDALIVLIHLLMLESGYIPQGTEAKALSMPEKWKLSGVYKLQYMHPLCEGSSATLTCVPLGNLIVVNATLKINNEIRSVKRLQLLPESFICKEKLGENVANIYKDLQKLSRLFKDQLVYPLLAFTRQALNLPDVFGLVVLPLELKLRIFRLLDVRSVLSLSAVCRDLFTASNDPLLWRFLYLRDFRDNTVRVQDTDWKELYRKRHIQRKESPKGRFVMLLPSSTHTIPFYPNPLHPRPFPSSRLPPGIIGGEYDQRPTLPYVGDPISSLIPGPGETPSQFPPLRPRFDPVGPLPGPNPILPGRGGPNDRFPFRPSRGRPTDGRLSFM

SEQ ID NO: 885040 - protein, 135 aa, Homo sapiens
ILNDFTKGDLALKAKIRPEPKGRFVMLLPSSTHTIPFYPNPLHPRPFPSSRLPPGIIGGEYDQRPTLPYVGDPISSLIPGPGETPSQFPPLRPRFDPVGPLPGPNPILPGRGGPNDRFPFRPSRGRPTDGRLSFM

SEQ ID NO: 885041 - protein, 155 aa, Homo sapiens
MQDEQPSDSFQGQAAQSGVWNDDSMLGPSQNFEAESIQDNAHMAEGTGFYPSEPMLCSESVEGQVPHSLETLYQSADCSDANDALIVLIHLLMLESGYIPQGTEAKALSMPEKWKLSGVYKLQYMHPLCEGSSATLTCVPLGNLIVVNGCLHGDH

SEQ ID NO: 885042 - protein, 290 aa, Homo sapiens
GDRPSAGTPGGPSREARALPGVAEPEGAGDGKRGWSAGVRLLENMARPPGGSGPLLDSEHSSLQNNEQPSLATSSNQTSMQDEQPSDSFQGQAAQSGVWNDDSMLGPSQNFEAESIQDNAHMAEGTGFYPSEPMLCSESVEGQVPHSLETLYQSADCSDANDALIVLIHLLMLESGYIPQGTEAKALSMPEKWKLSGVYKLQYMHPLCEGSSATLTCVPLGNLIVVNATLKINNEIRSVKRLQLLPESFICKEKLGENVANIYKDLQKLSRLFKDQLVYPLLAFTRQALN

SEQ ID NO: 885043 - protein, 408 aa, Homo sapiens
MQDEQPSDSFQGQAAQSGVWNDDSMLGPSQNFEAESIQDNAHMAEGTGFYPSEPMLCSESVEGQVPHSLETLYQSADCSDANDALIVLIHLLMLESGYIPQGTEAKALSMPEKWKLSGVYKLQYMHPLCEGSSATLTCVPLGNLIVVNATLKINNEIRSVKRLQLLPESFICKEKLGENVANIYKDLQKLSRLFKDQLVYPLLAFTRQALNLPDVFGLVVLPLELKLRIFRLLDVRSVLSLSAVCRDLFTASNDPLLWRFLYLRDFRDNTVRVQDTDWKELYRKRHIQRKESPKGRFVMLLPSSTHTIPFYPNPLHPRPFPSSRLPPGIIGGEYDQRPTLPYVGDPISSLIPGPGETPSQFPPLRPRFDPVGPLPGPNPILPGRGGPNDRFPFRPSRGRPTDGRLSFM

SEQ ID NO: 885044 - protein, 494 aa, Homo sapiens
MDGTGCSRRNGKSSNTRFTITLNYKDPLTGDEETLASYGIVSGDLICLILQDDIPAPNIPSSTDSEHSSLQNNEQPSLATSSNQTSMQDEQPSDSFQGQAAQSGVWNDDSMLGPSQNFEAESIQDNAHMAEGTGFYPSEPMLCSESVEGQVPHSLETLYQSADCSDANDALIVLIHLLMLESGYIPQGTEAKALSMPEKWKLSGVYKLQYMHPLCEGSSATLTCVPLGNLIVVNATLKINNEIRSVKRLQLLPESFICKEKLGENVANIYKDLQKLSRLFKDQLVYPLLAFTRQALNLPDVFGLVVLPLELKLRIFRLLDVRSVLSLSAVCRDLFTASNDPLLWRFLYLRDFRDNTVRVQDTDWKELYRKRHIQRKESPKGRFVMLLPSSTHTIPFYPNPLHPRPFPSSRLPPGIIGGEYDQRPTLPYVGDPISSLIPGPGETPSQFPPLRPRFDPVGPLPGPNPILPGRGGPNDRFPFRPSRGRPTDGRLSFM

SEQ ID NO: 885045 - protein, 486 aa, Homo sapiens
MTTVCSNTRFTITLNYKDPLTGDEETLASYGIVSGDLICLILQDDIPAPNIPSSTDSEHSSLQNNEQPSLATSSNQTSMQDEQPSDSFQGQAAQSGVWNDDSMLGPSQNFEAESIQDNAHMAEGTGFYPSEPMLCSESVEGQVPHSLETLYQSADCSDANDALIVLIHLLMLESGYIPQGTEAKALSMPEKWKLSGVYKLQYMHPLCEGSSATLTCVPLGNLIVVNATLKINNEIRSVKRLQLLPESFICKEKLGENVANIYKDLQKLSRLFKDQLVYPLLAFTRQALNLPDVFGLVVLPLELKLRIFRLLDVRSVLSLSAVCRDLFTASNDPLLWRFLYLRDFRDNTVRVQDTDWKELYRKRHIQRKESPKGRFVMLLPSSTHTIPFYPNPLHPRPFPSSRLPPGIIGGEYDQRPTLPYVGDPISSLIPGPGETPSQFPPLRPRFDPVGPLPGPNPILPGRGGPNDRFPFRPSRGRPTDGRLSFM

SEQ ID NO: 885046 - protein, 408 aa, Homo sapiens; identical to SEQ ID NO: 885043

SEQ ID NO: 885047 - protein, 418 aa, Homo sapiens
MRLRVRLLKRTWPLEVPETEPTLGHLRSHLRQSLLCTWGYSSNTRFTITLNYKDPLTGDEETLASYGIVSGDLICLILQDDIPAPNIPSSTDSEHSSLQNNEQPSLATSSNQTSMQDEQPSDSFQGQAAQSGVWNDDSMLGPSQNFEAESIQDNAHMAEGTGFYPSEPMLCSESVEGQVPHSLETLYQSADCSDANDALIVLIHLLMLESGYIPQGTEAKALSMPEKWKLSGVYKLQYMHPLCEGSSATLTCVPLGNLIVVNATLKINNEIRSVKRLQLLPESFICKEKLGENVANIYKDLQKLSRLFKDQLVYPLLAFTRQALNLPDVFGLVVLPLELKLRIFRLLDVRSVLSLSAVCRDLFTASNDPLLWRFLYLRDFRAVQEEAHTKKRIPERAVCDAPAIVNSHHSILSQPLAP

SEQ ID NO: 885048 - protein, 408 aa, Homo sapiens; identical to SEQ ID NO: 885043

SEQ ID NO: 885049 - protein, 487 aa, Homo sapiens
GDRPSAGTPGGPSREARALPGVAEPEGAGDGKRGWSAGVRLLENMARPPGGSGPLLDSEHSSLQNNEQPSLATSSNQTSMQDEQPSDSFQGQAAQSGVWNDDSMLGPSQNFEAESIQDNAHMAEGTGFYPSEPMLCSESVEGQVPHSLETLYQSADCSDANDALIVLIHLLMLESGYIPQGTEAKALSMPEKWKLSGVYKLQYMHPLCEGSSATLTCVPLGNLIVVNATLKINNEIRSVKRLQLLPESFICKEKLGENVANIYKDLQKLSRLFKDQLVYPLLAFTRQALNLPDVFGLVVLPLELKLRIFRLLDVRSVLSLSAVCRDLFTASNDPLLWRFLYLRDFRDNTVRVQDTDWKELYRKRHIQRKESPKGRFVMLLPSSTHTIPFYPNPLHPRPFPSSRLPPGIIGGEYDQRPTLPYVGDPISSLIPGPGETPSQFPPLRPRFDPVGPLPGPNPILPGRGGPNDRFPFRPSRGRPTDGRLSFM

SEQ ID NO: 885050 - protein, 394 aa, Homo sapiens
QVTPRINANNLLGPSQNFEAESIQDNAHMAEGTGFYPSEPMLCSESVEGQVPHSLETLYQSADCSDANDALIVLIHLLMLESGYIPQGTEAKALSMPEKWKLSGVYKLQYMHPLCEGSSATLTCVPLGNLIVVNATLKINNEIRSVKRLQLLPESFICKEKLGENVANIYKDLQKLSRLFKDQLVYPLLAFTRQALNLPDVFGLVVLPLELKLRIFRLLDVRSVLSLSAVCRDLFTASNDPLLWRFLYLRDFRDNTVRVQDTDWKELYRKRHIQRKESPKGRFVMLLPSSTHTIPFYPNPLHPRPFPSSRLPPGIIGGEYDQRPTLPYVGDPISSLIPGPGETPSQFPPLRPRFDPVGPLPGPNPILPGRGGPNDRFPFRPSRGRPTDGRLSFM

SEQ ID NO: 885051 - protein, 440 aa, Homo sapiens
RAIGQVRGRRGGLHGRPGLFRASRSRRVQATGSAGGRLGSGSWRTWPGLPGALVPSSLGPSQNFEAESIQDNAHMAEGTGFYPSEPMLCSESVEGQVPHSLETLYQSADCSDANDALIVLIHLLMLESGYIPQGTEAKALSMPEKWKLSGVYKLQYMHPLCEGSSATLTCVPLGNLIVVNATLKINNEIRSVKRLQLLPESFICKEKLGENVANIYKDLQKLSRLFKDQLVYPLLAFTRQALNLPDVFGLVVLPLELKLRIFRLLDVRSVLSLSAVCRDLFTASNDPLLWRFLYLRDFRDNTVRVQDTDWKELYRKRHIQRKESPKGRFVMLLPSSTHTIPFYPNPLHPRPFPSSRLPPGIIGGEYDQRPTLPYVGDPISSLIPGPGETPSQFPPLRPRFDPVGPLPGPNPILPGRGGPNDRFPFRPSRGRPTDGRLSFM

SEQ ID NO: 885052 - protein, 366 aa, Homo sapiens
MAEGTGFYPSEPMLCSESVEGQVPHSLETLYQSADCSDANDALIVLIHLLMLESGYIPQGTEAKALSMPEKWKLSGVYKLQYMHPLCEGSSATLTCVPLGNLIVVNATLKINNEIRSVKRLQLLPESFICKEKLGENVANIYKDLQKLSRLFKDQLVYPLLAFTRQALNLPDVFGLVVLPLELKLRIFRLLDVRSVLSLSAVCRDLFTASNDPLLWRFLYLRDFRDNTVRVQDTDWKELYRKRHIQRKESPKGRFVMLLPSSTHTIPFYPNPLHPRPFPSSRLPPGIIGGEYDQRPTLPYVGDPISSLIPGPGETPSQFPPLRPRFDPVGPLPGPNPILPGRGGPNDRFPFRPSRGRPTDGRLSFM

SEQ ID NO: 885053 - protein, 384 aa, Homo sapiens [sequence omitted]

SEQ ID NO: 885054 - protein, 522 aa, Homo sapiens; identical to SEQ ID NO: 885039

SEQ ID NO: 885055 - protein, 316 aa, Homo sapiens [sequence omitted]

SEQ ID NO: 885056 - protein, 343 aa, Homo sapiens
ITFSRLVFLSTLLKTQSRSHGLLPHLLMLESGYIPQGTEAKALSMPEKWKLSGVYKLQYMHPLCEGSSATLTCVPLGNLIVVNATLKINNEIRSVKRLQLLPESFICKEKLGENVANIYKDLQKLSRLFKDQLVYPLLAFTRQALNLPDVFGLVVLPLELKLRIFRLLDVRSVLSLSAVCRDLFTASNDPLLWRFLYLRDFRDNTVRVQDTDWKELYRKRHIQRKESPKGRFVMLLPSSTHTIPFYPNPLHPRPFPSSRLPPGIIGGEYDQRPTLPYVGDPISSLIPGPGETPSQFPPLRPRFDPVGPLPGPNPILPGRGGPNDRFPFRPSRGRPTDGRLSFM

SEQ ID NO: 885057 - protein, 285 aa, Homo sapiens
MSSIFILWVWKRDDAVKTSKIILMNTTLKINNEIRSVKRLQLLPESFICKEKLGENVANIYKDLQKLSRLFKDQLVYPLLAFTRQALNLPDVFGLVVLPLELKLRIFRLLDVRSVLSLSAVCRDLFTASNDPLLWRFLYLRDFRDNTVRVQDTDWKELYRKRHIQRKESPKGRFVMLLPSSTHTIPFYPNPLHPRPFPSSRLPPGIIGGEYDQRPTLPYVGDPISSLIPGPGETPSQFPPLRPRFDPVGPLPGPNPILPGRGGPNDRFPFRPSRGRPTDGRLSFM

SEQ ID NO: 885058 - protein, 483 aa, Homo sapiens
MRLRVRLLKRTWPLEVPETEPTLGHLRSHLRQSLLCTWGYSSNTRFTITLNYKDPLTGDEETLASYGIVSGDLICLILQDDIPAPNIPSSTDSEHSSLQNNEQPSLATSSNQTSMQDEQPSDSFQGQAAQSGVWNDDSMLGPSQNFEAESIQDNAHMAEGTGFYPSEPMLCSESVEGQVPHSLETLYQSADCSDANDALIVLIHLLMLESGYIPQGTEAKALSMPEKWKLSGVYKLQYMHPLCEGSSATLTCVPLGNLIVVNATLKINNEIRSVKRLQLLPESFICKEKLGENVANIYKDLQKLSRLFKDQLVYPLLAFTRQALNLPDVFGLVVLPLELKLRIFRLLDVRSVLSLSAVCRDLFTASNDPLLWRFLYLRDFRDNTVRVQDTDWKELYRKRHIQRKESPKGRFVMLLPSSTHTIPFYPNPLHPRPFPSSRLPPGIIGGEYDQRPNPILPGRGGPNDRFPFRPSRGRPTDGRLSFM

SEQ ID NO: 885059 - protein, 519 aa, Homo sapiens
MRLRVRLLKRTWPLEVPETEPTLGHLRSHLRQSLLCTWGYSSNTRFTITLNYKDPLTGDEETLASYGIVSGDLICLILQDDIPAPNIPSSTDSEHSSLQNNEQPSLATSSNQTSMQDEQPSDSFQGQAAQSGVWNDDSMLGPSQNFEAESIQDNAHMAEGTGFYPSEPMLCSESVEGQVPHSLETLYQSADCSDANDALIVLIHLLMLESGYIPQGTEAKALSMPEKWKLSGVYKLQYMHPLCEGSSATLTCVPLGNLIVVNATLKINNEIRSVKRLQLLPESFICKEKLGENVANIYKDLQKLSRLFKDQLVYPLLAFTRQALNLPDVFGLVVLPLELKLRIFRLLDVRSVLSLSAVCRDLFTASNDPLLWRFLYLRDFRDNTVRVQDTDWKELYRKRHIQRKESPKGRFVMLLPSSTHTIPFYPNPLHPRPFPSSRLPPGIIGGEYDQRPTLPYVGDPISSLIPGPGETPSQFPPLRPRFDPVGPLPGPNPILPGRLAANYSQGQPCHRGTFGSYHP

SEQ ID NO: 885060 - protein, 414 aa, Homo sapiens
MRLRVRLLKRTWPLEVPETEPTLGHLRSHLRQSLLCTWGYSSNTRFTITLNYKDPLTGDEETLASYGIVSGDLICLILQDDIPAPNIPSSTDSEHSSLQNNEQPSLATSSNQTSMQDEQPSDSFQGQAAQSGVWNDDSMLGPSQNFEAESIQDNAHMAEGTGFYPSEPMLCSESVEGQVPHSLETLYQSADCSDANDALIVLIHLLMLESGYIPQGTEAKALSMPEKWKLSGVYKLQYMHPLCEGSSATLTCVPLGNLIVVNATLKINNEIRSVKRLQLLPESFICKEKLGENVANIYKDLQKLSRLFKDQLVYPLLAFTRQALNLPDVFGLVVLPLELKLRIFRLLDVRSVLSLSAVCRDLFTASNDPLLWRFLYLRDFRGDFRNDIFTRKGSYCLDYSAHQKFLVVGFFCCK

SEQ ID NO: 885061 - protein, 242 aa, Homo sapiens
MRLRVRLLKRTWPLEVPETEPTLGHLRSHLRQSLLCTWGYSSNTRFTITLNYKDPLTGDEETLASYGIVSGDLICLILQDDIPAPNIPSSTDSEHSSLQNNEQPSLATSSNQTSMQDEQPSDSFQGQAAQSGVWNDDSMLGPSQNFEAESIQDNAHMAEGTGFYPSEPMLCSESVEGQVPHSLETLYQSADCSDANDALIVLIHLLMLESGYIPQVSTASKTQTSYDCSYMWMVPALKLPVV

SEQ ID NO: 885062 - protein, 316 aa, Homo sapiens
GDRPSAGTPGGPSREARALPGVAEPEGAGDGKRGWSAGVRLLENMARPPGGSGPLLATLKINNEIRSVKRLQLLPESFICKEKLGENVANIYKDLQKLSRLFKDQLVYPLLAFTRQALNLPDVFGLVVLPLELKLRIFRLLDVRSVLSLSAVCRDLFTASNDPLLWRFLYLRDFRDNTVRVQDTDWKELYRKRHIQRKESPKGRFVMLLPSSTHTIPFYPNPLHPRPFPSSRLPPGIIGGEYDQRPTLPYVGDPISSLIPGPGETPSQFPPLRPRFDPVGPLPGPNPILPGRGGPNDRFPFRPSRGRPTDGRLSFM

SEQ ID NO: 885063 - protein, 361 aa, Homo sapiens
MRLRVRLLKRTWPLEVPETEPTLGHLRSHLRQSLLCTWGYSSNTRFTITLNYKDPLTGDEETLASYGIVSGDLICLILQDDIPAPNIPSSTDSEHSSLQNNEQPSLATSSNQTSMQDEQPSDSFQGQAAQSGVWNDDSMLGPSQNFEAESIQDNAHMAEGTGFYPSEPMLCSESGGKMHIIKLFIKDVMHDAEGVTLQVSGNTKGTNKLRRRTSAETQHPRTHHVTFQCSNTRLYRKRHIQRKESPKGRFVMLLPSSTHTIPFYPNPLHPRPFPSSRLPPGIIGGEYDQRPTLPYVGDPISSLIPGPGETPSQFPPLRPRFDPVGPLPGPNPILPGRGGPNDRFPFRPSRGRPTDGRLSFM

SEQ ID NO: 885064 - protein, 149 aa, Homo sapiens
PRVRGRRGSTHASVQDTDWKELYRKRHIQRKESPKGRFVMLLPSSTHTIPFYPNPLHPRPFPSSRLPPGIIGGEYDQRPTLPYVGDPISSLIPGPGETPSQFPPLRPRFDPVGPLPGPNPILPGRGGPNDRFPFRPSRGRPTDGRLSFM

SEQ ID NO: 885065 - protein, 332 aa, Homo sapiens
MRLRVRLLKRTWPLEVPETEPTLGHLRSHLRQSLLCTWGYSSNTRFTITLNYKDPLTGDEETLASYGIVSGDLICLILQDDIPAPNIPSSTDSEHSSLQNNEQPSLATSSNQTSMQDEQPSDSFQGQAAQSGVWNDDSMLGPSQNFEAESIQDNAHMAEGTGFYPSEPMLCSESVEGQVPHSLETLYQSADCSDANDALIVLIHLLMLESGYIPQGTEAKALSMPEKWKLSGVYKLQYMHPLCEGSSATLTCVPLGNLIVVNATLKINNEIRSVKRLQLLPESFICKEKLGENVANIYKDLQKLSRLFKDQLVYPLLAFTRQDTEPTRMYIG

SEQ ID NO: 885066 - protein, 272 aa, Homo sapiens [sequence omitted]

SEQ ID NO: 885067 - protein, 263 aa, Homo sapiens [sequence omitted]

SEQ ID NO: 885068 - protein, 307 aa, Homo sapiens
MRPGLFKGQAPGSRRRPTAGLAVVRADSHKKEPRASGSARPAMLLWPLRGWAARALRCFGPGSRGSPASGPGPRRVQRRAWPPDKEQEKEKKSVICVEGNIASGKTTCLEFFSNATDVEVLTEPVSKWRNVRGHNPLGLMYHDASRWGLTLQTYVQLTMLDRHTRPQVSSVRLMERSIHSARYIFVENLYRSGKMPEVDYVVLSEWFDWILRNMDVSVDLIVYLRTNPETCYQRLKKRCREEEKVIPLEYLEAIHHLHEEWLIKGSLFPMAAPVLVIEADHHMERMLELFEQNRDRILTPENRKHCP

SEQ ID NO: 885069 - protein, 307 aa, Homo sapiens; identical to SEQ ID NO: 885068

SEQ ID NO: 885070 - protein, 307 aa, Homo sapiens; identical to SEQ ID NO: 885068

SEQ ID NO: 885071 - protein, 307 aa, Homo sapiens; identical to SEQ ID NO: 885068

SEQ ID NO: 885072 - protein, 307 aa, Homo sapiens; identical to SEQ ID NO: 885068

SEQ ID NO: 885073 - protein, 232 aa, Homo sapiens
VQRYAWPPDKEQEKEKKSVICVEGNIASGKTTCLEFFSNATDVEVLTEPVSKWRNVRGHNPLGLMYHDASRWGLTLQTYVQLTMLDRHTRPQVSSVRLMERSIHSARYIFVENLYRSGKMPEVDYVVLSEWFDWILRNMDVSVDLIVYLRTNPETCYQRLKKRCREEEKVIPLEYLEAIHHLHEEWLIKGSLFPMAAPVLVIEADHHMERMLELFEQNRDRILTPENRKHCP

SEQ ID NO: 885074 - protein, 307 aa, Homo sapiens; identical to SEQ ID NO: 885068

SEQ ID NO: 885075 - protein, 243 aa, Homo sapiens
MTSFSLPSGDCQHHSPPGRDKEQEKEKKSVICVEGNIASGKTTCLEFFSNATDVEVLTEPVSKWRNVRGHNPLGLMYHDASRWGLTLQTYVQLTMLDRHTRPQVSSVRLMERSIHSARYIFVENLYRSGKMPEVDYVVLSEWFDWILRNMDVSVDLIVYLRTNPETCYQRLKKRCREEEKVIPLEYLEAIHHLHEEWLIKGSLFPMAAPVLVIEADHHMERMLELFEQNRDRILTPENRKHCP

SEQ ID NO: 885076 - protein, 307 aa, Homo sapiens; identical to SEQ ID NO: 885068

SEQ ID NO: 885077 - protein, 307 aa, Homo sapiens; identical to SEQ ID NO: 885068

SEQ ID NO: 885078 - protein, 307 aa, Homo sapiens; identical to SEQ ID NO: 885068

SEQ ID NO: 885079 - protein, 2180 aa, Homo sapiens
MNANAAAGLAPEHIPTPGAALSWQAAIDAARQAKLMGSAGNATISTVSSTQRKRQQYGKPKKQGSTTATRPPRALLCLTLKNPIRRACISIVEWKPFEIIILLTIFANCVALAIYIPFPEDDSNATNSNLERVEYLFLIIFTVEAFLKVIAYGLLFHPNAYLRNGWNLLDFIIVVVGLFSAILEQATKADGANALGGKGAGFDVKALRAFRVLRPLRLVSGVPSLQVVLNSIIKAMVPLLHIALLVLFVIIIYAIIGLELFMGKMHKTCYNQEGIADVPAEDDPSPCALETGHGRQCQNGTVCKPGWDGPKHGITNFDNFAFAMLTVFQCITMEGWTDVLYWMQDAMGYELPWVYFVSLVIFGSFFVLNLVLGVLSGEFSKEREKAKARGDFQKLREKQQLEEDLKGYLDWITQAEDIDPENEDEGMDEEKPRNMSMPTSETESVNTENVAGGDIEGENCGARLAHRISKSKFSRYWRRWNRFCRRKCRAAVKSNVFYWLVIFLVFLNTLTIASEHYNQPNWLTEVQDTANKALLALFTAEMLLKMYSLGLQAYFVSLFNRFDCFVVCGGILETILVETKIMSPLGISVLRCVRLLRIFKITRYWNSLSNLVASLLNSVRSIASLLLLLFLFIIIFSLLGMQLFGGKFNFDEMQTRRSTFDNFPQSLLTVFQILTGEDWNSVMYDGIMAYGGPSFPGMLVCIYFIILFICGNYILLNVFLAIAVDNLADAESLTSAQKEEEEEKERKKLARTASPEKKQELVEKPAVGESKEEKIELKSITADGESPPATKINMDDLQPNENEDKSPYPNPETTGEEDEEEPEMPVGPRPRPLSELHLKEKAVPMPEASAFFIFSSNNRFRLQCHRIVNDTIFTNLILFFILLSSISLAAEDPVQHTSFRNHILFYFDIVFTTIFTIEIALKMTAYGAFLHKGSFCRNYFNILDLLVVSVSLISFGIQSSAINVVKILRVLRVLRPLRAINRAKGLKHVVQCVFVAIRTIGNIVIVTTLLQFMFACIGVQLFKGKLYTCSDSSKQTEAECKGNYITYKDGEVDHPIIQPRSWENSKFDFDNVLAAMMALFTVSTFEGWPELLYRSIDSHTEDKGPIYNYRVEISIFFIIYIIIIAFFMMNIFVGFVIVTFQEQGEQEYKNCELDKNQRQCVEYALKARPLRRYIPKNQHQYKVWYVVNSTYFEYLMFVLILLNTICLAMQHYGQSCLFKIAMNILNMLFTGLFTVEMILKLIAFKPKGYFSDPWNVFDFLIVIGSIIDVILSETNPAEHTQCSPSMNAEENSRISITFFRLFRVMRLVKLLSRGEGIRTLLWTFIKSFQALPYVALLIVMLFFIYAVIGMQVFGKIALNDTTEINRNNNFQTFPQAVLLLFRCATGEAWQDIMLACMPGKKCAPESEPSNSTEGETPCGSSFAVFYFISFYMLCAFLIINLFVAVIMDNFDYLTRDWSILGPHHLDEFKRIWAEYDPEAKGRIKHLDVVTLLRRIQPPLGFGKLCPHRVACKRLVSMNMPLNSDGTVMFNATLFALVRTALRIKTEGNLEQANEELRAIIKKIWKRTSMKLLDQVVPPAGDDEVTVGKFYATFLIQEYFRKFKKRKEQGLVGKPSQRNALSLQAGLRTLHDIGPEIRRAISGDLTAEEELDKAMKEAVSAASEDDIFRRAGGLFGNHVSYYQSDGRSAFPQTFTTQRPLHINKAGSSQGDTESPSHEKLVDSTFTPSSYSSTGSNANINNANNTALGRLPRPAGYPSTVSTVEGHGPPLSPAIRVQEVAWKLSSNRMHCCDMLDGGTFPPALGPRRAPPCLHQQLQGSLAGLREDTPCIVPGHASLCCSSRVGEWLPAGCTAPQHARCHSRESQAAMAGQEETSQDETYEVKMNHDTEACSEPSLLSTEMLSYQDDENRQLTLPEEDKRDIRQSPKRGFLRSASLGRRASFHLECLKRQKDRGGDISQKTVLPLHLVHHQALAVAGLSPLLQRSHSPASFPRPFATPPATPGSRGWPPQPVPTLRLEGVESSEKLNSSFPSIHCGSWAETTPGGGGSSAARRVRPVSLMVPSQAGAPGRQFHGSASSLVEAVLISEGLGQFAQDPKFIEVTTQELADACDMTIEEMESAADNILSGGAPQSPNGALLPFVNCRDAGQDRAGGEEDAGCVRARGAPSEEELQDSRVYVSSL

SEQ ID NO: 885080 - protein, 2138 aa, Homo sapiens [sequence omitted]

SEQ ID NO: 885081 - protein, 2157 aa, Homo sapiens
MVNENTRMYIPEENHQGSNYGSPRPAHANMNANAAAGLAPEHIPTPGAALSWQAAIDAARQAKLMGSAGNATISTVSSTQRKRQQYGKPKKQGSTTATRPPRALLCLTLKNPIRRACISIVEWKPFEIIILLTIFANCVALAIYIPFPEDDSNATNSNLERVEYLFLIIFTVEAFLKVIAYGLLFHPNAYLRNGWNLLDFIIVVVGLFSAILEQATKADGANALGGKGAGFDVKALRAFRVLRPLRLVSGVPSLQVVLNSIIKAMVPLLHIALLVLFVIIIYAIIGLELFMGKMHKTCYNQEGIADVPAEDDPSPCALETGHGRQCQNGTVCKPGWDGPKHGITNFDNFAFAMLTVFQCITMEGWTDVLYWVNDAVGRDWPWIYFVTLIIIGSFFVLNLVLGVLSGEFSKEREKAKARGDFQKLREKQQLEEDLKGYLDWITQAEDIDPENEDEGMDEEKPRNMSMPTSETESVNTENVAGGDIEGENCGARLAHRISKSKFSRYWRRWNRFCRRKCRAAVKSNVFYWLVIFLVFLNTLTIASEHYNQPNWLTEVQDTANKALLALFTAEMLLKMYSLGLQAYFVSLFNRFDCFVVCGGILETILVETKIMSPLGISVLRCVRLLRIFKITRYWNSLSNLVASLLNSVRSIASLLLLLFLFIIIFSLLGMQLFGGKFNFDEMQTRRSTFDNFPQSLLTVFQILTGEDWNSVMYDGIMAYGGPSFPGMLVCIYFIILFICGNYILLNVFLAIAVDNLADAESLTSAQKEEEEEKERKKLARTASPEKKQELVEKPAVGESKEEKIELKSITADGESPPATKINMDDLQPNENEDKSPYPNPETTGEEDEEEPEMPVGPRPRPLSELHLKEKAVPMPEASAFFIFSSNNRFRLQCHRIVNDTIFTNLILFFILLSSISLAAEDPVQHTSFRNHILGNADYVFTSIFTLEIILKMTAYGAFLHKGSFCRNYFNILDLLVVSVSLISFGIQSSAINVVKILRVLRVLRPLRAINRAKGLKHVVQCVFVAIRTIGNIVIVTTLLQFMFACIGVQLFKGKLYTCSDSSKQTEAECKGNYITYKDGEVDHPIIQPRSWENSKFDFDNVLAAMMALFTVSTFEGWPELLYRSIDSHTEDKGPIYNYRVEISIFFIIYIIIIAFFMMNIFVGFVIVTFQEQGEQEYKNCELDKNQRQCVEYALKARPLRRYIPKNQHQYKVWYVVNSTYFEYLMFVLILLNTICLAMQHYGQSCLFKIAMNILNMLFTGLFTVEMILKLIAFKPKHYFCDAWNTFDALIVVGSIVDIAITEVNPAEHTQCSPSMNAEENSRISITFFRLFRVMRLVKLLSRGEGIRTLLWTFIKSFQALPYVALLIVMLFFIYAVIGMQVFGKIALNDTTEINRNNNFQTFPQAVLLLFRCATGEAWQDIMLACMPGKKCAPESEPSNSTEGETPCGSSFAVFYFISFYMLCAFLIINLFVAVIMDNFDYLTRDWSILGPHHLDEFKRIWAEYDPEAKGRIKHLDVVTLLRRIQPPLGFGKLCPHRVACKRLVSMNMPLNSDGTVMFNATLFALVRTALRIKTEEGPSPSEAHQGAEDPFRPAGNLEQANEELRAIIKKIWKRTSMKLLDQVVPPAGDDEVTVGKFYATFLIQEYFRKFKKRKEQGLVGKPSQRNALSLQAGLRTLHDIGPEIRRAISGDLTAEEELDKAMKEAVSAASEDDIFRRAGGLFGNHVSYYQSDGRSAFPQTFTTQRPLHINKAGSSQGDTESPSHEKLVDSTFTPSSYSSTGSNANINNANNTALGRLPRPAGYPSTVSTVEGHGPPLSPAIRVQEVAWKLSSNRCHSRESQAAMAGQEETSQDETYEVKMNHDTEACSEPSLLSTEMLSYQDDENRQLTLPEEDKRDIRQSPKRGFLRSASLGRRASFHLECLKRQKDRGGDISQKTVLPLHLVHHQALAVAGLSPLLQRSHSPASFPRPFATPPATPGSRGWPPQPVPTLRLEGVESSEKLNSSFPSIHCGSWAETTPGGGGSSAARRVRPVSLMVPSQAGAPGRQFHGSASSLVEAVLISEGLGQFAQDPKFIEVTTQELADACDMTIEEMESAADNILSGGAPQSPNGALLPFVNCRDAGQDRAGGEEDAGCVRARGAPSEEELQDSRVYVSSL

SEQ ID NO: 885082 - protein, 2146 aa, Homo sapiens
MVNENTRMYIPEENHQGSNYGSPRPAHANMNANAAAGLAPEHIPTPGAALSWQAAIDAARQAKLMGSAGNATISTVSSTQRKRQQYGKPKKQGSTTATRPPRALLCLTLKNPIRRACISIVEWKPFEIIILLTIFANCVALAIYIPFPEDDSNATNSNLERVEYLFLIIFTVEAFLKVIAYGLLFHPNAYLRNGWNLLDFIIVVVGLFSAILEQATKADGANALGGKGAGFDVKALRAFRVLRPLRLVSGVPSLQVVLNSIIKAMVPLLHIALLVLFVIIIYAIIGLELFMGKMHKTCYNQEGIADVPAEDDPSPCALETGHGRQCQNGTVCKPGWDGPKHGITNFDNFAFAMLTVFQCITMEGWTDVLYWVNDAVGRDWPWIYFVTLIIIGSFFVLNLVLGVLSGEFSKEREKAKARGDFQKLREKQQLEEDLKGYLDWITQAEDIDPENEDEGMDEEKPRNMSMPTSETESVNTENVAGGDIEGENCGARLAHRISKSKFSRYWRRWNRFCRRKCRAAVKSNVFYWLVIFLVFLNTLTIASEHYNQPNWLTEVQDTANKALLALFTAEMLLKMYSLGLQAYFVSLFNRFDCFVVCGGILETILVETKIMSPLGISVLRCVRLLRIFKITRYWNSLSNLVASLLNSVRSIASLLLLLFLFIIIFSLLGMQLFGGKFNFDEMQTRRSTFDNFPQSLLTVFQILTGEDWNSVMYDGIMAYGGPSFPGMLVCIYFIILFICGNYILLNVFLAIAVDNLADAESLTSAQKEEEEEKERKKLARTASPEKKQELVEKPAVGESKEEKIELKSITADGESPPATKINMDDLQPNENEDKSPYPNPETTGEEDEEEPEMPVGPRPRPLSELHLKEKAVPMPEASAFFIFSSNNRFRLQCHRIVNDTIFTNLILFFILLSSISLAAEDPVQHTSFRNHILGNADYVFTSIFTLEIILKMTAYGAFLHKGSFCRNYFNILDLLVVSVSLISFGIQSSAINVVKILRVLRVLRPLRAINRAKGLKHVVQCVFVAIRTIGNIVIVTTLLQFMFACIGVQLFKGKLYTCSDSSKQTEAECKGNYITYKDGEVDHPIIQPRSWENSKFDFDNVLAAMMALFTVSTFEGWPELLYRSIDSHTEDKGPIYNYRVEISIFFIIYIIIIAFFMMNIFVGFVIVTFQEQGEQEYKNCELDKNQRQCVEYALKARPLRRYIPKNQHQYKVWYVVNSTYFEYLMFVLILLNTICLAMQHYGQSCLFKIAMNILNMLFTGLFTVEMILKLIAFKPKHYFCDAWNTFDALIVVGSIVDIAITEVNNAEENSRISITFFRLFRVMRLVKLLSRGEGIRTLLWTFIKSFQALPYVALLIVMLFFIYAVIGMQVFGKIALNDTTEINRNNNFQTFPQAVLLLFRCATGEAWQDIMLACMPGKKCAPESEPSNSTEGETPCGSSFAVFYFISFYMLCAFLIINLFVAVIMDNFDYLTRDWSILGPHHLDEFKRIWAEYDPEAKGRIKHLDVVTLLRRIQPPLGFGKLCPHRVACKRLVSMNMPLNSDGTVMFNATLFALVRTALRIKTEEGPSPSEAHQGAEDPFRPAGNLEQANEELRAIIKKIWKRTSMKLLDQVVPPAGDDEVTVGKFYATFLIQEYFRKFKKRKEQGLVGKPSQRNALSLQAGLRTLHDIGPEIRRAISGDLTAEEELDKAMKEAVSAASEDDIFRRAGGLFGNHVSYYQSDGRSAFPQTFTTQRPLHINKAGSSQGDTESPSHEKLVDSTFTPSSYSSTGSNANINNANNTALGRLPRPAGYPSTVSTVEGHGPPLSPAIRVQEVAWKLSSNRCHSRESQAAMAGQEETSQDETYEVKMNHDTEACSEPSLLSTEMLSYQDDENRQLTLPEEDKRDIRQSPKRGFLRSASLGRRASFHLECLKRQKDRGGDISQKTVLPLHLVHHQALAVAGLSPLLQRSHSPASFPRPFATPPATPGSRGWPPQPVPTLRLEGVESSEKLNSSFPSIHCGSWAETTPGGGGSSAARRVRPVSLMVPSQAGAPGRQFHGSASSLVEAVLISEGLGQFAQDPKFIEVTTQELADACDMTIEEMESAADNILSGGAPQSPNGALLPFVNCRDAGQDRAGGEEDAGCVRARGAPSEEELQDSRVYVSSL

SEQ ID NO: 885083 - protein, 2186 aa, Homo sapiens [sequence omitted]

SEQ ID NO: 885084 - protein, 2158 aa, Homo sapiens [sequence omitted]

SEQ ID NO: 885085 - protein, 2127 aa, Homo sapiens
MVNENTRMYIPEENHQGSNYGSPRPAHANMNANAAAGLAPEHIPTPGAALSWQAAIDAARQAKLMGSAGNATISTVSSTQRKRQQYGKPKKQGSTTATRPPRALLCLTLKNPIRRACISIVEWKPFEIIILLTIFANCVALAIYIPFPEDDSNATNSNLERVEYLFLIIFTVEAFLKVIAYGLLFHPNAYLRNGWNLLDFIIVVVGLFSAILEQATKADGANALGGKGAGFDVKALRAFRVLRPLRLVSGVPSLQVVLNSIIKAMVPLLHIALLVLFVIIIYAIIGLELFMGKMHKTCYNQEGIADVPAEDDPSPCALETGHGRQCQNGTVCKPGWDGPKHGITNFDNFAFAMLTVFQCITMEGWTDVLYWVNDAVGRDWPWIYFVTLIIIGSFFVLNLVLGVLSGEFSKEREKAKARGDFQKLREKQQLEEDLKGYLDWITQAEDIDPENEDEGMDEEKPRNMSMPTSETESVNTENVAGGDIEGENCGARLAHRISKSKFSRYWRRWNRFCRRKCRAAVKSNVFYWLVIFLVFLNTLTIASEHYNQPNWLTEVQDTANKALLALFTAEMLLKMYSLGLQAYFVSLFNRFDCFVVCGGILETILVETKIMSPLGISVLRCVRLLRIFKITRYWNSLSNLVASLLNSVRSIASLLLLLFLFIIIFSLLGMQLFGGKFNFDEMQTRRSTFDNFPQSLLTVFQILTGEDWNSVMYDGIMAYGGPSFPGMLVCIYFIILFICGNYILLNVFLAIAVDNLADAESLTSAQKEEEEEKERKKLARTASPEKKQELVEKPAVGESKEEKIELKSITADGESPPATKINMDDLQPNENEDKSPYPNPETTGEEDEEEPEMPVGPRPRPLSELHLKEKAVPMPEASAFFIFSSNNRFRLQCHRIVNDTIFTNLILFFILLSSISLAAEDPVQHTSFRNHILGNADYVFTSIFTLEIILKMTAYGAFLHKGSFCRNYFNILDLLVVSVSLISFGIQSSAINVVKILRVLRVLRPLRAINRAKGLKHVVQCVFVAIRTIGNIVIVTTLLQFMFACIGVQLFKGKLYTCSDSSKQTEAECKGNYITYKDGEVDHPIIQPRSWENSKFDFDNVLAAMMALFTVSTFEGWPELLYRSIDSHTEDKGPIYNYRVEISIFFIIYIIIIAFFMMNIFVGFVIVTFQEQGEQEYKNCELDKNQRQCVEYALKARPLRRYIPKNQHQYKVWYVVNSTYFEYLMFVLILLNTICLAMQHYGQSCLFKIAMNILNMLFTGLFTVEMILKLIAFKPKHYFCDAWNTFDALIVVGSIVDIAITEVNNAEENSRISITFFRLFRVMRLVKLLSRGEGIRTLLWTFIKSFQALPYVALLIVMLFFIYAVIGMQVFGKIALNDTTEINRNNNFQTFPQAVLLLFRCATGEAWQDIMLACMPGKKCAPESEPSNSTEGETPCGSSFAVFYFISFYMLCAFLIINLFVAVIMDNFDYLTRDWSILGPHHLDEFKRIWAEYDPEAKGRIKHLDVVTLLRRIQPPLGFGKLCPHRVACKRLVSMNMPLNSDGTVMFNATLFALVRTALRIKTEGNLEQANEELRAIIKKIWKRTSMKLLDQVVPPAGDDEVTVGKFYATFLIQEYFRKFKKRKEQGLVGKPSQRNALSLQAGLRTLHDIGPEIRRAISGDLTAEEELDKAMKEAVSAASEDDIFRRAGGLFGNHVSYYQSDGRSAFPQTFTTQRPLHINKAGSSQGDTESPSHEKLVDSTFTPSSYSSTGSNANINNANNTALGRLPRPAGYPSTVSTVEGHGPPLSPAIRVQEVAWKLSSNRCHSRESQAAMAGQEETSQDETYEVKMNHDTEACSEPSLLSTEMLSYQDDENRQLTLPEEDKRDIRQSPKRGFLRSASLGRRASFHLECLKRQKDRGGDISQKTVLPLHLVHHQALAVAGLSPLLQRSHSPASFPRPFATPPATPGSRGWPPQPVPTLRLEGVESSEKLNSSFPSIHCGSWAETTPGGGGSSAARRVRPVSLMVPSQAGAPGRQFHGSASSLVEAVLISEGLGQFAQDPKFIEVTTQELADACDMTIEEMESAADNILSGGAPQSPNGALLPFVNCRDAGQDRAGGEEDAGCVRARGAPSEEELQDSRVYVSSL

SEQ ID NO: 885086 - protein, 2139 aa, Homo sapiens
MVNENTRMYIPEENHQGSNYGSPRPAHANMNANAAAGLAPEHIPTPGAALSWQAAIDAARQAKLMGSAGNATISTVSSTQRKRQQYGKPKKQGSTTATRPPRALLCLTLKNPIRRACISIVEWKPFEIIILLTIFANCVALAIYIPFPEDDSNATNSNLERVEYLFLIIFTVEAFLKVIAYGLLFHPNAYLRNGWNLLDFIIVVVGLFSAILEQATKADGANALGGKGAGFDVKALRAFRVLRPLRLVSGVPSLQVVLNSIIKAMVPLLHIALLVLFVIIIYAIIGLELFMGKMHKTCYNQEGIADVPAEDDPSPCALETGHGRQCQNGTVCKPGWDGPKHGITNFDNFAFAMLTVFQCITMEGWTDVLYWVNDAVGRDWPWIYFVTLIIIGSFFVLNLVLGVLSGEFSKEREKAKARGDFQKLREKQQLEEDLKGYLDWITQAEDIDPENEDEGMDEEKPRNMSMPTSETESVNTENVAGGDIEGENCGARLAHRISKSKFSRYWRRWNRFCRRKCRAAVKSNVFYWLVIFLVFLNTLTIASEHYNQPNWLTEVQDTANKALLALFTAEMLLKMYSLGLQAYFVSLFNRFDCFVVCGGILETILVETKIMSPLGISVLRCVRLLRIFKITRYWNSLSNLVASLLNSVRSIASLLLLLFLFIIIFSLLGMQLFGGKFNFDEMQTRRSTFDNFPQSLLTVFQILTGEDWNSVMYDGIMAYGGPSFPGMLVCIYFIILFICGNYILLNVFLAIAVDNLADAESLTSAQKEEEEEKERKKLARTASPEKKQELVEKPAVGESKEEKIELKSITADGESPPATKINMDDLQPNENEDKSPYPNPETTGEEDEEEPEMPVGPRPRPLSELHLKEKAVPMPEASAFFIFSSNNRFRLQCHRIVNDTIFTNLILFFILLSSISLAAEDPVQHTSFRNHILGNADYVFTSIFTLEIILKMTAYGAFLHKGSFCRNYFNILDLLVVSVSLISFGIQSSAINVVKILRVLRVLRPLRAINRAKGLKHVVQCVFVAIRTIGNIVIVTTLLQFMFACIGVQLFKGKLYTCSDSSKQTEAECKGNYITYKDGEVDHPIIQPRSWENSKFDFDNVLAAMMALFTVSTFEGWPELLYRSIDSHTEDKGPIYNYRVEISIFFIIYIIIIAFFMMNIFVGFVIVTFQEQGEQEYKNCELDKNQRQCVEYALKARPLRRYIPKNQHQYKVWYVVNSTYFEYLMFVLILLNTICLAMQHYGQSCLFKIAMNILNMLFTGLFTVEMILKLIAFKPKHYFCDAWNTFDALIVVGSIVDIAITEVNPAEHTQCSPSMNAEENSRISITFFRLFRVMRLVKLLSRGEGIRTLLWTFIKSFQALPYVALLIVMLFFIYAVIGMQVFGKIALNDTTEINRNNNFQTFPQAVLLLFRCATGEAWQDIMLACMPGKKCAPESEPSNSTEGETPCGSSFAVFYFISFYMLCAFLIINLFVAVIMDNFDYLTRDWSILGPHHLDEFKRIWAEYDPEAKGRIKHLDVVTLLRRIQPPLGFGKLCPHRVACKRLVSMNMPLNSDGTVMFNATLFALVRTALREAELSSQVQYQAKEASLLERRRKSSHPKSSTKPNKLLSSGGSTGWVEDARALEGQVLARGCGWLGSLEERERGPHHPPLGFQAGLRTLHDIGPEIRRAISGDLTAEEELDKAMKEAVSAASEDDIFRRAGGLFGNHVSYYQSDGRSAFPQTFTTQRPLHINKAGSSQGDTESPSHEKLVDSTFTPSSYSSTGSNANINNANNTALGRLPRPAGYPSTVSTVEGHGPPLSPAIRVQEVAWKLSSNRCHSRESQAAMAGQEETSQDETYEVKMNHDTEACSEPSLLSTEMLSYQDDENRQLTLPEEDKRDIRQSPKRGFLRSASLGRRASFHLECLKRQKDRGGDISQKTVLPLHLVHHQALAVAGLSPLLQRSHSPASFPRPFATPPATPGSRGWPPQPVPTLRLEGVESSEKLNSSFPSIHCGSWAETTPGGGGSSAARRVRPVSLMVPSQAGAPGRQFHGSASSLVEAVLISEGLGQFAQDPKFIEVTTQELADACDMTIEEMESAADNILSGGAPQSPNGALLPFVNCRDAGQDRAGGEEDAGCVRARGAPSEEELQDSRVYVSSL

SEQ ID NO: 885087 - protein, 1043 aa, Homo sapiens
MAYVCKLLMSKTRPLVMIGVAWVMLLYRSIDSHTEDKGPIYNYRVEISIFFIIYIIIIAFFMMNIFVGFVIVTFQEQGEQEYKNCELDKNQRQCVEYALKARPLRRYIPKNQHQYKVWYVVNSTYFEYLMFVLILLNTICLAMQHYGQSCLFKIAMNILNMLFTGLFTVEMILKLIAFKPKGYFSDPWNVFDFLIVIGSIIDVILSETNPAEHTQCSPSMNAEENSRISITFFRLFRVMRLVKLLSRGEGIRTLLWTFIKSFQALPYVALLIVMLFFIYAVIGMQVFGKIALNDTTEINRNNNFQTFPQAVLLLFRCATGEAWQDIMLACMPGKKCAPESEPSNSTEGETPCGSSFAVFYFISFYMLCAFLIINLFVAVIMDNFDYLTRDWSILGPHHLDEFKRIWAEYDPEAKGRIKHLDVVTLLRRIQPPLGFGKLCPHRVACKRLVSMNMPLNSDGTVMFNATLFALVRTALRIKTEGNLEQANEELRAIIKKIWKRTSMKLLDQVVPPAGDDEVTVGKFYATFLIQEYFRKFKKRKEQGLVGKPSQRNALSLQAGLRTLHDIGPEIRRAISGDLTAEEELDKAMKEAVSAASEDDIFRRAGGLFGNHVSYYQSDGRSAFPQTFTTQRPLHINKAGSSQGDTESPSHEKLVDSTFTPSSYSSTGSNANINNANNTALGRLPRPAGYPSTVSTVEGHGPPLSPAIRVQEVAWKLSSNRCHSRESQAAMAGQEETSQDETYEVKMNHDTEACSEPSLLSTEMLSYQDDENRQLTLPEEDKRDIRQSPKRGFLRSASLGRRASFHLECLKRQKDRGGDISQKTVLPLHLVHHQALAVAGLSPLLQRSHSPASFPRPFATPPATPGSRGWPPQPVPTLRLEGVESSEKLNSSFPSIHCGSWAETTPGGGGSSAARRVRPVSLMVPSQAGAPGRQFHGSASSLVEAVLISEGLGQFAQDPKFIEVTTQELADACDMTIEEMESAADNILSGGAPQSPNGALLPFVNCRDAGQDRAGGEEDAGCVRARGAPSEEELQDSRVYVSSL

SEQ ID NO: 885088 - protein, 805 aa, Homo sapiens
MRLVKLLSRGEGIRTLLWTFIKSFQALPYVALLIVMLFFIYAVIGMQVFGKIALNDTTEINRNNNFQTFPQAVLLLFRCATGEAWQDIMLACMPGKKCAPESEPSNSTEGETPCGSSFAVFYFISFYMLCAFLIINLFVAVIMDNFDYLTRDWSILGPHHLDEFKRIWAEYDPEAKGRIKHLDVVTLLRRIQPPLGFGKLCPHRVACKRLVSMNMPLNSDGTVMFNATLFALVRTALRIKTEGNLEQANEELRAIIKKIWKRTSMKLLDQVVPPAGDDEVTVGKFYATFLIQEYFRKFKKRKEQGLVGKPSQRNALSLQAGLRTLHDIGPEIRRAISGDLTAEEELDKAMKEAVSAASEDDIFRRAGGLFGNHVSYYQSDGRSAFPQTFTTQRPLHINKAGSSQGDTESPSHEKLVDSTFTPSSYSSTGSNANINNANNTALGRLPRPAGYPSTVSTVEGHGPPLSPAIRVQEVAWKLSSNRCHSRESQAAMAGQEETSQDETYEVKMNHDTEACSEPSLLSTEMLSYQDDENRQLTLPEEDKRDIRQSPKRGFLRSASLGRRASFHLECLKRQKDRGGDISQKTVLPLHLVHHQALAVAGLSPLLQRSHSPASFPRPFATPPATPGSRGWPPQPVPTLRLEGVESSEKLNSSFPSIHCGSWAETTPGGGGSSAARRVRPVSLMVPSQAGAPGRQFHGSASSLVEAVLISEGLGQFAQDPKFIEVTTQELADACDMTIEEMESAADNILSGGAPQSPNGALLPFVNCRDAGQDRAGGEEDAGCVRARGAPSEEELQDSRVYVSSL

SEQ ID NO: 885089 - protein, 698 aa, Homo sapiens
MVALPIPSLILSLFSLTSFSAHMSPSLLLPSPVFFWPFEDVPAEDDPSPCALETGHGRQCQNGTVCKPGWDGPKHGITNFDNFAFAMLTVFQCITMEGWTDVLYWMQDAMGYELPWVYFVSLVIFGSFFVLNLVLGVLSGEFSKEREKAKARGDFQKLREKQQLEEDLKGYLDWITQAEDIDPENEDEGMDEEKPRNMSMPTSETESVNTENVAGGDIEGENCGARLAHRISKSKFSRYWRRWNRFCRRKCRAAVKSNVFYWLVIFLVFLNTLTIASEHYNQPNWLTEVQDTANKALLALFTAEMLLKMYSLGLQAYFVSLFNRFDCFVVCGGILETILVETKIMSPLGISVLRCVRLLRIFKITRYWNSLSNLVASLLNSVRSIASLLLLLFLFIIIFSLLGMQLFGGKFNFDEMQTRRSTFDNFPQSLLTVFQILTGEDWNSVMYDGIMAYGGPSFPGMLVCIYFIILFICGNYILLNVFLAIAVDNLADAESLTSAQKEEEEEKERKKLARTASPEKKQELVEKPAVGESKEEKIELKSITADGESPPATKINMDDLQPNENEDKSPYPNPETTGEEDEEEPEMPVGPRPRPLSELHLKEKAVPMPEASAFFIFSSNNRFRLQCHRIVNDTIFTNLILFFILLSSISLAAEDPVQHTSFRNHVCIACVFCTPSPWGCARPTASVADIIVQSGAQF

SEQ ID NO: 885090 - protein, 140 aa, Homo sapiens
VRGEKSHGAASWVGGNLNSQPTPPFSPCPLSSRYWRRWNRFCRRKCRAAVKSNVFYWLVIFLVFLNTLTIASEHYNQPNWLTEVQGERRPQLCSGFLLVTQPQGPGEGITTGRRWRGKQPMVGALGRCCAGDTKGLAVPK

SEQ ID NO: 885091 - protein, 2138 aa, Homo sapiens [sequence omitted]

SEQ ID NO: 885092 - protein, 2173 aa, Homo sapiens
MVNENTRMYIPEENHQGSNYGSPRPAHANMNANAAAGLAPEHIPTPGAALSWQAAIDAARQAKLMGSAGNATISTVSSTQRKRQQYGKPKKQGSTTATRPPRALLCLTLKNPIRRACISIVEWKPFEIIILLTIFANCVALAIYIPFPEDDSNATNSNLERVEYLFLIIFTVEAFLKVIAYGLLFHPNAYLRNGWNLLDFIIVVVGLFSAILEQATKADGANALGGKGAGFDVKALRAFRVLRPLRLVSGVPSLQVVLNSIIKAMVPLLHIALLVLFVIIIYAIIGLELFMGKMHKTCYNQEGIADVPAEDDPSPCALETGHGRQCQNGTVCKPGWDGPKHGITNFDNFAFAMLTVFQCITMEGWTDVLYWMQDAMGYELPWVYFVSLVIFGSFFVLNLVLGVLSGEFSKEREKAKARGDFQKLREKQQLEEDLKGYLDWITQAEDIDPENEDEGMDEEKPRNMSMPTSETESVNTENVAGGDIEGENCGARLAHRISKSKFSRYWRRWNRFCRRKCRAAVKSNVFYWLVIFLVFLNTLTIASEHYNQPNWLTEVQDTANKALLALFTAEMLLKMYSLGLQAYFVSLFNRFDCFVVCGGILETILVETKIMSPLGISVLRCVRLLRIFKITRYWNSLSNLVASLLNSVRSIASLLLLLFLFIIIFSLLGMQLFGGKFNFDEMQTRRSTFDNFPQSLLTVFQILTGEDWNSVMYDGIMAYGGPSFPGMLVCIYFIILFICGNYILLNVFLAIAVDNLADAESLTSAQKEEEEEKERKKLARTASPEKKQELVEKPAVGESKEEKIELKSITADGESPPATKINMDDLQPNENEDKSPYPNPETTGEEDEEEPEMPVGPRPRPLSELHLKEKAVPMPEASAFFIFSSNNRFRLQCHRIVNDTIFTNLILFFILLSSISLAAEDPVQHTSFRNHILGNADYVFTSIFTLEIILKMTAYGAFLHKGSFCRNYFNILDLLVVSVSLISFGIQSSAINVVKILRVLRVLRPLRAINRAKGLKHVVQCVFVAIRTIGNIVIVTTLLQFMFACIGVQLFKGKLYTCSDSSKQTEAECKGNYITYKDGEVDHPIIQPRSWENSKFDFDNVLAAMMALFTVSTFEGWPELLYRSIDSHTEDKGPIYNYRVEISIFFIIYIIIIAFFMMNIFVGFVIVTFQEQGEQEYKNCELDKNQRQCVEYALKARPLRRYIPKNQHQYKVWYVVNSTYFEYLMFVLILLNTICLAMQHYGQSCLFKIAMNILNMLFTGLFTVEMILKLIAFKPKGYFSDPWNVFDFLIVIGSIIDVILSETNPAEHTQCSPSMNAEENSRISITFFRLFRVMRLVKLLSRGEGIRTLLWTFIKSFQALPYVALLIVMLFFIYAVIGMQVFGKIALNDTTEINRNNNFQTFPQAVLLLFRCATGEAWQDIMLACMPGKKCAPESEPSNSTEGETPCGSSFAVFYFISFYMLCAFLIINLFVAVIMDNFDYLTRDWSILGPHHLDEFKRIWAEYDPEAKGRIKHLDVVTLLRRIQPPLGFGKLCPHRVACKRLVSMNMPLNSDGTVMFNATLFALVRTALRIKTEGNLEQANEELRAIIKKIWKRTSMKLLDQVVPPAGDDEVTVGKFYATFLIQEYFRKFKKRKEQGLVGKPSQRNALSLQAGLRTLHDIGPEIRRAISGDLTAEEELDKAMKEAVSAASEDDIFRRAGGLFGNHVSYYQSDGRSAFPQTFTTQRPLHINKAGSSQGDTESPSHEKLVDSTFTPSSYSSTGSNANINNANNTALGRLPRPAGYPSTVSTVEGHGPPLSPAIRVQEVAWKLSSNRERHVPVCEDLELRRDSGSAGTQAHCLLLRRANPSRCHSRESQAAMAGQEETSQDETYEVKMNHDTEACSEPSLLSTEMLSYQDDENRQLTLPEEDKRDIRQSPKRGFLRSASLGRRASFHLECLKRQKDRGGDISQKTVLPLHLVHHQALAVAGLSPLLQRSHSPASFPRPFATPPATPGSRGWPPQPVPTLRLEGVESSEKLNSSFPSIHCGSWAETTPGGGGSSAARRVRPVSLMVPSQAGAPGRQFHGSASSLVEAVLISEGLGQFAQDPKFIEVTTQELADACDMTIEEMESAADNILSGGAPQSPNGALLPFVNCRDAGQDRAGGEEDAGCVRARGAPSEEELQDSRVYVSSL

SEQ ID NO: 885093 - protein, 2166 aa, Homo sapiens [sequence omitted]

SEQ ID NO: 885094 - protein, 2155 aa, Homo sapiens [sequence omitted]

SEQ ID NO: 885095 - protein, 2169 aa, Homo sapiens
MNANAAAGLAPEHIPTPGAALSWQAAIDAARQAKLMGSAGNATISTVSSTQRKRQQYGKPKKQGSTTATRPPRALLCLTLKNPIRRACISIVEWKPFEIIILLTIFANCVALAIYIPFPEDDSNATNSNLERVEYLFLIIFTVEAFLKVIAYGLLFHPNAYLRNGWNLLDFIIVVVGLFSAILEQATKADGANALGGKGAGFDVKALRAFRVLRPLRLVSGVPSLQVVLNSIIKAMVPLLHIALLVLFVIIIYAIIGLELFMGKMHKTCYNQEGIADVPAEDDPSPCALETGHGRQCQNGTVCKPGWDGPKHGITNFDNFAFAMLTVFQCITMEGWTDVLYWMQDAMGYELPWVYFVSLVIFGSFFVLNLVLGVLSGEFSKEREKAKARGDFQKLREKQQLEEDLKGYLDWITQAEDIDPENEDEGMDEEKPRNMSMPTSETESVNTENVAGGDIEGENCGARLAHRISKSKFSRYWRRWNRFCRRKCRAAVKSNVFYWLVIFLVFLNTLTIASEHYNQPNWLTEVQDTANKALLALFTAEMLLKMYSLGLQAYFVSLFNRFDCFVVCGGILETILVETKIMSPLGISVLRCVRLLRIFKITRYWNSLSNLVASLLNSVRSIASLLLLLFLFIIIFSLLGMQLFGGKFNFDEMQTRRSTFDNFPQSLLTVFQILTGEDWNSVMYDGIMAYGGPSFPGMLVCIYFIILFICGNYILLNVFLAIAVDNLADAESLTSAQKEEEEEKERKKLARTASPEKKQELVEKPAVGESKEEKIELKSITADGESPPATKINMDDLQPNENEDKSPYPNPETTGEEDEEEPEMPVGPRPRPLSELHLKEKAVPMPEASAFFIFSSNNRFRLQCHRIVNDTIFTNLILFFILLSSISLAAEDPVQHTSFRNHILFYFDIVFTTIFTIEIALKMTAYGAFLHKGSFCRNYFNILDLLVVSVSLISFGIQSSAINVVKILRVLRVLRPLRAINRAKGLKHVVQCVFVAIRTIGNIVIVTTLLQFMFACIGVQLFKGKLYTCSDSSKQTEAECKGNYITYKDGEVDHPIIQPRSWENSKFDFDNVLAAMMALFTVSTFEGWPELLYRSIDSHTEDKGPIYNYRVEISIFFIIYIIIIAFFMMNIFVGFVIVTFQEQGEQEYKNCELDKNQRQCVEYALKARPLRRYIPKNQHQYKVWYVVNSTYFEYLMFVLILLNTICLAMQHYGQSCLFKIAMNILNMLFTGLFTVEMILKLIAFKPKHYFCDAWNTFDALIVVGSIVDIAITEVNNAEENSRISITFFRLFRVMRLVKLLSRGEGIRTLLWTFIKSFQALPYVALLIVMLFFIYAVIGMQVFGKIALNDTTEINRNNNFQTFPQAVLLLFRCATGEAWQDIMLACMPGKKCAPESEPSNSTEGETPCGSSFAVFYFISFYMLCAFLIINLFVAVIMDNFDYLTRDWSILGPHHLDEFKRIWAEYDPEAKGRIKHLDVVTLLRRIQPPLGFGKLCPHRVACKRLVSMNMPLNSDGTVMFNATLFALVRTALRIKTEGNLEQANEELRAIIKKIWKRTSMKLLDQVVPPAGDDEVTVGKFYATFLIQEYFRKFKKRKEQGLVGKPSQRNALSLQAGLRTLHDIGPEIRRAISGDLTAEEELDKAMKEAVSAASEDDIFRRAGGLFGNHVSYYQSDGRSAFPQTFTTQRPLHINKAGSSQGDTESPSHEKLVDSTFTPSSYSSTGSNANINNANNTALGRLPRPAGYPSTVSTVEGHGPPLSPAIRVQEVAWKLSSNRMHCCDMLDGGTFPPALGPRRAPPCLHQQLQGSLAGLREDTPCIVPGHASLCCSSRVGEWLPAGCTAPQHARCHSRESQAAMAGQEETSQDETYEVKMNHDTEACSEPSLLSTEMLSYQDDENRQLTLPEEDKRDIRQSPKRGFLRSASLGRRASFHLECLKRQKDRGGDISQKTVLPLHLVHHQALAVAGLSPLLQRSHSPASFPRPFATPPATPGSRGWPPQPVPTLRLEGVESSEKLNSSFPSIHCGSWAETTPGGGGSSAARRVRPVSLMVPSQAGAPGRQFHGSASSLVEAVLISEGLGQFAQDPKFIEVTTQELADACDMTIEEMESAADNILSGGAPQSPNGALLPFVNCRDAGQDRAGGEEDAGCVRARGAPSEEELQDSRVYVSSL

SEQ ID NO: 885096 - protein, 1872 aa, Homo sapiens
MVALPIPSLILSLFSLTSFSAHMSPSLLLPSPVFFWPFEDVPAEDDPSPCALETGHGRQCQNGTVCKPGWDGPKHGITNFDNFAFAMLTVFQCITMEGWTDVLYWMQDAMGYELPWVYFVSLVIFGSFFVLNLVLGVLSGEFSKEREKAKARGDFQKLREKQQLEEDLKGYLDWITQAEDIDPENEDEGMDEEKPRNMSMPTSETESVNTENVAGGDIEGENCGARLAHRISKSKFSRYWRRWNRFCRRKCRAAVKSNVFYWLVIFLVFLNTLTIASEHYNQPNWLTEVQDTANKALLALFTAEMLLKMYSLGLQAYFVSLFNRFDCFVVCGGILETILVETKIMSPLGISVLRCVRLLRIFKITRYWNSLSNLVASLLNSVRSIASLLLLLFLFIIIFSLLGMQLFGGKFNFDEMQTRRSTFDNFPQSLLTVFQILTGEDWNSVMYDGIMAYGGPSFPGMLVCIYFIILFICGNYILLNVFLAIAVDNLADAESLTSAQKEEEEEKERKKLARTASPEKKQELVEKPAVGESKEEKIELKSITADGESPPATKINMDDLQPNENEDKSPYPNPETTGEEDEEEPEMPVGPRPRPLSELHLKEKAVPMPEASAFFIFSSNNRFRLQCHRIVNDTIFTNLILFFILLSSISLAAEDPVQHTSFRNHILFYFDIVFTTIFTIEIALKMTAYGAFLHKGSFCRNYFNILDLLVVSVSLISFGIQSSAINVVKILRVLRVLRPLRAINRAKGLKHVVQCVFVAIRTIGNIVIVTTLLQFMFACIGVQLFKGKLYTCSDSSKQTEAECKGNYITYKDGEVDHPIIQPRSWENSKFDFDNVLAAMMALFTVSTFEGWPELLYRSIDSHTEDKGPIYNYRVEISIFFIIYIIIIAFFMMNIFVGFVIVTFQEQGEQEYKNCELDKNQRQCVEYALKARPLRRYIPKNQHQYKVWYVVNSTYFEYLMFVLILLNTICLAMQHYGQSCLFKIAMNILNMLFTGLFTVEMILKLIAFKPKGYFSDPWNVFDFLIVIGSIIDVILSETNPAEHTQCSPSMNAEENSRISITFFRLFRVMRLVKLLSRGEGIRTLLWTFIKSFQALPYVALLIVMLFFIYAVIGMQVFGKIALNDTTEINRNNNFQTFPQAVLLLFRCATGEAWQDIMLACMPGKKCAPESEPSNSTEGETPCGSSFAVFYFISFYMLCAFLIINLFVAVIMDNFDYLTRDWSILGPHHLDEFKRIWAEYDPEAKGRIKHLDVVTLLRRIQPPLGFGKLCPHRVACKRLVSMNMPLNSDGTVMFNATLFALVRTALRIKTEGNLEQANEELRAIIKKIWKRTSMKLLDQVVPPAGDDEVTVGKFYATFLIQEYFRKFKKRKEQGLVGKPSQRNALSLQAGLRTLHDIGPEIRRAISGDLTAEEELDKAMKEAVSAASEDDIFRRAGGLFGNHVSYYQSDGRSAFPQTFTTQRPLHINKAGSSQGDTESPSHEKLVDSTFTPSSYSSTGSNANINNANNTALGRLPRPAGYPSTVSTVEGHGPPLSPAIRVQEVAWKLSSNRCHSRESQAAMAGQEETSQDETYEVKMNHDTEACSEPSLLSTEMLSYQDDENRQLTLPEEDKRDIRQSPKRGFLRSASLGRRASFHLECLKRQKDRGGDISQKTVLPLHLVHHQALAVAGLSPLLQRSHSPASFPRPFATPPATPGSRGWPPQPVPTLRLEGVESSEKLNSSFPSIHCGSWAETTPGGGGSSAARRVRPVSLMVPSQAGAPGRQFHGSASSLVEAVLISEGLGQFAQDPKFIEVTTQELADACDMTIEEMESAADNILSGGAPQSPNGALLPFVNCRDAGQDRAGGEEDAGCVRARGAPSEEELQDSRVYVSSL

SEQ ID NO: 885097 - protein, 1795 aa, Homo sapiens
MVALPIPSLILSLFSLTSFSAHMSPSLLLPSPVFFWPFEDVPAEDDPSPCALETGHGRQCQNGTVCKPGWDGPKHGITNFDNFAFAMLTVFQCITMEGWTDVLYWMQDAMGYELPWVYFVSLVIFGSFFVLNLVLGVLSGEFSKEREKAKARGDFQKLREKQQLEEDLKGYLDWITQAEDIDPENEDEGMDEEKPRNMSMPTSETESVNTENVAGGDIEGENCGARLAHRISKSKFSRYWRRWNRFCRRKCRAAVKSNVFYWLVIFLVFLNTLTIASEHYNQPNWLTEVQDTANKALLALFTAEMLLKMYSLGLQAYFVSLFNRFDCFVVCGGILETILVETKIMSPLGISVLRCVRLLRIFKITRYWNSLSNLVASLLNSVRSIASLLLLLFLFIIIFSLLGMQLFGGKFNFDEMQTRRSTFDNFPQSLLTVFQILTGEDWNSVMYDGIMAYGGPSFPGMLVCIYFIILFICGNYILLNVFLAIAVDNLADAESLTSAQKEEEEEKERKKLARTASPEKKQELVEKPAVGESKEEKIELKSITADGESPPATKINMDDLQPNENEDKSPYPNPETTGEEDEEEPEMPVGPRPRPLSELHLKEKAVPMPEASAFFIFSSNNRFRLQCHRIVNDTIFTNLILFFILLSSISLAAEDPVQHTSFRNHILFYFDIVFTTIFTIEIALKMTAYGAFLHKGSFCRNYFNILDLLVVSVSLISFGIQSSAINVVKILRVLRVLRPLRAINRAKGLKHVVQCVFVAIRTIGNIVIVTTLLQFMFACIGVQLFKGKLYTCSDSSKQTEAECKGNYITYKDGEVDHPIIQPRSWENSKFDFDNVLAAMMALFTVSTFEGWPELLYRSIDSHTEDKGPIYNYRVEISIFFIIYIIIIAFFMMNIFVGFVIVTFQEQGEQEYKNCELDKNQRQCVEYALKARPLRRYIPKNQHQYKVWYVVNSTYFEYLMFVLILLNTICLAMQHYGQSCLFKIAMNILNMLFTGLFTVEMILKLIAFKPKGYFSDPWNVFDFLIVIGSIIDVILSETNPAEHTQCSPSMNAEENSRISITFFRLFRVMRLVKLLSRGEGIRTLLWTFIKSFQALPYVALLIVMLFFIYAVIGMQVFGKIALNDTTEINRNNNFQTFPQAVLLLFRCATGEAWQDIMLACMPGKKCAPESEPSNSTEGETPCGSSFAVFYFISFYMLCAFLIINLFVAVIMDNFDYLTRDWSILGPHHLDEFKRIWAEYDPEAKGRIKHLDVVTLLRRIQPPLGFGKLCPHRVACKRLVSMNMPLNSDGTVMFNATLFALVRTALRIKTEGNLEQANEELRAIIKKIWKRTSMKLLDQVVPPAGDDEVTVGKFYATFLIQEYFRKFKKRKEQGLVGKPSQRNALSLQAGLRTLHDIGPEIRRAISGDLTAEEELDKAMKEAVSAASEDDIFRRAGGLFGNHVSYYQSDGRSAFPQTFTTQRPLHINKAGSSQGDTESPSHEKLVDSTFTPSSYSSTGSNANINNANNTALGRLPRPAGYPSTVSTVEGHGPPLSPAIRVQEVAWKLSSNRCHSRESQAAMAGQEETSQDETYEVKMNHDTEACSEPSLLSTEMLSYQDDENRQLTLPEEDKRDIRQSPKRGFLRSASLGRRASFHLECLKRQKDRGGDISQKTVLPLHLVHHQALAVAGLSPLLQRSHSPASFPRPFATPPATPGSRGWPPQPVPTLRLEGVESSEKLNSSFPSIHCGSWAETTPGGGGSSAARRVRPVSLMVPSQAGAPGRQFHGSASSLVEAVGDSQMGRGERPRATRGLGMRG

SEQ ID NO: 885098 - protein, 109 aa, Homo sapiens
MVALPIPSLILSLFSLTSFSAHMSPSLLLPSPVFFWPFEMFQQKMTLPLVRWKRATGGSARTARCASPAGMVPSTASPTLTTLPSPCSRCSSASPWRAGRTCCTGSMMP

SEQ ID NO: 885099 - protein, 66 aa, Homo sapiens
NGIRRPRRRRRRGSEWSLGTRRTGVPVGPSVASRMEPGVGVMMQSSMLDPRGLPHDLSGRYGIFQG

SEQ ID NO: 885100 - protein, 259 aa, Homo sapiens
EPAGPSLNPTLAATAALIPLHRRAGDIRPGPLPGGSDAPSQLPVQETRPRLCAGQLKGTTTPRRIEGDRWGRGGAQPCEALTQRWGGGRPKGGRWSGRASGDGMGPGLRLVTGGGCRRGPREGGAGARREATPTAAPGGARPAAAGRGGAAAAAAPGHHRSLRGDVTAAGPPAPGAGWWRERLSQTWSAPPAGCLRQRRLSKGCWRWSCGALTIPEQNTLTSLPPQGRWLDSEQLPSVKGPVFTGSGWYLALSLEWQLC

SEQ ID NO: 885101 - protein, 215 aa, Homo sapiens
EPAGPSLNPTLAATAALIPLHRRAGDIAQARFREEVTLPASFRSRRLGPASAPGSLKGPRPPGGLKETGGGCRRGPREGGAGARREATPTAAPGGARPAAAGRGGAAAAAAPGHHRSLRGDVTAAGPPAPGAGWWRERLSQTWSAPPAGCLRQRRLSKGCWRWSCGALTIPEQNTLTSLPPQGRWLDSEQLPSVKGPVFTGSGWYLALSLEWQLC

SEQ ID NO: 885102 - protein, 262 aa, Homo sapiens
EPAGPSLNPTLAATAALIPLHRRAGDIRPGPLPGGSDAPSQLPVQETRPRLCAGQLKGTTTPRRIEGDRWGRGGAQPCEALTQRWGGGRPKGGRWSGRASGDGMGPGLRLVTGVRGGPSGREEGAWPRASAGPDRLSLALSRAGRLPAWTAGRRGWGSAGGHPHSRPGRSAPSSCWTRWSSGSGSSWTPSQPARRCYGSWAAGARSRLVAGTSQPNLERPPSRLSPPEAAFQRMLAMELRSPDHPRAEYPDFSPSPGPVAGL

SEQ ID NO: 885103 - protein, 262 aa, Homo sapiens; identical to SEQ ID NO: 885102

SEQ ID NO: 885104 - protein, 366 aa, Homo sapiens
EPAGPSLNPTLAATAALIPLHRRAGDIRPGPLPGGSDAPSQLPVQETRPRLCAGQLKGTTTPRRIEGDRWGRGGAQPCEALTQRWGGGRPKGGRWSGRASGDGMGPGLRLVTGGGCRRGPREGGAGARREATPTAAPGGARPAAAGRGGAAAAAAPGHHRSLRGDVTAAGPPAPGAGWWRERLSQTWSAPPAGCLRQRRLSKGCWRWSCGALTIPEQNTLTSLPPQGQLKQNHEIQAPNSEKISQCNMIANRRIIRGHISLGGEAGDKQWQARGNSTPLSYQEQKKAGARTEERSIQKKTQGQITADIGAGPAVARQEVGLRPGYGGGSRVGWLHRSIFHGIWGGHKCPHKNTFQKKPLIKNRKPG

SEQ ID NO: 885105 - protein, 215 aa, Homo sapiens; identical to SEQ ID NO: 885101

SEQ ID NO: 885106 - protein, 262 aa, Homo sapiens; identical to SEQ ID NO: 885102

SEQ ID NO: 885107 - protein, 259 aa, Homo sapiens; identical to SEQ ID NO: 885100

SEQ ID NO: 885108 - protein, 162 aa, Homo sapiens; identical to SEQ ID NO: 871967

SEQ ID NO: 885109 - protein, 227 aa, Homo sapiens
AWSGPAFPVRSARPAQAASPPSPGPGPLAPVPAPRGLGARAAPPRPGLGPPGPQCESACSLCPRVMTTPNKGNKALKVKREPGENGTSLTDEELVTMSVRELNQHLRGLSKEEIVQLKQRRRTLKNRGYAASCRVKRVTQKEELEKQKAELQQEVEKLASENASMKLELDALRSKYEALQTFARTVARSPVAPARGPLAAGLGPLVPGKVAATSVITIVKSKTDARS

SEQ ID NO: 885110 - protein, 227 aa, Homo sapiens; identical to SEQ ID NO: 885109

SEQ ID NO: 885111 - protein, 132 aa, Homo sapiens
MAAMVAASLFQAFCSEWAERDATENRSELYFQRRKLWRVLTTLHELTRQRPLLRVRHVGVRLDSLLEALGAMSSVPFYGHPIPLPSQGKGLFATQLIRKGETIFVERPLVAAQFLWNALYRYRGEYISPTPH

SEQ ID NO: 885112 - protein, 334 aa, Homo sapiens
MAASMCDVFSFCVGVAGRARVSVEVRFVSSAKGKGLFATQLIRKGETIFVERPLVAAQFLWNALYRYRACDHCLRALEKAEENAQRLTGKPGQVLPHPELCTVRKDLHQNCPHCQVMYCSAECRLAATEQYHQVLCPGPSQDDPLHPLNKLQEAWRSIHYPPETASIMLMARMVATVKQAKDKDRWIRLFSQFCNKTANEEEEIVHKLLGDKFKGQLELLRRLFTEALYEEAVSQWFTPDGFRSLFALVGTNGQGIGTSSLSQWVHACDTLELKPQDREQLDAFIDQLYKDIEAGNLYQLLGLLSAGAQPPQPPQDPQGELSICLFLSQMPGRG

SEQ ID NO: 885113 - protein, 473 aa, Homo sapiens
MAAMVAASLFQAFCSEWAERDATENRSELYFQRRKLWRVLTTLHELTRQRPLLRVRHVGVRLDSLLEALGAMSSVPFYGHPIPLPSQGKGLFATQLIRKGETIFVERPLVAAQFLWNALYRYRACDHCLRALEKAEENAQRLTGKPGQVLPHPELCTVRKDLHQNCPHCQVMYCSAECRLAATEQYHQVLCPGPSQDDPLHPLNKLQEAWRSIHYPPETASIMLMARMVATVKQAKDKDRWIRLFSQFCNKTANEEEEIVHKLLGDKFKGQLELLRRLFTEALYEEAVSQWFTPDGFRSLFALVGTNGQGIGTSSLSQWVHACDTLELKPQDREQLDAFIDQLYKDIEAATGEFLNCEGSGLFVLQSCCNHSCVPNAETSFPENNFLLHVTALEDIKPGEEICISYLDCCQRERSRHSRHKILRENYLFVCSCPKCLAEADEPNVTSEEEEEEEEEEEGEPEDAELGDEMTDV

SEQ ID NO: 885114 - protein, 366 aa, Homo sapiens
MWPLLSRYCCVWLSPSACDHCLRALEKAEENAQRLTGKPGQVLPHPELCTVRKDLHQNCPHCQVMYCSAECRLAATEQYHQVLCPGPSQDDPLHPLNKLQEAWRSIHYPPETASIMLMARMVATVKQAKDKDRWIRLFSQFCNKTANEEEEIVHKLLGDKFKGQLELLRRLFTEALYEEAVSQWFTPDGFRSLFALVGTNGQGIGTSSLSQWVHACDTLELKPQDREQLDAFIDQLYKDIEAATGEFLNCEGSGLFVLQSCCNHSCVPNAETSFPENNFLLHVTALEDIKPGEEICISYLDCCQRERSRHSRHKILRENYLFVCSCPKCLAEADEPNVTSEEEEEEEEEEEGEPEDAELGDEMTDV

SEQ ID NO: 885115 - protein, 234 aa, Homo sapiens
MVILLSTMRNLSRTLVYVLGREPLPKLCLWDYGEYGGPLESPGLYSLQLAGVSHRMDVRSRLALAESNGQGIGTSSLSQWVHACDTLELKPQDREQLDAFIDQLYKDIEAATGEFLNCEGSGLFVLQSCCNHSCVPNAETSFPENNFLLHVTALEDIKPGEEICISYLDCCQRERSRHSRHKILRENYLFVCSCPKCLAEADEPNVTSEEEEEEEEEEEGEPEDAELGDEMTDV

SEQ ID NO: 885116 - protein, 266 aa, Homo sapiens
MAASMCDVFSFCVGVAGRARVSVEVRFVSSAKGKGLFATQLIRKGETIFVERPLVAAQFLWNALYRYRACDHCLRALEKAEENAQRLTGKPGQVLPHPELCTVRKDLHQNCPHCQVMYCSAECRLAATEQYHQVLCPGPSQDDPLHPLNKLQEAWRSIHYPPETASIMLMARMVATVKQAKDKDRWIRLFSQFCNKTANEEEEIVHKLLGDKFKGQLELLRRLFTEALYEEAVSQWFTPDGFRSLFALVGTNGQGIGTRSRMFQSY

SEQ ID NO: 885117 - protein, 229 aa, Homo sapiens
MAEDSQDEQQPEQDRPSLDSHCDCPQNLAAAQDPFTEALYEEAVSQWFTPDGFRSLFALVGTNGQGIGTSSLSQWVHACDTLELKPQDREQLDAFIDQLYKDIEAATGEFLNCEGSGLFVLQSCCNHSCVPNAETSFPENNFLLHVTALEDIKPGEEICISYLDCCQRERSRHSRHKILRENYLFVCSCPKCLAEADEPNVTSEEEEEEEEEEEGEPEDAELGDEMTDV

SEQ ID NO: 885118 - protein, 418 aa, Homo sapiens
MAASMCDVFSFCVGVAGRARVSVEVRFVSSAKGKGLFATQLIRKGETIFVERPLVAAQFLWNALYRYRACDHCLRALEKAEENAQRLTGKPGQVLPHPELCTVRKDLHQNCPHCQVMYCSAECRLAATEQYHQVLCPGPSQDDPLHPLNKLQEAWRSIHYPPETASIMLMARMVATVKQAKDKDRWIRLFSQFCNKTANEEEEIVHKLLGDKFKGQLELLRRLFTEALYEEAVSQWFTPDGFRSLFALVGTNGQGIGTSSLSQWVHACDTLELKPQDREQLDAFIDQLYKDIEAATGEFLNCEGSGLFVLQSCCNHSCVPNAETSFPENNFLLHVTALEDIKPGEEICISYLDCCQRERSRHSRHKILRENYLFVCSCPKCLAEADEPNVTSEEEEEEEEEEEGEPEDAELGDEMTDV

SEQ ID NO: 885119 - protein, 366 aa, Homo sapiens; identical to SEQ ID NO: 885114

SEQ ID NO: 885120 - protein, 142 aa, Homo sapiens
FLTVKDLASLTSYTRTSRPTGEFLNCEGSGLFVLQSCCNHSCVPNAETSFPENNFLLHVTALEDIKPGEEICISYLDCCQRERSRHSRHKILRENYLFVCSCPKCLAEADEPNVTSEEEEEEEEEEEGEPEDAELGDEMTDV

SEQ ID NO: 885121 - protein, 334 aa, Homo sapiens; identical to SEQ ID NO: 885112

SEQ ID NO: 885122 - protein, 693 aa, Homo sapiens
MIAPLLCILSYNFNTFAILNVYSKLTMFCTTNSLPMDLLLKQGSLKQEVESFCYQIVSESNDQKVGILQSEDKQLQPSVSKKSEGELSRVKFISNSNKITFSKKPKRRKYDESYLSFGFTYFGNRDAPHAQCVLCKKILSNSSLAPSKLRRHLETKHAAYKDKDISFFKQHLDSPENNKPPTPKIVNTDNESATEASYNVSYHIALSGEAHTIGELLIKPCAKDVVMRMFDEQYSKKIDAVQLSNSTVARRIKDLAADIEEELVCRLKICDGFSLQLDESADVSGLAVLLVFVRYRFNKSIEEDLLLCESLQSNATGEEIFNCINSFMQKHEIEWEKCVDVCSDASRAVDGKIAEAVTLIKYVAPESTSSHCLLYRHALAVKIMPTSLKNVLDQAVQIINYIKARPHQSRLLKILCEEMGAQHTALLLNTEVRWLSRGKVLVRLFELRRELLVFMDSAFRLSDCLTNSSWLLRLAYLADIFTKLNEVNLSMQGKNVTVFTVFDKMSSLLRKLEFWASSVEEENFDCFPTLSDFLTEINSTVDKDICSAIVQHLRGLRATLLKYFPVTNDNNAWVRNPFTVTVKPASLVARDYESLIDLTSDSQVKQNFSELSLNDFWSSLIQEYPSIARRAVRVLLPFATMHLCETGFSYYAATKTKYRKRLDAAPHMRIRLSNITPNIKRICDKKTQKHCSH

SEQ ID NO: 885123 - protein, 693 aa, Homo sapiens; identical to SEQ ID NO: 885122

SEQ ID NO: 885124 - protein, 693 aa, Homo sapiens; identical to SEQ ID NO: 885122

SEQ ID NO: 885125 - protein, 693 aa, Homo sapiens
MIAPLLCILSYNFNTFAILNVYSKLTMFCTTNSLPMDLLLKQGSLKQEVESFCYQIVSESNDQKVGILQSEDKQLQPSVSKKSEGELSRVKFISNSNKITFSKKPKRRKYDESYLSFGFTYFGNRDAPHAQCVLCKKILSNSSLAPSKLRRHLETKHAAYKDKDISFFKQHLDSPENNKPPTPKIVNTDNESATEASYNVSYHIALSGEAHTIGELLIKPCAKDVVMRMFDEQYSKKIVGGGVGGWGREGVGGGGAADIEEELVCRLKICDGFSLQLDESADVSGLAVLLVFVRYRFNKSIEEDLLLCESLQSNATGEEIFNCINSFMQKHEIEWEKCVDVCSDASRAVDGKIAEAVTLIKYVAPESTSSHCLLYRHALAVKIMPTSLKNVLDQAVQIINYIKARPHQSRLLKILCEEMGAQHTALLLNTEVRWLSRGKVLVRLFELRRELLVFMDSAFRLSDCLTNSSWLLRLAYLADIFTKLNEVNLSMQGKNVTVFTVFDKMSSLLRKLEFWASSVEEENFDCFPTLSDFLTEINSTVDKDICSAIVQHLRGLRATLLKYFPVTNDNNAWVRNPFTVTVKPASLVARDYESLIDLTSDSQVKQNFSELSLNDFWSSLIQEYPSIARRAVRVLLPFATMHLCETGFSYYAATKTKYRKRLDAAPHMRIRLSNITPNIKRICDKKTQKHCSH

SEQ ID NO: 885126 - protein, 693 aa, Homo sapiens; identical to SEQ ID NO: 885122

SEQ ID NO: 885127 - protein, 693 aa, Homo sapiens; identical to SEQ ID NO: 885122

SEQ ID NO: 885128 - protein, 693 aa, Homo sapiens; identical to SEQ ID NO: 885122

SEQ ID NO: 885129 - protein, 354 aa, Homo sapiens
TLAAEAEADGVSPKQRLGHELTRDSGGGGPFGHLLAECSLLTGTDFNIMAGRHQNRSFPLPGVQSSGQVHAFGNCSDSDILEEDAEVYELRSRGKEKVRRSTSRDRLDDIIVLTKDIQEGDTLNAIALQYCCTVADIKRVNNLISDQDFFALRSIKIPVKKFSSLTETLCPPKGRQTSRHSSVQYSSEQQEILPANDSLAYSDSAGSFLKEVDRDIEQIVKCTDNKRENLNEVVSALTAQQMRFEPDNKNTQRKDPYYGADWGIGWWTAVVIMLIVGIITPVFYLLYYEILAKVDVSHHSTVDSSHLHSKITPPSQQREMENGIVPTKGIHFSQQDDHKLYSQDSQSPAAQQET

SEQ ID NO: 885130 - protein, 354 aa, Homo sapiens; identical to SEQ ID NO: 885129

SEQ ID NO: 885131 - protein, 175 aa, Homo sapiens
TLAAEAEADGVSPKQRLGHELTRDSGGGGPFGHLLAECSLLTGTDFNIMAGRHQNRSFPLPGVQSSGQVHAFGNCSDSDILEEDAEVYELRSRGKEKVRRSTSRDRLDDIIVLTKDIQEGDTLNAIALQYCCTVYQNSSKKVQFLDRNTLSSKRKTDFTSFICSILFRTTGNFAS

SEQ ID NO: 885132 - protein, 502 aa, Homo sapiens
MAWALKLPLADEVIESGLVQDFDASLSGIGQELGAGAYSMSDVLALPIFKQEESSLPPDNENKILPFQYVLCAATSPAVKLHDETLTYLNQGQSYEIRMLDNRKLGELPEINGKLVKSIFRVVFHDRRLQYTEHQQLEGWRWNRPGDRILDIDIPMSVGIIDPRANPTQLNTVEFLWDPAKRTSVFIQVHCISTEFTMRKHGGEKGVPFRVQIDTFKENENGEYTEHLHSASCQIKVFKPKGADRKQKTDREKMEKRTPHEKEKYQPSYETTILTECSPWPEITYVNNSPSPGFNSSHSSFSLGEGNGSPNHQPEPPPPVTDNLLPTTTPQEAQQWLHRNRFSTFTRLFTNFSGADLLKLTRDDVIQICGPADGIRLFNALKGRMVRPRLTIYVCQESLQLREQQQQQQQQQQKHEDGDSNGTFFVYHAIYLEELTAVELTEKIAQLFSISPCQISQIYKQGPTGIHVLISDEMIQNFQEEACFILDTMKAETNDSYHIILK

SEQ ID NO: 885133 - protein, 451 aa, Homo sapiens
MAWALKLPLADEVIESGLVQDFDASLSGIGQELGAGAYSMSDVLALPIFKQEESSLPPDNENKILPFQYVLCAATSPAVKLHDETLTYLNQGQSYEIRMLDNRKLGELPEINGKLVKSIFRVVFHDRRLQYTEHQQLEGWRWNRPGDRILDIDIPMSVGIIDPRANPTQLNTVEFLWDPAKRTSVFIQPKGADRKQKTDREKMEKRTPHEKEKYQPSYETTILTECSPWPEITYVNNSPSPGFNSSHSSFSLGEGNGSPNHQPEPPPPVTDNLLPTTTPQEAQQWLHRNRFSTFTRLFTNFSGADLLKLTRDDVIQICGPADGIRLFNALKGRMVRPRLTIYVCQESLQLREQQQQQQQQQQKHEDGDSNGTFFVYHAIYLEELTAVELTEKIAQLFSISPCQISQIYKQGPTGIHVLISDEMIQNFQEEACFILDTMKAETNDSYHIILK

SEQ ID NO: 885134 - protein, 502 aa, Homo sapiens; identical to SEQ ID NO: 885132

SEQ ID NO: 885135 - protein, 502 aa, Homo sapiens; identical to SEQ ID NO: 885132

SEQ ID NO: 885136 - protein, 495 aa, Homo sapiens
WIPRAAGFGTRVQDFDASLSGIGQELGAGAYSMSDVLALPIFKQEESSLPPDNENKILPFQYVLCAATSPAVKLHDETLTYLNQGQSYEIRMLDNRKLGELPEINGKLVKSIFRVVFHDRRLQYTEHQQLEGWRWNRPGDRILDIDIPMSVGIIDPRANPTQLNTVEFLWDPAKRTSVFIQVHCISTEFTMRKHGGEKGVPFRVQIDTFKENENGEYTEHLHSASCQIKVFKPKGADRKQKTDREKMEKRTPHEKEKYQPSYETTILTECSPWPEITYVNNSPSPGFNSSHSSFSLGEGNGSPNHQPEPPPPVTDNLLPTTTPQEAQQWLHRNRFSTFTRLFTNFSGADLLKLTRDDVIQICGPADGIRLFNALKGRMVRPRLTIYVCQESLQLREQQQQQQQQQQKHEDGDSNGTFFVYHAIYLEELTAVELTEKIAQLFSISPCQISQIYKQGPTGIHVLISDEMIQNFQEEACFILDTMKAETNDSYHIILK

SEQ ID NO: 885137 - protein, 424 aa, Homo sapiens
MAWALKLPLADEVIESGLVQDFDASLSGIGQELGAGAYSMSDVLALPIFKQEESSLPPDNENKILPFQYVLCAATSPAVKLHDETLTYLNQGQSYEIRMLDNRKLGELPEINGKLVKSIFRVVFHDRRLQYTEHQQLEGWRWNRPGDRILDIDIPMSVGIIDPRANPTQLNTVEFLWDPAKRTSVFIQVHCISTEFTMRKHGGEKGVPFRVQIDTFKENENGEYTEHLHSASCQIKVFKPKGADRKQKTDREKMEKRTPHEKEKYQPSYETTILTECSPWPEITYVNNSPSPGFNSSHSSFSLGEGMVRPRLTIYVCQESLQLREQQQQQQQQQQKHEDGDSNGTFFVYHAIYLEELTAVELTEKIAQLFSISPCQISQIYKQGPTGIHVLISDEMIQNFQEEACFILDTMKAETNDSYHIILK

SEQ ID NO: 885138 - protein, 410 aa, Homo sapiens
DLEDPRYPYNRKLGELPEINGKLVKSIFRVVFHDRRLQYTEHQQLEGWRWNRPGDRILDIDIPMSVGIIDPRANPTQLNTVEFLWDPAKRTSVFIQVHCISTEFTMRKHGGEKGVPFRVQIDTFKENENGEYTEHLHSASCQIKVFKPKGADRKQKTDREKMEKRTPHEKEKYQPSYETTILTECSPWPEITYVNNSPSPGFNSSHSSFSLGEGNGSPNHQPEPPPPVTDNLLPTTTPQEAQQWLHRNRFSTFTRLFTNFSGADLLKLTRDDVIQICGPADGIRLFNALKGRMVRPRLTIYVCQESLQLREQQQQQQQQQQKHEDGDSNGTFFVYHAIYLEELTAVELTEKIAQLFSISPCQISQIYKQGPTGIHVLISDEMIQNFQEEACFILDTMKAETNDSYHIILK

SEQ ID NO: 885139 - protein, 401 aa, Homo sapiens
WGELQNSVKTLGETHPFTKLVVDLDRRLQYTEHQQLEGWRWNRPGDRILDIDIPMSVGIIDPRANPTQLNTVEFLWDPAKRTSVFIQVHCISTEFTMRKHGGEKGVPFRVQIDTFKENENGEYTEHLHSASCQIKVFKPKGADRKQKTDREKMEKRTPHEKEKYQPSYETTILTECSPWPEITYVNNSPSPGFNSSHSSFSLGEGNGSPNHQPEPPPPVTDNLLPTTTPQEAQQWLHRNRFSTFTRLFTNFSGADLLKLTRDDVIQICGPADGIRLFNALKGRMVRPRLTIYVCQESLQLREQQQQQQQQQQKHEDGDSNGTFFVYHAIYLEELTAVELTEKIAQLFSISPCQISQIYKQGPTGIHVLISDEMIQNFQEEACFILDTMKAETNDSYHIILK

SEQ ID NO: 885140 - protein, 439 aa, Homo sapiens
MAWALKLPLADEVIESGLVQDFDASLSGIGQELGAGAYSMSDVLALPIFKQEESSLPPDNENKILPFQYVLCAATSPAVKLHDETLTYLNQGQSYEIRMLDNRKLGELPEINGKLVKSIFRVVFHDRRLQYTEHQQLEGWRWNRPGDRILDIDIPMSVGIIDPRANPTQLNTVEFLWDPAKRTSVFIQVHCISTEFTMRKHGGEKGVPFRVQIDTFKENENGEYTEHLHSASCQIKVFKPKGADRKQKTDREKMEKRTPHEKEKYQPSYETTILTECSPWPEITYVNNSPSPGFNSSHSSFSLGEGNGSPNHQPEPPPPVTDNLLPTTTPQEAQQWLHRNRFSTFTRLFTNFSGADLLKLTRDDVIQICGPADGIRLFNALKGRMVRPRLTIYVCQESLQLREQQQQQQQQQQKHEDGDSNGTFFVYHAIYLEKKKKPP

SEQ ID NO: 885141 - protein, 124 aa, Homo sapiens
MAWALKLPLADEVIESGLVQDFDASLSGIGQELGAGAYSMSDVLALPIFKQEESSLPPDNENKILPFQYVLCAATSPAVKLHDETLTYLNQGQSYEIRMLDNRKLGELPEINGKLVKSIFRDPQ

SEQ ID NO: 885142 - protein, 502 aa, Homo sapiens; identical to SEQ ID NO: 885132

SEQ ID NO: 885143 - protein, 502 aa, Homo sapiens; identical to SEQ ID NO: 885132

SEQ ID NO: 885144 - protein, 484 aa, Homo sapiens
MAWALKLPLADEVIESGLVQDFDASLSGIGQELGAGAYSMSDVLALPIFKQEESSLPPDNENIHDETLTYLNQGQSYEIRMLDNRKLGELPEINGKLVKSIFRVVFHDRRLQYTEHQQLEGWRWNRPGDRILDIDIPMSVGIIDPRANPTQLNTVEFLWDPAKRTSVFIQVHCISTEFTMRKHGGEKGVPFRVQIDTFKENENGEYTEHLHSASCQIKVFKPKGADRKQKTDREKMEKRTPHEKEKYQPSYETTILTECSPWPEITYVNNSPSPGFNSSHSSFSLGEGNGSPNHQPEPPPPVTDNLLPTTTPQEAQQWLHRNRFSTFTRLFTNFSGADLLKLTRDDVIQICGPADGIRLFNALKGRMVRPRLTIYVCQESLQLREQQQQQQQQQQKHEDGDSNGTFFVYHAIYLEELTAVELTEKIAQLFSISPCQISQIYKQGPTGIHVLISDEMIQNFQEEACFILDTMKAETNDSYHIILK

SEQ ID NO: 885145 - protein, 502 aa, Homo sapiens; identical to SEQ ID NO: 885132

SEQ ID NO: 885146 - protein, 495 aa, Homo sapiens [sequence omitted]

SEQ ID NO: 885147 - protein, 341 aa, Homo sapiens
MAWALKLPLADEVIESGLVQDFDASLSGIGQELGAGAYSMSDVLALPIFKQEESSLPPDNENKILPFQYVLCAATSPAVKLHDETLTYLNQGQSYEIRMLDNRKLGELPEINGKLVKSIFRVVFHDRRLQYTEHQQLEGWRWNRPGDRILDIDIPMSVGIIDPRANPTQLNTVEFLWDPAKRTSVFIQVHCISTEFTMRKHGGEKGVPFRVQIDTFKENENGEYTEHLHSASCQIKVFKPKGADRKQKTDREKMEKRTPHEKEKYQPSYETTILTECSPWPEITYVNNSPSPGFNSSHSSFSLGEGTSYQQPHLRKLSSGCIEIVFLHSQGFSQTSQGQIY

SEQ ID NO: 885148 - protein, 184 aa, Homo sapiens
GRNRNPERPKLSAPLGQRVAAAGNAAPRRTGRPQRSALRGVLICLFSKKLNHSDNDQPPDYSFSKRMVRPRLTIYVCQESLQLREQQQQQQQQQQKHEDGDSNGTFFVYHAIYLEELTAVELTEKIAQLFSISPCQISQIYKQGPTGIHVLISDEMIQNFQEEACFILDTMKAETNDSYHIILK

SEQ ID NO: 885149 - protein, 389 aa, Homo sapiens
MAWALKLPLADEVIESGLVQDFDASLSGIGQELGAGAYSMSDVLALPIFKQEESSLPPDNENKILPFQYVLCAATSPAVKLHDETLTYLNQGQSYEIRMLDNRKLGELPEINGKLVKSIFRVVFHDRRLQYTEHQQLEGWRWNRPGDRILDIDIPMSVGIIDPRANPTQLNTVEFLWDPAKRTSVFIQVHCISTEFTMRKHGGEKGVPFRVQIDTFKENENGEYTEHLHSASCQIKVFKPKGADRKQKTDREKMEKRTPHEKEKYQPSYETTILTECSPWPEITYVNNSPSPGFNSSHSSFSLGEGNGSPNHQPEPPPPVTDNLLPTTTPQEAQQWLHRNRFSTFTRLFTNFSGADLLKLTRILALCVGPSSCGTHRLLPNMQFCSCFS

SEQ ID NO: 885150 - protein, 239 aa, Homo sapiens
MAWALKLPLADEVIESGLVQDFDASLSGIGQELGAGAYSMSDVLALPIFKQEESSLPPDNENKILPFQYVLCAATSPAVKLHDETLTYLNQGQSYEAFDMLDNRVFIMEFHCWRGSGTPSATPDLSPLTSATPSQTPVRLRRQQNQRLLRDTARTTSQLWTTSPWGSSQDPVSWHSHPAQNSSKILFTGQSPKKQGTYRGNPCTYLEGRRHVQVRSVPKREDLGAQSHTPEDRDSSGIP

SEQ ID NO: 885151 - protein, 485 aa, Homo sapiens
MATEPKKAAAQNSPEDEGLLIVKIEEEEFIHGQDTCLQRSELLKQELCRQLFRQFCYQDSPGPREALSRLRELCCQWLKPEIHTKEQILELLVLEQFLTILPGDLQAWVHEHYPESGEEAVTILEDLERGTDEAVLQVQAHEHGQEIFQKKVSPPGPALNVKLQPVETKAHFDSSEPQLLWDCDNESENSRSMPKLEIFEKIESQRIISGRISGYISEASGESQDICKSAGRVKRQWEKESGESQRLSSAQDEGFGKILTHKNTVRGEIISHDGCERRLNLNSNEFTHQKSCKHGTCDQSFKWNSDFINHQIIYAGEKNHQYGKSFKSPKLAKHAAVFSGDKTHQCNECGKAFRHSSKLARHQRIHTGERCYECNECGKSFAESSDLTRHRRIHTGERPFGCKECGRAFNLNSHLIRHQRIHTREKPYECSECGKTFRVSSHLIRHFRIHTGEKPYECSECGRAFSQSSNLSQHQRIHMRENLLM

SEQ ID NO: 885152 - protein, 485 aa, Homo sapiens; identical to SEQ ID NO: 885151

SEQ ID NO: 885153 - protein, 485 aa, Homo sapiens; identical to SEQ ID NO: 885151

SEQ ID NO: 885154 - protein, 485 aa, Homo sapiens; identical to SEQ ID NO: 885151

SEQ ID NO: 885155 - protein, 466 aa, Homo sapiens
MVMEKPSPLLVGREFVRQYYTLLNQAPDMLHRFYGKNSSYVHGGLDSNGKPADAVYGQKEIHRKVMSQNFTNCHTKIRHVDAHATLNDGVVVQVMGLLSNNNQALRRFMQTFVLAPEGSVANKFYVHNDIFRYQDEVFGGFVTEPQEESEEEVEEPEERQQTPEVVPDDSGTFYDQAVVSNDMEEHLEEPVAEPEPDPEPEPEQEPVSEIQEEKPEPVLEETAPEDAQKSSSPAPADIAQTVQEDLRTFSWASVTSKNLPPSGAVPVTGIPPHVVKVPASQPRPESKPESQIPPQRPQRDQRVREQRINIPPQRGPRPIREAGEQGDIEPRRMVRHPDSHQLFIGNLPHEVDKSELKDFFQSYGNVVELRINSGGKLPNFGFVVFDDSEPVQKVLSNRPIMFRGEVRLNVEEKKTRAAREGDRRDNRLRGPGGPRGGLGGGMRGPPRGGMVQKPGFGVGRGLAPRQ

SEQ ID NO: 885156 - protein, 466 aa, Homo sapiens; identical to SEQ ID NO: 885155

SEQ ID NO: 885157 - protein, 466 aa, Homo sapiens; identical to SEQ ID NO: 885155

SEQ ID NO: 885158 - protein, 494 aa, Homo sapiens
MRASELEPLGQAVPKFLTLRNCVELTKAMVMEKPSPLLVGREFVRQYYTLLNQAPDMLHRFYGKNSSYVHGGLDSNGKPADAVYGQKEIHRKVMSQNFTNCHTKIRHVDAHATLNDGVVVQVMGLLSNNNQALRRFMQTFVLAPEGSVANKFYVHNDIFRYQDEVFGGFVTEPQEESEEEVEEPEERQQTPEVVPDDSGTFYDQAVVSNDMEEHLEEPVAEPEPDPEPEPEQEPVSEIQEEKPEPVLEETAPEDAQKSSSPAPADIAQTVQEDLRTFSWASVTSKNLPPSGAVPVTGIPPHVVKVPASQPRPESKPESQIPPQRPQRDQRVREQRINIPPQRGPRPIREAGEQGDIEPRRMVRHPDSHQLFIGNLPHEVDKSELKDFFQSYGNVVELRINSGGKLPNFGFVVFDDSEPVQKVLSNRPIMFRGEVRLNVEEKKTRAAREGDRRDNRLRGPGGPRGGLGGGMRGPPRGGMVQKPGFGVGRGLAPRQ

SEQ ID NO: 885159 - protein, 466 aa, Homo sapiens; identical to SEQ ID NO: 885155

SEQ ID NO: 885160 - protein, 421 aa, Homo sapiens
MVMEKPADAVYGQKEIHRKVMSQNFTNCHTKIRHVDAHATLNDGVVVQVMGLLSNNNQALRRFMQTFVLAPEGSVANKFYVHNDIFRYQDEVFGGFVTEPQEESEEEVEEPEERQQTPEVVPDDSGTFYDQAVVSNDMEEHLEEPVAEPEPDPEPEPEQEPVSEIQEEKPEPVLEETAPEDAQKSSSPAPADIAQTVQEDLRTFSWASVTSKNLPPSGAVPVTGIPPHVVKVPASQPRPESKPESQIPPQRPQRDQRVREQRINIPPQRGPRPIREAGEQGDIEPRRMVRHPDSHQLFIGNLPHEVDKSELKDFFQSYGNVVELRINSGGKLPNFGFVVFDDSEPVQKVLSNRPIMFRGEVRLNVEEKKTRAAREGDRRDNRLRGPGGPRGGLGGGMRGPPRGGMVQKPGFGVGRGLAPRQ

SEQ ID NO: 885161 - protein, 446 aa, Homo sapiens
MVMEKPSPLLVGREFVRQYYTLLNQAPDMLHRFYGKNSSYVHGGLDSNGKPADAVYGQKEIHRKVMSQNFTNCHTKIRHVDAHATLNDGVVVQVMGLLSNNNQALRRFMQTFVLAPEGSVANKFYVHNDIFRYQDEVFGGFVTEPQEESEEEVEEPEERQQTPEVVPDDSGTFYDQAVVSNDMEEHLEEPVAEPEPDPEPEPEQEPVSEIQEEKPEPVLEETAPEDAQKSSSPAPADIAQTVQEDLRTFSWASVTSKNLPPSGAVPVTGIPPHVVKVPASQPRPESKPESQIPPQRPQRDQRVREQRINIPPQRGPRPIREAGEQGDIEPRRMVRHPDSHQLFIGNLPHEVDKSELKDFFQSYGNVVELRINSGGKLPNFGFVVFDDSEPVQKVLSNRPIMFRGEVRLNVEEKKTRAAREGDRRDNRLRGPGGPRAISPKECLAYY

SEQ ID NO: 885162 - protein, 284 aa, Homo sapiens [sequence omitted]

SEQ ID NO: 885163 - protein, 276 aa, Homo sapiens
MVMEKPSPLLVGREFVRQYYTLLNQAPDMLHRFYGKNSSYVHGGLDSNGKPADAVYGQKEIHRKVMSQNFTNCHTKIRHVDAHVVKVPASQPRPESKPESQIPPQRPQRDQRVREQRINIPPQRGPRPIREAGEQGDIEPRRMVRHPDSHQLFIGNLPHEVDKSELKDFFQSYGNVVELRINSGGKLPNFGFVVFDDSEPVQKVLSNRPIMFRGEVRLNVEEKKTRAAREGDRRDNRLRGPGGPRGGLGGGMRGPPRGGMVQKPGFGVGRGLAPRQ

SEQ ID NO: 885164 - protein, 154 aa, Homo sapiens
MVMEKPSPLLVGREFVRQYYTLLNQAPDMLHRFYGKNSSYVHGGLDSNGKPADAVYGQKEIHRKVMSQNFTNCHTKIRHVDAHATLNDGVVVQVMGLLSNNNQALRRFMQTFVLAPEGSVANKFYVHNPVQSLSLNLRFHHKDLSGIKECENNE

SEQ ID NO: 885165 - protein, 446 aa, Homo sapiens; identical to SEQ ID NO: 885161

SEQ ID NO: 885166 - protein, 533 aa, Homo sapiens
MVMEKPSPLLVGREFVRQYYTLLNQAPDMLHRFYGKNSSYVHGGLDSNGKPADAVYGQKEIHRKVMSQNFTNCHTKIRHVDAHATLNDGVVVQVMGLLSNNNQALRRFMQTFVLAPEGSVANKFYVHNDIFRYQDEVFGGFVTEPQEESEEEVEEPEERQQTPEVVPDDSGTFYDQAVVSNDMEEHLEEPVAEPEPDPEPEPEQEPVSEIQEEKPEPVLEETAPEDAQKSSSPAPADIAQTVQEDLRTFSWASVTSKNLPPSGAVPVTGIPPHVVKVPASQPRPESKPESQIPPQRPQRDQRVREQRINIPPQRGPRPIREAGEQGDIEPRRMVRHPDSHQLFIGNLPHEVDKSELKDFFQSYGNVVELRINSGGKLPNFGFVVFDDSEPVQKVLSNRPIMFRGEVRLNVEEKKTRAAREGDRRDNRLRGPGGPRGGLGGGMRGPPRGGMVQKPGFGVGRGLAPREKKIKGSLRQAYKNGNQKGRGKFIERAWGKRGERNERPGKKRDKGREKKKTRRGRGKKGGEEHQNGWE

SEQ ID NO: 885167 - protein, 333 aa, Homo sapiens
MVMEKPSPLLVGREFVRQYYTLLNQAPDMLHRFYGKNSSYVHGGLDSNGKPADAVYGQKEIHRKVMSQNFTNCHTKIRHVDAHATLNDGVVVQVMGLLSNNNQALRRFMQTFVLAPEGSVANKFYVHNDIFRYQDEVFGGFVTEPQEESEEEVEEPEERQQTPEVVPDDSGTFYDQAVVSNDMEEHLEEPVAEPEPDPEPEPEQEPVSEIQEEKPEPVLEETAPEDAQKSSSPAPADIAQTVQEDLRTFSWASVTSKNLPPSGAVPVTGIPPHVVKVPASQPRPESKPESQIPPQRPQRDQRVREQRINIPPQRGPRPSKSSEGRFLVWGILR

SEQ ID NO: 885168 - protein, 170 aa, Homo sapiens
MVMEKPSPLLVGREFVRQYYTLLNQAPDMLHRFYGKNSSYVHGGLDSNGKPADAVYGQKEIHRKVMSQNFTNCHTKIRHVDAHATLNDGVVVQPFPQRNVLHITDIWYVSFIGIFLIFYVFEKPVRNTGFDNILKAGKTQIVSSLRVMTTFWCGEIAIGKFDNFDSHWYV

SEQ ID NO: 885169 - protein, 180 aa, Homo sapiens
MVMEKPSPLLVGREFVRQYYTLLNQAPDMLHRFYGKNSSYVHGGLDSNGKPADAVYGQKEIHRKVMSQNFTNCHTKIRHVDAHATLNDGVVVQVMGLLSNNNQALRRFMQTFVLAPEGSVANKFYVHNDIFRYQDEVFGGFVTEPQEESEEEVEEPEERQQTPEVVPDDSGTFYDQAVVR

SEQ ID NO: 885170 - protein, 154 aa, Homo sapiens; identical to SEQ ID NO: 885164

SEQ ID NO: 885171 - protein, 125 aa, Homo sapiens
MVMEKPSPLLVGREFVRQYYTLLNQAPDMLHRFYGKNSSYVHGGLDSNGKPADAVYGQKEIHRKVMSQNFTNCHTKIRHVDAHATLNDGVVVQVMGLLSNNNQALRRFMQTFVLAPEVCVGMIIL

SEQ ID NO: 885172 - protein, 466 aa, Homo sapiens; identical to SEQ ID NO: 885155

SEQ ID NO: 885173 - protein, 476 aa, Homo sapiens
MVMEKPSPLLVGREFVRQYYTLLNQAPDMLHRFYGKNSSYVHGGLDSNGKPADAVYGQKEIHRKVMSQNFTNCHTKIRHVDAHATLNDGVVVQVMGLLSNNNQALRRFMQTFVLAPEGSVANKFYVHNDIFRYQDEVFGGFVTEPQEESEEEVEEPEERQQTPEVVPDDSGTFYDQAVVRMIFLKFSCQSNDMEEHLEEPVAEPEPDPEPEPEQEPVSEIQEEKPEPVLEETAPEDAQKSSSPAPADIAQTVQEDLRTFSWASVTSKNLPPSGAVPVTGIPPHVVKVPASQPRPESKPESQIPPQRPQRDQRVREQRINIPPQRGPRPIREAGEQGDIEPRRMVRHPDSHQLFIGNLPHEVDKSELKDFFQSYGNVVELRINSGGKLPNFGFVVFDDSEPVQKVLSNRPIMFRGEVRLNVEEKKTRAAREGDRRDNRLRGPGGPRGGLGGGMRGPPRGGMVQKPGFGVGRGLAPRQ

SEQ ID NO: 885174 - protein, 473 aa, Homo sapiens [sequence omitted]

SEQ ID NO: 885175 - protein, 401 aa, Homo sapiens [sequence omitted]

SEQ ID NO: 885176 - protein, 262 aa, Homo sapiens
TTVLAELCLQVLEKNSSEHPQGQLLLGLAQAFPLAFQIQEDLRTFSWASVTSKNLPPSGAVPVTGIPPHVVKVPASQPRPESKPESQIPPQRPQRDQRVREQRINIPPQRGPRPIREAGEQGDIEPRRMVRHPDSHQLFIGNLPHEVDKSELKDFFQSYGNVVELRINSGGKLPNFGFVVFDDSEPVQKVLSNRPIMFRGEVRLNVEEKKTRAAREGDRRDNRLRGPGGPRGGLGGGMRGPPRGGMVQKPGFGVGRGLAPRQ

SEQ ID NO: 885177 - protein, 410 aa, Homo sapiens
MVMEKPSPLLVGREFVRQYYTLLNQAPDMLHRFYGKNSSYVHGGLDSNGKPADAVYGQKEIHRKVMSQNFTNCHTKIRHVDAHATLNDGVVVQVMGLLSNNNQALRRFMQTFVLAPEGSVANKFYVHNDIFRYQDEVFGGFVTEPQEESEEEVEEPEERQQTPEVVPDDSGTFYDQAVVSNDMEEHLEEPVAEPEPDPEPEPEQEPVSEIQEEKPEPVLEETAPEDAQKSSSPAPADIAQTVQEDLRTFSWASVTSKNLPPSGAVPVTGIPPHVVKVPASQPRPESKPESQIPPQRPQRDQRVREQRINIPPQRGPRPIREAGEQGDIEPRRMPFPQRNVLHITDIWYVSFIGIFLIFYVFEKPVRNTGFDNILKAGKTQIVSSLRVMTTFWCGEIAIGKFDNFDSHWYV

SEQ ID NO: 885178 - protein, 146 aa, Homo sapiens
MVMEKPSPLLVGREFVRQYYTLLNQAPDMLHRFYGKNSSYVHGGLDSNGKPADAVYGQKEIHRKVMSQNFTNCHTKIRHVDAHATLNDGVVVQVMGLLSNNNQALRRFMQTFVLAPEGSVANKFYVHNDIFRYQDLSGIKECENNE

SEQ ID NO: 885179 - protein, 369 aa, Homo sapiens
MVMEKPSPLLVGREFVRQYYTLLNQAPDMLHRFYGKNSSYVHGGLDSNGKPADAVYGQKEIHRKVMSQNFTNCHTKIRHVDAHATLNDGVVVQVMGLLSNNNQALRRFMQTFVLAPEGSVANKFYVHNDIFRYQDEVFGGFVTEPQEESEEEVEEPEERQQTPEVVPDDSGTFYDQAVVSNDMEEHLEEPVAEPEPDPEPEPEQEPVSEIQEEKPEPVLEETAPEDAQKSSSPAPADIAQTVQEDLRTFSWASVTSKNLPPSGAVPVTGIPPHVVKVPASQPRPESKPESQIPPQRPQRDQRVREQRINIPPQRGPRPIREAGEQGDIEPRRMVRHPDSHQLFIGNLPHEVDKSELKDFFQSRLLSFEH

SEQ ID NO: 885180 - protein, 535 aa, Homo sapiens
MVMEKPSPLLVGREFVRQYYTLLNQAPDMLHRFYGKNSSYVHGGLDSNGKPADAVYGQKEIHRKVMSQNFTNCHTKIRHVDAHATLNDGVVVQVMGLLSNNNQALRRFMQTFVLAPEGSVANKFYVHNDIFRYQDEVFGGFVTEPQEESEEEVEEPEERQQTPEVVPDDSGTFYDQAVVSNDMEEHLEEPVAEPEPDPEPEPEQEPVSEIQEEKPEPVLEETAPEDAQKSSSPAPADIAQTVQEDLRTFSWASVTSKNLPPSGAVPVTGIPPHVVKVPASQPRPESKPESQIPPQRPQRDQRVREQRINIPPQRGPRPILQAGETSADSLKPPEHMAETTPDQITQTSYHYGTTLHYTRHDANNTQGQLKRIHTQKLNGHTPRGKQHGRTTKPNEHDKGTTKPKTLQTPQNHTTIHPATLATTPRTQNTKQRHHPNNRPAKTDRTRNHTPHTKRTATDTGQRKTQAETDARNRERAETRGEKQARNNKGPEQTTGKPKPQTADRETKREDHKGDTDDEGNKRGRETRRDREKHKA

SEQ ID NO: 885181 - protein, 73 aa, Homo sapiens
QARASPAQGGERARLPRGRGRRPCSFSSASLPRHRRSTCFISKILSKTPRETLVTCLSIVLFGYWSLLVPICY

SEQ ID NO: 885182 - protein, 125 aa, Homo sapiens; identical to SEQ ID NO: 885171

SEQ ID NO: 885183 - protein, 390 aa, Homo sapiens
MGPPPGAGVSCRGGCGFSRLLAWCFLLALSPQAPGSRGAEAVWTAYLNVSWRVPHTGVNRTVWELSEEGVYGQDSPLEPVAGVLVPPDGPGALNACNPHTNFTVPTVWGSTVQVSWLALIQRGGGCTFADKIHLAYERGASGAVIFNFPGTRNEVIPMSHPGAVDIVAIMIGNLKGTKILQSIQRGIQVTMVIEVGKKHGPWVNHYSIFFVSVSFFIITAATVGYFIFYSARRLRNARAQSRKQRQLKADAKKAIGRLQLRTLKQGDKEIGPDGDSCAVCIELYKPNDLVRILTCNHIFHKTCVDPWLLEHRTCPMCKCDILKAWELRWMLKMDQCLYKSLYPMKYLIVPPPMKRIIAARPHHLDMLQYREQMNRLWRNTCSQQMKVYSW

SEQ ID NO: 885184 - protein, 390 aa, Homo sapiens; identical to SEQ ID NO: 885183

SEQ ID NO: 885185 - protein, 551 aa, Homo sapiens
MAAPALSWRLPLLILLLPLATSWASAAVNGTSQFTCFYNSRANISCVWSQDGALQDTSCQVHAWPDRRRWNQTCELLPVSQASWACNLILGAPDSQKLTTVDIVTLRVLCREGVRWRVMAIQDFKPFENLRLMAPISLQVVHVETHRCNISWEISQASHYFERHLEFEARTLSPGHTWEEAPLLTLKQKQEWICLETLTPDTQYEFQVRVKPLQGEFTTWSPWSQPLAFRTKPAALGKDTIPWLGHLLVGLSGAFGFIILVYLLINCRNTGPWLKKVLKCNTPDPSKFFSQLSSEHGGDVQKWLSSPFPSSSFSPGGLAPEISPLEVLERDKVTQLLLQQDKVPEPASLSSNHSLTSCFTNQGYFFFHLPDALEIEACQVYFTYDPYSEEDPDEGVAGAPTGSSPQPLQPLSGEDDAYCTFPSRDDLLLFSPSLLGGPSPPSTAPGGSGAGEERMPPSLQERVPRDWDPQPLGPPTPGVPDLVDFQPPPELVLREAGEEVPDAGPREGVSFPWSRPPGQGEFRALNARLPLNTDAYLSLQELQGQDPTHLV

SEQ ID NO: 885186 - protein, 594 aa, Homo sapiens
SQSSAGPWRDGHGPSTGEDWRARAATAPCLSQGFLPRLHPVDVMAAPALSWRLPLLILLLPLATSWASAAVNGTSQFTCFYNSRANISCVWSQDGALQDTSCQVHAWPDRRRWNQTCELLPVSQASWACNLILGAPDSQKLTTVDIVTLRVLCREGVRWRVMAIQDFKPFENLRLMAPISLQVVHVETHRCNISWEISQASHYFERHLEFEARTLSPGHTWEEAPLLTLKQKQEWICLETLTPDTQYEFQVRVKPLQGEFTTWSPWSQPLAFRTKPAALGKDTIPWLGHLLVGLSGAFGFIILVYLLINCRNTGPWLKKVLKCNTPDPSKFFSQLSSEHGGDVQKWLSSPFPSSSFSPGGLAPEISPLEVLERDKVTQLLLQQDKVPEPASLSSNHSLTSCFTNQGYFFFHLPDALEIEACQVYFTYDPYSEEDPDEGVAGAPTGSSPQPLQPLSGEDDAYCTFPSRDDLLLFSPSLLGGPSPPSTAPGGSGAGEERMPPSLQERVPRDWDPQPLGPPTPGVPDLVDFQPPPELVLREAGEEVPDAGPREGVSFPWSRPPGQGEFRALNARLPLNTDAYLSLQELQGQDPTHLV

SEQ ID NO: 885187 - protein, 594 aa, Homo sapiens; identical to SEQ ID NO: 885186

SEQ ID NO: 885188 - protein, 365 aa, Homo sapiens
MNITNCTTEASMAIRPKTITEKMLICMTLVVITTLTTLLNLAVIMAIGTTKKLHQPANYLICSLAVTDLLVAVLVMPLSIIYIVMDRWKLGYFLCEVWLSVDMTCCTCSILHLCVIALDRYWAITNAIEYARKRTAKRAALMILTVWTISIFISMPPLFWRSHRRLSPPPSQCTIQHDHVIYTIYSTLGAFYIPLTLILILYYRIYHAAKSLYQKRGSSRHLSNRSTDSQNSFASCKLTQTFCVSDFSTSDPTTEFEKFHASIRIPPFDNDLDHPGERQQISSTRERKAARILGLILGAFILSWLPFFIKELIVGLSIYTVSSEVADFLTWLGYVNSLINPLLYTSFNEDFKLAFKKLIRCREHT

SEQ ID NO: 885189 - protein, 129 aa, Homo sapiens
EYLGAATSSSQYHLPHTRAHLFIPHPPPPSPFTVSREAATCVDDLADCPCPCSCSCSSSSSSPLSPSRLLFQSRRPDSANAAPCHQRCLGLPGAPRSQVLSRRTPAGTGAGKDAGGENALGSTYSRIEC

SEQ ID NO: 885190 - protein, 365 aa, Homo sapiens; identical to SEQ ID NO: 885188

SEQ ID NO: 885191 - protein, 365 aa, Homo sapiens; identical to SEQ ID NO: 885188

SEQ ID NO: 885192 - protein, 120 aa, Homo sapiens
MWASELRGPGCADSLNAALAHSPLRNRQCRGFPGGGHSIQPLYTPRAPAAAPPPPHKMAAPIEETAAASPAPFCGRREICQHGKPLLRMHPSLETPLKGWSLGDHIKRKMPTTSTTSTRF

SEQ ID NO: 885193 - protein, 120 aa, Homo sapiens; identical to SEQ ID NO: 885192

SEQ ID NO: 885194 - protein, 120 aa, Homo sapiens; identical to SEQ ID NO: 885192

SEQ ID NO: 885195 - protein, 120 aa, Homo sapiens; identical to SEQ ID NO: 885192

SEQ ID NO: 885196 - protein, 2392 aa, Homo sapiens
MKKLLPNMLSPDPRELQKSIEVQLLRSSVCLATALNPIEQDQKWQSITENVVKYLKQTSRIAIGPLRLSTLTVSQSLPVLSTLQLYCSSALENTVSNRLSTEDCLIPLFSEALRSCKQHDVRPWMQALRYTMYQNQLLEKIKEQTVPIRSHLMELGLTAAKFARKRGNVSLATRLLAQCSEVQLGKTTTAQDLVQHFKKLSTQGQVDEKWGPELDIEKTKLLYTAGQSTHAMEMLSSCAISFCKSVKAEYAVAKSILTLAKWIQAEWKEISGQLKQVYRAQHQQNFTGLSTLSKNILTLIELPSVNTMEEEYPRIESESTVHIGVGEPDFILGQLYHLSSVQAPEVAKSWAALASWAYRWGRKVVDNASQGEGVRLLPREKSEVQNLLPDTITEEEKERIYGILGQAVCRPAGIQDEDITLQITESEDNEEDDMVDVIWRQLISSCPWLSELDESATEGVIKVWRKVVDRIFSLYKLSCSAYFTFLKLNAGQIPLDEDDPRLHLSHRVEQSTDDMIVMATLRLLRLLVKHAGELRQYLEHGLETTPTAPWRGIIPQLFSRLNHPEVYVRQSICNLLCRVAQDSPHLILYPAIVGTISLSSESQASGNKFSTAIPTLLGNIQGEELLVSECEGGSPPASQDSNKDEPKSGLNEDQAMMQDCYSKIVDKLSSANPTMVLQVQMLVAELRRVTVLWDELWLGVLLQQHMYVLRRIQQLEDEVKRVQNNNTLRKEEKIAIMREKHTALMKPIVFALEHVRSITAAPAETPHEKWFQDNYGDAIENALEKLKTPLNPAKPGSSWIPFKEIMLSLQQRAQKRASYILRLEEISPWLAAMTNTEIALPGEVSARDTVTIHSVGGTITILPTKTKPKKLLFLGSDGKSYPYLFKGLEDLHLDERIMQFLSIVNTMFATINRQETPRFHARHYSVTPLGTRSGLIQWVDGATPLFGLYKRWQQREAALQAQKAQDSYQTPQNPGIVPRPSELYYSKIGPALKTVGLSLDVSRRDWPLHVMKAVLEELMEATPPNLLAKELWSSCTTPDEWWRVTQSYARSTAVMSMVGYIIGLGDRHLDNVLIDMTTGEVVHIDYNVCFEKGKSLRVPEKVPFRMTQNIETALGVTGVEGVFRLSCEQVLHIMRRGRETLLTLLEAFVYDPLVDWTAGGEAGFAGAVYGGGGQQAESKQSKREMEREITRSLFSSRVAEIKVNWFKNRDEMLVVLPKLDGSLDEYLSLQEQLTDVEKLQGKLLEEIEFLEGAEGVDHPSHTLQHRYSEHTQLQTQQRAVQEAIQVKLNEFEQWITHYQAAFNNLEATQLASLLQEISTQMDLGPPSYVPATAFLQNAGQAHLISQCEQLEGEVGALLQQRRSVLRGCLEQLHHYATVALQYPKAIFQKHRIEQWKTWMEELICNTTVERCQELYRKYEMQYAPQPPPTVCQFITATEMTLQRYAADINSRLIRQVERLKQEAVTVPVCEDQLKEIERCIKVFLHENGEEGSLSLASVIISALCTLTRRNLMMEGAASSAGEQLVDLTSRDGAWFLEELCSMSGNVTCLVQLLKQCHLVPQDLDIPNPMEASETVHLANGVYTSLQELNSNFRQIIFPEALRCLMKGEYTLESMLHELDGLIEQTTDGVPLQTLVESLQAYLRNAAMGLEEETHAHYIDVARLLHAQYGELIQPRNGSVDETPKMSAGQMLLVAFDGMFAQVETAFSLLVEKLNKMEIPIAWRKIDIIREARSTQVNFFDDDNHRQVLEEIFFLKRLQTIKEFFRLCGTFSRTLSGSSSLEDQNTVNGPVQIVNVKTLFRNSCFSEDQMAKPIKAFTADFVRQLLIGLPNQALGLTLCSFISALGVDIIAQVEAKDFGAESKVSVDDLCKKAVEHNIQIGKFSQLVMNRATVLASSYDTAWKKHDLVRRLETSISSCKTSLQRVQLHIAMFQWQHEDLLINRPQAMSVTPPPRSAILTSMKKKLHTLSQIETSIATVQEKLAALESSIEQRLKWAGGANPALAPVLQDFEATIAERRNLVLKESQRASQVTFLCSNIIHFESLRTRTAEALNLDAALFELIKRCQQMCSFASQFNSSVSELELRLLQRVDTGLEHPIGSSEWLLSAHKQLTQDMSTQRAIQTEKEQQIETVCETIQNLVDNIKTVLTGHNRQLGDVKHLLKAMAKDEEAALADGEDVPYENSVRQFLGEYKSWQDNIQTVLFTLVQAMGQVRSQEHVEMLQEITPTLKELKTQSQSIYNNLVSFASPLVTDATNECSSPTSSATYQPSFAAAVRSNTGQKTQPDVMSQNARKLIQKNLATSADTPPSTVPGTGKSVACSPKKAVRDPKTGKAVQERNSYAVSVWKRVKAKLEGRDVDPNRRMSVAEQVDYVIKEATNLDNLAQLYEGWTAWV

SEQ ID NO: 885197 - protein, 185 aa, Homo sapiens [sequence omitted]

SEQ ID NO: 885198 - protein, 2352 aa, Homo sapiens
MKKLLPNMLSPDPRELQKSIEVQLLRSSVCLATALNPIEQDQKWQSITENVVKYLKQTSRIAIGPLRLSTLTVSQSLPVLSTLQLYCSSALENTVSNRLSTEDCLIPLFSEALRSCKQHDVRPWMQALRYTMYQNQLLEKIKEQTVPIRSHLMELGLTAAKFARKRGNVSLATRLLAQCSEVQLGKTTTAQDLVQHFKKLSTQGQVDEKWGPELDIEKTKLLYTAGQSTHAMEMLSSCAISFCKSVKAEYAVAKSILTLAKWIQAEWKEISGQLKQVYRAQHQQNFTGLSTLSKNILTLIELPSVNTMEEEYPRIESESTVHIGVGEPDFILGQLYHLSSVQAPEVAKSWAALASWAYRWGRKVVDNASQGEGVRLLPREKSEVQNLLPDTITEEEKERIYGILGQAVCRPAGIQDEDITLQITESEDNEEDDMVDVIWRQLISSCPWLSELDESATEGVIKVWRKVVDRIFSLYKLSCSAYFTFLKLNAGQIPLDEDDPRLHLSHRVEQSTDDMIVMATLRLLRLLVKHAGELRQYLEHGLETTPTAPWRGIIPQLFSRLNHPEVYVRQSICNLLCRVAQDSPHLILYPAIVGTISLSSESQASGNKFSTAIPTLLGNIQGEELLVSECEGGSPPASQDSNKDEPKSGLNEDQAMMQDCYSKIVDKLSSANPTMVLQVQMLVAELRRVTVLWDELWLGVLLQQHMYVLRRIQQLEDEVKRVQNNNTLRKEEKIAIMREKHTALMKPIVFALEHVRSITAAPAETPHEKWFQDNYGDAIENALEKLKTPLNPAKPGSSWIPFKEIMLSLQQRAQKRASYILRLEEISPWLAAMTNTEIALPGEVSARDTVTIHSVGGTITILPTKTKPKKLLFLGSDGKSYPYLFKGLEDLHLDERIMQFLSIVNTMFATINRQETPRFHARHYSVTPLGTRSGLIQWVDGATPLFGLYKRWQQREAALQAQKAQDSYQTPQNPGIVPRPSELYYSKIGPALKTVGLSLDVSRRDWPLHVMKAVLEELMEATPPNLLAKELWSSCTTPDEWWRVTQSYARSTAVMSMVGYIIGLGDRHLDNVLIDMTTGEVVHIDYNVCFEKGKSLRVPEKVPFRMTQNIETALGVTGVEGVFRLSCEQVLHIMRRGRETLLTLLEAFVYDPLVDWTAGGEAGFAGAVYGGGGQQAESKQSKREMEREITRSLFSSRVAEIKVNWFKNRDEMLVVLPKLDGSLDEYLSLQEQLTDVEKLQGKLLEEIEFLEGAEGVDHPSHTLQHRYSEHTQLQTQQRAVQEAIQVKLNEFEQWITHYQAAFNNLEATQLASLLQEISTQMDLGPPSYVPATAFLQNAGQAHLISQCEQLEGEVGALLQQRRSVLRGCLEQLHHYATVALQYPKAIFQKHRIEQWKTWMEELICNTTVERCQELYRKYEMQYAPQPPPTVCQFITATEMTLQRYAADINSRLIRQVERLKQEAVTVPVCEDQLKEIERCIKVFLHENGEEGSLSLASVIISALCTLTRRNLMMEGAASSAGEQLVDLTSRDGAWFLEELCSMSGNVTCLVQLLKQCHLVPQDLDIPNPMEASETVHLANGVYTSLQELNSNFRQIIFPEALRCLMKGEYTLESMLHELDGLIEQTTDGVPLQTLVESLQAYLRNAAMGLEEETHAHYIDVARLLHAQYGELIQPRNGSVDETPKMSAGQMLLVAFDGMFAQVETAFSLLVEKLNKMEIPIAWRKIDIIREARSTQVNFFDDDNHRQVLEEIFFLKRLQTIKEFFRLCGTFSRTLSGSSSLEDQNTVNGPVQIVNVKTLFRNSCFSEDQMAKPIKAFTADFVRQLLIGLPNQALGLTLCSFISALGVDIIAQVEAKDFGAESKVSVDDLCKKAVEHNIQIGKFSQLVMNRATVLASSYDTAWKKHDLVRRLETSISSCKTSLQRVQLHIAMFQWQHEDLLINRPQAMSVTPPPRSAILTSMKKKLHTLSQIETSIATVQEKLAALESSIEQRLKWAGGANPALAPVLQDFEATIAERRNLVLKESQRASQVTFLCSNIIHFESLRTRTAEALNLDAALFELIKRCQQMCSFASQFNSSVSELELRLLQRVDTGLEHPIGSSEWLLSAHKQLTQDMSTQRAIQTEKEQQIETVCETIQNLVDNIKTVLTGHNRQLGDVKHLLKAMAKDEEAALADGEDVPYENSVRQFLGEYKSWQDNIQTVLFTLVQAMGQVRSQEHVEMLQEITPTLKELKTQSQSIYNNLVSFASPLVTDATNECSSPTSSATYQPSFAAAVRSNTGQKTQPDVMSQNARKLIQKNLATSADTPPSTVPGTGKSVACSPKKAVRDPKTGKAVNEGNSYSGSWWIVYRVAYH

SEQ ID NO: 885199 - protein, 2236 aa, Homo sapiens
MKKLLPNMLSPDPRELQKSIEVQLLRSSVCLATALNPIEQDQKWQSITENVVKYLKQTSRIAIGPLRLSTLTVSQSLPVLSTLQLYCSSALENTVSNRLSTEDCLIPLFSEALRSCKQHDVRPWMQALRYTMYQNQLLEKIKEQTVPIRSHLMELGLTAAKFARKRGNVSLATRLLAQCSEVQLGKTTTAQDLVQHFKKLSTQGQVDEKWGPELDIEKTKLLYTAGQSTHAMEMLSSCAISFCKSVKAEYAVAKSILTLAKWIQAEWKEISGQLKQVYRAQHQQNFTGLSTLSKNILTLIELPSVNTMEEEYPRIESESTVHIGVGEPDFILGQLYHLSSVQAPEVAKSWAALASWAYRWGRKVVDNASQGEGVRLLPREKSEVQNLLPDTITEEEKERIYGILGQAVCRPAGIQDEDITLQITESEDNEEDDMVDVIWRQLISSCPWLSELDESATEGVIKVWRKVVDRIFSLYKLSCSAYFTFLKLNAGQIPLDEDDPRLHLSHRVEQSTDDMIVMATLRLLRLLVKHAGELRQYLEHGLETTPTAPWRGIIPQLFSRLNHPEVYVRQSICNLLCRVAQDSPHLILYPAIVGTISLSSESQASGNKFSTAIPTLLGNIQGEELLVSECEGGSPPASQDSNKDEPKSGLNEDQAMMQDCYSKIVDKLSSANPTMVLQVQMLVAELRRVTVLWDELWLGVLLQQHMYVLRRIQQLEDEVKRVQNNNTLRKEEKIAIMREKHTALMKPIVFALEHVRSITAAPAETPHEKWFQDNYGDAIENALEKLKTPLNPAKPGSSWIPFKEIMLSLQQRAQKRASYILRLEEISPWLAAMTNTEIALPGEVSARDTVTIHSVGGTITILPTKTKPKKLLFLGSDGKSYPYLFKGLEDLHLDERIMQFLSIVNTMFATINRQETPRFHARHYSVTPLGTRSGLIQWVDGATPLFGLYKRWQQREAALQAQKAQDSYQTPQNPGIVPRPSELYYSKIGPALKTVGLSLDVSRRDWPLHVMKAVLEELMEATPPNLLAKELWSSCTTPDEWWRVTQSYARSTAVMSMVGYIIGLGDRHLDNVLIDMTTGEVVHIDYNVCFEKGKSLRVPEKVPFRMTQNIETALGVTGVEGVFRLSCEQVLHIMRRGRETLLTLLEAFVYDPLVDWTAGGEAGFAGAVYGGGGQQAESKQSKREMEREITRSLFSSRVAEIKVNWFKNRDEMLVVLPKLDGSLDEYLSLQEQLTDVEKLQGKLLEEIEFLEGAEGVDHPSHTLQHRYSEHTQLQTQQRAVQEAIQVKLNEFEQWITHYQAAFNNLEATQLASLLQEISTQMDLGPPSYVPATAFLQNAGQAHLISQCEQLEGEVGALLQQRRSVLRGCLEQLHHYATVALQYPKAIFQKHRIEQWKTWMEELICNTTVERCQELYRKYEMQYAPQPPPTVCQFITATEMTLQRYAADINSRLIRQVERLKQEAVTVPVCEDQLKEIERCIKVFLHENGEEGSLSLASVIISALCTLTRRNLMMEGAASSAGEQLVDLTSRDGAWFLEELCSMSGNVTCLVQLLKQCHLVPQDLDIPNPMEASETVHLANGVYTSLQELNSNFRQIIFPEALRCLMKGEYTLESMLHELDGLIEQTTDGVPLQTLVESLQAYLRNAAMGLEEETHAHYIDVARLLHAQYGELIQPRNGSVDETPKMSAGQMLLVAFDGMFAQVETAFSLLVEKLNKMEIPIAWRKIDIIREARSTQVNFFDDDNHRQVLEEIFFLKRLQTIKEFFRLCGTFSRTLSGSSSLEDQNTVNGPVQIVNVKTLFRNSCFSEDQMAKPIKAFTADFVRQLLIGLPNQALGLTLCSFISALGVDIIAQVEAKDFGAESKVSVDDLCKKAVEHNIQIGKFSQLVMNRATVLASSYDTAWKKHDLVRRLETSISSCKTSLQRVQLHIAMFQWQHEDLLINRPQAMSVTPPPRSAILTSMKKKLHTLSQIETSIATVQEKLAALESSIEQRLKWAGGANPALAPVLQDFEATIAERRNLVLKESQRASQVTFLCSNIIHFESLRTRTAEALNLDAALFELIKRCQQMCSFASQFNSSVSELELRLLQRVDTGLEHPIGSSEWLLSAHKQLTQDMSTQRAIQTEKEQQIETVCETIQNLVDNIKTVLTGHNRQLGDVKHLLKAMAKDEEAALADGEDVPYENSVRQFLGEYKSWQDNIQTVLFTLVQAMGQVRSQEHVEMLQEITPTLKELKTQSQR

SEQ ID NO: 885200 - protein, 1274 aa, Homo sapiens
MKKLLPNMLSPDPRELQKSIEVQLLRSSVCLATALNPIEQDQKWQSITENVVKYLKQTSRIAIGPLRLSTLTVSQSLPVLSTLQLYCSSALENTVSNRLSTEDCLIPLFSEALRSCKQHDVRPWMQALRYTMYQNQLLEKIKEQTVPIRSHLMELGLTAAKFARKRGNVSLATRLLAQCSEVQLGKTTTAQDLVQHFKKLSTQGQVDEKWGPELDIEKTKLLYTAGQSTHAMEMLSSCAISFCKSVKAEYAVAKSILTLAKWIQAEWKEISGQLKQVYRAQHQQNFTGLSTLSKNILTLIELPSVNTMEEEYPRIESESTVHIGVGEPDFILGQLYHLSSVQAPEVAKSWAALASWAYRWGRKVVDNASQGEGVRLLPREKSEVQNLLPDTITEEEKERIYGILGQAVCRPAGIQDEDITLQITESEDNEEDDMVDVIWRQLISSCPWLSELDESATEGVIKVWRKVVDRIFSLYKLSCSAYFTFLKLNAGQIPLDEDDPRLHLSHRVEQSTDDMIVMATLRLLRLLVKHAGELRQYLEHGLETTPTAPWRGIIPQLFSRLNHPEVYVRQSICNLLCRVAQDSPHLILYPAIVGTISLSSESQASGNKFSTAIPTLLGNIQGEELLVSECEGGSPPASQDSNKDEPKSGLNEDQAMMQDCYSKIVDKLSSANPTMVLQVQMLVAELRRVTVLWDELWLGVLLQQHMYVLRRIQQLEDEVKRVQNNNTLRKEEKIAIMREKHTALMKPIVFALEHVRSITAAPAETPHEKWFQDNYGDAIENALEKLKTPLNPAKPGSSWIPFKEIMLSLQQRAQKRASYILRLEEISPWLAAMTNTEIALPGEVSARDTVTIHSVGGTITILPTKTKPKKLLFLGSDGKSYPYLFKGLEDLHLDERIMQFLSIVNTMFATINRQETPRFHARHYSVTPLGTRSGLIQWVDGATPLFGLYKRWQQREAALQAQKAQDSYQTPQNPGIVPRPSELYYSKIGPALKTVGLSLDVSRRDWPLHVMKAVLEELMEATPPNLLAKELWSSCTTPDEWWRVTQSYARSTAVMSMVGYIIGLGDRHLDNVLIDMTTGEVVHIDYNVCFEKGKSLRVPEKVPFRMTQNIETALGVTGVEGVFRLSCEQVLHIMRRGRETLLTLLEAFVYDPLVDWTAGGEAGFAGAVYGGGGQQAESKQSKREMEREITRSLFSSRVAEIKVKPSDGISHCLLFINRVNMLIKMLRQIVSLIFLAKLMYNIEMAVKYGSLRPACPTLVWATLNPVSTKNTNKT

SEQ ID NO: 885201 - protein, 887 aa, Homo sapiens
MKKLLPNMLSPDPRELQKSIEVQLLRSSVCLATALNPIEQDQKWQSITENVVKYLKQTSRIAIGPLRLSTLTVSQSLPVLSTLQLYCSSALENTVSNRLSTEDCLIPLFSEALRSCKQHDVRPWMQALRYTMYQNQLLEKIKEQTVPIRSHLMELGLTAAKFARKRGNVSLATRLLAQCSEVQLGKTTTAQDLVQHFKKLSTQGQVDEKWGPELDIEKTKLLYTAGQSTHAMEMLSSCAISFCKSVKAEYAVAKSILTLAKWIQAEWKEISGQLKQVYRAQHQQNFTGLSTLSKNILTLIELPSVNTMEEEYPRIESESTVHIGVGEPDFILGQLYHLSSVQAPEVAKSWAALASWAYRWGRKVVDNASQGEGVRLLPREKSEVQNLLPDTITEEEKERIYGILGQAVCRPAGIQDEDITLQITESEDNEEDDMVDVIWRQLISSCPWLSELDESATEGVIKVWRKVVDRIFSLYKLSCSAYFTFLKLNAGQIPLDEDDPRLHLSHRVEQSTDDMIVMATLRLLRLLVKHAGELRQYLEHGLETTPTAPWRGIIPQLFSRLNHPEVYVRQSICNLLCRVAQDSPHLILYPAIVGTISLSSESQASGNKFSTAIPTLLGNIQGEELLVSECEGGSPPASQDSNKDEPKSGLNEDQAMMQDCYSKIVDKLSSANPTMVLQVQMLVAELRRVTVLWDELWLGVLLQQHMYVLRRIQQLEDEVKRVQNNNTLRKEEKIAIMREKHTALMKPIVFALEHVRSITAAPAETPHEKWFQDNYGDAIENALEKLKTPLNPAKPGSSWIPFKEVQNNPKHATEMAHHSSHEIRNFNKWTSYLECKRFYKPIGGSLWPVAYKEHRKKCFCLRIWKSVGKGGWTAKVPNLSCMEGSHQ

SEQ ID NO: 885202 - protein, 965 aa, Homo sapiens
MKKLLPNMLSPDPRELQKSIEVQLLRSSVCLATALNPIEQDQKWQSITENVVKYLKQTSRIAIGPLRLSTLTVSQSLPVLSTLQLYCSSALENTVSNRLSTEDCLIPLFSEALRSCKQHDVRPWMQALRYTMYQNQLLEKIKEQTVPIRSHLMELGLTAAKFARKRGNVSLATRLLAQCSEVQLGKTTTAQDLVQHFKKLSTQGQVDEKWGPELDIEKTKLLYTAGQSTHAMEMLSSCAISFCKSVKAEYAVAKSILTLAKWIQAEWKEISGQLKQVYRAQHQQNFTGLSTLSKNILTLIELPSVNTMEEEYPRIESESTVHIGVGEPDFILGQLYHLSSVQAPEVAKSWAALASWAYRWGRKVVDNASQGEGVRLLPREKSEVQNLLPDTITEEEKERIYGILGQAVCRPAGIQDEDITLQITESEDNEEDDMVDVIWRQLISSCPWLSELDESATEGVIKVWRKVVDRIFSLYKLSCSAYFTFLKLNAGQIPLDEDDPRLHLSHRVEQSTDDMIVMATLRLLRLLVKHAGELRQYLEHGLETTPTAPWRGIIPQLFSRLNHPEVYVRQSICNLLCRVAQDSPHLILYPAIVGTISLSSESQASGNKFSTAIPTLLGNIQGEELLVSECEGGSPPASQDSNKDEPKSGLNEDQAMMQDCYSKIVDKLSSANPTMVLQVQMLVAELRRVTVLWDELWLGVLLQQHMYVLRRIQQLEDEVKRVQNNNTLRKEEKIAIMREKHTALMKPIVFALEHVRSITAAPAETPHEKWFQDNYGDAIENALEKLKTPLNPAKPGSSWIPFKEIMLSLQQRAQKRASYILRLEEISPWLAAMTNTEIALPGEVSARDTVTIHSVGGTITILPTKTKPKKLLFLGSDGKSYPYLFKGLEDLHLDERIMQFLSIVNTMFATINRQETPRFHARHYSVTPLGTRSGLIQWVDGATPLFGLYKRWQQREAALQAQKVD

SEQ ID NO: 885203 - protein, 692 aa, Homo sapiens
MKKLLPNMLSPDPRELQKSIEVQLLRSSVCLATALNPIEQDQKWQSITENVVKYLKQTSRIAIGPLRLSTLTVSQSLPVLSTLQLYCSSALENTVSNRLSTEDCLIPLFSEALRSCKQHDVRPWMQALRYTMYQNQLLEKIKEQTVPIRSHLMELGLTAAKFARKRGNVSLATRLLAQCSEVQLGKTTTAQDLVQHFKKLSTQGQVDEKWGPELDIEKTKLLYTAGQSTHAMEMLSSCAISFCKSVKAEYAVAKSILTLAKWIQAEWKEISGQLKQVYRAQHQQNFTGLSTLSKNILTLIELPSVNTMEEEYPRIESESTVHIGVGEPDFILGQLYHLSSVQAPEVAKSWAALASWAYRWGRKVVDNASQGEGVRLLPREKSEVQNLLPDTITEEEKERIYGILGQAVCRPAGIQDEDITLQITESEDNEEDDMVDVIWRQLISSCPWLSELDESATEGVIKVWRKVVDRIFSLYKLSCSAYFTFLKLNAGQIPLDEDDPRLHLSHRVEQSTDDMIVMATLRLLRLLVKHAGELRQYLEHGLETTPTAPWRGIIPQLFSRLNHPEVYVRQSICNLLCRVAQDSPHLILYPAIVGTISLSSESQASGNKFSTAIPTLLGNIQGEELLVSECEGGSPPASQDSNKDEPKSGLNEDQAMMQDCYSKIVDKLSSANPTMVLQVQRNSHVVEEFFIE

SEQ ID NO: 885204 - protein, 153 aa, Homo sapiens
MKKLLPNMLSPDPRELQKSIEVQLLRSSVCLATALNPIEQDQKWQSITENVVKYLKQTSRIAIGPLRLSTLTVSQSLPVLSTLQLYCSSALENTVSNRLSTEDCLIPLFSEALRSCKQHDVRPWMQALRYTMYQNQLLEKIKGKWFFFLVREN

SEQ ID NO: 885205 - protein, 133 aa, Homo sapiens
GAHPPRPHTETPGEKKREAWITKLLEELREAKENHTPEMKHFVGLEKKIKQMEMRHAQREQELQQIIQQTHQVVETEQNKEVEKWKRLAQLKNRELEKFRTELDSILDVLRELHRQGVVVPVAFADEMNAPEY

SEQ ID NO: 885206 - protein, 133 aa, Homo sapiens; identical to SEQ ID NO: 885205

SEQ ID NO: 885207 - protein, 120 aa, Homo sapiens
GGFLPEGLPNFLEDWGEPKENHTPEMKHFVGLEKKIKQMEMRHAQREQELQQIIQQTHQVVETEQNKEVEKWKRLAQLKNRELEKFRTELDSILDVLRELHRQGVVVPVAFADEMNAPEY

SEQ ID NO: 885208 - protein, 1327 aa, Homo sapiens
MEIEEESAEKIQFLKSSGTSLLSTDSLETNELVVSELNHSSLGVGLDTLEEQEEKEQFFARLEKGLTSSIDYSRLNKELDSNDSTHFKALHINQANAELTDDEHENESKHEELAENYSDDFEDEYVGAPLTTKDEEMPSKENSKSEKISVPKQEEEKTGMLANVVLLDSLDSVAEVNLDEQDKITPKPRCLPEMTENEMTGTGVSYGQSSSDVEALHQAYCHIAHSLGDEDKQKIESNTVEDIKSSVKGHPQENEENSKNISTMESDLPTVEELMKPIRIDSFGISGFDLQPVSSEKVAERKETEFFSSLPLKMNPNILSQDSQHVNLFFDKNDENVILQKTTNESMENSCPQVTEVTATEEHVDKMYLNILRKKITVNSSSLSQDDKINKTYRSQLSSEEEGAVMGKQVPYKKARSAPPLLKRKPQSGLYASVRSSGYGKPSSPLKMFSTLEKKTSEDIIKSKNLRSISTSNQPRKKEILSGTKLIKPAALDKPAHKTESCLSTRKKSENPTETDSCIQFQTDSLGYCGENKEKKLLMFKRVQEAEDKWRGAQALIEQIKATFSEKEKELENKLEELKKQQEKELFKLNQDNYILQAKLSSFEETNKKQRWLHFGEAADPVTGEKLKQIQKEIQEQETLLQGYQQENERLYNQVKDLQEQNKKNEERMFKENQSLFSEVASLKEQMHKSRFLSQVVEDSEPTRNQNFTDLLAELRMAQKEKDSLLEDIKRLKQDKQALEVDFEKMKKERDQAKDQIAYVTGEKLYEIKILEETHKQEISRLQKRLQWYAENQELLDKDALRLREANEEIEKLKLEIEKLKAESGNPSIRQKIRLKDKAADAKKIQDLERQVKEMEGILKRRYPNSLPALILAASAAGDTVDKNTVEFMEKRIKKLEADLEGKDEDAKKSLRTMEQQFQKMKIQYEQRLEQQEQLLACKLNQHDSPRIKALEKELDDIKEAHQITVRNLEAEIDVLKHQNAELDVKKNDKDDEDFQSIEFQVEQAHAKAKLVRLNEELAAKKREIQDLSKTVERLQKDRRMMLSNQNSKGREEMSAKRAKKDVLHSSKGNANSFPGTLDSKLYQPHTFTDSHVSEVLQENYRLKNELEGLISEKNELKMKSEAVMNQFENSMRRVKEDTAAHIASLKASHQREIEKLLCQNAVENSSSKVAELNRKIATQEVLIRHFQSQVNELQSKQESLVVSEVREEILQKEITKLLEELREAKENHTPEMKHFVGLEKKIKQMEMRHAQREQELQQIIQQTHQVVETEQNKEVEKWKRLAQLKNRELEKFRTELDSILDVLRELHRQGVVVPVAFADEMNAPEY

SEQ ID NO: 885209 - protein, 1403 aa, Homo sapiens
MANCSQEELDEEFEQFMKELSDDSFENSDKTARQSKKEMKKKDTVPWWITEDDFKDDGLLGTNVSYLKTKKTSQPVMEIEEESAEKIQFLKSSGTSLLSTDSLETNELVVSELNHSSLGVGLDTLEEQEEKEQFFARLEKGLTSSIDYSRLNKELDSNDSTHFKALHINQANAELTDDEHENESKHEELAENYSDDFEDEYVGAPLTTKDEEMPSKENSKSEKISVPKQEEEKTGMLANVVLLDSLDSVAEVNLDEQDKITPKPRCLPEMTENEMTGTGVSYGQSSSDVEALHQAYCHIAHSLGDEDKQKIESNTVEDIKSSVKGHPQENEENSKNISTMESDLPTVEELMKPIRIDSFGISGFDLQPVSSEKVAERKETEFFSSLPLKMNPNILSQDSQHVNLFFDKNDENVILQKTTNESMENSCPQVTEVTATEEHVDKMYLNILRKKITVNSSSLSQDDKINKTYRSQLSSEEEGAVMGKQVPYKKARSAPPLLKRKPQSGLYASVRSSGYGKPSSPLKMFSTLEKKTSEDIIKSKNLRSISTSNQPRKKEILSGTKLIKPAALDKPAHKTESCLSTRKKSENPTETDSCIQFQTDSLGYCGENKEKKLLMFKRVQEAEDKWRGAQALIEQIKATFSEKEKELENKLEELKKQQEKELFKLNQDNYILQAKLSSFEETNKKQRWLHFGEAADPVTGEKLKQIQKEIQEQETLLQGYQQENERLYNQVKDLQEQNKKNEERMFKENQSLFSEVASLKEQMHKSRFLSQVVEDSEPTRNQNFTDLLAELRMAQKEKDSLLEDIKRLKQDKQALEVDFEKMKKERDQAKDQIAYVTGEKLYEIKILEETHKQEISRLQKRLQWYAENQELLDKDALRLREANEEIEKLKLEIEKLKAESGNPSIRQKIRLKDKAADAKKIQDLERQVKEMEGILKRRYPNSLPALILAASAAGDTVDKNTVEFMEKRIKKLEADLEGKDEDAKKSLRTMEQQFQKMKIQYEQRLEQQEQLLACKLNQHDSPRIKALEKELDDIKEAHQITVRNLEAEIDVLKHQNAELDVKKNDKDDEDFQSIEFQVEQAHAKAKLVRLNEELAAKKREIQDLSKTVERLQKDRRMMLSNQNSKGREEMSAKRAKKDVLHSSKGNANSFPGTLDSKLYQPHTFTDSHVSEVLQENYRLKNELEGLISEKNELKMKSEAVMNQFENSMRRVKEDTAAHIASLKASHQREIEKLLCQNAVENSSSKVAELNRKIATQEVLIRHFQSQVNELQSKQESLVVSEVREEILQKEITKLLEELREAKENHTPEMKHFVGLEKKIKQMEMRHAQREQELQQIIQQTHQVVETEQNKEVEKWKRLAQLKNRELEKFRTELDSILDVLRELHRQGVVVPVAFADEMNAPEY

SEQ ID NO: 885210 - protein, 473 aa, Homo sapiens [sequence omitted]

SEQ ID NO: 885211 - protein, 149 aa, Homo sapiens
GTISSFQKGRARQMVSLRLSQVGSSPGFRLRTDAPAGTQARCFPSQASGPPPDSPLCSFPEAFPAKAAHLANGVVVGVLLVHRGRRDVEGAPPDLHLLLPVLGGRFCLVEACEAPVMPLIEAPSAHHRQPHLVRAVQDGPEGADGPLQH

SEQ ID NO: 885212 - protein, 149 aa, Homo sapiens; identical to SEQ ID NO: 885211

SEQ ID NO: 885213 - protein, 149 aa, Homo sapiens; identical to SEQ ID NO: 885211

SEQ ID NO: 885214 - protein, 111 aa, Homo sapiens
KNSEPQFEKVPEIMGVICAQLSIISQPRVRQQIINTVSLFISRPKYTDIVLSFLLCHPVPYNRHLAEVWRMLSVELPSTTWILWRLLRKLQKCHNEPAQEKMAYVAVAVSP

SEQ ID NO: 885215 - protein, 207 aa, Homo sapiens
MAPWAEAEHSALNPLRAVWLTLTAAFLLTLLLQLLPPGLLPGCAIFQDLIRYGKTKCGEPSRPAACRAFDVPKRYFSHFYIISVLWNGFLLWCLTQSLFLGAPFPSWLHGLLRILGAAQFQGVVIHCNHRIPFGDWFEYVSSPNYLAELMIYVSMAVTFGFHNLTWWLVVTNVFFNQALSAFLSHQFYKSKFVSYPKHRKAFLPFLF

SEQ ID NO: 885216 - protein, 318 aa, Homo sapiens
MAPWAEAEHSALNPLRAVWLTLTAAFLLTLLLQLLPPGLLPGCAIFQDLIRYGKTKCGEPSRPAACRAFDVPKRYFSHFYIISVLWNGFLLWCLTQSLFLGAPFPSWLHGLLRILGAAQFQGGELALSAFLVLVFLWLHSLRRLFECLYVSVFSNVMIHVVQYCFGLVYYVLVGLTVLSQVPMDGRNAYITGKNLLMQARWFHILGMMMFIWSSAHQYKCHVILGNLRKNKAGVVIHCNHRIPFGDWFEYVSSPNYLAELMIYVSMAVTFGFHNLTWWLVVTNVFFNQALSAFLSHQFYKSKFVSYPKHRKAFLPFLF

SEQ ID NO: 885217 - protein, 318 aa, Homo sapiens; identical to SEQ ID NO: 885216

SEQ ID NO: 885218 - protein, 318 aa, Homo sapiens; identical to SEQ ID NO: 885216

SEQ ID NO: 885219 - protein, 106 aa, Homo sapiens
MLSFDGHKLGYCSKVQTGITAAEPGGRTMSDHWQCCWKLYCPSEFSETLPVCRVFPSYCFIYQSYRCIGLQKQQHLCSPSSSPSLRQLLPSVLVGYFCCYCHFSKW

SEQ ID NO: 885220 - protein, 88 aa, Homo sapiens
TPLLEFFFPMFCFFQVKIISVNEDVTLRSALDRNLKSAVTAAFLMLPESFSEEDLFIEIAGLSYSDEKTEAQNGSLSKVTHLVHGGLV

SEQ ID NO: 885221 - protein, 406 aa, Homo sapiens
MALQTLQSSWVTFRKILSHFPEELSLAFVYGSGVYRQAGPSSDQKSYLTAASRTCWLPYPQSTFLQHGSLPFPVLPPVLPASLFNSRVLQDSDLSSLGEFLPPVPLIMIPMLSANAMLDFVFTVDDPVAWHSKNLKKNWSHYSFLKVLGPKIITSIQNNYGAGVYYNSLIMCNGRLIKYGVISTNVLIEDLLNWNNLYIAGRLQKPVKIISVNEDVTLRSALDRNLKSAVTAAFLMLPESFSEEDLFIEIAGLSYSGDFRMVVGEDKTKVLNIVKPNIAHFRELYGSILQENPQVVYKSQQGWLEIDKSPEGQFTQLMTLPKTLQQQINHIMDPPGKNRDVEETLFQVAHDPDCGDVVRLGLSAIVRPSSIRQSTKGIFTAGLKKSVIYSSLKLHKMWKGWLRKTS

SEQ ID NO: 885222 - protein, 452 aa, Homo sapiens
MALQTLQSSWVTFRKILSHFPEELSLAFVYGSGVYRQAGPSSDQKNAMLDFVFTVDDPVAWHSKNLKKNWSHYSFLKVLGPKIITSIQNNYGAGVYYNSLIMCNGRLIKYGVISTNVLIEDLLNWNNLYIAGRLQKPVKIISVNEDVTLRSALDRNLKSAVTAAFLMLPESFSEEDLFIEIAGLSYSGDFRMVVGEDKTKVLNIVKPNIAHFRELYGSILQENPQVVYKSQQGWLEIDKSPEGQFTQLMTLPKTLQQQINHIMDPPGKNRDVEETLFQVAHDPDCGDVVRLGLSAIVRPSSIRQSTKGIFTAGKSFGNPCVTYLLTEWLPHSWLQCKALYLLGACEMLSFDGHKLGYCSKVQTGITAAEPGGRTMSDHWQCCWKLYCPSEFSETLPVCRVFPSYCFIYQSYRCIGLQKQQHLCSPSSSPSLRQLLPSVLVGYFCCYCHFSKW

SEQ ID NO: 885223 - protein, 452 aa, Homo sapiens; identical to SEQ ID NO: 885222

SEQ ID NO: 885224 - protein, 204 aa, Homo sapiens
MALQTLQSSWVTFRKILSHFPEELSLAFVYGSGVYRQAGPSSDQKNAMLDFVFTVDDPVAWHSKNLKKNWSHYSFLKVLGPKIITSIQNNYGAGVYYNSLIMCNGRLIKYGVISTNVLIEDLLNWNNLYIAGRLQKPVKIISVNEDVTLRSALDRNLKSAVTAAFLMLPESFSEEDLFIEIAGLSYSEVSMVAAQMFYKGEIYI

SEQ ID NO: 885225 - protein, 316 aa, Homo sapiens
MALQTLQSSWVTFRKILSHFPEELSLAFVYGSGVYRQAGPSSDQKNAMLDFVFTVDDPVAWHSKNLKKNWSHYSFLKVLGPKIITSIQNNYGAGVYYNSLIMCNGRLIKYGVISTNVLIEDLLNWNNLYIAGRLQKPVKIISVNEDVTLRSALDRNLKSAVTAAFLMLPESFSEEDLFIEIAGLSYSGDFRMVVGEDKTKVLNIVKPNIAHFRELYGSILQENPQVVYKSQQGWLEIDKSPEGQFTQLMTLPKTLQQQINHIMDPPGKNRDVEETLFQVAHDPDCGDVVRLGLKKSVIYSSLKLHKMWKGWLRKTS

SEQ ID NO: 885226 - protein, 337 aa, Homo sapiens
MALQTLQSSWVTFRKILSHFPEELSLAFVYGSGVYRQAGPSSDQKNAMLDFVFTVDDPVAWHSKNLKKNWSHYSFLKVLGPKIITSIQNNYGAGVYYNSLIMCNGRLIKYGVISTNVLIEDLLNWNNLYIAGRLQKPVKIISVNEDVTLRSALDRNLKSAVTAAFLMLPESFSEEDLFIEIAGLSYSGDFRMVVGEDKTKVLNIVKPNIAHFRELYGSILQENPQVVYKSQQGWLEIDKSPEGQFTQLMTLPKTLQQQINHIMDPPGKNRDVEETLFQVAHDPDCGDVVRLGLSAIVRPSSIRQSTKGIFTAGLKKSVIYSSLKLHKMWKGWLRKTS

SEQ ID NO: 885227 - protein, 325 aa, Homo sapiens [sequence omitted]

SEQ ID NO: 885228 - protein, 200 aa, Homo sapiens
MALQTLQSSWVTFRKILSHFPEELSLAFVYGSGVYRQAGPSSDQKNAMLDFVFTVDDPVAWHSKNLKKNWSHYSFLKVLGPKIITSIQNNYGAGVYYNSLIMCNGRLIKYGVISTNVLIEDLLNWNNLYIAGRLQKPVKIISVNEDVTLRSALDRNLKSAVTAAFLMLPESFSEEDLFIEIAGLSYSVSVIRMVVGDLHV

SEQ ID NO: 885229 - protein, 151 aa, Homo sapiens
MALQTLQSSWVTFRKILSHFPEELSLAFVYGSGVYRQAGPSSDQKNAMLDFVFTVDDPVAWHSKNLKKNWSHYSFLKVLGPKIITSIQNNYGAGVYYNSLIMCNGRLIKYGVISTNVLIEDLLNWNNLYIAGRLQKPASLAVSQEFTGFSL

SEQ ID NO: 885230 - protein, 566 aa, Homo sapiens
MALSVPGYSPGFRKPPEVVRLRRKRARSRGAAASPPRELTEPAARRAALVAGLPLRPFPAAGGRGGGSGGGPAAARRNPFARLDNRPRVAAEPPDGPAREQPEAPVPFLDSNQENDLLWEEKFPERTTVTELPQTSHVSFSEPDIPSSKSTELPVDWSIKTRLLFTSSQPFTWADHLKAQEEAQGLVQHCRATEVTLPKSIQDPKLSSELRCTFQQSLIYWLHPALSWLPLFPRIGADRKMAGKTSPWSNDATLQHVLMSDWSVSFTSLYNLLKTKLCPYFYVCTYQFTVLFRAAGLAGSDLITALISPTTRGLREAMRNEGIEFSLPLIKESGHKKETASGTSLGYGEEQAISDEDEEESFSWLEEMGVQDKIKKPDILSIKLRKEKHEVQMDHRPESVVLVKGINTFTLLNFLINSKSLVATSGPQAGLPPTLLSPVAFRGATMQMLKARSVNVKTQALSGYRDQFSLEITGPIMPHSLHSLTMLLKSSQSGSFSAVLYPHEPTAVFNICLQMDKVLDMEVVHKELTNCGLHPNTLEQLSQIPLLGKSSLRNVVLRDYIYNWRS

SEQ ID NO: 885231 - protein, 566 aa, Homo sapiens; identical to SEQ ID NO: 885230

SEQ ID NO: 885232 - protein, 263 aa, Homo sapiens
MALSVPGYSPGFRKPPEVVRLRRKRARSRGAAASPPRELTEPAARRAALVAGLPLRPFPAAGGRGGGSGGGPAAARRNPFARLDNRPRVAAEPPDGPAREQPEAPVPFLDSNQENDLLWEEKFPERTTVTELPQTSHVSFSEPDIPSSKSTELPVDWSIKTRLLFTSSQPFTWADHLKAQEEAQGLVQHCRATEVTLPKSIQDPKLSSELRCTFQQSLIYWLHPALSWLPLFPRIGADRKMAGKTSPWSNDATLQHVLMSDWY

SEQ ID NO: 885233 - protein, 173 aa, Homo sapiens
CPGGRRGSSEQPEAPVPFLDSNQENDLLWEEKFPERTTVTELPQTSHVSFSEPDIPSSKSTELPVDWSIKTRLLFTSSQPFTWADHLKAQEEAQGLVQHCRATEVTLPKSIQDPKLSSELRCTFQQSLIYWLHPALSWLPLFPRIGADRKMAGKTSPWSNDATLQHVLMSDWY

SEQ ID NO: 885234 - protein, 552 aa, Homo sapiens
MALSVPGYSPGFRKPPEVVRLRRKRARSRGAAASPPRELTEPAARRAALVAGLPLRPFPAAGGRGGGSGGGPAAARRNPFARLDNRPRVAAEPPDGPAREQPEAPVPFLDSNQENDLLWEEKFPERTTVTELPQTSHVSFSEPDIPSSKSTELPVDWSIKTRLLFTSSQPFTWADHLKAQEEAQGLVQHCRATEVTLPKSIQSLIYWLHPALSWLPLFPRIGADRKMAGKTSPWSNDATLQHVLMSDWSVSFTSLYNLLKTKLCPYFYVCTYQFTVLFRAAGLAGSDLITALISPTTRGLREAMRNEGIEFSLPLIKESGHKKETASGTSLGYGEEQAISDEDEEESFSWLEEMGVQDKIKKPDILSIKLRKEKHEVQMDHRPESVVLVKGINTFTLLNFLINSKSLVATSGPQAGLPPTLLSPVAFRGATMQMLKARSVNVKTQALSGYRDQFSLEITGPIMPHSLHSLTMLLKSSQSGSFSAVLYPHEPTAVFNICLQMDKVLDMEVVHKELTNCGLHPNTLEQLSQIPLLGKSSLRNVVLRDYIYNWRS

SEQ ID NO: 885235 - protein, 265 aa, Homo sapiens
MALSVPGYSPGFRKPPEVVRLRRKRARSRGAAASPPRELTEPAARRAALVAGLPLRPFPAAGGRGGGSGGGPAAARRNPFARLDNRPRVAAEPPDGPAREQPEAPVPFLDSNQENDLLWEEKFPERTTVTELPQTSHVSFSEPDIPSSKSTELPVDWSIKTRLLFTSSQPFTWADHLKAQEEAQGLVQHCRATEVTLPKSIQDPKLSSELRCTFQQSLIYWLHPALSWLPLFPRIGADRKMAGKTSPWSNDATLQHVLMSDWHGV

SEQ ID NO: 885236 - protein, 136 aa, Homo sapiens
MALSVPGYSPGFRKPPEVVRLRRKRARSRGAAASPPRELTEPAARRAALVAGLPLRPFPAAGGRGGGSGGGPAAARRNPFARLDNRPRVAAEPPDGPAREQPEAPVPFLDSNQENDLLWEEKFPERTTVTELPQII

SEQ ID NO: 885237 - protein, 566 aa, Homo sapiens; identical to SEQ ID NO: 885230

SEQ ID NO: 885238 - protein, 133 aa, Homo sapiens
KRLRDDLNFPFLYIFMKARSVNVKTQALSGYRDQFSLEITGPIMPHSLHSLTMLLKSSQSGSFSAVLYPHEPTAVFNICLQMDKVLDMEVVHKELTNCGLHPNTLEQLSQIPLLGKSSLRNVVLRDYIYNWRS

SEQ ID NO: 885239 - protein, 457 aa, Homo sapiens
MALSVPGYSPGFRKPPEVVRLRRKRARSRGAAASPPRELTEPAARRAALVAGLPLRPFPAAGGRGGGSGGGPAAARRNPFARLDNRPRVAAEPPDGPAREQPEAPVPFLDSNQENDLLWEEKFPERTTVTELPQTSHVSFSEPDIPSSKSTELPVDWSIKTRLLFTSSQPFTWADHLKAQEEAQGLVQHCRATEVTLPKSIQDPKLSSELRCTFQQSLIYWLHPALSWLPLFPRIGADRKMAGKTSPWSNDATLQHVLMSDWSVSFTSLYNLLKTKLCPYFYVCTYQFTVLFRAAGLAGSDLITALISPTTRGLREAMRNEGIEFSLPLIKESGHKKETASGTSLGYGEEQAISDEDEEESFSWLEEMGVQDKIKKPDILSIKLRKEKHEVQMDHRPESVVLVKGINTFTLLNFLINSKSLVATSGPQAGLPPTLLSPVAFRGATMQMLKVIKVCIT

SEQ ID NO: 885240 - protein, 67 aa, Homo sapiens
APLATPLRAVLTGRVPEESEGAPEGSEEPLGEDLEVTWKRARKTLRAPILQGRCSMGQVTSPASPVI

SEQ ID NO: 885241 - protein, 67 aa, Homo sapiens; identical to SEQ ID NO: 885240

SEQ ID NO: 885242 - protein, 67 aa, Homo sapiens; identical to SEQ ID NO: 885240

SEQ ID NO: 885243 - protein, 539 aa, Homo sapiens
MALSVPGYSPGFRKPPEVVRLRRKRARSRGAAASPPRELTEPAARRAALVAGLPLRPFPAAGGRGGGSGGGPAAARRNPFARLDNRPRVAAEPPDGPAREQPEAPVPTSHVSFSEPDIPSSKSTELPVDWSIKTRLLFTSSQPFTWADHLKAQEEAQGLVQHCRATEVTLPKSIQDPKLSSELRCTFQQSLIYWLHPALSWLPLFPRIGADRKMAGKTSPWSNDATLQHVLMSDWSVSFTSLYNLLKTKLCPYFYVCTYQFTVLFRAAGLAGSDLITALISPTTRGLREAMRNEGIEFSLPLIKESGHKKETASGTSLGYGEEQAISDEDEEESFSWLEEMGVQDKIKKPDILSIKLRKEKHEVQMDHRPESVVLVKGINTFTLLNFLINSKSLVATSGPQAGLPPTLLSPVAFRGATMQMLKARSVNVKTQALSGYRDQFSLEITGPIMPHSLHSLTMLLKSSQSGSFSAVLYPHEPTAVFNICLQMDKVLDMEVVHKELTNCGLHPNTLEQLSQIPLLGKSSLRNVVLRDYIYNWRS

SEQ ID NO: 885244 - protein, 479 aa, Homo sapiens
MALSVPGYSPGFRKPPEVVRLRRKRARSRGAAASPPRELTEPAARRAALVAGLPLRPFPAAGGRGGGSGGGPAAARRNPFARLDNRPRVAAEPPDGPAREQPEAPVPFLDSNQENDLLWEEKFPERTTVTELPQTSHVSFSEPDIPSSKSTELPVDWSIKTRLLFTSSQPFTWADHLKAQEEAQGLVQHCRATEVTLPKSIQDPKLSSELRCTFQQSLIYWLHPALSWLPLFPRIGADRKMAGKTSPWSNDATLQHVLMSDWEQAISDEDEEESFSWLEEMGVQDKIKKPDILSIKLRKEKHEVQMDHRPESVVLVKGINTFTLLNFLINSKSLVATSGPQAGLPPTLLSPVAFRGATMQMLKARSVNVKTQALSGYRDQFSLEITGPIMPHSLHSLTMLLKSSQSGSFSAVLYPHEPTAVFNICLQMDKVLDMEVVHKELTNCGLHPNTLEQLSQIPLLGKSSLRNVVLRDYIYNWRS

SEQ ID NO: 885245 - protein, 566 aa, Homo sapiens; identical to SEQ ID NO: 885230

SEQ ID NO: 885246 - protein, 566 aa, Homo sapiens; identical to SEQ ID NO: 885230

SEQ ID NO: 885247 - protein, 552 aa, Homo sapiens; identical to SEQ ID NO: 885234

SEQ ID NO: 885248 - protein, 302 aa, Homo sapiens
PLLGLGVWASNKLVLQTWAKEPEAMQWLRVRESPGEATGHRVTMGTAALGPVWAALLLFLLMCEIPMVELTFDRAVASGCQRCCDSEDPLDPAHVSSASSSGRPHALPEIRPYINITILKGDKGDPGPMGLPGYMGREGPQGEPGPQGSKGDKGEMGSPGAPCQKRFFAFSVGRKTALHSGEDFQTLLFERVFVNLDGCFDMATGQFAAPLRGIYFFSLNVHSWNYKETYVHIMHNQKEAVILYAQPSERSIMQSQSVMLDLAYGDRVWVRLFKRQRENAIYSNDFDTYITFSGHLIKAEDD

SEQ ID NO: 885249 - protein, 259 aa, Homo sapiens
MGTAALGPVWAALLLFLLMCEIPMVELTFDRAVASGCQRCCDSEDPLDPAHVSSASSSGRPHALPEIRPYINITILKGDKGDPGPMGLPGYMGREGPQGEPGPQGSKGDKGEMGSPGAPCQKRFFAFSVGRKTALHSGEDFQTLLFERVFVNLDGCFDMATGQFAAPLRGIYFFSLNVHSWNYKETYVHIMHNQKEAVILYAQPSERSIMQSQSVMLDLAYGDRVWVRLFKRQRENAIYSNDFDTYITFSGHLIKAEDD

SEQ ID NO: 885250 - protein, 259 aa, Homo sapiens; identical to SEQ ID NO: 885249

SEQ ID NO: 885251 - protein, 359 aa, Homo sapiens
PLLGLGVWASNKLVLQTWAKEPEAMQWLRVRESPGEATGHRVTMGTAALGPVWAALLLFLLMCEIPMVELTFDRAVASGCQRCCDSEDPLDPAHVSSASSSGRPHALPEIRPYINITILKAQRAQHHAEPECDAGPGLRGPRLGAALQAPARERHLQQRLRHLHHLQRPPHQGRGRLRASGPPSRLESSADTASCEKTCPPHWDPLPASSQGSARALLSPFHQSHLNFRFPRASSCPQTLMSVPRCSLPLMPLSPAQCPDSPGFIKVLRPGWAAPRLRALLRPGAAFTNTCRRRATEAPGFRALSRSGELEQRRDLRPSVSSSRVGWPGVPLAFQTQVACPSPQREAASAHWCSCRLWG

SEQ ID NO: 885252 - protein, 180 aa, Homo sapiens [sequence omitted]

SEQ ID NO: 885253 - protein, 259 aa, Homo sapiens; identical to SEQ ID NO: 885249

SEQ ID NO: 885254 - protein, 259 aa, Homo sapiens; identical to SEQ ID NO: 885249

SEQ ID NO: 885255 - protein, 259 aa, Homo sapiens; identical to SEQ ID NO: 885249

SEQ ID NO: 885256 - protein, 259 aa, Homo sapiens; identical to SEQ ID NO: 885249

SEQ ID NO: 885257 - protein, 116 aa, Homo sapiens
MEIAAEPSLYSVDSRTRLANSFCLFCFLVAKGYKSLPPTPPPIALCAIIFQGDLAFEVPAICSAGLYFAGCESTAFPECLLFYPTWLLIALPVRGKESCAVAPLKPSPCCLPQKAT

SEQ ID NO: 885258 - protein, 1235 aa, Homo sapiens
MRSRSNSGVRLDGYARLVQQTILCYQNPVTGLLSASHEQKDAWVRDNIYSILAVWGLGMAYRKNADRDEDKAKAYELEQNVVKLMRGLLQCMMRQVAKVEKFKHTQSTKDSLHAKYNTATCGTVVGDDQWGHLQVDATSLFLLFLAQMTASGLRIIFTLDEVAFIQNLVFYIEAAYKVADYGMWERGDKTNQGIPELNASSVGMAKAALEAIDELDLFGAHGGRKSVIHVLPDEVEHCQSILFSMLPRASTSKEIDAGLLSIISFPAFAVEDVNLVNVTKNEIISKLQGRYGCCRFLRDGYKTPREDPNRLHYDPAELKLFENIECEWPVFWTYFIIDGVFSGDAVQVQEYREALEGILIRGKNGIRLVPELYAVPPNKVDEEYKNPHTVDRVPMGKVPHLWGQSLYILSSLLAEGFLAAGEIDPLNRRFSTSVKPDVVVQVTVLAENNHIKDLLRKHGVNVQSIADIHPIQVQPGRILSHIYAKLGRNKNMNLSGRPYRHIGVLGTSKLYVIRNQIFTFTPQFTDQHHFYLALDNEMIVEMLRIELAYLCTCWRMTGRPTLTFPISRTMLTNDGSDIHSAVLSTIRKLEDGYFGGARVKLGNLSEFLTTSFYTYLTFLDPDCDEKLFDNASEGTFSPDSDSDLVGYLEDTCNQESQDELDHYINHLLQSTSLRSYLPPLCKNTEDRHVFSAIHSTRDILSVMAKAKGLEVPFVPMTLPTKVLSAHRKSLNLVDSPQPLLEKVPESDFQWPRDDHGDVDCEKLVEQLKDCSNLQDQADILYILYVIKGPSWDTNLSGQHGVTVQNLLGELYGKAGLNQEWGLIRYISGLLRKKVEVLAEACTDLLSHQKQLTVGLPPEPREKIISAPLPPEELTKLIYEASGQDISIAVLTQEIVVYLAMYVRAQPSLFVEMLRLRIGLIIQVMATELARSLNCSGEEASESLMNLSPFDMKNLLHHILSGKEFGVERSVRPIHSSTSSPTISIHEVGHTGVTKTERSGINRLRSEMKQMTRRFSADEQFFSVGQAASSSAHSSKSARSSTPSSPTGTSSSDSGGHHIGWGERQGQWLRRRRLDGAINRVPVGFYQRVWKILQKCHGLSIDGYVLPSSTTREMTPHEIKFAVHVESVLNRVPQPEYRQLLVEAIMVLTLLSDTEMTSIGGIIHVDQIVQMASQLFLQDQVSIGAMDTLEKDQATGICHFFYDSAPSGAYGTMTYLTRAVASYLQELLPNSGCQMQ

SEQ ID NO: 885259 - protein, 1235 aa, Homo sapiens; identical to SEQ ID NO: 885258

SEQ ID NO: 885260 - protein, 1275 aa, Homo sapiens
MRSRSNSGVRLDGYARLVQQTILCYQNPVTGLLSASHEQKDAWVRDNIYSILAVWGLGMAYRKNADRDEDKAKAYELEQNVVKLMRGLLQCMMRQVAKVEKFKHTQSTKDSLHAKYNTATCGTVVGDDQWGHLQVDATSLFLLFLAQMTASGLRIIFTLDEVAFIQNLVFYIEAAYKVADYGMWERGDKTNQGIPELNASSVGMAKAALEAIDELDLFGAHGGRKSVIHVLPDEVEHCQSILFSMLPRASTSKEIDAGLLSIISFPAFAVEDVNLVNVTKNEIISKLQGRYGCCRFLRDGYKTPREDPNRLHYDPAELKLFENIECEWPVFWTYFIIDGVFSGDAVQVQEYREALEGILIRGKNGIRLVPELYAVPPNKVDEEYKNPHTVDRVPMGKVPHLWGQSLYILSSLLAEGFLAAGEIDPLNRRFSTSVKPDVVVQVTVLAENNHIKDLLRKHGVNVQSIADIHPIQVQPGRILSHIYAKLGRNKNMNLSGRPYRHIGVLGTSKLYVIRNQIFTFTPQFTDQHHFYLALDNEMIVEMLRIELAYLCTCWRMTGRPTLTFPISRTMLTNDGSDIHSAVLSTIRKLEDGYFGGARVKLGNLSEFLTTSFYTYLTFLDPDCDEKLFDNASEGTFSPDSDSDLVGYLEDTCNQESQDELDHYINHLLQSTSLRSYLPPLCKNTEDRHVFSAIHSTRDILSVMAKAKGLEVPFVPMTLPTKVLSAHRKSLNLVDSPQPLLEKVPESDFQWPRDDHGDVDCEKLVEQLKDCSNLQDQADILYILYVIKGPSWDTNLSGQHGVTVQNLLGELYGKAGLNQEWGLIRYISGLLRKKVEVLAEACTDLLSHQKQLTVGLPPEPREKIISAPLPPEELTKLIYEASGQDISIAVLTQEIVVYLAMYVRAQPSLFVEMLRLRIGLIIQVMATELARSLNCSGEEASESLMNLSPFDMKNLLHHILSGKEFGVERSDTRSHHAAQAGLELLGSSSLPTSASQSAGITGVSHRCLASVRPIHSSTSSPTISIHEVGHTGVTKTERSGINRLRSEMKQMTRRFSADEQFFSVGQAASSSAHSSKSARSSTPSSPTGTSSSDSGGHHIGWGERQGQWLRRRRLDGAINRVPVGFYQRVWKILQKCHGLSIDGYVLPSSTTREMTPHEIKFAVHVESVLNRVPQPEYRQLLVEAIMVLTLLSDTEMTSIGGIIHVDQIVQMASQLFLQDQVSIGAMDTLEKDQATGICHFFYDSAPSGAYGTMTYLTRAVASYLQELLPNSGCQMQ

SEQ ID NO: 885261 - protein, 1217 aa, Homo sapiens
MRSRSNSGVRLDGYARLVQQTILCYQNPVTGLLSASHEQKDAWVRDNIYSILAVWGLGMAYRKNADRDEDKAKAYELEQNVVKLMRGLLQCMMRQVAKVEKFKHTQSTKDSLHAKYNTATCGTVVGDDQWGHLQVDATSLFLLFLAQMTASGLRIIFTLDEVAFIQNLVFYIEAAYKVADYGMWERGDKTNQGIPELNASSVGMAKAALEAIDELDLFGAHGGRKSVIHVLPDEVEHCQSILFSMLPRASTSKEIDAGLLSIISFPAFAVEDVNLVNVTKNEIISKLQGRYGCCRFLRDGYKTPREDPNRLHYDPAELKLFENIECEWPVFWTYFIIDGVFSGDAVQVQEYREALEGILIRGKNGIRLVPELYAVPPNKVDEEYKNPHTVDRVPMGKVPHLWGQSLYILSSLLAEGFLAAGEIDPLNRRFSTSVKPDVVVQVTVLAENNHIKDLLRKHGVNVQSIADIHPIQVQPGRILSHIYAKLGRNKNMNLSGRPYRHIGVLGTSKLYVIRNQIFTFTPQFTDQHHFYLALDNEMIVEMLRIELAYLCTCWRMTGRPTLTFPISRTMLTNDGSDIHSAVLSTIRKLEDGYFGGARVKLGNLSEFLTTSFYTYLTFLDPDCDEKLFDNASEGTFSPDSDSDLVGYLEDTCNQESQDELDHYINHLLQSTSLRSYLPPLCKNTEDRHVFSAIHSTRDILSVMAKAKGLEVPFVPMTLPTKVLSAHRKSLNLVDSPQPLLEKVPESDFQWPRDDHGDVDCEKLVEQLKDCSNLQDQADILYILYVIKGPSWDTNLSGQHGVTVQNLLGELYGKAGLNQEWGLIRYISGLLRKKVEVLAEACTDLLSHQKQLTVGLPPEPREKIISASPQPWGPQEIVVYLAMYVRAQPSLFVEMLRLRIGLIIQVMATELARSLNCSGEEASESLMNLSPFDMKNLLHHILSGKEFGVERSVRPIHSSTSSPTISIHEVGHTGVTKTERSGINRLRSEMKQMTRRFSADEQFFSVGQAASSSAHSSKSARSSTPSSPTGTSSSDSGGHHIGWGERQGQWLRRRRLDGAINRVPVGFYQRVWKILQKCHGLSIDGYVLPSSTTREMTPHEIKFAVHVESVLNRVPQPEYRQLLVEAIMVLTLLSDTEMTSIGGIIHVDQIVQMASQLFLQDQVSIGAMDTLEKDQATGICHFFYDSAPSGAYGTMTYLTRAVASYLQELLPNSGCQMQ

SEQ ID NO: 885262 - protein, 894 aa, Homo sapiens
MVRGLGVQEYREALEGILIRGKNGIRLVPELYAVPPNKVDEEYKNPHTVDRVPMGKVPHLWGQSLYILSSLLAEGFLAAGEIDPLNRRFSTSVKPDVVVQVTVLAENNHIKDLLRKHGVNVQSIADIHPIQVQPGRILSHIYAKLGRNKNMNLSGRPYRHIGVLGTSKLYVIRNQIFTFTPQFTDQHHFYLALDNEMIVEMLRIELAYLCTCWRMTGRPTLTFPISRTMLTNDGSDIHSAVLSTIRKLEDGYFGGARVKLGNLSEFLTTSFYTYLTFLDPDCDEKLFDNASEGTFSPDSDSDLVGYLEDTCNQESQDELDHYINHLLQSTSLRSYLPPLCKNTEDRHVFSAIHSTRDILSVMAKAKGLEVPFVPMTLPTKVLSAHRKSLNLVDSPQPLLEKVPESDFQWPRDDHGDVDCEKLVEQLKDCSNLQDQADILYILYVIKGPSWDTNLSGQHGVTVQNLLGELYGKAGLNQEWGLIRYISGLLRKKVEVLAEACTDLLSHQKQLTVGLPPEPREKIISAPLPPEELTKLIYEASGQDISIAVLTQEIVVYLAMYVRAQPSLFVEMLRLRIGLIIQVMATELARSLNCSGEEASESLMNLSPFDMKNLLHHILSGKEFGVERSVRPIHSSTSSPTISIHEVGHTGVTKTERSGINRLRSEMKQMTRRFSADEQFFSVGQAASSSAHSSKSARSSTPSSPTGTSSSDSGGHHIGWGERQGQWLRRRRLDGAINRVPVGFYQRVWKILQKCHGLSIDGYVLPSSTTREMTPHEIKFAVHVESVLNRVPQPEYRQLLVEAIMVLTLLSDTEMTSIGGIIHVDQIVQMASQLFLQDQVSIGAMDTLEKDQATGICHFFYDSAPSGAYGTMTYLTRAVASYLQELLPNSGCQMQ

SEQ ID NO: 885263 - protein, 1238 aa, Homo sapiens
MRSRSNSGVRLDGYARLVQQTILCYQNPVTGLLSASHEQKDAWVRDNIYSILAVWGLGMAYRKNADRDEDKAKAYELEQNVVKLMRGLLQCMMRQVAKVEKFKHTQSTKDSLHAKYNTATCGTVVGDDQWGHLQVDATSLFLLFLAQMTASGLRIIFTLDEVAFIQNLVFYIEAAYKVADYGMWERGDKTNQGIPELNASSVGMAKAALEAIDELDLFGAHGGRKSVIHVLPDEVEHCQSILFSMLPRASTSKEIDAGLLSIISFPAFAVEDVNLVNVTKNEIISKLQGRYGCCRFLRDGYKTPREDPNRLHYDPAELKLFENIECEWPVFWTYFIIDGVFSGDAVQVQEYREALEGILIRGKNGIRLVPELYAVPPNKVDEEYKNPHTVDRVPMGKVPHLWGQSLYILSSLLAEGFLAAGEIDPLNRRFSTSVKPDVVVQVTVLAENNHIKDLLRKHGVNVQSIADIHPIQVQPGRILSHIYAKLGRNKNMNLSGRPYRHIGVLGTSKLYVIRNQIFTFTPQFTDQHHFYLALDNEMIVEMLRIELAYLCTCWRMTGRPTLTFPISRTMLTNDGSDIHSAVLSTIRKLEDGYFGGARVKLGNLSEFLTTSFYTYLTFLDPDCDEKLFDNASEGTFSPDSDSDLVGYLEDTCNQESQDELDHYINHLLQSTSLRSYLPPLCKNTEDRHVFSAIHSTRDILSVMAKAKGLEVPFVPMTLPTKVLSAHRKSLNLVDSPQPLLEKVPESDFQWPRDDHGDVDCEKLVEQLKDCSNLQDQADILYILYVIKGPSWDTNLSGQHGVTVQNLLGELYGKAGLNQEWGLIRYISGLLRKKVEVLAEACTDLLSHQKQLTVGLPPEPREKIISAPLPPEELTKLIYEASGQDISIAVLTQEIVVYLAMYVRAQPSLFVEMLRLRIGLIIQVMATELARSLNCSGEEASESLMNLSPFDMKNLLHHILSGKEFGVERSDTRSHHAAQAGLELLGSSSLPTSASQSAGITVRPIHSSTSSPTISIHEVGHTGVTKTERSGINRLRSEMKQRSSTPSSPTGTSSSDSGGHHIGWGERQGQWLRRRRLDGAINRVPVGFYQRVWKILQKCHGLSIDGYVLPSSTTREMTPHEIKFAVHVESVLNRVPQPEYRQLLVEAIMVLTLLSDTEMTSIGGIIHVDQIVQMASQLFLQDQVSIGAMDTLEKDQATGICHFFYDSAPSGAYGTMTYLTRAVASYLQELLPNSGCQMQ

SEQ ID NO: 885264 - protein, 1207 aa, Homo sapiens
MRSRSNSGVRLDGYARLVQQTILCYQNPVTGLLSASHEQKDAWVRDNIYSILAVWGLGMAYRKNADRDEDKAKAYELEQNVVKLMRGLLQCMMRQVAKVEKFKHTQSTKDSLHAKYNTATCGTVVGDDQWGHLQVDATSLFLLFLAQMTASGLRIIFTLDEVAFIQNLVFYIEAAYKVADYGMWERGDKTNQGIPELNASSVGMAKAALEAIDELDLFGAHGGRKSVIHVLPDEVEHCQSILFSMLPRASTSKEIDAGLLSIISFPAFAVEDVNLVNVTKNEIISKLQGRYGCCRFLRDGYKTPREDPNRLHYDPAELKLFENIECEWPVFWTYFIIDGVFSGDAVQVQEYREALEGILIRGKNGIRLVPELYAVPPNKVDEEYKNPHTVDRVPMGKVPHLWGQSLYILSSLLAEGFLAAGEIDPLNRRFSTSVKPDVVVQVTVLAENNHIKDLLRKHGVNVQSIADIHPIQVQPGRILSHIYAKLGRNKNMNLSGRPYRHIGVLGTSKLYVIRNQIFTFTPQFTDQHHFYLALDNEMIVEMLRIELAYLCTCWRMTGRPTLTFPISRTMLTNDGSDIHSAVLSTIRKLEDGYFGGARVKLGNLSEFLTTSFYTYLTFLDPDCDEKLFDNASEGTFSPDSDSDLVGYLEDTCNQESQDELDHYINHLLQSTSLRSYLPPLCKNTEDRHVFSAIHSTRDILSVMAKAKGLEVPFVPMTLPTKVLSAHRKSLNLVDSPQPLLEKVPESDFQWPRDDHGDVDCEKLVEQLKDCSNLQDQADILYILYVIKGPSWDTNLSGQHGVTVQNLLGELYGKAGLNQEWGLIRYISGLLRKKVEVLAEACTDLLSHQKQLTVGLPPEPREKIISAPLPPEELTKLIYEASGQDISIAVLTQEIVVYLAMYVRAQPSLFVEMLRLRIGLIIQVMATELARSLNCSGEEASESLMNLSPFDMKNLLHHILSGKEFGVERSVRPIHSSTSSPTISIHEVGHTGVTKTERSGINRLRSEMKQRSSTPSSPTGTSSSDSGGHHIGWGERQGQWLRRRRLDGAINRVPVGFYQRVWKILQKCHGLSIDGYVLPSSTTREMTPHEIKFAVHVESVLNRVPQPEYRQLLVEAIMVLTLLSDTEMTSIGGIIHVDQIVQMASQLFLQDQVSIGAMDTLEKDQATGICHFFYDSAPSGAYGTMTYLTRAVASYLQELLPNSGCQMQ

SEQ ID NO: 885265 - protein, 123 aa, Homo sapiens [sequence omitted]

SEQ ID NO: 885266 - protein, 321 aa, Homo sapiens
VLCLRISHRGHGPSHGGMNCSGEEASESLMNLSPFDMKNLLHHILSGKEFGVERSVRPIHSSTSSPTISIHEVGHTGVTKTERSGINRLRSEMKQMTRRFSADEQFFSVGQAASSSAHSSKSARSSTPSSPTGTSSSDSGGHHIGWGERQGQWLRRRRLDGAINRVPVGFYQRVWKILQKCHGLSIDGYVLPSSTTREMTPHEIKFAVHVESVLNRVPQPEYRQLLVEAIMVLTLLSDTEMTSIGGIIHVDQIVQMASQLFLQDQVSIGAMDTLEKDQATGICHFFYDSAPSGAYGTMTYLTRAVASYLQELLPNSGCQMQ

SEQ ID NO: 885267 - protein, 226 aa, Homo sapiens
MTRRFSADEQFFSVGQAASSSAHSSKSARSSTPSSPTGTSSSDSGGHHIGWGERQGQWLRRRRLDGAINRVPVGFYQRVWKILQKCHGLSIDGYVLPSSTTREMTPHEIKFAVHVESVLNRVPQPEYRQLLVEAIMVLTLLSDTEMTSIGGIIHVDQIVQMASQLFLQDQVSIGAMDTLEKDQATGICHFFYDSAPSGAYGTMTYLTRAVASYLQELLPNSGCQMQ

SEQ ID NO: 885268 - protein, 1181 aa, Homo sapiens
MRSRSNSGVRLDGYARLVQQTILCYQNPVTGLLSASHEQKDAWVRDNIYSILAVWGLGMAYRKNADRDEDKAKAYELEQNVVKLMRGLLQCMMRQVAKVEKFKHTQSTKDSLHAKYNTATCGTVVGDDQWGHLQVDATSLFLLFLAQMTASGLRIIFTLDEVAFIQNLVFYIEAAYKVADYGMWERGDKTNQGIPELNASSVGMAKAALEAIDELDLFGAHGGRKSVIHVLPDEVEHCQSILFSMLPRASTSKEIDAGLLSIISFPAFAVEDVNLVNVTKNEIISKLQGRYGCCRFLRDGYKTPREDPNRLHYDPAELKLFENIECEWPVFWTYFIIDGVFSGDAVQVQEYREALEGILIRGKNGIRLVPELYAVPPNKVDEEYKNPHTVDRVPMGKVPHLWGQSLYILSSLLAEGFLAAGEIDPLNRRFSTSVKPDVVVQVTVLAENNHIKDLLRKHGVNVQSIADIHPIQVQPGRILSHIYAKLGRNKNMNLSGRPYRHIGVLGTSKLYVIRNQIFTFTPQFTDQHHFYLALDNEMIVEMLRIELAYLCTCWRMTGRPTLTFPISRTMLTNDGSDIHSAVLSTIRKLEDGYFGGARVKLGNLSEFLTTSFYTYLTFLDPDCDEKLFDNASEGTFSPDSDSDLVGYLEDTCNQESQDELDHYINHLLQSTSLRSYLPPLCKNTEDRHVFSAIHSTRDILSVMAKAKGLEVPFVPMTLPTKVLSAHRKSLNLVDSPQPLLEKVPESDFQWPRDDHGDVDCEKLVEQLKDCSNLQDQADILYILYVIKGPSWDTNLSGQHGVTVQNLLGELYGKAGLNQEWGLIRYISGLLRKKVEVLAEACTDLLSHQKQLTVGLPPEPREKIISAPLPPEELTKLIYEASGQDISIAVLTQEIVVYLAMYVRAQPSLFVEMLRLRIGLIIQVMATELARSLNCSGEEASESLMNLSPFDMKNLLHHILSGKEFGVERSVRPIHSSTSSPTISIHEVGHTGVTKTERSGINRLRSEMKQMTRRFSADEQFFSVGQAASSSAHSSKSARSSTPSSPTGTSSSDSGGHHIGWGERQGQWLRRRRLDGAINRVPVGFYQRVWKILQKCHGLSIDGYVLPSSTTREMTPHEIKFAVHVESVLNRAARCNRVSPGNMITLSICHVPPSLTGNLLSPKIPCAIRKACPIRNTLGGQW

SEQ ID NO: 885269 - protein, 123 aa, Homo sapiens [sequence omitted]

SEQ ID NO: 885270 - protein, 140 aa, Homo sapiens
LEDPCTLGMSPISTTREMTPHEIKFAVHVESVLNRVPQPEYRQLLVEAIMVLTLLSDTEMTSIGGIIHVDQIVQMASQLFLQDQVSIGAMDTLEKDQATGICHFFYDSAPSGAYGTMTYLTRAVASYLQELLPNSGCQMQ

SEQ ID NO: 885271 - protein, 183 aa, Homo sapiens
PHPLSLSSHMILFRLFFTRQLDGAINRVPVGFYQRVWKILQKCHGLSIDGYVLPSSTTREMTPHEIKFAVHVESVLNRVPQPEYRQLLVEAIMVLTLLSDTEMTSIGGIIHVDQIVQMASQLFLQDQVSIGAMDTLEKDQATGICHFFYDSAPSGAYGTMTYLTRAVASYLQELLPNSGCQMQ

SEQ ID NO: 885272 - protein, 1235 aa, Homo sapiens; identical to SEQ ID NO: 885258

SEQ ID NO: 885273 - protein, 1204 aa, Homo sapiens
MRSRSNSGVRLDGYARLVQQTILCYQNPVTGLLSASHEQKDAWVRDNIYSILAVWGLGMAYRKNADRDEDKAKAYELEQNVVKLMRGLLQCMMRQVAKVEKFKHTQSTKDSLHAKYNTATCGTVVGDDQWGHLQVDATSLFLLFLAQMTASGLRIIFTLDEVAFIQNLVFYIEAAYKVADYGMWERGDKTNQGIPELNASSVGMAKAALEAIDELDLFGAHGGRKSVIHVLPDEVEHCQSILFSMLPRASTSKEIDAGLLSIISFPAFAVEDVNLVNVTKNEIISKLQGRYGCCRFLRDGYKTPREDPNRLHYDPAELKLFENIECEWPVFWTYFIIDGVFSGDAVQVQEYREALEGILIRGKNGIRLVPELYAVPPNKVDEEYKNPHTVDRVPMGKVPHLWGQSLYILSSLLAEGFLAAGEIDPLNRRFSTSVKPDVVVQVTVLAENNHIKDLLRKHGVNVQSIADIHPIQVQPGRILSHIYAKLGRNKNMNLSGRPYRHIGVLGTSKLYVIRNQIFTFTPQFTDQHHFYLALDNEMIVEMLRIELAYLCTCWRMTGRPTLTFPISRTMLTNDGSDIHSAVLSTIRKLEDGYFGGARVKLGNLSEFLTTSFYTYLTFLDPDCDEKLFDNASEGTFSPDSDSDLVGYLEDTCNQESQDELDHYINHLLQSTSLRSYLPPLCKNTEDRHVFSAIHSTRDILSVMAKAKGLEVPFVPMTLPTKVLSAHRKSLNLVDSPQPLLEKVPESDFQWPRDDHGDVDCEKLVEQLKDCSNLQDQADILYILYVIKGPSWDTNLSGQHGVTVQNLLGELYGKAGLNQEWGLIRYISGLLRKKVEVLAEACTDLLSHQKQLTVGLPPEPREKIISAPLPPEELTKLIYEASGQDISIAVLTQEIVVYLAMYVRAQPSLFVEMLRLRIGLIIQVMATELARSLNCSGEEASESLMNLSPFDMKNLLHHILSGKEFGVERSVRPIHSSTSSPTISIHEVGHTGVTKTERSGINRLRSEMKQMTRRFSADEQFFSVGQAASSSAHSSKSARSSTPSSPTGTSSSDSGGHHIGWGERQGQWLRRRRLDGAINRVPVGFYQRVWKILQKCHGLSIDGYVLPSSTTREMTPHEIKFAVHVESVLNRVPQPEYRQLLVEAIMVLTLLSDTEMTSIGGIIHVDQIVQMASQLFLQDQVGVPGSWVGWHLSLLRLEIPETDVC

SEQ ID NO: 885274 - protein, 1210 aa, Homo sapiens
MRSRSNSGVRLDGYARLVQQTILCYQNPVTGLLSASHEQKDAWVRDNIYSILAVWGLGMAYRKNADRDEDKAKAYELEQNVVKLMRGLLQCMMRQVAKVEKFKHTQSTKDSLHAKYNTATCGTVVGDDQWGHLQVDATSLFLLFLAQMTASGLRIIFTLDEVAFIQNLVFYIEAAYKVADYGMWERGDKTNQGIPELNASSVGMAKAALEAIDELDLFGAHGGRKSVIHVLPDEVEHCQSILFSMLPRASTSKEIDAGLLSIISFPAFAVEDVNLVNVTKNEIISKLQGRYGCCRFLRDGYKTPREDPNRLHYDPAELKLFENIECEWPVFWTYFIIDGVFSGDAVQVQEYREALEGILIRGKNGIRLVPELYAVPPNKVDEEYKNPHTVDRVPMGKVPHLWGQSLYILSSLLAEGFLAAGEIDPLNRRFSTSVKPDVVVQVTVLAENNHIKDLLRKHGVNVQSIADIHPIQVQPGRILSHIYAKLGRNKNMNLSGRPYRHIGVLGTSKLYVIRNQIFTFTPQFTDQHHFYLALDNEMIVEMLRIELAYLCTCWRMTGRPTLTFPISRTMLTNDGSDIHSAVLSTIRKLEDGYFGGARVKLGNLSEFLTTSFYTYLTFLDPDCDEKLFDNASEGTFSPDSDSDLVGYLEDTCNQESQDELDHYINHLLQSTSLRSYLPPLCKNTEDRHVFSAIHSTRDILSVMAKAKGLEVPFVPMTLPTKVLSAHRKSLNLVDSPQPLLEKVPESDFQWPRDDHGDVDCEKLVEQLKDCSNLQDQADILYILYVIKGPSWDTNLSGQHGVTVQNLLGELYGKAGLNQEWGLIRYISGLLRKKVEVLAEACTDLLSHQKQLTVGLPPEPREKIISAPLPPEELTKLIYEASGQDISIAVLTQEIVVYLAMYVRAQPSLFVEMLRLRIGLIIQVMATELARSLNCSGEEASESLMNLSPFDMKNLLHHILSGKEFGVERSVRPIHSSTSSPTISIHEVGHTGVTKTERSGINRLRSEMKQMTRRFSADEQFFSVGQAASSSAHSSKSARSSTPSSPTGTSSSDSGGHHIGWGERQGQWLRRRRLDGAINRVPVGFYQRVWKILQKCHGLSIDGYVLPSSTTREMTPHEIKFAVHVESVLNRVPQPEYRQLLVEAIMVLTLLSDTEMTSIGGIIHVDQIVQMASQLFLQDQVGVPGSWVGWHLSLLRLEILCPIGKNILEPR

SEQ ID NO: 885275 - protein, 1042 aa, Homo sapiens
MRSRSNSGVRLDGYARLVQQTILCYQNPVTGLLSASHEQKDAWVRDNIYSILAVWGLGMAYRKNADRDEDKAKAYELEQNVVKLMRGLLQCMMRQVAKVEKFKHTQSTKDSLHAKYNTATCGTVVGDDQWGHLQVDATSLFLLFLAQMTASGLRIIFTLDEVAFIQNLVFYIEAAYKVADYGMWERGDKTNQGIPELNASSVGMAKAALEAIDELDLFGAHGGRKSVIHVLPDEVEHCQSILFSMLPRASTSKEIDAGLLSIISFPAFAVEDVNLVNVTKNEIISKLQGRYGCCRFLRDGYKTPREDPNRLHYDPAELKLFENIECEWPVFWTYFIIDGVFSGDAVQVQEYREALEGILIRGKNGIRLVPELYAVPPNKVDEEYKNPHTVDRVPMGKVPHLWGQSLYILSSLLAEGFLAAGEIDPLNRRFSTSVKPDVVVQVTVLAENNHIKDLLRKHGVNVQSIADIHPIQVQPGRILSHIYAKLGRNKNMNLSGRPYRHIGVLGTSKLYVIRNQIFTFTPQFTDQHHFYLALDNEMIVEMLRIELAYLCTCWRMTGRPTLTFPISRTMLTNDGSDIHSAVLSTIRKLEDGYFGGARVKLGNLSEFLTTSFYTYLTFLDPDCDEKLFDNASEGTFSPDSDSDLVGYLEDTCNQESQDELDHYINHLLQSTSLRSYLPPLCKNTEDRHVFSAIHSTRDILSVMAKAKGLEVPFVPMTLPTKVLSAHRKSLNLVDSPQPLLEKVPESDFQWPRDDHGDVDCEKLVEQLKDCSNLQDQADILYILYVIKGPSWDTNLSGQHGVTVQNLLGELYGKAGLNQEWGLIRYISGLLRKKVEVLAEACTDLLSHQKQLTVGLPPEPREKIISAPLPPEELTKLIYEASGQDISIAVLTQEIVVYLAMYVRAQPSLFVEMLRLRIGLIIQVMATELARSLNCSGEEASESLMNLSPFDMKNLLHHILSGKEFGVERSDTRSHHAAQAGLELLGSSSLPTSASQSAGITGVSHRAWPRCALSTPPHPALPSPSTRWAIPESPKLRGVALTD

SEQ ID NO: 885276 - protein, 593 aa, Homo sapiens [sequence omitted]

SEQ ID NO: 885277 - protein, 100 aa, Homo sapiens
IVHKITLSCRRSPHRAEDHFHVGVGSLVQETLVEVGSPAEEIPEEVIQPYQEFSVEVGRLAQETSAINLLSQGIPEIDKPSQEFPEEIDLQAQEVPEEIN

SEQ ID NO: 885278 - protein, 324 aa, Homo sapiens
EFLSRVCQRHTDAQAQASAALFDSMHSSQASDNPFSPPRTLHSPPLQLQQRSEKPPWYSSGPSSTVSSAGPSSPTTVDGNSQFGFSDQPSLNSHVAEEHQGLGLLQETPGSGAQELSIEGEQELFEPNQSPQVPPMETSQPYEEVSQPCQEVPDISQPCQDISEALSQPCQKVPDISQQCQENHDNGNHTCQEVPHISQPCQKSSQLCQKVSEEVCQLCLENSEEVSQPCQGVSVEVGKLVHKFHVGVGSLVQETLVEVGSPAEEIPEEVIQPYQEFSVEVGRLAQETSAINLLSQGIPEIDKPSQEFPEEIDLQAQEVPEEIN

SEQ ID NO: 885279 - protein, 324 aa, Homo sapiens; identical to SEQ ID NO: 885278

SEQ ID NO: 885280 - protein, 377 aa, Homo sapiens
MASSEQAEQPSQPSSTPGSENVLPREPLIATAVKFLQNSRVRQSPLATRRAFLKKKGLTDEEIDMAFQQSGTAADEPSSLGPATQVVPVQPPHLISQPYSPAGSRWRDYGALAIIMAGIAFGFHQLYKKYLLPLILGGREDRKQLERMEAGLSELSGSVAQTVTQLQTTLASVQELLIQQQQKIQELAHELAAAKATTSTNWILESQNINELKSEINSLKGLLLNRRQFPPSPSAPKIPSWQIPVKSPSPSSPAAVNHHSSSDISPVSNESTSSSPGKEGHSPEGSTVTYHLLGPQEEGEGVVDVKGQVRMEVQGEEEKREDKEDEEDEEDDDVSHVDEEDCLGVQREDRRGGDGQINEQVEKLRRPEGASNESERD

SEQ ID NO: 885281 - protein, 184 aa, Homo sapiens
MKNQLEWRSGGTGRIVAGLKLGRGIRFDRLRYRKPVKTGKQHRLSFEIATAVKFLQNSRVRQSPLATRRAFLKKKGLTDEEIDMAFQQSGTAADEPSSLGPATQVVPVQPPHLISQPYSPAGSRWRDYGALAIIMAGIAFGFHQLYKKYLLPLILGGREDRKQLERMEAGLSELSGSVAQTGKD

SEQ ID NO: 885282 - protein, 377 aa, Homo sapiens; identical to SEQ ID NO: 885280

SEQ ID NO: 885283 - protein, 504 aa, Homo sapiens
MASSEQAEQPSQPSSTPGSENVLPREPLIATAVKFLQNSRVRQSPLATRRAFLKKKGLTDEEIDMAFQQSGTAADEPSSLGPATQVVPVQPPHLISQPYSPAGSRWRDYGALAIIMAGIAFGFHQLYKKYLLPLILGGREDRKQLERMEAGLSELSGSVAQTVTQLQTTLASVQELLIQQQQKIQELAHELAAAKATTSTNWILESQNINELKSEINSLKGLLLNRRQFPPSPSAPKIPSWQIPVKSPSPSSPAAVNHHSSSDISPVSNESTSSSPGKEGHSPEGSTVTYHLLGPQEEGEGVVDVKGQVRMEVQGEEEKREDKEDEEDEEDDDVSHVDEEDCLGVQREDRRGGDGQINEQVEKLRRPSPLSRTDALPRVCLLSVLTTVTPRMARASVPTASRLLSGGGAAVPLVSAIPLPPWARPWTRQVPVPSPNPTHAPSSSQTNETTLRFRCPRLPCNGSANPMARWGLTPEEEPGSRAFLTNSQLCPSPQETHVHLCDHV

SEQ ID NO: 885284 - protein, 377 aa, Homo sapiens; identical to SEQ ID NO: 885280

SEQ ID NO: 885285 - protein, 383 aa, Homo sapiens
LVRPGGKGSSEQAEQPSQPSSTPGSENVLPREPLIATAVKFLQNSRVRQSPLATRRAFLKKKGLTDEEIDMAFQQSGTAADEPSSLGPATQVVPVQPPHLISQPYSPAGSRWRDYGALAIIMAGIAFGFHQLYKKYLLPLILGGREDRKQLERMEAGLSELSGSVAQTVTQLQTTLASVQELLIQQQQKIQELAHELAAAKATTSTNWILESQNINELKSEINSLKGLLLNRRQFPPSPSAPKIPSWQIPVKSPSPSSPAAVNHHSSSDISPVSNESTSSSPGKEGHSPEGSTVTYHLLGPQEEGEGVVDVKGQVRMEVQGEEEKREDKEDEEDEEDDDVSHVDEEDCLGVQREDRRGGDGQINEQVEKLRRPEGASNESERD

SEQ ID NO: 885286 - protein, 334 aa, Homo sapiens
MASSEQAEQPSQPSSTPGSENVLPREPLIATAVKFLQNSRVRQSPLATRRAFLKKKGPAGSRWRDYGALAIIMAGIAFGFHQLYKKYLLPLILGGREDRKQLERMEAGLSELSGSVAQTVTQLQTTLASVQELLIQQQQKIQELAHELAAAKATTSTNWILESQNINELKSEINSLKGLLLNRRQFPPSPSAPKIPSWQIPVKSPSPSSPAAVNHHSSSDISPVSNESTSSSPGKEGHSPEGSTVTYHLLGPQEEGEGVVDVKGQVRMEVQGEEEKREDKEDEEDEEDDDVSHVDEEDCLGVQREDRRGGDGQINEQVEKLRRPEGASNESERD

SEQ ID NO: 885287 - protein, 379 aa, Homo sapiens
MASSEQAEQPSQPSSTPGSENVLPREPLIATAVKFLQNSRVRQSPLATRRAFLKKKGLTDEEIDMAFQQSGTAADEPSSLGPATQVVPVQPPHLISQPYSPAGSRWRDYGALAIIMAGIAFGFHQLYKKYLLPLILGGREDRKQLERMEAGLSELSGSVAQTVTQLQTTLASVQELLIQQQQKIQELAHELAAAKATTSTNWILESQNINELKSEINSLKGLLLNRRQFPPSPSAPKIPSWQIPVKSPSPSSPAAVNHHAWPELASLLPPDSSVEEELRSLWCLPSPSLPGPGPGPVRCLSPAFSRTDALPRVCLLSVLTTNETTLRFRCPRLPCNGSANPMARWGLTPEEEPGSRAFLTNSQLCPSPQETHVHLCDHV

SEQ ID NO: 885288 - protein, 72 aa, Homo sapiens
QAPTNKKRKKLVESDEAEQAEQPSQTESHSVDQLECSGAISAYCNLRLPGSSDSPASASQVAGATAKLYSRK

SEQ ID NO: 885289 - protein, 116 aa, Homo sapiens
MAIIERREPCWGSPRSTYKHPSHARLTAELPMHRGSATDSSRDFSSCLLWERENLEVESCQVRGDSINTLDFALKSQKGYPLGANTTPQGYGIFPRTKGKTKIKHKIVPTPDLQVI

SEQ ID NO: 885290 - protein, 67 aa, Homo sapiens
WYGLEVRDPRSRQSSRASQALLQEVKMCCLESRWDLLCCSGWSAVCKHGLLQPSPSGRSDPPASTSM

SEQ ID NO: 885291 - protein, 377 aa, Homo sapiens; identical to SEQ ID NO: 885280

SEQ ID NO: 885292 - protein, 423 aa, Homo sapiens
MASSEQAEQPSQPSSTPGSENVLPREPLIATAVKFLQNSRVRQSPLATRRAFLKKKGLTDEEIDMAFQQSGTAADEPSSLGPATQVVPVQPPHLISQPYSPAGSRWRDYGALAIIMAGIAFGFHQLYKKYLLPLILGGREDRKQLERMEAGLSELSGSVAQTVTQLQTTLASVQELLIQQQQKIQELAHELAAAKATTSTNWILESQNINELKSEINSLKGLLLNRRQFPPSPSAPKIPSWQIPVKSPSPSSPAAVNHHSSSDISPVSNESTSSSPGKEGHSPEGSTVTYHLLGPQEEGEGVVDVKGQVRMEVQGEEEKREDKDGGGAAVPLVSAIPLPPWARPWTRQVPVPSPNPTHAPSSSQTNETTLRFRCPRLPCNGSANPMARWGLTPEEEPGSRAFLTNSQLCPSPQETHVHLCDHV

SEQ ID NO: 885293 - protein, 313 aa, Homo sapiens
MAFQQSGTAADEPSSLGPATQVVPVQPPHLISQPYSPAGSRWRDYGALAIIMAGIAFGFHQLYKKYLLPLILGGREDRKQLERMEAGLSELSGSVAQTVTQLQTTLASVQELLIQQQQKIQELAHELAAAKATTSTNWILESQNINELKSEINSLKGLLLNRRQFPPSPSAPKIPSWQIPVKSPSPSSPAAVNHHSSSDISPVSNESTSSSPGKEGHSPEGSTVTYHLLGPQEEGEGVVDVKGQVRMEVQGEEEKREDKEDEEDEEDDDVSHVDEEDCLGVQREDRRGGDGQINEQVEKLRRPEGASNESERD

SEQ ID NO: 885294 - protein, 198 aa, Homo sapiens
MASSEQAEQPSQPSSTPGSENVLPREPLIATAVKFLQNSRVRQSPLATRRAFLKKKGLTDEEIDMAFQQSGTAADEPSSLGPATQVVPVQPPHLISQPYSPAGSRWRDYGALAIIMAGIAFGFHQLYKPNPTHAPSSSQTNETTLRFRCPRLPCNGSANPMARWGLTPEEEPGSRAFLTNSQLCPSPQETHVHLCDHV

SEQ ID NO: 885295 - protein, 295 aa, Homo sapiens
MDVLPMCSIFQELQIVHETGYFSALPSLEEYWQQTCLELERYLQSEPCYVSASEIKFDSQEDLWTKIILAREKKEESELKISSSPPEDTLISPSFCYNLETNSLNSDVSSESSDSSEELSPTAKFTSDPIGEVLVSSGKLSSSVTSTPPSSPELSREPSQLWGCVPGELPSPGKVRSGTSGKPGDKGNGDASPDGRRRVHRCHFNGCRKVYTKSSHLKAHQRTHTEVSAHAGPGGRPLVGATALHQPWREPGLAAQDVVRADKSSLPQMFSTKALGLFGVQSRILKTGLLSWINV

SEQ ID NO: 885296 - protein, 283 aa, Homo sapiens
MDVLPMCSIFQELQIVHETGYFSALPSLEEYWQQTCLELERYLQSEPCYVSASEIKFDSQEDLWTKIILAREKKEESELKISSSPPEDTLISPSFCYNLETNSLNSDVSSESSDSSEELSPTAKFTSDPIGEVLVSSGKLSSSVTSTPPSSPELSREPSQLWGCVPGELPSPGKVRSGTSGKPGDKGNGDASPDGRRRVHRCHFNGCRKVYTKSSHLKAHQRTHTGEKPYRCSWEGCEWRFARSDELTRHFRKHTGAKPFKCSHCDRCFSRSDHLALHMKRHL

SEQ ID NO: 885297 - protein, 283 aa, Homo sapiens; identical to SEQ ID NO: 885296

SEQ ID NO: 885298 - protein, 283 aa, Homo sapiens; identical to SEQ ID NO: 885296

SEQ ID NO: 885299 - protein, 283 aa, Homo sapiens; identical to SEQ ID NO: 885296

SEQ ID NO: 885300 - protein, 295 aa, Homo sapiens; identical to SEQ ID NO: 885295

SEQ ID NO: 885301 - protein, 295 aa, Homo sapiens; identical to SEQ ID NO: 885295

SEQ ID NO: 885302 - protein, 283 aa, Homo sapiens [sequence omitted]

SEQ ID NO: 885303 - protein, 305 aa, Homo sapiens
MDVLPMCSIFQELQIVHETGYFSALPSLEEYWQQWLESLKWWGEGMLISAVVASWKTCLELERYLQSEPCYVSASEIKFDSQEDLWTKIILAREKKEESELKISSSPPEDTLISPSFCYNLETNSLNSDVSSESSDSSEELSPTAKFTSDPIGEVLVSSGKLSSSVTSTPPSSPELSREPSQLWGCVPGELPSPGKVRSGTSGKPGDKGNGDASPDGRRRVHRCHFNGCRKVYTKSSHLKAHQRTHTGEKPYRCSWEGCEWRFARSDELTRHFRKHTGAKPFKCSHCDRCFSRSDHLALHMKRHL

SEQ ID NO: 885304 - protein, 270 aa, Homo sapiens
MDVLPMCSIFQELQIVHETGYFSALPSLEEYWQQTCLELERYLQSEPCYVSASEIKFDSQEDLWTKIILAREKKEESELKISSSPPEDTLISPSFCYNLETNSLNSDVSSESSDSSEELSPTAKFTSDPIGEVLVSSGKLSSSVTSTPPSSPELSREPSQLWGCVPGELPSPGKVRSGTSGKPGDKGNGDASPDGRRRVHRCHFNGCRKVYTKSSHLKAHQRTHTGEKPYRCSWEGCEWRFARSDELTRHFRKHTGGLSLEGLLRAKKVL

SEQ ID NO: 885305 - protein, 283 aa, Homo sapiens; identical to SEQ ID NO: 885296

SEQ ID NO: 885306 - protein, 295 aa, Homo sapiens; identical to SEQ ID NO: 885295

SEQ ID NO: 885307 - protein, 140 aa, Homo sapiens
MDVLPMCSIFQELQIVHETGYFSALPSLEEYWQQVNAAGRGSLRAPGRGPGRLFGVQTRCSLRSAGPGPRAVTGGAGAAPPPIDPPGCDQRPPREAPTPGTARPSPWHEFGACPRSRRHSWSLSWGPTCSACQGLSKVRR

SEQ ID NO: 885308 - protein, 283 aa, Homo sapiens; identical to SEQ ID NO: 885296

SEQ ID NO: 885309 - protein, 283 aa, Homo sapiens; identical to SEQ ID NO: 885296

SEQ ID NO: 885310 - protein, 283 aa, Homo sapiens; identical to SEQ ID NO: 885296

SEQ ID NO: 885311 - protein, 283 aa, Homo sapiens; identical to SEQ ID NO: 885296

SEQ ID NO: 885312 - protein, 283 aa, Homo sapiens; identical to SEQ ID NO: 885296

SEQ ID NO: 885313 - protein, 383 aa, Homo sapiens
MDVLPMCSIFQELQIVHETGYFSALPSLEEYWQQVNAAGRGSLRAPGRGPGRLFGVQTRCSLRSAGPGPRAVTGGAGAAPPPIDPPGCDQRPPREAPTPGTARPSPWHEFGACPRSRRHSWSLSWGPTCSACQGTCLELERYLQSEPCYVSASEIKFDSQEDLWTKIILAREKKEESELKISSSPPEDTLISPSFCYNLETNSLNSDVSSESSDSSEELSPTAKFTSDPIGEVLVSSGKLSSSVTSTPPSSPELSREPSQLWGCVPGELPSPGKVRSGTSGKPGDKGNGDASPDGRRRVHRCHFNGCRKVYTKSSHLKAHQRTHTGEKPYRCSWEGCEWRFARSDELTRHFRKHTGAKPFKCSHCDRCFSRSDHLALHMKRHL

SEQ ID NO: 885314 - protein, 228 aa, Homo sapiens
MDVLPMCSIFQELQIVHETGYFSALPSLEEYWQQTCLELERYLQSEPCYVSASEIKFDSQEDLWTKIILAREKKEESELKISSSPPEDTLISPSFCYNLETNSLNSDVSSESSDSSEELSPTAKFTSDPIGEVLVSSGKLSSSVTSTPPSSPELSREPSQLWGCVPGELPSPGKVRSGTSGKPGDKGNGDASPDGRRRVHRCHFNGCRKVYTKSSHLKAHQRTHTDAH

SEQ ID NO: 885315 - protein, 283 aa, Homo sapiens; identical to SEQ ID NO: 885296

SEQ ID NO: 885316 - protein, 267 aa, Homo sapiens
CQEEEERGRRRCAESRGPAKASAARATMATDELATKLSRRLQMEGEGGGETPEQPGLNGAAAAAAGAPDEAAEALGSADCELSAKLLRRADLNQGIGEPQSPSRRVFNPYTEFKEFSRKQIKDMEKMFKQYDAGRDGFIDLMELKLMMEKLGAPQTHLGLKNMIKEVDEDFDSKLSFREFLLIFRKAAAGELQEDSGLCVLARLSEIDVSSEGVKGAKSFFEAKVQAINVSSRFEEEIKAEQEERKKQAEEMKQRKAAFKELQSTFK

SEQ ID NO: 885317 - protein, 267 aa, Homo sapiens; identical to SEQ ID NO: 885316

SEQ ID NO: 885318 - protein, 104 aa, Homo sapiens
RLCRAGVNRPRLSFREFLLIFRKAAAGELQEDSGLCVLARLSEIDVSSEGVKGAKSFFEAKVQAINVSSRFEEEIKAEQEERKKQAEEMKQRKAAFKELQSTFK

SEQ ID NO: 885319 - protein, 303 aa, Homo sapiens
CQEEEERGRRRCAESRGPAKASAARATMATDELATKLSRRLQMEGEGGGETPEQPGLNGAAAAAAGAPDEAAEALGSADCELSAKLLRRADLNQGIGEPQSPSRRVFNPYTEFKEFSRKQIKDMEKMFKQYDAGRDGFIDLMELKLMMEKLGAPQTHLGLKNMIKEVDEDFDSKLSFREFLLIFRKAAAGELQEDSGLCVLARLSEIDVSSEGVKGAKSFFEAKWNWVCRWGPRTGSRGSGWQQLERLPSSALALQQPQNIGPGHQRVQPLRGGDQGRAGGKEEAGGGDEAAESGLQGAAVHL

SEQ ID NO: 885320 - protein, 151 aa, Homo sapiens
MAVVSLDMVLPVRLIAYDAGALSIADVPACWVPPVATGLSLGHPMLDAWLAFYACDGADVCCAVPGTPALLQQAAPPLGPPASPFPGWETAEEIESGLPPQSGTQGANWRHEGTPPQGLFLLCVFHLLKWERGWGASVLVKGPGQAPSTPC

SEQ ID NO: 885321 - protein, 292 aa, Homo sapiens
CQEEEERGRRRCAESRGPAKASAARATMATDELATKLSRRLQMEGEGGGETPEQPGLNGAAAAAAGAPDEAAEALGSADCELSAKLLRRADLNQGIGEPQSPSRRVFNPYTEFKEFSRKQIKDMEKMFKQYDAGRDGFIDLMELKLMMEKLGAPQTHLGLKNMIKEVDEDFDSKLSFREFLLIFRKAAAGELQEDSGLCVLARLSEIDVSSEGVKGAKSFFEAKWNWVCRWGPRTGSRGSGWQQLERLPSSALALQQPQNIGSLFQSSQQLPKIRVIGCQVLSEETEAQEGE

SEQ ID NO: 885322 - protein, 267 aa, Homo sapiens; identical to SEQ ID NO: 885316

SEQ ID NO: 885323 - protein, 288 aa, Homo sapiens
MAVVSLDMVLPVRLIAYDAGALSIADVPACWVPPVATGLSLGHPMLDAWLAFYACDGADVCCAVLMTPVMQALVLELWACCACVLAGAPDEAAEALGSADCELSAKLLRRADLNQGIGEPQSPSRRVFNPYTEFKEFSRKQIKDMEKMFKQYDAGRDGFIDLMELKLMMEKLGAPQTHLGLKNMIKEVDEDFDSKLSFREFLLIFRKAAAGELQEDSGLCVLARLSEIDVSSEGVKGAKSFFEAKVQAINVSSRFEEEIKAEQEERKKQAEEMKQRKAAFKELQSTFK

SEQ ID NO: 885324 - protein, 267 aa, Homo sapiens; identical to SEQ ID NO: 885316

SEQ ID NO: 885325 - protein, 267 aa, Homo sapiens; identical to SEQ ID NO: 885316

SEQ ID NO: 885326 - protein, 267 aa, Homo sapiens; identical to SEQ ID NO: 885316

SEQ ID NO: 885327 - protein, 244 aa, Homo sapiens
MGCRDVHAATVLSFLCGIASVAGLFAGTLLPNWRKLRLITFNRNEKNLTVYTGLWVKCARYDGSSDCLMYDTTWYSSVDQLDLRVLQFALPLSMLIAMGALLLCLIGMCNTAFRSSVPNIKLAKCLVNSAGCHLVAGLLFFLAGTVSLSPSIWVIFYNIHLNKKFEPVFSFDYAVYVTIASAGGLFMTSLILFIWYCTCKSLPSPFWQPLYSHPPSMHTYSQPYSARSRLSAIEIDIPVVSHTT

SEQ ID NO: 885328 - protein, 244 aa, Homo sapiens; identical to SEQ ID NO: 885327

SEQ ID NO: 885329 - protein, 244 aa, Homo sapiens; identical to SEQ ID NO: 885327

SEQ ID NO: 885330 - protein, 240 aa, Homo sapiens
SEHTDGHTSVQSVIEKLQEENRLLKQKVTHVEDLNAKWQRYNASRDEYVRGLHAQLRGLQIPHEPELMRKEISRLNRQLEEKINDCAEVKQELAASRTARDAALERVQMLEQQILAYKDDFMSERADRERAQSRIQELEEKVASLLHQVSWRQDSREPDAGRIHAGSKTAKYLAADALELMVPGGWRPGTGSQQPEPPAEGGHPGAVQRGQGDLQCPHCLQCFSDEQGEELLRHVAECCQ

SEQ ID NO: 885331 - protein, 240 aa, Homo sapiens; identical to SEQ ID NO: 885330

SEQ ID NO: 885332 - protein, 134 aa, Homo sapiens
ISRLNRQLEEKINDCAEVKQELAASRTARDAALERVQMLEQQVSVPRAPDGTDQMLLAGGGRNHGTGWAEGLVALSGQWSRWGWEKPGGALPPSLSRNVCLASLQILAYKDDFMSERADRERAQSRIQELEEKV

SEQ ID NO: 885333 - protein, 135 aa, Homo sapiens
KCGHFLLPVLTHPGCCPLWLPWKYNSRRTQTRTGRPCSGWQWSLARCPPGLGLLWQRKHEVGPGLPSSELRCPLGFLPPCSLAGPLHPRTQRSGFAPPPGWLEVGPLPGWPQVPSPPGRLSFPLCPMQRCRDSLL

SEQ ID NO: 885334 - protein, 236 aa, Homo sapiens
MTSLFRRSSSGSGGGGTAGARGGGGGTAAPQELNNSRPARQVRRLEFNQAMDDFKTMFPNMDYDIIECVLRANSGAVDATIDQLLQMNLEGGGSSGGVYEDSSDSEDSIPPEILERTLEPDSSDEEPPPVYSPPAYHMHVFDRPYPLAPPTPPPRIDALGSGAPTSQRRYRNWNPPLLGNLPDDFLRILPQQLDSIQGNAGGPKPGSGEGCPPAMAGPGPGDQESRWKQYLEDEID

SEQ ID NO: 885335 - protein, 386 aa, Homo sapiens
MTSLFRRSSSGSGGGGTAGARGGGGGTAAPQELNNSRPARQVRRLEFNQAMDDFKTMFPNMDYDIIECVLRANSGAVDATIDQLLQMNLEGGGSSGGVYEDSSDSEDSIPPEILERTLEPDSSDEEPPPVYSPPAYHMHVFDRPYPLAPPTPPPRIDALGSGAPTSQRRYRNWNPPLLGNLPDDFLRILPQQLDSIQGNAGGPKPGSGEGCPPAMAGPGPGDQESRWKQYLEDERIALFLQNEEFMKELQRNRDFLLALERDRLKYESQKSKSSSVAVGNDFGFSSPVPGTGDANPAVSEDALFRDKLKHMGKSTRRKLFELARAFSEKTKMRKSKRKHLLKHQSLGAAASTANLLDDVEGHACDEDFRGRRQEAPKVEEGLREGQ

SEQ ID NO: 885336 - protein, 386 aa, Homo sapiens; identical to SEQ ID NO: 885335

SEQ ID NO: 885337 - protein, 342 aa, Homo sapiens
MTSLFRRSSSGSGGGGTAGARGGGGGTAAPQELNNSRPARQVRRLEFNQAMDDFKTMFPNMDYDIIECVLRANSGAVDATIDQLLQMNLEGGGSSGGVYEDSSDSEDSIPPEILERTLEPDSSDEEPPPVYSPPAYHMHVFDRPYPLAPPTPPPRIDALGSGAPTSQRRYRNWNPPLLGNLPDDFLRILPQQLDSIQGNAGGPKPGSGEGCPPAMAGPGPGDQESRWKQYLEDERIALFLQNEEFMKELQRNRDFLLALERDRLKYESQKSKSSSVAVGNDFGFSSPVPGTGDANPAVSEDALFRDKLKHMGKSTRRKLFELARAFSEKTAGGCRVNSQPPG

SEQ ID NO: 885338 - protein, 66 aa, Homo sapiens
RIPLSLRIVCCALGTLRHAARSSSLSWSGSVFVKLVARPSWVRPVFVILVVLFPRVSSLAQSRGRA

SEQ ID NO: 885339 - protein, 386 aa, Homo sapiens; identical to SEQ ID NO: 885335

SEQ ID NO: 885340 - protein, 386 aa, Homo sapiens; identical to SEQ ID NO: 885335

SEQ ID NO: 885341 - protein, 386 aa, Homo sapiens; identical to SEQ ID NO: 885335

SEQ ID NO: 885342 - protein, 386 aa, Homo sapiens; identical to SEQ ID NO: 885335

SEQ ID NO: 885343 - protein, 386 aa, Homo sapiens; identical to SEQ ID NO: 885335

SEQ ID NO: 885344 - protein, 312 aa, Homo sapiens
MTSLFRRSSSGSGGGGTAGARGGGGGTAAPQELNNSRPARQVRRLEFNQAMDDFKTMFPNMDYDIIECVLRANSGAVDATIDQLLQMNLEGGGSSGGVYEDSSDSEDSIPPEILERTLEPDSSDEEPPPVYSPPAYHMHVFDRPYPLAPPTPPPRIDALGSGAPTSQRRYRNWNPPLLGNLPDDFLRILPQQLDSIQGNAGGPKPGSGEGCPPAMAGPGPGDQESRWKQYLEDERIALFLQNEEFMKELQRNRDFLLALERDRLKYESQKSKSSSVAVGNDFGFSSPVPGNFAFWGRKPRGIVGSSHPTLLC

SEQ ID NO: 885345 - protein, 304 aa, Homo sapiens
MSLMVVSMACVGFFLLQGAWPHEGVHRKPSLLAHPGPLVKSEETVILQCWSDVRFEHFLLHREGKFKDTLHLIGEHHDGVSKANFSIGPMMQDLAGTYRCYGSVTHSPYQLSAPSDPLDIVITGLYEKPSLSAQPGPTVLAGESVTLSCSSRSSYDMYHLSREGEAHERRFSAGPKVNGTFQADFPLGPATHGGTYRCFGSFRDSPYEWSNSSDPLLVSVTGNPSNSWPSPTEPSSKTGNPRHLHVLIGTSVVKSLSPSSSSFSFIAGAPTKKMHAVMDQEPAGNRTVNREDSDEQDHQEVSYA

SEQ ID NO: 885346 - protein, 304 aa, Homo sapiens
MSLMVVSMACVGFFLLQGAWPHEGVHRKPSLLAHPGPLVKSEETVILQCWSDVRFEHFLLHREGKYKDTLHLIGEHHDGVSKANFSIGPMMQDLAGTYRCYGSVTHSPYQLSAPSDPLDIVITGLYEKPSLSAQPGPTVLAGESVTLSCSSRSSYDMYHLSREGEAHERRFSAGPKVNGTFQADFPLGPATHGGTYRCFGSFRDSPYEWSNSSDPLLVSVTGNPSNSWPSPTEPSSKTGNPRHLHVLIGTSVVKIPFTILLFFLLHRWCSNKKNAAVMDQEPAGNRTVNSEDSDEQDHQEVSYA

SEQ ID NO: 885347 - protein, 382 aa, Homo sapiens
MSLMVVSMACVGLFLVQRAGPHMGGQDKPFLSAWPSAVVPRGGHVTLRCHYRHRFNNFMLYKEDRIHVPIFHGRIFQEGFNMSPVTTAHAGNYTCRGSHPHSPTGWSAPSNPMVIMVTGNHRKPSLLAHPGPLVKSGERVILQCWSDIMFEHFFLHKEWISKDPSRLVGQIHDGVSKANFSIGSMMRALAGTYRCYGSVTHTPYQLSAPSDPLDIVVTGLYEKPSLSAQPGPKVQAGESVTLSCSSRSSYDMYHLSREGGAHERRLPAVRKVNRTFQADFPLGPATHGGTYRCFGSFRHSPYEWSDPSDPLLVSVTGNPRHLHVLIGTSVVKIPFTILLFFLLHRWCSNKKNAAVMDQEPAGNRTVNSEDSDEQDHQEVSYA

SEQ ID NO: 885348 - protein, 204 aa, Homo sapiens
MSLMVVSMACVGFFLLQGAWPHEGLYEKPSLSAQPGPTVLAGESVTLSCSSRSSYDMYHLSREGEAHERRFSAGPKVNGTFQADFPLGPATHGGTYRCFGSFRDSPYEWSNSSDPLLVSVTGNPSNSWPSPTEPSSKTGNPRHLHVLIGTSVVKIPFTILLFFLLHRWCSNKKNAAVMDQEPAGNRTVNSEDSDEQDHQEVSYA

SEQ ID NO: 885349 - protein, 110 aa, Homo sapiens
TGSTMSLMVVSMACVGFFLLQGAWPHEGNPSNSWPSPTEPSSKTGNPRHLHVLIGTSVVKIPFTILLFFLLHRWCSNKKNAAVMDQEPAGNRTVNSEDSDEQDHQEVSYA

SEQ ID NO: 885350 - protein, 386 aa, Homo sapiens
TGSTMSLMVVSMACVGLFLVQRAGPHMGGQDKPFLSAWPSAVVPRGGHVTLRCHYRHRFNNFMLYKEDRIHVPIFHGRIFQEGFNMSPVTTAHAGNYTCRGSHPHSPTGWSAPSNPMVIMVTGNHRKPSLLAHPGPLVKSGERVILQCWSDIMFEHFFLHKEWISKDPSRLVGQIHDGVSKANFSIGSMMRALAGTYRCYGSVTHTPYQLSAPSDPLDIVVTGLYEKPSLSAQPGPKVQAGESVTLSCSSRSSYDMYHLSREGGAHERRLPAVRKVNRTFQADFPLGPATHGGTYRCFGSFRHSPYEWSDPSDPLLVSVTGNPSSSWPSPTEPSSKSGNLRHLHILIGTSVVKIPFTILLFFLLHRWCSNKKKCCCNGPRACREQK

SEQ ID NO: 885351 - protein, 287 aa, Homo sapiens
MSLMVVSMACVGFFLLQGAWPHEGVHRKPSLLAHPGPLVKSEETVILQCWSDVRFEHFLLHREGKYKDTLHLIGEHHDGVSKANFSIGPMMQDLAGTYRCYGSVTHSPYQLSAPSDPLDIVITGLYEKPSLSAQPGPTVLAGESVTLSCSSRSSYDMYHLSREGEAHERRFSAGPKVNGTFQADFPLGPATHGGTYRCFGSFRDSPYEWSNSSDPLLVSVTGNPRHLHVLIGTSVVKIPFTILLFFLLHRWCSNKKNAAVMDQEPAGNRTVNSEDSDEQDHQEVSYA

SEQ ID NO: 885352 - protein, 206 aa, Homo sapiens
MSLMVVSMACVGFFLLQGAWPHEGVHRKPSLLAHPGPLVKSEETVILQCWSDVRFEHFLLHREGKYKDTLHLIGEHHDGVSKANFSIGPMMQDLAGTYRCFGSFRDSPYEWSNSSDPLLVSVTGNPSNSWPSPTEPSSKTGNPRHLHVLIGTSVVKIPFTILLFFLLHRWCSNKKNAAVMDQEPAGNRTVNSEDSDEQDHQEVSYA

SEQ ID NO: 885353 - protein, 210 aa, Homo sapiens
KSRCCGGRCSSGGPVVARPPAPVRSGPATEAAQRRDSEPTPPSELRRTVPSHPAPTSPMGPQRRLSPAGAALLWGFLLQLTAAQEAILHASGNGTTKDYCMLYNPYWTALPSTLENATSISLMNLTSTPLCNLSDIPPVGIKSKAVVVPWGSCHFLEKARIAQKGGAEAMLVVNNSVLFPPSGNRSEFPDVKILIAFISYKDFRDMNQVN

SEQ ID NO: 885354 - protein, 581 aa, Homo sapiens
GLVLVGILGWRCSSGGPVVARPPAPVRSGPATEAAQRRDSEPTPPSELRRTVPSHPAPTSPMGPQRRLSPAGAALLWGFLLQLTAAQEAILHASGNGTTKDYCMLYNPYWTALPSTLENATSISLMNLTSTPLCNLSDIPPVGIKSKAVVVPWGSCHFLEKARIAQKGGAEAMLVVNNSVLFPPSGNRSEFPDVKILIAFISYKDFRDMNQTLGDNITVKMYSPSWPNFDYTMVVIFVIAVFTVALGGYWSGLVELENLKAVTTEDREMRKKKEEYLTFSPLTVVIFVVICCVMMVLLYFFYKWLVYVMIAIFCIASAMSLYNCLAALIHKIPYGQCTIACRGKNMEVRLIFLSGLCIAVAVVWAVFRNEDRWAWILQDILGIAFCLNLIKTLKLPNFKSCVILLGLLLLYDVFFVFITPFITKNGESIMVELAAGPFGNNEKLPVVIRVPKLIYFSVMSVCLMPVSILGFGDIIVPGLLIAYCRRFDVQTGSSYIYYVSSTVAYAIGMILTFVVLVLMKKGQPALLYLVPCTLITASVVAWRRKEMKKFWKGNSYQMMDHLDCATNEENPVISGEQIVQQ

SEQ ID NO: 885355 - protein, 599 aa, Homo sapiens
GLVLVGILGWRCSSGGPVVARPPAPVRSGPATEAAQRRDSEPTPPSELRRTVPSHPAPTSPMGPQRRLSPAGAALLWGFLLQLTAAQEAILHASGNGTTKDYCMLYNPYWTALPSTLENATSISLMNLTSTPLCNLSDIPPVGIKSKAVVVPWGSCHFLEKARIAQKGGAEAMLVVNNSVLFPPSGNRSEFPDVKILIAFISYKDFRDMNQTLGDNITVKMYSPSWPNFDYTMVVIFVIAVFTVALGGYWSGLVELENLKAVTTEDREMRKKKEEYLTFSPLTVVIFVVICCVMMVLLYFFYKWLVYVMIAIFCIASAMSLYNCLAALIHKIPYGQCTIACRGKNMEVRLIFLSGLCIAVAVVWAVFRNEDRWAWILQDILGIAFCLNLIKTLKLPNFKSCVILLGLLLLYDVFFVFITPFITKNGESIMVELAAGPFGNNEKNDGNLVEATGQPSAPHEKLPVVIRVPKLIYFSVMSVCLMPVSILGFGDIIVPGLLIAYCRRFDVQTGSSYIYYVSSTVAYAIGMILTFVVLVLMKKGQPALLYLVPCTLITASVVAWRRKEMKKFWKGNSYQMMDHLDCATNEENPVISGEQIVQQ

SEQ ID NO: 885356 - protein, 581 aa, Homo sapiens; identical to SEQ ID NO: 885354

SEQ ID NO: 885357 - protein, 513 aa, Homo sapiens
GLVLVGILGWRCSSGGPVVARPPAPVRSGPATEAAQRRDSEPTPPSELRRTVPSHPAPTSPMGPQRRLSPAGAALLWGFLLQLTAAQEAILHASGNGTTKDYCMLYNPYWTALPSTLENATSISLMNLTSTPLCNLSDIPPVGIKSKAVVVPWGSCHFLEKARIAQKGGAEAMLVVNNSVLFPPSGNRSEFPDVKILIAFISYKDFRDMNQTLGDNITVKMYSPSWPNFDYTMVVIFVIAVFTVALGGYWSGLVELENLKAVTTEDREMRKKKEEYLTFSPLTVVIFVVICCVMMVLLYFFYKWLVYVMIAIFCIASAMSLYNCLAALIHKIPYGQCTIACRGKNMEVRLIFLSGLCIAVAVVWAVFRNEDRWAWILQDILGIAFCLNLIKTLKLPNFKSCVILLGLLLLYDVFFVFITPFITKNGESIMVELAAGPFGNNEKLPVVIRVPKLIYFSVMSVCLMPVSILGFGDIIVPGLLIAYCRRFDVQTGSSYIYYVSSTVDDGPFGLCNK

SEQ ID NO: 885358 - protein, 167 aa, Homo sapiens
MSKDCQEVHWRPLFCFLFCFVLFCFVFEQLPVVIRVPKLIYFSVMSVCLMPVSILGFGDIIVPGLLIAYCRRFDVQTGSSYIYYVSSTVAYAIGMILTFVVLVLMKKGQPALLYLVPCTLITASVVAWRRKEMKKFWKGNSYQMMDHLDCATNEENPVISGEQIVQQ

SEQ ID NO: 885359 - protein, 374 aa, Homo sapiens
GLVLVGILGWRCSSGGPVVARPPAPVRSGPATEAAQRRDSEPTPPSELRRTVPSHPAPTSPMGPQRRLSPAGAALLWGFLLQLTAAQEAILHASGNGTTKDYCMLYNPYWTALPSTLENATSISLMNLTSTPLCNLSDIPPVGIKSKAVVVPWGSCHFLEKARIAQKGGAEAMLVVNNSVLFPPSGNRSEFPDVKILIAFISYKDFRDMNQTLGDNITVKMYSPSWPNFDYTMVVIFVIAVFTVALGGYWSGLVELENLKAVTTEDREMRKKKEEYLTFSPLTVVIFVVICCVMMVLLYFFYKWLVYVMIAIFCIASAMSLYNCLAALIHKIPYGQCTIACRGKNMEVRLIFLSGLCIAVAVVWAVFRNEDSHV

SEQ ID NO: 885360 - protein, 280 aa, Homo sapiens
GLVLVGILGWRCSSGGPVVARPPAPVRSGPATEAAQRRDSEPTPPSELRRTVPSHPAPTSPMGPQRRLSPAGAALLWGFLLQLTAAQEAILHASGNGTTKDYCMLYNPYWTALPSTLENATSISLMNLTSTPLCNLSDIPPVGIKSKAVVVPWGSCHFLEKARIAQKGGAEAMLVVNNSVLFPPSGNRSEFPDVKILIAFISYKDFRDMNQTLGDNITVKMYSPSWPNFDYTMVVIFVIAVFTVALGGYWSGLVEFLCYDSNFLHSISNESVQLSCCTNS

SEQ ID NO: 885361 - protein, 581 aa, Homo sapiens; identical to SEQ ID NO: 885354

SEQ ID NO: 885362 - protein, 599 aa, Homo sapiens; identical to SEQ ID NO: 885355

SEQ ID NO: 885363 - protein, 513 aa, Homo sapiens; identical to SEQ ID NO: 885357

SEQ ID NO: 885364 - protein, 261 aa, Homo sapiens
GLVLVGILGWRCSSGGPVVARPPAPVRSGPATEAAQRRDSEPTPPSELRRTVPSHPAPTSPMGPQRRLSPAGAALLWGFLLQLTAAQEAILHASGNGTTKDYCMLYNPYWTALPSTLENATSISLMNLTSTPLCNLSDIPPVGIKSKAVVVPWGSCHFLEKARIAQKGGAEAMLVVNNSVLFPPSGNRSEFPDVKILIAFISYKDFRDMNQTLGDNITVKMYSPSWPNFDYTMVVIFVIAVFTVALGGYWSGLVELKPCKQ

SEQ ID NO: 885365 - protein, 168 aa, Homo sapiens
MLFRLSEHSSPEEEASPHQRASGEGHHLKSKRPNPCAYTPPSLKAVQRIAESHLQSISNLNENQASEEEDELGELRELGYPREEDEEEEEDDEEEEEEEDSQAEVLKVIRQSAGQKTTCGQGLEGPWERPPPLDESERDGGSEDQVEDPALSEPGEEPQRPSPSEPGT

SEQ ID NO: 885366 - protein, 145 aa, Homo sapiens
QLLAVHSWILTNQIQAASREPRLLVVLTPRADHQPLTEASYVNLPTIALCNTDSPLRYVDIAIPCNNKGAHSVGLMWWMLAREVLRMRGTISREHPWEVMPDLYFYRDPEEIEKEEQAAAEKAVTKEEFQGEWTAPAPEFHCYSA

SEQ ID NO: 885367 - protein, 204 aa, Homo sapiens
MDPKDRKKIQFSVPAPPSQLDPRQVEMIRRRRPTPAMLFRLSEHSSPEEEASPHQRASGEGHHLKSKRPNPCAYTPPSLKAVQRIAESHLQSISNLNENQASEEEDELGELRELGYPREEDEEEEEDDEEEEEEEDSQAEVLKVIRQSAGQKTTCGQGLEGPWERPPPLDESERDGGSEDQVEDPALSEPGEEPQRPSPSEPGT

SEQ ID NO: 885368 - protein, 290 aa, Homo sapiens
AACVVAAAAASRQLASGNRTRVSSGVPAPAFLGTMNPNCARCGKIVYPTEKVNCLDKPAACAGEPSTDRRRDPESRTPAPPATPRAMDPKDRKKIQFSVPAPPSQLDPRQVEMIRRRRPTPAMLFRLSEHSSPEEEASPHQRASGEGHHLKSKRPNPCAYTPPSLKAVQRIAESHLQSISNLNENQASEEEDELGELRELGYPREEDEEEEEDDEEEEEEEDSQAEVLKVIRQSAGQKTTCGQGLEGPWERPPPLDESERDGGSEDQVEDPALSEPGEEPQRPSPSEPGT

SEQ ID NO: 885369 - protein, 300 aa, Homo sapiens
SSSGETAGGPPAGSPGLGSNSHPPPSPRRTRFSMLIGQFPLNPPSEHPGASAQAEGTGWGPQSWDRRPAACAGEPSTDRRRDPESRTPAPPATPRAMDPKDRKKIQFSVPAPPSQLDPRQVEMIRRRRPTPAMLFRLSEHSSPEEEASPHQRASGEGHHLKSKRPNPCAYTPPSLKAVQRIAESHLQSISNLNENQASEEEDELGELRELGYPREEDEEEEEDDEEEEEEEDSQAEVLKVIRQSAGQKTTCGQGLEGPWERPPPLDESERDGGSEDQVEDPALSEPGEEPQRPSPSEPGT

SEQ ID NO: 885370 - protein, 253 aa, Homo sapiens
SSSGETAGGPPAGSPGLGSNSHPPPSPRRTRFSMLIGQFPLNPPSEHPGAIPGGGDGLGTPKLGPEGEPGRGRDTRGEEERLREGGGEGRERQREETRRDTQEGRDTETQRHSGGERHRDAETPRPGSARERGTDLAQRARGASPESREPGGAPSPGADPPPAPAPSPRRARYFYPCANSPPPPLAAQPAACAGEPSTDRRRDPESRTPAPPATPRAMDPKPESLRRGAPSQVEETQPLCLHTTFAESCAAHC

SEQ ID NO: 885371 - protein, 234 aa, Homo sapiens
AACVVAAAAASRQLASGNRTRVSSGVPAPAFLGTMNPNCARCGKIVYPTEKVNCLDKIRRRRPTPAMLFRLSEHSSPEEEASPHQRASGEGHHLKSKRPNPCAYTPPSLKAVQRIAESHLQSISNLNENQASEEEDELGELRELGYPREEDEEEEEDDEEEEEEEDSQAEVLKVIRQSAGQKTTCGQGLEGPWERPPPLDESERDGGSEDQVEDPALSEPGEEPQRPSPSEPGT

SEQ ID NO: 885372 - protein, 218 aa, Homo sapiens
FTSHKDWVKSSAALQRLEKKPKPRPPERSPRPLWVPEPQLEIRRRRPTPAMLFRLSEHSSPEEEASPHQRASGEGHHLKSKRPNPCAYTPPSLKAVQRIAESHLQSISNLNENQASEEEDELGELRELGYPREEDEEEEEDDEEEEEEEDSQAEVLKVIRQSAGQKTTCGQGLEGPWERPPPLDESERDGGSEDQVEDPALSEPGEEPQRPSPSEPGT

SEQ ID NO: 885373 - protein, 145 aa, Homo sapiens
TPQTASRIETNPCAYTKPSLKAVQRIAESHLQSISNLNENQASEEEDELGELRELGYPREEDEEEEEDDEEEEEEEDSQAEVLKVIRQSAGQKTTCGQGLEGPWERPPPLDESERDGGSEDQVEDPALSEPGEEPQRPSPSEPGT

SEQ ID NO: 885374 - protein, 204 aa, Homo sapiens; identical to SEQ ID NO: 885367

SEQ ID NO: 885375 - protein, 204 aa, Homo sapiens; identical to SEQ ID NO: 885367

SEQ ID NO: 885376 - protein, 1167 aa, Homo sapiens
QFPAVPLEPLPTTEGTPGLPLQQAEERYESQEPLAGQESPLPLATREAALPILEPVLGQEQPAAPDQPCVLFADAPEPGQALPVEEEAVTLARAETTQARTEAQDLCRASPEPPGPESSSRWLDDLLASPPPSGGGARRGAGAELKDTQSPSTCSEGLLGWSQKDLQSEFGITGDPQPSSFSPSSWCQGASQDYGLGGASPRGDPGLGERDWTSKYGQGAGEGSTREWASRCGIGQEEMEASSSQDQSKVSAPGVLTAQDRVVGKPAQLGTQRSQEADVQDWEFRKRDSQGTYSSRDAELQDQEFGKRDSLGTYSSRDVSLGDWEFGKRDSLGAYASQDANEQGQDLGKRDHHGRYSSQDADEQDWEFQKRDVSLGTYGSRAAEPQEQEFGKSAWIRDYSSGGSSRTLDAQDRSFGTRPLSSGFSPEEAQQQDEEFEKKIPSVEDSLGEGSRDAGRPGERGSGGLFSPSTAHVPDGALGQRDQSSWQNSDASQEVGGHQERQQAGAQGPGSADLEDGEMGKRGWVGEFSLSVGPQREAAFSPGQQDWSRDFCIEASERSYQFGIIGNDRVSGAGFSPSSKMEGGHFVPPGKTTAGSVDWTDQLGLRNLEVSSCVGSGGSSEARESAVGQMGWSGGLSLRDMNLTGCLESGGSEEPGGIGVGEKDWTSDVNVKSKDLAEVGEGGGHSQARESGVGQTDWSGVEAGEFLKSRERGVGQADWTPDLGLRNMAPGAVCSPGESKELGVGQMDWGNNLGLRDLEVTCDPDSGGSQGLRGCGVGQMDWTQDLAPQNVELFGAPSEAREHGVGGVSQCPEPGLRHNGSLSPGLEARDPLEARELGVGETSGPETQGEDYSSSSLEPHPADPGMETGEALSFGASPGRCPARPPPSGSQGLLEEMLAASSSKAVARRESAASGLGGLLEEEGAGAGAAQEEVLEPGRDSPPSWRPQPDGEASQTEDVDGTWGSSAARWSDQGPAQTSRRPSQGPPARSPSQDFSFIEDTEILDSAMYRSRANLGRKRGHRAPVIRPGGTLGLSEAADSDAHLFQDSTEPRASRVPSSDEEVVEEPQSRRTRMSLGTKGLKVNLFPGLSPSALKAKLRPRNRSAEEGELAESKSSQKESAVQRSKSCKVPGLGKPLTLPPKPEKSSGSEGSSPNWLQALKLKKKKV

SEQ ID NO: 885377 - protein, 649 aa, Homo sapiens
MGKRGWVGEFSLSVGPQREAAFSPGQQDWSRDFCIEASERSYQFGIIGNDRVSGAGFSPSSKMEGGHFVPPGKTTAGSVDWTDQLGLRNLEVSSCVGSGGSSEARESAVGQMGWSGGLSLRDMNLTGCLESGGSEEPGGIGVGEKDWTSDVNVKSKDLAEVGEGGGHSQARESGVGQTDWSGVEAGEFLKSRERGVGQADWTPDLGLRNMAPGAVCSPGESKELGVGQMDWGNNLGLRDLEVTCDPDSGGSQGLRGCGVGQMDWTQDLAPQNVELFGAPSEAREHGVGGVSQCPEPGLRHNGSLSPGLEARDPLEARELGVGETSGPETQGEDYSSSSLEPHPADPGMETGEALSFGASPGRCPARPPPSGSQGLLEEMLAASSSKAVARRESAASGLGGLLEEEGAGAGAAQEEVLEPGRDSPPSWRPQPDGEASQTEDVDGTWGSSAARWSDQGPAQTSRRPSQGPPARSPSQDFSFIEDTEILDSAMYRSRANLGRKRGHRAPVIRPGGTLGLSEAADSDAHLFQDSTEPRASRVPSSDEEVVEEPQSRRTRMSLGTKGLKVNLFPGLSPSALKAKLRPRNRSAEEGELAESKSSQKESAVQRSKSCKVPGLGKPLTLPPKPEKSSGSEGSSPNWLQALKLKKKKV

SEQ ID NO: 885378 - protein, 301 aa, Homo sapiens [sequence omitted]

SEQ ID NO: 885379 - protein, 1167 aa, Homo sapiens; identical to SEQ ID NO: 885376

SEQ ID NO: 885380 - protein, 1167 aa, Homo sapiens; identical to SEQ ID NO: 885376

SEQ ID NO: 885381 - protein, 1167 aa, Homo sapiens; identical to SEQ ID NO: 885376

SEQ ID NO: 885382 - protein, 125 aa, Homo sapiens
PLSRAFAEPRASRVPSSDEEVVEEPQSRRTRMSLGTKGLKVNLFPGLSPSALKAKLRPRNRSAEEGELAESKSSQKESAVQRSKSCKVPGLGKPLTLPPKPEKSSGSEGSSPNWLQALKLKKKKV

SEQ ID NO: 885383 - protein, 1167 aa, Homo sapiens; identical to SEQ ID NO: 885376

SEQ ID NO: 885384 - protein, 1167 aa, Homo sapiens; identical to SEQ ID NO: 885376

SEQ ID NO: 885385 - protein, 1167 aa, Homo sapiens; identical to SEQ ID NO: 885376

SEQ ID NO: 885386 - protein, 1049 aa, Homo sapiens
QFPAVPLEPLPTTEGTPGLPLQQAEERYESQEPLAGQESPLPLATREAALPILEPVLGQEQPAAPDQPCVLFADAPEPGQALPVEEEAVTLARAETTQARTEAQDLCRASPEPPGPESSSRWLDDLLASPPPSGGGARRGAGAELKDTQSPSTCSEGLLGWSQKDLQSEFGITGDPQPSSFSPSSWCQGASQDYGLGGASPRGDPGLGERDWTSKYGQGAGEGSTREWASRCGIGQEEMEASSSQDQSKVSAPGVLTAQDRVVGKPAQLGTQRSQEADVQDWEFRKRDSQGTYSSRDAELQDQEFGKRDSLGTYSSRDVSLGDWEFGKRDSLGAYASQDANEQGQDLGKRDHHGRYSSQDADEQDWEFQKRDVSLGTYGSRAAEPQEQEFGKSAWIRDYSSGGSSRTLDAQDRSFGTRPLSSGFSPEEAQQQDEEFEKKIPSVEDSLGEGSRDAGRPGERGSGGLFSPSTAHVPDGALGQRDQSSWQNSDASQEVGGHQERQQAGAQGPGSADLEDGEMGKRGWVGEFSLSVGPQREAAFSPGQQDWSRDFCIEASERSYQFGIIGNDRVSGAGFSPSSKMEGGHFVPPGKTTAGSVDWTDQLGLRNLEVSSCVGSGGSSEARESAVGQMGWSGGLSLRDMNLTGCLESGGSEEPGGIGVGEKDWTSDVNVKSKDLAEVGEGGGHSQARESGVGQTDWSGVEAGEFLKSRERGVGQADWTPDLGLRNMAPGAVCSPGESKELGVGQMDWGNNLGLRDLEVTCDPDSGGSQGLRGCGVGQMDWTQDLAPQNVELFGAPSEAREHGVGGVSQCPEPGLRHNGSLSPGLEARDPLEARELGVGETSGPETQGEDYSSSSLEPHPADPGMETGEALSFGASPGRCPARPPPSGSQGLLEEMLAASSSKAVARRESAASGLGGLLEEEGAGAGAAQEEVLEPGRDSPPSWRPQPDGEASQTEDVDGTWGSSAARWSDQGPAQTSRRPSQGPPARSPSQDFSFIEDTEILDSAMNSEVPMNSEAPFFFYKFVEVQFLTDDGYQTFVGCKVYVPRI

SEQ ID NO: 885387 - protein, 877 aa, Homo sapiens
QFPAVPLEPLPTTEGTPGLPLQQAEERYESQEPLAGQESPLPLATREAALPILEPVLGQEQPAAPDQPCVLFADAPEPGQALPVEEEAVTLARAETTQARTEAQDLCRASPEPPGPESSSRWLDDLLASPPPSGGGARRGAGAELKDTQSPSTCSEGLLGWSQKDLQSEFGITGDPQPSSFSPSSWCQGASQDYGLGGASPRGDPGLGERDWTSKYGQGAGEGSTREWASRCGIGQEEMEASSSQDQSKVSAPGVLTAQDRVVGKPAQLGTQRSQEADVQDWEFRKRDSQGTYSSRDAELQDQEFGKRDSLGTYSSRDVSLGDWEFGKRDSLGAYASQDANEQGQDLGKRDHHGRYSSQDADEQDWEFQKRDVSLGTYGSRAAEPQEQEFGKSAWIRDYSSGGSSRTLDAQDRSFGTRPLSSGFSPEEAQQQDEEFEKKIPSVEDSLGEGSRDAGRPGERGSGGLFSPSTAHVPDGALGQRDQSSWQNSDASQEVGGHQERQQAGAQGPGSADLEDGEMGKRGWVGEFSLSVGPQREAAFSPGQQDWSRDFCIEASERSYQFGIIGNDRVSGAGFSPSSKMEGGHFVPPGKTTAGSVDWTDQLGLRNLEVSSCVGSGGSSEARESAVGQMGWSGGLSLRDMNLTGCLESGGSEEPGGIGVGEKDWTSDVNVKSKDLAEVGEGGGHSQARESGVGQTDWSGVEAGEFLKSRERGVGQADWTPDLGLRNMAPGAVCSPGESKELGVGQMDWGNNLGLRDLEVTCDPDSGGSQGLRGCGVGQMDWTQDLAPQNVELFGAPSEAREHGVGGVSQCPEPGLRHNGSLSPGLEARDPLEARELGVGETSGPETQGEDYSSSSLEPHPADPGMETGEALSFGAR

SEQ ID NO: 885388 - protein, 877 aa, Homo sapiens; identical to SEQ ID NO: 885387

SEQ ID NO: 885389 - protein, 877 aa, Homo sapiens; identical to SEQ ID NO: 885387

SEQ ID NO: 885390 - protein, 877 aa, Homo sapiens; identical to SEQ ID NO: 885387

SEQ ID NO: 885391 - protein, 786 aa, Homo sapiens
QFPAVPLEPLPTTEGTPGLPLQQAEERYESQEPLAGQESPLPLATREAALPILEPVLGQEQPAAPDQPCVLFADAPEPGQALPVEEEAVTLARAETTQARTEAQDLCRASPEPPGPESSSRWLDDLLASPPPSGGGARRGAGAELKDTQSPSTCSEGLLGWSQKDLQSEFGITGDPQPSSFSPSSWCQGASQDYGLGGASPRGDPGLGERDWTSKYGQGAGEGSTREWASRCGIGQEEMEASSSQDQSKVSAPGVLTAQDRVVGKPAQLGTQRSQEADVQDWEFRKRDSQGTYSSRDAELQDQEFGKRDSLGTYSSRDVSLGDWEFGKRDSLGAYASQDANEQGQDLGKRDHHGRYSSQDADEQDWEFQKRDVSLGTYGSRAAEPQEQEFGKSAWIRDYSSGGSSRTLDAQDRSFGTRPLSSGFSPEEAQQQDEEFEKKIPSVEDSLGEGSRDAGRPGERGSGGLFSPSTAHVPDGALGQRDQSSWQNSDASQEVGGHQERQQAGAQGPGSADLEDGEMGKRGWVGEFSLSVGPQREAAFSPGQQDWSRDFCIEASERSYQFGIIGNDRVSGAGFSPSSKMEGGHFVPPGKTTAGSVDWTDQLGLRNLEVSSCVGSGGSSEARESAVGQMGWSGGLSLRDMNLTGCLESGGSEEPGGIGVGEKDWTSDVNVKSKDLAEVGEGGGHSQARESGVGQTDWSGVEAGEFLKSRERGVGQADWTPDLGLRNMAPGAVCSPGESKELGVGQMDWGNNLGLRDLEVTCDPDSGGSQGLRGCGVGQSLPWVFF

SEQ ID NO: 885392 - protein, 786 aa, Homo sapiens; identical to SEQ ID NO: 885391

SEQ ID NO: 885393 - protein, 658 aa, Homo sapiens
QFPAVPLEPLPTTEGTPGLPLQQAEERYESQEPLAGQESPLPLATREAALPILEPVLGQEQPAAPDQPCVLFADAPEPGQALPVEEEAVTLARAETTQARTEAQDLCRASPEPPGPESSSRWLDDLLASPPPSGGGARRGAGAELKDTQSPSTCSEGLLGWSQKDLQSEFGITGDPQPSSFSPSSWCQGASQDYGLGGASPRGDPGLGERDWTSKYGQGAGEGSTREWASRCGIGQEEMEASSSQDQSKVSAPGVLTAQDRVVGKPAQLGTQRSQEADVQDWEFRKRDSQGTYSSRDAELQDQEFGKRDSLGTYSSRDVSLGDWEFGKRDSLGAYASQDANEQGQDLGKRDHHGRYSSQDADEQDWEFQKRDVSLGTYGSRAAEPQEQEFGKSAWIRDYSSGGSSRTLDAQDRSFGTRPLSSGFSPEEAQQQDEEFEKKIPSVEDSLGEGSRDAGRPGERGSGGLFSPSTAHVPDGALGQRDQSSWQNSDASQEVGGHQERQQAGAQGPGSADLEDGEMGKRGWVGEFSLSVGPQREAAFSPGQQDWSRDFCIEASERSYQFGIIGNDRVSGAGFSPSSKMEGGHFVPPGKTTAGSVDWTDQLGLRNLEVSSCVGSGGSSEARESAVGQMGWSGGLSLRDMNLTGCLESGGSEEPGGI

SEQ ID NO: 885394 - protein, 503 aa, Homo sapiens
QFPAVPLEPLPTTEGTPGLPLQQAEERYESQEPLAGQESPLPLATREAALPILEPVLGQEQPAAPDQPCVLFADAPEPGQALPVEEEAVTLARAETTQARTEAQDLCRASPEPPGPESSSRWLDDLLASPPPSGGGARRGAGAELKDTQSPSTCSEGLLGWSQKDLQSEFGITGDPQPSSFSPSSWCQGASQDYGLGGASPRGDPGLGERDWTSKYGQGAGEGSTREWASRCGIGQEEMEASSSQDQSKVSAPGVLTAQDRVVGKPAQLGTQRSQEADVQDWEFRKRDSQGTYSSRDAELQDQEFGKRDSLGTYSSRDVSLGDWEFGKRDSLGAYASQDANEQGQDLGKRDHHGRYSSQDADEQDWEFQKRDVSLGTYGSRAAEPQEQEFGKSAWIRDYSSGGSSRTLDAQDRSFGTRPLSSGFSPEEAQQQDGSTLFRGWSQEGPVKSPAECREEHSKTPEERSLPSDLAFNGDLAKAASSELQPPLGFLLIPIYSIFYKSL

SEQ ID NO: 885395 - protein, 445 aa, Homo sapiens
QFPAVPLEPLPTTEGTPGLPLQQAEERYESQEPLAGQESPLPLATREAALPILEPVLGQEQPAAPDQPCVLFADAPEPGQALPVEEEAVTLARAETTQARTEAQDLCRASPEPPGPESSSRWLDDLLASPPPSGGGARRGAGAELKDTQSPSTCSEGLLGWSQKDLQSEFGITGDPQPSSFSPSSWCQGASQDYGLGGASPRGDPGLGERDWTSKYGQGAGEGSTREWASRCGIGQEEMEASSSQDQSKVSAPGVLTAQDRVVGKPAQLGTQRSQEADVQDWEFRKRDSQGTYSSRDAELQDQEFGKRDSLGTYSSRDVSLGDWEFGKRDSLGAYASQDANEQGQDLGKRDHHGRYSSQDADEQDWEFQKRDVSLGTYGSRAAEPQEQEFGKSAWIRDYSSGGSSRTLDAQDRSFGTRPLSSGFSPEEAQQQDEEFEKKIPSVRN

SEQ ID NO: 885396 - protein, 402 aa, Homo sapiens
QFPAVPLEPLPTTEGTPGLPLQQAEERYESQEPLAGQESPLPLATREAALPILEPVLGQEQPAAPDQPCVLFADAPEPGQALPVEEEAVTLARAETTQARTEAQDLCRASPEPPGPESSSRWLDDLLASPPPSGGGARRGAGAELKDTQSPSTCSEGLLGWSQKDLQSEFGITGDPQPSSFSPSSWCQGASQDYGLGGASPRGDPGLGERDWTSKYGQGAGEGSTREWASRCGIGQEEMEASSSQDQSKVSAPGVLTAQDRVVGKPAQLGTQRSQEADVQDWEFRKRDSQGTYSSRDAELQDQEFGKRDSLGTYSSRDVSLGDWEFGKRDSLGAYASQDANEQGQDLGKRDHHGRYSSQDADEQDWEFQKRDVSLGTYGSRAAEPQEQEFGKSGNTGQSATP

SEQ ID NO: 885397 - protein, 438 aa, Homo sapiens
QFPAVPLEPLPTTEGTPGLPLQQAEERYESQEPLAGQESPLPLATREAALPILEPVLGQEQPAAPDQPCVLFADAPEPGQALPVEEEAVTLARAETTQARTEAQDLCRASPEPPGPESSSRWLDDLLASPPPSGGGARRGAGAELKDTQSPSTCSEGLLGWSQKDLQSEFGITGDPQPSSFSPSSWCQGASQDYGLGGASPRGDPGLGERDWTSKYGQGAGEGSTREWASRCGIGQEEMEASSSQDQSKVSAPGVLTAQDRVVGKPAQLGTQRSQEADVQDWEFRKRDSQGTYSSRDAELQDQEFGKRDSLGTYSSRDVSLGDWEFGKRDSLGAYASQDANEQGQDLGKRDHHGRYSSQDADEQDWEFQKRDVSLGTYGSRAAEPQEQEFGKSAWIRDYSSGGSSRTLDAQDRSFGTRPLSSAMRSRSHERLAGRRTR

SEQ ID NO: 885398 - protein, 343 aa, Homo sapiens
  misc_feature (14)..(14): Xaa can be any naturally occurring amino acid
GGGDWHRGPEPSGXDPGRARLQPPQLIPLCLPALKEGLPHVMKVSTLRESSAMASPLPREMEEELVPTGSEPGDTRAKPPVKPKPRALPAKPALPAKPSLLVPVGPRPPRGPLAELPSARKMNMLAGPQPYGGSKRPLPFAPRPAVEASTGGEATQETGKEEAGKEEPPPLTPPARCAAPGGVRKAPAPFRPASERFAATTVEEILAKMEQPRKEVLASPDRLWGSRLTFNHDGSSRYGPRTYGTTTAPRDEDGSTLFRGWSQEGPVKSPAECREEHSKTPEERSLPSDLAFNGDLAKAASSELPADISKPWIPSSPAPSSENGGPASPGLPAEASGSGPGSP

SEQ ID NO: 885399 - protein, 173 aa, Homo sapiens
MVYTLWAAVWVTWNVFIICFYLEVGGLLKDSELLTFSLSRHRSWWRERWPGCLHEEVPAVGLGAPHGQALVSGAGCALEPSYVEALHSCLQILIALLGFVCGCQVVSVFTEEEDSCEYGASAGSGAGDGYRGGSSESVPSGARRETSPLGRDLTPSRALLTAVGLSEDSPHTR

SEQ ID NO: 885400 - protein, 165 aa, Homo sapiens
TLFTKAAGSSLGCSLGGGFWGALQWRPVLSTCNVSPVRRGQVTAAQPGCCVRTPTCAGAPLSWLSHRLIPGAPTWESSETCPRWAWGTPFSMLCIWGPPDSGAEAAPPMRSWDPFPRGLDASRCARELCSAAAPSSPLPSTRCGQPSGSPGTSSSSASTWKSVAS

SEQ ID NO: 885401 - protein, 208 aa, Homo sapiens
MGSCSGRCALVVLCAFQLVAALERQVFDFLGYQWAPILANFVHIIIVILGLFGTIQYRLRYVMVYTLWAAVWVTWNVFIICFYLEVGGLLKDSELLTFSLSRHRSWWRERWPGCLHEEVPAVGLGAPHGQALVSGAGCALEPSYVEALHSCLQILIALLGFVCGCQVVSVFTEEEDSFDFIGGFDPFPLYHVNEKPSSLLSKQVYLPA

SEQ ID NO: 885402 - protein, 146 aa, Homo sapiens
MVYTLWAAVWVTWNVFIICFYLEVGGLLKDSELLTFSLSRHRSWWRERWPGCLHEEVPAVGLGAPHGQALVSGAGCALEPSYVEALHSCLQILIALLGFVCGCQVVSVFTEEEDSFDFIGGFDPFPLYHVNEKPSSLLSKQVYLPA

SEQ ID NO: 885403 - protein, 229 aa, Homo sapiens
QSNSHPGPRTAAGRSGRGGRQLLGAGREKRPFIRGTKLEVAALERQVFDFLGYQWAPILANFVHIIIVILGLFGTIQYRLRYVMVYTLWAAVWVTWNVFIICFYLEVGGLLKDSELLTFSLSRHRSWWRERWPGCLHEEVPAVGLGAPHGQALVSGAGCALEPSYVEALHSCLQILIALLGFVCGCQVVSVFTEEEDSFDFIGGFDPFPLYHVNEKPSSLLSKQVYLPA

SEQ ID NO: 885404 - protein, 284 aa, Homo sapiens
TLFTKAAGSSLGCSLGGGFWGALQWRPVLSTCNVSPVRRGQVTAAQPGCCVRTPTCAGAPLSWLSHRLIPGAPTWESSETCPRWAWGTPFSMLCIWGPPDSGAEAAPPMRSWDPFPRGLDASRCARELCSAAAPSSPLPEYTLWAAVWVTWNVFIICFYLEVGGLLKDSELLTFSLSRHRSWWRERWPGCLHEEVPAVGLGAPHGQALVSGAGCALEPSYVEALHSCLQILIALLGFVCGCQVVSVFTEEEDSFDFIGGFDPFPLYHVNEKPSSLLSKQVYLPA

SEQ ID NO: 885405 - protein, 146 aa, Homo sapiens
PGRDLQVNGHHPPGATWGPLSQPDQPSRLDSELLTFSLSRHRSWWRERWPGCLHEEVPAVGLGAPHGQALVSGAGCALEPSYVEALHSCLQILIALLGFVCGCQVVSVFTEEEDSFDFIGGFDPFPLYHVNEKPSSLLSKQVYLPA

SEQ ID NO: 885406 - protein, 119 aa, Homo sapiens
MVYTLWAAVWVTWNVFIICFYLEVGGLLKDSELLTFSLSRHRSWWRERWPGCLHEEVPAVGLGAPHGQALVSGAGCALEPSYVEALHSCLQILIALLGFVCGCQVVSVFTEEEDSCLRK

SEQ ID NO: 885407 - protein, 181 aa, Homo sapiens
MGSCSGRCALVVLCAFQLVAALERQVFDFLGYQWAPILANFVHIIIVILGLFGTIQYRLRYVMVYTLWAAVWVTWNVFIICFYLEVGGLLKDSELLTFSLSRHRSWWRERWPGCLHEEVPAVGLGAPHGQALVSGAGCALEPSYVEALHSCLQILIALLGFVCGCQVVSVFTEEEDSCLRK

SEQ ID NO: 885408 - protein, 162 aa, Homo sapiens
TPRGFPTAHNSASNQLLAEESLPTTPFYFILGKHRQQQDEKLNETLENELVQLPLTENIPAISELLHTPAHVLPSAAFLCSMFVNSLLLSKETKSAKEIPEDVDMEEEKESEDSDEENDFTEKVQDTSNTGLGEDIIHQLSKSEEKELRKFRKIDYSWIAAL

SEQ ID NO: 885409 - protein, 113 aa, Homo sapiens
PGSTKEVQGGTRDWPFRYCAKMVEEENIRVVRCGGSELNFRRAVFSADSKYIFCVSGDFVKVYSTVTEECVHILHGHRNLVTGIQLNPNNHLQVPLHALRISKRVTANLEVID

SEQ ID NO: 885410 - protein, 851 aa, Homo sapiens
PGSTKEVQGGTRDWPFRYCAKMVEEENIRVVRCGGSELNFRRAVFSADSKYIFCVSGDFVKVYSTVTEECVHILHGHRNLVTGIQLNPNNHLQLYSCSLDGTIKLWDYIDGILIKTFIVGCKLHALFTLAQAEDSVFVIVNKEKPDIFQLVSVKLPKSSSQEVEAKELSFVLDYINQSPKCIAFGNEGVYVAAVREFYLSVYFFKKKTTSRFTLSSSRNKKHAKNNFTCVACHPTEDCIASGHMDGKIRLWRNFYDDKKYTYTCLHWHHDMVMDLAFSVTGTSLLSGGRESVLVEWRDATEKNKEFLPRLGATIEHISVSPAGDLFCTSHSDNKIIIIHRNLEASAVIQGLVKDRSIFTGLMIDPRTKALVLNGKPGHLQFYSLQSDKQLYNLDIIQQEYINDYGLIQIELTKAAFGCFGNWLATVEQRQEKETELELQMKLWMYNKKTQGFILNTKINMPHEDCITALCFCNAEKSEQPTLVTASKDGYFKVWILTDDSDIYKKAVGWTCDFVGSYHKYQATNCCFSEDGSLLAVSFEEIVTIWDSVTWELKCTFCQRAGKIRHLCFGRLTCSKYLLGATENGILCCWNLLSCALEWNAKLNVRVMEPDPNSENIAAISQSSVGSDLFVFKPSEPRPLYIQKGISREKVQWGVFVPRDVPESFTSEAYQWLNRSQFYFLTKSQSLLTFSTKSPEEKLTPTSKQLLAEESLPTTPFYFILGKHRQQQDEKLNETLENELVQLPLTENIPAISELLHTPAHVLPSAAFLCSMFVNSLLLSKETKSAKEIPEDVDMEEEKESEDSDEENDFTEKVQDTSNTGLGEDIIHQLSKSEEKELRKFRKIDYSWIAAL

SEQ ID NO: 885411 - protein, 851 aa, Homo sapiens; identical to SEQ ID NO: 885410

SEQ ID NO: 885412 - protein, 851 aa, Homo sapiens; identical to SEQ ID NO: 885410

SEQ ID NO: 885413 - protein, 853 aa, Homo sapiens
PGSTKEVQGGTRDWPFRYCAKMVEEENIRVVRCGGSELNFRRAVFSADSKYIFCVSGDFVKVYSTVTEECVHILHGHRNLVTGIQLNPNNHLQLYSCSLDGTIKLWDYIDGILIKTFIVGCKLHALFTLAQAEDSVFVIVNKEKPDIFQLVSVKLPKSSSQEVEAKELSFVLDYINQSPKCIAFGNEGVYVAAVREFYLSVYFFKKKTTSRFTLSSSRNKKHAKNNFTCVACHPTEDCIASGHMDGKIRLWRNFYDDKKYTYTCLHWHHDMVMDLAFSVTGTSLLSGGRESVLVEWRDATEKNKEFLPRLGATIEHISVSPAGDLFCTSHSDNKIIIIHRNLEASAVIQGLVKDRSIFTGLMIDPRTKALVLNGKPGHLQFYSLQSDKQLYNLDIIQQEYINDYGLIQIELTKAAFGCFGNWLATVEQRQEKETELELQMKLWMYNKKTQGFILNTKINMPHEDCITALCFCNAEKSEQPTLVTASKDGYFKVWILTDDSDIYKKAVGWTCDFVGSYHKYQATNCCFSEDGSLLAVSFEEIVTIWDSVTWELKCTFCQRAGKIRHLCFGRLTCSKYLLGATENGILCCWNLLSCALEWNAKLNVRVMEPDPNSENIAAISQSSVGSDLFVFKPSEPRPLYIQKGISREKVQWGVFVPRDVPESFTSEAYQWLNRSQFYFLTKSQSLLTFSTKSPEEKLTPTSKQLLAEESLPTTPFYFILGKHRQQQDEKLNETLENELVQLPLTENIPAISELLHTPAHVLPSAAFLCSMFVNSLLLSKETKSAKEIPEDVDMEEEKESEDSDEENDFTEKVQDTSNTGLGEDIIHQLSKSEEKELRKFRLGLCVFDCMLIF

SEQ ID NO: 885414 - protein, 608 aa, Homo sapiens
MDGKIRLWRNFYDDKKYTYTCLHWHHDMVMDLAFSVTGTSLLSGGRESVLVEWRDATEKNKEFLPRLGATIEHISVSPAGDLFCTSHSDNKIIIIHRNLEASAVIQGLVKDRSIFTGLMIDPRTKALVLNGKPGHLQFYSLQSDKQLYNLDIIQQEYINDYGLIQIELTKAAFGCFGNWLATVEQRQEKETELELQMKLWMYNKKTQGFILNTKINMPHEDCITALCFCNAEKSEQPTLVTASKDGYFKVWILTDDSDIYKKAVGWTCDFVGSYHKYQATNCCFSEDGSLLAVSFEEIVTIWDSVTWELKCTFCQRAGKIRHLCFGRLTCSKYLLGATENGILCCWNLLSCALEWNAKLNVRVMEPDPNSENIAAISQSSVGSDLFVFKPSEPRPLYIQKGISREKVQWGVFVPRDVPESFTSEAYQWLNRSQFYFLTKSQSLLTFSTKSPEEKLTPTSKQLLAEESLPTTPFYFILGKHRQQQDEKLNETLENELVQLPLTENIPAISELLHTPAHVLPSAAFLCSMFVNSLLLSKETKSAKEIPEDVDMEEEKESEDSDEENDFTEKVQDTSNTGLGEDIIHQLSKSEEKELRKFRKIDYSWIAAL

SEQ ID NO: 885415 - protein, 395 aa, Homo sapiens
PGSTKEVQGGTRDWPFRYCAKMVEEENIRVVRCGGSELNFRRAVFSADSKYIFCVSGDFVKVYSTVTEECVHILHGHRNLVTGIQLNPNNHLQLYSCSLDGTIKLWDYIDGILIKTFIVGCKLHALFTLAQAEDSVFVIVNKEKPDIFQLVSVKLPKSSSQEVEAKELSFVLDYINQSPKCIAFGNEGVYVAAVREFYLSVYFFKKKTTSRFTLSSSRNKKHAKNNFTCVACHPTEDCIASGHMDGKIRLWRNFYDDKKYTYTCLHWHHDMVMDLAFSVTGTSLLSGGRESVLVEWRDATEKNKEFLPRLGATIEHISVSPAGDLFCTSHSDNKIIIIHRNLEASAVIQGLVKDRSIFTGLMIDPRTKALVLNGKPGHLQFYSLQSDKQLYNVYS

SEQ ID NO: 885416 - protein, 701 aa, Homo sapiens
VLPSAAFLCSMFVNSLLLSFVLDYINQSPKCIAFGNEGVYVAAVREFYLSVYFFKKKTTSRFTLSSSRNKKHAKNNFTCVACHPTEDCIASGHMDGKIRLWRNFYDDKKYTYTCLHWHHDMVMDLAFSVTGTSLLSGGRESVLVEWRDATEKNKEFLPRLGATIEHISVSPAGDLFCTSHSDNKIIIIHRNLEASAVIQGLVKDRSIFTGLMIDPRTKALVLNGKPGHLQFYSLQSDKQLYNLDIIQQEYINDYGLIQIELTKAAFGCFGNWLATVEQRQEKETELELQMKLWMYNKKTQGFILNTKINMPHEDCITALCFCNAEKSEQPTLVTASKDGYFKVWILTDDSDIYKKAVGWTCDFVGSYHKYQATNCCFSEDGSLLAVSFEEIVTIWDSVTWELKCTFCQRAGKIRHLCFGRLTCSKYLLGATENGILCCWNLLSCALEWNAKLNVRVMEPDPNSENIAAISQSSVGSDLFVFKPSEPRPLYIQKGISREKVQWGVFVPRDVPESFTSEAYQWLNRSQFYFLTKSQSLLTFSTKSPEEKLTPTSKQLLAEESLPTTPFYFILGKHRQQQDEKLNETLENELVQLPLTENIPAISELLHTPAHVLPSAAFLCSMFVNSLLLSKETKSAKEIPEDVDMEEEKESEDSDEENDFTEKVQDTSNTGLGEDIIHQLSKSEEKELRKFRKIDYSWIAAL

SEQ ID NO: 885417 - protein, 784 aa, Homo sapiens
PGSTKEVQGGTRDWPFRYCAKMVEEENIRVVRCGGSELNFRRAVFSADSKYIFCVSGDFVKVYSTVTEECVHILHGHRNLVTGIQLNPNNHLQLYSCSLDGTIKLWDYIDGILIKTFIVGCKLHALFTLAQAEDSVFVIVNKEKPDIFQLVSVKLPKSSSQEVEAKELSFVLDYINQSPKCIAFGNEGVYVAAVREFYLSVYFFKKKTTSRFTLSSSRNKKHAKNNFTCVACHPTEDCIASGHMDGKIRLWRNFYDDKKYTYTCLHWHHDMVMDLAFSVTGTSLLSGGRESVLVEWRDATEKNKEFLPRLGATIEHISVSPAGDLFCTSHSDNKIIIIHRNLEASAVIQGLVKDRSIFTGLMIDPRTKALVLNGKPGHLQFYSLQSDKQLYNLDIIQQEYINDYGLIQIELTKAAFGCFGNWLATVEQRQEKETELELQMKLWMYNKKTQGFILNTKINMPHEDCITALCFCNAEKSEQPTLVTASKDGYFKVWILTDDSDIYKKAVGWTCDFVGSYHKYQATNCCFSEDGSLLAVSFEEIVTIWDSVTWELKCTFCQRAGKIRHLCFGRLTCSKYLLGATENGILCCWNLLSCALEWNAKLNVRVMEPDPNSENIAAISQSSVGSDLFVFKPSEPRPLYIQKGISREKVQWGVFVPRDVPESFTSEAYQWLNRSQFYFLTKSQSLLTFSTKSPEEKLTPTSKQLLAEESLPTTPFYFILGKHRQQQDEKLNETLENELVQLPLTENIPAISELLHTPAHVLPSAAFLCSMFVNSLLLSKETKR

SEQ ID NO: 885418 - protein, 234 aa, Homo sapiens [sequence omitted]

SEQ ID NO: 885419 - protein, 208 aa, Homo sapiens
PGSTKEVQGGTRDWPFRYCAKMVEEENIRVVRCGGSELNFRRAVFSADSKYIFCVSGDFVKVYSTVTEECVHILHGHRNLVTGIQLNPNNHLQLYSCSLDGTIKLWDYIDGILIKTFIVGCKLHALFTLAQAEDSVFVIVNKEKPDIFQLVSVKLPKSSSQEVEAKELSFVLDYINQSPKCIAFGNEVNFVLFVFCFVPKISFLQSLF

SEQ ID NO: 885420 - protein, 154 aa, Homo sapiens
MAQSINITELNLPQLEMLKNQLDQEVEFLSTSIAQLKVVQTKYVEAKDCLNVLNKSNEGKELLVPLTSSMYVPGKLHDVEHVLIDVGTGYYVEKTAEDAKDFFKRKIDFLTKQMEKIQPALQEKHAMKQAVMEMMSQKIQQLTALGAAQATAKA

SEQ ID NO: 885421 - protein, 154 aa, Homo sapiens; identical to SEQ ID NO: 885420

SEQ ID NO: 885422 - protein, 166 aa, Homo sapiens
RLVEAGVNRPRHMAQSINITELNLPQLEMLKNQLDQEVEFLSTSIAQLKVVQTKYVEAKDCLNVLNKSNEGKELLVPLTSSMYVPGKLHDVEHVLIDVGTGYYVEKTAEDAKDFFKRKIDFLTKQMEKIQPALQEKHAMKQAVMEMMSQKIQQLTALGAAQATAKA

SEQ ID NO: 885423 - protein, 120 aa, Homo sapiens
PIFLLYCKYVEAKDCLNVLNKSNEGKELLVPLTSSMYVPGKLHDVEHVLIDVGTGYYVEKTAEDAKDFFKRKIDFLTKQMEKIQPALQEKHAMKQAVMEMMSQKIQQLTALGAAQATAKA

SEQ ID NO: 885424 - protein, 154 aa, Homo sapiens; identical to SEQ ID NO: 885420

SEQ ID NO: 885425 - protein, 154 aa, Homo sapiens; identical to SEQ ID NO: 885420

SEQ ID NO: 885426 - protein, 154 aa, Homo sapiens; identical to SEQ ID NO: 885420

SEQ ID NO: 885427 - protein, 154 aa, Homo sapiens; identical to SEQ ID NO: 885420

SEQ ID NO: 885428 - protein, 167 aa, Homo sapiens
MGVDVMTVVGLPNMAQSINITELNLPQLEMLKNQLDQEVEFLSTSIAQLKVVQTKYVEAKDCLNVLNKSNEGKELLVPLTSSMYVPGKLHDVEHVLIDVGTGYYVEKTAEDAKDFFKRKIDFLTKQMEKIQPALQEKHAMKQAVMEMMSQKIQQLTALGAAQATAKA

SEQ ID NO: 885429 - protein, 161 aa, Homo sapiens
  misc_feature (4)..(4): Xaa can be any naturally occurring amino acid
  misc_feature (9)..(9): Xaa can be any naturally occurring amino acid
  misc_feature (12)..(12): Xaa can be any naturally occurring amino acid
DLTXFVKSXSIXAKLPADLPQLEMLKNQLDQEVEFLSTSIAQLKVVQTKYVEAKDCLNVLNKSNEGKELLVPLTSSMYVPGKLHDVEHVLIDVGTGYYVEKTAEDAKDFFKRKIDFLTKQMEKIQPALQEKHAMKQAVMEMMSQKIQQLTALGAAQATAKA

SEQ ID NO: 885430 - protein, 154 aa, Homo sapiens; identical to SEQ ID NO: 885420

SEQ ID NO: 885431 - protein, 154 aa, Homo sapiens; identical to SEQ ID NO: 885420

SEQ ID NO: 885432 - protein, 154 aa, Homo sapiens; identical to SEQ ID NO: 885420

SEQ ID NO: 885433 - protein, 167 aa, Homo sapiens; identical to SEQ ID NO: 885428

SEQ ID NO: 885434 - protein, 66 aa, Homo sapiens
MAQSINITELNLPQLEMLKNQLDQEVEFLSTSIAQLKVVQTKYVEAKDCLNVLNKSNEDVCPWEAA

SEQ ID NO: 885435 - protein, 122 aa, Homo sapiens
MGVDVMTVVGLPNMAQSINITELNLPQLEMLKNQLDQMYVPGKLHDVEHVLIDVGTGYYVEKTAEDAKDFFKRKIDFLTKQMEKIQPALQEKHAMKQAVMEMMSQKIQQLTALGAAQATAKA

SEQ ID NO: 885436 - protein, 149 aa, Homo sapiens
MGVDVMTVVGLPNMAQSINITELNLPQLEMLKNQLDQEVEFLSTSIAQLKVVQTKYVEAKDCLNVLNKSNEGKELLVPLTSSMYVPGKLHDVEHVLIDVGTGYYVEKTAEDAKDFFKRKIDFLTKQMEMMSQKIQQLTALGAAQATAKA

SEQ ID NO: 885437 - protein, 122 aa, Homo sapiens; identical to SEQ ID NO: 885435

SEQ ID NO: 885438 - protein, 92 aa, Homo sapiens
  misc_feature (4)..(4): Xaa can be any naturally occurring amino acid
  misc_feature (9)..(9): Xaa can be any naturally occurring amino acid
  misc_feature (12)..(12): Xaa can be any naturally occurring amino acid
  misc_feature (17)..(17): Xaa can be any naturally occurring amino acid
DLTXFVKSXSIXAETSXGSAAARNAQEPAGPETAEDAKDFFKRKIDFLTKQMEKIQPALQEKHAMKQAVMEMMSQKIQQLTALGAAQATAKA

SEQ ID NO: 885439 - protein, 109 aa, Homo sapiens
MAQSINITELNLPQLEMLKNQLDQMYVPGKLHDVEHVLIDVGTGYYVEKTAEDAKDFFKRKIDFLTKQMEKIQPALQEKHAMKQAVMEMMSQKIQQLTALGAAQATAKA

SEQ ID NO: 885440 - protein, 109 aa, Homo sapiens; identical to SEQ ID NO: 885439

SEQ ID NO: 885441 - protein, 170 aa, Homo sapiens
WFENHGVGTSGVRIDLPQLEMLKNQLDQEVEFLSTSIAQLKVVQTKYVEAKDCLNVLNKSNEGNRSLEPLTKQSVNISLSGCQPAPEGYSPTRYWLQQQRAQFLTCPQDVNKHRSHWKLQQVDSNVTMAKSSDEEGWKKFLLGKKYVLTGLLDQPQMKSPGIKYVQRRRP

SEQ ID NO: 885442 - protein, 167 aa, Homo sapiens; identical to SEQ ID NO: 885428

SEQ ID NO: 885443 - protein, 154 aa, Homo sapiens; identical to SEQ ID NO: 885420

SEQ ID NO: 885444 - protein, 167 aa, Homo sapiens; identical to SEQ ID NO: 885428

SEQ ID NO: 885445 - protein, 167 aa, Homo sapiens; identical to SEQ ID NO: 885428

SEQ ID NO: 885446 - protein, 154 aa, Homo sapiens; identical to SEQ ID NO: 885420

SEQ ID NO: 885447 - protein, 108 aa, Homo sapiens
LLLLYGCDMTTEGKELLVPLTSSMYVPGKLHDVEHVLIDVGTGYYVEKTAEDAKDFFKRKIDFLTKQMEKIQPALQEKHAMKQAVMEMMSQKIQQLTALGAAQATAKA

SEQ ID NO: 885448 - protein, 122 aa, Homo sapiens; identical to SEQ ID NO: 885435

SEQ ID NO: 885449 - protein, 72 aa, Homo sapiens
RGYSLSWKKRVFGGQAGWLAESWLMLGWLVFPLILASQMYVPGKLHDVEHVLIDVGTGYYVEKVSESMWMPL

SEQ ID NO: 885450 - protein, 92 aa, Homo sapiens; identical to SEQ ID NO: 885438
  misc_feature (4)..(4): Xaa can be any naturally occurring amino acid
  misc_feature (9)..(9): Xaa can be any naturally occurring amino acid
  misc_feature (12)..(12): Xaa can be any naturally occurring amino acid
  misc_feature (17)..(17): Xaa can be any naturally occurring amino acid

SEQ ID NO: 885451 - protein, 165 aa, Homo sapiens
MTKLRGCRHEGVEQGARGAVRSGWLHLDCELLFRGCWWWRWRTAAPWCGEPRRPWTGVSSLKTGPTPAALPTSCATVSTETCGSEASSSVRLASSEVTSWSILSDPLRFHAHYIAQCWAPEDTIPLQDLVAAGRLGTSVRKTLLLCSPQPDGKVVYTSLQWASLQ

SEQ ID NO: 885452 - protein, 249 aa, Homo sapiens
MLVVEVANGRSLVWGAEAVQALRERLGVGGRTVGALPRGPRQNSRLGLPLLLMPEEARLLAEIGAVTLVSAPRPDSRHHSLALTSFKRQQEESFQEQSALAAEARETRRQELLEKITEGQAAKKQKLEQASGASSSQEAGSSQAAKEDETSDGQASGEQEEAGPSSSQAGPSNGVAPLPRSALLVQLATARPRPVKARPLDWRVQSKDWPHAGRPAHELRYSIYRDLWERGFFLSAAGKFGGDFLVYPE

SEQ ID NO: 885453 - protein, 274 aa, Homo sapiens
MLVVEVANGRSLVWGAEAVQALRERLGVGGRTVGALPRGPRQNSRLGLPLLLMPEEARLLAEIGAVTLVSAPRPDSRHHSLALTSFKRQQEESFQEQSALAAEARETRRQELLEKITEGQAAKKQKLEQASGASSSQEAGSSQAAKEDETSDGQASGEQEEAGPSSSQAGPSNGVAPLPRSALLVQLATARPRPVKARPLDWRVQSKDWPHAGRPAHELRYSIYRDLWERGFFLSAAGKFGGDFLVYPDPSVHAHILLVLAPEAFHPRLCGAWP

SEQ ID NO: 885454 - protein, 286 aa, Homo sapiens
RPRGGASPRPRRLWVRCSGLRRAAVSVTALPPGSRRRMLVVEVANGRSLVWGAEAVQALRERLGVGGRTVGALPRGPRQNSRLGLPLLLMPEEARLLAEIGAVTLVSAPRPDSRHHSLALTSFKRQQEESFQEQSALAAEARETRRQELLEKITEGQAAKKQKLEQASGASSSQEAGSSQAAKEDETSDGQASGEQEEAGPSSSQAGPSNGVAPLPRSALLVQLATARPRPVKARPLDWRVQSKDWPHAGRPAHELRYSIYRDLWERGFFLSAAGKFGGDFLVYPE

SEQ ID NO: 885455 - protein, 286 aa, Homo sapiens; identical to SEQ ID NO: 885454

SEQ ID NO: 885456 - protein, 249 aa, Homo sapiens; identical to SEQ ID NO: 885452

SEQ ID NO: 885457 - protein, 274 aa, Homo sapiens; identical to SEQ ID NO: 885453

SEQ ID NO: 885458 - protein, 249 aa, Homo sapiens; identical to SEQ ID NO: 885452

SEQ ID NO: 885459 - protein, 300 aa, Homo sapiens
MLVVEVANGRSLVWGAEAVQALRERLGVGGRTVGALPRGPRQNSRLGLPLLLMPEEARLLAEIGAVTLVSAPRPDSRHHSLALTSFKRQQEESFQEQSALAAEARETRRQELLEKITEGQAAKKQKLEQASGASSSQEAGSSQAAKEDETSDGQASGEQEEAGPSSSQAGPSNGVAPLPRSALLVQLATARPRPVKARPLDWRVQSKDWPHAGRPAHELRYSIYRDLWERGFFLSAAGKFGGDFLVYPDWSSGPSFSLLSVGLELLRLCWLPETAFHVRYPSGPAGVAGLGPRGLSPRFL

SEQ ID NO: 885460 - protein, 280 aa, Homo sapiens
ASCRFGTRVRCSGLRRAAVSVTALPPGSRRRMLVVEVANGRSLVWGAEAVQALRERLGVGGRTVGALPRGPRQNSRLGLPLLLMPEEARLLAEIGAVTLVSAPRPDSRHHSLALTSFKRQQEESFQEQSALAAEARETRRQELLEKITEGQAAKKQKLEQASGASSSQEAGSSQAAKEDETSDGQASGEQEEAGPSSSQAGPSNGVAPLPRSALLVQLATARPRPVKARPLDWRVQSKDWPHAGRPAHELRYSIYRDLWERGFFLSAAGKFGGDFLVYPE

SEQ ID NO: 885461 - protein, 249 aa, Homo sapiens; identical to SEQ ID NO: 885452

SEQ ID NO: 885462 - protein, 120 aa, Homo sapiens
MLVVEVANGRSLVWGAEAVQALRERLGVGGRTVGALPRGPRQNSRLGLPLLLMPEEARLLAEIGAVTLVSAPRPDSRHHSLALTSFKRQQEESFQEQKTRTGFRGQLKPGGRLEPGCQRG

SEQ ID NO: 885463 - protein, 230 aa, Homo sapiens
MLVVEVANGRSLVWGAEAVQALRERLGVGGRTVGALPRGPRQNSRLGLPLLLMPEEARLLAEIGAVTLVSAPRPDSRHHSLALTSFKRQQEESFQEQSALAAEARETRRQELLEKITEGQAAKKQKLEQASGASSSQEAGSSQGPSSSQAGPSNGVAPLPRSALLVQLATARPRPVKARPLDWRVQSKDWPHAGRPAHELRYSIYRDLWERGFFLSAAGKFGGDFLVYPE

SEQ ID NO: 885464 - protein, 215 aa, Homo sapiens
RGCWVNGIRRLIVSRRGDEEEFFEIRTEWSDRSVLYLHRSLADLGRLWQRLRDAFPEDRSELAQGPLRQGLVAIKEAHDIETRLNEVEKLLKTIISMPCKYSRSEVVLTFFERSPLDQVLKNDNVHKIQPSFQSPVKISEIMRSNGFCLANTETIVIDHSIPNGRDQHLGVDPTEHLFENGSEFPSELEDGDDPAAYVTNLSYYHLVPFETDIWD

SEQ ID NO: 885465 - protein, 140 aa, Homo sapiens
RGCWVNGIRRLIVSRRGDEEEFFEIRTEWSDRSVLYLHRSLADLGRLWQRLRDAFPEDRSELAQGPLRQGLVAIKEAHDIETRLNEVEKLLKTIISMPCKYSRSEVVLTFFERSPLDQVLKNDNVHKIQPSFQSPVKISE

SEQ ID NO: 885466 - protein, 215 aa, Homo sapiens; identical to SEQ ID NO: 885464

SEQ ID NO: 885467 - protein, 215 aa, Homo sapiens; identical to SEQ ID NO: 885464

SEQ ID NO: 885468 - protein, 178 aa, Homo sapiens
ASRGIEPVMGRLLLCASHGEIEKHPSLHASSYGLVAIKEAHDIETRLNEVEKLLKTIISMPCKYSRSEVVLTFFERSPLDQVLKNDNVHKIQPSFQSPVKISEIMRSNGFCLANTETIVIDHSIPNGRDQHLGVDPTEHLFENGSEFPSELEDGDDPAAYVTNLSYYHLVPFETDIWD

SEQ ID NO: 885469 - protein, 215 aa, Homo sapiens; identical to SEQ ID NO: 885464

SEQ ID NO: 885470 - protein, 464 aa, Homo sapiens
MSDGNPELLSTSQTYNGQSENNEDYEIPPITPPNLPEPSLLHLGDHEASYHSLCHGLTPNGLLPAYSYQAMDLPAIMVSNMLAQDSHLLSGQLPTIQEMVHSEVAAYDSGRPGPLLGRPAMLASHMSALSQSQLISQMGIRSSIAHSSPSPPGSKSATPSPSSSTQEEESEVHFKISGEKRPSADPGKKAKNPKKKKKKDPNEPQKPVSAYALFFRDTQAAIKGQNPSATFGDVSKIVASMWDSLGEEQKQAYKRKTEAAKKEYLKALAAYRASLVSKSSPDQGETKSTQANPPAKMLPPKQPMYAMPGLASFLTPSDLQAFRSGASPASLARTLGSKSLLPGLSASPPPPPSFPLSPTLHQQLSLPPHAQGALLSPPVSMSPAPQPPVLPTPMALQVQLAMSPSPPGPQDFPHISEFPSSSGSCSPGPSNPTSSGDWDSSYPSGECGISTCSLLPRDKSLYLT

SEQ ID NO: 885471 - protein, 511 aa, Homo sapiens
AAAPAMDVRLYPSAPAVGARPGAEPAGLAHLDYYHGGKFDGDSAYVGMSDGNPELLSTSQTYNGQSENNEDYEIPPITPPNLPEPSLLHLGDHEASYHSLCHGLTPNGLLPAYSYQAMDLPAIMVSNMLAQDSHLLSGQLPTIQEMVHSEVAAYDSGRPGPLLGRPAMLASHMSALSQSQLISQMGIRSSIAHSSPSPPGSKSATPSPSSSTQEEESEVHFKISGEKRPSADPGKKAKNPKKKKKKDPNEPQKPVSAYALFFRDTQAAIKGQNPSATFGDVSKIVASMWDSLGEEQKQAYKRKTEAAKKEYLKALAAYRASLVSKSSPDQGETKSTQANPPAKMLPPKQPMYAMPGLASFLTPSDLQAFRSGASPASLARTLGSKSLLPGLSASPPPPPSFPLSPTLHQQLSLPPHAQGALLSPPVSMSPAPQPPVLPTPMALQVQLAMSPSPPGPQDFPHISEFPSSSGSCSPGPSNPTSSGDWDSSYPSGECGISTCSLLPRDKSLYLT

SEQ ID NO: 885472 - protein, 369 aa, Homo sapiens
RSPGADAWAPWRCGFDGDSAYVGMSDGNPELLSTSQTYNGQSENNEDYEIPPITPPNLPEPSLLHLGDHEASYHSLCHGLTPNGLLPAYSYQAMDLPAIMVSNMLAQDSHLLSGQLPTIQEMVHSEVAAYDSGRPGPLLGRPAMLASHMSALSQSQLISQMGIRSSIAHSSPSPPGSKSATPSPSSSTQEEESEVHFKISGEKRPSADPGKKAKNPKKKKKKDPNEPQKPVSAYALFFRDTQAAIKGQNPSATFGDVSKIVASMWDSLGEEQKQAYKRKTEAAKKEYLKALAAYRASLVSKSSPDQGETKSTQANPPAKMLPPKQPMYAMPGLASFLTPSDLQAFRSGASPASLARTLGSKSLLPGLSA

SEQ ID NO: 885473 - protein, 487 aa, Homo sapiens
RSPGADAWAPWRCGFDGDSAYVGMSDGNPELLSTSQTYNGQSENNEDYEIPPITPPNLPEPSLLHLGDHEASYHSLCHGLTPNGLLPAYSYQAMDLPAIMVSNMLAQDSHLLSGQLPTIQEMVHSEVAAYDSGRPGPLLGRPAMLASHMSALSQSQLISQMGIRSSIAHSSPSPPGSKSATPSPSSSTQEEESEVHFKISGEKRPSADPGKKAKNPKKKKKKDPNEPQKPVSAYALFFRDTQAAIKGQNPSATFGDVSKIVASMWDSLGEEQKQAYKRKTEAAKKEYLKALAAYRASLVSKSSPDQGETKSTQANPPAKMLPPKQPMYAMPGLASFLTPSDLQAFRSGASPASLARTLGSKSLLPGLSASPPPPPSFPLSPTLHQQLSLPPHAQGALLSPPVSMSPAPQPPVLPTPMALQVQLAMSPSPPGPQDFPHISEFPSSSGSCSPGPSNPTSSGDWDSSYPSGECGISTCSLLPRDKSLYLT

SEQ ID NO: 885474 - protein, 464 aa, Homo sapiens; identical to SEQ ID NO: 885470

SEQ ID NO: 885475 - protein, 43 aa, Homo sapiens
MRQERGVPARIPGPPGLGLPECALRPQGSGFWQSLPAVRQGQQ

SEQ ID NO: 885476 - protein, 596 aa, Homo sapiens
MPPPFSSARGFGAPRPRPSPRERSGRRGRARGERPRGVDDLRPAATSSAAETRSHPPAGEPGPRAAPETAVAGCAGASLPGGAAAAAWKMAAPCGSELPANSPLKIPKMEVLSPASPGGLSDGNPSLSDPSTPRGASPLGPGSAAGSGAAASGGLGLGLGGRSAASSSVSFSPGGGGGGAAAAAAAACRGMSWTPAETNALIAVWGNERLVEARYQQLEGAGTVFGSKAPGPAMYERVSRALAELGYERTPSQCRERIKELESDGSTMEDYSQEDWGNHSQDLHGYPTDQELDEIPVTKRTLKIKQESSEEAQKRDIMQNIVQILESVQLKWELFQSWTDFSRLHLSNKLAIFGIGYNTRWKEDIRYHYAEISSQVPLGKRLREYFNSEKPEGRIIMTRVQKMNWKNVYYKFLEITISEARCLELHMEIDWIPIAHSKPTGGNVVQYLLPGGIPKSPGLYAIGYEECIERPLSPHMEQSSLDPGKEGRVDLETLSAQASLQVEIEPTRIIYCYLGIAEVRTLQQCLFLHFQANTKTFSKDWVGINGFLSQNCIVDPGVSPKSIYIKFVEVERDFLSAGSLVECLEKAIGYPLKFNN

SEQ ID NO: 885477 - protein, 279 aa, Homo sapiens [sequence omitted]

SEQ ID NO: 885478 - protein, 329 aa, Homo sapiens
MEDYSQEDWGNHSQDLHGYPTDQELDEIPVTKRTLKIKQESSEEAQKRDIMQNIVQILESVQLKWELFQSWTDFSRLHLSNKLAIFGIGYNTRWKEDIRYHYAEISSQVPLGKRLREYFNSEKPEGRIIMTRVQKMNWKNVYYKFLEITISEARCLELHMEIDWIPIAHSKPTGGNVVQYLLPGGIPKSPGLYAIGYEECIERPLSPHMEQSSLDPGKEGRVDLETLSAQASLQVEIEPTRIIYCYLGIAEVRTLQQCLFLHFQANTKTFSKDWVGINGFLSQNCIVDPGVSPKSIYIKFVEVERDFLSAGSLVECLEKAIGYPLKFNN

SEQ ID NO: 885479 - protein, 944 aa, Homo sapiens
MALLGKRCDVPTNGCGPDRWNSAFTRKDEIITSLVSALDSMCSALSKLNAEVACVAVHDESAFVVGTEKGRMFLNARKELQSDFLRFCRGPPWKDPEAEHPKKVQRGEGGGRSLPRSSLEHGSDVYLLRKMVEEVFDVLYSEALGRASVVPLPYERLLREPGLLAVQGLPEGLAFRRPAEYDPKALMAILEHSHRIRFKLKRPLEDGGRDSKALVELNGVSLIPKGSRDCGLHGQAPKVPPQDLPPTATSSSMASFLYSTALPNHAIRELKQEAPSCPLAPSDLGLSRPMPEPKATGAQDFSDCCGQKPTGPGGPLIQNVHASKRILFSIVHDKSEKWDAFIKETEDINTLRECVQILFNSRYAEALGLDHMVPVPYRKIACDPEAVEIVGIPDKIPFKRPCTYGVPKLKRILEERHSIHFIIKRMFDERIFTGNKFTKDTTKLEPASPPEDTSAEVSRATVLDLAGNARSDKGSMSEDCGPGTSGELGGLRPIKIEPEDLDIIQVTVPDPSPTSEEMTDSMPGHLPSEDSGYGMEMLTDKGLSEDARPEERPVEDSHGDVIRPLRKQVELLFNTRYAKAIGISEPVKVPYSKFLMHPEELFVVGLPEGISLRRPNCFGIAKLRKILEASNSIQFVIKRPELLTEGVKEPIMDSQERDSGDPLVDESLKRQGFQENYDARLSRIDIANTLREQVQDLFNKKYGEALGIKYPVQVPYKRIKSNPGSVIIEGLPPGIPFRKPCTFGSQNLERILAVADKIKFTVTRPFQGLIPKPDEDDANRLGEKVILREQVKELFNEKYGEALGLNRPVLVPYKLIRDSPDAVEVTGLPDDIPFRNPNTYDIHRLEKILKAREHVRMVIINQLQPFAEICNDAKVPAKDSSIPKRKRKRVSEGNSVSSSSSSSSSSSSNPDSVASANQISLVQWPMYMVDYAGLNVQLPGPLNY

SEQ ID NO: 885480 - protein, 95 aa, Homo sapiens
EHFSRELRRLRQKSLSFQCQQPFPLLPAKDSSIPKRKRKRVSEGNSVSSSSSSSSSSSSNPDSVASANQISLVQWPMYMVDYAGLNVQLPGPLNY

SEQ ID NO: 885481 - protein, 606 aa, Homo sapiens
MALLGKRCDVPTNGCGPDRWNSAFTRKDEIITSLVSALDSMCSALSKLNAEVACVAVHDESAFVVGTEKGRMFLNARKELQSDFLRFCRGPPWKDPEAEHPKKVQRGEGGGRSLPRSSLEHGSDVYLLRKMVEEVFDVLYSEALGRASVVPLPYERLLREPGLLAVQGLPEGLAFRRPAEYDPKALMAILEHSHRIRFKLKRPLEDGGRDSKALVELNGVSLIPKGSRDCGLHGQAPKVPPQDLPPTATSSSMASFLYSTALPNHAIRELKQEAPSCPLAPSDLGLSRPMPEPKATGAQDFSDCCGQKPTGPGGPLIQNVHASKRILFSIVHDKSEKWDAFIKETEDINTLRECVQILFNSRYAEALGLDHMVPVPYRKIACDPEAVEIVGIPDKIPFKRPCTYGVPKLKRILEERHSIHFIIKRMFDERIFTGNKFTKDTTKLEPASPPEDTSAEVSRATVLDLAGNARSDKGSMSEDCGPGTSGELGGLRPIKIEPEDLDIIQVTVPDPSPTSEEMTDSMPGHLPSEDSGYGMEMLTDKGLSEDARPEERPVEDSHGDVIRPLRKQVELLFNTRYGPSCSLRESKSPSWIVKRGIPGTLWWTRA

SEQ ID NO: 885482 - protein, 417 aa, Homo sapiens
ESARSFQSGDLTDKGLSEDARPEERPVEDSHGDVIRPLRKQVELLFNTRYAKAIGISEPVKVPYSKFLMHPEELFVVGLPEGISLRRPNCFGIAKLRKILEASNSIQFVIKRPELLTEGVKEPIMDSQERDSGDPLVDESLKRQGFQENYDARLSRIDIANTLREQVQDLFNKKYGEALGIKYPVQVPYKRIKSNPGSVIIEGLPPGIPFRKPCTFGSQNLERILAVADKIKFTVTRPFQGLIPKPDEDDANRLGEKVILREQVKELFNEKYGEALGLNRPVLVPYKLIRDSPDAVEVTGLPDDIPFRNPNTYDIHRLEKILKAREHVRMVIINQLQPFAEICNDAKVPAKDSSIPKRKRKRVSEGNSVSSSSSSSSSSSSNPDSVASANQISLVQWPMYMVDYAGLNVQLPGPLNY

SEQ ID NO: 885483 - protein, 358 aa, Homo sapiens
MALLGKRCDVPTNGCGPDRWNSAFTRKDEIITSLVSALDSMCSALSKLNAEVACVAVHDESAFVVGTEKGRMFLNARKELQSDFLRFCRGPPWKDPEAEHPKKVQRGEGGGRSLPRSSLEHGSDVYLLRKMVEEVFDVLYSEALGRASVVPLPYERLLREPGLLAVQGLPEGLAFRRPAEYDPKALMAILEHSHRIRFKLKRPLEDGGRDSKALVELNGVSLIPKGSRDCGLHGQAPKVPPQDLPPTATSSSMASFLYSTALPNHAIRELKQEAPSCPLAPSDLGLSRPMPEPKATGAQDFSDCCGNIAAGISKSRGWDRGHSCRGQPPRAGQDAWALLGWKEPCLGMGVGLDRWCPG

SEQ ID NO: 885484 - protein, 50 aa, Homo sapiens
CDFLCPLGEALGLNRPVLVPYKLIRDSPDAVEVTGLPDDIPFRNPNTYDI

SEQ ID NO: 885485 - protein, 168 aa, Homo sapiens
  misc_feature (15)..(16): Xaa can be any naturally occurring amino acid
GTSGHERHEDPAGVXXELFNEKYGEALGLNRPVLVPYKLIRDSPDAVEVTGLPDDIPFRNPNTYDIHRLEKILKAREHVRMVIINQLQPFAEICNDAKVPAKDSSIPKRKRKRVSEGNSVSSSSSSSSSSSSNPDSVASANQISLVQWPMYMVDYAGLNVQLPGPLNY

SEQ ID NO: 885486 - protein, 959 aa, Homo sapiens
MALLGKRCDVPTNGCGPDRWNSAFTRKDEIITSLVSALDSMCSALSKLNAEVACVAVHDESAFVVGTEKGRMFLNARKELQSDFLRFCRGPPWKDPEAEHPKKVQRGEGGGRSLPRSSLEHGSDVYLLRKMVEEVFDVLYSEALGRASVVPLPYERLLREPGLLAVQGLPEGLAFRRPAEYDPKALMAILEHSHRIRFKLKRPLEDGGRDSKALVELNGVSLIPKGSRDCGLHGQAPKVPPQDLPPTATSSSMASFLYSTALPNHAIRELKQEAPSCPLAPSDLGLSRPMPEPKATGAQDFSDCCGQKPTGPGGPLIQNVHASKRILFSIVHDKSEKWDAFIKETEDINTLRECVQILFNSRYAEALGLDHMVPVPYRKIACDPEAVEIVGIPDKIPFKRPCTYGVPKLKRILEERHSIHFIIKRMFDERIFTGNKFTKDTTKLEPASPPEDTSAEVSRATVLDLAGNARSDKGSMSEDCGPGTSGELGGLRPIKIEPEDLDIIQVTVPDPSPTSEEMTDSMPGHLPSEDSGYGMEMLTDKGLSEDARPEERPVEDSHGDVIRPLRKQVELLFNTRYAKAIGISEPVKVPYSKFLMHPEELFVVGLPEGISLRRPNCFGIAKLRKILEASNSIQFVIKRPELLTEGVKEPIMDSQGTASSLGFSPPALPPERDSGDPLVDESLKRQGFQENYDARLSRIDIANTLREQVQDLFNKKYGEALGIKYPVQVPYKRIKSNPGSVIIEGLPPGIPFRKPCTFGSQNLERILAVADKIKFTVTRPFQGLIPKPDEDDANRLGEKVILREQVKELFNEKYGEALGLNRPVLVPYKLIRDSPDAVEVTGLPDDIPFRNPNTYDIHRLEKILKAREHVRMVIINQLQPFAEICNDAKVPAKDSSIPKRKRKRVSEGNSVSSSSSSSSSSSSNPDSVASANQISLVQWPMYMVDYAGLNVQLPGPLNY

SEQ ID NO: 885487 - protein, 641 aa, Homo sapiens
MALLGKRCDVPTNGCGPDRWNSAFTRKDEIITSLVSALDSMCSALSKLNAEVACVAVHDESAFVVGTEKGRMFLNARKELQSDFLRFCRGPPWKDPEAEHPKKVQRGEGGGRSLPRSSLEHGSDVYLLRKMVEEVFDVLYSEALGRASVVPLPYERLLREPGLLAVQGLPEGLAFRRPAEYDPKALMAILEHSHRIRFKLKRPLEDGGRDSKALVELNGVSLIPKGSRDCGLHGQAPKVPPQDLPPTATSSSMASFLYSTALPNHAIRELKQEAPSCPLAPSDLGLSRPMPEPKATGAQDFSDCCGQKPTGPGGPLIQNVHASKRILFSIVHDKSEKWDAFIKETEDINTLRECVQILFNSRYAEALGLDHMVPVPYRKIACDPEAVEIVGIPDKIPFKRPCTYGVPKLKRILEERHSIHFIIKRMFDERIFTGNKFTKDTTKLEPASPPEDTSAEVSRATVLDLAGNARSDKGSMSEDCGPGTSGELGGLRPIKIEPEDLDIIQVTVPDPSPTSEEMTDSMPGHLPSEDSGYGMEMLTDKGLSEDARPEERPVEDSHGDVIRPLRKQVELLFNTRYAKAIGISEPVKVPYSKFLMHPEELFVVGLPEGISLRRPNCFGIAKLRKILEASNSIQFVIKRKL

SEQ ID NO: 885488 - protein, 975 aa, Homo sapiens
MALLGKRCDVPTNGCGPDRWNSAFTRKDEIITSLVSALDSMCSALSKLNAEVACVAVHDESAFVVGTEKGRMFLNARKELQSDFLRFCRGPPWKDPEAEHPKKVQRGEGGGRSLPRSSLEHGSDVYLLRKMVEEVFDVLYSEALGRASVVPLPYERLLREPGLLAVQGLPEGLAFRRPAEYDPKALMAILEHSHRIRFKLKRPLEDGGRDSKALVELNGVSLIPKGSRDCGLHGQAPKVPPQDLPPTATSSSMASFLYSTALPNHAIRELKQEAPSCPLAPSDLGLSRPMPEPKATGAQDFSDCCGQKPTGPGGPLIQNVHASKRILFSIVHDKSEKWDAFIKETEDINTLRECVQILFNSRYAEALGLDHMVPVPYRKIACDPEAVEIVGIPDKIPFKRPCTYGVPKLKRILEERHSIHFIIKRMFDERIFTGNKFTKDTTKLEPASPPEDTSAEVSRATVLDLAGNARSDKGSMSEDCGPGTSGELGGLRPIKIEPEDLDIIQVTVPDPSPTSEEMTDSMPGHLPSEDSGYGMEMLTDKGLSEDARPEERPVEDSHGDVIRPLRKQVELLFNTRYAKAIGISEPVKVPYSKFLMHPEELFVVGLPEGISLRRPNCFGIAKLRKILEASNSIQFVIKRPELLTEGVKEPIMDSQGTASSLGFSPPALPPERDSGDPLVDESLKRQGFQENYDARLSRIDIANTLREQVQDLFNKKYGEALGIKYPVQVPYKRIKSNPGSVIIEGLPPGIPFRKPCTFGSQNLERILAVADKIKFTVTRPFQGLIPKPDEDDANRLGEKVILREQVKELFNEKYGEALGLNRPVLVPYKLIRDSPDAVEVTGLPDDIPFRNPNTYDIHRLEKILKAREHVRMVIINQLQPFAEICNDAKVPAKDSSIPKRKRKRVSEGNSVSSSSSSSSSSSSNPDSVASANQISLVVKLHRFGLRHSSLWPSPLCLAGPSTLGCGPRGRGGTGL

SEQ ID NO: 885489 - protein, 111 aa, Homo sapiens
EHFSRELRRLRQKSLSFQCQQPFPLLPAKDSSIPKRKRKRVSEGNSVSSSSSSSSSSSSNPDSVASANQISLVVKLHRFGLRHSSLWPSPLCLAGPSTLGCGPRGRGGTGL

SEQ ID NO: 885490 - protein, 505 aa, Homo sapiens
MSRSYNDELQFLEKINKNCWRIKKGFVPNMQVEGVFYVNDALEKLMFEELRNACRGGGVGGFLPAMKQIGNVAALPGIVHRSIGLPDVHSGYGFAIGNMAAFDMNDPEAVVSPGGVGFDINCGVRLLRTNLDESDVQPVKEQLAQAMFDHIPVGVGSKGVIPMNAKDLEEALEMGVDWSLREGYAWAEDKEHCEEYGRMLQADPNKVSARAKKRGLPQLGTLGAGNHYAEIQVVDEIFNEYAAKKMGIDHKGQVCVMIHSGSRGLGHQVATDALVAMEKAMKRDKIIVNDRQLACARIASPEGQDYLKGMAAAGNYAWVNRSSMTFLTRQAFAKVFNTTPDDLDLHVIYDVSHNIAKVEQHVVDGKERTLLVHRKGSTRAFPPHHPLIAVDYQLTGQPVLIGGTMGTCSYVLTGTEQGMTETFGTTCHGAGRALSRAKSRRNLDFQDVLDKLADMGIAIRVASPKLVMEEAPESYKNVTDVVNTCHDAGISKKAIKLRPIAVIKG

SEQ ID NO: 885491 - protein, 538 aa, Homo sapiens
ALWFLEGGALRSRTTRQRLFKAEPGVFATVFATMSRSYNDELQFLEKINKNCWRIKKGFVPNMQVEGVFYVNDALEKLMFEELRNACRGGGVGGFLPAMKQIGNVAALPGIVHRSIGLPDVHSGYGFAIGNMAAFDMNDPEAVVSPGGVGFDINCGVRLLRTNLDESDVQPVKEQLAQAMFDHIPVGVGSKGVIPMNAKDLEEALEMGVDWSLREGYAWAEDKEHCEEYGRMLQADPNKVSARAKKRGLPQLGTLGAGNHYAEIQVVDEIFNEYAAKKMGIDHKGQVCVMIHSGSRGLGHQVATDALVAMEKAMKRDKIIVNDRQLACARIASPEGQDYLKGMAAAGNYAWVNRSSMTFLTRQAFAKVFNTTPDDLDLHVIYDVSHNIAKVEQHVVDGKERTLLVHRKGSTRAFPPHHPLIAVDYQLTGQPVLIGGTMGTCSYVLTGTEQGMTETFGTTCHGAGRALSRAKSRRNLDFQDVLDKLADMGIAIRVASPKLVMEEAPESYKNVTDVVNTCHDAGISKKAIKLRPIAVIKG

SEQ ID NO: 885492 - protein, 261 aa, Homo sapiens
PKRERRAPRGESDEAQRKHRLGPQVATDALVAMEKAMKRDKIIVNDRQLACARIASPEGQDYLKGMAAAGNYAWVNRSSMTFLTRQAFAKVFNTTPDDLDLHVIYDVSHNIAKVEQHVVDGKERTLLVHRKGSTRAFPPHHPLIAVDYQLTGQPVLIGGTMGTCSYVLTGTEQGMTETFGTTCHGAGRALSRAKSRRNLDFQDVLDKLADMGIAIRVASPKLVMEEAPESYKNVTDVVNTCHDAGISKKAIKLRPIAVIKG

SEQ ID NO: 885493 - protein, 348 aa, Homo sapiens
MSRSYNDELQFLEKINKNCWRIKKGFVPNMQVEGVFYVNDALEKLMFEELRNACRGGGVGGFLPAMKQIGNVAALPGIVHRSIGLPDVHSGYGFAIGNMAAFDMNDPEAVVSPGGVGFDINCGVRLLRTNLDESDVQPVKEQLAQAMFDHIPVGVGSKGVIPMNAKDLEEALEMGVDWSLREGYAWAEDKEHCEEYGRMLQADPNKVSARAKKRGLPQLGTLGAGNHYAEIQVVDEIFNEYAAKKMGIDHKGQVCVMIHSGSRGLGHQVATDALVAMEKAMKRDKIIVNDRQLACARIASPEGQDYLKGMAAAGNYAWVNRSSMTFLTRQLGQQGCLTPPTLSEVEVD

SEQ ID NO: 885494 - protein, 351 aa, Homo sapiens
MSRSYNDELQFLEKINKNCWRIKKGFVPNMQVEGVFYVNDALEKLMFEELRNACRGGGVGGFLPAMKQIGNVAALPGIVHRSIGLPDVHSGYGFAIGNMAAFDMNDPEAVVSPGGVGFDINCGVRLLRTNLDESDVQPVKEQLAQAMFDHIPVGVGSKGVIPMNAKDLEEALEMGVDWSLREGYAWAEDKEHCEEYGRMLQADPNKVSARAKKRGLPQLGTLGAGNHYAEIQVVDEIFNEYAAKKMGIDHKGQVCVMIHSGSRGLGHQVATDALVAMEKAMKRDKIIVNDRQLACARIASPEGQDYLKGMAAAGNYAWVNRSSMTFLTRQLGDGGGLVLKKGYAWPEDKEH

SEQ ID NO: 885495 - protein, 166 aa, Homo sapiens
MSRSYNDELQFLEKINKNCWRIKKGFVPNMQVEGVFYVNDALEKLMFEELRNACRGGGVGGFLPAMKQIGNVAALPGIVHRSIGLPDVHSGYGFAIGNMAAFDMNDPEAVVSPGGVGFDINCGVRLLRTNLDESDVQPVKEQLAQAMFDHIPVGVGSKGVIPMNAK

SEQ ID NO: 885496 - protein, 166 aa, Homo sapiens; identical to SEQ ID NO: 885495

SEQ ID NO: 885497 - protein, 118 aa, Homo sapiens
MSRSYNDELQFLEKINKNCWRIKKGFVPNMQVEGVFYVNDALEKLMFEELRNACRGGGVGGFLPAMKQIGNVAALPGIVHRSIGLPDVHSGYGFAIGNMAAFDMNDPEAVVSPAAILA

SEQ ID NO: 885498 - protein, 135 aa, Homo sapiens
LRSRTTRQRLFKAEPGVFATVFATMSRSYNDELQFLEKINKNCWRIKKGFVPNMQVRQESKWRGLPCSVPGPAGVHCALWTSPDHWVRPGPLQSFPHPVLLPSRFWGRPTCSGTTSRQERSPNHEDKLSAVDMGI

SEQ ID NO: 885499 - protein, 505 aa, Homo sapiens; identical to SEQ ID NO: 885490

SEQ ID NO: 885500 - protein, 332 aa, Homo sapiens
MGVDWSLREGYAWAEDKEHCEEYGRMLQADPNKVSARAKKRGLPQLGTLGAGNHYAEIQVVDEIFNEYAAKKMGIDHKGQVCVMIHSGSRGLGHQVATDALVAMEKAMKRDKIIVNDRQLACARIASPEGQDYLKGMAAAGNYAWVNRSSMTFLTRQAFAKVFNTTPDDLDLHVIYDVSHNIAKVEQHVVDGKERTLLVHRKGSTRAFPPHHPLIAVDYQLTGQPVLIGGTMGTCSYVLTGTEQGMTETFGTTCHGAGRALSRAKSRRNLDFQDVLDKLADMGIAIRVASPKLVMEEAPESYKNVTDVVNTCHDAGISKKAIKLRPIAVIKG

SEQ ID NO: 885501 - protein, 235 aa, Homo sapiens
MSRSYNDELQFLEKINKNCWRIKKGFVPNMQVEGVFYVNDALEKLMFEELRNACRGGGVGGFLPAMKQIGNVAALPGIVHRSIGLPDVHSGYGFAIGNMAAFDMNDPEAVVSPGGVGFDINCGVRLLRTNLDESDVQPVKEQLAQAMFDHIPVGVGSKGVIPMNAKDLEEALEMGVDWSLREGYAWAEDKEHCEEYGRMLQADPNKVSARAKKRGLPQWGPWAAPLRTVGAIPGS

SEQ ID NO: 885502 - protein, 166 aa, Homo sapiens; identical to SEQ ID NO: 885495

SEQ ID NO: 885503 - protein, 103 aa, Homo sapiens
MSRSYNDELQFLEKINKNCWRIKKGFVPNMQVEGVFYVNDALEKLMFEELRNACRGGGVGGFLPAMKQIGNVAALPGIVHVSQSQNFNHLYFLKSIEWMNGHA

SEQ ID NO: 885504 - protein, 835 aa, Homo sapiens
PEACVWREHSPSSYPQTSGAEVTAGAEVILHGCPGLLQFPPFALLLPVSPSYSTLDQLCPLSTLLFSISPSSPSLPFPPFLSLPLGSRIFPSAAGGSDIMLRLLRPLLLLLLLPPPGSPEPPGLTQLSPGAPPQAPDLLYADGLRAYAAGAWAPAVALLREALRSQAALGRVRLDCGASCAADPGAALPAVLLGAPEPDSGPGPTQGSWERQLLRAALRRADCLTQCAARRLGPGGAARLRVGSALRDAFRRREPYNYLQRAYYQLKKLDLAAAAAHTFFVANPMHLQMREDMAKYRRMSGVRPQSFRDLETPPHWAAYDTGLELLGRQEAGLALPRLEEALQGSLAQMESCRADCEGPEEQQGAEEEEDGAASQGGLYEAIAGHWIQVLQCRQRCVGETATRPGRSFPVPDFLPNQLRRLHEAHAQVGNLSQAIENVLSVLLFYPEDEAAKRALNQYQAQLGEPRPGLGPREDIQRFILRSLGEKRQLYYAMEHLGTSFKDPDPWTPAALIPEALREKLREDQEKRPWDHEPVKPKPLTYWKDVLLLEGVTLTQDSRQLNGSERAVLDGLLTPAECGVLLQLAKDAAGAGARSGYRGRRSPHTPHERFEGLTVLKAAQLARAGTVGSQGAKLLLEVSERVRTLTQAYFSPERPLHLSFTHLVCRSAIEGEQEQRMDLSHPVHADNCVLDPDTGECWREPPAYTYRDYSGLLYLNDDFQGGDLFFTEPNALTVTARVRPRCGRLVAFSSGVENPHGVWAVTRGRRCALALWHTWAPEHREQEWIEAKELLQESQEEEEEEEEEMPSKDPSPEPPSRRHQRVQDKTGRAPRVREEL

SEQ ID NO: 885505 - protein, 696 aa, Homo sapiens
PEACVWREHSPSSYPQTSGAEVTAGAEVILHGCPGLLQFPPFALLLPVSPSYSTLDQLCPLSTLLFSISPSSPSLPFPPFLSLPLGSRIFPSAAGGSDIMLRLLRPLLLLLLLPPPGSPEPPGLTQLSPGAPPQAPDLLYNYLQRAYYQMREDMAKYRRMSGVRPQSFRDLETPPHWAAYDTGLELLGRQEAGLALPRLEEALQGSLAQMESCRADCEGPEEQQGAEEEEDGAASQGGLYEAIAGHWIQVLQCRQRCVGETATRPGRSFPVPDFLPNQLRRLHEAHAQVGNLSQAIENVLSVLLFYPEDEAAKRALNQYQAQLGEPRPGLGPREDIQRFILRSLGEKRQLYYAMEHLGTSFKDPDPWTPAALIPEALREKLREDQEKRPWDHEPVKPKPLTYWKDVLLLEGVTLTQDSRQLNGSERAVLDGLLTPAECGVLLQLAKDAAGAGARSGYRGRRSPHTPHERFEGLTVLKAAQLARAGTVGSQGAKLLLEVSERVRTLTQAYFSPERPLHLSFTHLVCRSAIEGEQEQRMDLSHPVHADNCVLDPDTGECWREPPAYTYRDYSGLLYLNDDFQGGDLFFTEPNALTVTARVRPRCGRLVAFSSGVENPHGVWAVTRGRRCALALWHTWAPEHREQEWIEAKELLQESQEEEEEEEEEMPSKDPSPEPPSRRHQRVQDKTGRAPRVREEL

SEQ ID NO: 885506 - protein, 423 aa, Homo sapiens
SSSHPQDIQRFILRSLGEKRQLYYAMEHLGTSFKDPFDPLPRAPDIESRAFPTSVFLSGNRRTLMRYFSSNVRDFQGLTLVGDDAFLDCLQDPWTPAALIPEALREKLREDQEKRPWDHEPVKPKPLTYWKDVLLLEGVTLTQDSRQLNGSERAVLDGLLTPAECGVLLQLAKDAAGAGARSGYRGRRSPHTPHERFEGLTVLKAAQLARAGTVGSQGAKLLLEVSERVRTLTQAYFSPERPLHLSFTHLVCRSAIEGEQEQRMDLSHPVHADNCVLDPDTGECWREPPAYTYRDYSGLLYLNDDFQGGDLFFTEPNALTVTARVRPRCGRLVAFSSGVENPHGVWAVTRGRRCALALWHTWAPEHREQEWIEAKELLQESQEEEEEEEEEMPSKDPSPEPPSRRHQRVQDKTGRAPRVREEL

SEQ ID NO: 885507 - protein, 341 aa, Homo sapiens
WEGLGPSWEAGSGLSWAPTERISQPLREDQEKRPWDHEPVKPKPLTYWKDVLLLEGVTLTQDSRQLNGSERAVLDGLLTPAECGVLLQLAKDAAGAGARSGYRGRRSPHTPHERFEGLTVLKAAQLARAGTVGSQGAKLLLEVSERVRTLTQAYFSPERPLHLSFTHLVCRSAIEGEQEQRMDLSHPVHADNCVLDPDTGECWREPPAYTYRDYSGLLYLNDDFQGGDLFFTEPNALTVTARVRPRCGRLVAFSSGVENPHGVWAVTRGRRCALALWHTWAPEHREQEWIEAKELLQESQEEEEEEEEEMPSKDPSPEPPSRRHQRVQDKTGRAPRVREEL

SEQ ID NO: 885508 - protein, 147 aa, Homo sapiens
PEACVWREHSPSSYPQTSGAEVTAGAEVILHGCPGLLQFPPFALLLPVSPSYSTLDQLCPLSTLLFSISPSSPSLPFPPFLSLPLGSRIFPSAAGGSDIMLRLLRPLLLLLLLPPPGSPEPPGLTQLSPGAPPQAPDLLYRTPLPQR

SEQ ID NO: 885509 - protein, 462 aa, Homo sapiens
MLRLLRPLLLLLLLPPPGSPEPPGLTQLSPGAPPQAPDLLYADGLRAYAAGAWAPAVALLREALRSQAALGRVRLDCGASCAADPGAALPAVLLGAPEPDSGPGPTQGSWERQLLRAALRRADCLTQCAARRLGPGGAARLRVGSALRDAFRRREPYNYLQRAYYQLKKLDLAAAAAHTFFVANPMHLQMREDMAKYRRMSGVRPQSFRDLETPPHWAAYDTGLELLGRQEAGLALPRLEEALQGSLAQMESCRADCEGPEEQQGAEEEEDGAASQGGLYEAIAGHWIQVLQCRQRCVGETATRPGRSFPVPDFLPNQLRRLHEAHAQVGNLSQAIENVLSVLLFYPEDEAAKRALNQYQAQLGEPRPGLGPREDIQRFILRSLGEKRQLYYAMEHLGTSFKDPDPWTPAALIPEALREKLRCPSPGGCDLDPGFQAAEWVGAGGVGWAAHPSRVWGAAAAG

SEQ ID NO: 885510 - protein, 580 aa, Homo sapiens
SDALLPSPPQLKKLDLAAAAAHTFFVANPMHLQMREDMAKYRRMSGVRPQSFRDLETPPHWAAYDTGLELLGRQEAGLALPRLEEALQGSLAQMESCRADCEGPEEQQGAEEEEDGAASQGGLYEAIAGHWIQVLQCRQRCVGETATRPGRSFPVPDFLPNQLRRLHEAHAQVGNLSQAIENVLSVLLFYPEDEAAKRALNQYQAQLGEPRPGLGPREDIQRFILRSLGEKRQLYYAMEHLGTSFKDPDPWTPAALIPEALREKLREDQEKRPWDHEPVKPKPLTYWKDVLLLEGVTLTQDSRQLNGSERAVLDGLLTPAECGVLLQLAKDAAGAGARSGYRGRRSPHTPHERFEGLTVLKAAQLARAGTVGSQGAKLLLEVSERVRTLTQAYFSPERPLHLSFTHLVCRSAIEGEQEQRMDLSHPVHADNCVLDPDTGECWREPPAYTYRDYSGLLYLNDDFQGGDLFFTEPNALTVTARVRPRCGRLVAFSSGVENPHGVWAVTRGRRCALALWHTWAPEHREQEWIEAKELLQESQEEEEEEEEEMPSKDPSPEPPSRRHQRVQDKTGRAPRVREEL

SEQ ID NO: 885511 - protein, 577 aa, Homo sapiens
HTSSLVGLKKLDLAAAAAHTFFVANPMHLQMREDMAKYRRMSGVRPQSFRDLETPPHWAAYDTGLELLGRQEAGLALPRLEEALQGSLAQMESCRADCEGPEEQQGAEEEEDGAASQGGLYEAIAGHWIQVLQCRQRCVGETATRPGRSFPVPDFLPNQLRRLHEAHAQVGNLSQAIENVLSVLLFYPEDEAAKRALNQYQAQLGEPRPGLGPREDIQRFILRSLGEKRQLYYAMEHLGTSFKDPDPWTPAALIPEALREKLREDQEKRPWDHEPVKPKPLTYWKDVLLLEGVTLTQDSRQLNGSERAVLDGLLTPAECGVLLQLAKDAAGAGARSGYRGRRSPHTPHERFEGLTVLKAAQLARAGTVGSQGAKLLLEVSERVRTLTQAYFSPERPLHLSFTHLVCRSAIEGEQEQRMDLSHPVHADNCVLDPDTGECWREPPAYTYRDYSGLLYLNDDFQGGDLFFTEPNALTVTARVRPRCGRLVAFSSGVENPHGVWAVTRGRRCALALWHTWAPEHREQEWIEAKELLQESQEEEEEEEEEMPSKDPSPEPPSRRHQRVQDKTGRAPRVREEL

SEQ ID NO: 885512 - protein, 462 aa, Homo sapiens; identical to SEQ ID NO: 885509

SEQ ID NO: 885513 - protein, 820 aa, Homo sapiens
PEACVWREHSPSSYPQTSGAEVTAGAEVILHGCPGLLQFPPFALLLPVSPSYSTLDQLCPLSTLLFSISPSSPSLPFPPFLSLPLGSRIFPSAAGGSDIMLRLLRPLLLLLLLPPPGSPEPPGLTQLSPGAPPQAPDLLYADGLRAYAAGAWAPAVALLREALRSQAALGRVRLDCGASCAADPGAALPAVLLGAPEPDSGPGPTQGSWERQLLRAALRRADCLTQCAARRLGPGGAARLRVGSALRDAFRRREPYNYLQRAYYQLKKLDLAAAAAHTFFVANPMHLQMREDMAKYRRMSGVRPQSFRDLETPPHWAAYDTGLELLGRQEAGLALPRLEEALQGSLAQMESCRADCEGPEEQQGAEEEEDGAASQGGLYEAIAGHWIQVLQCRQRCVGETATRPGRSFPVPDFLPNQLRRLHEAHAQVGNLSQAIENVLSVLLFYPEDEAAKRALNQYQAQLGEPRPGLGPREDIQRFILRSLGEKRQLYYAMEHLGTSFKDPDPWTPAALIPEALREKLREDQEKRPWDHEPVKPKPLTYWKDVLLLEGVTLTQDSRQLNGSERAVLDGLLTPAECGVLLQLAKDAAGAGARSGYRGRRSPHTPHERFEGLTVLKAAQLARAGTVGSQGAKLLLEVSERVRTLTHLVCRSAIEGEQEQRMDLSHPVHADNCVLDPDTGECWREPPAYTYRDYSGLLYLNDDFQGGDLFFTEPNALTVTARVRPRCGRLVAFSSGVENPHGVWAVTRGRRCALALWHTWAPEHREQEWIEAKELLQESQEEEEEEEEEMPSKDPSPEPPSRRHQRVQDKTGRAPRVREEL

SEQ ID NO: 885514 - protein, 239 aa, Homo sapiens
ADYYYYYYYYIRGRSTTVLKAAALARAGTVGSQGAKLLLEVSERVRTLTQAYFSPERPLHLSFTHLVCRSAIEGEQEQRMDLSHPVHADNCVLDPDTGECWREPPAYTYRDYSGLLYLNDDFQGGDLFFTEPNALTVTARVRPRCGRLVAFSSGVENPHGVWAVTRGRRCALALWHTWAPEHREQEWIEAKELLQESQEEEEEEEEEMPSKDPSPEPPSRRHQRVQDKTGRAPRVREEL

SEQ ID NO: 885515 - protein, 687 aa, Homo sapiens
PEACVWREHSPSSYPQTSGAEVTAGAEVILHGCPGLLQFPPFALLLPVSPSYSTLDQLCPLSTLLFSISPSSPSLPFPPFLSLPLGSRIFPSAAGGSDIMLRLLRPLLLLLLLPPPGSPEPPGLTQLSPGAPPQAPDLLYADGLRAYAAGAWAPAVALLREALRSQAALGRVRLDCGASCAADPGAALPAVLLGAPEPDSGPGPTQGSWERQLLRAALRRADCLTQCAARRLGPGGAARLRVGSALRDAFRRREPYNYLQRAYYQLKKLDLAAAAAHTFFVANPMHLQMREDMAKYRRMSGVRPQSFRDLETPPHWAAYDTGLELLGRQEAGLALPRLEEALQGSLAQMESCRADCEGPEEQQGAEEEEDGAASQGGLYEAIAGHWIQVLQCRQRCVGETATRPGRSFPVPDFLPNQLRRLHEAHAQVGNLSQAIENVLSVLLFYPEDEAAKRALNQYQAQLGEPRPGLGPREDIQRFILRSLGEKRQLYYAMEHLGTSFKDPDPWTPAALIPEALREKLREDQEKRPWDHEPVKPKPLTYWKDVLLLEGVTLTQDSRQLNGSERAVLDGLLTPAECGVLLQLAKDAAGAGARSGYRGRRSPHTPHERFEGLTVLKAAQVSTGGTRARLMPRPGGEAVQEAGPQGLGFCEGAFLGPRLPDRTQRGEKGCSESWGRGCCHGERRSSLG

SEQ ID NO: 885516 - protein, 69 aa, Homo sapiens
EGVTLTQDSRQLNGSERAVLDGLLTPAECGVLLQLAKVGRPASSSARSRLLDTITCSLALGLPPSFCLS

SEQ ID NO: 885517 - protein, 293 aa, Homo sapiens
  misc_feature (7)..(7): Xaa can be any naturally occurring amino acid
DGRECVXGGGGAGARAERRPPGPAGAEYPGTFFCLSAAKVFPGSSERTEFKKCNMARGCLCCLKYMMFLFNLIFWLCGCGLLGVGIWLSVSQGNFATFSPSFPSLSAANLVIAIGTIVMVTGFLGCLGAIKENKCLLLSFFIVLLVILLAELILLILFFVYMDKVNENAKKDLKEGLLLYHTENNVGLKNAWNIIQAEMRCCGVTDYTDWYPVLGENTVPDRCCMENSQGCGRNATTPLWRTGCYEKVKMWFDDNKHVLGTVGMCILIMQILGMAFSMTLFQHIHRTGKKYDA

SEQ ID NO: 885518 - protein, 293 aa, Homo sapiens; identical to SEQ ID NO: 885517
  misc_feature (7)..(7): Xaa can be any naturally occurring amino acid

SEQ ID NO: 885519 - protein, 116 aa, Homo sapiens
MVTGFLGCLGAIKENKCLLLSFFIVLLVILLAELILLILFFVYMDKVNENAKKDLKEGLLLYHTENNVGLKNAWNIIQAEMRCCGVTDYTDWYPGLGCAPEEPPALMGFCPCPSSH

SEQ ID NO: 885520 - protein, 293 aa, Homo sapiens; identical to SEQ ID NO: 885517
  misc_feature (7)..(7): Xaa can be any naturally occurring amino acid

SEQ ID NO: 885521 - protein, 293 aa, Homo sapiens; identical to SEQ ID NO: 885517
  misc_feature (7)..(7): Xaa can be any naturally occurring amino acid

SEQ ID NO: 885522 - protein, 135 aa, Homo sapiens
MVTGFLGCLGAIKENKCLLLSFFIVLLVILLAELILLILFFVYMDKVNENAKKDLKEGLLLYHTENNVGLKNAWNIIQAEMRCCGVTDYTDWYPVLGENTVPDRCCMENSQGCGRNATTPLWRTVRLGMDRLGPR

SEQ ID NO: 885523 - protein, 157 aa, Homo sapiens
MWGRPTFEQSCPALVPWPGFLVRSFSRLRRNPQSADSGADTSGRRDSADKCCSCTVGPGASCVFCCGWGGWVGLCLSMQFLIFVNINSKSLVHWEMCNLPENLFCFWSTSGVASGPRAFATVLPPAPTSSVCLQSLIYRSPRCLLYSLCAWPFCYLA

SEQ ID NO: 885524 - protein, 175 aa, Homo sapiens
MVTGFLGCLGAIKENKCLLLSFFIVLLVILLAELILLILFFVYMDKVNENAKKDLKEGLLLYHTENNVGLKNAWNIIQAEMRCCGVTDYTDWYPVLGENTVPDRCCMENSQGCGRNATTPLWRTGCYEKVKMWFDDNKHVLGTVGMCILIMQILGMAFSMTLFQHIHRTGKKYDA

SEQ ID NO: 885525 - protein, 293 aa, Homo sapiens; identical to SEQ ID NO: 885517
  misc_feature (7)..(7): Xaa can be any naturally occurring amino acid

SEQ ID NO: 885526 - protein, 293 aa, Homo sapiens; identical to SEQ ID NO: 885517
  misc_feature (7)..(7): Xaa can be any naturally occurring amino acid

SEQ ID NO: 885527 - protein, 196 aa, Homo sapiens
  misc_feature (7)..(7): Xaa can be any naturally occurring amino acid
DGRECVXGGGGAGARAERRPPGPAGAEYPGTFFCLSAAKVFPGSSERTEFKKCNMARGCLCCLKYMMFLFNLIFWLCGCGLLGVGIWLSVSQGNFATFSPSFPSLSAANLVIAIGTIVMVTGFLGCLGAIKENKCLLLSFFIVLLVILLAELILLILFFVYMDKVNENAKKDLKEGLLLYHTPTCLPPGSTGGRAG

SEQ ID NO: 885528 - protein, 327 aa, Homo sapiens
MVRSRQMCNTNMSVPTDGAVTTSQIPASEQETLVRPKPLLLKLLKSVGAQKDTYTMKEDLDAGVSEHSGDWLDQDSVSDQFSVEFEVESLDSEDYSLSEEGQELSDEDDEVYQVTVYQAGESDTDSFEEDPEISLADYWKCTSCNEMNPPLPSHCNRCWALRENWLPEDKGKDKGEISEKAKLENSTQAEEGFDVPDCKKTIVNDSRESCVEENDDKITQASQSQESEDYSQPSTSSSIIYSSQEDVKEFEREETQDKEESVESSLPLNAIEPCVICQGRPKNGCIVHGKTGHLMACFTCAKKLKKRNKPCPVCRQPIQMIVLTYFP

SEQ ID NO: 885529 - protein, 302 aa, Homo sapiens
MVRSRQMCNTNMSVPTDGAVTTSQIPASEQETLDLDAGVSEHSGDWLDQDSVSDQFSVEFEVESLDSEDYSLSEEGQELSDEDDEVYQVTVYQAGESDTDSFEEDPEISLADYWKCTSCNEMNPPLPSHCNRCWALRENWLPEDKGKDKGEISEKAKLENSTQAEEGFDVPDCKKTIVNDSRESCVEENDDKITQASQSQESEDYSQPSTSSSIIYSSQEDVKEFEREETQDKEESVESSLPLNAIEPCVICQGRPKNGCIVHGKTGHLMACFTCAKKLKKRNKPCPVCRQPIQMIVLTYFP

SEQ ID NO: 885530 - protein, 81 aa, Homo sapiens
ARTEAPRELGCFWGLCGPVCRKDGARSRARGAAATPLTEILLLSQPGAPSLPGLVRTSAQCPGPESGMIPEAQGVVLPRAP

SEQ ID NO: 885531 - protein, 130 aa, Homo sapiens
MFIERLNCIRVCVRLIAYLLSSAPPPPAHHQVSDPFSFLSESSDSGTSVSENRCHLEGGSDQKDLVQELQEEKPSSSHLVSRPSTSSRRRAISETGIYEYLFDAFTQLFDILSLMKLVLLDLIKLFPFFG

SEQ ID NO: 885532 - protein, 490 aa, Homo sapiens
MVRSRQMCNTNMSVPTDGAVTTSQIPASEQETLVRPKPLLLKLLKSVGAQKDTYTMKEVLFYLGQYIMTKRLYDEKQQHIVYCSNDLLGDLFGVPSFSVKEHRKIYTMIYRNLVVVNQQESSDSGTSVSENRCHLEGGSDQKDLVQELQEEKPSSSHLVSRPSTSSRRRAISETEENSDELSGERQRKRHKSDSISLSFDESLALCVIREICCERSSSSESTGTPSNPDLDAGVSEHSGDWLDQDSVSDQFSVEFEVESLDSEDYSLSEEGQELSDEDDEVYQVTVYQAGESDTDSFEEDPEISLADYWKCTSCNEMNPPLPSHCNRCWALRENWLPEDKGKDKGEISEKAKLENSTQAEEGFDVPDCKKTIVNDSRESCVEENDDKITQASQSQESEDYSQPSTSSSIIYSSQEDVKEFEREETQDKEESVESSLPLNAIEPCVICQGRPKNGCIVHGKTGHLMACFTCAKKLKKRNKPCPVCRQPIQL

SEQ ID NO: 885533 - protein, 181 aa, Homo sapiens [sequence omitted]

SEQ ID NO: 885534 - protein, 276 aa, Homo sapiens
MVRSRQMCNTNMSVPTDGAVTTSQIPASEQETLDLDAGVSEHSGDWLDQDSVSDQFSVEFEVESLDSEDYSLSEEGQELSDEDDEDYWKCTSCNEMNPPLPSHCNRCWALRENWLPEDKGKDKGEISEKAKLENSTQAEEGFDVPDCKKTIVNDSRESCVEENDDKITQASQSQESEDYSQPSTSSSIIYSSQEDVKEFEREETQDKEESVESSLPLNAIEPCVICQGRPKNGCIVHGKTGHLMACFTCAKKLKKRNKPCPVCRQPIQMIVLTYFP

SEQ ID NO: 885535 - protein, 249 aa, Homo sapiens
MVRSRQMCNTNMSVPTDGAVTTSQIPASEQETLVRPKPLLLKLLKSVGAQKDTYTMKEDYWKCTSCNEMNPPLPSHCNRCWALRENWLPEDKGKDKGEISEKAKLENSTQAEEGFDVPDCKKTIVNDSRESCVEENDDKITQASQSQESEDYSQPSTSSSIIYSSQEDVKEFEREETQDKEESVESSLPLNAIEPCVICQGRPKNGCIVHGKTGHLMACFTCAKKLKKRNKPCPVCRQPIQMIVLTYFP

SEQ ID NO: 885536 - protein, 181 aa, Homo sapiens [sequence omitted]

SEQ ID NO: 885537 - protein, 528 aa, Homo sapiens
MVRSRQMCNTNMSVPTDGAVTTSQIPASEQETLVRPKPLLLKLLKSVGAQKDTYTMKERWSFTMLPRLVWNSWAQGICLPRPPKVLDLQVLFYLGQYIMTKRLYDEKQQHIVYCSNDLLGDLFGVPSFSVKEHRKIYTMIYRNLVVVNQQESSDSGTSVSENRCHLEGGSDQKDLVQELQEEKPSSSHLVSRPSTSSRRRAISETEENSDELSGERQRKRHKSDSISLSFDESLALCVIREICCERSSSSESTGTPSNPDLDAGVSEHSGDWLDQDSVSDQFSVEFEVESLDSEDYSLSEEGQELSDEDDEVYQVTVYQAGESDTDSFEEDPEISLADYWKCTSCNEMNPPLPSHCNRCWALRENWLPEDKGKDKGEISEKAKLENSTQAEEGFDVPDCKKTIVNDSRESCVEENDDKITQASQSQESEDYSQPSTSSSIIYSSQEDVKEFEREETQDKEESVESSLPLNAIEPCVICQGRPKNGCIVHGKTGHLMACFTCAKKLKKRNKPCPVCRQPIQMIVLTYFP

SEQ ID NO: 885538 - protein, 430 aa, Homo sapiens
MTKRLYDEKQQHIVYCSNDLLGDLFGVPSFSVKEHRKIYTMIYRNLVVVNQQESSDSGTSVSENRCHLEGGSDQKDLVQELQEEKPSSSHLVSRPSTSSRRRAISETEENSDELSGERQRKRHKSDSISLSFDESLALCVIREICCERSSSSESTGTPSNPDLDAGVSEHSGDWLDQDSVSDQFSVEFEVESLDSEDYSLSEEGQELSDEDDEVYQVTVYQAGESDTDSFEEDPEISLADYWKCTSCNEMNPPLPSHCNRCWALRENWLPEDKGKDKGEISEKAKLENSTQAEEGFDVPDCKKTIVNDSRESCVEENDDKITQASQSQESEDYSQPSTSSSIIYSSQEDVKEFEREETQDKEESVESSLPLNAIEPCVICQGRPKNGCIVHGKTGHLMACFTCAKKLKKRNKPCPVCRQPIQMIVLTYFP

SEQ ID NO: 885539 - protein, 81 aa, Homo sapiens; identical to SEQ ID NO: 885530

SEQ ID NO: 885540 - protein, 390 aa, Homo sapiens
MIYRNLVVVNQQESSDSGTSVSENRCHLEGGSDQKDLVQELQEEKPSSSHLVSRPSTSSRRRAISETEENSDELSGERQRKRHKSDSISLSFDESLALCVIREICCERSSSSESTGTPSNPDLDAGVSEHSGDWLDQDSVSDQFSVEFEVESLDSEDYSLSEEGQELSDEDDEVYQVTVYQAGESDTDSFEEDPEISLADYWKCTSCNEMNPPLPSHCNRCWALRENWLPEDKGKDKGEISEKAKLENSTQAEEGFDVPDCKKTIVNDSRESCVEENDDKITQASQSQESEDYSQPSTSSSIIYSSQEDVKEFEREETQDKEESVESSLPLNAIEPCVICQGRPKNGCIVHGKTGHLMACFTCAKKLKKRNKPCPVCRQPIQMIVLTYFP

SEQ ID NO: 885541 - protein, 145 aa, Homo sapiens
MVRSRQMCNTNMSVPTDGAVTTSQIPASEQETLVRPKPLLLKLLKSVGAQKDTYTMKEDLDAGVSEHSGDWLDQDSVSDQFSVEFEVESLDSEDYSLSEEGQELSDEDDEVYQVTVYQAGESDTDSFEEDPEISLAMCKEAKEKE

SEQ ID NO: 885542 - protein, 181 aa, Homo sapiens [sequence omitted]

SEQ ID NO: 885543 - protein, 81 aa, Homo sapiens; identical to SEQ ID NO: 885530

SEQ ID NO: 885544 - protein, 81 aa, Homo sapiens; identical to SEQ ID NO: 885530

SEQ ID NO: 885545 - protein, 81 aa, Homo sapiens; identical to SEQ ID NO: 885530

SEQ ID NO: 885546 - protein, 81 aa, Homo sapiens; identical to SEQ ID NO: 885530

SEQ ID NO: 885547 - protein, 181 aa, Homo sapiens [sequence omitted]

SEQ ID NO: 885548 - protein, 497 aa, Homo sapiens; identical to SEQ ID NO: 780495

SEQ ID NO: 885549 - protein, 224 aa, Homo sapiens
MVRSRQMCNTNMSVPTDGAVTTSQIPASEQETLDYWKCTSCNEMNPPLPSHCNRCWALRENWLPEDKGKDKGEISEKAKLENSTQAEEGFDVPDCKKTIVNDSRESCVEENDDKITQASQSQESEDYSQPSTSSSIIYSSQEDVKEFEREETQDKEESVESSLPLNAIEPCVICQGRPKNGCIVHGKTGHLMACFTCAKKLKKRNKPCPVCRQPIQMIVLTYFP

SEQ ID NO: 885550 - protein, 108 aa, Homo sapiens
MVRSRQMCNTNMSVPTDGAVTTSQIPASEQETLVRPKPLLLKLLKSVGAQKDTYTMKEVLFYLGQYIMTKRLYDEKQQHIVNDCANLFPLVDLSIRELYISNYITLGI

SEQ ID NO: 885551 - protein, 199 aa, Homo sapiens
MPQIPRDNKAAALLMLTKNVDFVKDAHEEMEQAVEECDPYSGLLNDTEENNSDNHNHEDDVLGFPSNQDLYWSEDDQELIIPCLALVRASKACLKKIRMLVAENGKKDQVAQLDDIVDISDEISPSVDDLALSIYPPMCHLTVRINSAKLVSVLKKALEITKASHVTPQPEDSWIPLLINAIDHCMNRIKELTQSELEL

SEQ ID NO: 885552 - protein, 360 aa, Homo sapiens
MASATAPAAAVPTLASPLEQLRHLAEELRLLLPRVRVGEAQETTEEFNREMFWRRLNEAAVTVSREATTLTIVFSQLPLPSPQETQKFCEQVHAAIKAFIAVYYLLPKDQGITLRKLVRGATLDIVDGMAQLMEVLSVTPTQSPENNDLISYNSVWVACQQMPQIPRDNKAAALLMLTKNVDFVKDAHEEMEQAVEECDPYSGLLNDTEENNSDNHNHEDDVLGFPSNQDLYWSEDDQELIIPCLALVRASKACLKKIRMLVAENGKKDQVAQLDDIVDISDEISPSVDDLALSIYPPMCHLTVRINSAKLVSVLKKALEITKASHVTPQPEDSWIPLLINAIDHCMNRIKELTQSELEL

SEQ ID NO: 885553 - protein, 360 aa, Homo sapiens; identical to SEQ ID NO: 885552

SEQ ID NO: 885554 - protein, 360 aa, Homo sapiens; identical to SEQ ID NO: 885552

SEQ ID NO: 885555 - protein, 232 aa, Homo sapiens
MAQLMEVLSVTPTQSPENNDLISYNSVWVACQQMPQIPRDNKAAALLMLTKNVDFVKDAHEEMEQAVEECDPYSGLLNDTEENNSDNHNHEDDVLGFPSNQDLYWSEDDQELIIPCLALVRASKACLKKIRMLVAENGKKDQVAQLDDIVDISDEISPSVDDLALSIYPPMCHLTVRINSAKLVSVLKKALEITKASHVTPQPEDSWIPLLINAIDHCMNRIKELTQSELEL

SEQ ID NO: 885556 - protein, 432 aa, Homo sapiens
PVLASESGMVGAVPQGTGRGGRRRGQAWSLITGWVVLDLGRGRASWREEAGQGLWDGAGRLVDGNEPLTLWPGSGAAVAVRLRQWQRRPVFAAFGKRLRWRAQLHLQPQSPPWLRLWSSSGTWRRSCGCSCLECGSAKPRRPPRSLIERCSGEDSETQKFCEQVHAAIKAFIAVYYLLPKDQGITLRKLVRGATLDIVDGMAQLMEVLSVTPTQSPENNDLISYNSVWVACQQMPQIPRDNKAAALLMLTKNVDFVKDAHEEMEQAVEECDPYSGLLNDTEENNSDNHNHEDDVLGFPSNQDLYWSEDDQELIIPCLALVRASKACLKKIRMLVAENGKKDQVAQLDDIVDISDEISPSVDDLALSIYPPMCHLTVRINSAKLVSVLKKALEITKASHVTPQPEDSWIPLLINAIDHCMNRIKELTQSELEL

SEQ ID NO: 885557 - protein, 412 aa, Homo sapiens
PVLASESGMVGAVPQGTGRGGRRRGQAWSLITGWVVLDLGRGRASWREEAGQGLWDGAGRLVDGNEPLTLWPGSGAAVAVRLRQWQRRPVFAAFGKRLRWRAQLHLQPQSPPWLRLWSSSGTWRRSCGCSCLECGETQKFCEQVHAAIKAFIAVYYLLPKDQGITLRKLVRGATLDIVDGMAQLMEVLSVTPTQSPENNDLISYNSVWVACQQMPQIPRDNKAAALLMLTKNVDFVKDAHEEMEQAVEECDPYSGLLNDTEENNSDNHNHEDDVLGFPSNQDLYWSEDDQELIIPCLALVRASKACLKKIRMLVAENGKKDQVAQLDDIVDISDEISPSVDDLALSIYPPMCHLTVRINSAKLVSVLKKALEITKASHVTPQPEDSWIPLLINAIDHCMNRIKELTQSELEL

SEQ ID NO: 885558 - protein, 309 aa, Homo sapiens
MASATAPAAAVPTLASPLEQLRHLAEELRLLLPRVRVGEAQETTEEFNREMFWRRLNEAAVTVSREATTLTIVFSQLPLPSPQETQKFCEQVHAAIKAFIAVYYLLPKDQGITLRKLVRGATLDIVDGMAQLMEVLSVTPTQSPENNDLISYNSVWVACQQMPQIPRDNKAAALLMLTKNVDFVKDAHEEMEQAVEECDPYSGLLNDTEENNSDNHNHEDDVLGFPSNQDLYWSEDDQELIIPCLALVRASKACLKKIRMLVAENGKKDQVAQLDDIVDISDEISPSVDDLALSIYPPMCHLTVRINEP

SEQ ID NO: 885559 - protein, 309 aa, Homo sapiens; identical to SEQ ID NO: 885558

SEQ ID NO: 885560 - protein, 323 aa, Homo sapiens
MASATAPAAAVPTLASPLEQLRHLAEELRLLLPRVRVGEAQETTEEFNREMFWRRLNEAAVTVSREATTLTIVFSQLPLPSPQETQKFCEQVHAAIKAFIAVYYLLPKDQGITLRKLVRGATLDIVDGMAQLMEVLSVTPTQSPENNDLISYNSVWVACQQMPQIPRDNKAAALLMLTKNVDFVKDAHEEMEQAVEECDPYSGLLNDTEENNSDNHNHEDDVLGFPSNQDLYWSEDDQELIIPCLALVRASKACLKKIRMLVAENGKKDQVAQLDDIVDISDEISPSVDDLALSIYPPMCHLTVRINSAKLVSVLKKALEITK

SEQ ID NO: 885561 - protein, 199 aa, Homo sapiens; identical to SEQ ID NO: 885551

SEQ ID NO: 885562 - protein, 309 aa, Homo sapiens; identical to SEQ ID NO: 885558

SEQ ID NO: 885563 - protein, 199 aa, Homo sapiens; identical to SEQ ID NO: 885551

SEQ ID NO: 885564 - protein, 199 aa, Homo sapiens; identical to SEQ ID NO: 885551

SEQ ID NO: 885565 - protein, 199 aa, Homo sapiens; identical to SEQ ID NO: 885551

SEQ ID NO: 885566 - protein, 360 aa, Homo sapiens; identical to SEQ ID NO: 885552

SEQ ID NO: 885567 - protein, 342 aa, Homo sapiens
MASATAPAAAVPTLASPLEQLRHLAEELRLLLPRVRVGEAQETTEEFNREMFWRRLNEAAVTVSREATTLTIVFSQLPLPSPQETQKFCEQVHAAIKAFIAVYYLLPKDQGITLRKLVRGATLDIVDGMAQLMEVLSVTPTQSPENNDLISYNSVWVACQQMPQIPRDNKAAALLMLTKNVDFVKDAHEEMEQAVEECDPYSGLLNDTEENNSDNHNHEDDVLGFPSNQDLYWSEDDQELIIPCLALVRASKACLKKIRMLVAENGKKDQVAQLDDIVDISDEISPSVDDLALSIYPPMCHLTVRINSAKLVSVLKKALEITNAIDHCMNRIKELTQSELEL

SEQ ID NO: 885568 - protein, 309 aa, Homo sapiens; identical to SEQ ID NO: 885558

SEQ ID NO: 885569 - protein, 333 aa, Homo sapiens
MASATAPAAAVPTLASPLEQLRHLAEELRLLLPRVRVGEAQETTEEFNREMFWRRLNEAAVTVSREATTLTIVFSQLPLPSPQETQKFCEQVHAAIKAFIAVYYLLPKDQGITLRKLVRGATLDIVDGMAQLMEVLSVTPTQSPENNDLISYNSVWVACQQMPQIPRDNKAAALLMLTKNVDFVKDAHEEMEQAVEECDPYSGLLNDTEENNSDNHNHEDDVLGFPSNQDLYWSEDDQELIIPCLALVRASKACLKKIRMLVAENGKKDQVAQLDDIVDISDEISPSVDDLALSIYPPMCHLTVRINVSTGFEGIATEQMGRISLITSISCKL

SEQ ID NO: 885570 - protein, 148 aa, Homo sapiens
MPQIPRDNKAAALLMLTKNVDFVKDAHEEMEQAVEECDPYSGLLNDTEENNSDNHNHEDDVLGFPSNQDLYWSEDDQELIIPCLALVRASKACLKKIRMLVAENGKKDQVAQLDDIVDISDEISPSVDDLALSIYPPMCHLTVRINEP

SEQ ID NO: 885571 - protein, 84 aa, Homo sapiens
RTWRAHIPLEELSVIDKPRSTSPPLLSLYTAIFSKALMKATKKRKYPRKDVRSTWPGRPIRVNLNYDFSGSFVLSSPLIVMVRL

SEQ ID NO: 885572 - protein, 159 aa, Homo sapiens
PVLASESGMVGAVPQGTGRGGRRRGQAWSLITGWVVLDLGRGRASWREEAGQGLWDGAGRLVDGNEPLTLWPGSGAAVAVRLRQWQRRPVFAAFGKRLRWRAQLHLQPQSPPWLRLWSSSGTWRRSCGCSCLECGSAKPRRPPRSLIERCSGEDSMRQL

SEQ ID NO: 885573 - protein, 393 aa, Homo sapiens
MSCSESPAANSFLVDSLISSGRGEAGGGGGGAGGGGGGGYYAHGGVYLPPAADLPYGLQSCGLFPTLGGKRNEAASPGSGGGGGGLGPGAHGYGPSPIDLWLDAPRSCRMEPPDGPPPPPQQQPPPPPQPPQPAPQATSCSFAQNIKEESSYCLYDSADKCPKVSATAAELAPFPRGPPPDGCALGTSSGVPVPGYFRLSQAYGTAKGYGSGGGGAQQLGAGPFPAQPPGRGFDLPPALASGSADAARKERALDSPPPPTLACGSGGGSQGDEEAHASSSAAEELSPAPSESSKASPEKDSLGNSKGENAANWLTAKSGRKKRCPYTKHQTLELEKEFLFNMYLTRERRLEISRSVHLTDRQVKIWFQNRRMKLKKMNRENRIRELTANFNFS

SEQ ID NO: 885574 - protein, 393 aa, Homo sapiens; identical to SEQ ID NO: 885573

SEQ ID NO: 885575 - protein, 109 aa, Homo sapiens
MLFSKLLRGGNLRCGKKKGNSKGENAANWLTAKSGRKKRCPYTKHQTLELEKEFLFNMYLTRERRLEISRSVHLTDRQVKIWFQNRRMKLKKMNRENRIRELTANFNFS

SEQ ID NO: 885576 - protein, 393 aa, Homo sapiens; identical to SEQ ID NO: 885573

SEQ ID NO: 885577 - protein, 288 aa, Homo sapiens
MSCSESPAANSFLVDSLISSGRGEAGGGGGGAGGGGGGGYYAHGGVYLPPAADLPYGLQSCGLFPTLGGKRNEAASPGSGGGGGGLGPGAHGYGPSPIDLWLDAPRSCRRRAATRGWPVPAQPPGRGFDLPPALASGSADAARKERALDSPPPPTLACGSGGGSQGDEEAHASSSAAEELSPAPSESSKASPEKDSLGNSKGENAANWLTAKSGRKKRCPYTKHQTLELEKEFLFNMYLTRERRLEISRSVHLTDRQVKIWFQNRRMKLKKMNRENRIRELTANFNFS

SEQ ID NO: 885578 - protein, 393 aa, Homo sapiens; identical to SEQ ID NO: 885573

SEQ ID NO: 885579 - protein, 94 aa, Homo sapiens
MCQVDREKQPSEGAFSENNAENESGGDKPPIDPNNPAANWLHARSTRKKRCPYTKHQTLELEKEFLFNMYLTRDRRYEVARLLNLTERQVKIWF

SEQ ID NO: 885580 - protein, 217 aa, Homo sapiens
MEVENEASCSPGSASGGSREYKVVMLGAGGVGKSAMTMQFISHQFPDYHDPTIEDAYKTQVRIDNEPAYLDILDTAGQAEFTAMREQYMRGGEGFIICYSVTDRQSFQEAAKFKELIFQVRHTYEIPLVLVGNKIDLEQFRQVSTEEGLSLAQEYNCGFFETSAALRFCIDDAFHGLVREIRKKESMPSLMEKKLKRKDSLWKKLKGSLKKKRENMT

SEQ ID NO: 885581 - protein, 153 aa, Homo sapiens
MEVENEASCSPGSASGGSREYKVVMLGAGGVGKSAMTMQFISHQFPDYHDPTIEDAYKTQVRIDNEPAYLDILDTAGQAEFTAMREQYMRGGEGFIICYSVTDRQSFQEAAKFKELIFQVRHTYEIPLVLVGNKIDLEQFRQPTLKEFGREEF

SEQ ID NO: 885582 - protein, 238 aa, Homo sapiens
MEVENEASCSPGSASGGSREYKVVMLGAGGVGKSAMTMQFISHQFPDYHDPTIEDAYKTQVRIDNEPAYLDILDTAGQLCDWLKHRWEVELWEIRRTEEAEFTAMREQYMRGGEGFIICYSVTDRQSFQEAAKFKELIFQVRHTYEIPLVLVGNKIDLEQFRQVSTEEGLSLAQEYNCGFFETSAALRFCIDDAFHGLVREIRKKESMPSLMEKKLKRKDSLWKKLKGSLKKKRENMT

SEQ ID NO: 885583 - protein, 96 aa, Homo sapiens
  misc_feature (13)..(14): Xaa can be any naturally occurring amino acid
  misc_feature (17)..(17): Xaa can be any naturally occurring amino acid
AEGPQGRELSLGXXSGXYHILVSTEEGLSLAQEYNCGFFETSAALRFCIDDAFHGLVREIRKKESMPSLMEKKLKRKDSLWKKLKGSLKKKRENMT

SEQ ID NO: 885584 - protein, 217 aa, Homo sapiens; identical to SEQ ID NO: 885580

SEQ ID NO: 885585 - protein, 97 aa, Homo sapiens
  misc_feature (13)..(13): Xaa can be any naturally occurring amino acid
TNLPPPSIPSPNXTEPSVYHTAVSTEEGLSLAQEYNCGFFETSAALRFCIDDAFHGLVREIRKKESMPSLMEKKLKRKDSLWKKLKGSLKKKRENMT

SEQ ID NO: 885586 - protein, 71 aa, Homo sapiens
AEFTAMREQYMRGGEGFIICYSVTDRQSFQEAAKFKELIFQVRHTYEIPLVLVGNKIDLEQFRQVSADFIW

SEQ ID NO: 885587 - protein, 448 aa, Homo sapiens
AALPPAGAWALRRVRERCRTGRGRREYYGLWVPLSKMELSAVGERVFAAESIIKRRIRKGRIEYLVKWKGWAIKYSTWEPEENILDSRLIAAFEQKERERELYGPKKRGPKPKTFLLKARAQAEALRISDVHFSVKPSASASSPKLHSSAAVHRLKKDIRRCHRMSRRPLPRPDPQGGSPGLRPPISPFSETVRIINRKVKPREPKRNRIILNLKVIDKGAGGGGAGQGAGALARPKVPSRNRVIGKSKKFSESVLRTQIRHMKFGAFALYKPPPAPLVAPSPGKAEASAPGPGLLLAAPAAPYDARSSGSSGCPSPTPQSSDPDDTPPKLLPETVSPSAPSWREPEVLDLSLPPESAATSKRAPPEVTAAAGPAPPTAPEPAGASSEPEAGDWRPEMSPCSNVVVTDVTSNLLTVTIKEFCNPEDFEKVAAGVAGAAGGGGSIGASK

SEQ ID NO: 885588 - protein, 448 aa, Homo sapiens; identical to SEQ ID NO: 885587

SEQ ID NO: 885589 - protein, 448 aa, Homo sapiens; identical to SEQ ID NO: 885587

SEQ ID NO: 885590 - protein, 448 aa, Homo sapiens; identical to SEQ ID NO: 885587

SEQ ID NO: 885591 - protein, 430 aa, Homo sapiens
AALPPAGAWALRRVRERCRTGRGRREYYGLWVPLSKMELSAVGERVFAAESIIKRRIRKGRIEYLVKWKGWAIKYSTWEPEENILDSRLIAAFEQKERERELYGPKKRGPKPKTFLLKPSASASSPKLHSSAAVHRLKKDIRRCHRMSRRPLPRPDPQGGSPGLRPPISPFSETVRIINRKVKPREPKRNRIILNLKVIDKGAGGGGAGQGAGALARPKVPSRNRVIGKSKKFSESVLRTQIRHMKFGAFALYKPPPAPLVAPSPGKAEASAPGPGLLLAAPAAPYDARSSGSSGCPSPTPQSSDPDDTPPKLLPETVSPSAPSWREPEVLDLSLPPESAATSKRAPPEVTAAAGPAPPTAPEPAGASSEPEAGDWRPEMSPCSNVVVTDVTSNLLTVTIKEFCNPEDFEKVAAGVAGAAGGGGSIGASK

SEQ ID NO: 885592 - protein, 448 aa, Homo sapiens; identical to SEQ ID NO: 885587

SEQ ID NO: 885593 - protein, 448 aa, Homo sapiens; identical to SEQ ID NO: 885587

SEQ ID NO: 885594 - protein, 448 aa, Homo sapiens; identical to SEQ ID NO: 885587

SEQ ID NO: 885595 - protein, 168 aa, Homo sapiens
MVGTEIERETPFQAPSSSRCLGRMLKNPFPRASRLVPAPLLLLTTEAFSQPSLPEAKEAPVSWAASVSLCCLGAEAPVPVAEATAPALGQALGGQAGKGETRGSVFSRRMRVLVPELGPGPRWPALGHFPGLHCAWVACSRRGWSWLPGCAAMGPSLRSTLAGGRSEP

SEQ ID NO: 885596 - protein, 203 aa, Homo sapiens
AALPPAGAWALRRVRERCRTGRGRREYYGLWVPLSKMELSAVGERVFAAESIIKRRIRKGRIEYLVKWKGWAIKYSTWEPEENILDSRLIAAFEQKERERELYGPKKRGPKPKTFLLKARAQAEALRISDVHFSVKPSASASSPKLHSSAAVHRLKKDIRRCHFPGLHCAWVACSRRGWSWLPGCAAMGPSLRSTLAGGRSEP

SEQ ID NO: 885597 - protein, 89 aa, Homo sapiens
DSTEEVDSTEEVDSTVEGARTPGEGLPDSSLADGHQDAEIGRWLVGAKDAPSQAFVVPSSAPCNLWRSQCLTPAVSAYCMQVVSQAKRD

SEQ ID NO: 885598 - protein, 485 aa, Homo sapiens
MELEVRRVRQAFLSGRSRPLRFRLQQLEALRRMVQEREKDILTAIAADLCKSEFNVYSQEVITVLGEIDFMLENLPEWVTAKPVKKNVLTMLDEAYIQPQPLGVVLIIGAWNYPFVLTIQPLIGAIAAGNAVIIKPSELSENTAKILAKLLPQYLDQDLYIVINGGVEETTELLKQRFDHIFYTGNTAVGKIVMEAAAKHLTPVTLELGGKSPCYIDKDCDLDIVCRRITWGKYMNCGQTCIAPDYILCEASLQNQIVWKIKETVKEFYGENIKESPDYERIINLRHFKRILSLLEGQKIAFGGETDEATRYIAPTVLTDVDPKTKVMQEEIFGPILPIVPVKNVDEAINFINEREKPLALYVFSHNHKLIKRMIDETSSGGVTGNDVIMHFTLNSFPFGGVGSSGMGAYHGKHSFDTFSHQRPCLLKSLKREGANKLRYPPNSQSKVDWGKFFLLKRFNKEKLGLLLLTFLGIVAAVLVKAEYY

SEQ ID NO: 885599 - protein, 485 aa, Homo sapiens; identical to SEQ ID NO: 885598

SEQ ID NO: 885600 - protein, 521 aa, Homo sapiens
MELEVRRVRQAFLSGRSRPLRFRLQQLEALRRMVQEREKDILTAIAADLCKSEFNVYSQEVITVLGEIDFMLENLPEWVTAKPVKKNVLTMLDEAYIQPQPLGVVLIIGAWNYPFVLTIQPLIGAIAAGNAVIIKPSELSENTAKILAKLLPQYLDQPFCSNSCDDPIKKDEMEDSEMSRIEEDVEPEDRGVKDLYIVINGGVEETTELLKQRFDHIFYTGNTAVGKIVMEAAAKHLTPVTLELGGKSPCYIDKDCDLDIVCRRITWGKYMNCGQTCIAPDYILCEASLQNQIVWKIKETVKEFYGENIKESPDYERIINLRHFKRILSLLEGQKIAFGGETDEATRYIAPTVLTDVDPKTKVMQEEIFGPILPIVPVKNVDEAINFINEREKPLALYVFSHNHKLIKRMIDETSSGGVTGNDVIMHFTLNSFPFGGVGSSGMGAYHGKHSFDTFSHQRPCLLKSLKREGANKLRYPPNSQSKVDWGKFFLLKRFNKEKLGLLLLTFLGIVAAVLVKAEYY

SEQ ID NO: 885601 - protein, 485 aa, Homo sapiens; identical to SEQ ID NO: 885598

SEQ ID NO: 885602 - protein, 485 aa, Homo sapiens; identical to SEQ ID NO: 885598

SEQ ID NO: 885603 - protein, 485 aa, Homo sapiens; identical to SEQ ID NO: 885598

SEQ ID NO: 885604 - protein, 493 aa, Homo sapiens
MELEVRRVRQAFLSGRSRPLRFRLQQLEALRRMVQEREKDILTAIAADLCKSEFNVYSQEVITVLGEIDFMLENLPEWVTAKPVKKNVLTMLDEAYIQPQPLGVVLIIGAWNYPFVLTIQPLIGAIAAGNAVIIKPSELSENTAKILAKLLPQYLDQDLYIVINGGVEETTELLKQRFDHIFYTGNTAVGKIVMEAAAKHLTPVTLELGGKSPCYIDKDCDLDIVCSCSGCFPLRRITWGKYMNCGQTCIAPDYILCEASLQNQIVWKIKETVKEFYGENIKESPDYERIINLRHFKRILSLLEGQKIAFGGETDEATRYIAPTVLTDVDPKTKVMQEEIFGPILPIVPVKNVDEAINFINEREKPLALYVFSHNHKLIKRMIDETSSGGVTGNDVIMHFTLNSFPFGGVGSSGMGAYHGKHSFDTFSHQRPCLLKSLKREGANKLRYPPNSQSKVDWGKFFLLKRFNKEKLGLLLLTFLGIVAAVLVKAEYY

SEQ ID NO: 885605 - protein, 503 aa, Homo sapiens
MELEVRRVRQAFLSGRSRPLRFRLQQLEALRRMVQEREKDILTAIAADLCKSEFNVYSQEVITVLGEIDFMLENLPEWVTAKPVKKNVLTMLDEAYIQPQPLGVVLIIGAWNYPFVLTIQPLIGAIAAGNAVIIKPSELSENTAKILAKLLPQYLDQDLYIVINGGVEETTELLKQRFDHIFYTGNTAVGKIVMEAAAKHLTPVTLELGGKSPCYIDKDCDLDIVCRRITWGKYMNCGQTCIAPDYILCEASLQNQIVWKIKETVKEFYGENIKESPDYERIINLRHFKRILSLLEGQKIAFGGETDEATRYIAPTVLTDVDPKTKVMQEEIFGPILPIVPVKNVDEAINFINEREKPLALYVFSHNHKLIKRMIDETSSGGVTGNDVIMHFTLNSFPFGGVGSSGMGAYHGKHSFDTFSHQRPCLLKSLKREGANKLRYPPNSQSKVDWGKFFLLKRFNKEKLGLLLLTFLGIVAAVLVKFTDCVGPVSRDEHQISKPSPVC

SEQ ID NO: 885606 - protein, 331 aa, Homo sapiens
MELEVRRVRQAFLSGRSRPLRFRLQQLEALRRMVQEREKDILTAIAADLCKSEFNVYSQEVITVLGEIDFMLENLPEWVTAKPVKKNVLTMLDEAYIQPQPLGVVLIIGAWNYPFVLTIQPLIGAIAAGNAVIIKPSELSENTAKILAKLLPQYLDQDLYIVINGGVEETTELLKQRFDHIFYTGNTAVGKIVMEAAAKHLTPVTLELGGKSPCYIDKDCDLDIVCRRITWGKYMNCGQTCIAPDYILCEASLQNQIVWKIKETVKEFYGENIKESPDYERIINLRHFKRILSLLEGQKIAFGGETDEATRYIGNGNSPFPMGRWQFGSFC

SEQ ID NO: 885607 - protein, 485 aa, Homo sapiens; identical to SEQ ID NO: 885598

SEQ ID NO: 885608 - protein, 485 aa, Homo sapiens; identical to SEQ ID NO: 885598

SEQ ID NO: 885609 - protein, 485 aa, Homo sapiens; identical to SEQ ID NO: 885598

SEQ ID NO: 885610 - protein, 508 aa, Homo sapiens
MELEVRRVRQAFLSGRSRPLRFRLQQLEALRRMVQEREKDILTAIAADLCKSEFNVYSQEVITVLGEIDFMLENLPEWVTAKPVKKNVLTMLDEAYIQPQPLGVVLIIGAWNYPFVLTIQPLIGAIAAGNAVIIKPSELSENTAKILAKLLPQYLDQDLYIVINGGVEETTELLKQRFDHIFYTGNTAVGKIVMEAAAKHLTPVTLELGGKSPCYIDKDCDLDIVCRRITWGKYMNCGQTCIAPDYILCEASLQNQIVWKIKETVKEFYGENIKESPDYERIINLRHFKRILSLLEGQKIAFGGETDEATRYIAPTVLTDVDPKTKVMQEEIFGPILPIVPVKNVDEAINFINEREKPLALYVFSHNHKLIKRMIDETSSGGVTGNDVIMHFTLNSFPFGGVGSSGMGAYHGKHSFDTFSHQRPCLLKSLKREGANKLRYPPNSQSKVDWGKFFLLKRFNKEKLGLLLLTFLGIVAAVLVKKYQAVLRRKALLIFLVVHRLRWSSKQR

SEQ ID NO: 885611 - protein, 485 aa, Homo sapiens; identical to SEQ ID NO: 885598

SEQ ID NO: 885612 - protein, 403 aa, Homo sapiens
MELEVRRVRQAFLSGRSRPLRFRLQQLEALRRMVQEREKDILTAIAADLCKSEFNVYSQEVITVLGEIDFMLENLPEWVTAKPVKKNVLTMLDEAYIQPQPLGVVLIIGAWNYPFVLTIQPLIGAIAAGNAVIIKPSELSENTAKILAKLLPQYLDQDLYIVINGGVEETTELLKQRFDHIFYTGNTAVGKIVMEAAAKHLTPVTLELGGKSPCYIDKDCDLDIVCRRITWGKYMNCGQTCIAPDYILCEASLQNQIVWKIKETVKEFYGENIKESPDYERIINLRHFKRILSLLEGQKIAFGGETDEATRYIAPTVLTDVDPKTKVMQEEIFGPILPIVPVKNVDEAINFINEREKPLALYVFSHNHKLIKRMIDETSSGGVTGNDVIMHFTLNSFPFGGVG

SEQ ID NO: 885613 - protein, 182 aa, Homo sapiens
MELEVRRVRQAFLSGRSRPLRFRLQQLEALRRMVQEREKDILTAIAADLCKSEFNVYSQEVITVLGEIDFMLENLPEWVTAKPVKKNVLTMLDEAYIQPQPLGVVLIIGAWNYPFVLTIQPLIGAIAAGNAVIIKPSELSENTAKILAKLLPQYLDQPFCSNSCDDPIKKDEMEDSEMSRIE

SEQ ID NO: 885614 - protein, 151 aa, Homo sapiens
MELEVRRVRQAFLSGRSRPLRFRLQQLEALRRMVQEREKDILTAIAADLCKSEFNVYSQEVITVLGEIDFMLENLPEWVTAKPVKKNVLTMLDEAYIQPQPLGVVLIIGAWNYPFVLTIQPLIGAIAAGNAVIIKPSELSVYIWINRGVEE

SEQ ID NO: 885615 - protein, 267 aa, Homo sapiens
ADRAAAAAGRRARGGGGGRAAGSQSGGGGGGGGDAAAPLSPPAPGAGSQPREAARAGRQHADGEELDGFEGEASSTSMISGASSPYQPTTEPVSQRRGLAGLRCDPDYLRGALGRLKVAQVILALIAFICIETIMACSPCEGLYFFEFVSCSAFVVTGVLLIMFSLNLHMRIPQINWNLTDLVNTGLSAFLFFIASIVLAALNHRAGAEIAAVIFGFLATAAYAVNTFLAVQKWRVSVRQQSTNDYIRARTESRDVDSRPEIQRLDT

SEQ ID NO: 885616 - protein, 293 aa, Homo sapiens
ADRAAAAAGRRARGGGGGRAAGSQSGGGGGGGGDAAAPLSPPAPGAGSQPREAARAGRQHADGEELDGFEGEASSTSMISGASSPYQPTTEPVSQRRGLAGLRCDPDYLRGALGRLKVAQVILALIAFICIETIMACSPCEGLYFFEFVSCSAFVVTGVLLIMFSLNLHMRIPQINWNLTDLVNTGLSAFLFFIASIVLAALNHRAGAEIAAVIFGFLATAAYAVNTFLAVQKWRVSVRQQSTNDYIRARTESRDVDSRPEIQRLDTFSYSTNVTVRKKSPTNLLSLNHWQLA

SEQ ID NO: 885617 - protein, 874 aa, Homo sapiens
MDEEEDNLSLLTALLEENESALDCNSEENNFLTRENGEPDAFDELFDADGDGESYTEEADDGETGETRDEKENLATLFGDMEDLTDEEEVPASQSTENRVLPAPAPRREKTNEELQEELRNLQEQMKALQEQLKVTTIKQTASPARLQKSPEKSPRPPLKERRVQRIQESTCFSAELDVPALPRTKRVARTPKASPPDPKSSSSRMTSAPSQPLQTISRNKPSGITRGQIVGTPGSSGETTQPICVEAFSGLRLRRPRVSSTEMNKKMTGRKLIRLSQIKEKMAREKLEEIDWVTFGVILKKVTPQSVNSGKTFSIWKLNDLRDLTQCVSLFLFGEVHKALWKTEQGTVVGILNANPMKPKDGSEEVCLSIDHPQKVLIMGEALDLGTCKAKKKNGEPCTQTVNLRDCEYCQYHVQAQYKKLSAKRADLQSTFSGGRIPKKFARRGTSLKERLCQDGFYYGGVSSASYAASIAAAVAPKKKIQTTLSNLVVKGTNLIIQETRQKLGIPQKSLSCSEEFKELMDLPTCGARNLKQHLAKATASGIMGSPKPAIKSISASALLKQQKQRMLEMRRRKSEEIQKRFLQSSSEVESPAVPSSSRQPPAQPPRTGSEFPRLEGAPATMTPKLGRGVLEGDDVLFYDESPPPRPKLSALAEAKKLAAITKLRAKGQVLTKTNPNSIKKKQKDPQDILEVKERVEKNTMFSSQAEDELEPARKKRREQLAYLESEEFQKILKAKSKHTGILKEAEAEMQERYFEPLVKKEQMEEKMRNIREVKCRVVTCKTCAYTHFKLLETCVSEQHEYHWHDGVKRFFKCPCGNRSISLDRLPNKHCSNCGLYKWERDGMLKEKTGPKIGGETLLPRGEEHAKFLNSLK

SEQ ID NO: 885618 - protein, 874 aa, Homo sapiens; identical to SEQ ID NO: 885617

SEQ ID NO: 885619 - protein, 855 aa, Homo sapiens
MDEEEDNLSLLTALLEENESALDCNSEENNFLTRENGEPDAFDELFDADGDGESYTEEADDGETGETRDEKENLATLFGDMEDLTDEEEVPASQSTENRVLPAPAPRREKTNEELQEELRNLQEQMKALQEQLKVTTIKQTASPARLQKSPEKSPRPPLKERRVQRIQESTCFSAELDVPALPRTKRVARTPKASPPDPKSSSSRMTSAPSQPLQTISRNKPSGITRGQIVGTPGSSGETTQPICVEAFSGLRLRRPRVSSTEMNKKMTGRKLIRLSQIKEKMAREKLEEIDWVTFGVILKKVTPQSVNSGKTFSIWKLNDLRDLTQCVSLFLFGEVHKALWKTEQGTVVGILNANPMKPKDGSEEVCLSIDHPQKVLIMGEALDLGTCKAKKKNGEPCTQTVNLRDCEYCQYHVQAQYKKLSAKRADLQSTFSGGRIPKKFARRGTSLKERLCQDGFYYGGVSSASYAASIAAAVAPKKKIQTTLSNLVVKGTNLIIQETRQKLGIPQKSLSCSEEFKELMDLPTCGARNLKQHLAKATASGIMGSPKPAIKSISASALLKQQKQRMLEMRRRKSEEIQKRFLQSSSEVESPAVPSSSRQPPAQPPRTGSEFPRLEGAPATMTPKLGRGVLEGDDVLFYDESPPPRPKLSALAEAKKLAAITKLRAKGQVLTKTNPNSIKKKQKDPQDILEVKERVEKNTMFSSQAEDELEPARKKRREQLAYLESEEFQKILKAKSKHTGILKEAEAEMQERYFEPLVKKEQMEEKMRNIREVKCRVVTCKTCAYTHFKLLETCVSEQHEYHWHDGVKRFFKCPCGNRSISLDRLPNKHCSNCGLYKWERDGMLKVCHLRTNF

SEQ ID NO: 885620 - protein, 913 aa, Homo sapiens
QRPSKLKRAEFYFFLSLVSPVSPSSASFEVSCHNCPLDSMDEEEDNLSLLTALLEENESALDCNSEENNFLTRENGEPDAFDELFDADGDGESYTEEADDGETGETRDEKENLATLFGDMEDLTDEEEVPASQSTENRVLPAPAPRREKTNEELQEELRNLQEQMKALQEQLKVTTIKQTASPARLQKSPEKSPRPPLKERRVQRIQESTCFSAELDVPALPRTKRVARTPKASPPDPKSSSSRMTSAPSQPLQTISRNKPSGITRGQIVGTPGSSGETTQPICVEAFSGLRLRRPRVSSTEMNKKMTGRKLIRLSQIKEKMAREKLEEIDWVTFGVILKKVTPQSVNSGKTFSIWKLNDLRDLTQCVSLFLFGEVHKALWKTEQGTVVGILNANPMKPKDGSEEVCLSIDHPQKVLIMGEALDLGTCKAKKKNGEPCTQTVNLRDCEYCQYHVQAQYKKLSAKRADLQSTFSGGRIPKKFARRGTSLKERLCQDGFYYGGVSSASYAASIAAAVAPKKKIQTTLSNLVVKGTNLIIQETRQKLGIPQKSLSCSEEFKELMDLPTCGARNLKQHLAKATASGIMGSPKPAIKSISASALLKQQKQRMLEMRRRKSEEIQKRFLQSSSEVESPAVPSSSRQPPAQPPRTGSEFPRLEGAPATMTPKLGRGVLEGDDVLFYDESPPPRPKLSALAEAKKLAAITKLRAKGQVLTKTNPNSIKKKQKDPQDILEVKERVEKNTMFSSQAEDELEPARKKRREQLAYLESEEFQKILKAKSKHTGILKEAEAEMQERYFEPLVKKEQMEEKMRNIREVKCRVVTCKTCAYTHFKLLETCVSEQHEYHWHDGVKRFFKCPCGNRSISLDRLPNKHCSNCGLYKWERDGMLKEKTGPKIGGETLLPRGEEHAKFLNSLK

SEQ ID NO: 885621 - protein, 913 aa, Homo sapiens; identical to SEQ ID NO: 885620

SEQ ID NO: 885622 - protein, 913 aa, Homo sapiens; identical to SEQ ID NO: 885620

SEQ ID NO: 885623 - protein, 248 aa, Homo sapiens
MAAGTAVGAWVLVLSLWGAVVGAQNITARIGEPLVLKCKGAPKKPPQRLEWKLNTGRTEAWKVLSPQGGGPWDSVARVLPNGSLFLPAVGIQDEGIFRCQAMNRNGKETKSNYRVRVYQIPGKPEIVDSASELTAGVPNKVGTCVSEGSYPAGTLSWHLDGKPLVPNEKGVSVKEQTRRHPETGLFTLQSELMVTPARGGDPRPTFSCSFSPGLPRHRALRTAPSSPVSGSLCLWRRSNWWWSQKVEQ

SEQ ID NO: 885624 - protein, 248 aa, Homo sapiens; identical to SEQ ID NO: 885623

SEQ ID NO: 885625 - protein, 248 aa, Homo sapiens; identical to SEQ ID NO: 885623

SEQ ID NO: 885626 - protein, 265 aa, Homo sapiens
MAAGTAVGAWVLVLSLWGAVVGAQNITARIGEPLVLKCKGAPKKPPQRLEWKLNTGRTEAWKVLSPQGGGPWDSVARVLPNGSLFLPAVGIQDEGIFRCQAMNRNGKETKSNYRVRVYQFENLHNYSPDWIFPPSEIPGKPEIVDSASELTAGVPNKVGTCVSEGSYPAGTLSWHLDGKPLVPNEKGVSVKEQTRRHPETGLFTLQSELMVTPARGGDPRPTFSCSFSPGLPRHRALRTAPSSPVSGSLCLWRRSNWWWSQKVEQ

SEQ ID NO: 885627 - protein, 234 aa, Homo sapiens
MAAGTAVGAWVLVLSLWGAVVGAQNITARIGEPLVLKCKGAPKKPPQRLEWKLGGGPWDSVARVLPNGSLFLPAVGIQDEGIFRCQAMNRNGKETKSNYRVRVYQIPGKPEIVDSASELTAGVPNKVGTCVSEGSYPAGTLSWHLDGKPLVPNEKGVSVKEQTRRHPETGLFTLQSELMVTPARGGDPRPTFSCSFSPGLPRHRALRTAPSSPVSGSLCLWRRSNWWWSQKVEQ

SEQ ID NO: 885628 - protein, 343 aa, Homo sapiens
TERWGLERGCRPHLGRRPQQGEGQTEPGPWKEAGWQPEQQLEPGCWSSVCGVSHSLNPTDPPCRKHFNPTPQSSSELFPEPEEVPFKVPHPPCPNFVSPHSLPTPLPWCYLPGAVVGAQNITARIGEPLVLKCKGAPKKPPQRLEWKLNTGRTEAWKVLSPQGGGPWDSVARVLPNGSLFLPAVGIQDEGIFRCQAMNRNGKETKSNYRVRVYQIPGKPEIVDSASELTAGVPNKVGTCVSEGSYPAGTLSWHLDGKPLVPNEKGVSVKEQTRRHPETGLFTLQSELMVTPARGGDPRPTFSCSFSPGLPRHRALRTAPSSPVSGSLCLWRRSNWWWSQKVEQ

SEQ ID NO: 885629 - protein, 264 aa, Homo sapiens
MAAGTAVGAWVLVLSLWGAVVGAQNITARIGEPLVLKCKGAPKKPPQRLEWKLNTGRTEAWKVLSPQGGGPWDSVARVLPNGSLFLPAVGIQDEGIFRCQAMNRNGKETKSNYRVRVYQIPGKPEIVDSASELTAGVPNKVVEESRRSRKRPCEQEVGTCVSEGSYPAGTLSWHLDGKPLVPNEKGVSVKEQTRRHPETGLFTLQSELMVTPARGGDPRPTFSCSFSPGLPRHRALRTAPSSPVSGSLCLWRRSNWWWSQKVEQ

SEQ ID NO: 885630 - protein, 374 aa, Homo sapiens
MEESDSEKTTEKENLGPRMDPPLGEPEGSLGWVLPNTAMKKKVLLMGKSGSGKTSMRSIIFANYIARDTRRLGATILDRIHSLQINSSLSTYSLVDSVGNTKTFDVEHSHVRFLGNLVLNLWDCGGQDTFMENYFTSQRDNIFRNVEVLIYVFDVESRELEKDMHYYQSCLEAILQNSPDAKIFCLVHKMDLVQEDQRDLIFKEREEDLRRLSRPLECSCFRTSIWDETLYKAWSSIVYQLIPNVQQLEMNLRNFAEIIEADEVLLFERATFLVISHYQCKEQRDAHRFEKISNIIKQFKLSCSKLAASFQSMEVRNSNFAAFIDIFTSNTYVMVVMSDPSIPSAATLINIRNARKHFEKLERVDGPKQCLLMR

SEQ ID NO: 885631 - protein, 308 aa, Homo sapiens
MKKKVLLMGKSGSGKTSMRSIIFANYIARDTRRLGATIDVEHSHVRFLGNLVLNLWDCGGQDTFMENYFTSQRDNIFRNVEVLIYVFDVESRELEKDMHYYQSCLEAILQNSPDAKIFCLVHKMDLVQEDQRDLIFKEREEDLRRLSRPLECSCFRTSIWDETLYKAWSSIVYQLIPNVQQLEMNLRNFAEIIEADEVLLFERATFLVISHYQCKEQRDAHRFEKISNIIKQFKLSCSKLAASFQSMEVRNSNFAAFIDIFTSNTYVMVVMSDPSIPSAATLINIRNARKHFEKLERVDGPKQCLLMR

SEQ ID NO: 885632 - protein, 194 aa, Homo sapiens
MEESDSEKTTEKENLGPRMDPPLGEPEGSLGWVLPNTAMKKKVLLMGKSGSGKTSMRSIIFANYIARDTRRLGATIDVEHSHVRFLGNLVLNLWDCGGQDTFMENYFTSQRDNIFRNVEVLIYVFDVESRELEKDMHYYQSCLEAILQNSPDAKIFCLVHKMDLVQEDQRDLVRNRRSAAPNARHALQTYFVEV

SEQ ID NO: 885633 - protein, 344 aa, Homo sapiens
YTHKPEQINVGLWWRYFFMPTVAGTFNTVHSWFNILWSEFQLVLTNIDVRQHSLSGETDDDNYLALSSSKGEFLLHGQLCSHQWPKGKFALGMLWYSTVGPSTAVERINSTDRIEQELLLQVWSVESRELEKDMHYYQSCLEAILQNSPDAKIFCLVHKMDLVQEDQRDLIFKEREEDLRRLSRPLECSCFRTSIWDETLYKAWSSIVYQLIPNVQQLEMNLRNFAEIIEADEVLLFERATFLVISHYQCKEQRDAHRFEKISNIIKQFKLSCSKLAASFQSMEVRNSNFAAFIDIFTSNTYVMVVMSDPSIPSAATLINIRNARKHFEKLERVDGPKQCLLMR

SEQ ID NO: 885634 - protein, 346 aa, Homo sapiens
MEESDSEKTTEKENLGPRMDPPLGEPEGSLGWVLPNTAMKKKVLLMGKSGSGKTSMRSIIFANYIARDTRRLGATIDVEHSHVRFLGNLVLNLWDCGGQDTFMENYFTSQRDNIFRNVEVLIYVFDVESRELEKDMHYYQSCLEAILQNSPDAKIFCLVHKMDLVQEDQRDLIFKEREEDLRRLSRPLECSCFRTSIWDETLYKAWSSIVYQLIPNVQQLEMNLRNFAEIIEADEVLLFERATFLVISHYQCKEQRDAHRFEKISNIIKQFKLSCSKLAASFQSMEVRNSNFAAFIDIFTSNTYVMVVMSDPSIPSAATLINIRNARKHFEKLERVDGPKQCLLMR

SEQ ID NO: 885635 - protein, 213 aa, Homo sapiens
MEESDSEKTTEKENLGPRMDPPLGEPEGSLGWVLPNTAMKKKVLLMGKSGSGKTSMRSIIFANYIARDTRRLGATIDVEHSHVRFLGNLVLNLWDCGGQDTFMENYFTSQRDNIFRNVEVLIYVFDVESRELEKDMHYYQSCLEAILQNSPDAKIFCLVHKMDLVQEDQRDLIFKEREEDLRRLSRPLECSCFRTSIWDETLYKAWSSNSLSD

SEQ ID NO: 885636 - protein, 689 aa, Homo sapiens
EREVGDGAGLAAGAGTRSGKMAAAQEADGARSAVVAAGGGSSGQVTSNGSIGRDPPAETQPQNPPAQPAPNAWQVIKGVLFRIFIIWAISSWFRRGPAPQDQAGPGGAPRVASRNLFPKDTLMNLHVYISEHEHFTDFNATSALFWEQHDLVYGDWTSGENSDGCYEHFAELDIPQSVQQNGSIYIHVYFTKSGFHPDPRQKALYRRLATVHMSRMINKYKRRRFQKTKNLLTGETEADPEMIKRAEDYGPVEVISHWHPNITINIVDDHTPWVKGSVPPPLDQYVKFDAVSGDYYPIIYFNDYWNLQKDYYPINESLASLPLRVSFCPLSLWRWQLYAAQSTKSPWNFLGDELYEQSDEEQDSVKVALLETNPYLLALTIIVSIVHSVFEFLAFKNDIQFWNSRQSLEGLSVRSVFFGVFQSFVVLLYILDNETNFVVQVSVFIGVLIDLWKITKVMDVRLDREHRVAGIFPRLSFKDKSTYIESSTKVYDDMAFRYLSWILFPLLGCYAVYSLLYLEHKGWYSWVLSMLYGFLLTFGFITMTPQLFINYKLKSVAHLPWRMLTYKALNTFIDDLFAFVIKMPVMYRIGCLRDDVVFFIYLYQRWIYRVDPTRVNEFGMSGEDPTAAAPVAEVPTAAGALTPTPAPTTTTATREEASTSLPTKPTQGASSASEPQEAPPKPAEDKKKD

SEQ ID NO: 885637 - protein, 689 aa, Homo sapiens; identical to SEQ ID NO: 885636

SEQ ID NO: 885638 - protein, 689 aa, Homo sapiens; identical to SEQ ID NO: 885636

SEQ ID NO: 885639 - protein, 674 aa, Homo sapiens
PGLELYEDTQLMKNCGILRAREASAHGCEVTSNGSIGRDPPAETQPQNPPAQPAPNAWQVIKGVLFRIFIIWAISSWFRRGPAPQDQAGPGGAPRVASRNLFPKDTLMNLHVYISEHEHFTDFNATSALFWEQHDLVYGDWTSGENSDGCYEHFAELDIPQSVQQNGSIYIHVYFTKSGFHPDPRQKALYRRLATVHMSRMINKYKRRRFQKTKNLLTGETEADPEMIKRAEDYGPVEVISHWHPNITINIVDDHTPWVKGSVPPPLDQYVKFDAVSGDYYPIIYFNDYWNLQKDYYPINESLASLPLRVSFCPLSLWRWQLYAAQSTKSPWNFLGDELYEQSDEEQDSVKVALLETNPYLLALTIIVSIVHSVFEFLAFKNDIQFWNSRQSLEGLSVRSVFFGVFQSFVVLLYILDNETNFVVQVSVFIGVLIDLWKITKVMDVRLDREHRVAGIFPRLSFKDKSTYIESSTKVYDDMAFRYLSWILFPLLGCYAVYSLLYLEHKGWYSWVLSMLYGFLLTFGFITMTPQLFINYKLKSVAHLPWRMLTYKALNTFIDDLFAFVIKMPVMYRIGCLRDDVVFFIYLYQRWIYRVDPTRVNEFGMSGEDPTAAAPVAEVPTAAGALTPTPAPTTTTATREEASTSLPTKPTQGASSASEPQEAPPKPAEDKKKD

SEQ ID NO: 885640 - protein, 670 aa, Homo sapiens
WNEKDAKNRQGEADRMSRKAHITEKVTSNGSIGRDPPAETQPQNPPAQPAPNAWQVIKGVLFRIFIIWAISSWFRRGPAPQDQAGPGGAPRVASRNLFPKDTLMNLHVYISEHEHFTDFNATSALFWEQHDLVYGDWTSGENSDGCYEHFAELDIPQSVQQNGSIYIHVYFTKSGFHPDPRQKALYRRLATVHMSRMINKYKRRRFQKTKNLLTGETEADPEMIKRAEDYGPVEVISHWHPNITINIVDDHTPWVKGSVPPPLDQYVKFDAVSGDYYPIIYFNDYWNLQKDYYPINESLASLPLRVSFCPLSLWRWQLYAAQSTKSPWNFLGDELYEQSDEEQDSVKVALLETNPYLLALTIIVSIVHSVFEFLAFKNDIQFWNSRQSLEGLSVRSVFFGVFQSFVVLLYILDNETNFVVQVSVFIGVLIDLWKITKVMDVRLDREHRVAGIFPRLSFKDKSTYIESSTKVYDDMAFRYLSWILFPLLGCYAVYSLLYLEHKGWYSWVLSMLYGFLLTFGFITMTPQLFINYKLKSVAHLPWRMLTYKALNTFIDDLFAFVIKMPVMYRIGCLRDDVVFFIYLYQRWIYRVDPTRVNEFGMSGEDPTAAAPVAEVPTAAGALTPTPAPTTTTATREEASTSLPTKPTQGASSASEPQEAPPKPAEDKKKD

SEQ ID NO: 885641 - protein, 567 aa, Homo sapiens
MNLHVYISEHEHFTDFNATSALFWEQHDLVYGDWTSGENSDGCYEHFAELDIPQSVQQNGSIYIHVYFTKSGFHPDPRQKALYRRLATVHMSRMINKYKRRRFQKTKNLLTGETEADPEMIKRAEDYGPVEVISHWHPNITINIVDDHTPWVKGSVPPPLDQYVKFDAVSGDYYPIIYFNDYWNLQKDYYPINESLASLPLRVSFCPLSLWRWQLYAAQSTKSPWNFLGDELYEQSDEEQDSVKVALLETNPYLLALTIIVSIVHSVFEFLAFKNDIQFWNSRQSLEGLSVRSVFFGVFQSFVVLLYILDNETNFVVQVSVFIGVLIDLWKITKVMDVRLDREHRVAGIFPRLSFKDKSTYIESSTKVYDDMAFRYLSWILFPLLGCYAVYSLLYLEHKGWYSWVLSMLYGFLLTFGFITMTPQLFINYKLKSVAHLPWRMLTYKALNTFIDDLFAFVIKMPVMYRIGCLRDDVVFFIYLYQRWIYRVDPTRVNEFGMSGEDPTAAAPVAEVPTAAGALTPTPAPTTTTATREEASTSLPTKPTQGASSASEPQEAPPKPAEDKKKD

SEQ ID NO: 885642 - protein, 685 aa, Homo sapiens
EREVGDGAGLAAGAGTRSGKMAAAQEADGARSAVVAAGGGSSGQVTSNGSIGRDPPAETQPQNPPAQPAPNAWQVIKGVLFRIFIIWAISSWFRRGPAPQDQAGPGGAPRVASRNLFPKDTLMNLHVYISEHEHFTDFNATSALFWEQHDLVYGDWTSGENSDGCYEHFAELDIPQSVQQNGSIYIHVYFTKSGFHPDPRQKALYRRLATVHMSRMINKYKRRRFQKTKNLLTGETEADPEMIKRAEDYGPVEVISHWHPNITINIVDDHTPWVKGSVPPPLDQYVKFDAVSGDYYPIIYFNDYWNLQKDYYPINESLASLPLRVSFCPLSLWRWQLYAAQSTKSPWNFLGDELYEQSDEEQDSVKVALLETNPYLLALTIIVSIVHSVFEFLAFKNDIQFWNSRQSLEGLSVRSVFFGVFQSFVVLLYILDNETNFVVQVSVFIGVLIDLWKITKVMDVRLDREHRVAGIFPRLSFKDKSTYIESSTKVYDDMAFRYLSWILFPLLGCYAVYSLLYLEHKGWYSWVLSMLYGFLLTFGFITMTPQLFINYKLKSVAHLPWRMLTYKALNTFIDDLFAFVIKMPVMYRIGCLRDDVVFFIYLYQRWIYRVDPTRVNEFGMSGEDPTAAAPVAEVPTAAGALTPTPAPTTTTATRVGWAGVGPGPPTGCPRPFIILSLVPLPHSPS

SEQ ID NO: 885643 - protein, 597 aa, Homo sapiens
EREVGDGAGLAAGAGTRSGKMAAAQEADGARSAVVAAGGGSSGQVTSNGSIGRDPPAETQPQNPPAQPAPNAWQVIKGVLFRIFIIWAISSWFRRGPAPQDQAGPGGAPRVASRNLFPKDTLMNLHVYISEHEHFTDFNATSALFWEQHDLVYGDWTSGENSDGCYEHFAELDIPQSVQQNGSIYIHVYFTKSGFHPDPRQKALYRRLATVHMSRMINKYKRRRFQKTKNLLTGETEADPEMIKRAEDYGPVEVISHWHPNITINIVDDHTPWVKGSVPPPLDQYVKFDAVSGDYYPIIYFNDYWNLQKDYYPINESLASLPLRVSFCPLSLWRWQLYAAQSTKSPWNFLGDELYEQSDEEQDSVKVALLETNPYLLALTIIVSIVHSVFEFLAFKNDIQFWNSRQSLEGLSVRSVFFGVFQSFVVLLYILDNETNFVVQVSVFIGVLIDLWKITKVMDVRLDREHRVAGIFPRLSFKDKSTYIESSTKVYDDMAFRYLSWILFPLLGCYAVYSLLYLEHKGWYSWVLSMLYGFLLTFGFITMTPQLFINYKLKSVAHLPWRMLTYKALNTFIDDLFADCHLRAEMTVGKILWTQQF

SEQ ID NO: 885644 - protein, 129 aa, Homo sapiens
MISSSGTAGSPWRACPCAPSSSAFSSHSWSSSTSWTTRPTSWSRSASSLGSSSTSGRSPRSWTSGWTESTGWQESSPAYPSRTSPRISSPRPKCMMIWHSGTCPGSSSRSGCPRPFIILSLVPLPHSPS

SEQ ID NO: 885645 - protein, 524 aa, Homo sapiens
EREVGDGAGLAAGAGTRSGKMAAAQEADGARSAVVAAGGGSSGQVTSNGSIGRDPPAETQPQNPPAQPAPNAWQVIKGVLFRIFIIWAISSWFRRGPAPQDQAGPGGAPRVASRNLFPKDTLMNLHVYISEHEHFTDFNATSALFWEQHDLVYGDWTSGENSDGCYEHFAELDIPQSVQQNGSIYIHVYFTKSGFHPDPRQKALYRRLATVHMSRMINKYKRRRFQKTKNLLTGETEADPEMIKRAEDYGPVEVISHWHPNITINIVDDHTPWVKGSVPPPLDQYVKFDAVSGDYYPIIYFNDYWNLQKDYYPINESLASLPLRVSFCPLSLWRWQLYAAQSTKSPWNFLGDELYEQSDEEQDSVKVALLETNPYLLALTIIVSIVHSVFEFLAFKNDIQFWNSRQSLEGLSVRSVFFGVFQSFVVLLYILDNETNFVVQVSVFIGVLIDLWKITKVMDVRWTRGKVEDLPAYLRQSGIESDKGENGSDRRPLRTGEPKARTGRGLGQGRPEWYKTLTTLPGPK

SEQ ID NO: 885646 - protein, 297 aa, Homo sapiens
EREVGDGAGLAAGAGTRSGKMAAAQEADGARSAVVAAGGGSSGQVTSNGSIGRDPPAETQPQNPPAQPAPNAWQVIKGVLFRIFIIWAISSWFRRGPAPQDQAGPGGAPRVASRNLFPKDTLMNLHVYISEHEHFTDFNATSALFWEQHDLVYGDWTSGENSDGCYEHFAELDIPQSVQQNGSIYIHVYFTKSGFHPDPRQKALYRRLATVHMSRMINKYKRRRFQKTKNLLTGETEADPEMIKRAEDYGPVEVISHWHPNITINIVDDHTPWVKGSVPPPLDQCKLPSPASCLQSL

SEQ ID NO: 885647 - protein, 706 aa, Homo sapiens
EREVGDGAGLAAGAGTRSGKMAAAQEADGARSAVVAAGGGSSGQVTSNGSIGRDPPAETQPQNPPAQPAPNAWQVIKGVLFRIFIIWAISSWFRRGPAPQDQAGPGGAPRVASRNLFPKDTLMNLHVYISEHEHFTDFNATSALFWEQHDLVYGDWTSGENSDGCYEHFAELDIPQSVQQNGSIYIHVYFTKSGFHPDPRQKALYRRLATVHMSRMINKYKRRRFQKTKNLLTGETEADPEMIKRAEDYGPVEVISHWHPNITINIVDDHTPWVKGSVPPPLDQYVKFDAVSGDYYPIIYFNDYWNLQKDYYPINESLASLPLRVSFCPLSLWRWQLYAAQSTKSPWNFLGDELYEQSDEEQDSVKVALLETNPYLLALTIIVSIVHSVFEFLAFKNDIQFWNSRQSLEGLSVRSVFFGVFQSFVVLLYILDNETNFVVQVSVFIGVLIDLWKITKVMDVRLDREHRVAGIFPRLSFKDKSTYIESSTKVYDDMAFRYLSWILFPLLGCYAVYSLLYLEHKGWYSWVLSMLYGFLLTFGFITMTPQLFINYKLKSVAHLPWRMLTYKALNTFIDDLFAFVIKMPVMYRIGCLRDDVVFFIYLYQRWIYRVDPTRVNEFGMSGEDPTAAAPVAEVPTAAGALTPTPAPTTTTATREEASTSLPTKPTQGASSASEPQGLFVEALSVPLSLCVSSHLALPAQHHWESW

SEQ ID NO: 885648 - protein, 686 aa, Homo sapiens
PRPSTPFYELSLSTPGLMAAAQEADGARSAVVAAGGGSSGQVTSNGSIGRDPPAETQPQNPPAQPAPNAWQVIKGVLFRIFIIWAISSWFRRGPAPQDQAGPGGAPRVASRNLFPKDTLMNLHVYISEHEHFTDFNATSALFWEQHDLVYGDWTSGENSDGCYEHFAELDIPQSVQQNGSIYIHVYFTKSGFHPDPRQKALYRRLATVHMSRMINKYKRRRFQKTKNLLTGETEADPEMIKRAEDYGPVEVISHWHPNITINIVDDHTPWVKGSVPPPLDQYVKFDAVSGDYYPIIYFNDYWNLQKDYYPINESLASLPLRVSFCPLSLWRWQLYAAQSTKSPWNFLGDELYEQSDEEQDSVKVALLETNPYLLALTIIVSIVHSVFEFLAFKNDIQFWNSRQSLEGLSVRSVFFGVFQSFVVLLYILDNETNFVVQVSVFIGVLIDLWKITKVMDVRLDREHRVAGIFPRLSFKDKSTYIESSTKVYDDMAFRYLSWILFPLLGCYAVYSLLYLEHKGWYSWVLSMLYGFLLTFGFITMTPQLFINYKLKSVAHLPWRMLTYKALNTFIDDLFAFVIKMPVMYRIGCLRDDVVFFIYLYQRWIYRVDPTRVNEFGMSGEDPTAAAPVAEVPTAAGALTPTPAPTTTTATREEASTSLPTKPTQGASSASEPQEAPPKPAEDKKKD

SEQ ID NO: 885649 - protein, 759 aa, Homo sapiens
EREVGDGAGLAAGAGTRSGKMAAAQEADGARSAVVAAGGGSSGQVTSNGSIGRDPPAETQPQNPPAQPAPNAWQVIKGVLFRIFIIWAISSWFRRGPAPQDQAGPGGAPRVASRNLFPKDTLMNLHVYISEHEHFTDFNATSALFWEQHDLVYGDWTSGENSDGCYEHFAELDIPQSVQQNGSIYIHVYFTKSGFHPDPRQKALYRRLATVHMSRMINKYKRRRFQKTKNLLTGETEADPEMIKRAEDYGPVEVISHWHPNITINIVDDHTPWVKGSVPPPLDQYVKFDAVSGDYYPIIYFNDYWNLQKDYYPINESLASLPLRVSFCPLSLWRWQLYAAQSTKSPWNFLGDELYEQSDEEQDSVKVALLETNPYLLALTIIVSIVHSVFEFLAFKNDIQFWNSRQSLEGLSVRSVFFGVFQSFVVLLYILDNETNFVVQVSVFIGVLIDLWKITKVMDVRLDREHRVAGIFPRLSFKDKSTYIESSTKVYDDMAFRYLSWILFPLLGCYAVYSLLYLEHKGWYSWVLSMLYGFLLTFGFITMTPQLFINYKLKSVAHLPWRMLTYKALNTFIDDLFAFVIKMPVMYRIGCLRDGPPGCGRASPTSHCLPPLSRCGFLHLPLPTVDLPRRPHPSQRVWHEWRRPHSCRPRGRGSHSSRGPHAHTCTHHDHRHQGGGLHVPAHQAHPGGQLCQRAPGSPSKASRGQEKGLVETGPHLLRLLATTTPASRPPRLPSLSPFPWTDQAGAVGGPPQVRAQRVT

SEQ ID NO: 885650 - protein, 497 aa, Homo sapiens
EREVGDGAGLAAGAGTRSGKMAAAQEADGARSAVVAAGGGSSGQVTSNGSIGRDPPAETQPQNPPAQPAPNAWQVIKGVLFRIFIIWAISSWFRRGPAPQDQAGPGGAPRVASRNLFPKDTLMNLHVYISEHEHFTDFNATSALFWEQHDLVYGDWTSGENSDGCYEHFAELDIPQSVQQNGSIYIHVYFTKSGFHPDPRQKALYRRLATVHMSRMINKYKRRRFQKTKNLLTGETEADPEMIKRAEDYGPVEVISHWHPNITINIVDDHTPWVKGSVPPPLDQYVKFDAVSGDYYPIIYFNDYWNLQKDYYPINESLASLPLRVSFCPLSLWRWQLYAAQSTKSPWNFLGDELYEQSDEEQDSVKVALLETNPYLLALTIIVSIVHSVFEFLAFKNDIQFWNSRQSLEGLSVRSVFFGVFQSFVVLLYILDNETNFVVQVSVFIGVLIDLWKITKVMDVRLDREHRVAGIFPRLSFKDKSTYIESSTKVYDDASSP

SEQ ID NO: 885651 - protein, 449 aa, Homo sapiens
MLPQRAEDYGPVEVISHWHPNITINIVDDHTPWVKGSVPPPLDQYVKFDAVSGDYYPIIYFNDYWNLQKDYYPINESLASLPLRVSFCPLSLWRWQLYAAQSTKSPWNFLGDELYEQSDEEQDSVKVALLETNPYLLALTIIVSIVHSVFEFLAFKNDIQFWNSRQSLEGLSVRSVFFGVFQSFVVLLYILDNETNFVVQVSVFIGVLIDLWKITKVMDVRLDREHRVAGIFPRLSFKDKSTYIESSTKVYDDMAFRYLSWILFPLLGCYAVYSLLYLEHKGWYSWVLSMLYGFLLTFGFITMTPQLFINYKLKSVAHLPWRMLTYKALNTFIDDLFAFVIKMPVMYRIGCLRDDVVFFIYLYQRWIYRVDPTRVNEFGMSGEDPTAAAPVAEVPTAAGALTPTPAPTTTTATREEASTSLPTKPTQGASSASEPQEAPPKPAEDKKKD

SEQ ID NO: 885652 - protein, 592 aa, Homo sapiens
EREVGDGAGLAAGAGTRSGKMAAAQEADGARSAVVAAGGGSSGQVTSNGSIGRDPPAETQPQNPPAQPAPNAWQVIKGVLFRIFIIWAISSWFRRGPAPQDQAGPGGAPRVASRNLFPKDTLMNLHVYISEHEHFTDFNATSALFWEQHDLVYGDWTSGENSDGCYEHFAELDIPQSVQQNGSIYIHVYFTKSGFHPDPRQKALYRRLATVHMSRMINKYKRRRFQKTKNLLTGETEADPEMIKRAEDYGPVEVISHWHPNITINIVDDHTPWVKGSVPPPLDQYVKFDAVSGDYYPIIYFNDYWNLQKDYYPINESLASLPLRVSFCPLSLWRWQLYAAQSTKSPWNFLGDELYEQSDEEQDSVKVALLETNPYLLALTIIVSIVHSVFEFLAFKNDIQFWNSRQSLEGLSVRSVFFGVFQSFVVLLYILDNETNFVVQVSVFIGVLIDLWKITKVMDVRLDREHRVAGIFPRLSFKDKSTYIESSTKVYDDMAFRYLSWILFPLLGCYAVYSLLYLEHKGWYSWVLSMLYGFLLTFGTGHARRNVYKKEKARVITEEEKNFKAFASLRMARANARLFGIRAKRAKEAAPR

SEQ ID NO: 885653 - protein, 246 aa, Homo sapiens
SVPTTPIDQEITKVMDVRLDREHRVAGIFPRLSFKDKSTYIESSTKVYDDMAFRYLSWILFPLLGCYAVYSLLYLEHKGWYSWVLSMLYGFLLTFGFITMTPQLFINYKLKSVAHLPWRMLTYKALNTFIDDLFAFVIKMPVMYRIGCLRDDVVFFIYLYQRWIYRVDPTRVNEFGMSGEDPTAAAPVAEVPTAAGALTPTPAPTTTTATREEASTSLPTKPTQGASSASEPQEAPPKPAEDKKKD

SEQ ID NO: 885654 - protein, 270 aa, Homo sapiens
EREVGDGAGLAAGAGTRSGKMAAAQEADGARSAVVAAGGGSSGQVTSNGSIGRDPPAETQPQNPPAQPAPNAWQVIKGVLFRIFIIWAISSWFRRGPAPQDQAGPGGAPRVASRNLFPKDTLMNLHVYISEHEHFTDFNATSALFWEQHDLVYGDWTSGENSDGCYEHFAELDIPQSVQQNGSIYIHVYFTKSGFHPDPRQKALYRRLATVHMSRMINKYKRRRFQKTKNLLTGETEADPEMIKRAEDYGPVEVISHWHPNTITSVDFKS

SEQ ID NO: 885655 - protein, 242 aa, Homo sapiens
MSNYVNDMWPGSPQEKDSPSTSRSGGSSRLSSRSRSRSFSRSSRSHSRVSSRFSSRSRRSKSRSRSRRRHQRKYRRYSRSYSRSRSRSRSRRYRERRYGFTRRYYRSPSRYRSRSRSRSRSRGRSYCGRAYAIARGQRYYGFGRTVYPEEHSRWRDRSRTRSRSRTPFRLSEKDRMELLEIAKTNAAKALGTTNIDLPASLRTVPSAKETSRGIGVSSNGAKPEVSILGLSEQNFQKANCQI

SEQ ID NO: 885656 - protein, 255 aa, Homo sapiens
MSNYVNDMWPGSPQEKDSPSTSRSGGSSRLSSRSRSRSFSRSSRSHSRVSSRFSSRSRRSKSRSRSRRRHQRKYRRYSRSYSRSRSRSRSRRYRERRYGFTRRYYRSPSRYRSRSRSRSRSRGRSYCGRAYAIARGQRYYGFGRTVYPEEHSRWRDRSRTRSRSRTPFRLSEKGGWVIYLSICGNVWWQYMSRLGNQRCCVVSILVPLVPEIFLEERGRTLPVFKWTAFSLGLKVNWMLNGSGCRELFFLLADCS

SEQ ID NO: 885657 - protein, 255 aa, Homo sapiens; identical to SEQ ID NO: 885656

SEQ ID NO: 885658 - protein, 242 aa, Homo sapiens; identical to SEQ ID NO: 885655

SEQ ID NO: 885659 - protein, 255 aa, Homo sapiens; identical to SEQ ID NO: 885656

SEQ ID NO: 885660 - protein, 242 aa, Homo sapiens; identical to SEQ ID NO: 885655

SEQ ID NO: 885661 - protein, 242 aa, Homo sapiens; identical to SEQ ID NO: 885655

SEQ ID NO: 885662 - protein, 290 aa, Homo sapiens
MSNYVNDMWPGSPQEKDSPSTSRSGGSSRLSSRSRSRSFSRSSRSHSRVSSRFSSRSRRSKSRSRSRRRHQRKYRRYSRSYSRSRSRSRSRRYRERRYGFTRRYYRSPSRYRSRSRSRSRSRGRSYCGRAYAIARGQRYYGFGRTVYPEEHSRWRDRSRTRSRSRTPFRLSEKDRMELLEIAKTNAAKALGTTNIDLPASLRTVPSAKETSRGIGVSSNGAKPELSEKVTEDGTRNPNEKPTQQRSIAFSSNNSVAKPIQKSAKAATEEASSRSPKIDQKKSPYGLWIPI

SEQ ID NO: 885663 - protein, 226 aa, Homo sapiens
MSNYVNDMWPGSPQEKDSPSTSRSGGSSRLSSRSRSRSFSRSSRSHSRVSSRFSSRSRRSKSRSRSRRRHQRKYRRYSRSYSRSRSRSRSRRYRERRYGFTRRYYRSPSRYRSRSRSRSRSRGRSYCGRAYAIARGQRYYGFGRTVYPEEHSRWRDRSRTRSRSRTPFRLSEKDRMELLEIAKTNAAKALGTTNIDLPASLRTVPSAKETSRGIGVSSNGAKPEKS

SEQ ID NO: 885664 - protein, 226 aa, Homo sapiens; identical to SEQ ID NO: 885663

SEQ ID NO: 885665 - protein, 242 aa, Homo sapiens; identical to SEQ ID NO: 885655

SEQ ID NO: 885666 - protein, 226 aa, Homo sapiens; identical to SEQ ID NO: 885663

SEQ ID NO: 885667 - protein, 242 aa, Homo sapiens; identical to SEQ ID NO: 885655

SEQ ID NO: 885668 - protein, 112 aa, Homo sapiens
MDRGPGYSYPVDWWSLGITAYELLRGWVRQAPVRYTRGAVQWGLTLYLDGQSRQGPRCRKEHWGSHCPPGFSPDACVPPMNALNFWSNPLIVQMGKRHSVGEGLTQRPTADQ

SEQ ID NO: 885669 - protein, 90 aa, Homo sapiens
SLSFCAPRYSFQDEEDMFMVVDLLLGGDLRYHLQQNVHFTEGTVKLYICELALALEYLQRYHIIHSIFMNLKQMLQTLSLNSSFLFPWTT

SEQ ID NO: 885670 - protein, 414 aa, Homo sapiens
MGGNHSHKPPVFDENEEVNFDHFQILRAIGKGSFGKVCIVQKRDTKKMYAMKYMNKQKCIERDEVRNVFRELQIMQGLEHPFLVNLWYSFQDEEDMFMVVDLLLGGDLRYHLQQNVHFTEGTVKLYICELALALEYLQRYHIIHRDIKPDNILLDEHGHVHITDFNIATVVKGAERASSMAGTKPYMAPEVFQVYMDRGPGYSYPVDWWSLGITAYELLRGWRPYEIHSVTPIDEILNMFKVERVHYSSTWCKGMVALLRKLLTKDPESRVSSLHDIQSVPYLADMNWDAVFKKALMPGFVPNKGRLNCDPTFELEEMILESKPLHKKKKRLAKNRSRDGTKDSCPLNGHLQHCLETVREEFIIFNREKLRRQQGQGSQLLDTDSRGGGQAQSKLQDGCNNNLLTHTCTRGCSS

SEQ ID NO: 885671 - protein, 176 aa, Homo sapiens
MFKVERVHYSSTWCKGMVALLRKLLTKDPESRVSSLHDIQSVPYLADMNWDAVFKKALMPGFVPNKGRLNCDPTFELEEMILESKPLHKKKKRLAKNRSRDGTKDSCPLNGHLQHCLETVREEFIIFNREKLRRQQGQGSQLLDTDSRGGGQAQSKLQDGCNNNLLTHTCTRGCSS

SEQ ID NO: 885672 - protein, 219 aa, Homo sapiens
MDRGPGYSYPVDWWSLGITAYELLRGWRPYEIHSVTPIDEILNMFKVERVHYSSTWCKGMVALLRKLLTKDPESRVSSLHDIQSVPYLADMNWDAVFKKALMPGFVPNKGRLNCDPTFELEEMILESKPLHKKKKRLAKNRSRDGTKDSCPLNGHLQHCLETVREEFIIFNREKLRRQQGQGSQLLDTDSRGGGQAQSKLQDGCNNNLLTHTCTRGCSS

SEQ ID NO: 885673 - protein, 918 aa, Homo sapiens
MGKRAYSDSDLVTQIRFFATTTCVTVKLRSIFCVDRFLFLPVNLPYYHYLYPVRYLLVRPRKYLFMWITKETLKFLFLAYLNAIKYKNSYCLHRTDLSYCCNVFSWLICYIGNYYIVPLKYFINFFKKLKIFNDVKVGSAEYLKFLIYNFFSLSQDNLEFCSIFHLQILGLEMDSDGSNQSTLAYILKMVSIHKVKNKLINDPCLVNTSDQDVPWQGILTWFSFGPVCAQGSGILQDWVQRDENSQIGLYQNSHRFWSAFSQNRLQDFFFCVILESRLDLDYFRGYDKRLILSGIYTKEVFLLQSFLRRFLLFLKCDIYQSEVMLPYIPQTLNFSIIYFCPFLVRIVPVYLYNILVYFLFIRYFLLVYIVFLIEAVGKEFSSNLKSPYLFADVCQSNILLTVIKHFSNAVCIYYEMNDRVTHGLSPRLECSGIIIAHFSLKLLGLSVIPAFLATFFNFYYFYRDSILLCCPGWSQTPGSKVILPLLPPKVLRLQAEQCFKLTLVYLHRLLLCTCGNNLTYKCILSKKFPRSEIAFEHGSSFFFFFFFFLSKKRVLKGQFYLQINIIFFIEVKSHNINHFKVNSLGGTLYIHNVVQTTSSNSRMCSLPQKETLYPLSSYSVFPSSLIPSKRHLLSVSNLSQHRGRVLCTIEIAEKTWDVIVRNKKPPNSLHASLSTVDMLPGTLYGRKVETHRSLQFCLGSPQRVLLKLLGLICIFFIGLLELKFNVLYKCEQLILGLLSRTCLPFEVFLMYEKKLGIFTKDLFEVTLGNDFQNLKLFDPCESNFMTILFSSSLRIFRVLICVDSAFNPLLNEVLETLILALYLITSKNMNSVTRQLFSKLFWIVLIGWLRETKLVFFFLSRIKGNKLGLSELLLRLTFPFGALEIYCYLKFKMVLYLIELKLKIYEKQKSLYVLSKYF

SEQ ID NO: 885674 - protein, 98 aa, Homo sapiens
KGTRTTSDWAAEDEEEEEEAEQQDGPCCRSSLSSSRWEAGGGAGGGGGSRGPAAWDRIRVNGGLGGGGGCRGGGDGRGDSELRGAAARTSAVIFHTMC

SEQ ID NO: 885675 - protein, 81 aa, Homo sapiens
KLDDDGTKDRTPCFWPLSALGREHTFRGAAARSLRTKLEMSVMKAFTGKFCKWQRGSIPCVSLELAQAHGHGEAAFPLELI

SEQ ID NO: 885676 - protein, 544 aa, Homo sapiens
MSRCAQAAEVAATVPGAGVGNVGLRPPMVPRQASFFPPPVPNPFVQQTQIGSARRVQIVLLGIILLPIRVLLVALILLLAWPFAAISTVCCPEKLTHPITGWRRKITQTALKFLGRAMFFSMGFIVAVKGKIASPLEAPVFVAAPHSTFFDGIACVVAGLPSMVSRNENAQVPLIGRLLRAVQPVLVSRVDPDSRKNTINEIIKRTTSGGEWPQILVFPEGTCTNRSCLITFKPGAFIPGVPVQPVLLRYPNKLDTVTWTWQGYTFIQLCMLTFCQLFTKVEVEFMPVQVPNDEEKNDPVLFANKVRNLMAEALGIPVTDHTYEDCRLMISAGQLTLPMEAGLVEFTKISRKLKLDWDGVRKHLDEYASIASSSKGGRIGIEEFAKYLKLPVSDVLRQLFALFDRNHDGSIDFREYVIGLAVLCNPSNTEEIIQVAFKLFDVDEDGYITEEEFSTILQASLGVPDLDVSGLFKEIAQGDSISYEEFKSFALKHPEYAKIFTTYLDLQTCHVFSLPKEVQTTPSTASNKVSPEKHEESTSDKKDD

SEQ ID NO: 885677 - protein, 104 aa, Homo sapiens
MSRCAQAAEVAATVPGAGVGNVGLRPPMVPRQASFFPPPVPNPFVQQTQIGSARRVQIVLLGIILLPIRVLLVALILLLAWPFAAISTVCCPEKLTHPITGWRR

SEQ ID NO: 885678 - protein, 544 aa, Homo sapiens; identical to SEQ ID NO: 885676

SEQ ID NO: 885679 - protein, 271 aa, Homo sapiens
AASLVTKVEVEFMPVQVPNDEEKNDPVLFANKVRNLMAEALGIPVTDHTYEDCRLMISAGQLTLPMEAGLVEFTKISRKLKLDWDGVRKHLDEYASIASSSKGGRIGIEEFAKYLKLPVSDVLRQLFALFDRNHDGSIDFREYVIGLAVLCNPSNTEEIIQVAFKLFDVDEDGYITEEEFSTILQASLGVPDLDVSGLFKEIAQGDSISYEEFKSFALKHPEYAKIFTTYLDLQTCHVFSLPKEVQTTPSTASNKVSPEKHEESTSDKKDD

SEQ ID NO: 885680 - protein, 330 aa, Homo sapiens
MSRCAQAAEVAATVPGAGVGNVGLRPPMVPRQASFFPPPVPNPFVQQTQIGSARRVQIVLLGIILLPIRVLLVALILLLAWPFAAISTVCCPEKLTHPITGWRRKITQTALKFLGRAMFFSMGFIVAVKGKIASPLEAPVFVAAPHSTFFDGIACVVAGLPSMVSRNENAQVPLIGRLLRAVQPVLVSRVDPDSRKNTINEIIKRTTSGGEWPQILVFPEGTCTNRSCLITFKPGAFIPGVPVQPVLLRYPNKLDTVTWTWQGYTFIQLCMLTFCQLFTKVEVEMFLFFWEGSSKHCLKISSFFCIFSLRRFKRRITQRTRTAHLLRLSF

SEQ ID NO: 885681 - protein, 407 aa, Homo sapiens
MSRCAQAAEVAATVPGAGVGNVGLRPPMVPRQASFFPPPVPNPFVQQTQIGSARRVQIVLLGIILLPIRVLLVALILLLAWPFAAISTVCCPEKLTHPITGWRRKITQTALKFLGRAMFFSMGFIVAVKGKIASPLEAPVFVAAPHSTFFDGIACVVAGLPSMVSRNENAQVPLIGRLLRAVQPVLVSRVDPDSRKNTINEIIKRTTSGGEWPQILVFPEGTCTNRSCLITFKPGAFIPGVPVQPVLLRYPNKLDTVTWTWQGYTFIQLCMLTFCQLFTKVEVEFMPVQVPNDEEKNDPVLFANKVRNLMAEALGIPVTDHTYEDCRLMISAGQLTLPMEAGLVEFTKISRKLKLDWDGVRKHLDEYASIASSSKGGRIGIEEFAKYLKLPVSDVLRQLFALFDRVC

SEQ ID NO: 885682 - protein, 190 aa, Homo sapiens
CCFSLGYPNKLDTVTWTWQGYTFIQLCMLTFCQLFTKVEVEFMPVQVPNDEEKNDPVLFANKVRNLMAEALGIPVTDHTYEDCRLMISAGQLTLPMEAGLVEFTKISRKLKLDWDGVRKHLDEYASIASSSKGGRIGIEEFAKYLKLPVSDVLRQLFALFDRALLEGADRGLGEALGGLFGGGGQRREGG

SEQ ID NO: 885683 - protein, 259 aa, Homo sapiens [sequence omitted]

SEQ ID NO: 885684 - protein, 544 aa, Homo sapiens; identical to SEQ ID NO: 885676

SEQ ID NO: 885685 - protein, 224 aa, Homo sapiens
LGSMVNTCQNPEIFKEMNNAFAHLPQGVIWKCQCSHWPKDVHLAANVKIVDWLPQSDLLAHPSIRLFVTHGGQNSIMEAIQHGVPMVGIPLFGDQPENMVRVEAKKFGVSIQLKKLKAETLALKMKQIMEDKRYKSAAVAASVILRSHPLSPTQRLVGWIDHVLQTGGATHLKPYVFQQPWHEQYLLDVFVFLLGLTLGTLWLCGKLLGMAVWWLRGARKVKET

SEQ ID NO: 885686 - protein, 224 aa, Homo sapiens; identical to SEQ ID NO: 885685

SEQ ID NO: 885687 - protein, 351 aa, Homo sapiens
MIVQRVVLNSRPGKNGNPVAENFRMEEVYLPDNINEGQVQVRTLYLSVDPYMRCRMNEDTGTDYITPWQLSQVVDGGGIGIIEESKHTNLTKGDFVTSFYWPWQTKVILDGNSLEKVDPQLVDGHLSYFLGAIGMPGLTSLIGIQEKGHITAGSNKTMVVSGAAGACGSVAGQIGHFLGCSRVVGICGTHEKCILLTSELGFDAAINYKKDNVAEQLRESCPAGVDVYFDNVGGNISDTVISQMNENSHIILCGQISQYNKDVPYPPPLSPAIEAIQKERNITRERFLVLNYKDKFEPGILQLSQWFKEGKLKIKETVINGLENMGAAFQSMMTGGNIGKQIVCISEEISL

SEQ ID NO: 885688 - protein, 351 aa, Homo sapiens; identical to SEQ ID NO: 885687

SEQ ID NO: 885689 - protein, 351 aa, Homo sapiens; identical to SEQ ID NO: 885687

SEQ ID NO: 885690 - protein, 109 aa, Homo sapiens
MAPRLQLEKAAWRWAETVRPEEVSQEHIETAYRIWLEPCIRGVCRRNCKGNPNCLVGIGEHIWLGEIDENSFHNIDDPNCERRKKVNHHFLSDCYMLFFVFVFAFVLGL

SEQ ID NO: 885691 - protein, 485 aa, Homo sapiens
MAPRLQLEKAAWRWAETVRPEEVSQEHIETAYRIWLEPCIRGVCRRNCKGNPNCLVGIGEHIWLGEIDENSFHNIDDPNCERRKKNSFVGLTNLGATCYVNTFLQVWFLNLELRQALYLCPSTCSDYMLGDGIQEEKDYEPQTICEHLQYLFALLQNSNRRYIDPSGFVKALGLDTGQQQDAQEFSKLFMSLLEDTLSKQKNPDVRNIVQQQFCGEYAYVTVCNQCGRESKLLSKFYELELNIQGHKQLTDCISEFLKEEKLEGDNRYFCENCQSKQNATRKIRLLSLPCTLNLQLMRFVFDRQTGHKKKLNTYIGFSEILDMEPYVEHKGGSYVYELSAVLIHRGVSAYSGHYIAHVKDPQSGEWYKFNDEDIEKMEGKKLQLGIEEDLAEPSKSQTRKPKCGKGTHCSRNAYMLVYRLQTQEKPNTTVQVPAFLQELVDRDNSKFEEWCIEMAEMRKQSVDKGKAKHEEVKELYQRLPAGAGL

SEQ ID NO: 885692 - protein, 289 aa, Homo sapiens
MLVYRLQTQEKPNTTVQVPAFLQELVDRDNSKFEEWCIEMAEMRKQSVDKGKAKHEEVKELYQRLPAGAEPYEFVSLEWLQKWLDESTPTKPIDNHACLCSHDKLHPDKISIMKRISEYAADIFYSRYGGGPRLTVKALCKECVVERCRILRLKNQLNEDYKTVNNLLKAAVKGSDGFWVGKSSLRSWRQLALEQLDEQDGDAEQSNGKMNGSTLNKDESKEERKEEEELNFNEDILCPHGELCISENERRLVSKEAWSKLQQYFPKAPEFPSYKECCSQCKILEREGE

SEQ ID NO: 885693 - protein, 686 aa, Homo sapiens
MAPRLQLEKAAWRWAETVRPEEVSQEHIETAYRIWLEPCIRGVCRRNCKGNPNCLVGIGEHIWLGEIDENSFHNIDDPNCERRKKNSFVGLTNLGATCYVNTFLQVWFLNLELRQALYLCPSTCSDYMLGDGIQEEKDYEPQTICEHLQYLFALLQNSNRRYIDPSGFVKALGLDTGQQQDAQEFSKLFMSLLEDTLSKQKNPDVRNIVQQQFCGEYAYVTVCNQCGRESKLLSKFYELELNIQGHKQLTDCISEFLKEEKLEGDNRYFCENCQSKQNATRKIRLLSLPCTLNLQLMRFVFDRQTGHKKKLNTYIGFSEILDMEPYVEHKGGSYVYELSAVLIHRGVSAYSGHYIAHVKDPQSGEWYKFNDEDIEKMEGKKLQLGIEEDLAEPSKSQTRKPKCGKGTHCSRNAYMLVYRLQTQEKPNTTVQVPAFLQELVDRDNSKFEEWCIEMAEMRKQSVDKGKAKHEEVKELYQRLPAGAEPYEFVSLEWLQKWLDESTPTKQISIMKRISEYAADIFYSRYGGGPRLTVKALCKECVVERCRILRLKNQLNEDYKTVNNLLKAAVKGSDGFWVGKSSLRSWRQLALEQLDEQDGDAEQSNGKMNGSTLNKDESKEERKEEEELNFNEDILCPHGELCISENERRLVSKEAWSKLQQYFPKAPEFPSYKECCSQCKILEREGE

SEQ ID NO: 885694 - protein, 392 aa, Homo sapiens
MAPRLQLEKAAWRWAETVRPEEVSQEHIETAYRIWLEPCIRGVCRRNCKGNPNCLVGIGEHIWLGEIDENSFHNIDDPNCERRKKNSFVGLTNLGATCYVNTFLQVWFLNLELRQALYLCPSTCSDYMLGDGIQEEKDYEPQTICEHLQYLFALLQNSNRRYIDPSGFVKALGLDTGQQQDAQEFSKLFMSLLEDTLSKQKNPDVRNIVQQQFCGEYAYVTVCNQCGRESKLLSKFYELELNIQGHKQLTDCISEFLKEEKLEGDNRYFCENCQSKQNATRKIRLLSLPCTLNLQLMRFVFDRQTGHKKKLNTYIGFSEILDMEPYVEHKGGSYVYELSAVLIHRGVSAYSGHYIAHVKDPQSGEWYKLILNTNYHLPPSPKPIKIKNYNKP

SEQ ID NO: 885695 - protein, 703 aa, Homo sapiens
MAPRLQLEKAAWRWAETVRPEEVSQEHIETAYRIWLEPCIRGVCRRNCKGNPNCLVGIGEHIWLGEIDENSFHNIDDPNCERRKKNSFVGLTNLGATCYVNTFLQVWFLNLELRQALYLCPSTCSDYMLGDGIQEEKDYEPQTICEHLQYLFALLQNSNRRYIDPSGFVKALGLDTGQQQDAQEFSKLFMSLLEDTLSKQKNPDVRNIVQQQFCGEYAYVTVCNQCGRESKLLSKFYELELNIQGHKQLTDCISEFLKEEKLEGDNRYFCENCQSKQNATRKIRLLSLPCTLNLQLMRFVFDRQTGHKKKLNTYIGFSEILDMEPYVEHKGGSYVYELSAVLIHRGVSAYSGHYIAHVKDPQSGEWYKFNDEDIEKMEGKKLQLGIEEDLAEPSKSQTRKPKCGKGTHCSRNAYMLVYRLQTQEKPNTTVQVPAFLQELVDRDNSKFEEWCIEMAEMRKQSVDKGKAKHEEVKELYQRLPAGAEPYEFVSLEWLQKWLDESTPTKPIDNHACLCSHDKLHPDKISIMKRISEYAADIFYSRYGGGPRLTVKALCKECVVERCRILRLKNQLNEDYKTVNNLLKAAVKGSDGFWVGKSSLRSWRQLALEQLDEQDGDAEQSNGKMNGSTLNKDESKEERKEEEELNFNEDILCPHGELCISENERRLVSKEAWSKLQQYFPKAPEFPSYKECCSQCKILEREGE

SEQ ID NO: 885696 - protein, 485 aa, Homo sapiens; identical to SEQ ID NO: 885691

SEQ ID NO: 885697 - protein, 185 aa, Homo sapiens
PRVRKLHPDKMSAAYSDILFIIDMEEVQDYTVKALCKECVVERCRILRLKNQLNEDYKTVNNLLKAAVKGSDGFWVGKSSLRSWRQLALEQLDEQDGDAEQSNGKMNGSTLNKDESKEERKEEEELNFNEDILCPHGELCISENERRLVSKEAWSKLQQYFPKAPEFPSYKECCSQCKILEREGE

SEQ ID NO: 885698 - protein, 518 aa, Homo sapiens
MLRVVSWNINGIRRPLQGVANQEPSNCAAVAVGRILDELDADIVCLQETKVTRDALTEPLAIVEGYNSYFSFSRNRSGYSGVATFCKDNATPVAAEEGLSGLFATQNGDVGCYGNMDEFTQEELRALDSEGRALLTQHKIRTWEGKEKTLTLINVYCPHADPGRPERLVFKMRFYRLLQIRAEALLAAGSHVIILGDLNTAHRPIDHWDAVNLECFEEDPGRKWMDSLLSNLGCQSASHVGPFIDSYRCFQPKQEGAFTCWSAVTGARHLNYGSRLDYVLGDRTLVIDTFQASFLLPEVMGSDHCPVGAVLSVSSVPAKQCPPLCTRFLPEFAGTQLKILRFLVPLEQSPVLEQSTLQHNNQTRVQTCQNKAQVRSTRPQPSQVGSSRGQKNLKSYFQPSPSCPQASPDIELPSLPLMSALMTPKTPEEKAVAKVVKGQAKTSEAKDEKELRTSFWKSVLAGPLRTPLCGGHREPCVMRTVKKPGPNLGRRFYMCARPRGPPTDPSSRCNFFLWSRPS

SEQ ID NO: 885699 - protein, 347 aa, Homo sapiens
MRFYRLLQIRAEALLAAGSHVIILGDLNTAHRPIDHWDAVNLECFEEDPGRKWMDSLLSNLGCQSASHVGPFIDSYRCFQPKQEGAFTCWSAVTGARHLNYGSRLDYVLGDRTLVIDTFQASFLLPEVMGSDHCPVGAVLSVSSVPAKQCPPLCTRFLPEFAGTQLKILRFLVPLEQSPVLEQSTLQHNNQTRVQTCQNKAQVRSTRPQPSQVGSSRGQKNLKSYFQPSPSCPQASPDIELPSLPLMSALMTPKTPEEKAVAKVVKGQAKTSEAKDEKELRTSFWKSVLAGPLRTPLCGGHREPCVMRTVKKPGPNLGRRFYMCARPRGPPTDPSSRCNFFLWSRPS

SEQ ID NO: 885700 - protein, 337 aa, Homo sapiens
GRVGQPTRPHVIILGDLNTAHRPIDHWDAVNLECFEEDPGRKWMDSLLSNLGCQSASHVGPFIDSYRCFQPKQEGAFTCWSAVTGARHLNYGSRLDYVLGDRTLVIDTFQASFLLPEVMGSDHCPVGAVLSVSSVPAKQCPPLCTRFLPEFAGTQLKILRFLVPLEQSPVLEQSTLQHNNQTRVQTCQNKAQVRSTRPQPSQVGSSRGQKNLKSYFQPSPSCPQASPDIELPSLPLMSALMTPKTPEEKAVAKVVKGQAKTSEAKDEKELRTSFWKSVLAGPLRTPLCGGHREPCVMRTVKKPGPNLGRRFYMCARPRGPPTDPSSRCNFFLWSRPS

SEQ ID NO: 885701 - protein, 294 aa, Homo sapiens
MDSLLSNLGCQSASHVGPFIDSYRCFQPKQEGAFTCWSAVTGARHLNYGSRLDYVLGDRTLVIDTFQASFLLPEVMGSDHCPVGAVLSVSSVPAKQCPPLCTRFLPEFAGTQLKILRFLVPLEQSPVLEQSTLQHNNQTRVQTCQNKAQVRSTRPQPSQVGSSRGQKNLKSYFQPSPSCPQASPDIELPSLPLMSALMTPKTPEEKAVAKVVKGQAKTSEAKDEKELRTSFWKSVLAGPLRTPLCGGHREPCVMRTVKKPGPNLGRRFYMCARPRGPPTDPSSRCNFFLWSRPS

SEQ ID NO: 885702 - protein, 111 aa, Homo sapiens
NSGLRHKKLTNKELGRKESEEERAEKRKRRVGDFEGEAKDEKELRTSFWKSVLAGPLRTPLCGGHREPCVMRTVKKPGPNLGRRFYMCARPRGPPTDPSSRCNFFLWSRPS

SEQ ID NO: 885703 - protein, 518 aa, Homo sapiens; identical to SEQ ID NO: 885698

SEQ ID NO: 885704 - protein, 421 aa, Homo sapiens
HAARRPRWNRTRVGCYGNMDEFTQEELRALDSEGRALLTQHKIRTWEGKEKTLTLINVYCPHADPGRPERLVFKMRFYRLLQIRAEALLAAGSHVIILGDLNTAHRPIDHWDAVNLECFEEDPGRKWMDSLLSNLGCQSASHVGPFIDSYRCFQPKQEGAFTCWSAVTGARHLNYGSRLDYVLGDRTLVIDTFQASFLLPEVMGSDHCPVGAVLSVSSVPAKQCPPLCTRFLPEFAGTQLKILRFLVPLEQSPVLEQSTLQHNNQTRVQTCQNKAQVRSTRPQPSQVGSSRGQKNLKSYFQPSPSCPQASPDIELPSLPLMSALMTPKTPEEKAVAKVVKGQAKTSEAKDEKELRTSFWKSVLAGPLRTPLCGGHREPCVMRTVKKPGPNLGRRFYMCARPRGPPTDPSSRCNFFLWSRPS

SEQ ID NO: 885705 - protein, 479 aa, Homo sapiens
MLRVVSWNINGIRRPLQGVANQEPSNCAAVAVGRILDELDADIVCLQETKVTRDALTEPLAIVEGYNSYFSFSRNRSGYSGVATFCKDNATPVAAEEGLSGLFATQNGDVGCYGNMDEFTQEELRALDSEGRALLTQHKIRNNPTLCFSAIHVIILGDLNTAHRPIDHWDAVNLECFEEDPGRKWMDSLLSNLGCQSASHVGPFIDSYRCFQPKQEGAFTCWSAVTGARHLNYGSRLDYVLGDRTLVIDTFQASFLLPEVMGSDHCPVGAVLSVSSVPAKQCPPLCTRFLPEFAGTQLKILRFLVPLEQSPVLEQSTLQHNNQTRVQTCQNKAQVRSTRPQPSQVGSSRGQKNLKSYFQPSPSCPQASPDIELPSLPLMSALMTPKTPEEKAVAKVVKGQAKTSEAKDEKELRTSFWKSVLAGPLRTPLCGGHREPCVMRTVKKPGPNLGRRFYMCARPRGPPTDPSSRCNFFLWSRPS

SEQ ID NO: 885706 - protein, 211 aa, Homo sapiens
SISCLQQTLAPSRNPISSQIPTHFSGPKLSPLNFLLVPLEQSPVLEQSTLQHNNQTRVQTCQNKAQVRSTRPQPSQVGSSRGQKNLKSYFQPSPSCPQASPDIELPSLPLMSALMTPKTPEEKAVAKVVKGQAKTSEAKDEKELRTSFWKSVLAGPLRTPLCGGHREPCVMRTVKKPGPNLGRRFYMCARPRGPPTDPSSRCNFFLWSRPS

SEQ ID NO: 885707 - protein, 206 aa, Homo sapiens
AERRVLCLLFAVPAAAAFGMEEIYAKFVSQKISKTRWRPLPPGSLQTAETFATGSWDNEENYISLWSIGDFGNLDSDGGFEGDHQLLCDIRHHGDVMDLQFFDQERIVAASSTGCVTVFLHHPNNQTLSVNQQWTTAHYHTGPGSPSYSSAPCTGVVCNNPEIVTVGEDGRINLFRADHKEAVRTIGLVTECHSTVLIDIPTNSML

SEQ ID NO: 885708 - protein, 336 aa, Homo sapiens
AERRVLCLLFAVPAAAAFGMEEIYAKFVSQKISKTRWRPLPPGSLQTAETFATGSWDNEENYISLWSIGDFGNLDSDGGFEGDHQLLCDIRHHGDVMDLQFFDQERIVAASSTGCVTVFLHHPNNQTLSVNQQWTTAHYHTGPGSPSYSSAPCTGVVCNNPEIVTVGEDGRINLFRADHKEAVRTIDNADSSTLHAVTFLRTPEILTVNSIGQLKIWDFRQQGNEPSQILSLTGDRVPLHCVDRHPNQQHVVATGGQDGMLSIWDVRQGTMPVSLLKAHEAEMWEVHFHPSNPEHLFTCSEDGSLWHWDASTDVPEKSSLFHQASKSNVKCRGSKR

SEQ ID NO: 885709 - protein, 336 aa, Homo sapiens; identical to SEQ ID NO: 885708

SEQ ID NO: 885710 - protein, 336 aa, Homo sapiens; identical to SEQ ID NO: 885708

SEQ ID NO: 885711 - protein, 336 aa, Homo sapiens; identical to SEQ ID NO: 885708

SEQ ID NO: 885712 - protein, 336 aa, Homo sapiens; identical to SEQ ID NO: 885708

SEQ ID NO: 885713 - protein, 399 aa, Homo sapiens
AERRVLCLLFAVPAAAAFGMEEIYAKFVSQKISKTRWRPLPPGSLQTAETFATGSWDNEENYISLWSIGDFGNLDSDGGFEGDHQLLCDIRHHGDVMDLQFFDQERIVAASSTGCVTVFLHHPNNQTLSVNQQWTTAHYHTGPGSPSYSSAPCTGVVCNNPEIVTVGEDGRINLFRADHKEAVRTIDNADSSTLHAVTFLRTPEILTVNSIGQLKIWDFRQQGNEPSQILSLTGDRVPLHCVDRHPNQQHVVATGGQDGMLSIWDVRQGTMPVSLLKAHEAEMWEVHFHPSNPEHLFTCSEDGSLWHWDASTDVPEKSSLFHQGGRSSTFLSHSISNQANVHQSVISSWLSTDPAKDRIEITSLLPSRSLSVNTLDVLGPCLVCGTDAEAIYVTRHLFS

SEQ ID NO: 885714 - protein, 303 aa, Homo sapiens
MDLQFFDQERIVAASSTGCVTVFLHHPNNQTLSVNQQWTTAHYHTGPGSPSYSSAPCTGVVCNNPEIVTVGEDGRINLFRADHKEAVRTIDNADSSTLHAVTFLRTPEILTVNSIGQLKIWDFRQQGNEPSQILSLTGDRVPLHCVDRHPNQQHVVATGGQDGMLSIWDVRQGTMPVSLLKAHEAEMWEVHFHPSNPEHLFTCSEDGSLWHWDASTDVPEKSSLFHQGGRSSTFLSHSISNQANVHQSVISSWLSTDPAKDRIEITSLLPSRSLSVNTLDVLGPCLVCGTDAEAIYVTRHLFS

SEQ ID NO: 885715 - protein, 336 aa, Homo sapiens; identical to SEQ ID NO: 885708

SEQ ID NO: 885716 - protein, 327 aa, Homo sapiens
AERRVLCLLFAVPAAAAFGMEEIYAKFVSQKISKTRWRPLPPGSLQTAETFATGSWDNEENYISLWSIGDFGNLDSDGGFEGDHQLLCDIRHHGDVMDLQFFDQERIVAASSTGCVTVFLHHPNNQTLSVNQQWTTAHYHTGPGSPSYSSAPCTGVVCNNPEIVTVGEDGRINLFRADHKEAVRTIDNADSSTLHAVTFLRTPEILTVNSIGQLKIWDFRQQGNEPSQILSLTGDRVPLHCVDRHPNQQHVVATGGQDGMLSIWDVRQGTMPVSLLKAHEAEMWEVHFHPSNPEHLFTCSEDGSLWHWDASTDVPEKSSLFHQGKTF

SEQ ID NO: 885717 - protein, 947 aa, Homo sapiens
MWQKIEDVEWRPQTYLELEGLPCILIFSGMDPHGESLPRSLRYCDLRLINSSCLVRTALEQELGLAAYFVSNEVPLEKGARNEALESDAEKLSSTDNEDEELGTEGSTSEKRSPMKRERSRSHDSASSSLSSKASGSALGGESSAQPTALPQGEHARSPQPRGPAEEGRAPGEKQRPRASQGPPSAISRHSPGPTPQPDCSLRTGQRSVQVSVTSSCSQLSSSSGSSSSSVAPAAGTWVLQASQCSLTKACRQPPIVFLPKLVYDMVVSTDSSGLPKAASLLPSPSVMWASSFRPLLSKTMTSTEQSLYYRQWTVPRPSHMDYGNRAEGRVDGFHPRRLLLSGPPQIGKTGAYLQFLSVLSRMLVRLTEVDVYDEEEININLREESDWHYLQLSDPWPDLELFKKLPFDYIIHDPKYEDASLICSHYQGIKSEDRGMSRKPEDLYVRRQTARMRLSKYAAYNTYHHCEQCHQYMGFHPRYQLYESTLHAFAFSYSMLGEEIQLHFIIPKSKEHHFVFSQPGGQLESMRLPLVTDKSHEYIKSPTFTPTTGRHEHGLFNLYHAMDGASHLHVLVVKEYEMAIYKKYWPNHIMLVLPSIFNSAGVGAAHFLIKELSYHNLELERNRQEELGIKPQDIWPFIVISDDSCVMWNVVDVNSAGERSREFSWSERNVSLKHIMQHIEAAPDIMHYALLGLRKWSSKTRASEVQEPFSRCHVHNFIILNVDLTQNVQYNQNRFLCDDVDFNLRVHSAGLLLCRFNRFSVMKKQIVVGGHRSFHITSKVSDNSAAVVPAQYICAPDSKHTFLAAPAQLLLEKFLQHHSHLFFPLSLKNHDHPVLSVDCYLNLGSQISVCYVSSRPHSLNISCSDLLFSGLLLYLCDSFVGASFLKKFHFLKGATLCVICQDRSSLRQTVVRLELEDEWQFRLRDEFQTANAREDRPLFFLTGRHI

SEQ ID NO: 885718 - protein, 348 aa, Homo sapiens
MPTAGAAHFLIKELSYHNLELERNRQEELGIKPQDIWPFIVISDDSCVMWNVVDVNSAGERSREFSWSERNVSLKHIMQHIEAAPDIMHYALLGLRKWSSKTRASEVQEPFSRCHVHNFIILNVDLTQNVQYNQNRFLCDDVDFNLRVHSAGLLLCRFNRFSVMKKQIVVGGHRSFHITSKVSDNSAAVVPAQYICAPDSKHTFLAAPAQLLLEKFLQHHSHLFFPLSLKNHDHPVLSVDCYLNLGSQISVCYVSSRPHSLNISCSDLLFSGLLLYLCDSFVGASFLKKFHFLKGATLCVICQDRSSLRQTVVRLELEDEWQFRLRDEFQTANAREDRPLFFLTGRHI

SEQ ID NO: 885719 - protein, 383 aa, Homo sapiens
MWQKIEDVEWRPQTYLELEGLPCILIFSGMDPHGESLPRSLRYCDLRLINSSCLVRTALEQELGLAAYFVSNEVPLEKGARNEALESDAEKLSSTDNEDEELGTEGSTSEKRSPMKRERSRSHDSASSSLSSKASGSALGGESSAQPTALPQGEHARSPQPRGPAEEGRAPGEKQRPRASQGPPSAISRHSPGPTPQPDCSLRTGQRSVQVSVTSSCSQLSSSSGSSSSSVAPAAGTWVLQASQCSLTKACRQPPIVFLPKLVYDMVVSTDSSGLPKAASLLPSPSVMWASSFRPLLSKTMTSTEQSLYYRQWTVPRPSHMDYGNRAEGRVDGFHPRRLLLSGPPQIGKTGAYLQFLSVLSRMLVRLTEVDVYDEEEINISLR

SEQ ID NO: 885720 - protein, 654 aa, Homo sapiens
  misc_feature (654)..(654): Xaa can be any naturally occurring amino acid
MWQKIEDVEWRPQTYLELEGLPCILIFSGMDPHGESLPRSLRYCDLRLINSSCLVRTALEQELGLAAYFVSNEVPLEKGARNEALESDAEKLSSTDNEDEELGTEGSTSEKRSPMKRERSRSHDSASSSLSSKASGSALGGESSAQPTALPQGEHARSPQPRGPAEEGRAPGEKQRPRASQGPPSAISRHSPGPTPQPDCSLRTGQRSVQVSVTSSCSQLSSSSGSSSSSVAPAAGTWVLQASQCSLTKACRQPPIVFLPKLVYDMVVSTDSSGLPKAASLLPSPSVMWASSFRPLLSKTMTSTEQSLYYRQWTVPRPSHMDYGNRAEGRVDGFHPRRLLLSGPPQIGKTGAYLQFLSVLSRMLVRLTEVDVYDEEEININLREESDWHYLQLSDPWPDLELFKKLPFDYIIHDPKYEDASLICSHYQGIKSEDRGMSRKPEDLYVRRQTARMRLSKYAAYNTYHHCEQCHQYMGFHPRYQLYESTLHAFAFSYSMLGEEIQLHFIIPKSKEHHFVFSQPGGQLESMRLPLVTDKSHEYIKSPTFTPTTGRHEHGLFNLYHAMDGASHLHVLVVKEYEMAIYKKYWPNHIMLVLPSIFNSAGVGAAHFLIKELSYHNLELERNRQESLDKAFRFPQTRTERNRTCQNFSGGKEX

SEQ ID NO: 885721 - protein, 193 aa, Homo sapiens
  misc_feature (178)..(179): Xaa can be any naturally occurring amino acid
  misc_feature (181)..(182): Xaa can be any naturally occurring amino acid
  misc_feature (185)..(185): Xaa can be any naturally occurring amino acid
  misc_feature (187)..(187): Xaa can be any naturally occurring amino acid
  misc_feature (193)..(193): Xaa can be any naturally occurring amino acid
HFEIILGSPSSGVTVGKHFVKQLRMWQKIEDVEWRPQTYLELEGLPCILIFSGMDPHGESLPRSLRYCDLRLINSSCLVRTALEQELGLAAYFVSNEVPLEKGARNEALESDAEKLSSTDNEDEELGTEGSTSEKRSPMKRERSRSHDSASSSLSSKASGSALGGESSAQPTALPQGXXKXXPPXPXKQAASX

SEQ ID NO: 885722 - protein, 348 aa, Homo sapiens; identical to SEQ ID NO: 885718

SEQ ID NO: 885723 - protein, 74 aa, Homo sapiens
CGCRSVLSPGALPTAGAAHFLIKELSYHNLELERNRQEELGIKPQDIWPFIVISDDSCVMWNVVDVNSAGERSR

SEQ ID NO: 885724 - protein, 236 aa, Homo sapiens
MSGALDVLQMKEEDVLKFLAAGTHLGGTNLDFQMEQYIYKRKSDGIYIINLKRTWEKLLLAARAIVAIENPADVSVISSRNTGQRAVLKFAAATGATPIAGRFTPGTFTNQIQAAFREPRLLVVTDPRADHQPLTEASYVNLPTIALCNTDSPLRYVDIAIPCNNKGAHSVGLMWWMLAREVLRMRGTISREHPWEVMPDLYFYRDPEEIEKEEQAAAEKAVTKEEFQGEWTGPAS

SEQ ID NO: 885725 - protein, 236 aa, Homo sapiens; identical to SEQ ID NO: 885724

SEQ ID NO: 885726 - protein, 345 aa, Homo sapiens
PRGCRRRARAHPPARCPAHPVAPRAPGPDRGASPVRPSTSCSGGFNETPTAAVGPAGSSTATGTGAGRWSQNRNHDVTPPPGTREVCVDPEFHQVRRVMTILFLTMVISYFGCMKAAPMKEANIRGQGGLAYPGVRTHGTLESVNGPKAGSRGLTSLADTFEHVIEELLDEDQKVRPNEENNKDADLYTSRVMLSSQVPLEPPLLFLLEEYKNYLDAANMSMRVRRHSDPARRGELSVCDSISEWVTAADKKTAVDMSGGTVTVLEKVPVSKGQLKQYFYETKCNPMGYTKEGCRGIDKRHWNSQCRTTQSYVRALTMDSKKRIGWRFIRIDTSCVCTLTIKRGR

SEQ ID NO: 885727 - protein, 247 aa, Homo sapiens
MTILFLTMVISYFGCMKAAPMKEANIRGQGGLAYPGVRTHGTLESVNGPKAGSRGLTSLADTFEHVIEELLDEDQKVRPNEENNKDADLYTSRVMLSSQVPLEPPLLFLLEEYKNYLDAANMSMRVRRHSDPARRGELSVCDSISEWVTAADKKTAVDMSGGTVTVLEKVPVSKGQLKQYFYETKCNPMGYTKEGCRGIDKRHWNSQCRTTQSYVRALTMDSKKRIGWRFIRIDTSCVCTLTIKRGR

SEQ ID NO: 885728 - protein, 247 aa, Homo sapiens; identical to SEQ ID NO: 885727

SEQ ID NO: 885729 - protein, 255 aa, Homo sapiens
MFHQVRRVMTILFLTMVISYFGCMKAAPMKEANIRGQGGLAYPGVRTHGTLESVNGPKAGSRGLTSLADTFEHVIEELLDEDQKVRPNEENNKDADLYTSRVMLSSQVPLEPPLLFLLEEYKNYLDAANMSMRVRRHSDPARRGELSVCDSISEWVTAADKKTAVDMSGGTVTVLEKVPVSKGQLKQYFYETKCNPMGYTKEGCRGIDKRHWNSQCRTTQSYVRALTMDSKKRIGWRFIRIDTSCVCTLTIKRGR

SEQ ID NO: 885730 - protein, 247 aa, Homo sapiens; identical to SEQ ID NO: 885727

SEQ ID NO: 885731 - protein, 262 aa, Homo sapiens
MQSREEEWFHQVRRVMTILFLTMVISYFGCMKAAPMKEANIRGQGGLAYPGVRTHGTLESVNGPKAGSRGLTSLADTFEHVIEELLDEDQKVRPNEENNKDADLYTSRVMLSSQVPLEPPLLFLLEEYKNYLDAANMSMRVRRHSDPARRGELSVCDSISEWVTAADKKTAVDMSGGTVTVLEKVPVSKGQLKQYFYETKCNPMGYTKEGCRGIDKRHWNSQCRTTQSYVRALTMDSKKRIGWRFIRIDTSCVCTLTIKRGR

SEQ ID NO: 885732 - protein, 265 aa, Homo sapiens
MLQTLSSLSPLFHQVRRVMTILFLTMVISYFGCMKAAPMKEANIRGQGGLAYPGVRTHGTLESVNGPKAGSRGLTSLADTFEHVIEELLDEDQKVRPNEENNKDADLYTSRVMLSSQVPLEPPLLFLLEEYKNYLDAANMSMRVRRHSDPARRGELSVCDSISEWVTAADKKTAVDMSGGTVTVLEKVPVSKGQLKQYFYETKCNPMGYTKEGCRGIDKRHWNSQCRTTQSYVRALTMDSKKRIGWRFIRIDTSCVCTLTIKRGR

SEQ ID NO: 885733 - protein, 247 aa, Homo sapiens; identical to SEQ ID NO: 885727

SEQ ID NO: 885734 - protein, 167 aa, Homo sapiens
MTILFLTMVISYFGCMKAAPMKEANIRGQGGLAYPGVRTHGTLESVNGPKAGSRGLTSLADTFEHVIEELLDEDQKVRPNEENNKDADLYTSRVMLSSQVPLEPPLLFLLEEYKNYLDAANMSMRVRRHSDPARRGELSVCDSISEWVTAADKKTADRHFLCMYIDH

SEQ ID NO: 885735 - protein, 248 aa, Homo sapiens
MFLAKALLEGADRGLGEALGGLFGGGGQRREGGGRNIGGIVGGIVNFISEAAAAQYTPEPPPTQQHFTSVEASESEEVRRFRQQFTQLAGPDMEVGATDLMNILNKVLSKHKDLKTDGFSLDTCRSIVSVMDSDTTGKLGFEEFKYLWNNIKKWQCVYKQYDRDHSGSLGSSQLRGALQAAGFQLNEQLYQMIVRRYANEDGDMDFNNFISCLVRLDAMFRAFKSLDRDRDGLIQVSIKEWLQLTMYS

SEQ ID NO: 885736 - protein, 685 aa, Homo sapiens
MAEDKSKRDSIEMSMKGCQTNNGFVHNEDILEQTPDPGSSTDNLKHSTRGILGSQEPDFKGVQPYAGMPKEVLFQFSGQARYRIPREILFWLTVASVLVLIAATIAIIALSPKCLDWWQEGPMYQIYPRSFKDSNKDGNGDLKGIQDKLDYITALNIKTVWITSFYKSSLKDFRYGVEDFREVDPIFGTMEDFENLVAAIHDKGLKLIIDFIPNHTSDKHIWFQLSRTRTGKYTDYYIWHDCTHENGKTIPPNNWLSVYGNSSWHFDEVRNQCYFHQFMKEQPDLNFRNPDVQEEIKEILRFWLTKGVDGFSLDAVKFLLEAKHLRDEIQVNKTQIPDTVTQYSELYHDFTTTQVGMHDIVRSFRQTMDQYSTEPGRYRFMGTEAYAESIDRTVMYYGLPFIQEADFPFNNYLSMLDTVSGNSVYEVITSWMENMPEGKWPNWMIGGPDSSRLTSRLGNQYVNVMNMLLFTLPGTPITYYGEEIGMGNIVAANLNESYDINTLRSKSPMQWDNSSNAGFSEASNTWLPTNSDYHTVNVDVQKTQPRSALKLYQDLSLLHANELLLNRGWFCHLRNDSHYVVYTRELDGIDRIFIVVLNFGESTLLNLHNMISGLPAKIRIRLSTNSADKGSKVDTSGIFLDKGEGLIFEHNTKNLLHRQTAFRDRCFVSNRACYSSVLNILYTSC

SEQ ID NO: 885737 - protein, 564 aa, Homo sapiens
MAEDKSKRDSIEMSMKGCQTNNGFVHNEDILEQTPDPGSSTDNLKHSTRGILGSQEPDFKGVQPYAGMPKEVLFQFSGQARYRIPREILFWLTVASVLVLIAATIAIIALSPKCLDWWQEGPMYQIYPRSFKDSNKDGNGDLKGIQDKLDYITALNIKTVWITSFYKSSLKDFRYGVEDFREVDPIFGTMEDFENLVAAIHDKGLKLIIDFIPNHTSDKHIWFQLSRTRTGKYTDYYIWHDCTHENGKTIPPNNWLSVYGNSSWHFDEVRNQCYFHQFMKEQPDLNFRNPDVQEEIKEILRFWLTKGVDGFSLDAVKFLLEAKHLRDEIQVNKTQIPDTVTQYSELYHDFTTTQVGMHDIVRSFRQTMDQYSTEPGRYRFMGTEAYAESIDRTVMYYGLPFIQEADFPFNNYLSMLDTVSGNSVYEVITSWMENMPEGKWPNWMIGGPDSSRLTSRLGNQYVNVMNMLLFTLPGTPITYYGEEIGMGNIVAANLNESYDINTLRSKSPMQWDNSSNAGFSEASNTWLPTNSDYHTVNVDSCSVTHARVQWRDLGTLQPLLPGFK

SEQ ID NO: 885738 - protein, 564 aa, Homo sapiens; identical to SEQ ID NO: 885737

SEQ ID NO: 885739 - protein, 598 aa, Homo sapiens
  misc_feature (497)..(497): Xaa can be any naturally occurring amino acid
MAEDKSKRDSIEMSMKGCQTNNGFVHNEDILEQTPDPGSSTDNLKHSTRGILGSQEPDFKGVQPYAGMPKEVLFQFSGQARYRIPREILFWLTVASVLVLIAATIAIIALSPKCLDWWQEGPMYQIYPRSFKDSNKDGNGDLKGIQDKLDYITALNIKTVWITSFYKSSLKDFRYGVEDFREVDPIFGTMEDFENLVAAIHDKGLKLIIDFIPNHTSDKHIWFQLSRTRTGKYTDYYIWHDCTHENGKTIPPNNWLSVYGNSSWHFDEVRNQCYFHQFMKEQPDLNFRNPDVQEEIKEILRFWLTKGVDGFSLDAVKFLLEAKHLRDEIQVNKTQIPDTVTQYSELYHDFTTTQVGMHDIVRSFRQTMDQYSTEPGRYRVMGDLNLIHRVLARTVEVLWDRHLIQESCFFPLTSCLNNATILDSWEQVLYKGLPHPWVVTCCQKGIMGLAGVDWVSHDHASGCSWEWWWTRSVSGIEHNLVVPPRWELLILDHGKNXTVNGETCEGEELWMNVCDVLSGYARIVLMYVREYMWKSGDVSNINDICRAEYVWNSQSGCLGWKTERAFLKELVVRVEELVAECAAVRVWLRRVVDNPVLV

SEQ ID NO: 885740 - protein, 564 aa, Homo sapiens
MAEDKSKRDSIEMSMKGCQTNNGFVHNEDILEQTPDPGSSTDNLKHSTRGILGSQEPDFKGVQPYAGMPKEVLFQFSGQARYRIPREILFWLTVASVLVLIAATIAIIALSPKCLDWWQEGPMYQIYPRSFKDSNKDGNGDLKGIQDKLDYITALNIKTVWITSFYKSSLKDFRYGVEDFREVDPIFGTMEDFENLVAAIHDKGLKLIIDFIPNHTSDKHIWFQLSRTRTGKYTDYYIWHDCTHENGKTIPPNNWLSVYGNSSWHFDEVRNQCYFHQFMKEQPDLNFRNPDVQEEIKEILRFWLTKGVDGFSLDAVKFLLEAKHLRDEIQVNKTQIPDTVTQYSELYHDFTTTQVGMHDIVRSFRQTMDQYSTEPGRYRFMGTEAYAESIDRTVMYYGLPFIQEADFPFNNYLSMLDTVSGNSVYEVITSWMENMPEGKWPNWMIGGPDSSRLTSRLGNQYVNVMNMLLFTLPGTPITYYGEEIGMGNIVAANLNESYDINTLRSKSPMQWDNSSNAGFSEASNTWLPTNSDYHTVNVDVSISENFMLILETKKWVSTESTHSP

SEQ ID NO: 885741 - protein, 502 aa, Homo sapiens
MAEDKSKRDSIEMSMKGCQTNNGFVHNEDILEQTPDPGSSTDNLKHSTRGILGSQEPDFKGVQPYAGMPKEVLFQFSGQARYRIPREILFWLTVASVLVLIAATIAIIALSPKCLDWWQEGPMYQIYPRSFKDSNKDGNGDLKGIQDKLDYITALNIKTVWITSFYKSSLKDFRYGVEDFREVDPIFGTMEDFENLVAAIHDKGLKLIIDFIPNHTSDKHIWFQLSRTRTGKYTDYYIWHDCTHENGKTIPPNNWLSVYGNSSWHFDEVRNQCYFHQFMKEQPDLNFRNPDVQEEIKEILRFWLTKGVDGFSLDAVKFLLEAKHLRDEIQVNKTQIPDTVTQYSELYHDFTTTQVGMHDIVRSFRQTMDQYSTEPGRYRFMGTEAYAESIDRTVMYYGLPFIQEADFPFNNYLSMLDTVSGNSVYEVITSWMENMPEGKWPNWMIGGPDSSRLTSRLGNQYVNVMNMLLFTLPGTPITYYGEEIGMGNIVAANLNESYDIVS

SEQ ID NO: 885742 - protein, 391 aa, Homo sapiens
MAEDKSKRDSIEMSMKGCQTNNGFVHNEDILEQTPDPGSSTDNLKHSTRGILGSQEPDFKGVQPYAGMPKEVLFQFSGQARYRIPREILFWLTVASVLVLIAATIAIIALSPKCLDWWQEGPMYQIYPRSFKDSNKDGNGDLKGIQDKLDYITALNIKTVWITSFYKSSLKDFRYGVEDFREVDPIFGTMEDFENLVAAIHDKGLKLIIDFIPNHTSDKHIWFQLSRTRTGKYTDYYIWHDCTHENGKTIPPNNWLSVYGNSSWHFDEVRNQCYFHQFMKEQPDLNFRNPDVQEEIKEILRFWLTKGVDGFSLDAVKFLLEAKHLRDEIQVNKTQIPDTVTQYSELYHDFTTTQVGMHDIVRSFRQTMDQYSTEPGRYRLTTAYALISSQA

SEQ ID NO: 885743 - protein, 482 aa, Homo sapiens
MPPSPLDDRVVVALSRPVRPQDLNLCLDSSYLGSANPGSNSHPPVIATTVVSLKAANLTYMPSSSGSARSLNCGCSSASCCTVATYDKDNQAQTQAIAAGTTTTAIGTSTTCPANQMVNNNENTGSLSPSSGVGSPVSGTPKQLASIKIIYPNDLAKKMTKCSKSHLPSQGPVIIDCRPFMEYNKSHIQGAVHINCADKISRRRLQQGKITVLDLISCREGKDSFKRIFSKEIIVYDENTNEPSRVMPSQPLHIVLESLKREGKEPLVLKGGLSSFKQNHENLCDNSLQLQECREVGGGASAASSLLPQPIPTTPDIENAELTPILPFLFLGNEQDAQDLDTMQRLNIGYVINVTTHLPLYHYEKGLFNYKRLPATDSNKQNLRQYFEEAFEFIEEAHQCGKGLLIHCQAGVSRSATIVIAYLMKHTRMTMTDAYKFVKGKRPIISPNLNFMGQLLEFEEDLNNGVTPRILTPKLMGVETVV

SEQ ID NO: 885744 - protein, 482 aa, Homo sapiens; identical to SEQ ID NO: 885743

SEQ ID NO: 885745 - protein, 140 aa, Homo sapiens
MQRLNIGYVINVTTHLPLYHYEKGLFNYKRLPATDSNKQNLRQYFEEAFEFIEEAHQCGKGLLIHCQAGVSRSATIVIAYLMKHTRMTMTDAYKFVKGKRPIISPNLNFMGQLLEFEEDLNNGVTPRILTPKLMGVETVV

SEQ ID NO: 885746 - protein, 140 aa, Homo sapiens; identical to SEQ ID NO: 885745

SEQ ID NO: 885747 - protein, 140 aa, Homo sapiens; identical to SEQ ID NO: 885745

SEQ ID NO: 885748 - protein, 302 aa, Homo sapiens
MEYNKSHIQGAVHINCADKISRRRLQQGKITVLDLISCREGKDSFKRIFSKEIIVYDENTNEPSRVMPSQPLHIVLESLKREGKEPLVLKGGLSSFKQNHENLCDNSLQLQECREVGGGASAASSLLPQPIPTTPDIENAELTPILPFLFLGNEQDAQDLDTMQRLNIGYVINVTTHLPLYHYEKGLFNYKRLPATDSNKQNLRQYFEEAFEFIEEAHQCGKGLLIHCQAGVSRSATIVIAYLMKHTRMTMTDAYKFVKGKRPIISPNLNFMGQLLEFEEDLNNGVTPRILTPKLMGVETVV

SEQ ID NO: 885749 - protein, 257 aa, Homo sapiens
MPQWGGAGHTADLTTGRPGQPLRGLVIFELVRHRGSRLGRCSGGRGGLSSFKQNHENLCDNSLQLQECREVGGGASAASSLLPQPIPTTPDIENAELTPILPFLFLGNEQDAQDLDTMQRLNIGYVINVTTHLPLYHYEKGLFNYKRLPATDSNKQNLRQYFEEAFEFIEEAHQCGKGLLIHCQAGVSRSATIVIAYLMKHTRMTMTDAYKFVKGKRPIISPNLNFMGQLLEFEEDLNNGVTPRILTPKLMGVETVV

SEQ ID NO: 885750 - protein, 140 aa, Homo sapiens; identical to SEQ ID NO: 885745

SEQ ID NO: 885751 - protein, 1515 aa, Homo sapiens
MTEVQAMVEFSVELNKFYNVDLFQRGFYQIRASMKIPSRIPHRVEASLLHATGMTLAFPASVHDSLICSKTFQILYKNEEVVLNDVMIFKVKMLLDERKIEETLEEMNFLLSLDLHFTDGDYSADDLNALQLISSRTLKLHFSPHRGLHHHVNVMFDYFHLSVVSVTVHASLVALHQPLISFPRPVKTTWLNRNAPAQNKDSVIPTLESVVFGINYTKQLSPDGCSFIIADSFLHHAYRFHYTLCATLLLAFKGLHSYFITVTEEIPSCQKLELEEMDVEARLTELCEEVKKIENPDELAELINMNLAQLCSLLMALWGQFLEVITLHEELRILLAQEHHTLRVRRFSEAFFCFEHPREAAIAYQELHAQSHLQMCTAIKNTSFCSSLPPLPIECSELDGDLNSLPIIFEDRYLDSVTEDLDAPWMGIQNLQRSESSKMDKYETEESSVAGLSSPELKVRPAGASSIWYTEGEKQLTKSLKGKNEESNKSKVKVTKLMKTMKSENTKKLIKQNSKDSVVLVGYKCLKSTASNDLIKCFEGNPSHSQKEGLDPTICGYNFDPKTYMRQTSQKEASCLPTNTERTEQKSPDIENVQPDQFDPLNSGNLNLCANLSISGKLDISQDDSEITQMEHNLASRRSSDDCHDHQTTPSLGVRTIEIKPSNKDPFSGENITVKLGPWTELRQEEILVDNLLPNFESLESNGKSKSIEITFEKEALQEAKCLSIGESLTKLRSNLPAPSTKEYHVVVSGDTIKLPDISATYASSRFSDSGVESEPSSFATHPNTDLVFETVQGQGPCNSERLFPQLLMKPDYNVKFSLGNHCTESTSAISEIQSSLTSINSLPSDDELSPDENSKKSVVPECHLNDSKTVLNLGTTDLPKCDDTKKSSITLQQQSVVFSGNLDNETVAIHSLNSSIKDPLQFVFSDEETSSDVKSSCSSKPNLDTMCKGFQSPDKSNNSTGTAITLNSKLICLGTPCVISGSISSNTDVSEDRTMKKNSDVLNLTQMYSEIPTVESETHLGTSDPFSASTDIVKQGLVENYFGSQSSTDISDTCAVSYSNALSPQKETSEKEISNLQQEQDKEDEEEEQDQQMVQNGYYEETDYSALDGTINAHYTSRDELMEERLTKSEKINSDYLRDGINMPTVCTSGCLSFPSAPRESPCNVKYSSKSKFDAITKQPSSTSYNFTSSISWYESSPKPQIQAFLQAKEELKLLKLPGFMYSEVPLLASSVPYFSVEEEDGSEDGVHLIVCVHGLDGNSADLRLVKTYIELGLPGGRIDFLMSERNQNDTFADFDSMTDRLLDEIIQYIQIYSLTVSKISFIGHSLGNLIIRSVLTRPRFKYYLNKLHTFLSLSGPHLGTLYNSSALVNTGLWFMQKWKKSGSLLQLTCRDHSDPRQTFLYKLSNKAGLHYFKNVVLVGSLQDRYVPYHSARIEMCKTALKDKQSGQIYSEMIHNLLRPVLQSKDCNLVRYNVINALPNTADSLIGRAAHIAVLDSEIFLEKFFLVAALKYFQ

SEQ ID NO: 885752 - protein, 105 aa, Homo sapiens
LCADPYELAKANMQLLYERLLRRKQLRTQKDNHLEEMDVEARLTELCEEVKKIENPDELAELINMNLAQLCSLLMALWGQFLEVITLHEELRILLAQEHHTLRVS

SEQ ID NO: 885753 - protein, 1470 aa, Homo sapiens
MTEVQAMVEFSVELNKFYNVDLFQRGFYQIRASMKIPSRIPHRVEASLLHATGMTLAFPASVHDSLICSKTFQILYKNEEVVLNDVMIFKVKMLLDERKIEETLEEMNFLLSLDLHFTDGDYSSCIIGCTTPATNKLSSPCEDNLVKRNAPAQNKDSVIPTLESVVFGINYTKQLSPDGCSFIIADSFLHHAYRFHYTLCATLLLAFKGLHSYFITVTEEIPSCQKLELEEMDVEARLTELCEEVKKIENPDELAELINMNLAQLCSLLMALWGQFLEVITLHEELRILLAQEHHTLRVRRFSEAFFCFEHPREAAIAYQELHAQSHLQMCTAIKNTSFCSSLPPLPIECSELDGDLNSLPIIFEDRYLDSVTEDLDAPWMGIQNLQRSESSKMDKYETEESSVAGLSSPELKVRPAGASSIWYTEGEKQLTKSLKGKNEESNKSKVKVTKLMKTMKSENTKKLIKQNSKDSVVLVGYKCLKSTASNDLIKCFEGNPSHSQKEGLDPTICGYNFDPKTYMRQTSQKEASCLPTNTERTEQKSPDIENVQPDQFDPLNSGNLNLCANLSISGKLDISQDDSEITQMEHNLASRRSSDDCHDHQTTPSLGVRTIEIKPSNKDPFSGENITVKLGPWTELRQEEILVDNLLPNFESLESNGKSKSIEITFEKEALQEAKCLSIGESLTKLRSNLPAPSTKEYHVVVSGDTIKLPDISATYASSRFSDSGVESEPSSFATHPNTDLVFETVQGQGPCNSERLFPQLLMKPDYNVKFSLGNHCTESTSAISEIQSSLTSINSLPSDDELSPDENSKKSVVPECHLNDSKTVLNLGTTDLPKCDDTKKSSITLQQQSVVFSGNLDNETVAIHSLNSSIKDPLQFVFSDEETSSDVKSSCSSKPNLDTMCKGFQSPDKSNNSTGTAITLNSKLICLGTPCVISGSISSNTDVSEDRTMKKNSDVLNLTQMYSEIPTVESETHLGTSDPFSASTDIVKQGLVENYFGSQSSTDISDTCAVSYSNALSPQKETSEKEISNLQQEQDKEDEEEEQDQQMVQNGYYEETDYSALDGTINAHYTSRDELMEERLTKSEKINSDYLRDGINMPTVCTSGCLSFPSAPRESPCNVKYSSKSKFDAITKQPSSTSYNFTSSISWYESSPKPQIQAFLQAKEELKLLKLPGFMYSEVPLLASSVPYFSVEEEDGSEDGVHLIVCVHGLDGNSADLRLVKTYIELGLPGGRIDFLMSERNQNDTFADFDSMTDRLLDEIIQYIQIYSLTVSKISFIGHSLGNLIIRSVLTRPRFKYYLNKLHTFLSLSGPHLGTLYNSSALVNTGLWFMQKWKKSGSLLQLTCRDHSDPRQTFLYKLSNKAGLHYFKNVVLVGSLQDRYVPYHSARIEMCKTALKDKQSGQIYSEMIHNLLRPVLQSKDCNLVRYNVINALPNTADSLIGRAAHIAVLDSEIFLEKFFLVAALKYFQ

SEQ ID NO: 885754 - protein, 1470 aa, Homo sapiens; identical to SEQ ID NO: 885753

SEQ ID NO: 885755 - protein, 458 aa, Homo sapiens
MTEVQAMVEFSVELNKFYNVDLFQRGFYQIRASMKIPSRIPHRVEASLLHATGMTLAFPASVHDSLICSKTFQILYKNEEVVLNDVMIFKVKMLLDERKIEETLEEMNFLLSLDLHFTDGDYSADDLNALQLISSRTLKLHFSPHRGLHHHVNVMFDYFHLSVVSVTVHASLVALHQPLISFPRPVKTTWLNRNAPAQNKDSVIPTLESVVFGINYTKQLSPDGCSFIIADSFLHHAYRFHYTLCATLLLAFKGLHSYFITVTEEIPSCQKLELAKANMQLLYERLLRRKQLRTQKDNHLEEMDVEARLTELCEEVKKIENPDELAELINMNLAQLCSLLMALWGQFLEVITLHEELRILLAQEHHTLRVRRFSEAFFCFEHPREAAIAYQELHAQSHLQMCTAIKNTSFCSSLPPLPIECSELDGDLNSLPIIFEDRYLDSVTEGKCNLTKIYKLCV

SEQ ID NO: 885756 - protein, 1424 aa, Homo sapiens
MTEVQAMVEFSVELNKFYNVDLFQRGFYQIRASMKIPSRIPHRVEASLLHATGMTLAFPASVHDSLICSKTFQILYKNEEVVLNDVMIFKVKMLLDERKIEETLEEMNFLLSLDLHFTDGDYSSCIIGCTTPATNKLSSPCEDNLVKRNAPAQNKDSVIPTLESVVFGINYTKQLSPDGCSFIIADSFLHHAYRFHYTLCATLLLAFKGLHSYFITVTEEIPSCQKLELEEMDVEARLTELCEEVKKIENPDELAELINMNLAQLCSLLMALWGQFLEVITLHEELRILLAQEHHTLRVRRFSEAFFCFEHPREAAIAYQELHAQSHLQMCTAIKNTSFCSSLPPLPIECSELDGDLNSLPIIFEDRYLDSVTEDLDAPWMGIQNLQRSESSKMDKYETEESSVAGLSSPELKVRPAGASSIWYTEGEKQLTKSLKGKNEESNKSKVKVTKLMKTMKSENTKKLIKQNSKDSVVLVGYKCLKSTASNDLIKCFEGNPSHSQKEGLDPTICGYNFDPKTYMRQTSQKEASCLPTNTERTEQKSPDIENVQPDQFDPLNSGNLNLCANLSISGKLDISQDDSEITQMEHNLASRRSSDDCHDHQTTPSLGVRTIEIKPSNKDPFSGENITVKLGPWTELRQEEILVDNLLPNFESLESNGKSKSIEITFEKEALQEAKCLSIGESLTKLRSNLPAPSTKEYHVVVSGDTIKLPDISATYASSRFSDSGVESEPSSFATHPNTDLVFETVQGQGPCNSERLFPQLLMKPDYNVKFSLGNHCTESTSAISEIQSSLTSINSLPSDDELSPDENSKKSVVPECHLNDSKTVLNLGTTDLPKCDDTKKSSITLQQQSVVFSGNLDNETVAIHSLNSSIKDPLQFVFSDEETSSDVKSSCSSKPNLDTMCKGFQSPDKSNNSTGTAITLNSKLICLGTPCVISGSISSNTDVSEDRTMKKNSDVLNLTQMYSEIPTVESETHLGTSDPFSASTDIVKQGLVENYFGSQSSTDISDTCAVSYSNALSPQKETSEKEISNLQQEQDKEDEEEEQDQQMVQNGYYEETDYSALDGTINAHYTSRDELMEERLTKSEKINSDYLRDGINMPTVCTSGCLSFPSAPRESPCNVKYSSKSKFDAITKQPSSTSYNFTSSISWYESSPKPQIQAFLQAKEELKLLKLPGFMYSEVPLLASSVPYFSVEEEDGSEDGVHLIVCVHGLDGNSADLRLVKTYIELGLPGGRIDFLMSERNQNDTFADFDSMTDRLLDEIIQYIQIYSLTVSKISFIGHSLGNLIIRSVLTRPRFKYYLNKLHTFLSLSGPHLGTLYNSSALVNTGLWFMQKWKKSGSLLQLTCRDHSDPRQTFLYKLSNKAGLHYFKNVVLVGSLQDRYVPYHSARIEMCKTALKDKQSGNGIKLFQRVIGINELFPKFFL

SEQ ID NO: 885757 - protein, 1387 aa, Homo sapiens
MTEVQAMVEFSVELNKFYNVDLFQRGFYQIRASMKIPSRIPHRVEASLLHATGMTLAFPASVHDSLICSKTFQILYKNEEVVLNDVMIFKVKMLLDERKIEETLEEMNFLLSLDLHFTDGDYSSCIIGCTTPATNKLSSPCEDNLVKRNAPAQNKDSVIPTLESVVFGINYTKQLSPDGCSFIIADSFLHHAYRFHYTLCATLLLAFKGLHSYFITVTEEIPSCQKLELEEMDVEARLTELCEEVKKIENPDELAELINMNLAQLCSLLMALWGQFLEVITLHEELRILLAQEHHTLRVRRFSEAFFCFEHPREAAIAYQELHAQSHLQMCTAIKNTSFCSSLPPLPIECSELDGDLNSLPIIFEDRYLDSVTEDLDAPWMGIQNLQRSESSKMDKYETEESSVAGLSSPELKVRPAGASSIWYTEGEKQLTKSLKGKNEESNKSKVKVTKLMKTMKSENTKKLIKQNSKDSVVLVGYKCLKSTASNDLIKCFEGNPSHSQKEGLDPTICGYNFDPKTYMRQTSQKEASCLPTNTERTEQKSPDIENVQPDQFDPLNSGNLNLCANLSISGKLDISQDDSEITQMEHNLASRRSSDDCHDHQTTPSLGVRTIEIKPSNKDPFSGENITVKLGPWTELRQEEILVDNLLPNFESLESNGKSKSIEITFEKEALQEAKCLSIGESLTKLRSNLPAPSTKEYHVVVSGDTIKLPDISATYASSRFSDSGVESEPSSFATHPNTDLVFETVQGQGPCNSERLFPQLLMKPDYNVKFSLGNHCTESTSAISEIQSSLTSINSLPSDDELSPDENSKKSVVPECHLNDSKTVLNLGTTDLPKCDDTKKSSITLQQQSVVFSGNLDNETVAIHSLNSSIKDPLQFVFSDEETSSDVKSSCSSKPNLDTMCKGFQSPDKSNNSTGTAITLNSKLICLGTPCVISGSISSNTDVSEDRTMKKNSDVLNLTQMYSEIPTVESETHLGTSDPFSASTDIVKQGLVENYFGSQSSTDISDTCAVSYSNALSPQKETSEKEISNLQQEQDKEDEEEEQDQQMVQNGYYEETDYSALDGTINAHYTSRDELMEERLTKSEKINSDYLRDGINMPTVCTSGCLSFPSAPRESPCNVKYSSKSKFDAITKQPSSTSYNFTSSISWYESSPKPQIQAFLQAKEELKLLKLPGFMYSEVPLLASSVPYFSVEEEDGSEDGVHLIVCVHGLDGNSADLRLVKTYIELGLPGGRIDFLMSERNQNDTFADFDSMTDRLLDEIIQYIQIYSLTVSKISFIGHSLGNLIIRSVLTRPRFKYYLNKLHTFLSLSGPHLGTLYNSSALVNTGLWFMQKWKKSGSLLQLTCRDHSDPRQTFLYKLSNKAGLHYFMVCQWDPYHEDSGGPPFF

SEQ ID NO: 885758 - protein, 640 aa, Homo sapiens
MLRSTLAQQGTPVYSVAWGPDSEKVLYTAGKQLIIKPLQPNAKVLQWKAHDGIILKVDWNSVNDLILSAGEDCKYKVWDSYGRPLYNSQPHEHPITSVAWAPDGELFAVGSFHTLRLCDKTGWSYALEKPNTGSIFNIAWSIDGTQIAGACGNGHVVFAHVVEQHWEWKNFQVTLTKRRAMQVRNVLNDAVDLLEFRDRVIKASLNYAHLVVSTSLQCYVFSTKNWNTPIIFDLKEGTVSLILQAERHFLLVDGSSIYLYSYEGRFISSPKFPGMRTDILNAQTVSLSNDTIAIRDKADEKIIFLFEASTGKPLGDGKFLSHKNEILEIALDQKGLTNDRKIAFIDKNRDLCITSVKRFGKEEQIIKLGTMVHTLAWNDTCNILCGLQDTRFIVWYYPNTVYVDRDILPKTLYERDASEFSKNPHIVSFVGNQVTIRRADGSLVHISITPYPAILHEYVSSSKWEDAVRLCRFVKEQTMWACLAAMAVANRDMTTAEIAYAAIGEIDKVQYINSIKNLPSKESKMAHILLFSGNIQEAEIVLLQAGLVYQAIQININLYNWERALELAVKYKTHVDTVLAYRQKFLETFGKQETNKRYLHYAEGLQIDWEKIKAKIEMEITKEREQSSSSQSSKSIGLKP

SEQ ID NO: 885759 - protein, 640 aa, Homo sapiens; identical to SEQ ID NO: 885758

SEQ ID NO: 885760 - protein, 640 aa, Homo sapiens; identical to SEQ ID NO: 885758

SEQ ID NO: 885761 - protein, 640 aa, Homo sapiens; identical to SEQ ID NO: 885758

SEQ ID NO: 885762 - protein, 460 aa, Homo sapiens
MQVRNVLNDAVDLLEFRDRVIKASLNYAHLVVSTSLQCYVFSTKNWNTPIIFDLKEGTVSLILQAERHFLLVDGSSIYLYSYEGRFISSPKFPGMRTDILNAQTVSLSNDTIAIRDKADEKIIFLFEASTGKPLGDGKFLSHKNEILEIALDQKGLTNDRKIAFIDKNRDLCITSVKRFGKEEQIIKLGTMVHTLAWNDTCNILCGLQDTRFIVWYYPNTVYVDRDILPKTLYERDASEFSKNPHIVSFVGNQVTIRRADGSLVHISITPYPAILHEYVSSSKWEDAVRLCRFVKEQTMWACLAAMAVANRDMTTAEIAYAAIGEIDKVQYINSIKNLPSKESKMAHILLFSGNIQEAEIVLLQAGLVYQAIQININLYNWERALELAVKYKTHVDTVLAYRQKFLETFGKQETNKRYLHYAEGLQIDWEKIKAKIEMEITKEREQSSSSQSSKSIGLKP

SEQ ID NO: 885763 - protein, 331 aa, Homo sapiens
AAAPTSEWKFLSHKNEILEIALDQKGLTNDRKIAFIDKNRDLCITSVKRFGKEEQIIKLGTMVHTLAWNDTCNILCGLQDTRFIVWYYPNTVYVDRDILPKTLYERDASEFSKNPHIVSFVGNQVTIRRADGSLVHISITPYPAILHEYVSSSKWEDAVRLCRFVKEQTMWACLAAMAVANRDMTTAEIAYAAIGEIDKVQYINSIKNLPSKESKMAHILLFSGNIQEAEIVLLQAGLVYQAIQININLYNWERALELAVKYKTHVDTVLAYRQKFLETFGKQETNKRYLHYAEGLQIDWEKIKAKIEMEITKEREQSSSSQSSKSIGLKP

SEQ ID NO: 885764 - protein, 640 aa, Homo sapiens; identical to SEQ ID NO: 885758

SEQ ID NO: 885765 - protein, 640 aa, Homo sapiens; identical to SEQ ID NO: 885758

SEQ ID NO: 885766 - protein, 304 aa, Homo sapiens
MLRSTLAQQGTPVYSVAWGPDSEKVLYTAGKQLIIKPLQPNAKVLQWKAHDGIILKVDWNSVNDLILSAGEDCKYKVWDSYGRPLYNSQPHEHPITSVAWAPDGELFAVGSFHTLRLCDKTGWSYALEKPNTGSIFNIAWSIDGTQIAGACGNGHVVFAHVVEQHWEWKNFQVTLTKRRAMQVRNVLNDAVDLLEFRDRVIKASLNYAHLVVSTSLQCYVFSTKNWNTPIIFDLKEGTVSLILQAERHFLLVDGSSIYLYSYEGRFISSPKFPGMRTDILNAQTVSLSNDTIAIRDKADEKSFL

SEQ ID NO: 885767 - protein, 252 aa, Homo sapiens
MLRSTLAQQGTPVYSVAWGPDSEKVLYTAGKQLIIKPLQPNAKVLQWKAHDGIILKVDWNSVNDLILSAGEDCKYKVWDSYGRPLYNSQPHEHPITSVAWAPDGELFAVGSFHTLRLCDKTGWSYALEKPNTGSIFNIAWSIDGTQIAGACGNGHVVFAHVVEQHWEWKNFQVTLTKRRAMQVRNVLNDAVDLLEFRDRVIKASLNYAHLVVSTSLQCYVFSTKNWNTPIIFDLKEGTVSLILQAESLFIFI

SEQ ID NO: 885768 - protein, 501 aa, Homo sapiens
MIISHFPKCVAVFALLALSVGALDTFIAAVYEHAVILPNRTETPVSKEEALLLMNKNIDVLEKAVKLAAKQGAHIIVTPEDGIYGWIFTRESIYPYLEDIPDPGVNWIPCRDPWRFGNTPVQQRLSCLAKDNSIYVVANIGDKKPCNASDSQCPPDGRYQYNTDVVFDSQGKLLARYHKYNLFAPEIQFDFPKDSELVTFDTPFGKFGIFTCFDIFSHDPAAVVVDEVSIDSILYPTAWYNTLPLLSAVPFHSAWAKAMGVNLLAANTHNTSMHMTGSGIYAPEAVKVYHYDMETESGQLLLSELKSRPRREPTYPAAVDWHAYASSVKPFSSEQSDFLGMIYFDEFTFTKLKRNTGNYTACQKDLCCHLTYKMSEKRTDEIYALGAFDGLHTVEGQYYLQICALLKCQTTDLETCGEPVGSAFTKFEDFSLSGTFGTRYVFPQIILSGSQLAPERHYEISRDGRLRSRSGAPLPVLVMALYGRVFEKDPPRLGQGSGKFQ

SEQ ID NO: 885769 - protein, 517 aa, Homo sapiens
MIISHFPKCVAVFALLALSVGALDTFIAAVYEHAVILPNRTETPVSKEEALLLMNKNIDVLEKAVKLAAKQGAHIIVTPEDGIYGWIFTRESIYPYLEDIPDPGVNWIPCRDPWRNHYKYSKFEEMSIELGFGNTPVQQRLSCLAKDNSIYVVANIGDKKPCNASDSQCPPDGRYQYNTDVVFDSQGKLLARYHKYNLFAPEIQFDFPKDSELVTFDTPFGKFGIFTCFDIFSHDPAAVVVDEVSIDSILYPTAWYNTLPLLSAVPFHSAWAKAMGVNLLAANTHNTSMHMTGSGIYAPEAVKVYHYDMETESGQLLLSELKSRPRREPTYPAAVDWHAYASSVKPFSSEQSDFLGMIYFDEFTFTKLKRNTGNYTACQKDLCCHLTYKMSEKRTDEIYALGAFDGLHTVEGQYYLQICALLKCQTTDLETCGEPVGSAFTKFEDFSLSGTFGTRYVFPQIILSGSQLAPERHYEISRDGRLRSRSGAPLPVLVMALYGRVFEKDPPRLGQGSGKFQ

SEQ ID NO: 885770 - protein, 147 aa, Homo sapiens
MIISHFPKCVAVFALLALSVGALDTFIAAVYEHAVILPNRTETPVSKEEALLLMNKNIDVLEKAVKLAAKQGAHIIVTPEDGIYGWIFTRESIYPYLEDIPDPGVNWIPCRDPWRKSKKMNEPVSKELCYHCHSECNQYGQWKLYRT

SEQ ID NO: 885771 - protein, 535 aa, Homo sapiens
MEEGARHRNNTEKKHPGGGESDASPEAGSGGGGVALKKEIGLVSACGIIVGNIIGSGIFVSPKGVLENAGSVGLALIVWIVTGFITVVGALCYAELGVTIPKSGGDYSYVKDIFGGLAGFLRLWIAVLVIYPTNQAVIALTFSNYVLQPLFPTCFPPESGLRLLAAICLLLLTWVNCSSVRWATRVQDIFTAGKLLALALIIIMGIVQICKGEYFWLEPKNAFENFQEPDIGLVALAFLQGSFAYGGWNFLNYVTEELVDPYKNLPRAIFISIPLVTFVYVFANVAYVTAMSPQELLASNAVAVTFGEKLLGVMAWIMPISVALSTFGGVNGSLFTSSRLFFAGAREGHLPSVLAMIHVKRCTPIPALLFTCISTLLMLVTSDMYTLINYVGFINYLFYGVTVAGQIVLRWKKPDIPRPIKINLLFPIIYLLFWAFLLVFSLWSEPVVCGIGLAIMLTGVPVYFLGVYWQHKPKCFSDFIELLTLVSQKMCVVVYPEVERGSGTEEANEDMEEQQQPMYQPTPTKDKDVAGQPQP

SEQ ID NO: 885772 - protein, 151 aa, Homo sapiens
MEEGARHRNNTEKKHPGGGESDASPEAGSGGGGVALKKEIGLVSACGIIVGNIIGSGIFVSPKGAALWGDRLKQFCPHQGVSWRDPRPYLFTRDPKSKGMLPSALFPAPPHHTCTHPSQGSLSRIRFSSGRQLPELRTKEKNSLSTPKPGG

SEQ ID NO: 885773 - protein, 394 aa, Homo sapiens
LLLQLEGRESVGAGQSVAEGREVNAPAKVLLTWVNCSSVRWATRVQDIFTAGKLLALALIIIMGIVQICKGEYFWLEPKNAFENFQEPDIGLVALAFLQGSFAYGGWNFLNYVTEELVDPYKNLPRAIFISIPLVTFVYVFANVAYVTAMSPQELLASNAVAVTFGEKLLGVMAWIMPISVALSTFGGVNGSLFTSSRLFFAGAREGHLPSVLAMIHVKRCTPIPALLFTCISTLLMLVTSDMYTLINYVGFINYLFYGVTVAGQIVLRWKKPDIPRPIKINLLFPIIYLLFWAFLLVFSLWSEPVVCGIGLAIMLTGVPVYFLGVYWQHKPKCFSDFIELLTLVSQKMCVVVYPEVERGSGTEEANEDMEEQQQPMYQPTPTKDKDVAGQPQP

SEQ ID NO: 885774 - protein, 535 aa, Homo sapiens; identical to SEQ ID NO: 885771

SEQ ID NO: 885775 - protein, 535 aa, Homo sapiens; identical to SEQ ID NO: 885771

SEQ ID NO: 885776 - protein, 512 aa, Homo sapiens
MEEGARHRNNTEKKHPGGGESDASPEAGSGGGGVALKKEIGLVSACGIIVGNIIGSGIFVSPKGVLENAGSVGLALIVWIVTGFITVVGALCYAELGVTIPKSGGDYSYVKDIFGGLAGFLRLWIAVLVIYPTNQAVIALTFSNYVLQPLFPTCFPPESGLRLLAAICLLLLTWVNCSSVRWATRVQDIFTAGKLLALALIIIMGIVQICKGEYFWLEPKNAFENFQEPDIGLVALAFLQGSFAYGGWNFLNYVTEELVDPYKNLPRAIFISIPLVTFVYVFANVAYVTAMSPQELLASNAVAVTFGEKLLGVMAWIMPISVALSTFGGVNGSLFTSSRLFFAGAREGHLPSVLAMIHVKRCTPIPALLFTCISTLLMLVTSDMYTLINYVGFINYLFYGVTVAGQIVLRWKKPDIPRPIKINLLFPIIYLLFWAFLLVFSLWSEPVVCGIGLAIMLTGVPVYFLGVYWQHKPKCFSDFIGELLEALAGFRASWAGMQWSVMGLGSHQGQEI

SEQ ID NO: 885777 - protein, 289 aa, Homo sapiens
MEEGARHRNNTEKKHPGGGESDASPEAGSGGGGVALKKEIGLVSACGIIVGNIIGSGIFVSPKGVLENAGSVGLALIVWIVTGFITVVGALCYAELGVTIPKSGGDYSYVKDIFGGLAGFLRLWIAVLVIYPTNQAVIALTFSNYVLQPLFPTCFPPESGLRLLAAICLLLLTWVNCSSVRWATRVQDIFTAGKLLALALIIIMGIVQICKGEYFWLEPKNAFENFQEPDIGLVALAFLQGSFAYGGWNFLNYVTEELVDPYKAANPGEPEDVCGRVPRGGAGLRDRGG

SEQ ID NO: 885778 - protein, 119 aa, Homo sapiens
MEEGARHRNNTEKKHPGGGESDASPEAGSGGGGVALKKEIGLVSACGIIVGNIIGSGIFVSPKGVLENAGSVGLALIVWIVTGFITVVGALCYAELGVTIPKSGGDYSYVKDIFGGLAG

SEQ ID NO: 885779 - protein, 547 aa, Homo sapiens
MEEGARHRNNTEKKHPGGGESDASPEAGSGGGGVALKKEIGLVSACGIIVGNIIGSGIFVSPKGVLENAGSVGLALIVWIVTGFITVVGALCYAELGVTIPKSGGDYSYVKDIFGGLAGFLRLWIAVLVIYPTNQAVIALTFSNYVLQPLFPTCFPPESGLRLLAAICLLLLTWVNCSSVRWATRVQDIFTAGKLLALALIIIMGIVQICKGEYFWLEPKNAFENFQEPDIGLVALAFLQGSFAYGGWNFLNYVTEELVDPYKNLPRAIFISIPLVTFVYVFANVAYVTAMSPQELLASNAVAVTFGEKLLGVMAWIMPISVALSTFGGVNGSLFTSSRLFFAGAREGHLPSVLAMIHVKRCTPIPALLFTCISTLLMLVTSDMYTLINYVGFINYLFYGVTVAGQIVLRWKKPDIPRPIKINLLFPIIYLLFWAFLLVFSLWSEPVVCGIGLAIMLTGVPVYFLGVYWQHKPKCFSDFIELLTLVSQKMCVVVYPEVERGSGTEEANEDMEEQQQPMYQPTPTKDKDVAGQPLCFCQAVVGLWCGW

SEQ ID NO: 885780 - protein, 243 aa, Homo sapiens [sequence omitted]

SEQ ID NO: 885781 - protein, 449 aa, Homo sapiens
MEEGARHRNNTEKKHPGGGESDASPEAGSGGGGVALKKEIGLVSACGIIVGNIIGSGIFVSPKGVLENAGSVGLALIVWIVTGFITVVGALCYAELGVTIPKSGGDYSYVKDIFGGLAGFLRLWIAVLVIYPTNQAVIALTFSNYVLQPLFPTCFPPESGLRLLAAICLLLLTWVNCSSVRWATRVQDIFTAGKLLALALIIIMGIVQICKGEYFWLEPKNAFENFQEPDIGLVALAFLQGSFAYGGWNFLNYVTEELVDPYKNLPRAIFISIPLVTFVYVFANVAYVTAMSPQELLASNAVAVTFGEKLLGVMAWIMPISVALSTFGGVNGSLFTSSRLFFAGAREGHLPSVLAMIHVKRCTPIPALLFTCISTLLMLVTSDMYTLINYVGFINYLFYGVTVAGQIVLRWKKPDIPRPIKINRITRSTASPVQPHHPFNRITRSTASR

SEQ ID NO: 885782 - protein, 971 aa, Homo sapiens
KVALVKCRDLHWAMMAHRDQRDVSLSSLRMLIVTDGANPWSVSSCDAFLSLFQSHGLKPEAICPCATSAEAMTVAIRRPGVPGAPLPGRAILSMNGLSYGVIRVNTEDKNSALTVQDVGHVMPGGMMCIVKPDGPPQLCKTDEIGEICVSSRTGGMMYFGLAGVTKNTFEVIPVNSAGSPVGDVPFIRSGLLGFVGPGSLVFVVGKMDGLLMVSGRRHNADDIVATGLAVESIKTVYRGRIAVFSVSVFYDERIVVVAEQRPDASEEDSFQWMSRVLQAIDSIHQVGVYCLALVPANTLPKTPLGGIHISQTKQLFLEGSLHPCNILMCPHTCVTNLPKPRQKQPGVGPASVMVGNLVAGKRIAQAAGRDLGQIEENDLVRKHQFLAEILQWRAQATPDHVLFMLLNAKGTTVCTASCLQLHKRAERIASVLGDKGHLNAGDNVVLLYPPGIELIAAFYGCLYAGCIPVTVRPPHAQNLTATLPTVRMIVDVSKAACILTSQTLMRLLRSREAAAAVDVKTWPTIIDTDDLPRKRLPQLYKPPTPEMLAYLDFSVSTTGMLTGVKMSHSAVNALCRAIKLQCELYSSRQIAICLDPYCGLGFALWCLCSVYSGHQSVLIPPMELENNLFLWLSTVNQYKIRDTFCSYSVMELCTKGLGNQVEVLKTRGINLSCVRTCVVVAEERPRVALQQSFSKLFKDIGLSPRAVSTTFGSRVNVAICLQGTSGPDPTTVYVDLKSLRHDRVRLVERGAPQSLLLSESGKILPGVKVVIVNPETKGPVGDSHLGEIWVNSPHTASGYYTIYDSETLQADHFNTRLSFGDAAQTLWARTGYLGFVRRTELTAATGERHDALYVVGALDETLELRGLRYHPIDIETSVSRIHRSIAECAVFTWTNLLVVVVELCGSEQEALDLVPLVTNVVLEEHYLIVGVVVVVDPGVIPINSRGEKQRMHLRDSFLADQLDPIYVAYNM

SEQ ID NO: 885783 - protein, 971 aa, Homo sapiens; identical to SEQ ID NO: 885782

SEQ ID NO: 885784 - protein, 846 aa, Homo sapiens
MMCIVKPDGPPQLCKTDEIGEICVSSRTGGMMYFGLAGVTKNTFEVIPVNSAGSPVGDVPFIRSGLLGFVGPGSLVFVVGKMDGLLMVSGRRHNADDIVATGLAVESIKTVYRGRIAVFSVSVFYDERIVVVAEQRPDASEEDSFQWMSRVLQAIDSIHQVGVYCLALVPANTLPKTPLGGIHISQTKQLFLEGSLHPCNILMCPHTCVTNLPKPRQKQPGVGPASVMVGNLVAGKRIAQAAGRDLGQIEENDLVRKHQFLAEILQWRAQATPDHVLFMLLNAKGTTVCTASCLQLHKRAERIASVLGDKGHLNAGDNVVLLYPPGIELIAAFYGCLYAGCIPVTVRPPHAQNLTATLPTVRMIVDVSKAACILTSQTLMRLLRSREAAAAVDVKTWPTIIDTDDLPRKRLPQLYKPPTPEMLAYLDFSVSTTGMLTGVKMSHSAVNALCRAIKLQCELYSSRQIAICLDPYCGLGFALWCLCSVYSGHQSVLIPPMELENNLFLWLSTVNQYKIRDTFCSYSVMELCTKGLGNQVEVLKTRGINLSCVRTCVVVAEERPRVALQQSFSKLFKDIGLSPRAVSTTFGSRVNVAICLQGTSGPDPTTVYVDLKSLRHDRVRLVERGAPQSLLLSESGKILPGVKVVIVNPETKGPVGDSHLGEIWVNSPHTASGYYTIYDSETLQADHFNTRLSFGDAAQTLWARTGYLGFVRRTELTAATGERHDALYVVGALDETLELRGLRYHPIDIETSVSRIHRSIAECAVFTWTNLLVVVVELCGSEQEALDLVPLVTNVVLEEHYLIVGVVVVVDPGVIPINSRGEKQRMHLRDSFLADQLDPIYVAYNM

SEQ ID NO: 885785 - protein, 971 aa, Homo sapiens; identical to SEQ ID NO: 885782

SEQ ID NO: 885786 - protein, 971 aa, Homo sapiens; identical to SEQ ID NO: 885782

SEQ ID NO: 885787 - protein, 605 aa, Homo sapiens
KVALVKCRDLHWAMMAHRDQRDVSLSSLRMLIVTDGANPWSVSSCDAFLSLFQSHGLKPEAICPCATSAEAMTVAIRRPGVPGAPLPGRAILSMNGLSYGVIRVNTEDKNSALTVQDVGHVMPGGMMCIVKPDGPPQLCKTDEIGEICVSSRTGGMMYFGLAGVTKNTFEVIPVNSAGSPVGDVPFIRSGLLGFVGPGSLVFVVGKMDGLLMVSGRRHNADDIVATGLAVESIKTVYRGRIAVFSVSVFYDERIVVVAEQRPDASEEDSFQWMSRVLQAIDSIHQVGVYCLALVPANTLPKTPLGGIHISQTKQLFLEGSLHPCNILMCPHTCVTNLPKPRQKQPGVGPASVMVGNLVAGKRIAQAAGRDLGQIEENDLVRKHQFLAEILQWRAQATPDHVLFMLLNAKGTTVCTASCLQLHKRAERIASVLGDKGHLNAGDNVVLLYPPGIELIAAFYGCLYAGCIPVTVRPPHAQNLTATLPTVRMIVDVSKAACILTSQTLMRLLRSREAAAAVDVKTWPTIIDTDDLPRKRLPQLYKPPTPEMLAYLDFSVSTTGMLTGVKVRCMLEKCHICQKIEMTTAPETIDAEAKWLYQRPVGRVKI

SEQ ID NO: 885788 - protein, 118 aa, Homo sapiens [sequence omitted]

SEQ ID NO: 885789 - protein, 113 aa, Homo sapiens
ASVNLLLAILFNHILSGKCTFQVVSRVHLLSSWDYRCTPPHLANCFVETAFRHVAQAGLELLDSGSPPASTSQSARITGVSHHTQSHSFLFILGYTIGFKPVITSHLNYCSLS

SEQ ID NO: 885790 - protein, 900 aa, Homo sapiens
MTVAIRRPGVPGAPLPGRAILSMNGLSYGVIRVNTEDKNSALTVQDVGHVMPGGMMCIVKPDGPPQLCKTDEIGEICVSSRTGGMMYFGLAGVTKNTFEVIPVNSAGSPVGDVPFIRSGLLGFVGPGSLVFVVGKMDGLLMVSGRRHNADDIVATGLAVESIKTVYRGRIAVFSVSVFYDERIVVVAEQRPDASEEDSFQWMSRVLQAIDSIHQVGVYCLALVPANTLPKTPLGGIHISQTKQLFLEGSLHPCNILMCPHTCVTNLPKPRQKQPGVGPASVMVGNLVAGKRIAQAAGRDLGQIEENDLVRKHQFLAEILQWRAQATPDHVLFMLLNAKGTTVCTASCLQLHKRAERIASVLGDKGHLNAGDNVVLLYPPGIELIAAFYGCLYAGCIPVTVRPPHAQNLTATLPTVRMIVDVSKAACILTSQTLMRLLRSREAAAAVDVKTWPTIIDTDDLPRKRLPQLYKPPTPEMLAYLDFSVSTTGMLTGVKMSHSAVNALCRAIKLQCELYSSRQIAICLDPYCGLGFALWCLCSVYSGHQSVLIPPMELENNLFLWLSTVNQYKIRDTFCSYSVMELCTKGLGNQVEVLKTRGINLSCVRTCVVVAEERPRVALQQSFSKLFKDIGLSPRAVSTTFGSRVNVAICLQGTSGPDPTTVYVDLKSLRHDRVRLVERGAPQSLLLSESGKILPGVKVVIVNPETKGPVGDSHLGEIWVNSPHTASGYYTIYDSETLQADHFNTRLSFGDAAQTLWARTGYLGFVRRTELTAATGERHDALYVVGALDETLELRGLRYHPIDIETSVSRIHRSIAECAVFTWTNLLVVVVELCGSEQEALDLVPLVTNVVLEEHYLIVGVVVVVDPGVIPINSRGEKQRMHLRDSFLADQLDPIYVAYNM

SEQ ID NO: 885791 - protein, 971 aa, Homo sapiens; identical to SEQ ID NO: 885782

SEQ ID NO: 885792 - protein, 971 aa, Homo sapiens; identical to SEQ ID NO: 885782

SEQ ID NO: 885793 - protein, 109 aa, Homo sapiens
MAAPGERGRFHGGNLFFLPGGARSEMMDDLATDARGRGAGRRDAAASASTPAQAPTSDSPVAEDASRRRPCRACVDFKTWMRTQQKAVQEPPRHPHPGMLHTVAVPPAQ

SEQ ID NO: 885794 - protein, 205 aa, Homo sapiens
MAAPGERGRFHGGNLFFLPGGARSEMMDDLATDARGRGAGRRDAAASASTPAQAPTSDSPVAEDASRRRPCRACVDFKTWMRTQQKRDTKFREDCPPDREELGRHSWAVLHTLAAYYPDLPTPEQQQDMAQFIHLFSKFYPCEECAEDLRKRLCRNHPDTRTRACFTQWLCHLHNEVNRKLGKPDFDCSKVDERWRDGWKDGSCD

SEQ ID NO: 885795 - protein, 201 aa, Homo sapiens
QALPIHHNLGYNLQTHIGWYYLPHNDVHFVLVEVCGLAGAAASASTPAQAPTSDSPVAEDASRRRPCRACVDFKTWMRTQQKRDTKFREDCPPDREELGRHSWAVLHTLAAYYPDLPTPEQQQDMAQFIHLFSKFYPCEECAEDLRKRLCRNHPDTRTRACFTQWLCHLHNEVNRKLGKPDFDCSKVDERWRDGWKDGSCD

SEQ ID NO: 885796 - protein, 205 aa, Homo sapiens; identical to SEQ ID NO: 885794

SEQ ID NO: 885797 - protein, 206 aa, Homo sapiens
PRAGLEADLEAHLEAELTRQALRGQHGGARRAGPLPRREPLLPAGGRALRDDGRPGDRRAGPGRGAERRGRLGLDASPGADLRFSCRRGRLPEAAVPGLRRLQDVDADAAEGAVPCPISPSPAQPLSPPPPRYPGRASQGCLSLNLAPRVGPALQPSSARGLDRLQDFGRSPVGHRLGRTVGSFGRLCSENELTLGRPASAAGHQV

SEQ ID NO: 885798 - protein, 136 aa, Homo sapiens
MESEETAGSRRVGQRWRRLSAARWGVTGTQPLGLPSQSSPATVCPVVIKLQGPLSSRSLSLSLGAGPPWHGRLRPPWRELLCPHQIGPVRLLASVEAAQRGQVAQIREGRWGAARRGGVPSSPRHSALLSGLSRGL

SEQ ID NO: 885799 - protein, 192 aa, Homo sapiens
MLLSVVLVLFRTGAAPVLVVACPGYNLFFLPGGARSEMMDDLATDARGRGAGRRDAAASASTPAQAPTSDSPVAEDASRRRPCRACVDFKTWMRTQQKTLAAYYPDLPTPEQQQDMAQFIHLFSKFYPCEECAEDLRKRLCRNHPDTRTRACFTQWLCHLHNEVNRKLGKPDFDCSKVDERWRDGWKDGSCD

SEQ ID NO: 885800 - protein, 217 aa, Homo sapiens
MLLSVVLVLFRTGAAPVLVVACPGYNLFFLPGGARSEMMDDLATDARGRGAGRRDAAASASTPAQAPTSDSPVAEDASRRRPCRACVDFKTWMRTQQKRDTKFREDCPPDREELGRHSWAVLHTLAAYYPDLPTPEQQQDMAQFIHLFSKFYPCEECAEDLRKRLCRNHPDTRTRACFTQWLCHLHNEVNRKLGKPDFDCSKVDERWRDGWKDGSCD

SEQ ID NO: 885801 - protein, 205 aa, Homo sapiens; identical to SEQ ID NO: 885794

SEQ ID NO: 885802 - protein, 320 aa, Homo sapiens
PRAGLEADLEAHLEAELTRQALRGQHGGARRAGPLPRREPLLPAGGRALRDDGRPGDRRAGPGRGAERRGRLGLDASPGADLRFSCRRGRLPEAAVPGLRRLQDVDADAAEGAVPCPISPSPAQPLSPPPPRYPGRASQGCLSLNLAPRVGPALQPSSRVGWIVCRTLAGVQWATGWAVQWGALGAFVRRMNSLSVGLLPQRDTKFREDCPPDREELGRHSWAVLHTLAAYYPDLPTPEQQQDMAQFIHLFSKFYPCEECAEDLRKRLCRNHPDTRTRACFTQWLCHLHNEVNRKLGKPDFDCSKVDERWRDGWKDGSCD

SEQ ID NO: 885803 - protein, 206 aa, Homo sapiens; identical to SEQ ID NO: 885797

SEQ ID NO: 885804 - protein, 931 aa, Homo sapiens
MLLFFTLGLLIHFVFFASIFDIYFTSPLVHGMTPQFTPLPPPARRLVLFVADGLRADALYELDENGNSRAPFIRNIIMHEGSWGISHTRVPTESRPGHVALIAGFYEDVSAVAKGWKENPVEFDSLFNESKYTWSWGSPDILPMFAKGASGDHVYTYSYDAKREDFGAQDATKLDTWVFDNVKDFFHHARNNQSLFSKINEEKIVFFLHLLGIDTNGHAHRPSSRDYKHNIKKVDDGVKEIVSMFNHFYGNDGKTTFIFTSDHGMTDWGSHGAGHPSETLTPLVTWGAGIKYPQRVSAQQFDDAFLKEWRLENWKRLDVNQADIAPLMTSLIGVPFPLNSVGILPVDYLNNTDLFKAESMFTNAVQILEQFKVKMTQKKEVTLPFLFTPFKLLSDSKQFNILRKARSYIKHRKFDEVVSLCKELIHLALKGLSYYHTYDRFFLGVNVVIGFVGWISYASLLIIKSHSNLIKGVSKEVKKPSHLLPCSFVAIGILVAFFLLIQACPWTYYVYGLLPLPIWYAVLREFQVIQDLVVSVLTYPLSHFVGYLLAFTLGIEVLVLSFFYRYMLTAGLTAFAAWPFLTRLWTRAKMTSLSWTFFSLLLAVFPLMPVVGRKPDISLVMGAGLLVLLLSLCVVTSLMKRKDSFIKEELLVHLLQVLSTVLSMYVVYSTQSSLLRKQGLPLMNQIISWATLASSLVVPLLSSPVLFQRLFSILLSLMSTYLLLSTGYEALFPLVLSCLMFVWINIEQETLQQSGVCCKQKLTSIQFSYNTDITQFRQLYLDDIRRAFFLVFFLVTAFFGTGNIASINSFDLASVYCFLTVFSPFMMGALMMWKILIPFVLVMCAFEAVQLTTQLSSKSLFLIVLVISDIMALHFFFLVKDYGSWLDIGTSISHYVIVMSMTIFLVFLNGLAQLLTTKKLRLCGKPKSHFM

SEQ ID NO: 885805 - protein, 931 aa, Homo sapiens; identical to SEQ ID NO: 885804

SEQ ID NO: 885806 - protein, 931 aa, Homo sapiens; identical to SEQ ID NO: 885804

SEQ ID NO: 885807 - protein, 271 aa, Homo sapiens
MLTAGLTAFAAWPFLTRLWTRAKMTSLSWTFFSLLLAVFPLMPVVGRKPDISLVMGAGLLVLLLSLCVVTSLMKRKDSFIKEELLVHLLQVLSTVLSMYVVYSTQSSLLRKQGLPLMNQIISWATLASSLVVPLLSSPVLFQRLFSILLSLMSTYLLLSTGYEALFPLVLSCLMFVWINIEQETLQQSGVCCKQKLTSIQFSYNTDITQFRQLYLDDIRRAFFLVFFLVTAFFGTGNIASINSFDLASVYCFLTVFSPFMMGALMMWKQFS

SEQ ID NO: 885808 - protein, 197 aa, Homo sapiens
NLPNSHKNRPESKSGRLQRLSYFPPLQLTSIQFSYNTDITQFRQLYLDDIRRAFFLVFFLVTAFFGTGNIASINSFDLASVYCFLTVFSPFMMGALMMWKILIPFVLVMCAFEAVQLTTQLSSKSLFLIVLVISDIMALHFFFLVKDYGSWLDIGTSISHYVIVMSMTIFLVFLNGLAQLLTTKKLRLCGKPKSHFM

SEQ ID NO: 885809 - protein, 395 aa, Homo sapiens
MLLFFTLGLLIHFVFFASIFDIYFTSPLVHGMTPQFTPLPPPARRLVLFVADGLRADALYELDENGNSRAPFIRNIIMHEGSWGISHTRVPTESRPGHVALIAGFYEDVSAVAKGWKENPVEFDSLFNESKYTWSWGSPDILPMFAKGASGDHVYTYSYDAKREDFGAQDATKLDTWVFDNVKDFFHHARNNQSLFSKINEEKIVFFLHLLGIDTNGHAHRPSSRDYKHNIKKVDDGVKEIVSMFNHFYGNDGKTTFIFTSDHGMTDWGSHGAGHPSETLTPLVTWGAGIKYPQRVSAQQFDDAFLKEWRLENWKRLDVNQADIAPLMTSLIGVPFPLNSVGILPVDYLNNTDLFKAESMFTNAVQILEQFKVKMTQKKEVTLPFLFTPFNCAGS

SEQ ID NO: 885810 - protein, 931 aa, Homo sapiens; identical to SEQ ID NO: 885804

SEQ ID NO: 885811 - protein, 931 aa, Homo sapiens; identical to SEQ ID NO: 885804

SEQ ID NO: 885812 - protein, 931 aa, Homo sapiens; identical to SEQ ID NO: 885804

SEQ ID NO: 885813 - protein, 903 aa, Homo sapiens
MLLFFTLGLLIHFVFFASIFDIYFTSPLVHGMTPQFTPLPPPARRLVLFVADGLRADALYELDENGNSRAPFIRNIIMHEGSWGISHTRVPTESRPGHVALIAGFYEDVSAVAKGWKENPVEFDSLFNESKYTWSWGSPDILPMFAKGASGDHVYTYSYDAKREDFGAQDATKLDTWVFDNVKEVDTNGHAHRPSSRDYKHNIKKVDDGVKEIVSMFNHFYGNDGKTTFIFTSDHGMTDWGSHGAGHPSETLTPLVTWGAGIKYPQRVSAQQFDDAFLKEWRLENWKRLDVNQADIAPLMTSLIGVPFPLNSVGILPVDYLNNTDLFKAESMFTNAVQILEQFKVKMTQKKEVTLPFLFTPFKLLSDSKQFNILRKARSYIKHRKFDEVVSLCKELIHLALKGLSYYHTYDRFFLGVNVVIGFVGWISYASLLIIKSHSNLIKGVSKEVKKPSHLLPCSFVAIGILVAFFLLIQACPWTYYVYGLLPLPIWYAVLREFQVIQDLVVSVLTYPLSHFVGYLLAFTLGIEVLVLSFFYRYMLTAGLTAFAAWPFLTRLWTRAKMTSLSWTFFSLLLAVFPLMPVVGRKPDISLVMGAGLLVLLLSLCVVTSLMKRKDSFIKEELLVHLLQVLSTVLSMYVVYSTQSSLLRKQGLPLMNQIISWATLASSLVVPLLSSPVLFQRLFSILLSLMSTYLLLSTGYEALFPLVLSCLMFVWINIEQETLQQSGVCCKQKLTSIQFSYNTDITQFRQLYLDDIRRAFFLVFFLVTAFFGTGNIASINSFDLASVYCFLTVFSPFMMGALMMWKILIPFVLVMCAFEAVQLTTQLSSKSLFLIVLVISDIMALHFFFLVKDYGSWLDIGTSISHYVIVMSMTIFLVFLNGLAQLLTTKKLRLCGKPKSHFM

SEQ ID NO: 885814 - protein, 490 aa, Homo sapiens
MLLFFTLGLLIHFVFFASIFDIYFTSPLVHGMTPQFTPLPPPARRLVLFVADGLRADALYELDENGNSRAPFIRNIIMHEGSWGISHTRVPTESRPGHVALIAGFYEDVSAVAKGWKENPVEFDSLFNESKYTWSWGSPDILPMFAKGASGDHVYTYSYDAKREDFGAQDATKLDTWVFDNVKDFFHHARNNQSLFSKINEEKIVFFLHLLGIDTNGHAHRPSSRDYKHNIKKVDDGVKEIVSMFNHFYGNDGKTTFIFTSDHGMTDWGSHGAGHPSETLTPLVTWGAGIKYPQRVSAQQFDDAFLKEWRLENWKRLDVNQADIAPLMTSLIGVPFPLNSVGILPVDYLNNTDLFKAESMFTNAVQILEQFKVKMTQKKEVTLPFLFTPFKLLSDSKQFNILRKARSYIKHRKFDEVVSLCKELIHLALKGLSYYHTYDRFFLGVNVVIGFVGWISYASLLIIKSHSNLIKGVSKEVKVRLENVRIQMMV

SEQ ID NO: 885815 - protein, 198 aa, Homo sapiens
MLLFFTLGLLIHFVFFASIFDIYFTSPLVHGMTPQFTPLPPPARRLVLFVADGLRADALYELDENGNSRAPFIRNIIMHEGSWGISHTRVPTESRPGHVALIAGFYEDVSAVAKGWKENPVEFDSLFNESKYTWSWGSPDILPMFAKGASGDHVYTYSYDAKREDFGAQDATKLDTWVFDNVKVCAIEWLIYKKHIFT

SEQ ID NO: 885816 - protein, 335 aa, Homo sapiens
NRLGRGLVLLGRGRFLRGLLTLLLPPPPLYTRHRMLGPESVPPPKRSRSKLMAPPRIGTHNGTFHCDEALACALLRLLPEYRDAEIVRTRDPEKLASCDIVVDVGGEYDPRRHRYDHHQRSFTETMSSLSPGKPWQTKLSSAGLIYLHFGHKLLAQLLGTSEEDSMVGTLYDKAGFKRAMDLVQEEFLQRLDFYQHSWLPARALVEEALAQRFQVDPSGEIVELAKGACPWKEHLYHLESGLSPPVAIFFVIYTDQAGQWRIQCVPKEPHSFQSRLPLPEPWRGLRDEALDQVSGIPGCIFVHASGFIGGHRTREGALSMARATLAQRSYLPQIS

SEQ ID NO: 885817 - protein, 388 aa, Homo sapiens
GSALLPPCRELLMGHRFLRGLLTLLLPPPPLYTRHRMLGPESVPPPKRSRSKLMAPPRIGTHNGTFHCDEALACALLRLLPEYRDAEIVRTRDPEKLASCDIVVDVGGEYDPRRHRYDHHQRSFTETMSSLSPGKPWQTKLSSAGLIYLHFGHKLLAQLLGTSEEDSMVGTLYDKMYENFVEEVDAVDNGISQWAEGEPRYALTTTLSARVARLNPTWNHPDQDTEAGFKRAMDLVQEEFLQRLDFYQHSWLPARALVEEALAQRFQVDPSGEIVELAKGACPWKEHLYHLESGLSPPVAIFFVIYTDQAGQWRIQCVPKEPHSFQSRLPLPEPWRGLRDEALDQVSGIPGCIFVHASGFIGGHRTREGALSMARATLAQRSYLPQIS

SEQ ID NO: 885818 - protein, 261 aa, Homo sapiens
MSSLSPGKPWQTKLSSAGLIYLHFGHKLLAQLLGTSEEDSMVGTLYDKMYENFVEEVDAVDNGISQWAEGEPRYALTTTLSARVARLNPTWNHPDQDTEAGFKRAMDLVQEEFLQRLDFYQHSWLPARALVEEALAQRFQVDPSGEIVELAKGACPWKEHLYHLESGLSPPVAIFFVIYTDQAGQWRIQCVPKEPHSFQSRLPLPEPWRGLRDEALDQVSGIPGCIFVHASGFIGGHRTREGALSMARATLAQRSYLPQIS

SEQ ID NO: 885819 - protein, 424 aa, Homo sapiens
GSALLPPCRELLMGHRFLRGLLTLLLPPPPLYTRHRMLGPESVPPPKRSRSKLMAPPRIGTHNGTFHCDEALACALLRLLPEYRDAEIVRTRDPEKLASCDIVVDVGGEYDPRRHRYDHHQRSFTETMSSLSPGKPWQTKLSSAGLIYLHFGHKLLAQLLGTSEEDSMVGTLYDKMYENFVEEVDAVDNGISQWAEGEPRYALTTTLSARVARLNPTWNHPDQDTEAGFKRAMDLVQEEFLQRLDFYQHSWLPARALVEEALAQRFQVDPSGEIVELAKGACPWKEHLYHLESGLSPPVAIFFVIYTDQAGQWRIQCVPKEPHSFQSRLPLPEPWRGLRDEALDQVSGIPGCIFVHASGFIGGHRTREGALSMAQLLGTSEEDSMVGTLYDKMYENFVEEVDAVDNGISQWAEGEPRYALTTTP

SEQ ID NO: 885820 - protein, 328 aa, Homo sapiens
GSALLPPCRELLMGHRFLRGLLTLLLPPPPLYTRHRMLGPESVPPPKRSRSKLMAPPRIGTHNGTFHCDEALACALLRLLPEYRDAEIVRTRDPEKLASCDIVVDVGGEYDPRRHRYDHHQRSFTETMSSLSPGKPWQTKLSSAGLIYLHFGHKLLAQLLGTSEEDSMVGTLYDKMYENFVEEVDAVDNGISQWAEGEPRYALTTTLSARVARLNPTWNHPDQDTEAGFKRAMDLVQEEFLQRLDFYQHSWLPARALVEEALAQRFQVDPSGEIVELAKGACPWKEHLYHLESGLSPPVAIFFVIYTDQAGQWRIQCVPKEPHSFQSR

SEQ ID NO: 885821 - protein, 100 aa, Homo sapiens
RVGAPASLQGAAYGTPLPARPLNAAAAAATPVYPAPHARSRVRPAPKTIPQQTHGTAPNRDAQWHLPLRRGTGMRTASPPAGVPGCRDCADPGSRKTRFL

SEQ ID NO: 885822 - protein, 297 aa, Homo sapiens
GSALLPPCRELLMGHRFLRGLLTLLLPPPPLYTRHRMLGPESVPPPKRSRSKLMAPPRIGTHNGTFHCDEALACALLRLLPEYRDAEIVRTRDPEKLASCDIVVDVGGEYDPRRHRYDHHQRSFTETMSSLSPGKPWQTKLSSAGLIYLHFGHKLLAQLLGTSEEDSMVGTLYDKMYENFVEEVDAVDNGISQWAEGEPRYALTTTLSARVARLNPTWNHPDQDTEAGFKRAMDLVQEEFLQRLDFYQHSWLPARALVEEALAQRFQVDPSGEIVELAASSSMQAASLAVTAPERVP

SEQ ID NO: 885823 - protein, 192 aa, Homo sapiens
GSALLPPCRELLMGHRFLRGLLTLLLPPPPLYTRHRMLGPESVPPPKRSRSKLMAPPRIGTHNGTFHCDEALACALLRLLPEYRDAEIVRTRDPEKLASCDIVVDVGGEYDPRRHRYDHHQRSFTETMSSLSPGKPWQTKLSSAGLIYLHFGHKLLAQLLGTSEEDSMVGTLYDKMYENFVKREQTRILRVT

SEQ ID NO: 885824 - protein, 388 aa, Homo sapiens; identical to SEQ ID NO: 885817

SEQ ID NO: 885825 - protein, 127 aa, Homo sapiens
MLSLFQVDPSGEIVELAKGACPWKEHLYHLESGLSPPVAIFFVIYTDQAGQWRIQCVPKEPHSFQSRLPLPEPWRGLRDEALDQVSGIPGCIFVHASGFIGGHRTREGALSMARATLAQRSYLPQIS

SEQ ID NO: 885826 - protein, 364 aa, Homo sapiens
VTLGLRACMPPGWMAFRQQGHSDSARQPKHPSYPSCLPEVQHYIPYPATPGSPFTPVYLADAEIVRTRDPEKLASCDIVVDVGGEYDPRRHRYDHHQRSFTETMSSLSPGKPWQTKLSSAGLIYLHFGHKLLAQLLGTSEEDSMVGTLYDKMYENFVEEVDAVDNGISQWAEGEPRYALTTTLSARVARLNPTWNHPDQDTEAGFKRAMDLVQEEFLQRLDFYQHSWLPARALVEEALAQRFQVDPSGEIVELAKGACPWKEHLYHLESGLSPPVAIFFVIYTDQAGQWRIQCVPKEPHSFQSRLPLPEPWRGLRDEALDQVSGIPGCIFVHASGFIGGHRTREGALSMARATLAQRSYLPQIS

SEQ ID NO: 885827 - protein, 311 aa, Homo sapiens
PPCSLFTALGRGRGLAASCEPVDRQLLRIYDQWDCCQDGSATHQGSFTETMSSLSPGKPWQTKLSSAGLIYLHFGHKLLAQLLGTSEEDSMVGTLYDKMYENFVEEVDAVDNGISQWAEGEPRYALTTTLSARVARLNPTWNHPDQDTEAGFKRAMDLVQEEFLQRLDFYQHSWLPARALVEEALAQRFQVDPSGEIVELAKGACPWKEHLYHLESGLSPPVAIFFVIYTDQAGQWRIQCVPKEPHSFQSRLPLPEPWRGLRDEALDQVSGIPGCIFVHASGFIGGHRTREGALSMARATLAQRSYLPQIS

SEQ ID NO: 885828 - protein, 359 aa, Homo sapiens
GSALLPPCRELLMGHRFLRGLLTLLLPPPPLYTRHRMLGPESVPPPKRSRSKLMAPPRIGTHNGTFHCDEALACALLRLLPEYRDAEIVRTRDPEKLASCDIVVDVGGEYDPRRHRYDHHQRSFTETMSSLSPGKPWQTKLSSAGLIYLHFGHKLLAQLLGTSEEDSMVGTLYDKMYENFVEEVDAVDNGISQWAEGEPRYALTTTLSARVARLNPTWNHPDQDTEAGFKRAMDLVQEEFLQRLDFYQHSWLPARALVEEALAQRFQVDPSGEIVELAKGACPWKEHLYHLESGLSPPVAIFFVIYTDQAGQWRIQCCPCQSHGGVFGTRPWTRSVGSLAASSSMQAASLAVTAPERVP

SEQ ID NO: 885829 - protein, 100 aa, Homo sapiens; identical to SEQ ID NO: 885821

SEQ ID NO: 885830 - protein, 178 aa, Homo sapiens
GSALLPPCRELLMGHRFLRGLLTLLLPPPPLYTRHRMLGPESVPPPKRSRSKLMAPPRIGTHNGTFHCDEALACALLRLLPEYRDAEIVRTRDPEKLASCDIVVDVGGEYDPRRHRYDHHQRSFSRDHEAPCPLGEARGTNQRLTQLAGNSILNPWPPFPGSHQRLGLGAPRWPGGPP

SEQ ID NO: 885831 - protein, 168 aa, Homo sapiens
SSVELITPTVELRWPEMPAHSLVMSSPALPAFLLCSTLLVIKMYVVAIITGQVRLRKKAFANPEDALRHGGPQYCRSDPDVERCLRAHRNDMETIYPFLFLGFVYSFLGPNPFVAWMHFLVFLVGRVAHTVAYLGKLRAPIRSVTYTLAQLPCASMALQILWEAARHL

SEQ ID NO: 885832 - protein, 168 aa, Homo sapiens; identical to SEQ ID NO: 885831

SEQ ID NO: 885833 - protein, 168 aa, Homo sapiens; identical to SEQ ID NO: 885831

SEQ ID NO: 885834 - protein, 168 aa, Homo sapiens; identical to SEQ ID NO: 885831

SEQ ID NO: 885835 - protein, 209 aa, Homo sapiens
SSVELITPTVELRWPEMPAHSLVMSSPALPAFLLCSTLLVIKMYVVAIITGQVRLRKKSLALLPRLECSGKITAHCSLDLPGSSNPPASALLPSSWDQQAFANPEDALRHGGPQYCRSDPDVERCLRAHRNDMETIYPFLFLGFVYSFLGPNPFVAWMHFLVFLVGRVAHTVAYLGKLRAPIRSVTYTLAQLPCASMALQILWEAARHL

SEQ ID NO: 885836 - protein, 168 aa, Homo sapiens; identical to SEQ ID NO: 885831

SEQ ID NO: 885837 - protein, 139 aa, Homo sapiens [sequence omitted]

SEQ ID NO: 885838 - protein, 934 aa, Homo sapiens
MSSDEKGISPAHKTSTPTHRSASSSTSSQRDSRQSIHILERTASSSTEPSVSRQLLEPEPVPLSKEADSWEIIEGLKIGQTNVQKPDKHEGFMLKKRKWPLKGWHKRFFVLDNGMLKYSKAPLDIQKGKVHGSIDVGLSVMSIKKKARRIDLDTEEHIYHLKVKSQDWFDAWVSKLRHHRLYRQNEIVRSPRDASFHIFPSTSTAESSPAANVSVMDGKMQPNSFPWQSPLPCSNSLPATCTTGQSKVAAWLQDSEEMDRCAEDLAHCQSNLVELSKLLQNLEILQRTQSAPNFTDMQANCVDISKKDKRVTRRWRTKSVSKDTKIQLQVPFSATMSPVRLHSSNPNLCADIEFQTPPSHLTDPLESSTDYTKLQEEFCLIAQKVHSLLKSAFNSIAIEKEKLKQMVSEQDHSKGHSTQMARLRQSLSQALNQNAELRSRLNRIHSESIICDQVVSVNIIPSPDEAGEQIHVSLPLSQQVANESRLSMSESVSEFFDAQEVLLSASSSENEASDDESYISDVSDNISEDNTSVADNISRQILNGELTGGAFRNGRRACLPAPCPDTSNINLWNILRNNIGKDLSKVSMPVELNEPLNTLQHLCEEMEYSELLDKASETDDPYERMVLVAAFAVSGYCSTYFRAGSKPFNPVLGETYECIREDKGFRFFSEQVSHHPPISACHCESKNFVFWQDIRWKNKFWGKSMEILPVGTLNVMLPKYGDYYVWNKVTTCIHNILSGRRWIEHYGEVTIRNTKSSVCICKLTFVKVNYWNSNMNEVQGVVIDQEGKAVYRLFGKWHEGLYCGVAPSAKCIWRPGSMPTNYELYYGFTRFAIELNELDPVLKDLLPPTDARFRPDQRFLEEGNLEAAASEKQRVEELQRSRRRYMEENNLEHIPKFFKKVIDANQREAWVSNDTYWELRKDPGFSKVDSPVLW

SEQ ID NO: 885839 - protein, 898 aa, Homo sapiens
MSSDEKGISPAHKTSTPTHRSASSSTSSQRDSRQSIHILERTASSSTEPSVSRQLLEPEPVPLSKEADSWEIIEGLKIGQTNVQKPDKHEGFMLKKRKWPLKGWHKRFFVLDNGMLKYSKAPLDIQKGKVHGSIDVGLSVMSIKKKARRIDLDTEEHIYHLKVKSQDWFDAWVSKLRHHRLYRQNEIVRSPRDASFHIFPSTSTAESSPAANVSVMDGKMQPNSFPWQSPLPCSNSLPATCTTGQSKVAAWLQDSEEMDRCAEDLAHCQSNLVELSKLLQNLEILQRTQSAPNFTDMQANCVDISKKDKRVTRRWRTKSVSKDTKIQLQVPFSATMSPVRLHSSNPNLCADIEFQTPPSHLTDPLESSTDYTKLQEEFCLIAQKVHSLLKSAFNSIAIEKEKLKQMVSEQDHSKGHSTQMARLRQSLSQAGEQIHVSLPLSQQVANESRLSMSESVSEFFDAQEVLLSASSSENEASDDESYISDVSDNISEDNTSVADNISRQILNGELTGGAFRNGRRACLPAPCPDTSNINLWNILRNNIGKDLSKVSMPVELNEPLNTLQHLCEEMEYSELLDKASETDDPYERMVLVAAFAVSGYCSTYFRAGSKPFNPVLGETYECIREDKGFRFFSEQVSHHPPISACHCESKNFVFWQDIRWKNKFWGKSMEILPVGTLNVMLPKYGDYYVWNKVTTCIHNILSGRRWIEHYGEVTIRNTKSSVCICKLTFVKVNYWNSNMNEVQGVVIDQEGKAVYRLFGKWHEGLYCGVAPSAKCIWRPGSMPTNYELYYGFTRFAIELNELDPVLKDLLPPTDARFRPDQRFLEEGNLEAAASEKQRVEELQRSRRRYMEENNLEHIPKFFKKVIDANQREAWVSNDTYWELRKDPGFSKVDSPVLW

SEQ ID NO: 885840 - protein, 479 aa, Homo sapiens; identical to SEQ ID NO: 739431

SEQ ID NO: 885841 - protein, 479 aa, Homo sapiens; identical to SEQ ID NO: 739431

SEQ ID NO: 885842 - protein, 479 aa, Homo sapiens; identical to SEQ ID NO: 739431

SEQ ID NO: 885843 - protein, 391 aa, Homo sapiens
MERTQSSNMETRLDAMKELAKLSADVTFATEFINMDGIIVLTRLVESGTKLLSHYSEMLAFTLTAFLELMDHGIVSWDMVSITFIKQIAGYVSQPMVDVSILQRSLAILESMVLNSQSLYQKIAEEITVGQLISHLQVSNQEIQTYAIALINALFLKAPEDKRQDMANAFAQKHLRSIILNHVIRGNRPIKTEMAHQLYVLQVLTFNLLEERMMTKMDPNDQAQRDIIFELRRIAFDAESDPSNAPGSGTEKRKAMYTKDYKMLGFTNHINPAMDFTQTPPGMLALDNMLYLAKVHQDTYIRIVLENSSREDKHECPFGRSAIELTKMLCEILQVGELPNEGRNDYHPMFFTHDRAFEELFGICIQLLNKTWKEMRATAEDFNKVSVSGLL

SEQ ID NO: 885844 - protein, 459 aa, Homo sapiens
MDLVFNSGSSELKEHSYTLRWSLPNPEYYTLRYADGPQLYITEQTRSDIKNGTILQLAISPSRAARQLMERTQSSNMETRLDAMKELAKLSADVTFATEFINMDGIIVLTRLVESGTKLLSHYSEMLAFTLTAFLELMDHGIVSWDMVSITFIKQIAGYVSQPMVDVSILQRSLAILESMVLNSQSLYQKIAEEITVGQLISHLQVSNQEIQTYAIALINALFLKAPEDKRQDMANAFAQKHLRSIILNHVIRGNRPIKTEMAHQLYVLQVLTFNLLEERMMTKMDPNDQAQRDIIFELRRIAFDAESDPSNAPGSGTEKRKAMYTKDYKMLGFTNHINPAMDFTQTPPGMLALDNMLYLAKVHQDTYIRIVLENSSREDKHECPFGRSAIELTKMLCEILQVGELPNEGRNDYHPMFFTHDRAFEELFGICIQLLNKTWKEMRATAEDFNKVSVSGLL

SEQ ID NO: 885845 - protein, 374 aa, Homo sapiens
MAHQLYVLQVLTFNLLEERMMTKMDPNDQAQRDIIFELRRIAFDAESDPSNAPGSGTEKRKAMYTKDYKMLGFTNHINPAMDFTQTPPGMLALDNMLYLAKVHQDTYIRIVLENSSREDKHECPFGRSAIELTKMLCEILQVGELPNEGRNDYHPMFFTHDRAFEELFGICIQLLNKTWKEMRATAEDFNKVMQVVREQITRALPSKPNSLDQFKSKLRSLSYSEILRLRQSERMSQDDFQSPPIVELREKIQPEILELIKQQRLNRLCEGSSFRKIGNRRRQERFWYCRLALNHKVLHYGDLDDNPQGEVTFESLQEKIPVADIKAIVTGKDCPHMKEKSALKQNKEVLGIGLLPSCMNPDETFNFIAPNKYE

SEQ ID NO: 885846 - protein, 660 aa, Homo sapiens
MPPPSDIVKVAIEWPGANAQLLEIDQKRPLASIIKEVCDGWSLPNPEYYTLRYADGPQLYITEQTRSDIKNGTILQLAISPSRAARQLMERTQSSNMETRLDAMKELAKLSADVTFATEFINMDGIIVLTRLVESGTKLLSHYSEMLAFTLTAFLELMDHGIVSWDMVSITFIKQIAGYVSQPMVDVSILQRSLAILESMVLNSQSLYQKIAEEITVGQLISHLQVSNQEIQTYAIALINALFLKAPEDKRQDMANAFAQKHLRSIILNHVIRGNRPIKTEMAHQLYVLQVLTFNLLEERMMTKMDPNDQAQRDIIFELRRIAFDAESDPSNAPGSGTEKRKAMYTKDYKMLGFTNHINPAMDFTQTPPGMLALDNMLYLAKVHQDTYIRIVLENSSREDKHECPFGRSAIELTKMLCEILQVGELPNEGRNDYHPMFFTHDRAFEELFGICIQLLNKTWKEMRATAEDFNKVMQVVREQITRALPSKPNSLDQFKSKLRSLSYSEILRLRQSERMSQDDFQSPPIVELREKIQPEILELIKQQRLNRLCEGSSFRKIGNRRRQERFWYCRLALNHKVLHYGDLDDNPQGEVTFESLQEKIPVADIKAIVTGKDCPHMKEKSALKQNKVSREASLSSWPSDTWRVPLVVVFSRCILGIFP

SEQ ID NO: 885847 - protein, 343 aa, Homo sapiens
MHWFQWGKAFPYGRVLGPWLGEVQWFWFQIGHSSIVSMEFCQLENHINPAMDFTQTPPGMLALDNMLYLAKVHQDTYIRIVLENSSREDKHECPFGRSAIELTKMLCEILQVGELPNEGRNDYHPMFFTHDRAFEELFGICIQLLNKTWKEMRATAEDFNKVMQVVREQITRALPSKPNSLDQFKSKLRSLSYSEILRLRQSERMSQDDFQSPPIVELREKIQPEILELIKQQRLNRLCEGSSFRKIGNRRRQERFWYCRLALNHKVLHYGDLDDNPQGEVTFESLQEKIPVADIKAIVTGKDCPHMKEKSALKQNKEVLGIGLLPSCMNPDETFNFIAPNKY

SEQ ID NO: 885848 - protein, 121 aa, Homo sapiens
NHINPAMDFTQTPPGMLALDNMLYLAKVHQDTYIRVKAGELAFSVLVPHLLPSSFISLILPFSSPDRLSWRTVAGKTNMNAPLAAVPLSSPKCSVKSCRLGNYVSLCSSLFFSHSLSSRAQ

SEQ ID NO: 885849 - protein, 479 aa, Homo sapiens; identical to SEQ ID NO: 739431

SEQ ID NO: 885850 - protein, 296 aa, Homo sapiens
MVDVSILQRSLAILESMVLNSQSLYQKIAEEITVGQLISHLQVSNQEIQTYAIALINALFLKAPEDKRQDMANAFAQKHLRSIILNHVIRGNRPIKTEMAHQLYVLQVLTFNLLEERMMTKMDPNDQAQRDIIFELRRIAFDAESDPSNAPGSGTEKRKAMYTKDYKMLGFTNHINPAMDFTQTPPGMLALDNMLYLAKVHQDTYIRIVLENSSREDKHECPFGRSAIELTKMLCEILQVGELPNEGRNDYHPMFFTHDRAFEELFGICIQLLNKTWKEMRATAEDFNKVSVSGLL

SEQ ID NO: 885851 - protein, 391 aa, Homo sapiens; identical to SEQ ID NO: 885843

SEQ ID NO: 885852 - protein, 655 aa, Homo sapiens
MPPPSDIVKVAIEWPGANAQLLEIDQKRPLASIIKEVCDGWSLPNPEYYTLRYADGPQLYITEQTRSDIKNGTILQLAISPSRAARQLMERTQSSNMETRLDAMKELAKLSADVTFATEFINMDGIIVLTRLVESGTKLLSHYSEMLAFTLTAFLELMDHGIVSWDMVSITFIKQIAGYVSQPMVDVSILQRSLAILESMVLNSQSLYQKIAEEITVGQLISHLQVSNQEIQTYAIALINALFLKAPEDKRQDMANAFAQKHLRSIILNHVIRGNRPIKTEMAHQLYVLQVLTFNLLEERMMTKMDPNDQAQRDIIFELRRIAFDAESDPSNAPGSGTEKRKAMYTKDYKMLGFTNHINPAMDFTQTPPGMLALDNMLYLAKVHQDTYIRIVLENSSREDKHECPFGRSAIELTKMLCEILQVGELPNEGRNDYHPMFFTHDRAFEELFGICIQLLNKTWKEMRATAEDFNKVMQVVREQITRALPSKPNSLDQFKSKLRSLSYSEILRLRQSERMSQDDFQSPPIVELREKIQPEILELIKQQRLNRLCEGSSFRKIGNRRRQERFWYCRLALNHKVLHYGDLDDNPQGEVTFESLQEKIPVADIKAIVTGKDCPHMKEKSALKQNKEVLGIGLLPSCMNPDETFNFIAPNKYE

SEQ ID NO: 885853 - protein, 387 aa, Homo sapiens
MHVIRGNRPIKTEMAHQLYVLQVLTFNLLEERMMTKMDPNDQAQRDIIFELRRIAFDAESDPSNAPGSGTEKRKAMYTKDYKMLGFTNHINPAMDFTQTPPGMLALDNMLYLAKVHQDTYIRIVLENSSREDKHECPFGRSAIELTKMLCEILQVGELPNEGRNDYHPMFFTHDRAFEELFGICIQLLNKTWKEMRATAEDFNKVMQVVREQITRALPSKPNSLDQFKSKLRSLSYSEILRLRQSERMSQDDFQSPPIVELREKIQPEILELIKQQRLNRLCEGSSFRKIGNRRRQERFWYCRLALNHKVLHYGDLDDNPQGEVTFESLQEKIPVADIKAIVTGKDCPHMKEKSALKQNKEVLGIGLLPSCMNPDETFNFIAPNKYE

SEQ ID NO: 885854 - protein, 145 aa, Homo sapiens
MPPPSDIVKVAIEWPGANAQLLEIDQKRPLASIIKEVCDGWSLPNPEYYTLRYADGPQLYITEQTRSDIKNGTILQLAISPSRAARQLMERTQSSNMETRLDAMKELAKLSADVTFATEFINMDGIIVLTRLVESGTKLLSQYLG

SEQ ID NO: 885855 - protein, 71 aa, Homo sapiens
AVSVFLSRRIRAHWERCHHRQTLSKWPLSGQVLTPSSLKSTRYAPEVRSSGSRKGTWGVHGRGHLEGWGPP

SEQ ID NO: 885856 - protein, 105 aa, Homo sapiens
MQITTDWFWHTNNSLIDSTNIYLATPKLCEKTSSASGLDVHRRASVSYPQSSNLLQGADGTYLVPGLLVPGCTPADGEDPVIQHGDPAGCHEGAGQALCRRDFRY

SEQ ID NO: 885857 - protein, 479 aa, Homo sapiens
MAVLGVQLVVTLLTATLMHRLAPHCSFARWLLCNGSLFRYKHPSEEELRALAGKPRPRGRKERWANGLSEEKPLSVPRDAPFQLETCPLTTVDALVLRFFLEYQWFVDFAVYSGGVYLFTEAYYYMLGPAKETNIAVFWCLLTVTFSIKMFLTVTRLYFSAEEGGERSVCLTFAFLFLLLAMLVQVVREETLELGLEPGLASMTQNLEPLLKKQGWDWALPVAKLAIRVGLAVVGSVLGAFLTFPGLRLAQTHRDALTMSEDRPMLQFLLHTSFLSPLFILWLWTKPIARDFLHQPPFGETRFSLLSDSAFDSGRLWLLVVLCLLRLAVTRPHLQAYLCLAKARVEQLRREAGRIEAREIQQRVVRVYCYVTVVSLQYLTPLILTLNCTLLLKTLGGYSWGLGPAPLLSPDPSSASAAPIGSGEDEVQQTAARIAGALGGLLTPLFLRGVLAYLIWWTAACQLLASLFGLYFHQHLAGS

SEQ ID NO: 885858 - protein, 477 aa, Homo sapiens
MAVLGVQLVVTLLTATLMHRLAPHCSFARWLLCNGSLFRYKHPSEEELRALAGKPRPRGRKERWANGLSEEKPLSVPRDAPFQLETCPLTTVDALVLRFFLEYQWFVDFAVYSGGVYLFTEAYYYMLGPAKETNIAVFWCLLTVTFSIKMFLTVTRLYFSAEEGGERSVCLTFAFLFLLLAMLVQVVREETLELGLEPGLASMTQNLEPLLKKQGWDWALPVAKLAIRVGLAVVGSVLGAFLTFPGLRLAQTHRDALTMSEDRPMLQFLLHTSFLSPLFILWLWTKPIARDFLHQPPFGETRFSLLSDSAFDSGRLWLLVVLCLLRLAVTRPHLQAYLCLAKARVEQLRREAGRIEAREIQQRVVRVYCYVTVVSLQYLTPLILTLNCTLLLKTLGGYSWGLGPAPLLSPDPSSASAAPIGSGEDEVQQTAARIAGALGGLLTPLFLRGVLAYLICGGAAVSQLWLTSQHWSPTAGL

SEQ ID NO: 885859 - protein, 450 aa, Homo sapiens
MPVLALSLFRYKHPSEEELRALAGKPRPRGRKERWANGLSEEKPLSVPRDAPFQLETCPLTTVDALVLRFFLEYQWFVDFAVYSGGVYLFTEAYYYMLGPAKETNIAVFWCLLTVTFSIKMFLTVTRLYFSAEEGGERSVCLTFAFLFLLLAMLVQVVREETLELGLEPGLASMTQNLEPLLKKQGWDWALPVAKLAIRVGLAVVGSVLGAFLTFPGLRLAQTHRDALTMSEDRPMLQFLLHTSFLSPLFILWLWTKPIARDFLHQPPFGETRFSLLSDSAFDSGRLWLLVVLCLLRLAVTRPHLQAYLCLAKARVEQLRREAGRIEAREIQQRVVRVYCYVTVVSLQYLTPLILTLNCTLLLKTLGGYSWGLGPAPLLSPDPSSASAAPIGSGEDEVQQTAARIAGALGGLLTPLFLRGVLAYLIWWTAACQLLASLFGLYFHQHLAGS

SEQ ID NO: 885860 - protein, 459 aa, Homo sapiens
SPRPVGECTAFSHASCLFRYKHPSEEELRALAGKPRPRGRKERWANGLSEEKPLSVPRDAPFQLETCPLTTVDALVLRFFLEYQWFVDFAVYSGGVYLFTEAYYYMLGPAKETNIAVFWCLLTVTFSIKMFLTVTRLYFSAEEGGERSVCLTFAFLFLLLAMLVQVVREETLELGLEPGLASMTQNLEPLLKKQGWDWALPVAKLAIRVGLAVVGSVLGAFLTFPGLRLAQTHRDALTMSEDRPMLQFLLHTSFLSPLFILWLWTKPIARDFLHQPPFGETRFSLLSDSAFDSGRLWLLVVLCLLRLAVTRPHLQAYLCLAKARVEQLRREAGRIEAREIQQRVVRVYCYVTVVSLQYLTPLILTLNCTLLLKTLGGYSWGLGPAPLLSPDPSSASAAPIGSGEDEVQQTAARIAGALGGLLTPLFLRGVLAYLIWWTAACQLLASLFGLYFHQHLAGS

SEQ ID NO: 885861 - protein, 454 aa, Homo sapiens
MAVLGVQLVVTLLTATLMHRLAPHCSFARWLLCNGSLFRYKHPSEEELRALAGKPRPRGRKERWANGLSEEKPLSVPRDAPFQLETCPLTTVDALEAYYYMLGPAKETNIAVFWCLLTVTFSIKMFLTVTRLYFSAEEGGERSVCLTFAFLFLLLAMLVQVVREETLELGLEPGLASMTQNLEPLLKKQGWDWALPVAKLAIRVGLAVVGSVLGAFLTFPGLRLAQTHRDALTMSEDRPMLQFLLHTSFLSPLFILWLWTKPIARDFLHQPPFGETRFSLLSDSAFDSGRLWLLVVLCLLRLAVTRPHLQAYLCLAKARVEQLRREAGRIEAREIQQRVVRVYCYVTVVSLQYLTPLILTLNCTLLLKTLGGYSWGLGPAPLLSPDPSSASAAPIGSGEDEVQQTAARIAGALGGLLTPLFLRGVLAYLIWWTAACQLLASLFGLYFHQHLAGS

SEQ ID NO: 885862 - protein, 513 aa, Homo sapiens
MAVLGVQLVVTLLTATLMHRLAPHCSFARWLLCNGSLFRYKHPSEEELRALAGKPRPRGRKERWANGLSEEKPLSVPRDAPFQLETCPLTTVDALVLRFFLEYQWFVDFAVYSGGVYLFTEAYYYMLGPAKETNIAVFWCLLTVTFSIKMFLTVTRLYFSAEEGGERSVCLTFAFLFLLLAMLVQVVREETLELGLEPGLASMTQNLEPLLKKQGWDWALPVAKLAIRVGLAVVGSVLGAFLTFPGLRLAQTHRDALTMSEDRPMLQLSGSLGGWGDRELKGETRGEGVPRPHSLLPSPPRFLLHTSFLSPLFILWLWTKPIARDFLHQPPFGETRFSLLSDSAFDSGRLWLLVVLCLLRLAVTRPHLQAYLCLAKARVEQLRREAGRIEAREIQQRVVRVYCYVTVVSLQYLTPLILTLNCTLLLKTLGGYSWGLGPAPLLSPDPSSASAAPIGSGEDEVQQTAARIAGALGGLLTPLFLRGVLAYLIWWTAACQLLASLFGLYFHQHLAGS

SEQ ID NO: 885863 - protein, 364 aa, Homo sapiens
MFLTVTRLYFSAEEGGERSVCLTFAFLFLLLAMLVQVVREETLELGLEPGLASMTQNLEPLLKKQGWDWALPVAKLAIRVGLAVVGSVLGAFLTFPGLRLAQTHRDALTMSEDRPMLQLSGSLGGWGDWELKGETRGEGVPRPHSLLPSPPRFLLHTSFLSPLFILWLWTKPIARDFLHQPPFGETRFSLLSDSAFDSGRLWLLVVLCLLRLAVTRPHLQAYLCLAKARVEQLRREAGRIEAREIQQRVVRVYCYVTVVSLQYLTPLILTLNCTLLLKTLGGYSWGLGPAPLLSPDPSSASAAPIGSGEDEVQQTAARIAGALGGLLTPLFLRGVLAYLIWWTAACQLLASLFGLYFHQHLAGS

SEQ ID NO: 885864 - protein, 112 aa, Homo sapiens
LKLLISDDPPASASQSAGITGVNHHSNLVSCKKYCVTRAQNCPCAWLRAWQTLVHSYLGSKRMPEGWGVREQSGLRDPRNSLYSVLFLSSPGLASMTQNLEPLLKKQGWDWA

SEQ ID NO: 885865 - protein, 479 aa, Homo sapiens; identical to SEQ ID NO: 885857
